United States Patent Application Publication US 2011/0182862 A1 - sequence listing, part 15

SEQ ID NO: 21144 - DNA, 4268 bp, Muscodor strobelii
  misc_feature: SGI EST ID NO. CUFF.49589.0
  misc_feature: Variant of the nucleotide sequence at SEQ ID NO 21142
gttggaaaagcgggtcgccgcaatacactgcgccttgggcctgagctcatgaaaacataatatattcgacagcgcgtttccgcgagcacgaaaaactcgaagttgaatacagcgtgaacaatagcacaaagccctcgtgctccatgatgagcaccggtttcgatagcgcgctggaagtccctgtcgcatggggtagaccatgacggaaccaatcgagctccagctcctcagccagtcgcgctttgagactagggtgcaccaagacctcatatcttacaaccccgtcattgagctattcgccggcccagcaggcccaacgacgctccagatatggcgttccaacagccaggtggtcgccaagagctcacttcgcggagaaaaagagaccgtgcaagccctccactggaagccggatggccaattccttgctgtgggatggagcgatggcatcttgcggctcatgggtctagagacaagcaaggctgttcatcagatgtcgatttgtgatgatggcaaatcgaagatcaccacgattggttgggcgcaaaatcttgcgggagagcgtacggctgagactgccgagtcttccgtcaagagctgggagcaattagcctcacagggtcttgatgtcaacaagaagaagcctactgctgacttgccgagagaactcacattcctcgaagtcgagactgctcttccaaaaattagccctctcccagcatcaggaggatcgggcgatgatatgtacgtatttacgactagcgcatcactcgactttctgttccgaccattctcccgagatgacaacgacaaagtcgatgtgatgatcgtaggcacagatgacggtcgcgtccatgtcagcatctacgactcattcatcattggcagtttcacatattccttgcccgagagacctattgccatccaactctataaaagcgcttctcatctggatgtctcaactcatatgctcgtcttcacaccatgcgcagaggagaagcccaaaattctctaccttgtacccatagacttgaccttcattcactcttccccagagaacctgtccttgttggcatcgaaaacgaccaccttacagaagctcctaagatacgtcaaacaggtacagatacatatggtacacgaatggcagtctacccgagagctacctaataagttcattaacagcatcaacgagactttgcgagaaactggaacgtatggtgatatgacgatcggccaggccttataccactctgttgtcacgggtcacactttcccagaagtcaaagaatggctcgttgatcaacttgcggagcgcggacataaacggtgggataaggcagtggtaacaggcctgcaaggactacgaagcctagtccacgagaacttcatcccagcactagagcgcatcggcgtcattctcagtcgcttactgggcattgccagattccacgagacgaaatccgagattgggttcaccagtgcgcaggtactaaaagccatggacgccgtctcgtgcttactgcttgtcggccacaagatccttctcctcgtgatggaggagctagaactcttccaggctttctcaatttggctccgtcatgaaattgacagacttgcctcctcatcagtttctgacgaattgaccgagaaagaagccacaatggagcacggaaagattttggcgtatatccaacagtatatggcagcaagtcccctgcgcaactacctcagcagtgtagcaactgaagtggccaaaggagatcacgaaatgtctgagagtggtgactccctgctcgaaacactcaagacacatatacataaacaagagtctggtcaggagtcggtaggctcaatgtcccaggtcgaatacctgtgcaaattcctcgatgggagaactacggccgtcctggatggaattgccgaagccgagcgacgaagcgtccgcttcggccagctgaccgagatcaagctcgagcatcctgtgtcacacttcgatattcgcatgtcagctacgccagttgaggagagctggcgtagcgtgacccatatcgtcttaactaccgaagagcatgaaagtcaagtgtacatcttccgctcctcggccataatcacaaacggcatttgcagtagcgtaacgaccgagtacacgcacatgactctcggtgacgggaagatattggacgtcaaattcttatacgatgacagtttactcgttctctgggctgtgaaggatgcacccctccgcctcatacgcgtcccccaccaatcatcagaactaggctacgtgacctataggcctggcgttgacacgccaccccacgaactcagcaacgatcaaatcacaagtgtgttcctcaacatgactgtacctgtcggaccagacttcacacccgcgcagatggaggtcagagaggccagtgcggaaaggggaaatttaccgccaagagtggctctactcgacaaggagggaaggacgtacaaggtgttcaaattgcctgaggatccttttgtgtctgttcgcggtagttgacgatgggtattctctgattgaaagtaagaatggctctgtacattgtgctgaaagacagggaagctggcactatgaaggctctgatgcgaaagtagtgtcaattaagataagaacgctggttctgtcgtatcatggctcctttattcaaagactacttaggaaaggtttcgtagcgcccaagtagacttgatacaagggttcggaggtctatatgtaggggcttcttgtttgccgtctattcggaagttaagacagagggccatcctggattatccgcctttaacaatcctacagagtaatttgtcatctagacttttgcgatcagtccattttcaactcgattatagtatgtgagaacacctgcgtcaacatcgttaatctttgagagagagagtcgagtaagaggatcacgaaaactattcatgtctatatagcttagagcggaacagaatcgccccagccatgagccatgagtatacctacctactcctcgggtttaatgtaactgtcctaacgtaccaagcacctgtgttctcatgggtcaaaatgtcctgagcgaaagtgccgacaccaccgagattcctcgattaaaagctctaggaaatatgccgagcagacgatgtgttgtacatgtcatcagcctaaccagtcctcttcccacacaccccaataatccaacaccgcataaccctatttcctccccttcttagcccactctctaagaacgttcttctggatcttccccgtactagtcttgggcagttcatccacgatctcgacttccttcggtaccatgaaccgcgagatattgctctggttcttcgcccattctatcacagccttcggctctagtttttgttggggtgtggtcttgacggtaagatatgccttaggcatttcaccccattgctccgacgggatggcgacgacgcctgcttcgagcacgtccgggtgcttgacgagcatgccttctagtgctactgaggatatgttttcacctccttgacacgagtttagtacttgtcagaagtgaagagaacaagtaacttaccgctgatgatgatgtccttagcacgatcctgaatctgcgcacttccatctggatgcataactgccaggtcacctgaatgcagcgcaccgccgaggaacagcttccgagttgcctcggcgtctttgtagtaaccctttgcgcagatgttgccaaaaaagacgatctcgccgatttcttgaccgtcccgcgcgacgtctatcaagatgcccttttcagattcttcgggcttgacgatgcggattgggagagaagttaggaaaccgtgtccttggcgagccatctgtgcgtagcgctctgatggcgggagggtgtcccatagtggcatgtgatagccttttgttatggggccgtaggtctctgtcattccgtagacgtggattgggtggaggttaagatcggtcttggcttgacattagctgacagtaacataccgaacgaggcggtagaagaaacgtcaagagactaagacataccatctgctcgaaaagatgagctgtcggcggactggccgccacggtgacacggacgggttcgggaagtttctcggcttcttgcgcggcacagagtaaggtgttgactgtaggcgcggcgttgaagtgtgtgatatgctcgtccttgagaagcttccatattaaagggtagtcaatcttgcggagacagtagtgtgtcccacgagcagctgtg

SEQ ID NO: 21145 - DNA, 1734 bp, Muscodor strobelii
  misc_feature: SGI cDNA ID NO. 567153
  misc_feature: Elevated expression when VOC is produced
  misc_feature: Encodes the peptide sequence at SEQ ID NO 21146
atgtcaaaagccacgtcgcgagtgcaaagtctacttgctcatctctccggtgggtcgagctcgccagtaggatatgaccacaagcaacatattcaccaactctcgccgacgttcttcctcgagcgcgccgcggcgatcgagcccgatgcggaggccatttaccatgtcaccgcaaacggggtcacaattcgccgaagctatgcggatttcgccgagcgcgctagaggattggccttctacctcacgaagagaggcctgaagagagtcggtatcctagccacgaacacgccagcgttcttggacagtatctttggagtcatagcttccggtggtgtcattgtgcctgtgaattatagactgaagcccgatgatattacttatatcttcgactttgccgatgtagactctatcattgtggacaaggagtacctgtcattattagatgacttcataagtagccaccccaaggtgcaaaccatcatcgatctagacacagatataacatccggccctggcgctggagacttcaacgatgctataatagagggtcttcaatacgagcagtcacaagagaagaaaggatggggtgctttagctgagaccgtcaatgaggatgacatgattgctatgcccttcacatcaggcacaacatcacggcccaaaggtgttgtcttcacacacagaggcgcgtaccttgctgcggtgggcaatatcatagagtcgggactgaattatgatggcggaaaacgatgcagatatctttggacgttgcctatgttccatgctatgggctggacatttccatgggccatcacagctgctcgtgggacacactactgtctccgcaagattgactaccctttaatatggaagcttctcaaggacgagcatatcacacacttcaacgccgcgcctacagtcaacaccttactctgtgccgcgcaagaagccgagaaacttcccgaacccgtccgtgtcaccgtggcggccagtccgccgacagctcatcttttcgagcagatgaccgatcttaacctccacccaatccacgtctacggaatgacagagacctacggccccataacaaaaggctatcacatgccactatgggacaccctcccgccatcagagcgctacgcacagatggctcgccaaggacacggtttcctaacttctctcccaatccgcatcgtcaagcccgaagaatctgaaaagggcatcttgatagacgtcgcgcgggacggtcaagaaatcggcgagatcgtcttttttggcaacatctgcgcaaagggttactacaaagacgccgaggcaactcggaagctgttcctcggcggtgcgctgcattcaggtgacctggcagttatgcatccagatggaagtgcgcagattcaggatcgtgctaaggacatcatcatcagcggaggtgaaaacatatcctcagtagcactagaaggcatgctcgtcaagcacccggacgtgctcgaagcaggcgtcgtcgccatcccgtcggagcaatggggtgaaatgcctaaggcatatcttaccgtcaagaccacaccccaacaaaaactagagccgaaggctgtgatagaatgggcgaagaaccagagcaatatctcgcggttcatggtaccgaaggaagtcgagatcgtggatgaactgcccaagactagtacggggaagatccagaagaacgttcttagagagtgggctaagaaggggaggaaatag

SEQ ID NO: 21146 - protein, 577 aa, Muscodor strobelii
  misc_feature: SGI Peptide ID NO. 567153
  misc_feature (66)..(499): Pfam Id: PF00501 Pfam Desc: AMP-binding enzyme
  misc_feature (7)..(576): NCBI GI: 169622966 Blast Desc: SNOG_14709 [Phaeosphaeria nodorum SN15] gi|160704884|gb|EAT77901.2| SNOG_14709 [Phaeosphaeria nodorum SN15]
  misc_feature (1)..(577): NCBI GI: 238503788 Blast Desc: AMP-binding domain protein, [Aspergillus flavus NRRL3357] gi|220690597|gb|EED46946.1| AMP-binding domain protein, [Aspergillus flavus NRRL3357]
  misc_feature (1)..(573): NCBI GI: 121702597 Blast Desc: AMP-binding domain protein, [Aspergillus clavatus NRRL 1] gi|119397706|gb|EAW08137.1| AMP-binding domain protein, [Aspergillus clavatus NRRL 1]
  misc_feature (1)..(573): NCBI GI: 154312808 Blast Desc: BC1G_05105 [Botryotinia fuckeliana B05.10] gi|150849807|gb|EDN25000.1| BC1G_05105 [Botryotinia fuckeliana B05.10]
  misc_feature (1)..(575): NCBI GI: 189188536 Blast Desc: long-chain-fatty-acid-CoA ligase [Pyrenophora tritici-repentis Pt-1C-BFP] gi|187972213|gb|EDU39712.1| long-chain-fatty-acid-CoA ligase [Pyrenophora tritici-repentis
  misc_feature (1)..(572): NCBI GI: 156051678 Blast Desc: SS1G_07246 [Sclerotinia sclerotiorum 1980] gi|154705024|gb|EDO04763.1| SS1G_07246 [Sclerotinia sclerotiorum 1980]
  misc_feature (1)..(573): NCBI GI: 239606818 Blast Desc: AMP-binding domain-containing protein [Ajellomyces dermatitidis ER-3]
  misc_feature (1)..(573): NCBI GI: 226284078 Blast Desc: 2-succinylbenzoate-CoA ligase [Paracoccidioides brasiliensis Pb01]
  misc_feature (4)..(577): NCBI GI: 115389402 Blast Desc: conserved [Aspergillus terreus NIH2624] gi|114194602|gb|EAU36302.1| conserved [Aspergillus terreus NIH2624]
  misc_feature (1)..(573): NCBI GI: 240108138 Blast Desc: AMP-binding enzyme, [Coccidioides posadasii C735 delta SOWgp]
  misc_feature (36)..(574): SWISSPROT Homolog: EC 6.2.1.26 o-succinylbenzoate--CoA ligase
  misc_feature: Useful for introducing or modulating the production of volatile compounds
MSKATSRVQSLLAHLSGGSSSPVGYDHKQHIHQLSPTFFLERAAAIEPDAEAIYHVTANGVTIRRSYADFAERARGLAFYLTKRGLKRVGILATNTPAFLDSIFGVIASGGVIVPVNYRLKPDDITYIFDFADVDSIIVDKEYLSLLDDFISSHPKVQTIIDLDTDITSGPGAGDFNDAIIEGLQYEQSQEKKGWGALAETVNEDDMIAMPFTSGTTSRPKGVVFTHRGAYLAAVGNIIESGLNYDGGKRCRYLWTLPMFHAMGWTFPWAITAARGTHYCLRKIDYPLIWKLLKDEHITHFNAAPTVNTLLCAAQEAEKLPEPVRVTVAASPPTAHLFEQMTDLNLHPIHVYGMTETYGPITKGYHMPLWDTLPPSERYAQMARQGHGFLTSLPIRIVKPEESEKGILIDVARDGQEIGEIVFFGNICAKGYYKDAEATRKLFLGGALHSGDLAVMHPDGSAQIQDRAKDIIISGGENISSVALEGMLVKHPDVLEAGVVAIPSEQWGEMPKAYLTVKTTPQQKLEPKAVIEWAKNQSNISRFMVPKEVEIVDELPKTSTGKIQKNVLREWAKKGRK

SEQ ID NO: 21147 - DNA, 3211 bp, Muscodor strobelii
  misc_feature: SGI EST ID NO. CUFF.49590.1
  misc_feature: Variant of the nucleotide sequence at SEQ ID NO 21145
gaaaattgaagtgtagttgttaccctacacttgtgcagaagcttcaaatatacaatccctgcatcccgtaaaacatccccatatcaacccctgaccccagcttactagcgctggaaacagggtcccggggcggtggggaggagcctcacgtctagcttgcagcacactcaagactcacgcttgaaattggtggcacttcactctcatcctcctctcgtcaaattcagcttccccacatcaccgaagcgaaaatgtcaaaagccacgtcgcgagtgcaaagtctacttgctcatctctccggtgggtcgagctcgccagtaggatatgaccacaagcaacatattcaccaactctcgccgacgttcttcctcgagcgcgccgcggcgatcgagcccgatgcggaggccatttaccatgtcaccgcaaacggggtcacaattcgccgaagctatgcggatttcgccgagcgcgctagaggattggccttctacctcacgaagagaggcctgaagagagtcggtatcctagccacgaacacgccagcgttcttggacagtatctttggagtcatagcttccggtggtgtcattgtgcctgtgaattatagactgaagcccgatgatattacttatatcttcgactttgccgatgtagactctatcattgtggacaaggagtacctgtcattattagatgacttcataagtagccaccccaaggtgcaaaccatcatcgatctagacacagatataacatccggccctggcgctggagacttcaacgatgctataatagagggtcttcaatacgagcagtcacaagagaagaaaggatggggtgctttagctgagaccgtcaatgaggatgacatgattgctatgcccttcacatcaggcacaacatcacggcccaaaggtgttgtcttcacacacagaggcgcgtaccttgctgcggtgggcaatatcatagagtcgggactgaattatgatggcggaaaacgatgcagatatctttggacgttgcctatgttccatgctatgggctggacatttccatgggccatcacagctgctcgtgggacacactactgtctccgcaagattgactaccctttaatatggaagcttctcaaggacgagcatatcacacacttcaacgccgcgcctacagtcaacaccttactctgtgccgcgcaagaagccgagaaacttcccgaacccgtccgtgtcaccgtggcggccagtccgccgacagctcatcttttcgagcagatgaccgatcttaacctccacccaatccacgtctacggaatgacagagacctacggccccataacaaaaggctatcacatgccactatgggacaccctcccgccatcagagcgctacgcacagatggctcgccaaggacacggtttcctaacttctctcccaatccgcatcgtcaagcccgaagaatctgaaaagggcatcttgatagacgtcgcgcgggacggtcaagaaatcggcgagatcgtcttttttggcaacatctgcgcaaagggttactacaaagacgccgaggcaactcggaagctgttcctcggcggtgcgctgcattcaggtgacctggcagttatgcatccagatggaagtgcgcagattcaggatcgtgctaaggacatcatcatcagcggaggtgaaaacatatcctcagtagcactagaaggcatgctcgtcaagcacccggacgtgctcgaagcaggcgtcgtcgccatcccgtcggagcaatggggtgaaatgcctaaggcatatcttaccgtcaagaccacaccccaacaaaaactagagccgaaggctgtgatagaatgggcgaagaaccagagcaatatctcgcggttcatggtaccgaaggaagtcgagatcgtggatgaactgcccaagactagtacggggaagatccagaagaacgttcttagagagtgggctaagaaggggaggaaatagggttatgcggtgttggattattggggtgtgtgggaagaggactggttaggctgatgacatgtacaacacatcgtctgctcggcatatttcctagagcttttaatcgaggaatctcggtggtgtcggcactttcgctcaggacattttgacccatgagaacacaggtgcttggtacgttaggacagttacattaaacccgaggagtaggtaggtatactcatggctcatggctggggcgattctgttccgctctaagctatatagacatgaatagttttcgtgatcctcttactcgactctctctctcaaagattaacgatgttgacgcaggtgttctcacatactataatcgagttgaaaatggactgatcgcaaaagtctagatgacaaattactctgtaggattgttaaaggcggataatccaggatggccctctgtcttaacttccgaatagacggcaaacaagaagcccctacatatagacctccgaacccttgtatcaagtctacttgggcgctacgaaacctttcctaagtagtctttgaataaaggagccatgatacgacagaaccagcgttcttatcttaattgacactactttcgcatcagagccttcatagtgccagcttccctgtctttcagcacaatgtacagagccattcttactttcaatcagagaatacccatcgtcaactaccgcgaacagacacaaaaggatcctcaggcaatttgaacaccttgtacgtccttccctccttgtcgagtagagccactcttggcggtaaatttcccctttccgcactggcctctctgacctccatctgcgcgggtgtgaagtctggtccgacaggtacagtcatgttgaggaacacacttgtgatttgatcgttgctgagttcgtggggtggcgtgtcaacgccaggcctataggtcacgtagcctagttctgatgattggtgggggacgcgtatgaggcggaggggtgcatctgtctgatgttagctggcggcgttggtacggaggggagttgactaatgacagagagaagcatggagatgagatgagatgctacatacccttcacagcccagagaacgagtaaactgtcatcgtataagaatttgacgtccaatatcttcccgtcaccgagagtcatgtgcgtgtactcggtcgttacgctactgcaaatgccgtttgtgattatggccgaggagcggaagatgtac

SEQ ID NO: 21148 - DNA, 1065 bp, Muscodor strobelii
  misc_feature: SGI cDNA ID NO. 567154
  misc_feature: Reduced expression when VOC is produced
  misc_feature: Encodes the peptide sequence at SEQ ID NO 21149
atggcacaacaacaaaagatctcgcaacgcgacataaaagccaactcctctgtgagcgcctccctcgccatcgaagcaacgaagaaagcctatgagctaaggcaagccgcgtacggcgccggcaactcccaagcacgggaggacttattggccgaagccgtcaatcgtgagatagaagccgaaagcttcgggaaggccgccaaatatacgcgcactggtgccttccagggtctcgctgcgggtgccgggctcggtgtgcagcccggcgccgcgttgggcaaattgacgggcgcgcttgtgggcggcgttgttagtactgtgggtgctcttgttggtggtggagttgggtccgcatacggcgctatcagcggcccattctggaatctaggtcaaatggccggccaggggttggagagtattgtcggagactggctgcctgattggcaggcaacaacaagccagaaaaacgctctgaagaaattgctgcttggggccaaagagacggagaagcccggaaggcaagagcttgaggatatgagggctgataatgggggtgttgagcctggatcgagcgaatatgaagagtttagacggaatttgaccgagggctggctgccgagctcgagcaagaagcctggtggtagcggtggtggcatgtcgtctatgatgccaagtatgccctccatgccggctatgccgtctgtgccctccttaggattcggagggagatcgaagaaggcggctagttgcgacaacgcagccactaccaccgcttcgccaccatcacagacgcagcagcagcccgagcagcaccgggagcagccatccacaaatcgtgcggagaagaaattaggagaacccaagtcatccaaactgcgaacgacacaaactgcaaatgttaacaagcagcgacaagagtcgcagcctgcggcaaaggatatagccgaaattgctaccaagacggcgcaggcccagaacaagacactgttcaagaccagaggcacagccgcgccaaccatggtctacaggaaaaatccccctaagaagccggcagacgccacttga

SEQ ID NO: 21149 - protein, 354 aa, Muscodor strobelii
  misc_feature: SGI Peptide ID NO. 567154
  misc_feature (2)..(228): NCBI GI: 189209185 Blast Desc: conserved [Pyrenophora tritici-repentis Pt-1C-BFP] gi|187977018|gb|EDU43644.1| conserved [Pyrenophora tritici-repentis Pt-1C-BFP]
  misc_feature (5)..(158): NCBI GI: 169622466 Blast Desc: SNOG_14457 [Phaeosphaeria nodorum SN15] gi|160704780|gb|EAT78328.2| SNOG_14457 [Phaeosphaeria nodorum SN15]
  misc_feature (7)..(205): NCBI GI: 189190534 Blast Desc: conserved [Pyrenophora tritici-repentis Pt-1C-BFP] gi|187973212|gb|EDU40711.1| conserved [Pyrenophora tritici-repentis Pt-1C-BFP]
  misc_feature (4)..(226): NCBI GI: 169606039 Blast Desc: SNOG_06052 [Phaeosphaeria nodorum SN15] gi|111065996|gb|EAT87116.1| SNOG_06052 [Phaeosphaeria nodorum SN15]
  misc_feature (28)..(136): NCBI GI: 169616374 Blast Desc: SNOG_11358 [Phaeosphaeria nodorum SN15] gi|111059946|gb|EAT81066.1| SNOG_11358 [Phaeosphaeria nodorum SN15]
  misc_feature: Useful for introducing or modulating the production of volatile compounds
MAQQQKISQRDIKANSSVSASLAIEATKKAYELRQAAYGAGNSQAREDLLAEAVNREIEAESFGKAAKYTRTGAFQGLAAGAGLGVQPGAALGKLTGALVGGVVSTVGALVGGGVGSAYGAISGPFWNLGQMAGQGLESIVGDWLPDWQATTSQKNALKKLLLGAKETEKPGRQELEDMRADNGGVEPGSSEYEEFRRNLTEGWLPSSSKKPGGSGGGMSSMMPSMPSMPAMPSVPSLGFGGRSKKAASCDNAATTTASPPSQTQQQPEQHREQPSTNRAEKKLGEPKSSKLRTTQTANVNKQRQESQPAAKDIAEIATKTAQAQNKTLFKTRGTAAPTMVYRKNPPKKPADAT

SEQ ID NO: 21150 - DNA, 2708 bp, Muscodor strobelii
  misc_feature: SGI EST ID NO. CUFF.49554.0
  misc_feature: Variant of the nucleotide sequence at SEQ ID NO 21148
ggaatggttctcgcttatcgagttcttcaatattgcgatctagatcgtcccgtcaaacagattcctactcatagatcggtcttaacaagatatgcaagccggcaaagagatatgatttccactaaatacagccgattgaggacaccaaagaagcaattataacctcaacataaatttgtactgtcgaaatcttattgttgatggtgcatctgcgtacgcagatacaggtgacctccacataatctcaacatttcaagcgaaaatggcacaacaacaaaagatctcgcaacgcgacataaaagccaactcctctgtgagcgcctccctcgccatcgaagcaacgaagaaagcctatgagctaaggcaagccgcgtacggcgccggcaactcccaagcacgggaggacttattggccgaagccgtcaatcgtgagatagaagccgaaagcttcgggaaggccgccaaatatacgcgcactggtgccttccagggtctcgctgcgggtgccgggctcggtgtgcagcccggcgccgcgttgggcaaattgacgggcgcgcttgtgggcggcgttgttagtactgtgggtgctcttgttggtggtggagttgggtccgcatacggcgctatcagcggcccattctggaatctaggtcaaatggccggccaggggttggagagtattgtcggagactggctgcctgattggcaggcaacaacaagccagaaaaacgctctgaagaaattgctgcttggggccaaagagacggagaagcccggaaggcaagagcttgaggatatgagggctgataatgggggtgttgagcctggatcgagcgaatatgaagagtttagacggaatttgaccgagggctggctgccgagctcgagcaagaagcctggtggtagcggtggtggcatgtcgtctatgatgccaagtatgccctccatgccggctatgccgtctgtgccctccttaggattcggagggagatcgaagaaggcggctagttgcgacaacgcagccactaccaccgcttcgccaccatcacagacgcagcagcagcccgagcagcaccgggagcagccatccacaaatcgtgcggagaagaaattaggagaacccaagtcatccaaactgcgaacgacacaaactgcaaatgttaacaagcagcgacaagagtcgcagcctgcggcaaaggatatagccgaaattgctaccaagacggcgcaggcccagaacaagacactgttcaagaccagaggcacagccgcgccaaccatggtctacaggaaaaatccccctaagaagccggcagacgccacttgataaaggagagaaacccccacctgagctataaatgatgtatggtctttaatcagcatcatgtttgcagggatgcagcactgaatatctactactatgttgaagtcaaaatccaacgcctctactaatcaattgccacggtaatctgcgaagctgctccatacagagtcgggctgtgcctctggagatgcatcatcgccatgtatacagatgaaggcctctagaattgactgaacttcacgacattcacgctctgccatgatttctggccgcgccattccgctagccagtgtctcgaatctcaatatcgcctgagagatggaaaatgcttcttattgggcccatgttccggtatgatacgtcgtatcctccaggctattccaatgtgcagcggcgcaagccacttgtaagcgggtatattctttcgcatcaggtccgagtcgcctcagcgacttatgaacccacgaaacgagcttccacgcccattcgccgcggcgacgtgcccctccgttataatcattattgtctgggaggatgaagagcgcaagggcctgagctgtagatacaggatgaacgaaactccttgaacatgtaccccggtacctttgaatcgactcacgcgaccagtaccgataaactcccaccaacttagaatgctatcctagagtgaatgccgccatccattactatcatctatgtgtccaagccggtctgtgctatggctcgggccttgagtccgagtagtatggcagctcagcatttgggctctcggagtcgttaccctcgctctcggacgtttgacgacggcagaagcccaggcacttactgatgcagttgttcggcccatagctgagacgcacagcgactacagctattggtctaaccataattgttaccccaattatgtctctttactagcctcttgcgctttctacaatagcagcgtaacacacagcgccgaactaaaggagcttgcatgccagctgacagctctgagacgagaccacggctgagtttccgctcacgggacctaatgggattatgaaggtcgtcgcacagggttgttgagctggaaccctgcaatcgtcacgtagttaggtcattgagcatgccgcatatcaatcgtattacgttgaaatcatagatggtttccgaaagtaatagcacactggcatggccagagcgaacttctttttgcatgtgcgaatacctagccggccacggatctactgtcacaaagtagcccacttatacggagtcagggttgtgaggtaatacgccgtgctcagcggcaactgatacaggggcttaggagttatacatacggtgattatcgcaagtcaattcagtagctagatagagtcatccttattgcccttctctt

SEQ ID NO: 21151 - DNA, 1560 bp, Muscodor strobelii
  misc_feature: SGI cDNA ID NO. 567155
  misc_feature: Elevated expression when VOC is produced
  misc_feature: Encodes the peptide sequence at SEQ ID NO 21152
atggctcttgagacgagcgagattccgagcttctcgcgtcggtctttgctcacgcccttgcttctgttctcttgcttctccttacttattggtgatctcgcattcggttttgacacaggcaattttggagggatcctcggtaaccctggtttcatcaaagagttcggcacttacgaccctcaaaccgcaacatataccttcagtacactgcgtacttctctttcaacctcgcttgcacttatcggcaagtttttaggctgcatcgttggaggtccggtaattgagaagtttggccataaatttgtgttctttgccctctgctgcactgcatttataggaattatccttgagatttctagtgctgggtcatcccccggaacgggtcgacttgctcaattcatagttggccgtattgttgtttatgctagtgtcggacttgtcgaagtctgcgtgcccacatatcaagcagagattgttccagcgaacatccgaggtctcgttgttgtgtctttgcagctattcctaacggtaggaactcttgtcgcatcgggcgcaaacatagcttacaaagatgacgcatcgtcgagtggatggttgactgtcactggaattcaattcatcttcccttttctgctgctcatttgctcatttttcatccccagctcgcctcgttggttattatctaagtcaagggatgaggaagccgtcagatcccttcgtcgtcttcgcccacagtcctacgccgatgaaggctggtgtgagatcgaagtccagacgatccgagaagcactccaccaagaaacacagaaggctccttggggggatcttttgcgtggaaacaatctacgccggaccgttattgtgatgattttctactttttccacgatgccacggggcaacctttggcagcaacgtacgcgactacgtttttccaggacattggctttggttccgcatcgtatacgtttgttctcatcggtgctctccttagcattttttcggtcattcctgcgatggtcatcgtcgatagacttggtcgtcggaagacccttctcatttcctatttcttccaagctgtctggatgtacatccttgcgggtgttggcacggcagggactaccacggccgcgaagaacacgatcgtcgcatcactcatcctctacgctgtatcttacaatatgggaagtgcttcgatcccgtatctcctgggtgcagagatcccgaccgctgcgctccgcgagaaaacacaagcactaggagctgcatggaacgtcatctgggccttcgtggtgagcttcgtgacaccgtatctcatcgatgccataagcttcaagatcggtatcttatacgggagcatatctcttacggcagtcttaattaccttcttctttttgcctgagacaaagggctacgctcttgaagaagttgacgcaatcttcgaaaagtcatttaacccctttcgtccggaactgcccaatttcactcccgctgagttacaggttggtgagcttgagggtgcaacaaacgttggaaatacagaaaagacagctattgcctag

SEQ ID NO: 21152 - protein, 519 aa, Muscodor strobelii
  misc_feature: SGI Peptide ID NO. 567155
  misc_feature (28)..(436): Pfam Id: PF07690 Pfam Desc: Major Facilitator Superfamily
  misc_feature (24)..(480): Pfam Id: PF00083 Pfam Desc: Sugar (and other) transporter
  misc_feature (15)..(510): NCBI GI: 242799200 Blast Desc: sugar transporter, [Talaromyces stipitatus ATCC 10500] gi|218716674|gb|EED16095.1| sugar transporter, [Talaromyces stipitatus ATCC 10500]
  misc_feature (17)..(509): NCBI GI: 46127349 Blast Desc: FG08052.1 [Gibberella zeae PH-1]
  misc_feature (6)..(518): NCBI GI: 169772863 Blast Desc: [Aspergillus oryzae RIB40] gi|83768761|dbj|BAE58898.1| protein product [Aspergillus oryzae]
  misc_feature (21)..(518): NCBI GI: 238490766 Blast Desc: sugar transporter, [Aspergillus flavus NRRL3357] gi|220697033|gb|EED53374.1| sugar transporter, [Aspergillus flavus NRRL3357]
  misc_feature (11)..(482): NCBI GI: 242791879 Blast Desc: sugar transporter, [Talaromyces stipitatus ATCC 10500] gi|218718432|gb|EED17852.1| sugar transporter, [Talaromyces stipitatus ATCC 10500]
  misc_feature (17)..(490): NCBI GI: 242822996 Blast Desc: sugar transporter, [Talaromyces stipitatus ATCC 10500] gi|218712922|gb|EED12347.1| sugar transporter, [Talaromyces stipitatus ATCC 10500]
  misc_feature (12)..(508): NCBI GI: 256726993 Blast Desc: NECHADRAFT_76534 [Nectria haematococca mpVI 77-13-4]
  misc_feature (8)..(482): NCBI GI: 212535038 Blast Desc: sugar transporter, [Penicillium marneffei ATCC 18224] gi|210070074|gb|EEA24164.1| sugar transporter, [Penicillium marneffei ATCC 18224]
  misc_feature (3)..(503): NCBI GI: 212541144 Blast Desc: sugar transporter, [Penicillium marneffei ATCC 18224] gi|210068026|gb|EEA22118.1| sugar transporter, [Penicillium marneffei ATCC 18224]
  misc_feature (36)..(480): NCBI GI: 50307923 Blast Desc: protein product [Kluyveromyces lactis] gi|49643095|emb|CAG99047.1| KLLA0E00287p [Kluyveromyces lactis]
  misc_feature: Useful for introducing or modulating the production of volatile compounds
MALETSEIPSFSRRSLLTPLLLFSCFSLLIGDLAFGFDTGNFGGILGNPGFIKEFGTYDPQTATYTFSTLRTSLSTSLALIGKFLGCIVGGPVIEKFGHKFVFFALCCTAFIGIILEISSAGSSPGTGRLAQFIVGRIVVYASVGLVEVCVPTYQAEIVPANIRGLVVVSLQLFLTVGTLVASGANIAYKDDASSSGWLTVTGIQFIFPFLLLICSFFIPSSPRWLLSKSRDEEAVRSLRRLRPQSYADEGWCEIEVQTIREALHQETQKAPWGDLLRGNNLRRTVIVMIFYFFHDATGQPLAATYATTFFQDIGFGSASYTFVLIGALLSIFSVIPAMVIVDRLGRRKTLLISYFFQAVWMYILAGVGTAGTTTAAKNTIVASLILYAVSYNMGSASIPYLLGAEIPTAALREKTQALGAAWNVIWAFVVSFVTPYLIDAISFKIGILYGSISLTAVLITFFFLPETKGYALEEVDAIFEKSFNPFRPELPNFTPAELQVGELEGATNVGNTEKTAIA

SEQ ID NO: 21153 - DNA, 5461 bp, Muscodor strobelii
  misc_feature: SGI EST ID NO. CUFF.49585.0
  misc_feature: Variant of the nucleotide sequence at SEQ ID NO 21151
gactttgcaatggcgcgcctcgtcaagtcaaatgaataggcacatctctaggaagaccctctctaatcattattcatggaaaagactgctcacatcagtagtgcaataacaagacgcgactttgtagcattgtctctccttcctcgtacctaagtcctatctgactattttcttagtgcttcttacattctcagaagaagggtaattactttgacggggtagtgcaacagtcagtttcattgtgaacttacattgtcatcatggctcttgagacgagcgagattccgagcttctcgcgtcggtctttgctcacgcccttgcttctgttctcttgcttctccttacttattggtgatctcgcattcggttttgacacaggcaattttggagggatcctcggtaaccctggtttcatcaaagagttcggcacttacgaccctcaaaccgcaacatataccttcagtacactgcgtacttctctttcaacctcgcttgcacttatcggcaagtttttaggctgcatcgttggaggtccggtaattgagaagtttggccataaatttgtgttctttgccctctgctgcactgcatttataggaattatccttgagatttctagtgctgggtcatcccccggaacgggtcgacttgctcaattcatagttggccgtattgttgtttatgctagtgtcggacttgtcgaagtctgcgtgcccacatatcaagcagagattgttccagcgaacatccgaggtctcgttgttgtgtctttgcagctattcctaacggtaggaactcttgtcgcatcgggcgcaaacatagcttacaaagatgacgcatcgtcgagtggatggttgactgtcactggaattcaattcatcttcccttttctgctgctcatttgctcatttttcatccccagctcgcctcgttggttattatctaagtcaagggatgaggaagccgtcagatcccttcgtcgtcttcgcccacagtcctacgccgatgaaggctggtgtgagatcgaagtccagacgatccgagaagcactccaccaagaaacacagaaggctccttggggggatcttttgcgtggaaacaatctacgccggaccgttattgtgatgattttctactttttccacgatgccacggggcaacctttggcagcaacgtacgcgactacgtttttccaggacattggctttggttccgcatcgtatacgtttgttctcatcggtgctctccttagcattttttcggtcattcctgcgatggtcatcgtcgatagacttggtcgtcggaagacccttctcatttcctatttcttccaagctgtctggatgtacatccttgcgggtgttggcacggcagggactaccacggccgcgaagaacacgatcgtcgcatcactcatcctctacgctgtatcttacaatatgggaagtgcttcgatcccgtatctcctgggtgcagagatcccgaccgctgcgctccgcgagaaaacacaagcactaggagctgcatggaacgtcatctgggccttcgtggtgagcttcgtgacaccgtatctcatcgatgccataagcttcaagatcggtatcttatacgggagcatatctcttacggcagtcttaattaccttcttctttttgcctgagacaaagggctacgctcttgaagaagttgacgcaatcttcgaaaagtcatttaacccctttcgtccggaactgcccaatttcactcccgctgagttacaggttggtgagcttgagggtgcaacaaacgttggaaatacagaaaagacagctattgcctagtaattagtttcatgaagacagagatctactagtgtgcaagagttgtagtaggagcccacactggtcaccatagcgctggcttgcttcactctgtcgccattgtgtaagcattgctagcaggaattctgaaaaggtctggatcaacaagggatgcactctcgtatgcacctaatacgtgcttatagcaggatggctggcagcaacatcttctaatcagaccctaattcattgtcgcgatgccaacccgtaagcccggtgataatagccataagctcccatacggcgtcgaaacccgcagttcgcccttgtcccctgaacgcaaatcggaaaaactttgtcatgctgttggggtgtcttgcacaggccgctagaatatcttcattcgcgcttgcgagagccacaagcttccaaccacgacccggccccattgagagttctgtcatctccgcagtactgcattgccgccattcaaactcttgtcgtttaccgctcgccgtaggaacgtcgacggtgtacctgagagactctttaggacgccaaaagctacctgttcggtgtacggtcaacatttcatcgacagcgggaaagcctccgattgtagttgtaactttaaacttagtgttcggcgaatcaaacttgctggacacattgttggatgcggcgatagccgggtcctgtaagttcaacccgtcgtggagggttatgaagggcttttgcgtgctggccatgtttttgctaagggtcagggcgaactgcctgtcgatttgatgtgggcccatatagtagatagcagtagacatagcgctttcgctgtatatgttgaagtccaggggcattcgtcgctcaggcggtagagccgggtttgtagcttcaattatatcggcttgagcatcgtctccatcatatgactgaaaatgttcagtgtacggtggcggcgcttcattctgcatcgtatggacctggactgaatacttgcataacacgaacgtggtgatgtctgctaacgataggaaggtatttgagactaggcaatatgcaggattggctagcaaatggaaataggtggaagccagtgtttccagcgcgggaggggttactttggatagaaagagttgagcggggatatctgatgcgattggctgtcacaacccgagcgaaacacaatgccactacagtaatgcaacaggcatatttgtacctagtctctagagtgcggcttcatctgaaggtaatttgacatgctcccgggagcataatagaagggctattcattcgtctgtttggtaattcgttaaaaagtcgtctctttattgctctttctacaggagcgtctattgcaactttacacacctgctgcgatcactaccttctccccttcgcgagagcatcgcacgggagtaagatttcaagaggatgcactaaggagtcatgtcacaaaacggaggaatgcatgtaacccgtcccaacgtttagggatgatgatgaactcaactcaactcaactctcatttctaagtctcgtgcttcgaaatttgtaacgaaaatcaagtcaatggccaaatgctagtagaaagcgacaactatgacagtggtcagcagctccttacaggctgccagactcaagaaagaatcgaaaggaggtagttacgtgtttcctcaatttacacgcttctcaaattatccgcacaaaggagtgtcggatcctatcctgcgaattgaaatgattggaactgcgacacatcctactacacgcttacttcaagcgacgctctgtgttagcgcgggtgttgacaaagtcaggatggctgagagtgagctccacgcctcccgtaagaacatgatcgacagcctcgacaccttgcatgaagccgtgatcctggtttccaacctcatatttccaggcaccaaatctaccgcgcgagagaatgtctttcttgcggagatagggaagggcttcgtccagtgcaccgtttcgttcaacgctaggcgtagggtagccgtgatcaaagcgtcgaacgtacgtactgacgatctcatcttgaggctccaggagactagtgtttatcaagccttgaatgcagtcctcaagaagtgtctcttgcttgacaggcttgtatgaagactcagaaacttctaacatgagggaccagtatggaccagactgagcgtccgtagatgtcggctttgctccgctggcgagttgctgggtgggtagtttgatgtcatcagccggctgattgtaagggctgtaattcgaaaaaatagtcgcccgatagaacgggcagttgtcttcggtgaagtaaagctattggattgtcatgaattcattagcgatatttcttagccattaagtggcgaagaatcatacccagcatttgtcaccgatgcgctctgggcgttttccacgaatgcccacaccaattacgttagtggaagaatagaacagcagagagcagatcttttgaagctgtgcatcccccattgattgagcaagatgatcgatagccatagtagagatgagagagttgtaccaaacacaagtacctataagacttgtcaacaatgcaccaattttccttcgagagctggaagcttgccatccttcaggtgagctttcttggccgcagcatcaaccttagcgacagcaccgtgggcaccaaatctcgtgttcttcttgtccagcgtgttcgcaacagcggtccaaatgccgccagtgcctccgtgcgcgggaaaacgaaacacggaattggggccccagcctcctgcaactttgttcgtgacaacgttacgggtcaagagcttaacgttcggtgcagcaacacgttccccaacccatgtcgcattcatctattgtgaatcatattagatcatactcagttgcgatctagatccatcgaagcataccttggtcgttggcactgcccagactctaaagttatacgggcgcactgcacaaatcttcggtcaatgtgtcttagcaacttcaaatgacacttgctagcactcactgaagatctcgttcagcctgatgccaacgtttcggatgttccactcgtcgaagttcttcggcttatcagatggagcgcgggtgcgagcttctaaagccgcatcgatcaagtcctctaagcaatgcgccttttcctccggttccagtacagcgatgttattttgaaagggatatggcacccagtcacctctaaatcggcaatatgatactctctattgtatgcatgttagttaattattatgtccttcacttgagataaaacgactctcaagtctataggagaaacaagaagcaggatagtaatttcatatacctggtgtgtataccaatccgtttcattagggagagcctcatcgagacaatcatcgaagtacttgtaatgagagaagatgacatggccgccaacatcgaacagctatttatgataggcattagcttcgcactgcctaaacgctagaaagaatgagtttgacactcacaaacccttctggcgtagtgtcagtagaggcaaggcctccaggggtttcgtttgagtcgacgatgagccacgatgctcggttctacatccgtgcgctcgtcagtgtactgccttttgcgcttgcctggtgtgtggacttcacttaccgactgctgaa

SEQ ID NO: 21154 - DNA, 1551 bp, Muscodor strobelii
  misc_feature: SGI cDNA ID NO. 567156
  misc_feature: Encodes the peptide sequence at SEQ ID NO 21155
atggctcttgagacgagcgagattccgagcttctcgcgtcggtctttgctcacgcccttgcttctgttctcttgcttctccttacttattggtgatctcgcattcggttttgacacaggcaattttggagggatcctcggtaaccctggtttcatcaaagagttcggcacttacgaccctcaaaccgcaacatataccttcagtacactgcgtacttctctttcaacctcgcttgcacttatcggcaagtttttaggctgcatcgttggaggtccggtaattgagaagtttggccataaatttgtgttctttgccctctgctgcactgcatttataggaattatccgtagtgctgggtcatcccccggaacgggtcgacttgctcaattcatagttggccgtattgttgtttatgctagtgtcggacttgtcgaagtctgcgtgcccacatatcaagcagagattgttccagcgaacatccgaggtctcgttgttgtgtctttgcagctattcctaacggtaggaactcttgtcgcatcgggcgcaaacatagcttacaaagatgacgcatcgtcgagtggatggttgactgtcactggaattcaattcatcttcccttttctgctgctcatttgctcatttttcatccccagctcgcctcgttggttattatctaagtcaagggatgaggaagccgtcagatcccttcgtcgtcttcgcccacagtcctacgccgatgaaggctggtgtgagatcgaagtccagacgatccgagaagcactccaccaagaaacacagaaggctccttggggggatcttttgcgtggaaacaatctacgccggaccgttattgtgatgattttctactttttccacgatgccacggggcaacctttggcagcaacgtacgcgactacgtttttccaggacattggctttggttccgcatcgtatacgtttgttctcatcggtgctctccttagcattttttcggtcattcctgcgatggtcatcgtcgatagacttggtcgtcggaagacccttctcatttcctatttcttccaagctgtctggatgtacatccttgcgggtgttggcacggcagggactaccacggccgcgaagaacacgatcgtcgcatcactcatcctctacgctgtatcttacaatatgggaagtgcttcgatcccgtatctcctgggtgcagagatcccgaccgctgcgctccgcgagaaaacacaagcactaggagctgcatggaacgtcatctgggccttcgtggtgagcttcgtgacaccgtatctcatcgatgccataagcttcaagatcggtatcttatacgggagcatatctcttacggcagtcttaattaccttcttctttttgcctgagacaaagggctacgctcttgaagaagttgacgcaatcttcgaaaagtcatttaacccctttcgtccggaactgcccaatttcactcccgctgagttacaggttggtgagcttgagggtgcaacaaacgttggaaatacagaaaagacagctattgcctag

SEQ ID NO: 21155 - protein, 516 aa, Muscodor strobelii
  misc_feature: SGI Peptide ID NO. 567156
  misc_feature (28)..(433): Pfam Id: PF07690 Pfam Desc: Major Facilitator Superfamily
  misc_feature (24)..(477): Pfam Id: PF00083 Pfam Desc: Sugar (and other) transporter
  misc_feature (15)..(507): NCBI GI: 242799200 Blast Desc: sugar transporter, [Talaromyces stipitatus ATCC 10500] gi|218716674|gb|EED16095.1| sugar transporter, [Talaromyces stipitatus ATCC 10500]
  misc_feature (17)..(506): NCBI GI: 46127349 Blast Desc: FG08052.1 [Gibberella zeae PH-1]
  misc_feature (6)..(515): NCBI GI: 169772863 Blast Desc: [Aspergillus oryzae RIB40] gi|83768761|dbj|BAE58898.1| protein product [Aspergillus oryzae]
  misc_feature (21)..(515): NCBI GI: 238490766 Blast Desc: sugar transporter, [Aspergillus flavus NRRL3357] gi|220697033|gb|EED53374.1| sugar transporter, [Aspergillus flavus NRRL3357]
  misc_feature (11)..(479): NCBI GI: 242791879 Blast Desc: sugar transporter, [Talaromyces stipitatus ATCC 10500] gi|218718432|gb|EED17852.1| sugar transporter, [Talaromyces stipitatus ATCC 10500]
  misc_feature (17)..(487): NCBI GI: 242822996 Blast Desc: sugar transporter, [Talaromyces stipitatus ATCC 10500] gi|218712922|gb|EED12347.1| sugar transporter, [Talaromyces stipitatus ATCC 10500]
  misc_feature (3)..(500): NCBI GI: 212541144 Blast Desc: sugar transporter, [Penicillium marneffei ATCC 18224] gi|210068026|gb|EEA22118.1| sugar transporter, [Penicillium marneffei ATCC 18224]
  misc_feature (8)..(479): NCBI GI: 212535038 Blast Desc: sugar transporter, [Penicillium marneffei ATCC 18224] gi|210070074|gb|EEA24164.1| sugar transporter, [Penicillium marneffei ATCC 18224]
  misc_feature (12)..(505): NCBI GI: 256726993 Blast Desc: NECHADRAFT_76534 [Nectria haematococca mpVI 77-13-4]
  misc_feature (36)..(477): NCBI GI: 50307923 Blast Desc: protein product [Kluyveromyces lactis] gi|49643095|emb|CAG99047.1| KLLA0E00287p [Kluyveromyces lactis]
MALETSEIPSFSRRSLLTPLLLFSCFSLLIGDLAFGFDTGNFGGILGNPGFIKEFGTYDPQTATYTFSTLRTSLSTSLALIGKFLGCIVGGPVIEKFGHKFVFFALCCTAFIGIIRSAGSSPGTGRLAQFIVGRIVVYASVGLVEVCVPTYQAEIVPANIRGLVVVSLQLFLTVGTLVASGANIAYKDDASSSGWLTVTGIQFIFPFLLLICSFFIPSSPRWLLSKSRDEEAVRSLRRLRPQSYADEGWCEIEVQTIREALHQETQKAPWGDLLRGNNLRRTVIVMIFYFFHDATGQPLAATYATTFFQDIGFGSASYTFVLIGALLSIFSVIPAMVIVDRLGRRKTLLISYFFQAVWMYILAGVGTAGTTTAAKNTIVASLILYAVSYNMGSASIPYLLGAEIPTAALREKTQALGAAWNVIWAFVVSFVTPYLIDAISFKIGILYGSISLTAVLITFFFLPETKGYALEEVDAIFEKSFNPFRPELPNFTPAELQVGELEGATNVGNTEKTAIA

SEQ ID NO: 21156 - DNA, 5461 bp, Muscodor strobelii; identical to SEQ ID NO: 21153
  misc_feature: SGI EST ID NO. CUFF.49585.0
  misc_feature: Variant of the nucleotide sequence at SEQ ID NO 21154

SEQ ID NO: 21157 - DNA, 741 bp, Muscodor strobelii
  misc_feature: SGI cDNA ID NO. 567157
  misc_feature: Elevated expression when VOC is produced
  misc_feature: Encodes the peptide sequence at SEQ ID NO 21158
atgcagaatgaagcgccgccaccgtacactgaacattttcagtcatatgatggagacgatgctcaagccgatataattgaagctacaaacccggctctaccgcctgagcgacgaatgcccctggacttcaacatatacagcgaaagcgctatgtctactgctatctactatatgggcccacatcaaatcgacaggcagttcgccctgacccttagcaaaaacatggccagcacgcaaaagcccttcataaccctccacgacgggttgaacttacaggacccggctatcgccgcatccaacaatgtgtccagcaagtttgattcgccgaacactaagtttaaagttacaactacaatcggaggctttcccgctgtcgatgaaatgttgaccgtacaccgaacaggtagcttttggcgtcctaaagagtctctcaggtacaccgtcgacgttcctacggcgagcggtaaacgacaagagtttgaatggcggcaatgcagtactgcggagatgacagaactctcaatggggccgggtcgtggttggaagcttgtggctctcgcaagcgcgaatgaagatattctagcggcctgtgcaagacaccccaacagcatgacaaagtttttccgatttgcgttcaggggacaagggcgaactgcgggtttcgacgccgtatgggagcttatggctattatcaccgggcttacgggttggcatcgcgacaatgaattagggtctgattag

SEQ ID NO: 21158 - protein, 246 aa, Muscodor strobelii
  misc_feature: SGI Peptide ID NO. 567157
  misc_feature (31)..(240): NCBI GI: 240105211 Blast Desc: CPC735_047740 [Coccidioides posadasii C735 delta SOWgp]
  misc_feature (3)..(240): NCBI GI: 255951174 Blast Desc: Pc22g24660 [Penicillium chrysogenum Wisconsin 54-1255] gi|211593371|emb|CAP99754.1| Pc22g24660 [Penicillium chrysogenum Wisconsin 54-1255]
  misc_feature (31)..(240): NCBI GI: 119194669 Blast Desc: CIMG_01709 [Coccidioides immitis RS]
  misc_feature (31)..(240): NCBI GI: 46134219 Blast Desc: FG09249.1 [Gibberella zeae PH-1]
  misc_feature (34)..(240): NCBI GI: 115433430 Blast Desc: [Aspergillus terreus NIH2624] gi|114189704|gb|EAU31404.1| [Aspergillus terreus NIH2624]
  misc_feature (6)..(233): NCBI GI: 261352745 Blast Desc: conserved [Verticillium albo-atrum VaMs.102]
  misc_feature (7)..(200): NCBI GI: 39972603 Blast Desc: MGG_07603 [Magnaporthe grisea 70-15] gi|145016807|gb|EDK01237.1| MGG_07603 [Magnaporthe grisea 70-15]
  misc_feature (158)..(237): NCBI GI: 238494878 Blast Desc: conserved [Aspergillus flavus NRRL3357] gi|220695325|gb|EED51668.1| conserved [Aspergillus flavus NRRL3357]
  misc_feature (158)..(237): NCBI GI: 169777689 Blast Desc: [Aspergillus oryzae RIB40] gi|83772047|dbj|BAE62177.1| protein product [Aspergillus oryzae]
  misc_feature: Useful for introducing or modulating the production of volatile compounds
MQNEAPPPYTEHFQSYDGDDAQADIIEATNPALPPERRMPLDFNIYSESAMSTAIYYMGPHQIDRQFALTLSKNMASTQKPFITLHDGLNLQDPAIAASNNVSSKFDSPNTKFKVTTTIGGFPAVDEMLTVHRTGSFWRPKESLRYTVDVPTASGKRQEFEWRQCSTAEMTELSMGPGRGWKLVALASANEDILAACARHPNSMTKFFRFAFRGQGRTAGFDAVWELMAIITGLTGWHRDNELGSD

SEQ ID NO: 21159 - DNA, 1557 bp, Muscodor strobelii
  misc_feature: SGI EST ID NO. CUFF.49585.1
  misc_feature: Variant of the nucleotide sequence at SEQ ID NO 21157
atcgcatcagatatccccgctcaactctttctatccaaagtaacccctcccgcgctggaaacactggcttccacctatttccatttgctagccaatcctgcatattgcctagtctcaaataccttcctatcgttagcagacatcaccacgttcgtgttatgcaagtattcagtccaggtccatacgatgcagaatgaagcgccgccaccgtacactgaacattttcagtcatatgatggagacgatgctcaagccgatataattgaagctacaaacccggctctaccgcctgagcgacgaatgcccctggacttcaacatatacagcgaaagcgctatgtctactgctatctactatatgggcccacatcaaatcgacaggcagttcgccctgacccttagcaaaaacatggccagcacgcaaaagcccttcataaccctccacgacgggttgaacttacaggacccggctatcgccgcatccaacaatgtgtccagcaagtttgattcgccgaacactaagtttaaagttacaactacaatcggaggctttcccgctgtcgatgaaatgttgaccgtacaccgaacaggtagcttttggcgtcctaaagagtctctcaggtacaccgtcgacgttcctacggcgagcggtaaacgacaagagtttgaatggcggcaatgcagtactgcggagatgacagaactctcaatggggccgggtcgtggttggaagcttgtggctctcgcaagcgcgaatgaagatattctagcggcctgtgcaagacaccccaacagcatgacaaagtttttccgatttgcgttcaggggacaagggcgaactgcgggtttcgacgccgtatgggagcttatggctattatcaccgggcttacgggttggcatcgcgacaatgaattagggtctgattagaagatgttgctgccagccatcctgctataagcacgtattaggtgcatacgagagtgcatcccttgttgatccagaccttttcagaattcctgctagcaatgcttacacaatggcgacagagtgaagcaagccagcgctatggtgaccagtgtgggctcctactacaactcttgcacactagtagatctctgtcttcatgaaactaattactaggcaatagctgtcttttctgtatttccaacgtttgttgcaccctcaagctcaccaacctgtaactcagcgggagtgaaattgggcagttccggacgaaaggggttaaatgacttttcgaagattgcgtcaacttcttcaagagcgtagccctatcattcacaatatcacttaactcatatcattatcaaccaaactctaagccgaagagaaggaaaatagcactagcgcacctttgtctcaggcaaaaagaagaaggtaattaagactgccgtaagagatatgctcccgtataagataccgatcttgaagcttatggcatcgatgagatacggtgtcacgaagctcaccacgaaggcccagatgacgttccatgcagctcctagtgcttgtgttttctcgcggagcgcagcggtcggg

SEQ ID NO: 21160 - DNA, 1503 bp, Muscodor strobelii
  misc_feature: SGI cDNA ID NO. 567158
  misc_feature: Encodes the peptide sequence at SEQ ID NO 21161
atggcctccaaagagattaaggtcgatattttggtcattggagctggtccgactgggctgggtgctgctaaacgtcttcagcagtcgaaccgagcatcgtggctcatcgtcgactcaaacgaaacccctggaggccttgcctctactgacactacgccagaagggtttctgttcgatgttggcggccatgtcatcttctctcattacaagtacttcgatgattgtctcgatgaggctctccctaatgaaacggattggtatacacaccagagagtatcatattgccgatttagaggtgactgggtgccatatccctttcaaaataacatcgctgtactggaaccggaggaaaaggcgcattgcttagaggacttgatcgatgcggctttagaagctcgcacccgcgctccatctgataagccgaagaacttcgacgagtggaacatccgaaacgttggcatcaggctgaacgagatcttcatgcgcccgtataactttagagtctgggcagtgccaacgaccaagatgaatgcgacatgggttggggaacgtgttgctgcaccgaacgttaagctcttgacccgtaacgttgtcacgaacaaagttgcaggaggctggggccccaattccgtgtttcgttttcccgcgcacggaggcactggcggcatttggaccgctgttgcgaacacgctggacaagaagaacacgagatttggtgcccacggtgctgtcgctaaggttgatgctgcggccaagaaagctcacctgaaggatggtacttgtgtttggtacaactctctcatctctactatggctatcgatcatcttgctcaatcaatgggggatgcacagcttcaaaagatctgctctctgctgttctattcttccactaacgtaattggtgtgggcattcgtggaaaacgcccagagcgcatcggtgacaaatgctggctttacttcaccgaagacaactgcccgttctatcgggcgactattttttcgaattacagcccttacaatcagccggctgatgacatcaaactacccacccagcaactcgccagcggagcaaagccgacatctacggacgctcagtctggtccatactggtccctcatgttagaagtttctgagtcttcatacaagcctgtcaagcaagagacacttcttgaggactgcattcaaggcttgataaacactagtctcctggagcctcaagatgagatcgtcagtacgtacgttcgacgctttgatcacggctaccctacgcctagcgttgaacgaaacggtgcactggacgaagcccttccctatctccgcaagaaagacattctctcgcgcggtagatttggtgcctggaaatatgaggttggaaaccaggatcacggcttcatgcaaggtgtcgaggctgtcgatcatgttcttacgggaggcgtggagctcactctcagccatcctgactttgtcaacacccgcgctaacacagagcgtcgcttgaagtaa

SEQ ID NO: 21161 - protein, 500 aa, Muscodor strobelii
  misc_feature: SGI Peptide ID NO. 567158
  misc_feature (17)..(153): Pfam Id: PF01593 Pfam Desc: Flavin containing amine oxidoreductase
  misc_feature (1)..(499): NCBI GI: 256732354 Blast Desc: NECHADRAFT_100697 [Nectria haematococca mpVI 77-13-4]
  misc_feature (1)..(500): NCBI GI: 115492455 Blast Desc: ATEG_00769 [Aspergillus terreus NIH2624] gi|114197715|gb|EAU39415.1| ATEG_00769 [Aspergillus terreus NIH2624]
  misc_feature (2)..(499): NCBI GI: 189210880 Blast Desc: UDP-galactopyranose mutase [Pyrenophora tritici-repentis Pt-1C-BFP] gi|187977864|gb|EDU44490.1| UDP-galactopyranose mutase [Pyrenophora tritici-repentis
  misc_feature (1)..(500): NCBI GI: 119491144 Blast Desc: NFIA_064610 [Neosartorya fischeri NRRL 181] gi|119411354|gb|EAW21297.1| conserved [Neosartorya fischeri NRRL 181]
  misc_feature (1)..(499): NCBI GI: 145233253 Blast Desc: An02g08660 [Aspergillus niger] gi|134056927|emb|CAK44274.1| protein product [Aspergillus niger]
  misc_feature (1)..(499): NCBI GI: 67008316 Blast Desc: UDP-galactopyranose mutase [Aspergillus fumigatus] gi|238817000|gb|ACR56867.1| UDP-galactopyranose mutase [Aspergillus fumigatus]
  misc_feature (1)..(499): NCBI GI: 115391603 Blast Desc: ATEG_04128 [Aspergillus terreus NIH2624] gi|114194230|gb|EAU35930.1| ATEG_04128 [Aspergillus terreus NIH2624]
  misc_feature (1)..(499): NCBI GI: 212527530 Blast Desc: conserved [Penicillium marneffei ATCC 18224] gi|210073320|gb|EEA27407.1| conserved [Penicillium marneffei ATCC 18224]
  misc_feature (8)..(499): NCBI GI: 145252076 Blast Desc: An16g02380 [Aspergillus niger] gi|134083094|emb|CAL00462.1| protein product [Aspergillus niger]
  misc_feature (1)..(499): NCBI GI: 121706000 Blast Desc: conserved [Aspergillus clavatus NRRL 1] gi|119399409|gb|EAW09837.1| conserved [Aspergillus clavatus NRRL 1]
MASKEIKVDILVIGAGPTGLGAAKRLQQSNRASWLIVDSNETPGGLASTDTTPEGFLFDVGGHVIFSHYKYFDDCLDEALPNETDWYTHQRVSYCRFRGDWVPYPFQNNIAVLEPEEKAHCLEDLIDAALEARTRAPSDKPKNFDEWNIRNVGIRLNEIFMRPYNFRVWAVPTTKMNATWVGERVAAPNVKLLTRNVVTNKVAGGWGPNSVFRFPAHGGTGGIWTAVANTLDKKNTRFGAHGAVAKVDAAAKKAHLKDGTCVWYNSLISTMAIDHLAQSMGDAQLQKICSLLFYSSTNVIGVGIRGKRPERIGDKCWLYFTEDNCPFYRATIFSNYSPYNQPADDIKLPTQQLASGAKPTSTDAQSGPYWSLMLEVSESSYKPVKQETLLEDCIQGLINTSLLEPQDEIVSTYVRRFDHGYPTPSVERNGALDEALPYLRKKDILSRGRFGAWKYEVGNQDHGFMQGVEAVDHVLTGGVELTLSHPDFVNTRANTERRLK

SEQ ID NO: 21162 - DNA, 2093 bp, Muscodor strobelii
  misc_feature: SGI EST ID NO. CUFF.49586.2
  misc_feature: Variant of the nucleotide sequence at SEQ ID NO 21160
acttgctacagtgttgtacatcgggacgtccattctttgctcattatatcaaaacgtcgtccaagtcgaccgttatttccaaccggaacctattaggatggcctccaaagagattaaggtcgatattttggtcattggagctggtccgactgggctgggtgctgctaaacgtcttcagcagtcgaaccgagcatcgtggctcatcgtcgactcaaacgaaacccctggaggccttgcctctactgacactacgccagaagggtttctgttcgatgttggcggccatgtcatcttctctcattacaagtacttcgatgattgtctcgatgaggctctccctaatgaaacggattggtatacacaccagagagtatcatattgccgatttagaggtgactgggtgccatatccctttcaaaataacatcgctgtactggaaccggaggaaaaggcgcattgcttagaggacttgatcgatgcggctttagaagctcgcacccgcgctccatctgataagccgaagaacttcgacgagtggaacatccgaaacgttggcatcaggctgaacgagatcttcagtgagtgctagcaagtgtcatttgaagttgctaagacacattgaccgaagatttgtgcagtgcgcccgtataactttagagtctgggcagtgccaacgaccaagatgaatgcgacatgggttggggaacgtgttgctgcaccgaacgttaagctcttgacccgtaacgttgtcacgaacaaagttgcaggaggctggggccccaattccgtgtttcgttttcccgcgcacggaggcactggcggcatttggaccgctgttgcgaacacgctggacaagaagaacacgagatttggtgcccacggtgctgtcgctaaggttgatgctgcggccaagaaagctcacctgaaggatggtacttgtgtttggtacaactctctcatctctactatggctatcgatcatcttgctcaatcaatgggggatgcacagcttcaaaagatctgctctctgctgttctattcttccactaacgtaattggtgtgggcattcgtggaaaacgcccagagcgcatcggtgacaaatgctggctttacttcaccgaagacaactgcccgttctatcgggcgactattttttcgaattacagcccttacaatcagccggctgatgacatcaaactacccacccagcaactcgccagcggagcaaagccgacatctacggacgctcagtctggtccatactggtccctcatgttagaagtttctgagtcttcatacaagcctgtcaagcaagagacacttcttgaggactgcattcaaggcttgataaacactagtctcctggagcctcaagatgagatcgtcagtacgtacgttcgacgctttgatcacggctaccctacgcctagcgttgaacgaaacggtgcactggacgaagcccttccctatctccgcaagaaagacattctctcgcgcggtagatttggtgcctggaaatatgaggttggaaaccaggatcacggcttcatgcaaggtgtcgaggctgtcgatcatgttcttacgggaggcgtggagctcactctcagccatcctgactttgtcaacacccgcgctaacacagagcgtcgcttgaagtaagcgtgtagtaggatgtgtcgcagttccaatcatttcaattcgcaggataggatccgacactcctttgtgcggataatttgagaagcgtgtaaattgaggaaacacgtaactacctcctttcgattctttcttgagtctggcagcctgtaaggagctgctgaccactgtcatagttgtcgctttctactagcatttggccattgacttgattttcgttacaaatttcgaagcacgagacttagaaatgagagttgagttgagttgagttcatcatcatccctaaacgttgggacgggttacatgcattcctccgttttgtgacatgactccttagtgcatcctcttgaaatcttactcccgtgcgatgctctcgcgaaggggagaaggtagtgatcgcagcagacgaatgaatagcccttctattatgctcccg

SEQ ID NO: 21163 - DNA, 894 bp, Muscodor strobelii
  misc_feature: SGI cDNA ID NO. 567159
  misc_feature: Encodes the peptide sequence at SEQ ID NO 21164
atgtcagtttccaccaaagccgaggcagaaatccagcgaaatccgcaccccgacttcaaaagtgtcgagaagtcgcgtcctgactgggatcaatcgtctaactttcgcttcaccaagaccgtcgatccctcatggaggcccggtgccggggccaaccagttgactcccgcctcggcttcactccgccatgtccagattgacccgtatgaagatgggcgcccggcacgtcttaactacaagctgttgatctctagtattgttccgcgaccgattggatttgtatccacgcgctcaggcatggaagatggcgaggagtctttaaatcttgcgcccttctcctacttcaacctgattaatcatgaccctccaatcttttgccttggcatagctgccagcatcgcgaagcctaaagacactcttcgcaatcttatggcgacgaaagaatgtaccgtgaacatcatcagcgagcatttcatcgaagctgccaactcaacctccgttgatgcgccgcccggccgctcggaatgggatgtcagcggcctcacgcctgtatacgacacaactactgtcaaggcacctcgtgtgggagaggccatattcagtgttgagtgcaagctggaaagcgtgcgtgagtttgacagcaagagcacacctggcaagaagtcaggctgtcttgtactactggagggtacaaagttctgggcccgggaggattctgtcaacgaggacagaagtttaattgaccccgagatccttcggccgattagcagactgggaggcattacatacgggcggacgactgaagctaccgaactgcttcgacctacatgggagcacgacattggcggtgtggaggggtacaagaaattgaagcagacagacggaaatctttag

SEQ ID NO: 21164 - protein, 297 aa, Muscodor strobelii
  misc_feature: SGI Peptide ID NO. 567159
  misc_feature (3)..(291): NCBI GI: 39972827 Blast Desc: MGG_07708 [Magnaporthe grisea 70-15] gi|145012475|gb|EDJ97129.1| MGG_07708 [Magnaporthe grisea 70-15]
  misc_feature (10)..(295): NCBI GI: 256732848 Blast Desc: NECHADRAFT_68730 [Nectria haematococca mpVI 77-13-4]
  misc_feature (11)..(296): NCBI GI: 46124513 Blast Desc: FG06634.1 [Gibberella zeae PH-1]
  misc_feature (8)..(292): NCBI GI: 116208208 Blast Desc: CHGG_03397 [Chaetomium globosum CBS 148.51] gi|88183994|gb|EAQ91462.1| CHGG_03397 [Chaetomium globosum CBS 148.51]
  misc_feature (8)..(292): NCBI GI: 171685588 Blast Desc: protein product [Podospora anserina] gi|170942755|emb|CAP68408.1| protein product [Podospora anserina]
  misc_feature (7)..(290): NCBI GI: 156052006 Blast Desc: SS1G_07411 [Sclerotinia sclerotiorum 1980] gi|154705188|gb|EDO04927.1| SS1G_07411 [Sclerotinia sclerotiorum 1980]
  misc_feature (4)..(292): NCBI GI: 164428964 Blast Desc: NCU00236 [Neurospora crassa OR74A] gi|157072355|gb|EAA28471.2| conserved [Neurospora crassa OR74A]
  misc_feature (2)..(278): NCBI GI: 169598908 Blast Desc: SNOG_02263 [Phaeosphaeria nodorum SN15] gi|111069355|gb|EAT90475.1| SNOG_02263 [Phaeosphaeria nodorum SN15]
  misc_feature (7)..(278): NCBI GI: 189208742 Blast Desc: conserved [Pyrenophora tritici-repentis Pt-1C-BFP] gi|187976797|gb|EDU43423.1| conserved [Pyrenophora tritici-repentis Pt-1C-BFP]
  misc_feature (16)..(279): NCBI GI: 226278738 Blast Desc: flavoprotein oxygenase [Paracoccidioides brasiliensis Pb01]
MSVSTKAEAEIQRNPHPDFKSVEKSRPDWDQSSNFRFTKTVDPSWRPGAGANQLTPASASLRHVQIDPYEDGRPARLNYKLLISSIVPRPIGFVSTRSGMEDGEESLNLAPFSYFNLINHDPPIFCLGIAASIAKPKDTLRNLMATKECTVNIISEHFIEAANSTSVDAPPGRSEWDVSGLTPVYDTTTVKAPRVGEAIFSVECKLESVREFDSKSTPGKKSGCLVLLEGTKFWAREDSVNEDRSLIDPEILRPISRLGGITYGRTTEATELLRPTWEHDIGGVEGYKKLKQTDGNL

SEQ ID NO: 21165 - DNA, 1993 bp, Muscodor strobelii
  misc_feature: SGI EST ID NO. CUFF.49567.0
  misc_feature: Variant of the nucleotide sequence at SEQ ID NO 21163
cgggaatcttagacatgatcattcgctatcagtcgagatcagatatgtcgttaaaacgatgtcataatcaattctcaaaataacgtcatgttggccccacgggcaagtacctacaggcactttctttgaaagcgcgggtagacgggtatgggtagttggcaaaccctacaatttcgctcaagcagtattgcagtagacgagcggatgatttgtcattataatatccatatgttatgtcttcagtctagggcctggtccgcggtgaaaaaataattgtgcatctcaggtattcaagctccacgttgagtcggttgtcacttcatgacatcatgagacgctgggtaaactgctttcgactgacttgagtggttagaccaagcgcgtcctcgacaacagacgattaatgcgcacaattgtttgggcacctaactccaccgatgatggaattagtagctgccggcatgagatctaccccgcgcaccagtcgcattgttctcaagtccatttcacttataggtcgacgttgcccgagaaccacaaaggccaaaaaggctcacgagatacgagaacattcaactacaaatctcacgaactgtttatcggtacgtagtgaagcagtctcgcaaaatcactttggcatcgcatcataccataccacgatgtcagtttccaccaaagccgaggcagaaatccagcgaaatccgcaccccgacttcaaaagtgtcgagaagtcgcgtcctgactgggatcaatcgtctaactttcgcttcaccaagaccgtcgatccctcatggaggcccggtgccggggccaaccagttgactcccgcctcggcttcactccgccatgtccagattgacccgtatgaagatgggcgcccggcacgtcttaactacaagctgttgatctctagtattgttccgcgaccgattggatttgtatccacgcgctcaggcatggaagatggcgaggagtctttaaatcttgcgcccttctcctacttcaacctgattaatcatgaccctccaatcttttgccttggcatagctgccagcatcgcgaagcctaaagacactcttcgcaatcttatggcgacgaaagaatgtaccgtgaacatcatcagcgagcatttcatcgaagctgccaactcaacctccgttgatgcgccgcccggccgctcggaatgggatgtcagcggcctcacgcctgtatacgacacaactactgtcaaggcacctcgtgtgggagaggccatattcagtgttgagtgcaagctggaaagcgtgcgtgagtttgacagcaagagcacacctggcaagaagtcaggctgtcttgtactactggagggtacaaagttctgggcccgggaggattctgtcaacgaggacagaagtttaattgaccccgagatccttcggccgattagcagactgggaggcattacatacgggcggacgactgaagctaccgaactgcttcgacctacatgggagcacgacattggcggtgtggaggggtacaagaaattgaagcagacagacggaaatctttagaactcatcactcatcatgtcataaatcgcccactagatcatccaggtaacgagcttgatatatgcatcgcatcattgccaagaaaggcgcagagatatccaagagctcggctatccgctcaaatactcgcgaaaagagaagcgtaaagaatagacgactacagacaaataaccattcgagcttgattaattgtaagattgaatgtaatatgatcgataatggctgatgtagatatggatggaatgcggactgaaatcgcacctaccacgcaatctagagcggctcggggatatagtagggtaccgtcatcaaatcttgcagagtctcctaacgaaaaccaatgtttcacgagcctcatcactcattgctttgattaatgtagctaaaataatgtatgtaggaattggagaaattctaaacatatatgcacactatcagag

SEQ ID NO: 21166 - DNA, 1281 bp, Muscodor strobelii
  misc_feature: SGI cDNA ID NO. 567160
  misc_feature: Encodes the peptide sequence at SEQ ID NO 21167
atgtctggtcactgtcagcacatcattgtggttggtgcgggttgttttggtctctcgaccgcactcgaattatcacggaacaggtcttttgcgcacgctcgcatcactatcatcaacgccacagaaattccagaccaagcttgctccagcttcgatatcaatcgcatcgtgcgaacagattacaccagcactctttatgcgacactagctgctgaggcattgtgcgagtggaagcaaggcgaatggggcaaaggtggacgcttcgttaaatccggcttgttgatgcttggagaggccaaagacggctatattgcatctgcgctggccctggcccggagtcgtggtgaagaccacaacattgccgaggtagcaggcgatgacgctatccgaaaggcttgcagttccggggggaaaagcggttcttggggctacctgaacgaacatgcaggatgggtcgacgccggccgaagtctagaatatgcatataccgagcttgaaaagctcggccgcgcagagataatcgtcggtaccgtgtcacggatgggagtcgaggtatctgacgtggctaagtcccgtgtgactggcgtcgtgcttgatgatgggaggacattttcggctgatctcacaattctcgccgcaggggcgaagagccccatgcttattgatatgcgaggtatcgcggtcgcatctggtgaagttctatcctatattacactggatgtcgaggcgacggagagattgcgcgatatgccagcgatcatcaatcttagcaaaggctggttcattctaccaccgaatggaaacgagcttaaaatcgcccgacatgggcaagggtttttgaacatttgtgatatttcccatccagagataccaaaggaccgcattaggctttcgacgcctaacgttgacgaacaagggcgagaagatatgctcagaaagggccttggatcatgtcgcgaggctctcgaagaactcataccctggctcgcagctagaccatttgatcgaacacgtatctgctggtatactgacacacccgacggcaatttcataatcgactatcatccccgtttcgatggtttattcgtagcgacaggtggcagcgggcatgctttcaagttcatgccagtaatcggcaagtatattgttgatgctttacaaaacaaattaaaccctagctaccaacagctatggagctggccagagcaagatgttggcgtcaaacccgacgatgtacagcgggcggcgtacaaagcccgcggaggcgacaaccagcaataa

SEQ ID NO: 21167 - protein, 426 aa, Muscodor strobelii
  misc_feature: SGI Peptide ID NO. 567160
  misc_feature (7)..(385): Pfam Id: PF01266 Pfam Desc: FAD dependent oxidoreductase
  misc_feature (6)..(403): NCBI GI: 119187013 Blast Desc: CIMG_03554 [Coccidioides immitis RS]
  misc_feature (6)..(403): NCBI GI: 240108354 Blast Desc: conserved [Coccidioides posadasii C735 delta SOWgp]
  misc_feature (7)..(401): NCBI GI: 145252386 Blast Desc: An16g03950 [Aspergillus niger] gi|134083255|emb|CAK46826.1| protein product [Aspergillus niger]
  misc_feature (8)..(411): NCBI GI: 261194206 Blast Desc: fructosyl amino acid oxidasesarcosine oxidase [Ajellomyces dermatitidis SLH14081] gi|239588522|gb|EEQ71165.1| fructosyl amino acid oxidasesarcosine oxidase [Ajellomyces
  misc_feature (8)..(411): NCBI GI: 239606907 Blast Desc: fructosyl amino acid oxidasesarcosine oxidase [Ajellomyces dermatitidis ER-3]
  misc_feature (6)..(402): NCBI GI: 258563650 Blast Desc: conserved [Uncinocarpus reesii 1704] gi|237908077|gb|EEP82478.1| conserved [Uncinocarpus reesii 1704]
  misc_feature (8)..(410): NCBI GI: 238838174 Blast Desc: conserved [Microsporum canis CBS 113480]
  misc_feature (6)..(401): NCBI GI: 159127620 Blast Desc: fructosyl amino acid oxidasesarcosine oxidase, [Aspergillus fumigatus A1163]
  misc_feature (3)..(403): NCBI GI: 212526958 Blast Desc: fructosyl amino acid oxidasesarcosine oxidase, [Penicillium marneffei ATCC 18224] gi|210073034|gb|EEA27121.1| fructosyl amino acid oxidasesarcosine oxidase, [Penicillium ATCC
  misc_feature (6)..(401): NCBI GI: 119491903 Blast Desc: fructosyl amino acid oxidasesarcosine oxidase, [Neosartorya fischeri NRRL 181] gi|119411606|gb|EAW21549.1| fructosyl amino acid oxidasesarcosine oxidase, [Neosartorya NRRL
  misc_feature (8)..(415): SWISSPROT Homolog: EC 1.5.3.7 L-pipecolate oxidase
MSGHCQHIIVVGAGCFGLSTALELSRNRSFAHARITIINATEIPDQACSSFDINRIVRTDYTSTLYATLAAEALCEWKQGEWGKGGRFVKSGLLMLGEAKDGYIASALALARSRGEDHNIAEVAGDDAIRKACSSGGKSGSWGYLNEHAGWVDAGRSLEYAYTELEKLGRAEIIVGTVSRMGVEVSDVAKSRVTGVVLDDGRTFSADLTILAAGAKSPMLIDMRGIAVASGEVLSYITLDVEATERLRDMPAIINLSKGWFILPPNGNELKIARHGQGFLNICDISHPEIPKDRIRLSTPNVDEQGREDMLRKGLGSCREALEELIPWLAARPFDRTRICWYTDTPDGNFIIDYHPRFDGLFVATGGSGHAFKFMPVIGKYIVDALQNKLNPSYQQLWSWPEQDVGVKPDDVQRAAYKARGGDNQQ

SEQ ID NO: 21168 - DNA, 2146 bp, Muscodor strobelii
  misc_feature: SGI EST ID NO. CUFF.49570.0
  misc_feature: Variant of the nucleotide sequence at SEQ ID NO 21166
tagcattcgtttcgaggaatcttacgctgtcgatactatcaggtgtaaactgaatgtatgatgtatcttgttcatgacctgcctagggtgtcaatgacgagctcatccgcctacagagtacttcgctaccaaaggccaattgaagtttcactcgtatatctatcactgcccatacatgtatgttgtcctgtgatttcctagtctgtgcactcagacccgccacaaacgtaatctaggtaggtaagcaatttgcatgagtgtattgcggcatatcgaattgatggtcagtatttattccataaaatcaattcttgaaaaaatgcaagtgcgtcagatagttccggattatatagaaactaatacaatcgctcctctgtctgctagtatgtctggtcactgtcagcacatcattgtggttggtgcgggttgttttggtctctcgaccgcactcgaattatcacggaacaggtcttttgcgcacgctcgcatcactatcatcaacgccacagaaattccagaccaagcttgctccagcttcgatatcaatcgcatcgtgcgaacagattacaccagcactctttatgcgacactagctgctgaggcattgtgcgagtggaagcaaggcgaatggggcaaaggtggacgcttcgttaaatccggcttgttgatgcttggagaggccaaagacggctatattgcatctgcgctggccctggcccggagtcgtggtgaagaccacaacattgccgaggtagcaggcgatgacgctatccgaaaggcttgcagttccggggggaaaagcggttcttggggctacctgaacgaacatgcaggatgggtcgacgccggccgaagtctagaatatgcatataccgagcttgaaaagctcggccgcgcagagataatcgtcggtaccgtgtcacggatgggagtcgaggtatctgacgtggctaagtcccgtgtgactggcgtcgtgcttgatgatgggaggacattttcggctgatctcacaattctcgccgcaggggcgaagagccccatgcttattgatatgcgaggtatcgcggtcgcatctggtgaagttctatcctatattacactggatgtcgaggcgacggagagattgcgcgatatgccagcgatcatcaatcttagcaaaggctggttcattctaccaccgaatggaaacgagcttaaaatcgcccgacatgggcaagggtttttgaacatttgtgatatttcccatccagagataccaaaggaccgcattaggctttcgacgcctaacgttgacgaacaagggcgagaagatatgctcagaaagggccttggatcatgtcgcgaggctctcgaagaactcataccctggctcgcagctagaccatttgatcgaacacgtatctgctggtatactgacacacccgacggcaatttcataatcgactatcatccccgtttcgatggtttattcgtagcgacaggtggcagcgggcatgctttcaagttcatgccagtaatcggcaagtatattgttgatgctttacaaaacaaattaaaccctagctaccaacagctatggagctggccagagcaagatgttggcgtcaaacccgacgatgtacagcgggcggcgtacaaagcccgcggaggcgacaaccagcaataagatatatgactttgtgctaccagtcgaacctttaaaccgcatgattgctagggctgccagtcgaatttctgtgacactgatggcacttgtactttgaagggatctgtgtggtttatgtgggctgtccgcgccggctcgttgaagaagcacgcacgtttggcacaatcaagcgctggtatcttgtgaccagtcgtgcgaaagtggttaagcgagcgttatatcctctgctaagaggctcttccgaaatgacccacttgtaggatagggagctatgatgataataagtttctgtcagtggatggttaagtttacgagccagagtgcagagaagatgaggagaagtccgcttgaccgagaaggtgatgaagaagtacggtcttcgtttgcgactggcattacgctaggccacgaccaaaatgacaagatgcctatatggaataatcaggcaagaagcacgtaccagcgtaccgtgagtttggt

SEQ ID NO: 21169 - DNA, 1005 bp, Muscodor strobelii
  misc_feature: SGI cDNA ID NO. 567161
  misc_feature: Encodes the peptide sequence at SEQ ID NO 21170
atgtcgtcgacactcaatattttggacatcaatcaagagcaggatttgcgttcgtccgtcgttggtggacttaatactgtaccaaagacgttgcctgatctcctattgtgggatgacgctggacacgagttattccagcaactgacaaagagcaaatcataccatggcccacaagcagatcacggaattatgacggaccgagtggacgatatatgtgaaatgcttggagatgatggtgttttgatcgaacttggagccggctctattccacacacctcatttctcctggaagagctctgtcggcggggcacacgaacgcgatatttagctcatgatttctgccgggaccgcctcgcccaaagcctctggcgtctcaacaacgagctatctatgaaaggccttaatgaattagaatggatgcgtggagtcgtcggtacttacgaacaattcttcgagtggctttctaacacggatgaacttcaacggcgtcgcgtcgtggttatttggctaggaaacagtctcagtcatgtttctaatgccgagttctccaagattatcgacgtcttgatgcaatccatctctgcgagccaagctgcatcgagcgtattgctactttcagtcaatggctgccaagaggcagcagcgatgcggtcgtcatacaactccccagatggcttgtccctagcctttgtctctaatgccttgcgacatgcaaatcgcctgcttggtaccgatactctcgatgacaagttatggaagccagtgctccgcgcagatgctagaggcacagtggtatcctgggcatttcgattgcagggtgaagctcggctcgtagttgacggacggccagtaagatgcgtggctggggaagacattactctcataactctttcggtacgaggtgaatctgagatttccaagctgctggcgcccacctcgtctcagctcatggaaacatggagccacccatccctcgcgtggagtaagtacgcgcccgaccgttaa

SEQ ID NO: 21170 - protein, 334 aa, Muscodor strobelii
  misc_feature: SGI Peptide ID NO. 567161
  misc_feature (2)..(320): NCBI GI: 238503023 Blast Desc: conserved [Aspergillus flavus NRRL3357] gi|220691555|gb|EED47903.1| conserved [Aspergillus flavus NRRL3357]
  misc_feature (6)..(321): NCBI GI: 169768218 Blast Desc: [Aspergillus oryzae RIB40] gi|83766437|dbj|BAE56577.1| protein product [Aspergillus oryzae]
  misc_feature (6)..(329): NCBI GI: 238497506 Blast Desc: N-methyltransferase, [Aspergillus flavus NRRL3357] gi|220693262|gb|EED49607.1| N-methyltransferase, [Aspergillus flavus NRRL3357]
  misc_feature (2)..(252): NCBI GI: 67903214 Blast Desc: AN8594.2 [Aspergillus nidulans FGSC A4] gi|40741438|gb|EAA60628.1| AN8594.2 [Aspergillus nidulans FGSC A4]
  misc_feature (6)..(305): NCBI GI: 94490328 Blast Desc: [Xylaria sp. BCC 1067]
  misc_feature (2)..(252): NCBI GI: 259483194 Blast Desc: TPA: conserved [Aspergillus nidulans FGSC A4]
  misc_feature (7)..(285): NCBI GI: 121717277 Blast Desc: conserved [Aspergillus clavatus NRRL 1] gi|119404218|gb|EAW14635.1| conserved [Aspergillus clavatus NRRL 1]
  misc_feature (2)..(262): NCBI GI: 119481997 Blast Desc: NFIA_090880 [Neosartorya fischeri NRRL 181] gi|119409181|gb|EAW19130.1| conserved [Neosartorya fischeri NRRL 181]
  misc_feature (2)..(330): NCBI GI: 169776339 Blast Desc: [Aspergillus oryzae RIB40] gi|83771371|dbj|BAE61503.1| protein product [Aspergillus oryzae]
  misc_feature (50)..(328): NCBI GI: 116194798 Blast Desc: CHGG_03997 [Chaetomium globosum CBS 148.51] gi|88179910|gb|EAQ87378.1| CHGG_03997 [Chaetomium globosum CBS 148.51]
MSSTLNILDINQEQDLRSSVVGGLNTVPKTLPDLLLWDDAGHELFQQLTKSKSYHGPQADHGIMTDRVDDICEMLGDDGVLIELGAGSIPHTSFLLEELCRRGTRTRYLAHDFCRDRLAQSLWRLNNELSMKGLNELEWMRGVVGTYEQFFEWLSNTDELQRRRVVVIWLGNSLSHVSNAEFSKIIDVLMQSISASQAASSVLLLSVNGCQEAAAMRSSYNSPDGLSLAFVSNALRHANRLLGTDTLDDKLWKPVLRADARGTVVSWAFRLQGEARLVVDGRPVRCVAGEDITLITLSVRGESEISKLLAPTSSQLMETWSHPSLAWSKYAPDR

SEQ ID NO: 21171 - DNA, 248 bp, Muscodor strobelii
  misc_feature: SGI EST ID NO. CUFF.49576.0
  misc_feature: Variant of the nucleotide sequence at SEQ ID NO 21169
cacgaacgcgatatttagctcatgatttctgccgggaccgcctcgcccaaagcctctggcgtctcaacaacgagctatctatgaaaggccttaatgaattagaatggatgcgtggagtcgtcggtacttacgaacaattcttcgagtggctttctaacacggatgaacttcaacggcgtcgcgtcgtggttatttggctaggaaacagtctcagtcatgtttctaatgccgagttctccaagattatc

SEQ ID NO: 21172 - DNA, 1248 bp, Muscodor strobelii
  misc_feature: SGI cDNA ID NO. 567162
  misc_feature: Encodes the peptide sequence at SEQ ID NO 21173
atggaggttgcatcactctccgcctcgacaaatgctggtcatgtcacgagacatttgatcgacacgttccttatcactcatccacatctcgatcatattagcgggttcgttatcaacacagcaggattgcctggggcccggccaaaaaggcttgccggtttgccatcaaccattcaggctttcaaacaacatattttcaacaatgtgatatggccaaacctctccgacgagaacaatggagcagggttggtaacgtacatgcgtctcgttgaaggcgggagtccggcacttggcgaaggagatggaaaaggctatcttgagatcagcgatgggttgagcgtcaagctattttctgttagtcacgggcattgcatcgaaaggcatggacacagaggctcatccgcttcctcccgctacggcagtttcgatgcttcatcgatggcgtctccaagaggtgcgccaggtagtaatgctgcctcgggtccttctcctctatttcgaacctctgctgccggccaagagaaggagtcaatatgtgtgtacgactccagcgcgtatttcattcgtgacaatgccacgggacgagaagtgctcatgtttggtgatgtggagcccgactcgatctccctgtcccctagaaatcttggcatatggcaggaggctgcaccgcgcatcgcaaacggaaatctcgccgcgatctttattgaatgctcgtacgacaattgccagaccgatgaccgtctttttgggcatctcacaccccgctacgtcattcaggaattgaagacccttgctgcagcggtcgagatcgctaagcagtccccctcaaagcttgatgcgactaagaaacgcaaacgcgaatctgaagatgccactcagagagcaaatcgggcatctacacgctcaggcgcagaagaaaatccagtgtctcccaagagtactcgacccaccaagcgaacatcgggactgacagagcagggcgagaccgagacacctcatattactacacccacggctgagttgacccttagggaactggaatcgaagaccgttcctattattcgggccccagaggttacgaacgcactaatagggctgaaagttgtcatcatccatgtcaaggaaaaactcatggatggggaggatcctaagcacacaatactgcgggagcttcaagaacacgagaaagaggcgcagttgggctgcgaattcatcatgtcggacaccggctcgagcttcctcatctag

SEQ ID NO: 21173 - protein, 415 aa, Muscodor strobelii
  misc_feature: SGI Peptide ID NO. 567162
  misc_feature (181)..(264): Pfam Id: PF02112 Pfam Desc: cAMP phosphodiesterases class-II
  misc_feature (20)..(74): Pfam Id: PF02112 Pfam Desc: cAMP phosphodiesterases class-II
  misc_feature (1)..(415): NCBI GI: 256733312 Blast Desc: NECHADRAFT_68732 [Nectria haematococca mpVI 77-13-4]
  misc_feature (1)..(415): NCBI GI: 46124511 Blast Desc: FG06633.1 [Gibberella zeae PH-1]
  misc_feature (1)..(415): NCBI GI: 39972825 Blast Desc: MGG_07707 [Magnaporthe grisea 70-15] gi|145012474|gb|EDJ97128.1| MGG_07707 [Magnaporthe grisea 70-15] gi|260103325|gb|ACX31737.1| low-affinity cAMP phosphodiesterase
  misc_feature (1)..(318): NCBI GI: 116208210 Blast Desc: CHGG_03398 [Chaetomium globosum CBS 148.51] gi|88183995|gb|EAQ91463.1| CHGG_03398 [Chaetomium globosum CBS 148.51]
  misc_feature (1)..(348): NCBI GI: 261354111 Blast Desc: 3',5'-cyclic-nucleotide phosphodiesterase [Verticillium albo-atrum VaMs.102]
  misc_feature (1)..(415): NCBI GI: 171685584 Blast Desc: protein product [Podospora anserina] gi|170942753|emb|CAP68406.1| protein product [Podospora anserina]
  misc_feature (1)..(303): NCBI GI: 164428966 Blast Desc: NCU00237 [Neurospora crassa OR74A] gi|157072356|gb|EAA28472.2| conserved [Neurospora crassa OR74A]
  misc_feature (1)..(415): NCBI GI: 119186463 Blast Desc: CIMG_03279 [Coccidioides immitis RS]
  misc_feature (1)..(415): NCBI GI: 240108562 Blast Desc: cAMP phosphodiesterases class-II family protein [Coccidioides posadasii C735 delta SOWgp]
  misc_feature (1)..(408): NCBI GI: 255941742 Blast Desc: Pc16g13410 [Penicillium chrysogenum Wisconsin 54-1255] gi|211586263|emb|CAP94011.1| Pc16g13410 [Penicillium chrysogenum Wisconsin 54-1255]
  misc_feature (12)..(269): SWISSPROT Homolog: EC 3.1.4.17 3',5'-cyclic-nucleotide phosphodiesterase
MEVASLSASTNAGHVTRHLIDTFLITHPHLDHISGFVINTAGLPGARPKRLAGLPSTIQAFKQHIFNNVIWPNLSDENNGAGLVTYMRLVEGGSPALGEGDGKGYLEISDGLSVKLFSVSHGHCIERHGHRGSSASSRYGSFDASSMASPRGAPGSNAASGPSPLFRTSAAGQEKESICVYDSSAYFIRDNATGREVLMFGDVEPDSISLSPRNLGIWQEAAPRIANGNLAAIFIECSYDNCQTDDRLFGHLTPRYVIQELKTLAAAVEIAKQSPSKLDATKKRKRESEDATQRANRASTRSGAEENPVSPKSTRPTKRTSGLTEQGETETPHITTPTAELTLRELESKTVPIIRAPEVTNALIGLKVVIIHVKEKLMDGEDPKHTILRELQEHEKEAQLGCEFIMSDTGSSFLI

SEQ ID NO: 21174 - DNA, 3046 bp, Muscodor strobelii
  misc_feature: SGI EST ID NO. CUFF.49617.0
  misc_feature: Variant of the nucleotide sequence at SEQ ID NO 21172
gggagataggaattgaagctaattagcgacacggcggagatcgaacttggcttcaagctcacccaacgccaggcggttgcactgtacctgcaggccgggagcgccgcatcggctaggaaaagggaactccacatcgaatgcggcgggccacagcggactccccgagaggacgttcagaccccgtgcaattcctggtgcgcgcacaatcattgggaactggaagtcatctgagtggacataggataagcgatcaacgcattatgagcagctgtacgcaagcgactaccctggttccggacagacccgtcgagaaatctgtctattatactctgagagcgcgcctatgtaagacgatggtcaccgaaagtggagagttcgcagttgagcagagacatacgtagtcctgtcggccaagccatcatagacgaacgttgcgacgaacatggagcagaggcaaaaaagcggcgtctggtttgcaaatgctcaacgtcgccacgctgcacagcatgacgggcgactaaccttaaatgcgagcttccccaggtttcgtaaccctgccagagtcgtatctgacctcgccgagggagtgttcaattcgtgctatgctctcggcgtgccattcattcttctccgccatccctttgtgcttcctttattatcgttccgcacgcgacgacgagacacggtctgtgcgcagggctggtggaacaaatcacttaggaaagtgtagcgagtaaagattgagaatgagttaggagaatccgaatacttgaagattggagaatactgtgttgctgtgtgtcagactaaggacatcctgaagagaagaacatcgagagaagagtgtcacgtggattgaccttgatcttggggctttgctgggttcatcatccctgagcgataggcggtgctgtctggagatcgagtccctgagttcccgtcaaccctagcgcgagctggcctcactggcgaagtgtccgggaaacagccactaggccacatacaacaacccgcatcttccaacaccattcaagctgccattttcccattgaaacattgttctggcatcccaagtatcgactcgcgtatttccaaaggtgccgacctaccatcacaatttcgaaaatcctcgctctctccctagcacccgcagcacgcagtcgagtgcaggtatagaggggcggccagtggaccgaccgtggacactattggcacacaccacaggcgagaggcggatggaggaaagccttcaagaagagggcgcaaaggcgcctgcaattcaggtcatcgttctcggtgcaggaggcggacccttagagcataatgtcacttcgttgcttgtgcgatcactgaatacaggatgggcgcggggctctgtagtcgcattggatgcaggcgtgcatctgtcatcaattaccagaatccttgaagaaacccaaccggacggtcttggtaatacagtcgcgctaccacacatcttggaaactggcccgttcgctgggatggaggttgcatcactctccgcctcgacaaatgctggtcatgtcacgagacatttgatcgacacgttccttatcactcatccacatctcgatcatattagcgggttcgttatcaacacagcaggattgcctggggcccggccaaaaaggcttgccggtttgccatcaaccattcaggctttcaaacaacatattttcaacaatgtgatatggccaaacctctccgacgagaacaatggagcagggttggtaacgtacatgcgtctcgttgaaggcgggagtccggcacttggcgaaggagatggaaaaggctatcttgagatcagcgatgggttgagcgtcaagctattttctgttagtcacgggcattgcatcgaaaggcatggacacagaggctcatccgcttcctcccgctacggcagtttcgatgcttcatcgatggcgtctccaagaggtgcgccaggtagtaatgctgcctcgggtccttctcctctatttcgaacctctgctgccggccaagagaaggagtcaatatgtgtgtacgactccagcgcgtatttcattcgtgacaatgccacgggacgagaagtgctcatgtttggtgatgtggagcccgactcgatctccctgtcccctagaaatcttggcatatggcaggaggctgcaccgcgcatcgcaaacggaaatctcgccgcgatctttattgaatgctcgtacgacaattgccagaccgatgaccgtctttttgggcatctcacaccccgctacgtcattcaggaattgaagacccttgctgcagcggtcgagatcgctaagcagtccccctcaaagcttgatgcgactaagaaacgcaaacgcgaatctgaagatgccactcagagagcaaatcgggcatctacacgctcaggcgcagaagaaaatccagtgtctcccaagagtactcgacccaccaagcgaacatcgggactgacagagcagggcgagaccgagacacctcatattactacacccacggctgagttgacccttagggaactggaatcgaagaccgttcctattattcgggccccagaggttacgaacgcactaatagggctgaaagttgtcatcatccatgtcaaggaaaaactcatggatggggaggatcctaagcacacaatactgcgggagcttcaagaacacgagaaagaggcgcagttgggctgcgaattcatcatgtcggacaccggctcgagcttcctcatctagaggatgttataccgtttgcacattgctgtactataatgagctatgatggttggagttcgttgctttatgctagataccacgctttgagggaaatgcagtataaatgacagttgactcatcagggtatatatgaggccggagtcgaagcttctatcgagctatgtcttatctcggtagctaacatataaccccaagacattgtaaatgttcacatgttctattccgcctgcataaacaatgctcaccaggtctgatcgttgatcatatgatcaattactggtgttaatgtcccaaag

SEQ ID NO: 21175 - DNA, 747 bp, Muscodor strobelii
  misc_feature: SGI cDNA ID NO. 567163
  misc_feature: Elevated expression when VOC is produced
  misc_feature: Encodes the peptide sequence at SEQ ID NO 21176
atgatatccctcgtagccttcgacctggacgggacgctcgccgagagcaagcaagcactcaaggataccatgagtgctgccattgctgaactactatcggtggcgcatgtagcagtgatatctggaggcgactggccacaatttcagaagcaagttgcaagccgtctcggctcagacgccgacctcagcaaactgtggctcatgccgacaaccggaactaagctctacactcgcgagaccggggactgggcgcctgtctatgcggatctgttcagcgaggagaagcgcaaagagatcgttgaggcattcaatgcatcgctagatgcaaccggattcacgcctgagcagacgtggggcgagcggattgaggaccgtggcagccagattacgttctctgctctgggccaagaggctccaatccatgcgaagaagacgtgggatccagactttgcgaagcgaaaagtgattcaggcagacttgcggaagaggcttcctggactctcaattaacatgggtggtgctacatcaattgacatcaccaaagagggggtcgacaaggggtatgcgctgaagagactcgcttcagtatctggtataccacttgaacagatgatgttcattggggacgcaattttcccgggggggaatgattaccccgccaaggaggtcggtgttaagacactgctggtgcgggatccagatgatacgctgacggccatcgccgctattgtcaattgtctcaagtag

SEQ ID NO: 21176 - protein, 248 aa, Muscodor strobelii
  misc_feature: SGI Peptide ID NO. 567163
  misc_feature (147)..(210): Pfam Id: PF08282 Pfam Desc: haloacid dehalogenase-like hydrolase
  misc_feature (1)..(247): NCBI GI: 46115850 Blast Desc: FG03767.1 [Gibberella zeae PH-1]
  misc_feature (1)..(247): NCBI GI: 238844125 Blast Desc: HAD-superfamily hydrolase subfamily IIB [Microsporum canis CBS 113480]
  misc_feature (1)..(248): NCBI GI: 94495498 Blast Desc: SKA58_05600 [Sphingomonas sp. SKA58] gi|94424886|gb|EAT09907.1| SKA58_05600 [Sphingomonas sp. SKA58]
  misc_feature (1)..(247): NCBI GI: 103488049 Blast Desc: HAD family hydrolase [Sphingopyxis alaskensis RB2256] gi|98978126|gb|ABF54277.1| HAD-superfamily hydrolase subfamily IIB [Sphingopyxis alaskensis RB2256]
  misc_feature (1)..(247): NCBI GI: 94497153 Blast Desc: SKA58_18970 [Sphingomonas sp. SKA58] gi|58422642|gb|AAW73217.1| PmmC [Sphingobium chungbukense] gi|94423525|gb|EAT08553.1| SKA58_18970 [Sphingomonas sp. SKA58]
  misc_feature (1)..(247): NCBI GI: 113473738 Blast Desc: pCAR3_060 [Sphingomonas sp. KA1] gi|112821418|dbj|BAF03289.1| [Sphingomonas sp. KA1]
  misc_feature (1)..(247): NCBI GI: 92109505 Blast Desc: HAD family hydrolase [Nitrobacter hamburgensis X14] gi|91802587|gb|ABE64960.1| HAD-superfamily hydrolase subfamily IIB [Nitrobacter hamburgensis X14]
  misc_feature (1)..(247): NCBI GI: 94497138 Blast Desc: SKA58_18895 [Sphingomonas sp. SKA58] gi|94423510|gb|EAT08538.1| SKA58_18895 [Sphingomonas sp. SKA58]
  misc_feature (2)..(247): NCBI GI: 225351864 Blast Desc: BIFPSEUDO_03466 [Bifidobacterium pseudocatenulatum DSM 20438] gi|225157111|gb|EEG70450.1| BIFPSEUDO_03466 [Bifidobacterium pseudocatenulatum DSM 20438]
  misc_feature (4)..(236): NCBI GI: 256396800 Blast Desc: HAD-superfamily hydrolase, subfamily IIB [Catenulispora acidiphila DSM 44928] gi|256363026|gb|ACU76523.1| HAD-superfamily hydrolase, subfamily IIB [Catenulispora DSM
  misc_feature (1)..(218): SWISSPROT Homolog: EC 5.4.2.8 Phosphomannomutase
  misc_feature: Useful for introducing or modulating the production of volatile compounds
MISLVAFDLDGTLAESKQALKDTMSAAIAELLSVAHVAVISGGDWPQFQKQVASRLGSDADLSKLWLMPTTGTKLYTRETGDWAPVYADLFSEEKRKEIVEAFNASLDATGFTPEQTWGERIEDRGSQITFSALGQEAPIHAKKTWDPDFAKRKVIQADLRKRLPGLSINMGGATSIDITKEGVDKGYALKRLASVSGIPLEQMMFIGDAIFPGGNDYPAKEVGVKTLLVRDPDDTLTAIAAIVNCLK

SEQ ID NO: 21177 - DNA, 1122 bp, Muscodor strobelii
  misc_feature: SGI EST ID NO. CUFF.49673.0
  misc_feature: Variant of the nucleotide sequence at SEQ ID NO 21175
ctcagggccaagccagcacacagcacaggcactacagcggacatcaaacatcttgttaagcggattcacaagcagtcaatcgagaacagggaccataaatgcaacaaattgtctcaccatgatatccctcgtagccttcgacctggacgggacgctcgccgagagcaagcaagcactcaaggataccatgagtgctgccattgctgaactactatcggtggcgcatgtagcagtgatatctggaggcgactggccacaatttcagaagcaagttgcaagccgtctcggctcagacgccgacctcagcaaactgtggctcatgccgacaaccggaactaagctctacactcgcgagaccggggactgggcgcctgtctatgcggatctgttcagcgaggagaagcgcaaagagatcgttgaggcattcaatgcatcgctagatgcaaccggattcacgcctgagcagacgtggggcgagcggattgaggaccgtggcagccagattacgttctctgctctgggccaagaggctccaatccatgcgaagaagacgtgggatccagactttgcgaagcgaaaagtgattcaggcagacttgcggaagaggcttcctggactctcaattaacatgggtggtgctacatcaattgacatcaccaaagagggggtcgacaaggggtatgcgctgaagagactcgcttcagtatctggtataccacttgaacagatgatgttcattggggacgcaattttcccgggggggaatgattaccccgccaaggaggtcggtgttaagacactgctggtgcgggatccagatgatacgctgacggccatcgccgctattgtcaattgtctcaagtagcaagaacaacacacggatgttgttttaaaggatggtagactaacagctgcctggattgacacgtcaggcgaagcgcatcgaaaggtttgcttcagatgatatgccaaatgaggaaagaaggggatgagcaaagcaacgcctatttgttctttaccagcgatgcgttaaagatacgtagtatagaccacaacccataacaatcaatatctaggcgataagtcgtcatatggtggaaggatgaagccgtctcatccgag

SEQ ID NO: 21178 - DNA, 2580 bp, Muscodor strobelii
  misc_feature: SGI cDNA ID NO. 567164
  misc_feature: Encodes the peptide sequence at SEQ ID NO 21179
atggcggacaacactggtgctggcgaacagacgaagggaaacttgatggcaagactggctgctcgcacgaggacgaagggtaggaatccgcgatcgtccaagaagccacgccgcctcaatattctacacgacgtcactgtctccatccagaatcgccgaggacgggacaatctaagcgtgacggtcccgggccaaggatctcggaccgcttcatgccgtcccccggacaccagaaatcgacacggccatttccctgatgattcttccgatcatgcttctgatacgtcaattgaaaatcttcgttgccttaccctctcgactcctgatctgtctcctggcatgtctcctgacgagtccttccactctgccaactcagatgagccgctcactccccgaactgtcgatcctgctagcgacgaagacaagcccaagggtatttctgttcatgatgttgtccctctcgacgcagtgctgaattataatgaagatatccatgcgtccagcatcccttcagagaacatcactacggatatgcatgacgggacctcttcacacaagcctgccgatgctcaaaacgacgacaatcagtctgacgggtcttctgacaaatcttctagctccgacgaggacgatggcagtgcctttgataaggagcctcgccacaataatgaggaagagcccctcagtcccactagcttcttcatagaaggctatgaggacaagatcgggaactcttctgctcattctacaccacccaaagaccaacaaatccacagcgttgaagacagccatactcatggctctttcaccgatgagaccgctgccgacagggacactattgtctcgttgatcaatccttccgactatgtggtcgttgaggatttgccagacagcttctctaacgtacccgccacctcttacgaggacgacaatgcacttgctaccgagcagtctggcactgagacccaggaactatctctcgctcccctccctatccctccatccgtcgtcggagagaagatccggttcgacctcgctggtctcggcctgaaagatgtcgatcattccaagatccgctgggattttccacgatcttcctcaagactcgagaatctgccgccggaactgaggctcataatcctgaaaagtatgccggatctacagacactgcgctcgttgattcatgcctctcctcgcatgcatacggactatacgggaagatttgatcgtcccagtatcctggcggcttgtctccagcgcgacatgtccgactatttccccgacatctatgcagtcttgatgtcgcgtacggatgagctcggagagaagatagacactgatgagctggaagagtttctctccaagagatacagggcttggcttaatccctcagattccctcgtcagcaaggccatcccgcttcccgataatgtcagctcactccgcatagagcagcagctctggatattccggttccatctaaccatcgtcctgccgctaactcgtcgatattgccactgggcacttgacaacatcaagacaacgatgtcggctctggacaccaagtcgagagagtcacaagctgcgtgtcttatgcaaagtcgagatcgatgctcgtccacaatgaccgcatcgctacataccctacccgacatcatgatgagcagaagtgaacagattcgcgtcttccaggcgatctatcgcacccaggtgttcaatcagctttggggccagcctgcgccgaatggagagggtggcggtgctcaccttggcgattacaatgaaggatggacaaacgatgagttctttggtctgttcgcaccttgggatgccgacgccatcgctaccgttgatttgttcattcgagacacatacactagcatcttcagagatgtccaggaacacttttcgccttcaaaccctaggtttaaggacgccaaactcatacatcaggaagggtacgatgaactcgacggtacttgggtagacggatatgactacccggaaggctcagcagatcttcgcttcgagggtcgtgagagccttgcgaaccacttttatgttttcatgaatggcactgtctcgcgtgggttagatactctagtgcagctcttgcaatgcaaagaccacgaagagctctgcattgttgcgcagtactgtctcgtccctgaagatcatactgacccaatcatgggcgatgtcctccagcgagaatggcaaggcttggatagacgtatcactacacttcttgagcgcctccgccgccggcgtccgctacagctcgatgctgcagactcaaaagactacgccatgatcaaacaaagttcactagactttgtgggtgattctcgaccacgacatgatccaccgctcggctgggtggcattgtggggtggaaagtacgtcaatgtttggggtgagtatgtacccaaggaggttcagcgaatgggttatgtcatctgggacaagacacgatggactgcactaggggcagagggtatcgttgctaagcaatgggagaccgcagaatcagctctgaaaaatgagctgaaggacatgctcggctggactcccttctag

SEQ ID NO: 21179 - protein, 859 aa, Muscodor strobelii
  misc_feature: SGI Peptide ID NO. 567164
  misc_feature (369)..(840): NCBI GI: 238504638 Blast Desc: conserved [Aspergillus flavus NRRL3357] gi|220691021|gb|EED47370.1| conserved [Aspergillus flavus NRRL3357]
  misc_feature (361)..(840): NCBI GI: 169764175 Blast Desc: [Aspergillus oryzae RIB40] gi|83764413|dbj|BAE54557.1| protein product [Aspergillus oryzae]
  misc_feature (300)..(839): NCBI GI: 145228595 Blast Desc: An01g01670 [Aspergillus niger] gi|134054697|emb|CAK43538.1| protein product [Aspergillus niger]
  misc_feature (366)..(840): NCBI GI: 256725269 Blast Desc: NECHADRAFT_82982 [Nectria haematococca mpVI 77-13-4]
  misc_feature (369)..(820): NCBI GI: 115449853 Blast Desc: [Aspergillus terreus NIH2624] gi|114187662|gb|EAU29362.1| [Aspergillus terreus NIH2624]
  misc_feature (364)..(820): NCBI GI: 116201281 Blast Desc: CHGG_08525 [Chaetomium globosum CBS 148.51] gi|88177043|gb|EAQ84511.1| CHGG_08525 [Chaetomium globosum CBS 148.51]
  misc_feature (367)..(813): NCBI GI: 256727223 Blast Desc: NECHADRAFT_75869 [Nectria haematococca mpVI 77-13-4]
  misc_feature (400)..(586): NCBI GI: 116192307 Blast Desc: [Chaetomium globosum CBS 148.51] gi|88181784|gb|EAQ89252.1| [Chaetomium globosum CBS 148.51]
  misc_feature (763)..(858): NCBI GI: 116192307 Blast Desc: [Chaetomium globosum CBS 148.51] gi|88181784|gb|EAQ89252.1| [Chaetomium globosum CBS 148.51]
  misc_feature (369)..(653): NCBI GI: 242760006 Blast Desc: TSTA_060120 [Talaromyces stipitatus ATCC 10500] gi|218723097|gb|EED22514.1| TSTA_060120 [Talaromyces stipitatus ATCC 10500]
MADNTGAGEQTKGNLMARLAARTRTKGRNPRSSKKPRRLNILHDVTVSIQNRRGRDNLSVTVPGQGSRTASCRPPDTRNRHGHFPDDSSDHASDTSIENLRCLTLSTPDLSPGMSPDESFHSANSDEPLTPRTVDPASDEDKPKGISVHDVVPLDAVLNYNEDIHASSIPSENITTDMHDGTSSHKPADAQNDDNQSDGSSDKSSSSDEDDGSAFDKEPRHNNEEEPLSPTSFFIEGYEDKIGNSSAHSTPPKDQQIHSVEDSHTHGSFTDETAADRDTIVSLINPSDYVVVEDLPDSFSNVPATSYEDDNALATEQSGTETQELSLAPLPIPPSVVGEKIRFDLAGLGLKDVDHSKIRWDFPRSSSRLENLPPELRLIILKSMPDLQTLRSLIHASPRMHTDYTGRFDRPSILAACLQRDMSDYFPDIYAVLMSRTDELGEKIDTDELEEFLSKRYRAWLNPSDSLVSKAIPLPDNVSSLRIEQQLWIFRFHLTIVLPLTRRYCHWALDNIKTTMSALDTKSRESQAACLMQSRDRCSSTMTASLHTLPDIMMSRSEQIRVFQAIYRTQVFNQLWGQPAPNGEGGGAHLGDYNEGWTNDEFFGLFAPWDADAIATVDLFIRDTYTSIFRDVQEHFSPSNPRFKDAKLIHQEGYDELDGTWVDGYDYPEGSADLRFEGRESLANHFYVFMNGTVSRGLDTLVQLLQCKDHEELCIVAQYCLVPEDHTDPIMGDVLQREWQGLDRRITTLLERLRRRRPLQLDAADSKDYAMIKQSSLDFVGDSRPRHDPPLGWVALWGGKYVNVWGEYVPKEVQRMGYVIWDKTRWTALGAEGIVAKQWETAESALKNELKDMLGWTPF

SEQ ID NO: 21180 - DNA, 3497 bp, Muscodor strobelii
  misc_feature: SGI EST ID NO. CUFF.49718.1
  misc_feature: Variant of the nucleotide sequence at SEQ ID NO 21178
gtcgggagagccattatgcactgtccaagatactgtggctccggcagtgaatcaccgggggagagtggggcgccgtggacctgacgcatggaccctcaaatggcctctgacctattttcgacatttagtggacaatgaccttgcgcaacaatggaacaataactgtacacagcgactataacctccgggctcacacttcatcaaggcgaactcgctcatgaggggcaaacacaagtcatacaacttcgacatcgcggggcgaactttaataagcacccttatgcccttcctcatctaactgctctcgcactccagccgcacctttgctctttctcttagacggacttgcgttacagacagaggcacctgcagcaggacatctcgtgacctgcgcttcttctacatccgcaccttccttccatctcgtacattcaattacttattaactgaatctgcccaacgcgaccgccttgagacagcaacaggcactgggtacctactgcctgaaaccaacacaaagcgggacactcactcaaacctcttctcctgcatcccacacttccaccattcctgcccttctgcaacaacagaagtttactttcacacgcgcacctacgtatctcggtccatatatctacacctagtctcgactgggtcctcattctgtccagcccagctacatctctcattccactgtcaccactccatctgctcagcatggcggacaacactggtgctggcgaacagacgaagggaaacttgatggcaagactggctgctcgcacgaggacgaagggtaggaatccgcgatcgtccaagaagccacgccgcctcaatattctacacgacgtcactgtctccatccagaatcgccgaggacgggacaatctaagcgtgacggtcccgggccaaggatctcggaccgcttcatgccgtcccccggacaccagaaatcgacacggccatttccctgatgattcttccgatcatgcttctgatacgtcaattgaaaatcttcgttgccttaccctctcgactcctgatctgtctcctggcatgtctcctgacgagtccttccactctgccaactcagatgagccgctcactccccgaactgtcgatcctgctagcgacgaagacaagcccaagggtatttctgttcatgatgttgtccctctcgacgcagtgctgaattataatgaagatatccatgcgtccagcatcccttcagagaacatcactacggatatgcatgacgggacctcttcacacaagcctgccgatgctcaaaacgacgacaatcagtctgacgggtcttctgacaaatcttctagctccgacgaggacgatggcagtgcctttgataaggagcctcgccacaataatgaggaagagcccctcagtcccactagcttcttcatagaaggctatgaggacaagatcgggaactcttctgctcattctacaccacccaaagaccaacaaatccacagcgttgaagacagccatactcatggctctttcaccgatgagaccgctgccgacagggacactattgtctcgttgatcaatccttccgactatgtggtcgttgaggatttgccagacagcttctctaacgtacccgccacctcttacgaggacgacaatgcacttgctaccgagcagtctggcactgagacccaggaactatctctcgctcccctccctatccctccatccgtcgtcggagagaagatccggttcgacctcgctggtctcggcctgaaagatgtcgatcattccaagatccgctgggattttccacgatcttcctcaagactcgagaatctgccgccggaactgaggctcataatcctgaaaagtatgccggatctacagacactgcgctcgttgattcatgcctctcctcgcatgcatacggactatacgggaagatttgatcgtcccagtatcctggcggcttgtctccagcgcgacatgtccgactatttccccgacatctatgcagtcttgatgtcgcgtacggatgagctcggagagaagatagacactgatgagctggaagagtttctctccaagagatacagggcttggcttaatccctcagattccctcgtcagcaaggccatcccgcttcccgataatgtcagctcactccgcatagagcagcagctctggatattccggttccatctaaccatcgtcctgccgctaactcgtcgatattgccactgggcacttgacaacatcaagacaacgatgtcggctctggacaccaagtcgagagagtcacaagctgcgtgtcttatgcaaagtcgagatcgatgctcgtccacaatgaccgcatcgctacataccctacccgacatcatgatgagcagaagtgaacagattcgcgtcttccaggcgatctatcgcacccaggtgttcaatcagctttggggccagcctgcgccgaatggagagggtggcggtgctcaccttggcgattacaatgaaggatggacaaacgatgagttctttggtctgttcgcaccttgggatgccgacgccatcgctaccgttgatttgttcattcgagacacatacactagcatcttcagagatgtccaggaacacttttcgccttcaaaccctaggtttaaggacgccaaactcatacatcaggaagggtacgatgaactcgacggtacttgggtagacggatatgactacccggaaggctcagcagatcttcgcttcgagggtcgtgagagccttgcgaaccacttttatgttttcatgaatggcactgtctcgcgtgggttagatactctagtgcagctcttgcaatgcaaagaccacgaagagctctgcattgttgcgcagtactgtctcgtccctgaagatcatactgacccaatcatgggcgatgtcctccagcgagaatggcaaggcttggatagacgtatcactacacttcttgagcgcctccgccgccggcgtccgctacagctcgatgctgcagactcaaaagactacgccatgatcaaacaaagttcactagactttgtgggtgattctcgaccacgacatgatccaccgctcggctgggtggcattgtggggtggaaagtacgtcaatgtttggggtgagtatgtacccaaggaggttcagcgaatgggttatgtcatctgggacaagacacgatggactgcactaggggcagagggtatcgttgctaagcaatgggagaccgcagaatcagctctgaaaaatgagctgaaggacatgctcggctggactcccttctagtattagacagcagacagagtgctagtagcccgctaggtattcgcgagtatgcttaggtgctttacatttgtcttcggtctttgcaccgcccaatatacattgtttatactctcgatatagtgcattcttgtcgttcgcatatcgtgacttcttactttgactgttcaatggattgatcgccgagatcgcttgtttatttg

SEQ ID NO: 21181 - DNA, 1854 bp, Muscodor strobelii
  misc_feature: SGI cDNA ID NO. 567165
  misc_feature: Encodes the peptide sequence at SEQ ID NO 21182
atgtcggttccacgaaatcgtccatatcgtcaccgaggagttttcattcctttccaggcacaacctggcaatgaatggtctgaagatgacactattcaacaagatggattcattttcatccgtaacgtacaacgtgacctcagttgcatccagtccataggaactggagatatcttgtataacaagatactaagaccggatgagattcgcggagaggatgcgctacctgaggaactacggatctccactgccgataatgtggaaggacgactgctgagaccacttatggttcgaggtgctctacgaacttatttcaacgaattagtcctttggcagctgttagggaacggcacctatagcttgtatctaagaggttacaatggtggagacttggagagcctcttcagattgtataaagcaaataaccgtcccgtcccagagcacttcatttggcacgttgtcttggcattgctcgaggcagtcgtatacctgcaaaccgggatccgccctggcacagatgacgaaccgatggaaaattgggtcccgatctatcaacgcgacttggcgactaataacgtcttcatccattatccgcatcaagatcaagatgaatcggatgcgggctttccgagcagtgctttccccgagattatcctcggcgattttggttacggttgcttggaaggcgataacgttgacgatatcggcggcgggatgtggaatcgaaacgattacgacacttggcaagacacctaccccattttcgtaatggcaaaacgattatgccttgcaacctacgagcccgaccctctcgaagatttcccgtacagcactgcgaacgacgccatcaacgatcacctggcgccgtatgagactccatactctaacgaactgattaattttgtcggctacatggatagaaacccaccagacgatgatgttggcactgtgccggacttaccctcgctgccagacatagacacgattcgaaatacagtcattccagaagcacggacaatggttcgtcgagaattagatgtttcttggaccaaaccaaaccgtttcatgccctacgagtggatggatgtagcagatgctcctcaagatccacctgaaggtcctccggagaaccctgtcgaggaggaccagcccccggaggaagaacctgaacaagaagaacctgaacaggaggaacctgaacaggaggaacctgaacaggaggaacctgaaaatgatggtgaagctgaggaagacgatgagtcagagggagaccccctgaatgacccgatacaagtagaacaggcatacagacggcataacaggtcgcaattgaatgggcttaaacggctggaggcggagtttcctgcagtgcggccaccgcatgaggtgagaatgcttcagttcaacttgccccgagtatacgcgatcaaacctcttcgcgatccgcctgcgccgcctcctccagactcaccacccgcgactcctcctccacctccaccgccacctggaccacccggaggactaccgcctgggggactaccaccaccgcctgggggacaccccgctcccgctcccgctccagcactagctcctgtccccattgccgctcaaatccaagctataatacagggtgtgattcaggctctgccgccgccgcctgcaccgcctccgcctcctgctcctggaggcccgggaggaagaggtgggggtgctggtgccggaagggggcacgaggtgcacgaggtgcacgaggacgaggccgtggtggaaggactggcggggttggaagtgcaaaccaacctccacgaagaagtcatagactggctggaactagggtcaattatgaagaggtaa

SEQ ID NO: 21182 - protein, 617 aa, Muscodor strobelii
  misc_feature: SGI Peptide ID NO. 567165
  misc_feature (120)..(306): NCBI GI: 116197487 Blast Desc: CHGG_06899 [Chaetomium globosum CBS 148.51] gi|88178178|gb|EAQ85646.1| CHGG_06899 [Chaetomium globosum CBS 148.51]
MSVPRNRPYRHRGVFIPFQAQPGNEWSEDDTIQQDGFIFIRNVQRDLSCIQSIGTGDILYNKILRPDEIRGEDALPEELRISTADNVEGRLLRPLMVRGALRTYFNELVLWQLLGNGTYSLYLRGYNGGDLESLFRLYKANNRPVPEHFIWHVVLALLEAVVYLQTGIRPGTDDEPMENWVPIYQRDLATNNVFIHYPHQDQDESDAGFPSSAFPEIILGDFGYGCLEGDNVDDIGGGMWNRNDYDTWQDTYPIFVMAKRLCLATYEPDPLEDFPYSTANDAINDHLAPYETPYSNELINFVGYMDRNPPDDDVGTVPDLPSLPDIDTIRNTVIPEARTMVRRELDVSWTKPNRFMPYEWMDVADAPQDPPEGPPENPVEEDQPPEEEPEQEEPEQEEPEQEEPEQEEPENDGEAEEDDESEGDPLNDPIQVEQAYRRHNRSQLNGLKRLEAEFPAVRPPHEVRMLQFNLPRVYAIKPLRDPPAPPPPDSPPATPPPPPPPPGPPGGLPPGGLPPPPGGHPAPAPAPALAPVPIAAQIQAIIQGVIQALPPPPAPPPPPAPGGPGGRGGGAGAGRGHEVHEVHEDEAVVEGLAGLEVQTNLHEEVIDWLELGSIMKR

SEQ ID NO: 21183 - DNA, 591 bp, Muscodor strobelii
  misc_feature: SGI cDNA ID NO. 567166
  misc_feature: Encodes the peptide sequence at SEQ ID NO 21184
atggcagcccctcgccccaccaatgtctcgactctgtcgatagattcgtacctggggacgttcgactcaccggaggatgaccagtttcttgagttcctccgagttaccaaggtcgctgacaacgtgagcaccgaatttatcgccgaggctcgaaagatcgagtctcacatagccaagatacgcacgcagaacaacaccccaggcactaacttcaacttcgtcggcgaccaacaaatgtaccacgatcggtataaagccgctgagcaaccgatgaagacgctccgtgatgaggcgaagacggctttcgccgaggcaaaatacaacctagactctgaagaggcgcacgaccacgccatgatgaagctccaagcttggttcgacgctggtatcgcagccgcaatcgcacggctcgattttatgcgccggtacccaaatacctatactggcccaggacacatgggtcacatgaagacggcccaaaaccacctaaacgctgctaagagggcttatcgcaatatcgccgttcagatggagaggcaccagcgaaccaccgtgtcgaagttcatggacatgttcgggtgggacgattga

SEQ ID NO: 21184 - protein, 196 aa, Muscodor strobelii
  misc_feature: SGI Peptide ID NO. 567166
MAAPRPTNVSTLSIDSYLGTFDSPEDDQFLEFLRVTKVADNVSTEFIAEARKIESHIAKIRTQNNTPGTNFNFVGDQQMYHDRYKAAEQPMKTLRDEAKTAFAEAKYNLDSEEAHDHAMMKLQAWFDAGIAAAIARLDFMRRYPNTYTGPGHMGHMKTAQNHLNAAKRAYRNIAVQMERHQRTTVSKFMDMFGWDD

SEQ ID NO: 21185 - DNA, 693 bp, Muscodor strobelii
  misc_feature: SGI cDNA ID NO. 567167
  misc_feature: Encodes the peptide sequence at SEQ ID NO 21186
atgtcttcctcggtctcttccacgtcatcgactctctcccgcgactccatcgaagccattctccccgccaatcttcacaagacgtttgatgattttgccttgctctacggcggccccctcagcaccggcagatccttgctgtcggaacgtaaacatcaatctcatcgcagcaagaagcgcgaggcggccggttcttctcgcgacaacggttcttggcatccgcgaggtgcccgcaagcgcgcccaagtcaactaccatgtcctcgagcaaggcgccaaggagaagcgcgacgaaattgtcgagatcgagaaagtggctgccgaaagactcgacagcgctcagacactccacgacaattgcagcaacaaaggcttcgaccgagacgacctagaagaccttcttagcctttgccagtcttggcttcgctactccatccgggctgccaaagccagactcgagttcaccgagacctatccatatgcttgggatggttcgcaagagaagggtcaccgcaacggcatcaagcatgtcatccaattggcagatggagccatcatcaagatgggattactccagaaagagcttaagagcctgacgaagaaggagaagaagaatgtgttggctgagatcggagagatgattgagccggacgagggagatgaggaggacgagcatgagtacgttgtggactga

SEQ ID NO: 21186 - protein, 230 aa, Muscodor strobelii
  misc_feature: SGI Peptide ID NO. 567167
MSSSVSSTSSTLSRDSIEAILPANLHKTFDDFALLYGGPLSTGRSLLSERKHQSHRSKKREAAGSSRDNGSWHPRGARKRAQVNYHVLEQGAKEKRDEIVEIEKVAAERLDSAQTLHDNCSNKGFDRDDLEDLLSLCQSWLRYSIRAAKARLEFTETYPYAWDGSQEKGHRNGIKHVIQLADGAIIKMGLLQKELKSLTKKEKKNVLAEIGEMIEPDEGDEEDEHEYVVD

SEQ ID NO: 21187 - DNA, 1824 bp, Muscodor strobelii
  misc_feature: SGI cDNA ID NO. 567168
  misc_feature: Encodes the peptide sequence at SEQ ID NO 21188
atgcccaccatcacctgcaacaagtatgatctcttcgaggcactaggtcagagattcacaaccgaggagttcgaggagctatgcttcgacttcggcatcgagctggacgaggacacggagaaggatgagcggcccgtcgtcaacggcgtccaggcgccccccgagctcaagatcgagatccccgccaaccgctacgacatgctctgcgaggagggcatcgccctcatgctcaacatcttccgccagcgccagcccgccccggccttcaagctcgcccagcccgccgacggcaccctccacaccatcaccgtccacgagagcaccgcccacgtccggcccctcgtcgccggcgccatcctgcgcaacgtccgcttcacccagaaggcctacgactccttcatcagcctgcaggacaagctgcaccagaacctcgcccgccagcgcaccctcgtctccatcggcacccacgacctcgacaccctcaagggccccttcacctacgaggccgccaagccccacgacttcagcttcgtgcccctcaaccagacccagagcatgaggggcgaggagatgatggccttctacgacaaggacaggcacctgggcaggtatctacacatcatcaaggacgcgcccgtctaccctctcatctacgacgccaaccgcgtcgtctgctccatgccccccatcatcaacggcgaccactccaagatctcgctcgacaccaagaacgtcttcatagaagtcaccgccaccgacgagacaaagctcgacatcgtcatcaacatgatggtcaccatgttctccggctactgcaaggagcccttcgccgtcgagcccgtcaagatcatctcagaccacaaccagcagaccaggataacgccaaacctcaaccccagggaacacagcgtcgaggtggactatctgaacgcttgtctggggctgtccgagtcgccagagagtattagcaagctgctctccaagatggctctcagtgccaagccctcgccaaaggacgcaaacatggtcgatatcctgataccgccgacgagagccgacatcctacagaggtgtgatatcatggaggatctcggtatcgcctacggtttcaacaagctcccccgcatgaacgtcaacaagacggtcggtgctcccctaaatatcaacaagctcgcagacatcatccgcactgagtctggcatggcaggctggaccgaagtcatgcctctaattctctgcagtcacgacgagaactttgcttggctaaaccggaaagacgacggcaagacttgcgttcgcctcgagaaccccaagactgccgaataccagattgtgcggacctcactgctccccggtctattgaagactatccgtgagaacaagagacacagtgtacccatgaagatcttcgagacgtctgacgtcgtcttcaagaatgaaactctcgagcggagagcccggaacgagcgacatttctgcgccgccttctacggcaagacgagcgggttcgaggttgtccacggcttactcgaccgcatcatgcttatgctgcgacaggccttcatcgcgcacgagggtggtctcgagggcaaagaagtacagtttgacgtcaaggagaaccaaacgaagcgtgatggatactggcttgagcctatcgacgagccgaccttctttgcaggacgagccgccgccatctacgtcagattggagggcaaggagagacggatcggagagtttggcatactacatcccactgtgctcgacaacttcgagctcaagtatcccgtcagcacactagaggtcaatttggaggttttcttatag

SEQ ID NO: 21188 - protein, 607 aa, Muscodor strobelii
  misc_feature: SGI Peptide ID NO. 567168
  misc_feature (111)..(273): Pfam Id: PF03483 Pfam Desc: B3/4 domain
  misc_feature (299)..(370): Pfam Id: PF03484 Pfam Desc: tRNA synthetase B5 domain
  misc_feature (212)..(273): Pfam Id: PF03483 Pfam Desc: B3/4 domain
  misc_feature (1)..(607): NCBI GI: 146419612 Blast Desc: PGUG_01438 [Pichia guilliermondii ATCC 6260] gi|146389182|gb|EDK37340.1| PGUG_01438 [Pichia guilliermondii ATCC 6260]
  misc_feature (1)..(607): NCBI GI: 50553754 Blast Desc: YALI0E22979p [Yarrowia lipolytica] gi|49650157|emb|CAG79887.1| YALI0E22979p [Yarrowia lipolytica]
  misc_feature (1)..(607): NCBI GI: 19115354 Blast Desc: phenylalanine-tRNA ligase beta subunit () [Schizosaccharomyces pombe] gi|12229964|sp|O42849.1|SYFB_SCHPO RecName: Full=Phenylalanyl-tRNA synthetase beta chain; AltName:
  misc_feature (1)..(607): NCBI GI: 149246281 Blast Desc: phenylalanyl-tRNA synthetase beta chain [Lodderomyces elongisporus NRRL YB-4239] gi|146447564|gb|EDK41952.1| phenylalanyl-tRNA synthetase beta chain [Lodderomyces NRRL
  misc_feature (1)..(607): NCBI GI: 254570487 Blast Desc: Beta subunit of cytoplasmic phenylalanyl-tRNA synthetase, forms a tetramer with Frs2p to generate ac [Pichia pastoris GS115] gi|238032151|emb|CAY70095.1| Beta subunit of a to
  misc_feature (1)..(607): NCBI GI: 50306631 Blast Desc: protein product [Kluyveromyces lactis] gi|49642423|emb|CAH00385.1| KLLA0D05137p [Kluyveromyces lactis]
  misc_feature (1)..(607): NCBI GI: 126136475 Blast Desc: henylalanyl-tRNA synthetase beta chain (Phenylalanine--tRNA ligase beta chain) (PheRS) [Pichia stipitis CBS 6054] gi|126091983|gb|ABN66732.1| henylalanyl-tRNA synthetase
  misc_feature (1)..(607): NCBI GI: 261360181 Blast Desc: phenylalanyl-tRNA synthetase beta chain [Verticillium albo-atrum VaMs.102]
  misc_feature (1)..(607): NCBI GI: 46122107 Blast Desc: FG05431.1 [Gibberella zeae PH-1]
  misc_feature (1)..(607): NCBI GI: 256729932 Blast Desc: [Nectria haematococca mpVI 77-13-4]
  misc_feature (1)..(607): SWISSPROT Homolog: EC 6.1.1.20 Phenylalanine--tRNA ligase
MPTITCNKYDLFEALGQRFTTEEFEELCFDFGIELDEDTEKDERPVVNGVQAPPELKIEIPANRYDMLCEEGIALMLNIFRQRQPAPAFKLAQPADGTLHTITVHESTAHVRPLVAGAILRNVRFTQKAYDSFISLQDKLHQNLARQRTLVSIGTHDLDTLKGPFTYEAAKPHDFSFVPLNQTQSMRGEEMMAFYDKDRHLGRYLHIIKDAPVYPLIYDANRVVCSMPPIINGDHSKISLDTKNVFIEVTATDETKLDIVINMMVTMFSGYCKEPFAVEPVKIISDHNQQTRITPNLNPREHSVEVDYLNACLGLSESPESISKLLSKMALSAKPSPKDANMVDILIPPTRADILQRCDIMEDLGIAYGFNKLPRMNVNKTVGAPLNINKLADIIRTESGMAGWTEVMPLILCSHDENFAWLNRKDDGKTCVRLENPKTAEYQIVRTSLLPGLLKTIRENKRHSVPMKIFETSDVVFKNETLERRARNERHFCAAFYGKTSGFEVVHGLLDRIMLMLRQAFIAHEGGLEGKEVQFDVKENQTKRDGYWLEPIDEPTFFAGRAAAIYVRLEGKERRIGEFGILHPTVLDNFELKYPVSTLEVNLEVFL

SEQ ID NO: 21189 - DNA, 2682 bp, Muscodor strobelii
  misc_feature: SGI EST ID NO. CUFF.49634.0
  misc_feature: Variant of the nucleotide sequence at SEQ ID NO 21187
cccgcctgtatgccattaggcaggagtgttggcggggttgtcaaatgcgttggaagttgcgactgcgggacggaaaggcccctccaaatttattgtgttgcttcccagttccaaacgtgagtcaacctccaattgcgccagctccttcgacgccgctgccagtccttcacccgacaagattgcgcaacaacacttctaccggctcgcctcgtgacttaacggagcacggcagctaggctgcttatcctctccctcaagatgcccaccatcacctgcaacaagtatgatctcttcgaggcactaggtcagagattcacaaccgaggagttcgaggagctatgcttcgacttcggcatcgagctggacgaggacacggagaaggatgagcggcccgtcgtcaacggcgtccaggcgccccccgagctcaagatcgagatccccgccaaccgctacgacatgctctgcgaggagggcatcgccctcatgctcaacatcttccgccagcgccagcccgccccggccttcaagctcgcccagcccgccgacggcaccctccacaccatcaccgtccacgagagcaccgcccacgtccggcccctcgtcgccggcgccatcctgcgcaacgtccgcttcacccagaaggcctacgactccttcatcagcctgcaggacaagctgcaccagaacctcgcccgccagcgcaccctcgtctccatcggcacccacgacctcgacaccctcaagggccccttcacctacgaggccgccaagccccacgacttcagcttcgtgcccctcaaccagacccagagcatgaggggcgaggagatgatggccttctacgacaaggacaggcacctgggcaggtatctacacatcatcaaggacgcgcccgtctaccctctcatctacgacgccaaccgcgtcgtctgctccatgccccccatcatcaacggcgaccactccaagatctcgctcgacaccaagaacgtcttcatagaagtcaccgccaccgacgagacaaagctcgacatcgtcatcaacatgatggtcaccatgttctccggctactgcaaggagcccttcgccgtcgagcccgtcaagatcatctcagaccacaaccagcagaccaggataacgccaaacctcaaccccagggaacacagcgtcgaggtggactatctgaacgcttgtctggggctgtccgagtcgccagagagtattagcaagctgctctccaagatggctctcagtgccaagccctcgccaaaggacgcaaacatggtcgatatcctgataccgccgacgagagccgacatcctacagaggtgtgatatcatggaggatctcggtatcgcctacggtttcaacaagctcccccgcatgaacgtcaacaagacggtcggtgctcccctaaatatcaacaagctcgcagacatcatccgcactgagtctggcatggcaggctggaccgaagtcatgcctctaattctctgcagtcacgacgagaactttgcttggctaaaccggaaagacgacggcaagacttgcgttcgcctcgagaaccccaagactgccgaataccagattgtgcggacctcactgctccccggtctattgaagactatccgtgagaacaagagacacagtgtacccatgaagatcttcgagacgtctgacgtcgtcttcaagaatgaaactctcgagcggagagcccggaacgagcgacatttctgcgccgccttctacggcaagacgagcgggttcgaggttgtccacggcttactcgaccgcatcatgcttatgctgcgacaggccttcatcgcgcacgagggtggtctcgagggcaaagaagtacagtttgacgtcaaggagaaccaaacgaagcgtgatggatactggcttgagcctatcgacgagccgaccttctttgcaggacgagccgccgccatctacgtcagattggagggcaaggagagacggatcggagagtttggcatactacatcccactgtgctcgacaacttcgagctcaagtatcccgtcagcacactagaggtcaatttggaggttttcttatagacatttcactgcaattctaagataaaccctgagaggatctggcgtagaatttggagaacagtccgaccgttgactacggagtggttgagtatcaggctgtagatctgcgaagatatccaatgagaaccgagcttgtcaaatcatcgtctaacctaggacattgtgcatatcagaggtatggaacaactgggaatgtgcttatgtctcaattgatatgcgatttgggtaacagataaacgctagtcaatggcacccgtctgcccaatatctatttgccatgtcatggaccattagtctattttcgtctgacacgcgacgccgtcgctgaattgttcaatcattcgagatggctactatcctagcttcatatcctaaaccgaatttgcatttaggctcattcaccattgaaggaaagatagggggctcaggttacagcaggcctagtcagagcgagcgacactaattaggagacttgcgacgtcttgtcgatagtctctctagacaaactctcttaataagatgaagcgcaaattgtggacgaaaagaatgctctagtcaattcagcatctcgatgagcgacttccccatgcgatcttgtca

SEQ ID NO: 21190 - DNA, 1869 bp, Muscodor strobelii
  misc_feature: SGI cDNA ID NO. 567169
  misc_feature: Encodes the peptide sequence at SEQ ID NO 21191
atggctgacgcgccgagtgcgaccgatgagttgtatcccatcgccgtgctcatcgacgagctgaagcacgacgacgtcctcctccgcctcaatgccatccaccgcttgtccaccatcgccctcgccctcggccccgagcgcacgcgcgaggagctcattcccttcctcgacgagtctgtcgaggatgaggacgaggttcttgttgccttgagcgaggagctcggcagcttcatcgagtatgtcggtggccctcagtacggccatgtcctgctgtcgcccctcgagaatctcgctgccatcgaggagcccgtcgtcagagacaaggccgtcgagtccctgaacaagatctgtctcgatctgtccgcacagcaaatcgaagagtacttcatccccctcaccatccgtctcagcaaggccgactggttcacctccaaggtctcgggatgcggcctctacaccgcgccctacaagaaggtctccccccaggtccaggagtctctgcgcacgcagttcggcctcctcgtacacgatgagacccccatggtccgtcgccagtccgccaccaacctcgccaagtttgccaaggagatgaccgcccccgttgtcgtcgacgagatgataccccttttccagcacctcgcccaagacgaccaggacagcgtgcgcctgctgactgtcgagatcctcatatccatcgccgaggtcatccccaaggaggagcaggccagccacggcgtcctcctcacatccctgcgcaacctcatagaagacaagagctggagggtgcgctacatgatcgccgataggttcgagaagattgccaaggctgtcgacgaggaggtggtgtcccgtgacttggttccttctttcgtcaagctcttgaaggacaacgaggctgaggttcggactgctattgccggccagatccccggcttctgcactttggtcgaccgcgaagtactgctgaaggacataatgagcaccgtcgaggatctggtctcggatccgtcacaacacgtccgcgctgctcttggcactcagatcagtggtctggctccgattctgggcaagcaagagaccattgaccacctcctccccatgttcttgcagatgctcaaggacgagttccccgaagtccgcctgcacatcatttccaaacttgatcttgtcaataaggtcattggtatcgatttgctatctcagtctctacttccggccatcgtccagctcgcagaggacaagcagtggagagtcaggctggccatcatcgagtacatccctcttctggcgagccagctcggagttaagttcttcgacgagaaattgagtggactctgcatgggctggctgggcgataccgtcttctctattcgcgaagccgctacgcacaacctcaagaagctgacggaagttttcggcgtcgagtgggccagcgaggccatcatccccaaggttatggccatggggtctcaccccaactacctttaccgcatgacaacatgctttgccatctcgacgctcgcgacggtagtcagcctagacgtgattggaaagtcaattctgcccatgttggagaagctagtcgaggacgagatccccaacatccggtttaatgtggccaagacatattcagagctgatcaatgttttgaaacgtctgcccgacgagggtactatctacagcttagagcaggccggacagaaagacacgaccgcctcagcaaagtcgacagagctcatccagcagcgcatactccctaacctggagaagttacagaaggacgacgacgtcgatgttcggtacttcgccacgaccgctgcatcgaacatccccggcgcaggtggtgagcctatgaacacgtcaccgtag

SEQ ID NO: 21191 - protein, 622 aa, Muscodor strobelii
  misc_feature: SGI Peptide ID NO. 567169
  misc_feature (397)..(433): Pfam Id: PF02985 Pfam Desc: HEAT repeat
  misc_feature (200)..(236): Pfam Id: PF02985 Pfam Desc: HEAT repeat
  misc_feature (358)..(394): Pfam Id: PF02985 Pfam Desc: HEAT repeat
  misc_feature (280)..(316): Pfam Id: PF02985 Pfam Desc: HEAT repeat
  misc_feature (1)..(622): NCBI GI: 46122105 Blast Desc: FG05430.1 [Gibberella zeae PH-1]
  misc_feature (1)..(622): NCBI GI: 256729746 Blast Desc: [Nectria haematococca mpVI 77-13-4]
  misc_feature (1)..(622): NCBI GI: 145615553 Blast Desc: conserved [Magnaporthe grisea 70-15] gi|145022364|gb|EDK06384.1| conserved [Magnaporthe grisea 70-15]
  misc_feature (1)..(620): NCBI GI: 156051424 Blast Desc: protein phosphatase PP2A regulatory subunit A [Sclerotinia sclerotiorum 1980] gi|154704897|gb|EDO04636.1| protein phosphatase PP2A regulatory subunit A [Sclerotinia 1980]
  misc_feature (1)..(621): NCBI GI: 154301902 Blast Desc: BC1G_10188 [Botryotinia fuckeliana B05.10] gi|150855580|gb|EDN30772.1| BC1G_10188 [Botryotinia fuckeliana B05.10]
  misc_feature (1)..(622): NCBI GI: 164429150 Blast Desc: protein phosphatase PP2A regulatory subunit A [Neurospora crassa OR74A] gi|157072428|gb|EDO65422.1| protein phosphatase PP2A regulatory subunit A [Neurospora crassa OR74A]
  misc_feature (1)..(622): NCBI GI: 116207708 Blast Desc: conserved [Chaetomium globosum CBS 148.51] gi|88183744|gb|EAQ91212.1| conserved [Chaetomium globosum CBS 148.51]
  misc_feature (8)..(622): NCBI GI: 119496671 Blast Desc: protein phosphotase 2a 65kd regulatory sububit [Neosartorya fischeri NRRL 181] gi|119413271|gb|EAW23212.1| protein phosphotase 2a 65kd regulatory sububit [Neosartorya NRRL
  misc_feature (8)..(622): NCBI GI: 240281580 Blast Desc: phosphoprotein phosphatase A [Ajellomyces capsulatus H143]
  misc_feature (8)..(622): NCBI GI: 121702675 Blast Desc: protein phosphotase 2a 65kd regulatory sububit [Aspergillus clavatus NRRL 1] gi|119397745|gb|EAW08176.1| protein phosphotase 2a 65kd regulatory sububit [Aspergillus clavatus NRRL
MADAPSATDELYPIAVLIDELKHDDVLLRLNAIHRLSTIALALGPERTREELIPFLDESVEDEDEVLVALSEELGSFIEYVGGPQYGHVLLSPLENLAAIEEPVVRDKAVESLNKICLDLSAQQIEEYFIPLTIRLSKADWFTSKVSGCGLYTAPYKKVSPQVQESLRTQFGLLVHDETPMVRRQSATNLAKFAKEMTAPVVVDEMIPLFQHLAQDDQDSVRLLTVEILISIAEVIPKEEQASHGVLLTSLRNLIEDKSWRVRYMIADRFEKIAKAVDEEVVSRDLVPSFVKLLKDNEAEVRTAIAGQIPGFCTLVDREVLLKDIMSTVEDLVSDPSQHVRAALGTQISGLAPILGKQETIDHLLPMFLQMLKDEFPEVRLHIISKLDLVNKVIGIDLLSQSLLPAIVQLAEDKQWRVRLAIIEYIPLLASQLGVKFFDEKLSGLCMGWLGDTVFSIREAATHNLKKLTEVFGVEWASEAIIPKVMAMGSHPNYLYRMTTCFAISTLATVVSLDVIGKSILPMLEKLVEDEIPNIRFNVAKTYSELINVLKRLPDEGTIYSLEQAGQKDTTASAKSTELIQQRILPNLEKLQKDDDVDVRYFATTAASNIPGAGGEPMNTSP

SEQ ID NO: 21192 - DNA, 2997 bp, Muscodor strobelii
  misc_feature: SGI EST ID NO. CUFF.49863.1
  misc_feature: Variant of the nucleotide sequence at SEQ ID NO 21190
cgacgagcctgtcgaccttgtctgcacgactgtagtgtgggctgctgtgctgtaccccttgtaccagagcctgccttgggcggaccacaacaagaaacaagcgtccaaacatctgcatccacatccaacacctcaacctccatatcacactaccaccgctactactaccttacctaaccgcacctttgcctaagatacccctccacaccgcgacgcctctacacaacatcacgatacctggaggcagtcccgttcgcaacgctctcaacttggccgcaccccgcatcgccctcgacggtatttgttgtgctgagacccggggaaactgcccccctccaagcagctagtttctgctgctacccgccccgactggccgcccacgattgcatcactccacccacgcgatcagccttccaagctcaccaccacccatctccgggccacgctctgcccgccgacgcctctccctctccctcggccatcgagtcatcgacaaccctcgtcgagtccgcatagccagccctccccttcgccatggctgacgcgccgagtgcgaccgatgagttgtatcccatcgccgtgctcatcgacgagctgaagcacgacgacgtcctcctccgcctcaatgccatccaccgcttgtccaccatcgccctcgccctcggccccgagcgcacgcgcgaggagctcattcccttcctcgacgagtctgtcgaggatgaggacgaggttcttgttgccttgagcgaggagctcggcagcttcatcgagtatgtcggtggccctcagtacggccatgtcctgctgtcgcccctcgagaatctcgctgccatcgaggagcccgtcgtcagagacaaggccgtcgagtccctgaacaagatctgtctcgatctgtccgcacagcaaatcgaagagtacttcatccccctcaccatccgtctcagcaaggccgactggttcacctccaaggtctcgggatgcggcctctacaccgcgccctacaagaaggtctccccccaggtccaggagtctctgcgcacgcagttcggcctcctcgtacacgatgagacccccatggtccgtcgccagtccgccaccaacctcgccaagtttgccaaggagatgaccgcccccgttgtcgtcgacgagatgataccccttttccagcacctcgcccaagacgaccaggacagcgtgcgcctgctgactgtcgagatcctcatatccatcgccgaggtcatccccaaggaggagcaggccagccacggcgtcctcctcacatccctgcgcaacctcatagaagacaagagctggagggtgcgctacatgatcgccgataggttcgagaagattgccaaggctgtcgacgaggaggtggtgtcccgtgacttggttccttctttcgtcaagctcttgaaggacaacgaggctgaggttcggactgctattgccggccagatccccggcttctgcactttggtcgaccgcgaagtactgctgaaggacataatgagcaccgtcgaggatctggtctcggatccgtcacaacacgtccgcgctgctcttggcactcagatcagtggtctggctccgattctgggcaagcaagagaccattgaccacctcctccccatgttcttgcagatgctcaaggacgagttccccgaagtccgcctgcacatcatttccaaacttgatcttgtcaataaggtcattggtatcgatttgctatctcagtctctacttccggccatcgtccagctcgcagaggacaagcagtggagagtcaggctggccatcatcgagtacatccctcttctggcgagccagctcggagttaagttcttcgacgagaaattgagtggactctgcatgggctggctgggcgataccgtcttctctattcgcgaagccgctacgcacaacctcaagaagctgacggaagttttcggcgtcgagtgggccagcgaggccatcatccccaaggttatggccatggggtctcaccccaactacctttaccgcatgacaacatgctttgccatctcgacgctcgcgacggtagtcagcctagacgtgattggaaagtcaattctgcccatgttggagaagctagtcgaggacgagatccccaacatccggtttaatgtggccaagacatattcagagctgatcaatgttttgaaacgtctgcccgacgagggtactatctacagcttagagcaggccggacagaaagacacgaccgcctcagcaaagtcgacagagctcatccagcagcgcatactccctaacctggagaagttacagaaggacgacgacgtcgatgttcggtacttcgccacgaccgctgcatcgaacatccccggcgcaggtggtgagcctatgaacacgtcaccgtagatgagacatgtcaaaaaaagaatttcttcctgcagcttgttatggtcgtgtgtttctgccccctcataccctgcttccggtgcatactagtgcgacggcgagatgatacagagaatatggcaattgggatgttttgacaagatgacctctcgattgggtgaacagtatagagcaacgagacgcgaggacacagcatgatgggataatgatatccagagaattaaaaaaaacacaagagaacgattcgacatgcgagattccatagagcagaagacatcatttcaagcaaacgcatgaaggacaacatgtctgatgatgatgagagaatgtttcgccgtgcttctgctagacgaggatcaattatctgtaggattaatgatgatgggaacacttatgaaagagaattccatcagtactgcgtcacaggtcatggcatgatggtgtaatgttagtgcacaggatcagaaaaacttccaatgtcgtggcccccgaactgaacagtactcaaggactgaactcattcatatatgaaagcatcgacagggtaaaagcaaatagtaattggggctgagtaggtctgtgtctccttcccat

SEQ ID NO: 21193 - DNA, 342 bp, Muscodor strobelii
  misc_feature: SGI cDNA ID NO. 567170
  misc_feature: Encodes the peptide sequence at SEQ ID NO 21194
atgaaggtcctcatcgtcctcgccgccctggccatgaccgcctcagcctatcggtgcaagtacgatcgcttctccggcagcatcggcggcaccacctactgcggctctttcgaggagggcttcaaggccggcgaccagaccgagggcgatggctgctcaaaggtccacaccaactcgtgctacaaacgccaccacggcaccactggcgatgccaactgccgcctcgtcatctactacggcgatgacagatgcgccggagataagacgctgacgctgaactgcgcccaggatttgacagcccagatctacgaggatcatagctataaggtctattgcgattaa

SEQ ID NO: 21194 - protein, 113 aa, Muscodor strobelii
  misc_feature: SGI Peptide ID NO. 567170
MKVLIVLAALAMTASAYRCKYDRFSGSIGGTTYCGSFEEGFKAGDQTEGDGCSKVHTNSCYKRHHGTTGDANCRLVIYYGDDRCAGDKTLTLNCAQDLTAQIYEDHSYKVYCD

SEQ ID NO: 21195 - DNA, 642 bp, Muscodor strobelii
  misc_feature: SGI cDNA ID NO. 567171
  misc_feature: Encodes the peptide sequence at SEQ ID NO 21196
atggagaaattggaagaattggcggcaagtaacatcaaaagatggggcgacgagcccgtattccgtcaccctaccgcaacggataacaaagaagtcattgacgtgttgctcgaagaagcagctggtctgaacaatgtagagccacaatggattattcagtccctacagaaacgaggtctaccaccagctactgagcaagagagaaaagacattcttcgtctaatgtatccagctttccgcgatgattataacacagaatccgagggcggctgcgtgcccccgtatggcgaaccagagttcccctataattggggagtcgtcgggaccagtcattttctcgagggcgtcgaccgttgtatgggagatattgcgtggtatacagaaacacatggctcagaagcctgtaagcaagcgacctttgagattgtcagtcaaaagattacctggaaagcgaaccggcatcatggactacttgctcctcatagacctcatactacgaaattgacaatgccccaccttgccgagggcaagatgtatggcagtattgatttcatcgaggtcgagttccgcacacatctcaaacccttggcgcaggcgagggaggtgttcgagaaggcgcttccgcatcaccatcaaagttaa

SEQ ID NO: 21196 - protein, 213 aa, Muscodor strobelii
  misc_feature: SGI Peptide ID NO. 567171
MEKLEELAASNIKRWGDEPVFRHPTATDNKEVIDVLLEEAAGLNNVEPQWIIQSLQKRGLPPATEQERKDILRLMYPAFRDDYNTESEGGCVPPYGEPEFPYNWGVVGTSHFLEGVDRCMGDIAWYTETHGSEACKQATFEIVSQKITWKANRHHGLLAPHRPHTTKLTMPHLAEGKMYGSIDFIEVEFRTHLKPLAQAREVFEKALPHHHQS

SEQ ID NO: 21197 - DNA, 534 bp, Muscodor strobelii
  misc_feature: SGI cDNA ID NO. 567172
  misc_feature: Encodes the peptide sequence at SEQ ID NO 21198
atggtgcaagccgtccccgtcgaatctcgtgatatcaacgacgctggcaaccgcgttagtgtacaaagcatcgactacgacatgtactccgggattcacgaggccgaatcattcctggcctatatacttgatagtaagcaatgggatcagctgcatttagccatgacaaacgatattgtgtacaacaatagtcagtttcttgaactaggccgtcccggcggtgtcgccaataatctgtgtgaagtcatcgaggctactcgggcggccttcggtgattcactcgtctcacacagcgttacctcagcctacatcgaaccgattacttccgataaggcccgagtcatcacttacctcattgtctcgcaatgggatcccacggcactcgacgatcctaccaagacattccgtatatatgagcagtgtgacgatatatgggtgcttcaagatgggctttggaagctacagtttagcattgtcaccagccaaggtccgaactgggaggtgccccaggtttatactccaacgaaacaatag

SEQ ID NO: 21198 - protein, 177 aa, Muscodor strobelii
  misc_feature: SGI Peptide ID NO. 567172
  misc_feature (31)..(169): NCBI GI: 169620604 Blast Desc: SNOG_13504 [Phaeosphaeria nodorum SN15] gi|111057831|gb|EAT78951.1| SNOG_13504 [Phaeosphaeria nodorum SN15]
MVQAVPVESRDINDAGNRVSVQSIDYDMYSGIHEAESFLAYILDSKQWDQLHLAMTNDIVYNNSQFLELGRPGGVANNLCEVIEATRAAFGDSLVSHSVTSAYIEPITSDKARVITYLIVSQWDPTALDDPTKTFRIYEQCDDIWVLQDGLWKLQFSIVTSQGPNWEVPQVYTPTKQ

SEQ ID NO: 21199 - DNA, 355 bp, Muscodor strobelii
  misc_feature: SGI EST ID NO. CUFF.49648.0
  misc_feature: Variant of the nucleotide sequence at SEQ ID NO 21197
gtcatcacttacctcattgtctcgcaatgggatcccacggcactcgacgatcctaccaagacattccgtatatatgagcagtgtgacgatatatgggtgcttcaagatgggctttggaagctacagtttagcattgtcaccagccaaggtccgaactgggaggtgccccaggtttatactccaacgaaacaatagaatctctgaataacgaagcatgggagcagcaagtggaaatgcctgtcgcatggctagaagtggtccacttaataattggtttgagaggccaatcgaacccgaagagatagctcagacataaaagtttgcaggataataatcctaagtaaataaaccccct

SEQ ID NO: 21200 - DNA, 750 bp, Muscodor strobelii
  misc_feature: SGI cDNA ID NO. 567173
  misc_feature: Encodes the peptide sequence at SEQ ID NO 21201
atgggagaccatgaagcgcccaccatcacccatgtgggtggctggccggagctcgctgagtacatcaccgcctactgtgatccacatgtccacacccccatcgacaaaaaggttcatattgaacttgaatgcgagatttgctgcgaggcctcgctcatcctgccgaagtggatcacacccaatcggccaaaggtacaattttcaccagagaccgacgtcgaagttggtacaatgcctaataaggaacgcacggttgttactccgtgtggccatctcttcggatctgactgctgggaaaattgggtacgtgccatcgcacggaatgatgaggacgtcacttgccctaagtgtcgatttgtgctcaagcactcggagtgtggccatgctactgaagcgcgaatactgcccgccaacttcaaagagggcttcgcgggtgtccaacagctcgttaacctggtgccgtacactcgtattcattgctggcgctaccatccacgctgtgacttggtgctgatggccgatatcaccgaatggacgccagagaagacgaaagaggcagaacagaaccacggcgtcggccccgtgtgcgagacttgccgaatactcgccttcgtcggccccgtcgatcctcctaacaggttacgcatcataagatatgatgacctgagggacaccctcgtccaggtctacagtacatcaacgcaagtcgtcgaaagcgagactgagtttggacagggggacacttggtag

SEQ ID NO: 21201 - protein, 249 aa, Muscodor strobelii
  misc_feature: SGI Peptide ID NO. 567173
  misc_feature (39)..(141): NCBI GI: 46124285 Blast Desc: FG06520.1 [Gibberella zeae PH-1]
MGDHEAPTITHVGGWPELAEYITAYCDPHVHTPIDKKVHIELECEICCEASLILPKWITPNRPKVQFSPETDVEVGTMPNKERTVVTPCGHLFGSDCWENWVRAIARNDEDVTCPKCRFVLKHSECGHATEARILPANFKEGFAGVQQLVNLVPYTRIHCWRYHPRCDLVLMADITEWTPEKTKEAEQNHGVGPVCETCRILAFVGPVDPPNRLRIIRYDDLRDTLVQVYSTSTQVVESETEFGQGDTW

SEQ ID NO: 21202 - DNA, 918 bp, Muscodor strobelii
  misc_feature: SGI cDNA ID NO. 567174
  misc_feature: Encodes the peptide sequence at SEQ ID NO 21203
atgacaaaaccaacatccctcgagccctcaaagctaggcacaaaagaatactgggaatccctctacgaaaccgaaatatcaaactacgcacatgacccctcagacacgggtacagcttggttcgacgacagcgacgctgaaaacaaactcgtcgaatttctatcggatccagaacggcatcaggaactttcgttgtctgaggaggaaaccacatttcttgatcttgggacgggaaatggacagctactcttcgcgctgagagacgcggggtggagaggcgagatgctgggcgtggattatagtgatatgagcgttgactttgctaggaaactggagaaaaataggaggcgggagaaggaaggtgcagaagacggtgagggagacgaggtggaaataagatttcacgtccacgatatattgcatgattcaccgttcgcattacatgatgcgcctgttgcgccggaacgagtaaggcaaagcggtggttgggacgtgatactagataagggcacgtttgacgctgtttcgctttctgccgagattttgcctccagcgacgacgacaacagtgaacacggcgggagatacggaagcacagccgagaagagtcaatgaattatacccgccaacaatcctcgcacttctcaagcccggcggcttattcctagtcacgagttgcaattggacggaggacgagcttcggtcttggttcgctgagccttcgtacacgacatcggagatagcgggagtggtgggtggtggtaggccaattggcaatggcgtagatgccgaaaacgacgcacgctggggatttgaggttgttggtcgggtgccttataggagtttcagctttgggggcgttaaggggcagactattagcagtctttgcttccgaaagatatcgcttgctggccggtag

SEQ ID NO: 21203 - protein, 305 aa, Muscodor strobelii
  misc_feature: SGI Peptide ID NO. 567174
  misc_feature (3)..(299): NCBI GI: 85078465 Blast Desc: NCU00487 [Neurospora crassa OR74A] gi|28917223|gb|EAA26936.1| conserved [Neurospora crassa OR74A]
  misc_feature (3)..(299): NCBI GI: 256729933 Blast Desc: NECHADRAFT_46521 [Nectria haematococca mpVI 77-13-4]
  misc_feature (3)..(300): NCBI GI: 46122103 Blast Desc: FG05429.1 [Gibberella zeae PH-1]
  misc_feature (2)..(300): NCBI GI: 171686168 Blast Desc: protein product [Podospora anserina] gi|170943045|emb|CAP68698.1| protein product [Podospora anserina]
  misc_feature (2)..(299): NCBI GI: 39941518 Blast Desc: MGG_05670 [Magnaporthe grisea 70-15] gi|145022363|gb|EDK06383.1| MGG_05670 [Magnaporthe grisea 70-15]
  misc_feature (2)..(299): NCBI GI: 156051422 Blast Desc: SS1G_07118 [Sclerotinia sclerotiorum 1980] gi|154704896|gb|EDO04635.1| SS1G_07118 [Sclerotinia sclerotiorum 1980]
  misc_feature (2)..(300): NCBI GI: 154301900 Blast Desc: BC1G_10187 [Botryotinia fuckeliana B05.10] gi|150855579|gb|EDN30771.1| BC1G_10187 [Botryotinia fuckeliana B05.10]
  misc_feature (1)..(299): NCBI GI: 169623020 Blast Desc: SNOG_14737 [Phaeosphaeria nodorum SN15] gi|160704896|gb|EAT77929.2| SNOG_14737 [Phaeosphaeria nodorum SN15]
  misc_feature (1)..(299): NCBI GI: 189188102 Blast Desc: conserved [Pyrenophora tritici-repentis Pt-1C-BFP] gi|187971996|gb|EDU39495.1| conserved [Pyrenophora tritici-repentis Pt-1C-BFP]
  misc_feature (1)..(299): NCBI GI: 254573890 Blast Desc: S-adenosylmethionine-dependent methyltransferase of the seven beta-strand family [Pichia pastoris GS115] gi|238033853|emb|CAY71875.1| S-adenosylmethionine-dependent of
MTKPTSLEPSKLGTKEYWESLYETEISNYAHDPSDTGTAWFDDSDAENKLVEFLSDPERHQELSLSEEETTFLDLGTGNGQLLFALRDAGWRGEMLGVDYSDMSVDFARKLEKNRRREKEGAEDGEGDEVEIRFHVHDILHDSPFALHDAPVAPERVRQSGGWDVILDKGTFDAVSLSAEILPPATTTTVNTAGDTEAQPRRVNELYPPTILALLKPGGLFLVTSCNWTEDELRSWFAEPSYTTSEIAGVVGGGRPIGNGVDAENDARWGFEVVGRVPYRSFSFGGVKGQTISSLCFRKISLAGR

SEQ ID NO: 21204 - DNA, 6684 bp, Muscodor strobelii
  misc_feature: SGI EST ID NO. CUFF.50040.0
  misc_feature: Variant of the nucleotide sequence at SEQ ID NO 21202
cacaattctaccatctctgcccctccaccccaccatgctgcgaacgtggtgttttacatttccccatgcggtattctatcgcaacactcaaacaaacctcacatcattttgacgcatgattcaaagtgagaggacgatgagcaacatcaactcaggcgaatatcaatgaatacaaatcaggaggcgaccgaatcattacagcatgacaaaaccaacatccctcgagccctcaaagctaggcacaaaagaatactgggaatccctctacgaaaccgaaatatcaaactacgcacatgacccctcagacacgggtacagcttggttcgacgacagcgacgctgaaaacaaactcgtcgaatttctatcggatccagaacggcatcaggaactttcgttgtctgaggaggaaaccacatttcttgatcttgggacgggaaatggacagctactcttcgcgctgagagacgcggggtggagaggcgagatgctgggcgtggattatagtgatatgagcgttgactttgctaggaaactggagaaaaataggaggcgggagaaggaaggtgcagaagacggtgagggagacgaggtggaaataagatttcacgtccacgatatattgcatgattcaccgttcgcattacatgatgcgcctgttgcgccggaacgagtaaggcaaagcggtggttgggacgtgatactagataagggcacgtttgacgctgtttcgctttctgccgagattttgcctccagcgacgacgacaacagtgaacacggcgggagatacggaagcacagccgagaagagtcaatgaattatacccgccaacaatcctcgcacttctcaagcccggcggcttattcctagtcacgagttgcaattggacggaggacgagcttcggtcttggttcgctgagccttcgtacacgacatcggagatagcgggagtggtgggtggtggtaggccaattggcaatggcgtagatgccgaaaacgacgcacgctggggatttgaggttgttggtcgggtgccttataggagtttcagctttgggggcgttaaggggcagactattagcagtctttgcttccgaaagatatcgcttgctggccggtagtcagatgtcggaaaggatacgcaatgcaagatgtaaggccacagcctcatgcaatctctcttgagatgtctgagcgccgtttcagctgcgctaatagtcatgggtgacaagcagacgtgaaaacaatagtacataacgtatccatatcacacacgcacgattataatgtcaataaacgaacaaagtctgcaaatggcgataccatggtctctgaactgtcattccacataaggcctactgcacatagcgcatcgaatcgaggagttcgagttcatgtccatgtccattcatatgccgcagccgtcttcttgcctatctgtatcaccaggggtatctgaatccgaaaaagaatctagattccgacaatgtcccaaccatgtctccttccccaaacgaaacgcgaaagagagacagcacacaaataaatcatcatatatagcccatatcagcaattccacaattgctctctacgtctcttcatgcctttctttccttttcatggtactcttcttgatcgtatcatatccctttccatcccgaatgctttatccatatcttcgccaaatggggccatctgtgcatagcataatgactagggccatggaagagcaagcaaaacttgcccgtggggccttattctgaaccctccaagctatagatctaacccatcgtccatatcggagccttggccaatacctgtcttcccctgacctcgacagcgatgaaacctgcgaaccggactctgttgggatctttctggagggatgccggtggtggctgctgttgctgagaggactgctgtgtcgccgctgctgtttgaggagtggccgcgtcagtaaggatcgatgccgtgctgccttttctgctgctcgcgggatgtggggttgagccgccgagcattgtcaacataccactcttgttcttgtcgcgttttgcgttcttgtcgccgtctttgtcctctggctcctccgccggttctggaaggggtggcagggcttgcttctcgggctccatcacatcgggctgtacggggtcgccgggcattgggtatgtgagggccacgtctcggctttccaggggtaagttggcggcaatgccaacagccaattctacgatcatcgacgcactaccctctacaccagccgggggcggatctgacaggtattggtagaggaccgctgtgaggttacttgtgaccatcttcgtgtagtccgcacgatgctcggcgctctcgggtgagttaaggcgatgctgtagaccctctagtgttgtcattcgccacgagactaccttggctgttagagcatcgaactcctcctggctgctcatagtgtatgagtatctgcggatgttttgctcgatctgtttcagactgcagctgagatccacatcaagggctgggtggaaacacttgttgaagacctcgtcgacgatccagcgcgagatgatggcgcgtccaacggctgtcatctcctgcttgcccaccttgatggcgtctgacgaaacatatcgttcgatccacgagggaagcgattgccaatccttgcggatgttgaaagaaagattgttgatggcgccattgagtctgttaaagcgtgtcgagtattcgttatcgtccagcgccgttcgcgattgggacatacgctgattggcaacggcattctgtagctgctctacctgctgtgtcatctgttcgatttgtgcttttccatcaaaataaagtctcttgacgttcttgtatttggtgactggaaggcacgtaagtatataaaaaaagatgatttccatccagtgttgcttacggaggtctttgaactgcttgtcgtgatcagcatcgcggccttcagtagatggctgggggctgttccgcccgcgctcatcggccgcaggcccgtcatattgctgtcgctcgcctgagccgctgggacggaagccagggggtggattgcccgcgccaggggttgggggcaagggattcatggcgttgacctggctgtgtcgatagtttgggggaggcccaggaggcggctcgacagacctcatcttgtcgttctcgacagatctacggccctggccaggcggaccctgctgttgctgctgctgtgggggaggtggcatggcttgggagggcgatgactgccggggctgctgcacaccggagagcaatccgtcgtggggtgcttggcctacagccggcgagtcctgcgcagattgcaggttggcgggtggttgttcggagtccgacgtcggcgactcgtgcgacagctgggacactgtctctgggttgggcggcagggaggtctcagtggtgaggtggctggtgtagatggagggcggattgctgtgctgctggtactgatcacgaggctgctgggtgtattgttggtacgggctctgcgccgggtcgacgacaatctgtgcaccgccgtagagttgctgctggctatcggcctgcggtcgtgcgggtggcggcgagaggatctggccctgttgctggagcagctgggcttggtgttgggcaatggcctgctgctggtggaaggcgagatcctcgtggtcgtacggcgacgtctcgacttcgctgggcacgtggcgaatggtgttgggcagcgcctcttgcgagcctcctgccagcagatcctggttggagcgttcgaattggaaagagctgtcgaactcgccgacgccctggctgggtgagtgctgggccgagggctgctgtgtcagcgactgctgactgtgggactggtgagactggggatgccgcgagcttgcgctgggagggggcacccagtcgggatggtcaatcggacgggacaacagagagctgcccctcggcgtggtggcggggttgttgctgttgttggtgttgtttgaccgcttggatggccggcggacaacaccagcagaggcggcgtcgtagacgtggtcctgttgggcggcgtaatggttggaggtggggcgattcgacgacgacgacgacgatgacgagcccaggatgttcttgatgaggttgcgggcccgtcgcttgggttccggcgccggctggggttgagattgaggttgagggtggccgtgggcaggcggcgcggggccttggctgacggcgggggaggagatgcccgaggcggtgtgggacaggtcgtcgactgagctggaggcgaggccgtagggcgactgcgtctgcagcggggggatgatctgggagtagcgggcagactgcgagcgggacaccaggtcggcgtagttgtcgcggggctgcggtgcctgctgctgctgttgctgctgctgttgctgctgcgggcgtgcgttgtacacggtggaggggggattgggcagattgaggggtatcgtgctcccctgcgcaggcgggggcggcaggttgggattgggcttgcgcagcacctcgcgcggcgggccgttgttgaggtttaagctgagactgtgcagcgacaattgcgagtggtgctggctctgttgcggcgacgactgcgtgctctgctgctgtggcgggggctgcggctgcagtggaggctggccggtcctggtgtcgacttgctgtggtgcaggcggcgcctgctgctgctgtgggtgccctcggcggaaggagtcgttcgagctgagcgacggcggcggtccaggcgaggctgaaggggggttgctggaggcgtcgggtccgagtccggcagcagacactcgtcgcggcccaggtgtctgttgggagggtgaagccgcggacgagggcggttgtgagaggggcggtgcagctcctcctccactgcccgcgccctgcgcctggagttgctgctgctgctgctgtaagtgaagctggtgttgcagggcagcccgctgctgctcccgctgctgctcctgctgctgcgcttgaaccacctggtgctcgacgggcagagtgtgctgcgatcgattgctgtgtttgcctaggcgtgggaaggagggcataatgctattatgtgcgtgatgcagaccactgggacgctcagcgcctgtctattcttggctgttcgaggggccgtgacctgttccaggaccggtcgagcgacaaagcaccagctcggcgcgtgcaagaaaaacaaagcgcggagagcgcaaaccgctatatctgctgggacaagacgacacggacaaagaaacaagacgactgatgagctcagctccaattaccccgtccgaagcaaagcaaaaaaaaaaaaaagatgagacgagatgtgtcgttctgtgcggcccctgccgtcgagctgattcgtctggcctggaatcaaaacgctgcaaatgctgtacctcagatccgctcagggtggtcctgtctcgcctggttactacggtgctgcgagtatgtatctcgcggctgtggctcgctgtcgctgctcgattctgctgcggtctgcaatctgcaatggcgcccgtgtctgcatccctctctcgcgcctgtgtcgtagcggaatggcgaggagcaggcccgtcagattaccgcgaatgcaatgcaaagcaacctgaacccgctcgagcctgtcgcccgtcgggctcgcagacgggcgtgacgggggtggataatgaccttcctctctgaccgacaggggggatctactagcctgtcggcagctcaagaggggggcatcctctgacttgcttgtgaagggggctgtgctgatgatgatcactgatcaggagccggtaatagtcaggcaatcaggacgggcaattggtgcggtacaagctcgacaagctcgcaaggatcaaagcctgtcgacctgtgtctaatagatagcttggtaagtgcagaggtagatatgtacaggtaaagcttcgtttgttctggtagctctctccagctagaaaatacggctattgcttttgaatgcgtatagattcgcgttgccgtaaaaacgtaggtttggaagatgtcatccagattttcaatgttacccagcttgaatcttgggtcccagttcggtcgcttggggaggatctctttagtgatcgctagtgctggtaattattacgatgaaccagtattacatatttcccaatcgcaggcgagagttggatgtcggaactaaatatgaagaatggatcgaggctaattcagaaaattgcgcagatgagcagcatgagatgaagttcccagaagaggcgcgaccaatcacattgatattcagctttcggcaacgaggtatttacaagaagaaatgaggtatcaggagcgctctgagaggtgagaggttgagaccacccagcgcaaggaattggtagagggccctccgacatggtgtcccagactgaggtgcacatcagatggcaatcgcaaattacatacagtggtagtatgctactacactgccggcagtcagaatggtgatgacgatctctccagctacatacataggcttatttaccaagtggtcttaaggagaccagagacatgcaaagcttaggtactgatgcgagtcagagacacatatcagaccgtgggtctgacccttcctcggtgttttcgacagggtcacgaggaaaggactcgttcaattagccagggttcaaaattc

SEQ ID NO: 21205 - DNA, 3147 bp, Muscodor strobelii
  misc_feature: SGI cDNA ID NO. 567175
  misc_feature: Encodes the peptide sequence at SEQ ID NO 21206
atgccctccttcccacgcctaggcaaacacagcaatcgatcgcagcacactctgcccgtcgagcaccaggtggttcaagcgcagcagcaggagcagcagcgggagcagcagcgggctgccctgcaacaccagcttcacttacagcagcagcagcagcaactccaggcgcagggcgcgggcagtggaggaggagctgcaccgcccctctcacaaccgccctcgtccgcggcttcaccctcccaacagacacctgggccgcgacgagtgtctgctgccggactcggacccgacgcctccagcaaccccccttcagcctcgcctggaccgccgccgtcgctcagctcgaacgactccttccgccgagggcacccacagcagcagcaggcgccgcctgcaccacagcaagtcgacaccaggaccggccagcctccactgcagccgcagcccccgccacagcagcagagcacgcagtcgtcgccgcaacagagccagcaccactcgcaattgtcgctgcacagtctcagcttaaacctcaacaacggcccgccgcgcgaggtgctgcgcaagcccaatcccaacctgccgcccccgcctgcgcaggggagcacgatacccctcaatctgcccaatcccccctccaccgtgtacaacgcacgcccgcagcagcaacagcagcagcaacagcagcagcaggcaccgcagccccgcgacaactacgccgacctggtgtcccgctcgcagtctgcccgctactcccagatcatccccccgctgcagacgcagtcgccctacggcctcgcctccagctcagtcgacgacctgtcccacaccgcctcgggcatctcctcccccgccgtcagccaaggccccgcgccgcctgcccacggccaccctcaacctcaatctcaaccccagccggcgccggaacccaagcgacgggcccgcaacctcatcaagaacatcctgggctcgtcatcgtcgtcgtcgtcgtcgaatcgccccacctccaaccattacgccgcccaacaggaccacgtctacgacgccgcctctgctggtgttgtccgccggccatccaagcggtcaaacaacaccaacaacagcaacaaccccgccaccacgccgaggggcagctctctgttgtcccgtccgattgaccatcccgactgggtgccccctcccagcgcaagctcgcggcatccccagtctcaccagtcccacagtcagcagtcgctgacacagcagccctcggcccagcactcacccagccagggcgtcggcgagttcgacagctctttccaattcgaacgctccaaccaggatctgctggcaggaggctcgcaagaggcgctgcccaacaccattcgccacgtgcccagcgaagtcgagacgtcgccgtacgaccacgaggatctcgccttccaccagcagcaggccattgcccaacaccaagcccagctgctccagcaacagggccagatcctctcgccgccacccgcacgaccgcaggccgatagccagcagcaactctacggcggtgcacagattgtcgtcgacccggcgcagagcccgtaccaacaatacacccagcagcctcgtgatcagtaccagcagcacagcaatccgccctccatctacaccagccacctcaccactgagacctccctgccgcccaacccagagacagtgtcccagctgtcgcacgagtcgccgacgtcggactccgaacaaccacccgccaacctgcaatctgcgcaggactcgccggctgtaggccaagcaccccacgacggattgctctccggtgtgcagcagccccggcagtcatcgccctcccaagccatgccacctcccccacagcagcagcaacagcagggtccgcctggccagggccgtagatctgtcgagaacgacaagatgaggtctgtcgagccgcctcctgggcctcccccaaactatcgacacagccaggtcaacgccatgaatcccttgcccccaacccctggcgcgggcaatccaccccctggcttccgtcccagcggctcaggcgagcgacagcaatatgacgggcctgcggccgatgagcgcgggcggaacagcccccagccatctactgaaggccgcgatgctgatcacgacaagcagttcaaagacctcctcaccaaatacaagaacgtcaagagactttattttgatggaaaagcacaaatcgaacagatgacacagcaggtagagcagctacagaatgccgttgccaatcagcgtatgtcccaatcgcgaacggcgctggacgataacgaatactcgacacgctttaacagactcaatggcgccatcaacaatctttctttcaacatccgcaaggattggcaatcgcttccctcgtggatcgaacgatatgtttcgtcagacgccatcaaggtgggcaagcaggagatgacagccgttggacgcgccatcatctcgcgctggatcgtcgacgaggtcttcaacaagtgtttccacccagcccttgatgtggatctcagctgcagtctgaaacagatcgagcaaaacatccgcagatactcatacactatgagcagccaggaggagttcgatgctctaacagccaaggtagtctcgtggcgaatgacaacactagagggtctacagcatcgccttaactcacccgagagcgccgagcatcgtgcggactacacgaagatggtcacaagtaacctcacagcggtcctctaccaatacctgtcagatccgcccccggctggtgtagagggtagtgcgtcgatgatcgtagaattggctgttggcattgccgccaacttacccctggaaagccgagacgtggccctcacatacccaatgcccggcgaccccgtacagcccgatgtgatggagcccgagaagcaagccctgccaccccttccagaaccggcggaggagccagaggacaaagacggcgacaagaacgcaaaacgcgacaagaacaagagtgcagcggcgacacagcagtcctctcagcaacagcagccaccaccggcatccctccagaaagatcccaacagagtccggttcgcaggtttcatcgctgtcgaggtcaggggaagacaggtattggccaaggctccgatatggacgatgggttag

SEQ ID NO: 21206 - protein, 1048 aa, Muscodor strobelii
  misc_feature: SGI Peptide ID NO. 567175
  misc_feature (207)..(1047): NCBI GI: 256729935 Blast Desc: NECHADRAFT_83877 [Nectria haematococca mpVI 77-13-4]
  misc_feature (234)..(1047): NCBI GI: 46122099 Blast Desc: FG05427.1 [Gibberella zeae PH-1]
  misc_feature (414)..(1047): NCBI GI: 171686166 Blast Desc: protein product [Podospora anserina] gi|170943044|emb|CAP68697.1| protein product [Podospora anserina]
  misc_feature (266)..(1047): NCBI GI: 85078461 Blast Desc: NCU00486 [Neurospora crassa OR74A] gi|28917222|gb|EAA26935.1| [Neurospora crassa OR74A]
  misc_feature (238)..(1048): NCBI GI: 261360184 Blast Desc: conserved [Verticillium albo-atrum VaMs.102]
  misc_feature (632)..(1047): NCBI GI: 39941516 Blast Desc: MGG_05669 [Magnaporthe grisea 70-15] gi|145022362|gb|EDK06382.1| MGG_05669 [Magnaporthe grisea 70-15]
  misc_feature (647)..(1048): NCBI GI: 154302014 Blast Desc: BC1G_10244 [Botryotinia fuckeliana B05.10] gi|150855636|gb|EDN30828.1| BC1G_10244 [Botryotinia fuckeliana B05.10]
  misc_feature (660)..(1048): NCBI GI: 156051548 Blast Desc: SS1G_07181 [Sclerotinia sclerotiorum 1980] gi|154704959|gb|EDO04698.1| SS1G_07181 [Sclerotinia sclerotiorum 1980]
  misc_feature (520)..(1046): NCBI GI: 145240699 Blast Desc: An08g08850 [Aspergillus niger] gi|134077520|emb|CAK96664.1| protein product [Aspergillus niger]
  misc_feature (717)..(1047): NCBI GI: 119196877 Blast Desc: CIMG_02813 [Coccidioides immitis RS]
MPSFPRLGKHSNRSQHTLPVEHQVVQAQQQEQQREQQRAALQHQLHLQQQQQQLQAQGAGSGGGAAPPLSQPPSSAASPSQQTPGPRRVSAAGLGPDASSNPPSASPGPPPSLSSNDSFRRGHPQQQQAPPAPQQVDTRTGQPPLQPQPPPQQQSTQSSPQQSQHHSQLSLHSLSLNLNNGPPREVLRKPNPNLPPPPAQGSTIPLNLPNPPSTVYNARPQQQQQQQQQQQAPQPRDNYADLVSRSQSARYSQIIPPLQTQSPYGLASSSVDDLSHTASGISSPAVSQGPAPPAHGHPQPQSQPQPAPEPKRRARNLIKNILGSSSSSSSSNRPTSNHYAAQQDHVYDAASAGVVRRPSKRSNNTNNSNNPATTPRGSSLLSRPIDHPDWVPPPSASSRHPQSHQSHSQQSLTQQPSAQHSPSQGVGEFDSSFQFERSNQDLLAGGSQEALPNTIRHVPSEVETSPYDHEDLAFHQQQAIAQHQAQLLQQQGQILSPPPARPQADSQQQLYGGAQIVVDPAQSPYQQYTQQPRDQYQQHSNPPSIYTSHLTTETSLPPNPETVSQLSHESPTSDSEQPPANLQSAQDSPAVGQAPHDGLLSGVQQPRQSSPSQAMPPPPQQQQQQGPPGQGRRSVENDKMRSVEPPPGPPPNYRHSQVNAMNPLPPTPGAGNPPPGFRPSGSGERQQYDGPAADERGRNSPQPSTEGRDADHDKQFKDLLTKYKNVKRLYFDGKAQIEQMTQQVEQLQNAVANQRMSQSRTALDDNEYSTRFNRLNGAINNLSFNIRKDWQSLPSWIERYVSSDAIKVGKQEMTAVGRAIISRWIVDEVFNKCFHPALDVDLSCSLKQIEQNIRRYSYTMSSQEEFDALTAKVVSWRMTTLEGLQHRLNSPESAEHRADYTKMVTSNLTAVLYQYLSDPPPAGVEGSASMIVELAVGIAANLPLESRDVALTYPMPGDPVQPDVMEPEKQALPPLPEPAEEPEDKDGDKNAKRDKNKSAAATQQSSQQQQPPPASLQKDPNRVRFAGFIAVEVRGRQVLAKAPIWTMG

SEQ ID NO: 21207 - DNA, 6698 bp, Muscodor strobelii
  misc_feature: SGI EST ID NO. CUFF.50041.1
  misc_feature: Variant of the nucleotide sequence at SEQ ID NO 21205
gaattttgaaccctggctaattgaacgagtcctttcctcgtgaccctgtcgaaaacaccgaggaagggtcagacccacggtctgatatgtgtctctgactcgcatcagtacctaagctttgcatgtctctggtctccttaagaccacttggtaaataagcctatgtatgtagctggagagatcgtcatcaccattctgactgccggcagtgtagtagcatactaccactgtatgtaatttgcgattgccatctgatgtgcacctcagtctgggacaccatgtcggagggccctctaccaattccttgcgctgggtggtctcaacctctcacctctcagagcgctcctgatacctcatttcttcttgtaaatacctcgttgccgaaagctgaatatcaatgtgattggtcgcgcctcttctgggaacttcatctcatgctgctcatctgcgcaattttctgaattagcctcgatccattcttcatatttagttccgacatccaactctcgcctgcgattgggaaatatgtaatactggttcatcgtaataattaccagcactagcgatcactaaagagatcctccccaagcgaccgaactgggacccaagattcaagctgggtaacattgaaaatctggatgacatcttccaaacctacgtttttacggcaacgcgaatctatacgcattcaaaagcaatagccgtattttctagctggagagagctaccagaacaaacgaagctttacctgtacatatctacctctgcacttaccaagctatctattagacacaggtcgacaggctttgatccttgcgagcttgtcgagcttgtaccgcaccaattgcccgtcctgattgcctgactattaccggctcctgatcagtgatcatcatcagcacagcccccttcacaagcaagtcagaggatgcccccctcttgagctgccgacaggctagtagatcccccctgtcggtcagagaggaaggtcattatccacccccgtcacgcccgtctgcgagcccgacgggcgacaggctcgagcgggttcaggttgctttgcattgcattcgcggtaatctgacgggcctgctcctcgccattccgctacgacacaggcgcgagagagggatgcagacacgggcgccattgcagattgcagaccgcagcagaatcgagcagcgacagcgagccacagccgcgagatacatactcgcagcaccgtagtaaccaggcgagacaggaccaccctgagcggatctgaggtacagcatttgcagcgttttgattccaggccagacgaatcagctcgacggcaggggccgcacagaacgacacatctcgtctcatcttttttttttttttgctttgcttcggacggggtaattggagctgagctcatcagtcgtcttgtttctttgtccgtgtcgtcttgtcccagcagatatagcggtttgcgctctccgcgctttgtttttcttgcacgcgccgagctggtgctttgtcgctcgaccggtcctggaacaggtcacggcccctcgaacagccaagaatagacaggcgctgagcgtcccagtggtctgcatcacgcacataatagcattatgccctccttcccacgcctaggcaaacacagcaatcgatcgcagcacactctgcccgtcgagcaccaggtggttcaagcgcagcagcaggagcagcagcgggagcagcagcgggctgccctgcaacaccagcttcacttacagcagcagcagcagcaactccaggcgcagggcgcgggcagtggaggaggagctgcaccgcccctctcacaaccgccctcgtccgcggcttcaccctcccaacagacacctgggccgcgacgagtgtctgctgccggactcggacccgacgcctccagcaaccccccttcagcctcgcctggaccgccgccgtcgctcagctcgaacgactccttccgccgagggcacccacagcagcagcaggcgccgcctgcaccacagcaagtcgacaccaggaccggccagcctccactgcagccgcagcccccgccacagcagcagagcacgcagtcgtcgccgcaacagagccagcaccactcgcaattgtcgctgcacagtctcagcttaaacctcaacaacggcccgccgcgcgaggtgctgcgcaagcccaatcccaacctgccgcccccgcctgcgcaggggagcacgatacccctcaatctgcccaatcccccctccaccgtgtacaacgcacgcccgcagcagcaacagcagcagcaacagcagcagcaggcaccgcagccccgcgacaactacgccgacctggtgtcccgctcgcagtctgcccgctactcccagatcatccccccgctgcagacgcagtcgccctacggcctcgcctccagctcagtcgacgacctgtcccacaccgcctcgggcatctcctcccccgccgtcagccaaggccccgcgccgcctgcccacggccaccctcaacctcaatctcaaccccagccggcgccggaacccaagcgacgggcccgcaacctcatcaagaacatcctgggctcgtcatcgtcgtcgtcgtcgtcgaatcgccccacctccaaccattacgccgcccaacaggaccacgtctacgacgccgcctctgctggtgttgtccgccggccatccaagcggtcaaacaacaccaacaacagcaacaaccccgccaccacgccgaggggcagctctctgttgtcccgtccgattgaccatcccgactgggtgccccctcccagcgcaagctcgcggcatccccagtctcaccagtcccacagtcagcagtcgctgacacagcagccctcggcccagcactcacccagccagggcgtcggcgagttcgacagctctttccaattcgaacgctccaaccaggatctgctggcaggaggctcgcaagaggcgctgcccaacaccattcgccacgtgcccagcgaagtcgagacgtcgccgtacgaccacgaggatctcgccttccaccagcagcaggccattgcccaacaccaagcccagctgctccagcaacagggccagatcctctcgccgccacccgcacgaccgcaggccgatagccagcagcaactctacggcggtgcacagattgtcgtcgacccggcgcagagcccgtaccaacaatacacccagcagcctcgtgatcagtaccagcagcacagcaatccgccctccatctacaccagccacctcaccactgagacctccctgccgcccaacccagagacagtgtcccagctgtcgcacgagtcgccgacgtcggactccgaacaaccacccgccaacctgcaatctgcgcaggactcgccggctgtaggccaagcaccccacgacggattgctctccggtgtgcagcagccccggcagtcatcgccctcccaagccatgccacctcccccacagcagcagcaacagcagggtccgcctggccagggccgtagatctgtcgagaacgacaagatgaggtctgtcgagccgcctcctgggcctcccccaaactatcgacacagccaggtcaacgccatgaatcccttgcccccaacccctggcgcgggcaatccaccccctggcttccgtcccagcggctcaggcgagcgacagcaatatgacgggcctgcggccgatgagcgcgggcggaacagcccccagccatctactgaaggccgcgatgctgatcacgacaagcagttcaaagacctcctcaccaaatacaagaacgtcaagagactttattttgatggaaaagcacaaatcgaacagatgacacagcaggtagagcagctacagaatgccgttgccaatcagcgtatgtcccaatcgcgaacggcgctggacgataacgaatactcgacacgctttaacagactcaatggcgccatcaacaatctttctttcaacatccgcaaggattggcaatcgcttccctcgtggatcgaacgatatgtttcgtcagacgccatcaaggtgggcaagcaggagatgacagccgttggacgcgccatcatctcgcgctggatcgtcgacgaggtcttcaacaagtgtttccacccagcccttgatgtggatctcagctgcagtctgaaacagatcgagcaaaacatccgcagatactcatacactatgagcagccaggaggagttcgatgctctaacagccaaggtagtctcgtggcgaatgacaacactagagggtctacagcatcgccttaactcacccgagagcgccgagcatcgtgcggactacacgaagatggtcacaagtaacctcacagcggtcctctaccaatacctgtcagatccgcccccggctggtgtagagggtagtgcgtcgatgatcgtagaattggctgttggcattgccgccaacttacccctggaaagccgagacgtggccctcacatacccaatgcccggcgaccccgtacagcccgatgtgatggagcccgagaagcaagccctgccaccccttccagaaccggcggaggagccagaggacaaagacggcgacaagaacgcaaaacgcgacaagaacaagagtggtatgttgacaatgctcggcggctcaaccccacatcccgcgagcagcagaaaaggcagcacggcatcgatccttactgacgcggccactcctcaaacagcagcggcgacacagcagtcctctcagcaacagcagccaccaccggcatccctccagaaagatcccaacagagtccggttcgcaggtttcatcgctgtcgaggtcaggggaagacaggtattggccaaggctccgatatggacgatgggttagatctatagcttggagggttcagaataaggccccacgggcaagttttgcttgctcttccatggccctagtcattatgctatgcacagatggccccatttggcgaagatatggataaagcattcgggatggaaagggatatgatacgatcaagaagagtaccatgaaaaggaaagaaaggcatgaagagacgtagagagcaattgtggaattgctgatatgggctatatatgatgatttatttgtgtgctgtctctctttcgcgtttcgtttggggaaggagacatggttgggacattgtcggaatctagattctttttcggattcagatacccctggtgatacagataggcaagaagacggctgcggcatatgaatggacatggacatgaactcgaactcctcgattcgatgcgctatgtgcagtaggccttatgtggaatgacagttcagagaccatggtatcgccatttgcagactttgttcgtttattgacattataatcgtgcgtgtgtgatatggatacgttatgtactattgttttcacgtctgcttgtcacccatgactattagcgcagctgaaacggcgctcagacatctcaagagagattgcatgaggctgtggccttacatcttgcattgcgtatcctttccgacatctgactaccggccagcaagcgatatctttcggaagcaaagactgctaatagtctgccccttaacgcccccaaagctgaaactcctataaggcacccgaccaacaacctcaaatccccagcgtgcgtcgttttcggcatctacgccattgccaattggcctaccaccacccaccactcccgctatctccgatgtcgtgtacgaaggctcagcgaaccaagaccgaagctcgtcctccgtccaattgcaactcgtgactaggaataagccgccgggcttgagaagtgcgaggattgttggcgggtataattcattgactcttctcggctgtgcttccgtatctcccgccgtgttcactgttgtcgtcgtcgctggaggcaaaatctcggcagaaagcgaaacagcgtcaaacgtgcccttatctagtatcacgtcccaaccaccgctttgccttactcgttccggcgcaacaggcgcatcatgtaatgcgaacggtgaatcatgcaatatatcgtggacgtgaaatcttatttccacctcgtctccctcaccgtcttctgcaccttccttctcccgcctcctatttttctccagtttcctagcaaagtcaacgctcatatcactataatccacgcccagcatctcgcctctccaccccgcgtctctcagcgcgaagagtagctgtccatttcccgtcccaagatcaagaaatgtggtttcctcctcagacaacgaaagttcctgatgccgttctggatccgatagaaattcgacgagtttgttttcagcgtcgctgtcgtcgaaccaagctgtacccgtgtctgaggggtcatgtgcgtagtttgatatttcggtttcgtagagggattcccagctgtagggcgttagtggatgcgtatggtagggaaacatggaaggtagccggggattcgagggacctactattcttttgtgcctagctttgagggctcgagggatgttggttttgtcatgctgtaatgattcggtcgcctcctgatttgtattcattgatattcgcctgagttgatgttgctcatcgtcctctcactttgaatcatgcgtcaaaatgatgtgaggtttgtttgagtgttgcgatagaataccgcatggggaaatgtaaaacaccacgttcgcagcatggtggggtggaggggcagagatggtagaattgtg

SEQ ID NO: 21208 - DNA, 342 bp, Muscodor strobelii
  misc_feature: SGI cDNA ID NO. 567176
  misc_feature: Encodes the peptide sequence at SEQ ID NO 21209
atgactgccaaagaattgtcgcagttccatttccagccctacggcctcccagatatgtgtgttcagtgcttaaagagcagtcccaaggaatcgttgtttgactgctccattgaattcacttgggaagatcccaatgccgacaacagcacgtgttactgcacgagcgggtggcaatgggatgctagtacccctcctgatccttccagagcgctcaatgaatatctcgcgtgtaaaactaagaccgagtcggaatccgatattttccagttcaagttcgagaacatggatcatccttcgaattttagcctgttgctctcacacagctttgtggaccacaagtag

SEQ ID NO: 21209 - protein, 113 aa, Muscodor strobelii
  misc_feature: SGI Peptide ID NO. 567176
MTAKELSQFHFQPYGLPDMCVQCLKSSPKESLFDCSIEFTWEDPNADNSTCYCTSGWQWDASTPPDPSRALNEYLACKTKTESESDIFQFKFENMDHPSNFSLLLSHSFVDHK

SEQ ID NO: 21210 - DNA, 477 bp, Muscodor strobelii
  misc_feature: SGI cDNA ID NO. 567177
  misc_feature: Encodes the peptide sequence at SEQ ID NO 21211
atgactgccaaagaattgtcgcagttccatttccagccctacggcctcccagatatgtgtgttcagtgcttaaagagcagtcccaaggaatcgttgtttgactgctccattgaattcacttgggaagatcccaatgccgacaacagcacgtgttactgcacgagcgggtggcaatgggatgctagtacccctcctgatccttccagagcgctcaatgaatatctcgcgtgtaaaactaagaccgagtcggaatccgatattttccagttcaagttcgagaacatggatcatccttcgaattttagcctgttgctctcacacagctttgtggaccacaaagactttccggagccacaaagggcaaatctgttcggacaggcgaacctgacattagacattcaagagacaactgacacatctatgacatactctattccgggccctcaaaaagcaaagatagttggagtaactatttga

SEQ ID NO: 21211 - protein, 158 aa, Muscodor strobelii
  misc_feature: SGI Peptide ID NO. 567177
  misc_feature (7)..(111): NCBI GI: 171686164 Blast Desc: protein product [Podospora anserina] gi|170943043|emb|CAP68696.1| protein product [Podospora anserina]
MTAKELSQFHFQPYGLPDMCVQCLKSSPKESLFDCSIEFTWEDPNADNSTCYCTSGWQWDASTPPDPSRALNEYLACKTKTESESDIFQFKFENMDHPSNFSLLLSHSFVDHKDFPEPQRANLFGQANLTLDIQETTDTSMTYSIPGPQKAKIVGVTI

SEQ ID NO: 21212 - DNA, 405 bp, Muscodor strobelii
  misc_feature: SGI cDNA ID NO. 567178
  misc_feature: Elevated expression when VOC is produced
  misc_feature: Encodes the peptide sequence at SEQ ID NO 21213
atgcatggttccaaggtcatccctttcgcccttgtggctttctctgcagtcactatctcagcggttgcaatacaggttaagagggccgactgtattgaaacttgtggtgaggtctgctattggcaggaggacgttgacgctgccgtctctcaaggatatatgtatctcgagaaaggcacaaccgtcggagacaatgactacccgcatcagtacaacaactatgagggcttcgacttccccgatgccggtccatggtatgagttcccaattttaagctcatacgatgtatacaccggcgggtccccgggtgcggaccgtgttgtcatcgacggatcaggcaacttccaggatgcaatcacacacacaggcgcaagcggcaataattttgtagactgcacaaaataa

SEQ ID NO: 21213 - protein, 134 aa, Muscodor strobelii
  misc_feature: SGI Peptide ID NO. 567178
  misc_feature (49)..(132): Pfam Id: PF00545 Pfam Desc: ribonuclease
  misc_feature (5)..(132): NCBI GI: 116198587 Blast Desc: CHGG_07449 [Chaetomium globosum CBS 148.51] gi|88178728|gb|EAQ86196.1| CHGG_07449 [Chaetomium globosum CBS 148.51]
  misc_feature (1)..(132): NCBI GI: 242811649 Blast Desc: extracellular guanyl-specific ribonuclease RntA [Talaromyces stipitatus ATCC 10500] gi|218714132|gb|EED13555.1| extracellular guanyl-specific ribonuclease RntA [Talaromyces ATCC
  misc_feature (1)..(133): NCBI GI: 212544166 Blast Desc: extracellular guanyl-specific ribonuclease RntA [Penicillium marneffei ATCC 18224] gi|210065206|gb|EEA19300.1| extracellular guanyl-specific ribonuclease RntA [Penicillium ATCC
  misc_feature (31)..(132): NCBI GI: 85104062 Blast Desc: NCU01045 [Neurospora crassa OR74A] gi|51704253|sp|P09646.2|RNN1_NEUCR RecName: Full=Guanyl-specific ribonuclease N1; Short=RNase N1; Flags: Precursor ribonuclease T1
  misc_feature (31)..(133): NCBI GI: 361992 Blast Desc: NCU01045 [Neurospora crassa OR74A] gi|51704253|sp|P09646.2|RNN1_NEUCR RecName: Full=Guanyl-specific ribonuclease N1; Short=RNase N1; Flags: Precursor ribonuclease T1
  misc_feature (16)..(133): NCBI GI: 208918 Blast Desc: fusion gene containing ompA-signal peptide/RNase T1 [synthetic construct]
  misc_feature (26)..(133): NCBI GI: 169782684 Blast Desc: [Aspergillus oryzae RIB40] gi|238492331|ref|XP_002377402.1| extracellular guanyl-specific ribonuclease RntA [Aspergillus flavus NRRL3357] RecName: T1; T1;
  misc_feature (9)..(133): NCBI GI: 171692639 Blast Desc: protein product [Podospora anserina] gi|170946268|emb|CAP73069.1| protein product [Podospora anserina]
  misc_feature (31)..(133): NCBI GI: 515263 Blast Desc: protein product [Podospora anserina] gi|170946268|emb|CAP73069.1| protein product [Podospora anserina]
  misc_feature (31)..(133): NCBI GI: 3660338 Blast Desc: protein product [Podospora anserina] gi|170946268|emb|CAP73069.1| protein product [Podospora anserina]
  misc_feature (31)..(132): SWISSPROT Homolog: EC 3.1.27.3 Ribonuclease T(1)
  misc_feature: Useful for introducing or modulating the production of volatile compounds
MHGSKVIPFALVAFSAVTISAVAIQVKRADCIETCGEVCYWQEDVDAAVSQGYMYLEKGTTVGDNDYPHQYNNYEGFDFPDAGPWYEFPILSSYDVYTGGSPGADRVVIDGSGNFQDAITHTGASGNNFVDCTK

SEQ ID NO: 21214 - DNA, 977 bp, Muscodor strobelii
  misc_feature: SGI EST ID NO. CUFF.49692.0
  misc_feature: Variant of the nucleotide sequence at SEQ ID NO 21212
cgcactggttgcacgtctctgaaaatgacctggcaacttccccacagtataagcctatctcggctggaccaaccagactagtcctacaagccaagcgacccagttcgggtagtttcttcattcggtaggtcagctcgttcttagatccagcgtgctgctttgataagacggcggttcagtgctgcgaagatcggtaccatttcaagttatgtcgtcggtattcggcttactttgcagatatgctctcgaaacatataaagagtttgtgagacatctagctggttaagtcgagccgtccctctctacacttttctgctcctctccacaagaatctgcccattgtgttctctcatcccgcctctacagttgaccatgcatggttccaaggtcatccctttcgcccttgtggctttctctgcagtcactatctcagcggttgcaatacaggttaagagggccgactgtattgaaacttgtggtgaggtctgctattggcaggaggacgttgacgctgccgtctctcaaggatatatgtatctcgagaaaggcacaaccgtcggagacaatgactacccgcatcagtacaacaactatgagggcttcgacttccccgatgccggtccatggtatgagttcccaattttaagctcatacgatgtatacaccggcgggtccccgggtgcggaccgtgttgtcatcgacggatcaggcaacttccaggatgcaatcacacacacaggcgcaagcggcaataattttgtagactgcacaaaataaggtggcgattccatgaatgtagactgaagaaatgataacaagacgacatgtccccacgaataaaactattaagccagccggagaaagacatgtgaggaggtttggatcgagaagatccatccgcaacatataagcatcttggcattcaagattttcgacatgaactcgagatacaaaatttaatcaatacttgaaacgag

SEQ ID NO: 21215 - DNA, 546 bp, Muscodor strobelii
  misc_feature: SGI cDNA ID NO. 567179
  misc_feature: Encodes the peptide sequence at SEQ ID NO 21216
atgaggacgctcatgcgaggaaatccaaatgctgtattcgagtttcctcttggtcccaatggcatggtctttggaatggacatcaacagaccgccaggcccgcctccaagccatgccttgcccacagatgcgttcgttgttttcggatatcgaagatctgacataactcatattgacccaatctatataggcaccattacccgcgagaggaggtccacctcccgagcggatggcgaagactcaagtccgactcagtggtgcccagttgtcgactacgacgcaacgccgggcccgctcgcaaattcatttggccatccctggactggccaacctcagaacccgacgataccctcgatttggagagtaataagagattggatgcctgctttccccatggtgaaacagccatatggccctgggggtggtagtcctggtggtagtggcttcaggggcagagaaatggacaccatcgagcagtttggcaatacggcgaatgttaccaagagcgcgaatgtcacagagactgtagcggccgaagcggactga

SEQ ID NO: 21216 - protein, 181 aa, Muscodor strobelii
  misc_feature: SGI Peptide ID NO. 567179
MRTLMRGNPNAVFEFPLGPNGMVFGMDINRPPGPPPSHALPTDAFVVFGYRRSDITHIDPIYIGTITRERRSTSRADGEDSSPTQWCPVVDYDATPGPLANSFGHPWTGQPQNPTIPSIWRVIRDWMPAFPMVKQPYGPGGGSPGGSGFRGREMDTIEQFGNTANVTKSANVTETVAAEAD

SEQ ID NO: 21217 - DNA, 2115 bp, Muscodor strobelii
  misc_feature: SGI cDNA ID NO. 567180
  misc_feature: Reduced expression when VOC is produced
  misc_feature: Encodes the peptide sequence at SEQ ID NO 21218
gcccagccgagcgagaccaggagcccccgcaagcgcagccacgatgagttccgcaacgagtctgatcccaacgatcccaacgaccccaacgaccgcaaagaccccaacgagggcatcgacgacgacctgaagctcgtccgcgacaccgtcacccagatgttcgagtccaactggaccgccgacgccctgtacgagacgaccctcggccaggtcaagctcccggccaagatcttcgtccgcgacgccgacggccacctccagccctacaagggccccaccccgagcagcagggacgccgacaagagcacccccgtcctggtgcgtcgaccgtggcccggcgccctggtcgagaagctgccgcacaccgagcccgctccgcagtccatgtgctacatcgtcaagagccacccgaggcgcggcaagttcttcccggacaaggccaaggctctcggtgtcgtcgacaggtccctgtacaaggtcctcgccggcaatctgcccgtccaggcccaggacgggtcgaccgtcaccccggacatggtcatgggccccaacgagccaggcagtggctttgccgtcgtcgacttgcccaccgccgcctacatcgagcccctggtgaaccggccggagtggcgcgacgagaagctgatggagtgtgtccacgacgtcgtatggatcctcggcgagggcattgtcgacaacccgcggctgcaggacttcatgaggcacttgtcatcctcggccaagacacccatcaagcacatcgtctcctctgccgacacctgtcccgacatgatcgctctcgagtcctcggctgcccagacctacaacttgcggggcattgatcaagacagatttcccctgcctgttttcaataacaaggcctctctcatgggtacccctgtgccgcaatcagatctgttcgaggtcgcccgcgtggggaagcgcatcacctacgcccccaagtacagtcatcagaatgacaagattgtacctttccccaatgtggctgcccttgctaaggccaaggacaggccagctacgcggaaatataccgagagagcactttccaaggtgtccagtcgcagctttcaggatgatgtcgacaaagctgaagccgacatcccaaacaagaatgctgagatcatcccccttggcaccggctcgtcactgccctccaagtaccgcaacgtctccgcgacccttgtccgtgttcccggatacggcaactacctcttcgacgctggcgagaacacgctgggccaactccgacgtgccttcggcagtgagctaccatccgttctgcgcgacctgaaggccatatggatcagtcacatgcatgccgaccatcacctcggaaccgtgtccgtgatcaaagcctggcatgacgaaacttccaagtctatgcccgatgccaggctgctgtttgcctcccacttcagcatgatcaattggctgcgcgagtatgcatgcgtggagaatttcggcctccgtcgactgctcactcacggcttcaatagatcccgagacgacgggagcagcgtcacgcgtgattttgatccggcagaaacaaaggagttcggcttgaccaagatccagggtgcgtgggttgaccactgtttcggtgcgctcgcgacctctttcacctttccctccggtctcaagatatcctactcgggagattgtagaccctgcgacaagtttgtggagattggtaagggatctacgctactcatccacgagtctacgttcgatgactccatgaggggcgatgcgctcgccaagaaacattccacgatgaaggaggccattggtgttgggcggagaatgggtgccagacgcatctttttgacccatttcagccagcggtatcaagcgatccccaagatggggaggccaggtagcaggagcagtagtgggagtgggagtgaaagtggtcgagagagcaattgggagagcgaccgagaagatggtgaggtgggggatcaaggacatccggatgaggcgattctcgtcgcgttcgatctgatgagggtgaggttgggcgagtttagacatgcccaggctttcttgcccgccattcagaggatgcttgaggatcctgtgagtcttgtttag

SEQ ID NO: 21218 - protein, 704 aa, Muscodor strobelii
  misc_feature: SGI Peptide ID NO. 567180
  misc_feature (396)..(618): Pfam Id: PF00753 Pfam Desc: Metallo-beta-lactamase superfamily
  misc_feature (396)..(449): Pfam Id: PF00753 Pfam Desc: Metallo-beta-lactamase superfamily
  misc_feature (1)..(699): NCBI GI: 156037628 Blast Desc: SS1G_12528 [Sclerotinia sclerotiorum 1980] gi|154697936|gb|EDN97674.1| SS1G_12528 [Sclerotinia sclerotiorum 1980]
  misc_feature (1)..(699): NCBI GI: 116208200 Blast Desc: CHGG_03393 [Chaetomium globosum CBS 148.51] gi|88183990|gb|EAQ91458.1| CHGG_03393 [Chaetomium globosum CBS 148.51]
  misc_feature (6)..(698): NCBI GI: 255957035 Blast Desc: Pc21g23030 [Penicillium chrysogenum Wisconsin 54-1255] gi|211590981|emb|CAP97200.1| Pc21g23030 [Penicillium chrysogenum Wisconsin 54-1255]
  misc_feature (2)..(698): NCBI GI: 115397493 Blast Desc: conserved [Aspergillus terreus NIH2624] gi|114192529|gb|EAU34229.1| conserved [Aspergillus terreus NIH2624]
  misc_feature (5)..(631): NCBI GI: 261191546 Blast Desc: tRNA processing endoribonuclease Trz1 [Ajellomyces dermatitidis SLH14081] gi|239589947|gb|EEQ72590.1| tRNA processing endoribonuclease Trz1 [Ajellomyces dermatitidis
  misc_feature (7)..(698): NCBI GI: 169767144 Blast Desc: [Aspergillus oryzae RIB40] gi|83765898|dbj|BAE56041.1| protein product [Aspergillus oryzae]
  misc_feature (10)..(697): NCBI GI: 119185995 Blast Desc: CIMG_03045 [Coccidioides immitis RS]
  misc_feature (7)..(698): NCBI GI: 238483971 Blast Desc: tRNA processing endoribonuclease Trz1, [Aspergillus flavus NRRL3357] gi|220701274|gb|EED57612.1| tRNA processing endoribonuclease Trz1, [Aspergillus flavus NRRL3357]
  misc_feature (5)..(631): NCBI GI: 239612646 Blast Desc: tRNA processing endoribonuclease Trz1 [Ajellomyces dermatitidis ER-3]
  misc_feature (38)..(696): NCBI GI: 85086579 Blast Desc: NCU00232 [Neurospora crassa OR74A] gi|28918798|gb|EAA28467.1| [Neurospora crassa OR74A]
  misc_feature (115)..(629): SWISSPROT Homolog: EC 3.1.26.11 Ribonuclease Z
  misc_feature: Useful for introducing or modulating the production of volatile compounds
AQPSETRSPRKRSHDEFRNESDPNDPNDPNDRKDPNEGIDDDLKLVRDTVTQMFESNWTADALYETTLGQVKLPAKIFVRDADGHLQPYKGPTPSSRDADKSTPVLVRRPWPGALVEKLPHTEPAPQSMCYIVKSHPRRGKFFPDKAKALGVVDRSLYKVLAGNLPVQAQDGSTVTPDMVMGPNEPGSGFAVVDLPTAAYIEPLVNRPEWRDEKLMECVHDVVWILGEGIVDNPRLQDFMRHLSSSAKTPIKHIVSSADTCPDMIALESSAAQTYNLRGIDQDRFPLPVFNNKASLMGTPVPQSDLFEVARVGKRITYAPKYSHQNDKIVPFPNVAALAKAKDRPATRKYTERALSKVSSRSFQDDVDKAEADIPNKNAEIIPLGTGSSLPSKYRNVSATLVRVPGYGNYLFDAGENTLGQLRRAFGSELPSVLRDLKAIWISHMHADHHLGTVSVIKAWHDETSKSMPDARLLFASHFSMINWLREYACVENFGLRRLLTHGFNRSRDDGSSVTRDFDPAETKEFGLTKIQGAWVDHCFGALATSFTFPSGLKISYSGDCRPCDKFVEIGKGSTLLIHESTFDDSMRGDALAKKHSTMKEAIGVGRRMGARRIFLTHFSQRYQAIPKMGRPGSRSSSGSGSESGRESNWESDREDGEVGDQGHPDEAILVAFDLMRVRLGEFRHAQAFLPAIQRMLEDPVSLV

SEQ ID NO: 21219 - DNA, 2347 bp, Muscodor strobelii
  misc_feature: SGI EST ID NO. CUFF.49706.0
  misc_feature: Variant of the nucleotide sequence at SEQ ID NO 21217
gcccagccgagcgagaccaggagcccccgcaagcgcagccacgatgagttccgcaacgagtctgatcccaacgatcccaacgaccccaacgaccgcaaagaccccaacgagggcatcgacgacgacctgaagctcgtccgcgacaccgtcacccagatgttcgagtccaactggaccgccgacgccctgtacgagacgaccctcggccaggtcaagctcccggccaagatcttcgtccgcgacgccgacggccacctccagccctacaagggccccaccccgagcagcagggacgccgacaagagcacccccgtcctggtgcgtcgaccgtggcccggcgccctggtcgagaagctgccgcacaccgagcccgctccgcagtccatgtgctacatcgtcaagagccacccgaggcgcggcaagttcttcccggacaaggccaaggctctcggtgtcgtcgacaggtccctgtacaaggtcctcgccggcaatctgcccgtccaggcccaggacgggtcgaccgtcaccccggacatggtcatgggccccaacgagccaggcagtggctttgccgtcgtcgacttgcccaccgccgcctacatcgagcccctggtgaaccggccggagtggcgcgacgagaagctgatggagtgtgtccacgacgtcgtatggatcctcggcgagggcattgtcgacaacccgcggctgcaggacttcatgaggcacttgtcatcctcggccaagacacccatcaagcacatcgtctcctctgccgacacctgtcccgacatgatcgctctcgagtcctcggctgcccagacctacaacttgcggggcattgatcaagacagatttcccctgcctgttttcaataacaaggcctctctcatgggtacccctgtgccgcaatcagatctgttcgaggtcgcccgcgtggggaagcgcatcacctacgcccccaagtacagtcatcagaatgacaagattgtacctttccccaatgtggctgcccttgctaaggccaaggacaggccagctacgcggaaatataccgagagagcactttccaaggtgtccagtcgcagctttcaggatgatgtcgacaaagctgaagccgacatcccaaacaagaatgctgagatcatcccccttggcaccggctcgtcactgccctccaagtaccgcaacgtctccgcgacccttgtccgtgttcccggatacggcaactacctcttcgacgctggcgagaacacgctgggccaactccgacgtgccttcggcagtgagctaccatccgttctgcgcgacctgaaggccatatggatcagtcacatgcatgccgaccatcacctcggaaccgtgtccgtgatcaaagcctggcatgacgaaacttccaagtctatgcccgatgccaggctgctgtttgcctcccacttcagcatgatcaattggctgcgcgagtatgcatgcgtggagaatttcggcctccgtcgactgctcactcacggcttcaatagatcccgagacgacgggagcagcgtcacgcgtgattttgatccggcagaaacaaaggagttcggcttgaccaagatccagggtgcgtgggttgaccactgtttcggtgcgctcgcgacctctttcacctttccctccggtctcaagatatcctactcgggagattgtagaccctgcgacaagtttgtggagattggtaagggatctacgctactcatccacgagtctacgttcgatgactccatgaggggcgatgcgctcgccaagaaacattccacgatgaaggaggccattggtgttgggcggagaatgggtgccagacgcatctttttgacccatttcagccagcggtatcaagcgatccccaagatggggaggccaggtagcaggagcagtagtgggagtgggagtgaaagtggtcgagagagcaattgggagagcgaccgagaagatggtgaggtgggggatcaaggacatccggatgaggcgattctcgtcgcgttcgatctgatgagggtgaggttgggcgagtttagacatgcccaggctttcttgcccgccattcagaggatgcttgaggatcctgtgagtcttgtttaggcacatattctagaggaagagagcaggacatggaaagaacagtatagaacattgcgcaagaggatctggagtgtgatcttggatggacttaccccatagagttgcattgcatggcggagctatctctgttttgttgtatattaagggtttgtaatataggaggatcaataaatctcgtctaggatcaagatttccgttaatgttctctaccatttgacagcgtacatcgttg

SEQ ID NO: 21220 - DNA, 1293 bp, Muscodor strobelii
  misc_feature: SGI cDNA ID NO. 567181
  misc_feature: Encodes the peptide sequence at SEQ ID NO 21221
atggccattgcttctggtcctaattcaactcaaattccgaagtcgccatcgctgactgctgatcaccacggcacacaagcagaagatgcacgcaaatcacaaatagacacttacgttcaatcggggatacagtcgctttccattcctctcgccttagagccctgcgcgagtggaaagtccaacgacttggtctctgtgctcgtcacaggagggacgggtagtctaggatgccatctcgtagcgcacctagcccgccttccgcacgtgagcagcgtgtattgccttaaccgccgaaacgaccaagacccattgactcgccagatgaaagcttttacactgaagggcatcacgctggacccctcagcggctcagaagctgaaagtatacgagacggacacatcacaaccacaactgggcctcgaacctgagcaatatcaggaaatactagaatatgtcgaccacatcgtccataacgcgtggccaatgggtctcaagagccccgtcaaaagcttcgtgcctcagttctccgtcatgcggaacctgcttgatctcgcggtcgccctatcaaccaagaacaggacgaaaggcaagaaagtgtcgtttcaactcgtatcgtcgatcgctacagtaggatactaccccctgcacaacggcatgcctctcgttcccgaagagccgatggcaatcgactccgtgctgcctactggctacgccgaggctaagctcgtgtgcgagcggatgctcagcgaggcgctcgcgcagcggcctgattgcttccgcgccatggccgtgcgactggctttcattgtcaaatcgtcgcagaagatcggtgctctaccggatctgagcggttcgctgtcttggacgccggcggacgacgtcgcgagtactctggttgaccttctgctcctcgacgacaccgttgcgtcttatccgatctatcatgtcgacaatcctgtgcgccggctgtggagcgagatgctcgccatgctcgctgaagtgcttggcataccgcccagtggcatagttccctttcaggagtggctggacagggtccgcgggtttggagcatcgggcatggagaatccggcggcgaagattatagattttctcgccaatgactttgagcgatggaataaaagatccctggcgcctacctccctaccgagatgcttgaattacgcctttaccatcctaatacgcttcggatctggtgaaaccgatgccgatgtcaacctaccaaaggtcagcaatgctcttgctacaggctttctcttcagctctagctcctag

SEQ ID NO: 21221 - protein, 430 aa, Muscodor strobelii
  misc_feature: SGI Peptide ID NO. 567181
  misc_feature (68)..(298): Pfam Id: PF07993 Pfam Desc: Male sterility protein
  misc_feature (66)..(88): Pfam Id: PF01370 Pfam Desc: NAD dependent epimerase/dehydratase family
  misc_feature (68)..(159): Pfam Id: PF07993 Pfam Desc: Male sterility protein
  misc_feature (1)..(377): NCBI GI: 212539163 Blast Desc: polyketide synthase, [Penicillium marneffei ATCC 18224] gi|210069479|gb|EEA23570.1| polyketide synthase, [Penicillium marneffei ATCC 18224]
  misc_feature (30)..(377): NCBI GI: 242821914 Blast Desc: polyketide synthase, [Talaromyces stipitatus ATCC 10500] gi|218712699|gb|EED12124.1| polyketide synthase, [Talaromyces stipitatus ATCC 10500]
  misc_feature (1)..(377): NCBI GI: 242760842 Blast Desc: polyketide synthase, [Talaromyces stipitatus ATCC 10500] gi|218723266|gb|EED22683.1| polyketide synthase, [Talaromyces stipitatus ATCC 10500]
  misc_feature (1)..(377): NCBI GI: 238841419 Blast Desc: polyketide synthase [Microsporum canis CBS 113480]
  misc_feature (1)..(377): NCBI GI: 119184607 Blast Desc: CIMG_07081 [Coccidioides immitis RS]
  misc_feature (1)..(377): NCBI GI: 240109915 Blast Desc: polyketide synthase, [Coccidioides posadasii C735 delta SOWgp]
  misc_feature (1)..(377): NCBI GI: 212539227 Blast Desc: polyketide synthase, [Penicillium marneffei ATCC 18224] gi|210069511|gb|EEA23602.1| polyketide synthase, [Penicillium marneffei ATCC 18224]
  misc_feature (1)..(377): NCBI GI: 242760674 Blast Desc: polyketide synthase, [Talaromyces stipitatus ATCC 10500] gi|218723234|gb|EED22651.1| polyketide synthase, [Talaromyces stipitatus ATCC 10500]
  misc_feature (1)..(377): NCBI GI: 115390210 Blast Desc: ATEG_03432 [Aspergillus terreus NIH2624] gi|114195006|gb|EAU36706.1| ATEG_03432 [Aspergillus terreus NIH2624]
  misc_feature (30)..(377): NCBI GI: 52000443 Blast Desc: citrinin polyketide synthase [Monascus purpureus]
  misc_feature (57)..(348): SWISSPROT Homolog: EC 1.2.1.31 L-aminoadipate-semialdehyde dehydrogenase
  misc_feature: Useful for fungicidal and/or biocontrol applications
MAIASGPNSTQIPKSPSLTADHHGTQAEDARKSQIDTYVQSGIQSLSIPLALEPCASGKSNDLVSVLVTGGTGSLGCHLVAHLARLPHVSSVYCLNRRNDQDPLTRQMKAFTLKGITLDPSAAQKLKVYETDTSQPQLGLEPEQYQEILEYVDHIVHNAWPMGLKSPVKSFVPQFSVMRNLLDLAVALSTKNRTKGKKVSFQLVSSIATVGYYPLHNGMPLVPEEPMAIDSVLPTGYAEAKLVCERMLSEALAQRPDCFRAMAVRLAFIVKSSQKIGALPDLSGSLSWTPADDVASTLVDLLLLDDTVASYPIYHVDNPVRRLWSEMLAMLAEVLGIPPSGIVPFQEWLDRVRGFGASGMENPAAKIIDFLANDFERWNKRSLAPTSLPRCLNYAFTILIRFGSGETDADVNLPKVSNALATGFLFSSSS

SEQ ID NO: 21222 - DNA, 261 bp, Muscodor strobelii
  misc_feature: SGI EST ID NO. CUFF.49712.0
  misc_feature: Variant of the nucleotide sequence at SEQ ID NO 21220
ctttcattgtcaaatcgtcgcagaagatcggtgctctaccggatctgagcggttcgctgtcttggacgccggcggacgacgtcgcgagtactctggttgaccttctgctcctcgacgacaccgttgcgtcttatccgatctatcatgtcgacaatcctgtgcgccggctgtggagcgagatgctcgccatgctcgctgaagtgcttggcataccgcccagtggcatagttccctttcaggagtggctggacagggtccgcg

SEQ ID NO: 21223 - DNA, 1803 bp, Muscodor strobelii
  misc_feature: SGI cDNA ID NO. 567182
  misc_feature: Encodes the peptide sequence at SEQ ID NO 21224
atgttatcgcccgcgctgcttaaagatcgcccaacgaattcgacgcaagagtggtatgccctagcccataacacccaagaccagtcaggaggtgcatttccctcaaacatccttgtcttcgaaccgagttccggccaagtgatgcaggccattcgtggtcttacattcaccaaggtctcccgagcctcgatgatcaagatcttgactcgacattcggatcagggttcaagtgataagtgggttgaagtgccgccgcctcaatcccttctaccgtcatcagcagattcgctgcctctccgtacagatacagccgtgaatcaaaagagcacttccgatcttctgagtagagtcaagggagtggtaggcgagatcacaggccttcggaccgatgaaatcccagacgatacagatctggctgacattggcatcgattcactgattggaatggagctggcgaacgatattgagagcgccttcggctgtactttgaatcatgacgagttggtgatgaccagcgacctaaggggcctcatacatcttgtcgagagcgccctagggattgatcgcaccgacgatgcggacctccggcttgacagaaactctcggggtaatcatcaactggaaattcaattaccgtatatcaatgaccgcccaggttccggctcgagtgactgctcgacatcaaccgagcctcagatttggactccaaccgcaactaatgatatcgatatgacaataatccaggaatgcttcactgaaacgaagctcagcactgatcagtacattgagaaacatggattcgaaggatacgtgcaagaattgcttcccaaatacacgactttaagcggcattatcatagtcgaagccttcaaaaccctgggctgtgatctttcaacaactcagtccggtcacacactggagcgcatccagtttacgccagagcaatgtcgttttcaggatcgactgtaccaaattctcgaggaaggaggaatcattcgatctaacggagaccaactcgttcgcactgaagcttctctgccctcgatgacaagtgcaatgtatatggagcacttgcaccgtgagcacccggatcataggtgtgtgaccgagctggtgtatcgcacatgctccaggctcgtagacatcctgctgggaaagctcgatgccacccagctcctgtttggtgtcgaagagaatcgtctacttctcgcgaccttttatggcgattacgggctcaacaagttgtatatcgaccaaatgacccagttcgtgcaaaatctgattgctcgactggcctcgcagggtcaggtcgaagtgttgcgaatcatggaaatgggcgcaggttccggaggtacaacgaagtcattattgcctatactggcccgagccgaaatcccagtagagtacacatttactgatctatcgccttcatacatcgcaaaggccagaaagatgttcaagcaataccccttcatcaaagtcgctgtgcatgacatcgagcaaccgccatcagaccatgacatgattggttcgcaacacatcgtcatcgctaccaacgctgttcacgcaactcgttctctatctgcgtcttgcgggaatatgcgcaagttcctccggcccggtggcttcttgttgatgttagaaatgatgcgacacctgccgtgggtcgatgttgtgttcggccccttcaagggctggtggctattcgatgatgggagaacacacgcgcttgttgatgagacgcgttgggataaggatcttcgtgaagctggatacgaatatgtcgactggccgatggcgtaa

SEQ ID NO: 21224 - protein, 600 aa, Muscodor strobelii
  misc_feature: SGI Peptide ID NO. 567182
  misc_feature (443)..(544): Pfam Id: PF08242 Pfam Desc: Methyltransferase domain
  misc_feature (115)..(181): Pfam Id: PF00550 Pfam Desc: Phosphopantetheine attachment site
  misc_feature (15)..(597): NCBI GI: 115390210 Blast Desc: ATEG_03432 [Aspergillus terreus NIH2624] gi|114195006|gb|EAU36706.1| ATEG_03432 [Aspergillus terreus NIH2624]
  misc_feature (12)..(597): NCBI GI: 40787403 Blast Desc: polyketide synthase [Cochliobolus heterostrophus]
  misc_feature (13)..(597): NCBI GI: 189210844 Blast Desc: polyketide synthase [Pyrenophora tritici-repentis Pt-1C-BFP] gi|187977846|gb|EDU44472.1| polyketide synthase [Pyrenophora tritici-repentis Pt-1C-BFP]
  misc_feature (1)..(597): NCBI GI: 255953601 Blast Desc: Pc21g05070 [Penicillium chrysogenum Wisconsin 54-1255] gi|211589264|emb|CAP95404.1| Pc21g05070 [Penicillium chrysogenum Wisconsin 54-1255]
  misc_feature (3)..(597): NCBI GI: 116203405 Blast Desc: CHGG_09586 [Chaetomium globosum CBS 148.51] gi|88175714|gb|EAQ83182.1| CHGG_09586 [Chaetomium globosum CBS 148.51]
  misc_feature (1)..(597): NCBI GI: 242760842 Blast Desc: polyketide synthase, [Talaromyces stipitatus ATCC 10500] gi|218723266|gb|EED22683.1| polyketide synthase, [Talaromyces stipitatus ATCC 10500]
  misc_feature (20)..(597): NCBI GI: 242821914 Blast Desc: polyketide synthase, [Talaromyces stipitatus ATCC 10500] gi|218712699|gb|EED12124.1| polyketide synthase, [Talaromyces stipitatus ATCC 10500]
  misc_feature (19)..(597): NCBI GI: 119184607 Blast Desc: CIMG_07081 [Coccidioides immitis RS]
  misc_feature (1)..(597): NCBI GI: 238506389 Blast Desc: polyketide synthase, [Aspergillus flavus NRRL3357] gi|220689109|gb|EED45460.1| polyketide synthase, [Aspergillus flavus NRRL3357]
  misc_feature (3)..(597): NCBI GI: 154101582 Blast Desc: polyketide synthase [Xanthoparmelia semiviridis]
  misc_feature: Useful for fungicidal and/or biocontrol applications
MLSPALLKDRPTNSTQEWYALAHNTQDQSGGAFPSNILVFEPSSGQVMQAIRGLTFTKVSRASMIKILTRHSDQGSSDKWVEVPPPQSLLPSSADSLPLRTDTAVNQKSTSDLLSRVKGVVGEITGLRTDEIPDDTDLADIGIDSLIGMELANDIESAFGCTLNHDELVMTSDLRGLIHLVESALGIDRTDDADLRLDRNSRGNHQLEIQLPYINDRPGSGSSDCSTSTEPQIWTPTATNDIDMTIIQECFTETKLSTDQYIEKHGFEGYVQELLPKYTTLSGIIIVEAFKTLGCDLSTTQSGHTLERIQFTPEQCRFQDRLYQILEEGGIIRSNGDQLVRTEASLPSMTSAMYMEHLHREHPDHRCVTELVYRTCSRLVDILLGKLDATQLLFGVEENRLLLATFYGDYGLNKLYIDQMTQFVQNLIARLASQGQVEVLRIMEMGAGSGGTTKSLLPILARAEIPVEYTFTDLSPSYIAKARKMFKQYPFIKVAVHDIEQPPSDHDMIGSQHIVIATNAVHATRSLSASCGNMRKFLRPGGFLLMLEMMRHLPWVDVVFGPFKGWWLFDDGRTHALVDETRWDKDLREAGYEYVDWPMA

SEQ ID NO: 21225 - DNA, 642 bp, Muscodor strobelii
  misc_feature: SGI cDNA ID NO. 567183
  misc_feature: Encodes the peptide sequence at SEQ ID NO 21226
atggatgccgacactcttcgtttctgggaaacgcttcgcgtccagtttgatgagagattcccagtcgctcgtctgtctcgccgcgttctcaatgccatgcccgacgagaccagcgttttctgcctcgagcaggcaagcttagtactgaaggagccggccgggttcttcctcgacggcaccaataaggatgtcgtcttcctcacgtccgaacgacaggtcagcgctaccctctgttgcaaggtttccgctaccgacggcatgcctcgcgctgtccccgtcgatgtcgagaaagagcttcgccacctgcctacctatgcccagcgtgctggtatgttgcgacctaacaagcgagctcggcaaaactcgcgcagacagaactcctcggtcggtactaagatccacaagcctacttccgggggactcaatgcctggacagtcttcctcagagagtactatgattcattcccgaaggggaccaagcatgacatggcggtccgatctacggaagcaagtgctctgtgggacggcatgactgatcagcagaagcaaccctattccgacgaggcctcacgtcgcaaggagatggctaagaagactaaggagggaaagcagagtctgcaggaggacgaagatgaagattga

SEQ ID NO: 21226 - protein, 213 aa, Muscodor strobelii
  misc_feature: SGI Peptide ID NO. 567183
MDADTLRFWETLRVQFDERFPVARLSRRVLNAMPDETSVFCLEQASLVLKEPAGFFLDGTNKDVVFLTSERQVSATLCCKVSATDGMPRAVPVDVEKELRHLPTYAQRAGMLRPNKRARQNSRRQNSSVGTKIHKPTSGGLNAWTVFLREYYDSFPKGTKHDMAVRSTEASALWDGMTDQQKQPYSDEASRRKEMAKKTKEGKQSLQEDEDED

SEQ ID NO: 21227 - DNA, 291 bp, Muscodor strobelii
  misc_feature: SGI cDNA ID NO. 567184
  misc_feature: Elevated expression when VOC is produced
  misc_feature: Encodes the peptide sequence at SEQ ID NO 21228
atgagtgggctcgagattgccggcctcgtccttggggccgtctcggctggatctgcggtgatctccgccaacagagatctcaaaggccacagcagtcgttacaccgaaaagactatatacggcgagaattccgtgactcgcatcaccagctcagcggtcacagacggcaatggcgagtctagggtcaccgcgaggggcgatgtctatgcgcggtcttggcagggcgggagagcggtagcaacgtactcgtcagatgatcagagacagcagcagaagcgtatcggaggttaa

SEQ ID NO: 21228 - protein, 96 aa, Muscodor strobelii
  misc_feature: SGI Peptide ID NO. 567184
  misc_feature: Useful for introducing or modulating the production of volatile compounds
MSGLEIAGLVLGAVSAGSAVISANRDLKGHSSRYTEKTIYGENSVTRITSSAVTDGNGESRVTARGDVYARSWQGGRAVATYSSDDQRQQQKRIGG

SEQ ID NO: 21229 - DNA, 620 bp, Muscodor strobelii
  misc_feature: SGI EST ID NO. CUFF.49737.0
  misc_feature: Variant of the nucleotide sequence at SEQ ID NO 21227
tccaaatctctaatcctcgtcgaccgccaccacactcttttgactatgagtgggctcgagattgccggcctcgtccttggggccgtctcggctggatctgcggtgatctccgccaacagagatctcaaaggccacagcagtcgttacaccgaaaagactatatacggcgagaattccgtgactcgcatcaccagctcagcggtcacagacggcaatggcgagtctagggtcaccgcgaggggcgatgtctatgcgcggtcttggcagggcgggagagcggtagcaacgtactcgtcagatgatcagagacagcagcagaagcgtatcggaggttaaagatcatttggctactgtgcgggtcgtcaacctgcatcttgaagcgtatgcctgattgcgcttggcaactggagactaatcttcacgatgttgatgaccttgttcctagagcccgtggcgcgaaatttcgtggtttcagagaagtcggaatcacgggagttcgattcttgtgtctttgagtaacaaggccaataccttccagcatgtcatcttgcgaggattcggctagtcattttgcttgttcctcagatagtaacttgacggaccttcttcggctgtatccc

SEQ ID NO: 21230 - DNA, 618 bp, Muscodor strobelii
  misc_feature: SGI cDNA ID NO. 567185
  misc_feature: Encodes the peptide sequence at SEQ ID NO 21231
atgggtagcggaccaagtcgaccagagtacaccgtcacgacttatgagagtcaattgacgcaaaggagtgcgtatacgcaaggcgaagcccgggccgggacgttcaacgacggcgcgggaaccttcgctttcgcgggtgaaggtgctgctgccggatcccacaacgacagctacgccgcccgcaccaatggcatcggccaagccgcagcgaactcatacggggcaggagccaagtacggcgatcacgtaggcgcggcgacgaacacaaggggtcaaaagatgcttgcggctggcacgatgccggccttgcttccctcgagcggtggtgggaactcctatacaagcacctcgctcacaaacagcacgagatccgcggtcggaggacgagtcacctcacaaggtaatgcatattcgggcattgtcgaagggagggacgcgtacgtgagcgctgggagagccaaggttagcattcaaaatggtcaactcaaagtggatgtcaaatctggagggaatgttggtattgaaggcaatactatttgggcacaggatggtgagtctaaggctcagctgcaaatcagatctaaagtcgtgactattgcggaaactttcatcaaataa

SEQ ID NO: 21231 - protein, 205 aa, Muscodor strobelii
  misc_feature: SGI Peptide ID NO. 567185
MGSGPSRPEYTVTTYESQLTQRSAYTQGEARAGTFNDGAGTFAFAGEGAAAGSHNDSYAARTNGIGQAAANSYGAGAKYGDHVGAATNTRGQKMLAAGTMPALLPSSGGGNSYTSTSLTNSTRSAVGGRVTSQGNAYSGIVEGRDAYVSAGRAKVSIQNGQLKVDVKSGGNVGIEGNTIWAQDGESKAQLQIRSKVVTIAETFIK

SEQ ID NO: 21232 - DNA, 786 bp, Muscodor strobelii
  misc_feature: SGI cDNA ID NO. 567186
  misc_feature: Elevated expression when VOC is produced
  misc_feature: Encodes the peptide sequence at SEQ ID NO 21233
atgccgcccgcaggtccgcctcaaaatctagatgagctggctcgctcacttctcaagaacgggcccgtgaaagtgttgcacgtgtccccgcgccgcgtccgaatacaattcggagggcgctgggtcgcggatacaacggaggcacaactcatctgggagcacccatactatccttcttactatctgcctttggccgacttcaagaacgatgtactcgaataccccaaggatcagaatcaagctggctataaacttgccaaactcaacgtagacggtgcctccacagaccgtgtcatcgtcttcgagggtggaaactccgctctatcaaacctcgttcgcgtcgagttcggcgccgcagatgcctggttcgaagaagacagtgtcatagacgtgcacccgaaggaccctttcaaacgggttgacgtcgtcttctcttcacgtcccgtacgagtcctcattgcagggactgaagtagcgaatgcgaacgctggtgcactccatctctacgagacgggtctgccaacacgattctacttacctgcatccgcggtagatccaaaatatctccgagcgagcgacacagtcacgaaatgtccttataagggcgaggcaaattactatgatatcgtggttgatgggaagacgtataaggacattgtttggtattataagacggctaagcttgagtgtgccagtgtagctggtgcactgtgtttctataatgagaaggtggatattgagcttgatgggaagccattggagaagcctaagtcaccgttctcgtga

SEQ ID NO: 21233 - protein, 261 aa, Muscodor strobelii
  misc_feature: SGI Peptide ID NO. 567186
  misc_feature (149)..(250): Pfam Id: PF04248 Pfam Desc: Domain of function (DUF427)
  misc_feature (8)..(261): NCBI GI: 256730408 Blast Desc: NECHADRAFT_95062 [Nectria haematococca mpVI 77-13-4]
  misc_feature (8)..(251): NCBI GI: 189207523 Blast Desc: conserved [Pyrenophora tritici-repentis Pt-1C-BFP] gi|187976188|gb|EDU42814.1| conserved [Pyrenophora tritici-repentis Pt-1C-BFP]
  misc_feature (10)..(261): NCBI GI: 46115750 Blast Desc: FG03717.1 [Gibberella zeae PH-1]
  misc_feature (29)..(261): NCBI GI: 269128733 Blast Desc: protein of function DUF427 [Thermomonospora curvata DSM 43183] gi|268313691|gb|ACZ00066.1| protein of function DUF427 [Thermomonospora curvata DSM 43183]
  misc_feature (26)..(261): NCBI GI: 242205892 Blast Desc: [Postia placenta Mad-698-R] gi|220732188|gb|EED86026.1| [Postia placenta Mad-698-R]
  misc_feature (31)..(256): NCBI GI: 170120623 Blast Desc: [Laccaria bicolor S238N-H82] gi|164633319|gb|EDQ98068.1| [Laccaria bicolor S238N-H82]
  misc_feature (60)..(254): NCBI GI: 169625648 Blast Desc: SNOG_16099 [Phaeosphaeria nodorum SN15] gi|111055351|gb|EAT76471.1| SNOG_16099 [Phaeosphaeria nodorum SN15]
  misc_feature (31)..(252): NCBI GI: 111224144 Blast Desc: FRAAL4754 [Frankia alni ACN14a] gi|111151676|emb|CAJ63395.1| conserved [Frankia alni ACN14a]
  misc_feature (20)..(258): NCBI GI: 169863972 Blast Desc: CC1G_11661 [Coprinopsis cinerea okayama7#130] gi|116500305|gb|EAU83200.1| CC1G_11661 [Coprinopsis cinerea okayama7#130]
  misc_feature (9)..(251): NCBI GI: 261357764 Blast Desc: conserved [Verticillium albo-atrum VaMs.102]
  misc_feature: Useful for introducing or modulating the production of volatile compounds
MPPAGPPQNLDELARSLLKNGPVKVLHVSPRRVRIQFGGRWVADTTEAQLIWEHPYYPSYYLPLADFKNDVLEYPKDQNQAGYKLAKLNVDGASTDRVIVFEGGNSALSNLVRVEFGAADAWFEEDSVIDVHPKDPFKRVDVVFSSRPVRVLIAGTEVANANAGALHLYETGLPTRFYLPASAVDPKYLRASDTVTKCPYKGEANYYDIVVDGKTYKDIVWYYKTAKLECASVAGALCFYNEKVDIELDGKPLEKPKSPFS

SEQ ID NO: 21234 - DNA, 1123 bp, Muscodor strobelii
  misc_feature: SGI EST ID NO. CUFF.49760.0
  misc_feature: Variant of the nucleotide sequence at SEQ ID NO 21232
tatcactgtgctaacgctggcgttgagtaatttgatattctgttttctcaatatccaacttttactaacgacgaggatctaagataattgcaacccgtcctaaattcaccttcagaagcaacacaatgccgcccgcaggtccgcctcaaaatctagatgagctggctcgctcacttctcaagaacgggcccgtgaaagtgttgcacgtgtccccgcgccgcgtccgaatacaattcggagggcgctgggtcgcggatacaacggaggcacaactcatctgggagcacccatactatccttcttactatctgcctttggccgacttcaagaacgatgtactcgaataccccaaggatcagaatcaagctggctataaacttgccaaactcaacgtagacggtgcctccacagaccgtgtcatcgtcttcgagggtggaaactccgctctatcaaacctcgttcgcgtcgagttcggcgccgcagatgcctggttcgaagaagacagtgtcatagacgtgcacccgaaggaccctttcaaacgggttgacgtcgtcttctcttcacgtcccgtacgagtcctcattgcagggactgaagtagcgaatgcgaacgctggtgcactccatctctacgagacgggtctgccaacacgattctacttacctgcatccgcggtagatccaaaatatctccgagcgagcgacacagtcacgaaatgtccttataagggcgaggcaaattactatgatatcgtggttgatgggaagacgtataaggacattgtttggtattataagacggctaagcttgagtgtgccagtgtagctggtgcactgtgtttctataatgagaaggtggatattgagcttgatgggaagccattggagaagcctaagtcaccgttctcgtgaggtctgggcgtcaagtcgacgccaggagtacccagtgaactgagacactgcatgaaatatggcgcgtgaaaaaaattgtactattaggcacacgatggtatgctgaaaaagaatgagatttcttataccgtactccattcctgaggccaatctactgtgatagttacttcatggagaaaccattttcaactacgttcactttctcattcaag

SEQ ID NO: 21235 - DNA, 1635 bp, Muscodor strobelii
  misc_feature: SGI cDNA ID NO. 567187
  misc_feature: Encodes the peptide sequence at SEQ ID NO 21236
atggagcacctcactgcgcgcttcaagcgcaagaaggacaaggagagggacaaggaggtccctgcaacccgaagcggctccccagcctcaaccagctcagcgggcacgcttgcgccaccgggaaacgcccagaatgcgacgctggctgctgccaatcccacccctccagccacgggtgctgcatcaccttcgttgcacagcggccttttctcaggcctcagcaacctgcgcgtgagcaacaaaaaagagaagggtccttcgcctgcaccctctccactgctgcctgccctggagccgtcttgcagctcactcggcattggccccgacaatcaatctgtcctccctgccgacagtgacatggcgaacaggaccttccatggcgtcaacagcccgactcttcgaggcccaaagcctcagatgcccttcttcttgaacttgtctgactcagaaatgaagcaaaagttccaagatctcaactgggatgagagaatgcgactctcaaatggagcgcaaggcggtcccgaccacgagttcgcacctgtaacgattccagaggctaagctcctcgaccgctacacgaacatccagccttgggacaacaaccgtgtgaggctccacgtgccccacgaccaggtggactacatcaatgcatcgccgattgttgcgcgctcccccatgcggcccgatgaacaaccaccgttccgatacatcgccatgcaaggacccaagatgaacactgtcgaccatgcctggcgtatggtcgcggagcagctgagcagtccggctgtcattgtcatgttgaccgagacgtatgagaacttcaacgagaagtgcttcccttacttcccaacaggtccccgcgctcctgcgatcgagatcggactggataatgagtttgaggatggcttccgtgcaacagtcgagtgcaccagcattgtcgagaagtgcgaaggtgccatacaagtgcgcaagcttaatctgaaggtagaggggcgttctgatatgatcgtctggcacctcctctataagaagtggcctgactttggtgtgccacggccggaggactgggccagcttcttcgagttgatgaagttctctcgtcgactgaacaccggtgcattcgacaaccctagaatcatccactgctcagccggtgtcggtcgaagtggcacgttcattgcgcttgagacactgatgcgtgagatcgattcgggtaacatgaacctcttggatcccaggcttgtgacccataatgaggatcttgtctacaatctggttaatagccttcgtaaacaacgcaaacaaatggtccaagctgagactcagttcatgttcatctaccatgtgttgcgtcaacactggctcaagaagaatgagtttcaagatgaggagtcgcgcatggcacgctctaattcgagacgtacccccacaatctcgtcgtttcgagacccacgaaaaccttctggacgacacttgattagcgagaagcctccccgaactcagccacagccactccaacactctcgcccacagtctcgcccacaaccaccatctcgatctcactcacagccacaaccccgagacgacagcgacagcagtgatagctcggctggtggtgctcctctccataattga

SEQ ID NO: 21236 - protein, 544 aa, Muscodor strobelii
  misc_feature: SGI Peptide ID NO. 567187
  misc_feature (186)..(452): Pfam Id: PF00102 Pfam Desc: Protein-tyrosine phosphatase
  misc_feature (139)..(457): NCBI GI: 46123839 Blast Desc: FG06297.1 [Gibberella zeae PH-1]
  misc_feature (135)..(457): NCBI GI: 242784349 Blast Desc: protein-tyrosine phosphatase 2 [Talaromyces stipitatus ATCC 10500] gi|218720516|gb|EED19935.1| protein-tyrosine phosphatase 2 [Talaromyces stipitatus ATCC 10500]
  misc_feature (138)..(514): NCBI GI: 212527678 Blast Desc: protein-tyrosine phosphatase 2 [Penicillium marneffei ATCC 18224] gi|210073394|gb|EEA27481.1| protein-tyrosine phosphatase 2 [Penicillium marneffei ATCC 18224]
  misc_feature (141)..(454): NCBI GI: 169617822 Blast Desc: SNOG_12091 [Phaeosphaeria nodorum SN15] gi|160703492|gb|EAT80503.2| SNOG_12091 [Phaeosphaeria nodorum SN15]
  misc_feature (141)..(509): NCBI GI: 189200773 Blast Desc: tyrosine-protein phosphatase 2 [Pyrenophora tritici-repentis Pt-1C-BFP] gi|187983822|gb|EDU49310.1| tyrosine-protein phosphatase 2 [Pyrenophora tritici-repentis
  misc_feature (50)..(453): NCBI GI: 240108170 Blast Desc: Protein-tyrosine phosphatase domain containing protein [Coccidioides posadasii C735 delta SOWgp]
  misc_feature (1)..(333): NCBI GI: 145610777 Blast Desc: MGG_00912 [Magnaporthe grisea 70-15] gi|145018140|gb|EDK02419.1| MGG_00912 [Magnaporthe grisea 70-15]
  misc_feature (114)..(453): NCBI GI: 119491733 Blast Desc: protein-tyrosine phosphatase 2 [Neosartorya fischeri NRRL 181] gi|119411521|gb|EAW21464.1| protein-tyrosine phosphatase 2 [Neosartorya fischeri NRRL 181]
  misc_feature (114)..(510): NCBI GI: 121705676 Blast Desc: protein-tyrosine phosphatase 2 [Aspergillus clavatus NRRL 1] gi|119399247|gb|EAW09675.1| protein-tyrosine phosphatase 2 [Aspergillus clavatus NRRL 1]
  misc_feature (31)..(483): NCBI GI: 225556444 Blast Desc: protein-tyrosine phosphatase [Ajellomyces capsulatus G186AR]
  misc_feature (133)..(459): SWISSPROT Homolog: EC 3.1.3.48 Protein-tyrosine-phosphatase
MEHLTARFKRKKDKERDKEVPATRSGSPASTSSAGTLAPPGNAQNATLAAANPTPPATGAASPSLHSGLFSGLSNLRVSNKKEKGPSPAPSPLLPALEPSCSSLGIGPDNQSVLPADSDMANRTFHGVNSPTLRGPKPQMPFFLNLSDSEMKQKFQDLNWDERMRLSNGAQGGPDHEFAPVTIPEAKLLDRYTNIQPWDNNRVRLHVPHDQVDYINASPIVARSPMRPDEQPPFRYIAMQGPKMNTVDHAWRMVAEQLSSPAVIVMLTETYENFNEKCFPYFPTGPRAPAIEIGLDNEFEDGFRATVECTSIVEKCEGAIQVRKLNLKVEGRSDMIVWHLLYKKWPDFGVPRPEDWASFFELMKFSRRLNTGAFDNPRIIHCSAGVGRSGTFIALETLMREIDSGNMNLLDPRLVTHNEDLVYNLVNSLRKQRKQMVQAETQFMFIYHVLRQHWLKKNEFQDEESRMARSNSRRTPTISSFRDPRKPSGRHLISEKPPRTQPQPLQHSRPQSRPQPPSRSHSQPQPRDDSDSSDSSAGGAPLHN

SEQ ID NO: 21237 - DNA, 2150 bp, Muscodor strobelii
  misc_feature: SGI EST ID NO. CUFF.49764.0
  misc_feature: Variant of the nucleotide sequence at SEQ ID NO 21235
aaaaactgtaaatttggtggccatggagcacctcactgcgcgcttcaagcgcaagaaggacaaggagagggacaaggaggtccctgcaacccgaagcggctccccagcctcaaccagctcagcgggcacgcttgcgccaccgggaaacgcccagaatgcgacgctggctgctgccaatcccacccctccagccacgggtgctgcatcaccttcgttgcacagcggccttttctcaggcctcagcaacctgcgcgtgagcaacaaaaaagagaagggtccttcgcctgcaccctctccactgctgcctgccctggagccgtcttgcagctcactcggcattggccccgacaatcaatctgtcctccctgccgacagtgacatggcgaacaggaccttccatggcgtcaacagcccgactcttcgaggcccaaagcctcagatgcccttcttcttgaacttgtctgactcagaaatgaagcaaaagttccaagatctcaactgggatgagagaatgcgactctcaaatggagcgcaaggcggtcccgaccacgagttcgcacctgtaacgattccagaggctaagctcctcgaccgctacacgaacatccagccttgggacaacaaccgtgtgaggctccacgtgccccacgaccaggtggactacatcaatgcatcgccgattgttgcgcgctcccccatgcggcccgatgaacaaccaccgttccgatacatcgccatgcaaggacccaagatgaacactgtcgaccatgcctggcgtatggtcgcggagcagctgagcagtccggctgtcattgtcatgttgaccgagacgtatgagaacttcaacgagaagtgcttcccttacttcccaacaggtccccgcgctcctgcgatcgagatcggactggataatgagtttgaggatggcttccgtgcaacagtcgagtgcaccagcattgtcgagaagtgcgaaggtgccatacaagtgcgcaagcttaatctgaaggtagaggggcgttctgatatgatcgtctggcacctcctctataagaagtggcctgactttggtgtgccacggccggaggactgggccagcttcttcgagttgatgaagttctctcgtcgactgaacaccggtgcattcgacaaccctagaatcatccactgctcagccggtgtcggtcgaagtggcacgttcattgcgcttgagacactgatgcgtgagatcgattcgggtaacatgaacctcttggatcccaggcttgtgacccataatgaggatcttgtctacaatctggttaatagccttcgtaaacaacgcaaacaaatggtccaagctgagactcagttcatgttcatctaccatgtgttgcgtcaacactggctcaagaagaatgagtttcaagatgaggagtcgcgcatggcacgctctaattcgagacgtacccccacaatctcgtcgtttcgagacccacgaaaaccttctggacgacacttgattagcgagaagcctccccgaactcagccacagccactccaacactctcgcccacagtctcgcccacaaccaccatctcgatctcactcacagccacaaccccgagacgacagcgacagcagtgatagctcggctggtggtgctcctctccataattgagcacagtactcggatcttgcatttctttggcaagcacacatgcacagttcatatgtgcctttcgtcagtataccgagcagtaggatggacaggtgcttcatttgcacctatcttttgcatttcgttttcgtagcatcatcgcattgcttaggcgtggacaacaggaaaataacggattgtcattcagggaaccaggggaaaaggtgttcggcacggcaggatccgtttatggcatgatgactttaagatacccatttgcttcactttgcttagagatagaggagacaatgtgatagcattgcctagctgctatgcatatcgagaaatacatactggtagtagctacttgcaatgagagatacagctaactattgcttttaaggagtggatgtgactgaatgtttggtgatgatataggcgcctgtcataatgtcccaaggtacgctgaggcagacttaactttctccatagcctgcgacgtaggtaaattgaa

SEQ ID NO: 21238 - DNA, 1875 bp, Muscodor strobelii
  misc_feature: SGI cDNA ID NO. 567188
  misc_feature: Encodes the peptide sequence at SEQ ID NO 21239
atgaataattcaagtggccacccagttgtcgcggggcattatcgatacaggcaacttggctcagaaggccgcgagtttcgtctcctcactctgttaccaggagacccaaatgacccggttaaagttacgattcaacatacgtctctgtcaggaaaagacaaaagaccatggaacgacggattattaagtttagaagaattgcgcaaaagcttgcccaaagacgcacatgtgatcgaaaccctagacgagcgatatctttttgcctccttccgaatggatgagttttcgcgtatgcatctgcaaagcacttcgtggcatcatatggatcaatcgatcagcccatcgacatattgtgcctcagttctgcctcgcagtcaggggcttcactacgacgccttgtcgtatacttgggggtcgcaggggcataaagcggaggtggtggttgtcgaccgagacctaaggcccccattcggctcactcttatcaaaaatatcagtaactcggaatcttcatgaggcactgacgtatttgcgcaagaaaacagaatctcggacgctctgggtggacgcggtctgtatcaaccaggacgatatttcggagcgcgattcacaagtcacgatgattcgtgacatcttcaacgcggccagcggggtggttgcctgggttggtccggccgcggactatagtgagcttgccatgcaggctattggtaaactgggaaagcagatgcattattccaagtcccttttccaggtattcccggaccccgacgcctctgagccgggatggtcctgtaacgggacacgcttgccgttcgagcctgagacctggcattatattaagaacctcctggatcggccatggttcacgcggttgtgggttatgcaggaagtccagctcgccaacatcaaacggacgagtctacaatgcggacacgacagcataacatgggctcattttcgcagtgcccttcagtacttgcgaaataaccattttttgccgctattcctgcatgccggggtcaatcgagcgtcaatgatttgcgacgacctcacatgcatgccattcaaatacatcctatggcagaccataggggcggtatgctctaatgatcgagaccgaatatacggtctgctggggctcttgcagccctcgttagccggtagcatacgaccacaatattcacttcctgtttctgctgttttccaacaagcatgtatggaagagatcaagttttcggaccgacttgagctgttagacttatgctatctggtcaatagggatgccattacgacttcgtggattccggacctaacacaggaccctccaatcatgaggatcctcaactcacagttttgcactggtctctctccagcatcttgctcttttgatgagccccaaggagtcttgatatcgaatgggttgaaggtctcagctcttgcgcgctgcagccagccatttgatgtggaagccaacgatatcagaagcatcggcagattcgctacccagtggctgagtgatcgattgcagtcagcagatgaacctagaagattggagcttgaggatcaactcttgaaagcactcgtagactacagagtcagggagcggcatccagacgctcctttcccggatcatcgcgaatggaaaaatatcatcttttcctcaaaatctcagatttctgaaggcgaatttgggtcttatgtagaggttacaggtcactttcacccaacggccgtatactggacaatggagcggctagatgctcgctgcctcttcgaaatggaaaatggctccattgggctcggtccaccgggatcccaacaaggcgagtacagtttcagtaatgactattgcaaggctgattcgtacaggtga

SEQ ID NO: 21239 - protein, 624 aa, Muscodor strobelii
  misc_feature: SGI Peptide ID NO. 567188
  misc_feature (130)..(297): Pfam Id: PF06985 Pfam Desc: Heterokaryon incompatibility protein (HET)
  misc_feature (130)..(235): Pfam Id: PF06985 Pfam Desc: Heterokaryon incompatibility protein (HET)
  misc_feature (274)..(297): Pfam Id: PF06985 Pfam Desc: Heterokaryon incompatibility protein (HET)
  misc_feature (14)..(611): NCBI GI: 154311024 Blast Desc: BC1G_06630 [Botryotinia fuckeliana B05.10] gi|150851034|gb|EDN26227.1| BC1G_06630 [Botryotinia fuckeliana B05.10]
  misc_feature (14)..(610): NCBI GI: 115492481 Blast Desc: [Aspergillus terreus NIH2624] gi|114197728|gb|EAU39428.1| [Aspergillus terreus NIH2624]
  misc_feature (14)..(440): NCBI GI: 169603560 Blast Desc: SNOG_04789 [Phaeosphaeria nodorum SN15] gi|111066060|gb|EAT87180.1| SNOG_04789 [Phaeosphaeria nodorum SN15]
  misc_feature (1)..(622): NCBI GI: 261357884 Blast Desc: conserved [Verticillium albo-atrum VaMs.102]
  misc_feature (2)..(600): NCBI GI: 46139411 Blast Desc: FG11220.1 [Gibberella zeae PH-1]
  misc_feature (184)..(568): NCBI GI: 256727220 Blast Desc: NECHADRAFT_32743 [Nectria haematococca mpVI 77-13-4]
  misc_feature (13)..(610): NCBI GI: 39974569 Blast Desc: MGG_00569 [Magnaporthe grisea 70-15] gi|145018530|gb|EDK02809.1| MGG_00569 [Magnaporthe grisea 70-15]
  misc_feature (173)..(459): NCBI GI: 256719970 Blast Desc: NECHADRAFT_98482 [Nectria haematococca mpVI 77-13-4]
  misc_feature (130)..(610): NCBI GI: 256730222 Blast Desc: NECHADRAFT_82497 [Nectria haematococca mpVI 77-13-4]
  misc_feature (191)..(493): NCBI GI: 145609067 Blast Desc: MGG_09107 [Magnaporthe grisea 70-15] gi|145016510|gb|EDK00940.1| MGG_09107 [Magnaporthe grisea 70-15]
MNNSSGHPVVAGHYRYRQLGSEGREFRLLTLLPGDPNDPVKVTIQHTSLSGKDKRPWNDGLLSLEELRKSLPKDAHVIETLDERYLFASFRMDEFSRMHLQSTSWHHMDQSISPSTYCASVLPRSQGLHYDALSYTWGSQGHKAEVVVVDRDLRPPFGSLLSKISVTRNLHEALTYLRKKTESRTLWVDAVCINQDDISERDSQVTMIRDIFNAASGVVAWVGPAADYSELAMQAIGKLGKQMHYSKSLFQVFPDPDASEPGWSCNGTRLPFEPETWHYIKNLLDRPWFTRLWVMQEVQLANIKRTSLQCGHDSITWAHFRSALQYLRNNHFLPLFLHAGVNRASMICDDLTCMPFKYILWQTIGAVCSNDRDRIYGLLGLLQPSLAGSIRPQYSLPVSAVFQQACMEEIKFSDRLELLDLCYLVNRDAITTSWIPDLTQDPPIMRILNSQFCTGLSPASCSFDEPQGVLISNGLKVSALARCSQPFDVEANDIRSIGRFATQWLSDRLQSADEPRRLELEDQLLKALVDYRVRERHPDAPFPDHREWKNIIFSSKSQISEGEFGSYVEVTGHFHPTAVYWTMERLDARCLFEMENGSIGLGPPGSQQGEYSFSNDYCKADSYR

SEQ ID NO: 21240 - DNA, 1007 bp, Muscodor strobelii
  misc_feature: SGI EST ID NO. CUFF.49778.0
  misc_feature: Variant of the nucleotide sequence at SEQ ID NO 21238
gtaactcggaatcttcatgaggcactgacgtatttgcgcaagaaaacagaatctcggacgctctgggtggacgcggtctgtatcaaccaggacgatatttcggagcgcgattcacaagtcacgatgattcgtgacatcttcaacgcggccagcggggtggttgcctgggttggtccggccgcggactatagtgagcttgccatgcaggctattggtaaactgggaaagcagatgcattattccaagtcccttttccaggtattcccggaccccgacgcctctgagccgggatggtcctgtaacgggacacgcttgccgttcgagcctgagacctggcattatattaagaacctcctggatcggccatggttcacgcggttgtgggttatgcaggaagtccagctcgccaacatcaaacggacgagtctacaatgcggacacgacagcataacatgggctcattttcgcagtgcccttcagtacttgcgaaataaccattttttgccgctattcctgcatgccggggtcaatcgagcgtcaatgatttgcgacgacctcacatgcatgccattcaaatacatcctatggcagaccataggggcggtatgctctaatgatcgagaccgaatatacggtctgctggggctcttgcagccctcgttagccggtagcatacgaccacaatattcacttcctgtttctgctgttttccaacaagcatgtatggaagagatcaagttttcggaccgacttgagctgttagacttatgctatctggtcaatagggatgccattacgacttcgtggattccggacctaacacaggaccctccaatcatgaggatcctcaactcacagttttgcactggtctctctccagcatcttgctcttttgatgagccccaaggagtcttgatatcgaatgggttgaaggtctcagctcttgcgcgctgcagccagccatttgatgtggaagccaacgatatcagaagcatcggcagattcgc

SEQ ID NO: 21241 - DNA, 1890 bp, Muscodor strobelii
  misc_feature: SGI cDNA ID NO. 567189
  misc_feature: Encodes the peptide sequence at SEQ ID NO 21242
atgtctccctcagtccgccgacctgtccgcgtagccggagcctctggtggcttctccgaccgtgtccgggccatcgcggatcttgcgaagaatgaagatgtggatgttatcgtcggcgactggctgtctgagatgaccatgactattcatggtaccggaaaacagcggaagagagcagagctgcagggcagggcactcacttttgaagagcaagttgagcatgccatgttcgctgaaaactttatggattgttttgagcccgccattgaagatctcgctcgccgaggcatcaagttagccgtcaatgctggtgcttcagatactgagattctggccaaattggtgaagcaaaaatgcgaagctaaaggcgtcaacttgaaagtcgcttgggtttctggtgacgaagcgaccgatgctgtcaaaggcttgctcaccaggggcgaaaagttccgcagtctaatgcacgaccgatccgtcaaagaatggggacttgagcccatcactgctcagtgttatcttggaggtctcggcattgctagggcattgaccgaaggtgctgatattgtcatttgcggtcgtgtttcggacgcctcacccaccattggcgccgctgcatggtggcatcagtggaaaaacgaccagttcgacgagcttgccggttctcttgtcattggccatctcctcgaatgtgcctcatacgtctgtggaggctactcttctaattttaaagatatcctaaagagaggtgatcaccttaatatgggcttccccatttgcgcgattgacaacaagggcgaaggcataatgtacaaagaaaagaatactggtggtgagatgaccgtcacctctgtcacctctcaattgtgttatgagatccaaggccctcaatattacaactgcgatgttaccgctcagctcgagaacatcaagttcgagcaagttggcgaaaaccaagtcaaggtttcaggcgttcgcggtcttcctccaccgccaactacaaaagtcggtattactggcttctctggttggcaagccgagtaccacgtcgtcatgtgcggtctcgatattgaggagaagtgcaaaatgaccgaagatcagatcagatacgagtttggcgaggagagactcaagaaattcaccaaactcgaattccaacaaatcggtaccgctcctatcgatggccgcaatcaagacgtttcctcggtcattctgcgctgctttgcccagtcgaatgatcgcgaacttcttcgcatgcgcaaccctgatgggttcttccgtcgcagcatgacaagcttcctaatgtcttgccctggtgcttcattgaccaacgacttccgactggctgagggcaaaccttactacgaataccatcctgcccttctctctcagtccgccattccccaacaagttcactttctctgggacggtgcgcccgagacaatcaccatggagcttgcacctgagttcaggacatacgaccgccagcaaccttcttatgagactccaaatccgactgatctcagctcgtttggccctacggtacgtctcccattagggcgtgtcgttctcggacgatctggcgacaagtgtagtgacgccaatgttggattcttcgttcgtcatgacgacgagtgggactggctccgtagtcttctcacggtcgagaaaattagagagctccttggaccggaagagggtgtcaaggcacacaagattgatcgcttcgagatgccgaatattaaggttgtccactttctcctgcacgatcacctcgaccgcggctacgatgcctgctcgacacttgatactctcggaaagaatgtgtgcgagtatctccgctccaagacagttgatgtacccaagaagtttgccgatcgcggattcgtatag

SEQ ID NO: 21242 - protein, 629 aa, Muscodor strobelii
  misc_feature: SGI Peptide ID NO. 567189
  misc_feature (11)..(388): Pfam Id: PF07287 Pfam Desc: Domain of function (DUF1446)
  misc_feature (95)..(359): Pfam Id: PF07287 Pfam Desc: Domain of function (DUF1446)
  misc_feature (2)..(629): NCBI GI: 261355824 Blast Desc: conserved [Verticillium albo-atrum VaMs.102]
  misc_feature (1)..(629): NCBI GI: 189197007 Blast Desc: PTRG_04508 [Pyrenophora tritici-repentis Pt-1C-BFP] gi|187980789|gb|EDU47415.1| PTRG_04508 [Pyrenophora tritici-repentis Pt-1C-BFP]
  misc_feature (1)..(627): NCBI GI: 261354680 Blast Desc: conserved [Verticillium albo-atrum VaMs.102]
  misc_feature (1)..(629): NCBI GI: 169616404 Blast Desc: SNOG_11374 [Phaeosphaeria nodorum SN15] gi|160703171|gb|EAT81082.2| SNOG_11374 [Phaeosphaeria nodorum SN15]
  misc_feature (8)..(627): NCBI GI: 256724636 Blast Desc: NECHADRAFT_48019 [Nectria haematococca mpVI 77-13-4]
  misc_feature (7)..(627): NCBI GI: 169773091 Blast Desc: [Aspergillus oryzae RIB40] gi|238491030|ref|XP_002376752.1| DUF1446 domain protein [Aspergillus flavus NRRL3357] gi|83768875|dbj|BAE59012.1| protein
  misc_feature (7)..(627): NCBI GI: 119472007 Blast Desc: NFIA_057110 [Neosartorya fischeri NRRL 181] gi|119406411|gb|EAW16362.1| conserved [Neosartorya fischeri NRRL 181]
  misc_feature (1)..(627): NCBI GI: 240108773 Blast Desc: CPC735_022780 [Coccidioides posadasii C735 delta SOWgp]
  misc_feature (6)..(627): NCBI GI: 145240401 Blast Desc: An08g07320 [Aspergillus niger] gi|134077365|emb|CAK39979.1| protein product [Aspergillus niger]
  misc_feature (7)..(627): NCBI GI: 255956849 Blast Desc: Pc21g22060 [Penicillium chrysogenum Wisconsin 54-1255] gi|211590888|emb|CAP97103.1| Pc21g22060 [Penicillium chrysogenum Wisconsin 54-1255]
MSPSVRRPVRVAGASGGFSDRVRAIADLAKNEDVDVIVGDWLSEMTMTIHGTGKQRKRAELQGRALTFEEQVEHAMFAENFMDCFEPAIEDLARRGIKLAVNAGASDTEILAKLVKQKCEAKGVNLKVAWVSGDEATDAVKGLLTRGEKFRSLMHDRSVKEWGLEPITAQCYLGGLGIARALTEGADIVICGRVSDASPTIGAAAWWHQWKNDQFDELAGSLVIGHLLECASYVCGGYSSNFKDILKRGDHLNMGFPICAIDNKGEGIMYKEKNTGGEMTVTSVTSQLCYEIQGPQYYNCDVTAQLENIKFEQVGENQVKVSGVRGLPPPPTTKVGITGFSGWQAEYHVVMCGLDIEEKCKMTEDQIRYEFGEERLKKFTKLEFQQIGTAPIDGRNQDVSSVILRCFAQSNDRELLRMRNPDGFFRRSMTSFLMSCPGASLTNDFRLAEGKPYYEYHPALLSQSAIPQQVHFLWDGAPETITMELAPEFRTYDRQQPSYETPNPTDLSSFGPTVRLPLGRVVLGRSGDKCSDANVGFFVRHDDEWDWLRSLLTVEKIRELLGPEEGVKAHKIDRFEMPNIKVVHFLLHDHLDRGYDACSTLDTLGKNVCEYLRSKTVDVPKKFADRGFV

SEQ ID NO: 21243 - DNA, 495 bp, Muscodor strobelii
  misc_feature: SGI EST ID NO. CUFF.49797.0
  misc_feature: Variant of the nucleotide sequence at SEQ ID NO 21241
ctgcagggcagggcactcacttttgaagagcaagttgagcatgccatgttcgctgaaaactttatggattgttttgagcccgccattgaagatctcgctcgccgaggcatcaagttagccgtcaatgctggtgcttcagatactgagattctggccaaattggtgaagcaaaaatgcgaagctaaaggcgtcaacttgaaagtcgcttgggtttctggtgacgaagcgaccgatgctgtcaaaggcttgctcaccaggggcgaaaagttccgcagtctaatgcacgaccgatccgtcaaagaatggggacttgagcccatcactgctcagtgttatcttggaggtctcggcattgctagggcattgaccgaaggtgctgatattgtcatttgcggtcgtgtttcggacgcctcacccaccattggcgccgctgcatggtggcatcagtggaaaaacgaccagttcgacgagcttgccggttctcttgtcattggc

SEQ ID NO: 21244 - DNA, 591 bp, Muscodor strobelii
  misc_feature: SGI cDNA ID NO. 567190
  misc_feature: Encodes the peptide sequence at SEQ ID NO 21245
atgtcttgccctggtgcttcattgaccaacgacttccgactggctgagggcaaaccttactacgaataccatcctgcccttctctctcagtccgccattccccaacaagttcactttctctgggacggtgcgcccgagacaatcaccatggagcttgcacctgagttcaggacatacgaccgccagcaaccttcttatgagactccaaatccgactgatctcagctcgtttggccctacggtacgtctcccattagggcgtgtcgttctcggacgatctggcgacaagtgtagtgacgccaatgttggattcttcgttcgtcatgacgacgagtgggactggctccgtagtcttctcacggtcgagaaaattagagagctccttggaccggaagagggtgtcaaggcacacaagattgatcgcttcgagatgccgaatattaaggttgtccactttctcctgcacgatcacctcgaccgcggctacgatgcctgctcgacacttgatactctcggaaagaatgtgtgcgagtatctccgctccaagacagttgatgtacccaagaagtttgccgatcgcggattcgtatag

SEQ ID NO: 21245 - protein, 196 aa, Muscodor strobelii
  misc_feature: SGI Peptide ID NO. 567190
  misc_feature (2)..(196): NCBI GI: 261355824 Blast Desc: conserved [Verticillium albo-atrum VaMs.102]
  misc_feature (3)..(196): NCBI GI: 189197007 Blast Desc: PTRG_04508 [Pyrenophora tritici-repentis Pt-1C-BFP] gi|187980789|gb|EDU47415.1| PTRG_04508 [Pyrenophora tritici-repentis Pt-1C-BFP]
  misc_feature (9)..(193): NCBI GI: 145245249 Blast Desc: An11g09340 [Aspergillus niger] gi|134079590|emb|CAK40807.1| protein product [Aspergillus niger]
  misc_feature (1)..(194): NCBI GI: 261354680 Blast Desc: conserved [Verticillium albo-atrum VaMs.102]
  misc_feature (2)..(196): NCBI GI: 256724636 Blast Desc: NECHADRAFT_48019 [Nectria haematococca mpVI 77-13-4]
  misc_feature (50)..(168): NCBI GI: 115396408 Blast Desc: [Aspergillus terreus NIH2624] gi|114193412|gb|EAU35112.1| [Aspergillus terreus NIH2624]
  misc_feature (2)..(196): NCBI GI: 169624296 Blast Desc: SNOG_15404 [Phaeosphaeria nodorum SN15] gi|111056217|gb|EAT77337.1| SNOG_15404 [Phaeosphaeria nodorum SN15]
  misc_feature (4)..(194): NCBI GI: 240108773 Blast Desc: CPC735_022780 [Coccidioides posadasii C735 delta SOWgp]
  misc_feature (2)..(196): NCBI GI: 169616404 Blast Desc: SNOG_11374 [Phaeosphaeria nodorum SN15] gi|160703171|gb|EAT81082.2| SNOG_11374 [Phaeosphaeria nodorum SN15]
  misc_feature (4)..(194): NCBI GI: 119176115 Blast Desc: CIMG_09804 [Coccidioides immitis RS]
MSCPGASLTNDFRLAEGKPYYEYHPALLSQSAIPQQVHFLWDGAPETITMELAPEFRTYDRQQPSYETPNPTDLSSFGPTVRLPLGRVVLGRSGDKCSDANVGFFVRHDDEWDWLRSLLTVEKIRELLGPEEGVKAHKIDRFEMPNIKVVHFLLHDHLDRGYDACSTLDTLGKNVCEYLRSKTVDVPKKFADRGFV

SEQ ID NO: 21246 - DNA, 855 bp, Muscodor strobelii
  misc_feature: SGI EST ID NO. CUFF.49793.0
  misc_feature: Variant of the nucleotide sequence at SEQ ID NO 21244
cgaagatcagatcagatacgagtttggcgaggagagactcaagaaattcaccaaactcgaattccaacaaatcggtaccgctcctatcgatggccgcaatcaagacgtttcctcggtcattctgcgctgctttgcccagtcgaatgatcgcgaacttcttcgcatgcgcaaccctgatgggttcttccgtcgcagcatgacaagcttcctaatgtcttgccctggtgcttcattgaccaacgacttccgactggctgagggcaaaccttactacgaataccatcctgcccttctctctcagtccgccattccccaacaagttcactttctctgggacggtgcgcccgagacaatcaccatggagcttgcacctgagttcaggacatacgaccgccagcaaccttcttatgagactccaaatccgactgatctcagctcgtttggccctacggtacgtctcccattagggcgtgtcgttctcggacgatctggcgacaagtgtagtgacgccaatgttggattcttcgttcgtcatgacgacgagtgggactggctccgtagtcttctcacggtcgagaaaattagagagctccttggaccggaagagggtgtcaaggcacacaagattgatcgcttcgagatgccgaatattaaggttgtccactttctcctgcacgatcacctcgaccgcggctacgatgcctgctcgacacttgatactctcggaaagaatgtgtgcgagtatctccgctccaagacagttgatgtacccaagaagtttgccgatcgcggattcgtatagatgtattattggaaatggagattcatttcagattctgcatattttaataagcc

SEQ ID NO: 21247 - DNA, 567 bp, Muscodor strobelii
  misc_feature: SGI cDNA ID NO. 567191
  misc_feature: Encodes the peptide sequence at SEQ ID NO 21248
atggcttcagtaagcggtaaagtgattgcaattacgggcggtgcgtccggaattgggcttgcgactgcaaagctcctcgtttctcgaggcgcccttgtgtctatagcagatgtccacgaaaatgctctcggtgacgcaaaagcagcgattgaatcttcgcatagcggtgctcaggtcctcgcatcagtcgtcgatgttcgcaacgccgactcagtcgaaaattgggttaaagcaacgatcgacaagtttggtcgcttagacggagcagccaatgtcgccggtgtattcaagtcttaccacgatcacggagtcgaagcagaagatgagaagaactgggatttcatgatatcagtcaatctcaccggggtcatgcattgtcttcgcgctcaactgcccaaactttctcctggtggaagcattgtaaacgcagccagtattctaggacttgttggacaagccggtgcagcggcgtactcagcatcgaaacatggagtcataggattgacgagatcagcggctaaagactggggccctaagggtgtcagggtcaattgtattgctccgtaa

SEQ ID NO: 21248 - protein, 188 aa, Muscodor strobelii
  misc_feature: SGI Peptide ID NO. 567191
  misc_feature (7)..(177): Pfam Id: PF00106 Pfam Desc: short chain dehydrogenase
  misc_feature (8)..(181): Pfam Id: PF08659 Pfam Desc: KR domain
  misc_feature (11)..(97): Pfam Id: PF08659 Pfam Desc: KR domain
  misc_feature (3)..(188): NCBI GI: 189192222 Blast Desc: 3-alpha-(or 20-beta)-hydroxysteroid dehydrogenase [Pyrenophora tritici-repentis Pt-1C-BFP] gi|187974056|gb|EDU41555.1| 3-alpha-(or 20-beta)-hydroxysteroid
  misc_feature (3)..(179): NCBI GI: 261354679 Blast Desc: 3-oxoacyl-[acyl-carrier-protein] reductase [Verticillium albo-atrum VaMs.102]
  misc_feature (5)..(188): NCBI GI: 154309270 Blast Desc: BC1G_07529 [Botryotinia fuckeliana B05.10] gi|150852353|gb|EDN27545.1| BC1G_07529 [Botryotinia fuckeliana B05.10]
  misc_feature (1)..(188): NCBI GI: 169782972 Blast Desc: [Aspergillus oryzae RIB40] gi|83774692|dbj|BAE64815.1| protein product [Aspergillus oryzae]
  misc_feature (5)..(188): NCBI GI: 110162100 Blast Desc: ABA4 protein [Botryotinia fuckeliana]
  misc_feature (1)..(188): NCBI GI: 238492709 Blast Desc: short chain dehydrogenase, [Aspergillus flavus NRRL3357] gi|220696085|gb|EED52427.1| short chain dehydrogenase, [Aspergillus flavus NRRL3357]
  misc_feature (3)..(188): NCBI GI: 156052176 Blast Desc: SS1G_07497 [Sclerotinia sclerotiorum 1980] gi|154705273|gb|EDO05012.1| SS1G_07497 [Sclerotinia sclerotiorum 1980]
  misc_feature (3)..(188): NCBI GI: 154312858 Blast Desc: BC1G_05130 [Botryotinia fuckeliana B05.10] gi|150849832|gb|EDN25025.1| BC1G_05130 [Botryotinia fuckeliana B05.10]
  misc_feature (3)..(188): NCBI GI: 46110046 Blast Desc: FG01905.1 [Gibberella zeae PH-1]
  misc_feature (3)..(188): NCBI GI: 67522731 Blast Desc: AN1822.2 [Aspergillus nidulans FGSC A4] gi|40745831|gb|EAA64987.1| AN1822.2 [Aspergillus nidulans FGSC A4] gi|259487170|tpe|CBF85629.1| TPA: oxidoreductase, short chain
  misc_feature (3)..(188): SWISSPROT Homolog: EC 1.1.1.178 3-hydroxy-2-methylbutyryl-CoA dehydrogenase
  misc_feature (3)..(188): SWISSPROT Homolog: EC 1.1.1.35 3-hydroxyacyl-CoA dehydrogenase
MASVSGKVIAITGGASGIGLATAKLLVSRGALVSIADVHENALGDAKAAIESSHSGAQVLASVVDVRNADSVENWVKATIDKFGRLDGAANVAGVFKSYHDHGVEAEDEKNWDFMISVNLTGVMHCLRAQLPKLSPGGSIVNAASILGLVGQAGAAAYSASKHGVIGLTRSAAKDWGPKGVRVNCIAP

SEQ ID NO: 21249 - DNA, 538 bp, Muscodor strobelii
  misc_feature: SGI EST ID NO. CUFF.49802.0
  misc_feature: Variant of the nucleotide sequence at SEQ ID NO 21247
cttcagtaagcggtaaagtgattgcaattacgggcggtgcgtccggaattgggcttgcgactgcaaagctcctcgtttctcgaggcgcccttgtgtctatagcagatgtccacgaaaatgctctcggtgacgcaaaagcagcgattgaatcttcgcatagcggtgctcaggtcctcgcatcagtcgtcgatgttcgcaacgccgactcagtcgaaaattgggttaaagcaacgatcgacaagtttggtcgcttagacggagcagccaatgtcgccggtgtattcaagtcttaccacgatcacggagtcgaagcagaagatgagaagaactgggatttcatgatatcagtcaatctcaccggggtcatgcattgtcttcgcgctcaactgcccaaactttctcctggtggaagcattgtaaacgcagccagtattctaggacttgttggacaagccggtgcagcggcgtactcagcatcgaaacatggagtcataggattgacgagatcagcggctaaagactggggccctaagggtgt

SEQ ID NO: 21250 - DNA, 1440 bp, Muscodor strobelii
  misc_feature: SGI cDNA ID NO. 567192
  misc_feature: Reduced expression when VOC is produced
  misc_feature: Encodes the peptide sequence at SEQ ID NO 21251
atggccacctactccctctccaaggagcacaaggacatgctcgagaagtcgcttgtcgactccgaccctgaggttgctgagatcatgaaaaaagagatccagcgccagagggagtctatcattctcattgcctctgagaatgtaacatctcgtgccgtcttcgatgccctaggttctcccatgtccaacaagtactccgagggtcttcccggtgctcgttactacggtgggaaccagcacatcgacgaggtcgagctgctctgccagaagcgtgctctcgccgccttcaatgtcgactctgagaagtggggtgtaaacgtccaaaccctcagtggcagccctgccaacttgcaggtctaccaggctctcatggctcccggtggccgcttgatgggtctcgatctcccccacggtggccatttgagccatggttatcagacaccccagaggaagatctctgctgtttcgacttacttccagactatgccataccgcgtaaacactgatactggcattatcgactacgacaagctcgaggagaatgctggccttttccgtcccaaggttctggttgctggtacctctgcttactgccgcgagatcgactacgctcgcatgcgcaagatcgctgactccgtcggcgcctacctcgtcgttgatatggcccacatctctggtctgatttccgccggttgcatcaagactcccttcgactatgccgatattgtcactaccaccacacacaagtcgctccgtggtccccgcggtgctatgattttcttccgcaagggtgtccgcagccacgacaagaccggaaagcccattaactacgacctggaggagaagatcaacttctccgttttccccggtcaccagggtggccctcacaatcacaccatcactgccttgactgttgctctgaagcaggctgccacccctgagttcaaggcttatcagcagcaggtcgtcgccaacgccaaggccctcgagcacaagttcaaggctcttggttacaccttggtgtcgggcggtaccgactctcacatggttcttgtagatctgcgaccacaggccctggacggtgcccgtattgaagccgttctcgagaactttaacattgcctgcaacaagaatgcggttcccggtgacaagtctgccttgactcccggcggtctgcgtatcggtaccccggccatgacatctcgcggcttcggtgagaaagactttgagcgcgttgctgactatatcgacgtcgccgtgaagctttgcaagcagatacagtctgagcttcccaaggaggccaacaagctcaaggacttccgcgccaaggtcaccagtggcgaggttgccaagatcgccgaactcaagaaggaagtcgctgaatggagccagaccttccctcttcctgttgagggctggagagtggacgctggcatttaa

SEQ ID NO: 21251 - protein, 479 aa, Muscodor strobelii
  misc_feature: SGI Peptide ID NO. 567192
  misc_feature (18)..(416): Pfam Id: PF00464 Pfam Desc: Serine hydroxymethyltransferase
  misc_feature (1)..(479): NCBI GI: 116203551 Blast Desc: serine hydroxymethyltransferase [Chaetomium globosum CBS 148.51] gi|88175787|gb|EAQ83255.1| serine hydroxymethyltransferase [Chaetomium globosum CBS 148.51]
  misc_feature (2)..(479): NCBI GI: 145610763 Blast Desc: serine hydroxymethyltransferase [Magnaporthe grisea 70-15] gi|145018128|gb|EDK02407.1| serine hydroxymethyltransferase [Magnaporthe grisea 70-15]
  misc_feature (1)..(479): NCBI GI: 85094603 Blast Desc: cytosolic serine hydroxymethyltransferase [Neurospora crassa OR74A] gi|67476659|sp|P34898.2|GLYC_NEUCR RecName: Full=Serine hydroxymethyltransferase, cytosolic; Short=SHMT;
  misc_feature (1)..(479): NCBI GI: 7545109 Blast Desc: serine hydroxymethyltransferase [Neurospora crassa]
  misc_feature (13)..(479): NCBI GI: 256732936 Blast Desc: [Nectria haematococca mpVI 77-13-4]
  misc_feature (2)..(479): NCBI GI: 46123825 Blast Desc: GLYC_NEUCR Serine hydroxymethyltransferase, cytosolic (Serine methylase) (Glycine hydroxymethyltransferase) (SHMT) [Gibberella zeae PH-1]
  misc_feature (2)..(474): NCBI GI: 154309861 Blast Desc: BC1G_06851 [Botryotinia fuckeliana B05.10] gi|150851639|gb|EDN26832.1| BC1G_06851 [Botryotinia fuckeliana B05.10]
  misc_feature (1)..(470): NCBI GI: 119195021 Blast Desc: serine hydroxymethyltransferase, cytosolic [Coccidioides immitis RS]
  misc_feature (1)..(470): NCBI GI: 240105063 Blast Desc: serine hydroxymethyltransferase, cytosolic, [Coccidioides posadasii C735 delta SOWgp]
  misc_feature (1)..(470): NCBI GI: 258566243 Blast Desc: serine hydroxymethyltransferase [Uncinocarpus reesii 1704] gi|237907567|gb|EEP81968.1| serine hydroxymethyltransferase [Uncinocarpus reesii 1704]
  misc_feature (1)..(479): SWISSPROT Homolog: EC 2.1.2.1 Glycine hydroxymethyltransferase
  misc_feature: Useful for introducing or modulating the production of volatile compounds
MATYSLSKEHKDMLEKSLVDSDPEVAEIMKKEIQRQRESIILIASENVTSRAVFDALGSPMSNKYSEGLPGARYYGGNQHIDEVELLCQKRALAAFNVDSEKWGVNVQTLSGSPANLQVYQALMAPGGRLMGLDLPHGGHLSHGYQTPQRKISAVSTYFQTMPYRVNTDTGIIDYDKLEENAGLFRPKVLVAGTSAYCREIDYARMRKIADSVGAYLVVDMAHISGLISAGCIKTPFDYADIVTTTTHKSLRGPRGAMIFFRKGVRSHDKTGKPINYDLEEKINFSVFPGHQGGPHNHTITALTVALKQAATPEFKAYQQQVVANAKALEHKFKALGYTLVSGGTDSHMVLVDLRPQALDGARIEAVLENFNIACNKNAVPGDKSALTPGGLRIGTPAMTSRGFGEKDFERVADYIDVAVKLCKQIQSELPKEANKLKDFRAKVTSGEVAKIAELKKEVAEWSQTFPLPVEGWRVDAGI

SEQ ID NO: 21252 - DNA, 2189 bp, Muscodor strobelii
  misc_feature: SGI EST ID NO. CUFF.49812.0
  misc_feature: Variant of the nucleotide sequence at SEQ ID NO 21250
tttaagtaaaatcgaccccgcgccactttcattctctgaccatcccaaccgtttgctttcgagcttatattttccaattctcacccattcccttacatactcccgagctgccttcacattctgcagcccattgatttggtcctttccctgcgatacccctcaattgcgtttacaacacagtcacaatggccacctactccctctccaaggagcacaaggacatgctcgagaagtcgcttgtcgactccgaccctgaggttgctgagatcatgaaaaaagagatccagcgccagagggagtctatcattctcattgcctctgagaatgtaacatctcgtgccgtcttcgatgccctaggttctcccatgtccaacaagtactccgagggtcttcccggtgctcgttactacggtgggaaccagcacatcgacgaggtcgagctgctctgccagaagcgtgctctcgccgccttcaatgtcgactctgagaagtggggtgtaaacgtccaaaccctcagtggcagccctgccaacttgcaggtctaccaggctctcatggctcccggtggccgcttgatgggtctcgatctcccccacggtggccatttgagccatggttatcagacaccccagaggaagatctctgctgtttcgacttacttccagactatgccataccgcgtaaacactgatactggcattatcgactacgacaagctcgaggagaatgctggccttttccgtcccaaggttctggttgctggtacctctgcttactgccgcgagatcgactacgctcgcatgcgcaagatcgctgactccgtcggcgcctacctcgtcgttgatatggcccacatctctggtctgatttccgccggttgcatcaagactcccttcgactatgccgatattgtcactaccaccacacacaagtcgctccgtggtccccgcggtgctatgattttcttccgcaagggtgtccgcagccacgacaagaccggaaagcccattaactacgacctggaggagaagatcaacttctccgttttccccggtcaccagggtggccctcacaatcacaccatcactgccttgactgttgctctgaagcaggctgccacccctgagttcaaggcttatcagcagcaggtcgtcgccaacgccaaggccctcgagcacaagttcaaggctcttggttacaccttggtgtcgggcggtaccgactctcacatggttcttgtagatctgcgaccacaggccctggacggtgcccgtattgaagccgttctcgagaactttaacattgcctgcaacaagaatgcggttcccggtgacaagtctgccttgactcccggcggtctgcgtatcggtaccccggccatgacatctcgcggcttcggtgagaaagactttgagcgcgttgctgactatatcgacgtcgccgtgaagctttgcaagcagatacagtctgagcttcccaaggaggccaacaagctcaaggacttccgcgccaaggtcaccagtggcgaggttgccaagatcgccgaactcaagaaggaagtcgctgaatggagccagaccttccctcttcctgttgagggctggagagtggacgctggcatttaaataatgtctccgtcacatcattaattttatttcacttgtttcatatgtgttacgatcacgacacgaattatgcatcgcggttcaacctagacgagtgggcggcaggctttaaaagaaaggataggggccactcaacagttctccaaggtggcggacgaatgcgggttctacggttacggttcacggagtcaaagaaaagagagaacttgcggaaataaaaatatatcccttgcatatgcatttcatcaggcgttgcaagcagctctgctcggcgaccagagcagggcttcggggagtacaggtttgcgttttgatatgggttattcaacaactcagctgcttcaacacgcactctcgtccgatatgagtcgaggaatgggttgactggttctggctagttgattgagttagtgtataaaattacgtgcaagatgtacaagaaatgtacgtccagctaggcgagaaatctacaatgatattctgcccaccattaattcgcttgcattgtgttcttgattgtcacggggtatgcttcactccaagctagatatgagacactcggca

SEQ ID NO: 21253 - DNA, 762 bp, Muscodor strobelii
  misc_feature: SGI cDNA ID NO. 567193
  misc_feature: Elevated expression when VOC is produced
  misc_feature: Encodes the peptide sequence at SEQ ID NO 21254
atgaaaaccgcagcagcagcagcaacactctctgcgctcgcagtagctaacgccgcgtcagccccagatgcgtctttcaaaatcgaacttctggacgttggctgggccaggagctgccagggtgcggacacgctcattgtcaaatcaacacctgaggcactgacctggaatttctctgacttcgatgcgtcatatcccgagaagactgggtttccctcagtagctatctgtgtcatggaaaacaatatcggccgagtccctgcaggttggcattttgccgtcaacagtgtcgagacaagcggcaaaggacacatcagtggtggtgctaaggctgactaccttgggacctacctcggcatgaatatcgcgtatgtcactaatcagtcggctcctgctggagaaaggttctggaaggtaaatgggcaagacatgggaagtttcgagcttcgaaacaccactttaggcctcaagggaaacgaagatgaaccattcgacgtcactgtcccagcgaacggcacactgtggtccccatgtttcccagaaaacttctcccgcgacggatatagtatccaattttcccaccagacccacctctatctcgaagctggtgagggcgcgaaggagccatcagcctccatcgatcccaatgttcaggtgaaactaaacttgaaatgggaggcttgtgacccggcacaggagcctgtttctggatggggaaaaccgattgcgacttcaacagaatggactccctcgtgcaagtag

SEQ ID NO: 21254 - protein, 253 aa, Muscodor strobelii
  misc_feature: SGI Peptide ID NO. 567193
  misc_feature: Useful for introducing or modulating the production of volatile compounds
MKTAAAAATLSALAVANAASAPDASFKIELLDVGWARSCQGADTLIVKSTPEALTWNFSDFDASYPEKTGFPSVAICVMENNIGRVPAGWHFAVNSVETSGKGHISGGAKADYLGTYLGMNIAYVTNQSAPAGERFWKVNGQDMGSFELRNTTLGLKGNEDEPFDVTVPANGTLWSPCFPENFSRDGYSIQFSHQTHLYLEAGEGAKEPSASIDPNVQVKLNLKWEACDPAQEPVSGWGKPIATSTEWTPSCK

SEQ ID NO: 21255 - DNA, 1454 bp, Muscodor strobelii
  misc_feature: SGI EST ID NO. CUFF.49818.0
  misc_feature: Variant of the nucleotide sequence at SEQ ID NO 21253
aaagagcactgaggaagctcggctttgaagtgcaattatgctcaggcagaatatctcaaacacgtgattcgacaagttgggttcgggtttacatgcccgtaatcctttgaatcccgtctttggctgcaacaagacttctagctcctatgtcgactcgtatcaggtggaacttctgttcttctccaaatatgggatgctttcggtgattgttcttggcgcgttatgaacatcattttgaacggaaccgtggacgggacgtcttatgatgacacccctcagtctgcaagctcaaatgaggcgccaaatggaaggagaatggctgtattggacggctattttcgagtgcgcaaacttgcaaattaagagaataagaagcctatagtcatcgattctgtttccgagactaagccgagcatctagactgttgtaagtcgggaagtcgaaaattgaaagaatctccccatccaacttcaccagttgattcgtaggggtatatatatacgagacatatcccacgaagttatcaagtcgatcttcttaagttcaacaagtctatccatcgatcctacccgccgaccaaagccatgaaaaccgcagcagcagcagcaacactctctgcgctcgcagtagctaacgccgcgtcagccccagatgcgtctttcaaaatcgaacttctggacgttggctgggccaggagctgccagggtgcggacacgctcattgtcaaatcaacacctgaggcactgacctggaatttctctgacttcgatgcgtcatatcccgagaagactgggtttccctcagtagctatctgtgtcatggaaaacaatatcggccgagtccctgcaggttggcattttgccgtcaacagtgtcgagacaagcggcaaaggacacatcagtggtggtgctaaggctgactaccttgggacctacctcggcatgaatatcgcgtatgtcactaatcagtcggctcctgctggagaaaggttctggaaggtaaatgggcaagacatgggaagtttcgagcttcgaaacaccactttaggcctcaagggaaacgaagatgaaccattcgacgtcactgtcccagcgaacggcacactgtggtccccatgtttcccagaaaacttctcccgcgacggatatagtatccaattttcccaccagacccacctctatctcgaagctggtgagggcgcgaaggagccatcagcctccatcgatcccaatgttcaggtgaaactaaacttgaaatgggaggcttgtgacccggcacaggagcctgtttctggatggggaaaaccgattgcgacttcaacagaatggactccctcgtgcaagtagagcaaggattagacaacgcatcaccaaaagaagcgtaatatcacctcgaggagcctagaatttaggcacgatagtccacagttttcaatgacactcaattgatcattg

SEQ ID NO: 21256 - DNA, 738 bp, Muscodor strobelii
  misc_feature: SGI cDNA ID NO. 567194
  misc_feature: Encodes the peptide sequence at SEQ ID NO 21257
atgaagaccttactcttgctcggaggcatgacgcccgacgtcactaaggtgtattacgatatcatcaatcgcgcagctcgatcaactctaggcggaaggcataatgcaccattattcctgtacagcgcaaacttggaggtgatggctcagtatgctactaccggagactggacttctttcgcgaagacttatacggatccgattgagacgctagctggcaaagtcgacgcggtagtcgtatccgccatattggctcataaagtcacagcgcagctccagaaggcatgttctgcaactaatgttccactacttcatatcggcgattgcgtggcgtcacacatcaagtcgaaatatccgcaaatacgcaagttagggctattaggtccgaagataacgatgctagaccgagaggaccgcgatttcttcatcggccgacttgaaagtcccgagaatggattcacagtgattgtgccagagactgaagcagagattacagaggtcaatcgaggtatgatggaggaagtgacaaaaggtctaccagctgtgaagccgacaacgaaagcaatgttcatacagcaagcgaatagattgattgagcgcggcgcccaaggagtcattcttggcagcacggatcttggcttcgttgtacggcaagaggatctgcccgacggtgctattgtgatcgaaccgggtgctatacatgcagaagaagctgcgaagtgggcattggcagaatag

SEQ ID NO: 21257 - protein, 245 aa, Muscodor strobelii
  misc_feature: SGI Peptide ID NO. 567194
  misc_feature (192)..(243): Pfam Id: PF01177 Pfam Desc: Asp/Glu/Hydantoin racemase
  misc_feature (1)..(245): NCBI GI: 212704398 Blast Desc: DESPIG_02453 [Desulfovibrio piger ATCC 29098] gi|212672119|gb|EEB32602.1| DESPIG_02453 [Desulfovibrio piger ATCC 29098]
  misc_feature (1)..(239): NCBI GI: 257470749 Blast Desc: amino acid recemase [Fusobacterium ulcerans ATCC 49185]
  misc_feature (1)..(244): NCBI GI: 89098523 Blast Desc: aspartate racemase [Bacillus sp. NRRL B-14911] gi|89086768|gb|EAR65886.1| aspartate racemase [Bacillus sp. NRRL B-14911]
  misc_feature (1)..(245): NCBI GI: 254722213 Blast Desc: aspartate racemase family protein [Bacillus anthracis str. A1055]
  misc_feature (1)..(243): NCBI GI: 266623105 Blast Desc: aspartate racemase [Clostridium hathewayi DSM 13479]
  misc_feature (1)..(243): NCBI GI: 125716925 Blast Desc: amino acid recemase, [Streptococcus sanguinis SK36] gi|125496842|gb|ABN43508.1| Amino acid recemase, [Streptococcus sanguinis SK36]
  misc_feature (1)..(244): NCBI GI: 228997316 Blast Desc: Aspartate racemase [Bacillus mycoides Rock3-17] gi|229004941|ref|ZP_04162668.1| Aspartate racemase [Bacillus mycoides Rock1-4] gi|228756289|gb|EEM05607.1| Aspartate racemase
  misc_feature (1)..(245): NCBI GI: 30262238 Blast Desc: aspartate racemase family protein [Bacillus anthracis str. Ames] gi|47527517|ref|YP_018866.1| aspartate racemase family protein [Bacillus anthracis str. 'Ames Ancestor'] aspartate str.
  misc_feature (1)..(245): NCBI GI: 126650720 Blast Desc: aspartate racemase [Bacillus sp. B14905] gi|126592385|gb|EAZ86403.1| aspartate racemase [Bacillus sp. B14905]
  misc_feature (1)..(243): NCBI GI: 118477654 Blast Desc: aspartate racemase [Bacillus thuringiensis str. Al Hakam] gi|229184450|ref|ZP_04311656.1| Aspartate racemase [Bacillus cereus BGSC 6E1] gi|118416879|gb|ABK85298.1| aspartate
MKTLLLLGGMTPDVTKVYYDIINRAARSTLGGRHNAPLFLYSANLEVMAQYATTGDWTSFAKTYTDPIETLAGKVDAVVVSAILAHKVTAQLQKACSATNVPLLHIGDCVASHIKSKYPQIRKLGLLGPKITMLDREDRDFFIGRLESPENGFTVIVPETEAEITEVNRGMMEEVTKGLPAVKPTTKAMFIQQANRLIERGAQGVILGSTDLGFVVRQEDLPDGAIVIEPGAIHAEEAAKWALAE

SEQ ID NO: 21258 - DNA, 1016 bp, Muscodor strobelii
  misc_feature: SGI EST ID NO. CUFF.49820.0
  misc_feature: Variant of the nucleotide sequence at SEQ ID NO 21256
ctcgatccttgtgttatgcccttgatcatatttacctgtgactcatttcgcacttgtcttcatcgactctcaccatgaagaccttactcttgctcggaggcatgacgcccgacgtcactaaggtgtattacgatatcatcaatcgcgcagctcgatcaactctaggcggaaggcataatgcaccattattcctgtacagcgcaaacttggaggtgatggctcagtatgctactaccggagactggacttctttcgcgaagacttatacggatccgattgagacgctagctggcaaagtcgacgcggtagtcgtatccgccatattggctcataaagtcacagcgcagctccagaaggcatgttctgcaactaatgttccactacttcatatcggcgattgcgtggcgtcacacatcaagtcgaaatatccgcaaatacgcaagttagggctattaggtccgaagataacgatgctagaccgagaggaccgcgatttcttcatcggccgacttgaaagtcccgagaatggattcacagtgattgtgccagagactgaagcagagattacagaggtcaatcgaggtatgatggaggaagtgacaaaaggtctaccagctgtgaagccgacaacgaaagcaatgttcatacagcaagcgaatagattgattgagcgcggcgcccaaggagtcattcttggcagcacggatcttggcttcgttgtacggcaagaggatctgcccgacggtgctattgtgatcgaaccgggtgctatacatgcagaagaagctgcgaagtgggcattggcagaatagaatagctccgaaatgtagcaaaaataacaattaaaagagaatactgatgcgaataagcagatcactgcgctgaggcggatgttgtcggctttcgttgtaagaaagtgtgttggccgagaccaacacaattacccaacgcgtcgtagtggtagaatagctgacaaagcgatgaaaacagggagattatacaagcatcgaatccag

SEQ ID NO: 21259 - DNA, 1050 bp, Muscodor strobelii
  misc_feature: SGI cDNA ID NO. 567195
  misc_feature: Encodes the peptide sequence at SEQ ID NO 21260
atggcatcattcacccgctacgttgaggcacataagcctgagaacaaggctggtcctggagatggccgaaccacggcgatgcagatcatcactgacaacaatcttatcggtgcctggactaacgaaaaagtcgtcctaatcactggatgctcatctggtatcggtgtcgagactgctcgtgctctcaaatcaacgggcgctcgtgtctacgccacagcgcgcaacttagacaaggcgcgtgaggtcctggcaaatgacatcgagcctggccgcctagagctcttgcacttacaacttgactcgcttaaatcagtacgacagtgtgcggccgagtttcaagtcaaagaatccaagttgcatattctcatcaacaatgctggtattatggcgctaccaacgcgcacggtgaccgaagacggcttcgaagcgcaattcgctacgaaccatctcgggcacttcctgctcttccagcttctcaagccgcagctcctagccgcctctacgccaaagttccacgctcgtgtcgtgaacgtttcatcgtcagcccatcgacgtggagcaaccaatcttgaggatccacagcttgctcagccggatgcttactcgccctacgccggctacgcaaactccaagacagcaaatgtctggatggctaatgagatcgagcgacggtatggcagcggcagcgctgatcccaagatccacgggcacagccttaatccaggcggtatctcatcggggcttcaagtgcacgcaatggacgttatagcacctctgatggagaaccccgaaatacaaaagatcatgaaaagcgccgagcaaggtgcggcgaccaccgtatgggcggccgtggatccagtatgggagggcacgggcggtaagtttcttgaggacgttcagatcgcgccacctgctgcagagcacacatcgggagccaatcctacagtatccaatgcgacaactattggttacgcgccatgggcttatgatgttgagaaggctaagaagctgtgggaaatgagtaatgagatggtcgggattcaagagtag

SEQ ID NO: 21260 - protein, 349 aa, Muscodor strobelii
  misc_feature: SGI Peptide ID NO. 567195
  misc_feature (43)..(190): Pfam Id: PF00106 Pfam Desc: short chain dehydrogenase
  misc_feature (43)..(182): Pfam Id: PF00106 Pfam Desc: short chain dehydrogenase
  misc_feature (4)..(349): NCBI GI: 169607923 Blast Desc: SNOG_07026 [Phaeosphaeria nodorum SN15] gi|111064557|gb|EAT85677.1| SNOG_07026 [Phaeosphaeria nodorum SN15]
  misc_feature (1)..(349): NCBI GI: 256720144 Blast Desc: NECHADRAFT_73270 [Nectria haematococca mpVI 77-13-4]
  misc_feature (4)..(347): NCBI GI: 256721804 Blast Desc: NECHADRAFT_97586 [Nectria haematococca mpVI 77-13-4]
  misc_feature (5)..(349): NCBI GI: 169773903 Blast Desc: [Aspergillus oryzae RIB40] gi|238491930|ref|XP_002377202.1| short-chain dehydrogenase/reductase, [Aspergillus flavus NRRL3357] protein
  misc_feature (4)..(349): NCBI GI: 256726740 Blast Desc: NECHADRAFT_32426 [Nectria haematococca mpVI 77-13-4]
  misc_feature (6)..(349): NCBI GI: 154311572 Blast Desc: BC1G_06245 [Botryotinia fuckeliana B05.10] gi|150850756|gb|EDN25949.1| BC1G_06245 [Botryotinia fuckeliana B05.10]
  misc_feature (4)..(349): NCBI GI: 261358215 Blast Desc: WW domain-containing oxidoreductase [Verticillium albo-atrum VaMs.102]
  misc_feature (4)..(349): NCBI GI: 154304821 Blast Desc: BC1G_08996 [Botryotinia fuckeliana B05.10] gi|150853858|gb|EDN29050.1| BC1G_08996 [Botryotinia fuckeliana B05.10]
  misc_feature (6)..(347): NCBI GI: 256734856 Blast Desc: NECHADRAFT_75545 [Nectria haematococca mpVI 77-13-4]
  misc_feature (4)..(349): NCBI GI: 238485476 Blast Desc: short-chain dehydrogenase/reductase, [Aspergillus flavus NRRL3357] gi|220698855|gb|EED55194.1| short-chain dehydrogenase/reductase, [Aspergillus flavus NRRL3357]
  misc_feature (45)..(347): SWISSPROT Homolog: EC 1.3.1.33 Protochlorophyllide reductase
MASFTRYVEAHKPENKAGPGDGRTTAMQIITDNNLIGAWTNEKVVLITGCSSGIGVETARALKSTGARVYATARNLDKAREVLANDIEPGRLELLHLQLDSLKSVRQCAAEFQVKESKLHILINNAGIMALPTRTVTEDGFEAQFATNHLGHFLLFQLLKPQLLAASTPKFHARVVNVSSSAHRRGATNLEDPQLAQPDAYSPYAGYANSKTANVWMANEIERRYGSGSADPKIHGHSLNPGGISSGLQVHAMDVIAPLMENPEIQKIMKSAEQGAATTVWAAVDPVWEGTGGKFLEDVQIAPPAAEHTSGANPTVSNATTIGYAPWAYDVEKAKKLWEMSNEMVGIQE

SEQ ID NO: 21261 - DNA, 2192 bp, Muscodor strobelii
  misc_feature: SGI EST ID NO. CUFF.49826.0
  misc_feature: Variant of the nucleotide sequence at SEQ ID NO 21259
ggccgcttgcctgccctaagtccggacgactcagaatgattcgtccacaggcgaaatgattacactcccatcgagcggacacgggcggagaaatacactctccatcttagcaatcgatagcaaggtgaatacgagcgccggctttgtcacgggattggagtgcttcatgcaatataccggagattggagtccgccccgttgtctccggggtggacaaatgtgatataaaagtcgtcgaccttgatattgttggtgttttgacaataacggacgtaaaaaatccacgtagctaaacgcaatcatcatctctacgacaatggcatcattcacccgctacgttgaggcacataagcctgagaacaaggctggtcctggagatggccgaaccacggcgatgcagatcatcactgacaacaatcttatcggtgcctggactaacgaaaaagtcgtcctaatcactggatgctcatctggtatcggtgtcgagactgctcgtgctctcaaatcaacgggcgctcgtgtctacgccacagcgcgcaacttagacaaggcgcgtgaggtcctggcaaatgacatcgagcctggccgcctagagctcttgcacttacaacttgactcgcttaaatcagtacgacagtgtgcggccgagtttcaagtcaaagaatccaagttgcatattctcatcaacaatgctggtattatggcgctaccaacgcgcacggtgaccgaagacggcttcgaagcgcaattcgctacgaaccatctcgggcacttcctgctcttccagcttctcaagccgcagctcctagccgcctctacgccaaagttccacgctcgtgtcgtgaacgtttcatcgtcagcccatcgacgtggagcaaccaatcttgaggatccacagcttgctcagccggatgcttactcgccctacgccggctacgcaaactccaagacagcaaatgtctggatggctaatgagatcgagcgacggtatggcagcggcagcgctgatcccaagatccacgggcacagccttaatccaggcggtatctcatcggggcttcaagtgcacgcaatggacgttatagcacctctgatggagaaccccgaaatacaaaagatcatgaaaagcgccgagcaaggtgcggcgaccaccgtatgggcggccgtggatccagtatgggagggcacgggcggtaagtttcttgaggacgttcagatcgcgccacctgctgcagagcacacatcgggagccaatcctacagtatccaatgcgacaactattggttacgcgccatgggcttatgatgttgagaaggctaagaagctgtgggaaatgagtaatgagatggtcgggattcaagagtagatataggacttagaagggcttgaggtatctagcaatgacgtgagattctgtctcctcacgaaccgaatgccttcggagcctgcatatcgtgtaccacatctgtaaacacccctctagccttcggaatttcgcaatcttgcttaatcttgaacaccatgttgaattttccatctgctttaatacctactttcaataaatatcagatattctgtgccacttggccgtattttgccgtcataacgagcggggcaatccggtaacaagatggggttcggagacatatcccctcatctgccgttcatcaccggataggcgatatactaggcgtataccttttaagtatcaataacacgccatgctctatgtaaaaacagaactagacaagcttcattcatcgtatgattgttgggcttaattgaacaggctccgtcgcaaatttgttctaattgtaaatcatacttcaatagatcaatcatgtctcttgataatagtcgccaccccacagcacagccagattggaacaacctcgaagttcttcaccgaggtactgttcctccacgagcaaactttcacatctataattcggtgaatgatgctctatcttatgatatcagtaaagctaggacttcctcgctatctggaacatggaagtttcttttagcaagaaatcctttcgagggtccggaagggttcgaagacccggcctatgagacatcaggatgggacgacacgcaagttcctagcatgtggcagcttaacggctacggaataggacctcagtataccaatgtcaattttcctattccagttgacccaccaaacgcgc

SEQ ID NO: 21262 - DNA, 3072 bp, Muscodor strobelii
  misc_feature: SGI cDNA ID NO. 567196
  misc_feature: Reduced expression when VOC is produced
  misc_feature: Encodes the peptide sequence at SEQ ID NO 21263
atggcgtcgcccgccgtcgcactggctaacggcgtgccctcgccgtcgcccatgcatctcgatgccaatgcaaatgtcaacgccaacgccgacctttcgcagtccatcactgcagccaccaccaagcgcaaacgcgactcgaccgacgaaggtgacaagcaggaaaactcgtccaacggcgccgacaccaacaacgccaacaccccagcccttaaaactgactggagtgaacaaacccccagctcagccctcgtcgaggtttcaaatgatgccgtgcgcgattacttcaccctgcttgaaagacttgacctcaccccctcgcttctaaagcgtccactacccgaagcagaccccaacgatgagccccaggccaagcgccagaagtcagtagacagcaaaccatccccgtctattgccgacaaggtcgctcaacagcagtaccgcgatgtcaacgctcttatcagcgacataaggcatgccgtcgacgatcaaattgccgagctgcagcaaaccgcaaagggtgaagaggctagctcggcagactctgccattgcgcgtgtcatcgagttcaagaagaaagcccacgacatcttcgagcgagagctgtcctactccgctaaggagtccgagacgcgcaaagtgctggagctgctcgggtccaacgatggtttgcagtcgaatgctagtggcaacataatgctcagcgtctacggcgatgctcccaagtcgcgcatgctattctccagcctgcagcagcccactgacggtacagacaccggcttccgcccgctgcgggagatcgggctgcccaacggtatcaaagtcgctaaggtcatcccctacagcttccccaatgccattgagaaggacaagaagtcgaagacactgggcgagctgttccccgctcctcgcaatctaccctcattagcccctccgaaagtcccgaagagcacatccaaaggactgcatgtaggctggcaccgccccgaattgaccgagaagtctaagtaccgagccggctcatactccagccagcacctgtctaccggcagatggctcgactacagcagtgccgcgccgtcttcgcagtccatgaccaagcagcgcgagcgcgctctgagcctcgcagggaacaagccttcgtcttcggaggtggagacgaccgagttggagtccctcttccgaggcgccttctctagctttgcaccgtccaaggatgattcagctgccatggtgtcttcagagttgatcagccacacgctgtggtggcagaaggttggccagcggaactacgaccgtttgatcggagccgacatccctggtgtcgccggaaatgagagcgatgagatggaggtagacgaggttgaagaaatcgacgaggagttgatccagagggccatcgacaactgggacgagaccgtgatagaccctactctcgaggaagcctgctgccccaagaagtcggacgaagagaaggacgtggacgatatcctgcaagacgtgtcggacatgatgcaaaccctcatctcgtaccagcggaaccgcaatttgacgttgcccactacatctagccagagtcgctacgctgcggacccgtcacatagcgacatgctcactaacggtagcccggtacagcctggcgaggaagagatggctacctacgaggcgctcaaggcgcaactggctttgatcattgctatgctaccgccctatgcagtggctcgtgtaaactcggacaagcttgaggagctggacatctctatgaagctggagatccggaccgaagagtatcaaggcgttatggaagaggacaacggtgctgctcgctctagagcagctgcagcgcagagcactgcgccgccgccgaatccacgacctgtatctcatcgttcgtcaagctcgtcgtccagcacggtgaaccagtacggccagcaatatcacccgagcacggcgcggggtcccgtcccgactccaccattctatccatcttcaacccctgtccggcctcctcagcccgcggcgacccgcgcccctcagacgatgccgcccgcttatcagcaacggcctccctctaatgccgggggttatcgaccatcgagcggatataacacatcctatacgccgcaatactccaagcctgcgcctccgtattctcagcagccttcattcacctccacgccgacccagagcaggccgccgaactatgcaaaccacactgctggaaacaaatatgtccctggctatcataatatgggccgtctgggcaaccaaactccacaacaacctcgctaccaagcatcgtatcaggcgccacacactcagcctcctcagtacaaccatcagagctatcaggcacagcaatcacctgcttccaccccatctcagatcaactacgggcctttcactaatggagtcggcgcgatgcccccgaggaccgcgcctgccacccagcacactcattaccagcagccgcactcaccacacgtgccccctcagcaagtctatcatactgcaggcacgccgtcccgccagccttcgtatggaggtcaagcgcagatgaacaaccagtctcggccttattattcccctgctggaacacatgcgccccctgcacaaaataatcagatggcgaaccagcattacaatcccacccaacccggtcaaagccctggacaagcgtccttccaaacttctctgaacacacagcaggtccaacaagccatggatcaggctaaggcccgtttcaatgcgcaacaaactgctcagaagccaactgaatacttgagccacggtgtgggaggtcatcaaggccagggatcaccctccggcggctttcctggcgcacctgttggtttaggcggcatcggactcggagccgacaattctagaatggcgtctgctagaaccggcaaacctcctagcaacaactactctcagtccagtcccaatctgaatgggcaagtcggttcacccgcagcgccgaatgggccgccgccaatgaatgggactcctgcacccgttgcgccgatggatagcggggcccaagtcacgtccgacgtgcagggagcttag

SEQ ID NO: 21263 - protein, 1023 aa, Muscodor strobelii
  misc_feature: SGI Peptide ID NO. 567196
  misc_feature (1)..(968): NCBI GI: 85094594 Blast Desc: NCU02272 [Neurospora crassa OR74A] gi|28921373|gb|EAA30680.1| [Neurospora crassa OR74A] gi|40804615|emb|CAF05875.1| [Neurospora crassa]
  misc_feature (105)..(1003): NCBI GI: 171679545 Blast Desc: protein product [Podospora anserina] gi|170939398|emb|CAP64626.1| protein product [Podospora anserina]
  misc_feature (1)..(968): NCBI GI: 116203549 Blast Desc: CHGG_09658 [Chaetomium globosum CBS 148.51] gi|88175786|gb|EAQ83254.1| CHGG_09658 [Chaetomium globosum CBS 148.51]
  misc_feature (77)..(919): NCBI GI: 256728940 Blast Desc: NECHADRAFT_106118 [Nectria haematococca mpVI 77-13-4]
  misc_feature (90)..(930): NCBI GI: 46138533 Blast Desc: FG10781.1 [Gibberella zeae PH-1]
  misc_feature (42)..(748): NCBI GI: 145610765 Blast Desc: MGG_11470 [Magnaporthe grisea 70-15] gi|145018130|gb|EDK02409.1| MGG_11470 [Magnaporthe grisea 70-15]
  misc_feature (6)..(775): NCBI GI: 154293905 Blast Desc: BC1G_14024 [Botryotinia fuckeliana B05.10] gi|150845179|gb|EDN20372.1| BC1G_14024 [Botryotinia fuckeliana B05.10]
  misc_feature (96)..(994): NCBI GI: 261355058 Blast Desc: conserved [Verticillium albo-atrum VaMs.102]
  misc_feature (88)..(794): NCBI GI: 156039749 Blast Desc: SS1G_12011 [Sclerotinia sclerotiorum 1980] gi|154697748|gb|EDN97486.1| SS1G_12011 [Sclerotinia sclerotiorum 1980]
  misc_feature (22)..(744): NCBI GI: 189194599 Blast Desc: conserved [Pyrenophora tritici-repentis Pt-1C-BFP] gi|187979202|gb|EDU45828.1| conserved [Pyrenophora tritici-repentis Pt-1C-BFP]
  misc_feature: Useful for introducing or modulating the production of volatile compounds
MASPAVALANGVPSPSPMHLDANANVNANADLSQSITAATTKRKRDSTDEGDKQENSSNGADTNNANTPALKTDWSEQTPSSALVEVSNDAVRDYFTLLERLDLTPSLLKRPLPEADPNDEPQAKRQKSVDSKPSPSIADKVAQQQYRDVNALISDIRHAVDDQIAELQQTAKGEEASSADSAIARVIEFKKKAHDIFERELSYSAKESETRKVLELLGSNDGLQSNASGNIMLSVYGDAPKSRMLFSSLQQPTDGTDTGFRPLREIGLPNGIKVAKVIPYSFPNAIEKDKKSKTLGELFPAPRNLPSLAPPKVPKSTSKGLHVGWHRPELTEKSKYRAGSYSSQHLSTGRWLDYSSAAPSSQSMTKQRERALSLAGNKPSSSEVETTELESLFRGAFSSFAPSKDDSAAMVSSELISHTLWWQKVGQRNYDRLIGADIPGVAGNESDEMEVDEVEEIDEELIQRAIDNWDETVIDPTLEEACCPKKSDEEKDVDDILQDVSDMMQTLISYQRNRNLTLPTTSSQSRYAADPSHSDMLTNGSPVQPGEEEMATYEALKAQLALIIAMLPPYAVARVNSDKLEELDISMKLEIRTEEYQGVMEEDNGAARSRAAAAQSTAPPPNPRPVSHRSSSSSSSTVNQYGQQYHPSTARGPVPTPPFYPSSTPVRPPQPAATRAPQTMPPAYQQRPPSNAGGYRPSSGYNTSYTPQYSKPAPPYSQQPSFTSTPTQSRPPNYANHTAGNKYVPGYHNMGRLGNQTPQQPRYQASYQAPHTQPPQYNHQSYQAQQSPASTPSQINYGPFTNGVGAMPPRTAPATQHTHYQQPHSPHVPPQQVYHTAGTPSRQPSYGGQAQMNNQSRPYYSPAGTHAPPAQNNQMANQHYNPTQPGQSPGQASFQTSLNTQQVQQAMDQAKARFNAQQTAQKPTEYLSHGVGGHQGQGSPSGGFPGAPVGLGGIGLGADNSRMASARTGKPPSNNYSQSSPNLNGQVGSPAAPNGPPPMNGTPAPVAPMDSGAQVTSDVQGA

SEQ ID NO: 21264 - DNA, 4753 bp, Muscodor strobelii
  misc_feature: SGI EST ID NO. CUFF.49942.0
  misc_feature: Variant of the nucleotide sequence at SEQ ID NO 21262
cccatctcccgctcctgaagtcactggccaatgttgagcagatcggatgagagaggaatttccactgtctgtcactgtccagggtgcggtctgcatacagtatctctgttcttcggcccatgttcgtgagccgtgagtcgtgattgacagcctgcccgtctccccccagcctgcctctggtctcccttcctttccaccaaaccgtgcatcatattcgttttgatgccgtaaatcaaatcatcacgcatcacacaggattagagattgatcgcgtctgctgccggcattttctgagcagattagcgtggcgtgtgtgcccccacagactctctttcgtggccgtgggcgcggatgtcgccagttttcgcgggtgcaagttggaggccgtgaggtccagaataatcgtcgactccctgctcctgcaaaaaacccagagtcgcgacaagtgacgaccgcatcgcgcttgtgcgagccaccaccgctcaaccgtccccaattaatctagtcactgcaccacgcaacgcccgcaccaccaccacaagcatcgcccactcagatctgactggtctgactgcttgctggcattggttattcgttgctggggagctgtgtgtcgcccgcccgcatcattcttacttttcattgaattacttcatctctcttattgactgctggcatcatggcgtcgcccgccgtcgcactggctaacggcgtgccctcgccgtcgcccatgcatctcgatgccaatgcaaatgtcaacgccaacgccgacctttcgcagtccatcactgcagccaccaccaagcgcaaacgcgactcgaccgacgaaggtgacaagcaggaaaactcgtccaacggcgccgacaccaacaacgccaacaccccagcccttaaaactgactggagtgaacaaacccccagctcagccctcgtcgaggtttcaaatgatgccgtgcgcgattacttcaccctgcttgaaagacttgacctcaccccctcgcttctaaagcgtccactacccgaagcagaccccaacgatgagccccaggccaagcgccagaagtcagtagacagcaaaccatccccgtctattgccgacaaggtcgctcaacagcagtaccgcgatgtcaacgctcttatcagcgacataaggcatgccgtcgacgatcaaattgccgagctgcagcaaaccgcaaagggtgaagaggctagctcggcagactctgccattgcgcgtgtcatcgagttcaagaagaaagcccacgacatcttcgagcgagagctgtcctactccgctaaggagtccgagacgcgcaaagtgctggagctgctcgggtccaacgatggtttgcagtcgaatgctagtggcaacataatgctcagcgtctacggcgatgctcccaagtcgcgcatgctattctccagcctgcagcagcccactgacggtacagacaccggcttccgcccgctgcgggagatcgggctgcccaacggtatcaaagtcgctaaggtcatcccctacagcttccccaatgccattgagaaggacaagaagtcgaagacactgggcgagctgttccccgctcctcgcaatctaccctcattagcccctccgaaagtcccgaagagcacatccaaaggactgcatgtaggctggcaccgccccgaattgaccgagaagtctaagtaccgagccggctcatactccagccagcacctgtctaccggcagatggctcgactacagcagtgccgcgccgtcttcgcagtccatgaccaagcagcgcgagcgcgctctgagcctcgcagggaacaagccttcgtcttcggaggtggagacgaccgagttggagtccctcttccgaggcgccttctctagctttgcaccgtccaaggatgattcagctgccatggtgtcttcagagttgatcagccacacgctgtggtggcagaaggttggccagcggaactacgaccgtttgatcggagccgacatccctggtgtcgccggaaatgagagcgatgagatggaggtagacgaggttgaagaaatcgacgaggagttgatccagagggccatcgacaactgggacgagaccgtgatagaccctactctcgaggaagcctgctgccccaagaagtcggacgaagagaaggacgtggacgatatcctgcaagacgtgtcggacatgatgcaaaccctcatctcgtaccagcggaaccgcaatttgacgttgcccactacatctagccagagtcgctacgctgcggacccgtcacatagcgacatgctcactaacggtagcccggtacagcctggcgaggaagagatggctacctacgaggcgctcaaggcgcaactggctttgatcattgctatgctaccgccctatgcagtggctcgtgtaaactcggacaagcttgaggagctggacatctctatgaagctggagatccggaccgaagagtatcaaggcgttatggaagaggacaacggtgctgctcgctctagagcagctgcagcgcagagcactgcgccgccgccgaatccacgacctgtatctcatcgttcgtcaagctcgtcgtccagcacggtgaaccagtacggccagcaatatcacccgagcacggcgcggggtcccgtcccgactccaccattctatccatcttcaacccctgtccggcctcctcagcccgcggcgacccgcgcccctcagacgatgccgcccgcttatcagcaacggcctccctctaatgccgggggttatcgaccatcgagcggatataacacatcctatacgccgcaatactccaagcctgcgcctccgtattctcagcagccttcattcacctccacgccgacccagagcaggccgccgaactatgcaaaccacactgctggaaacaaatatgtccctggctatcataatatgggccgtctgggcaaccaaactccacaacaacctcgctaccaagcatcgtatcaggcgccacacactcagcctcctcagtacaaccatcagagctatcaggcacagcaatcacctgcttccaccccatctcagatcaactacgggcctttcactaatggagtcggcgcgatgcccccgaggaccgcgcctgccacccagcacactcattaccagcagccgcactcaccacacgtgccccctcagcaagtctatcatactgcaggcacgccgtcccgccagccttcgtatggaggtcaagcgcagatgaacaaccagtctcggccttattattcccctgctggaacacatgcgccccctgcacaaaataatcagatggcgaaccagcattacaatcccacccaacccggtcaaagccctggacaagcgtccttccaaacttctctgaacacacagcaggtccaacaagccagtgagtactaatgaacttcttttacgactatgtcatgccatggggatgaggctggaggttgttggaaccgagtcttgtgaaatatgctgtgtgcggttgcccacccctccgcatggttacccaagctaactgatactatcctagtggatcaggctaaggcccgtttcaatgcgcaacaaactgctcagaagccaactgaatacttgagccacggtgtgggaggtcatcaaggccagggatcaccctccggcggctttcctggcgcacctgttggtttaggcggcatcggactcggagccgacaattctagaatggcgtctgctagaaccggcaaacctcctagcaacaactactctcagtccagtcccaatctgaatgggcaagtcggttcacccgcagcgccgaatgggccgccgccaatgaatgggactcctgcacccgttgcgccgatggatagcggggcccaagtcacgtccgacgtgcagggagcttagagagtttccacgtcaggactggatatacctaccaatagggtgccagagaataagagcagtgatcacaacctttttcaccatcttcttcaacaccatcatcaccaccttcatcaacaacaacatcaaaatcttccttctggcagcagcgcccgtaacgaggcggctccttcgataatggtccgcaacccggccaataatcctcacgacaatgtagggcagcctgccggccaggatcggtcttttcagctcccatatgggcggcagcgcctgtttcctttagatcgttggtgatctatgtgatgcggctgagccctatgctttttaccatattcggcgtgtggcctattgtcataatcaggattgaaattcgggacaaacaatagcgtatcagagacaagtcatgtccacgaaacatcccagaacataaccatatggtttctcttcctcatttgaggtgtaataccaattaccaatagagttttcgcaaaagggaaaagaagaaagattttcctttcttcaaaaaggcggcgggaaaaaggcgtactggttcttttggcacgggaaagtgggataaggaggagaactgcaagagatgggactcagatatcctgtccgtgctggaattgtttgtgtagtaattgtccttttgagttctttgctgtcgtaagtatttgccggggagaggtggtcctctagagtgagcgggaaggaggtgaagatgaaaagatcgcaaggcgatcgcaggggatgctactggtactgatagtgatattgatactgtataaaacatattattaccttctacctgtctttgtgcttaattgcaatatgatgtgctaagctcaagcaagtcttgaa

SEQ ID NO: 21265 - DNA, 1197 bp, Muscodor strobelii
  misc_feature: SGI cDNA ID NO. 567197
  misc_feature: Encodes the peptide sequence at SEQ ID NO 21266
atgaagggagctctgctgggtgccgcagctgtgctgctcggcgctgccaatgccgacgtccacaagatgaagctcaagaaggtccccattgctgaccagctgaatgccatccctatggaggcccagctccgcggtctcggccagaagtacctcggcgctcgccctgacttccacgcccaggccgtcttccagcctggcaatgtgcacgccgagaaggaccaccctctccccatctccaacttcatgaacgcacaatacttctccgagatcagcatcggaacgccaccacaggacttcaaggtcatcctcgacaccggaagctccaacctctgggtcccctcgcagtcttgcggtagcattgcctgctacctccactccaaatacgactcttcctcttcctccacctacaagaagaacgggaccgactttgagatccgctacggctctggcagcctgagcggttttgtctcccaggacaccgtcaacattggtgacttgaccatcaagggccaagacttcgccgaggccaccaatgaacctggcctggcttttgccttcggccgcttcgacggtatcctgggtatgggcttcgaccgtctctccgttaacggcatcgtcccccccttctaccagatggtcaaccagaagctcatcgacgagcctgtcttcgccttctacttgagcggagaaaacggtggtgacgactccgaggttgtcttcggtggtgtggacaaggaccactacactggcaagatcaccgagatccctctgcgccgcaaggcttactgggaggtcgatcttgactccatctccttcggcaaggagacggctgagctcgacaacaccggtgtcatcttggacactggtacctccttgatcgctctcccctccgacttggctgagctcctgaacaaggagatgggcgccaagaagggctacaatggccagtacagcatcgactgcgccaagcgtgactcgctgcccgacgtgactttcaagctgtccggctacgacttctccatctctgcctacgactacatcctcgaggtctctggtagctgcatctccaccttcatgggtatggacatccccgcccccgccgggccccttgccatcctaggtgatgccttcctccggaagtactactccatctacgatcttggcaagggcaccgttggtctcgccaaggccaagtaa

SEQ ID NO: 21266 - protein, 398 aa, Muscodor strobelii
  misc_feature: SGI Peptide ID NO. 567197
  misc_feature (85)..(397): Pfam Id: PF00026 Pfam Desc: Eukaryotic aspartyl protease
  misc_feature (1)..(398): NCBI GI: 39973863 Blast Desc: conserved [Magnaporthe grisea 70-15] gi|58257401|gb|AAW69322.1| vacuolar protease A-like protein [Magnaporthe grisea] gi|145018129|gb|EDK02408.1| conserved grisea
  misc_feature (1)..(398): NCBI GI: 116203505 Blast Desc: vacuolar protease A precursor [Chaetomium globosum CBS 148.51] gi|88175764|gb|EAQ83232.1| vacuolar protease A precursor [Chaetomium globosum CBS 148.51]
  misc_feature (1)..(398): NCBI GI: 154309857 Blast Desc: BC1G_06849 [Botryotinia fuckeliana B05.10] gi|38195404|gb|AAR13364.1| aspartic proteinase precursor [Botryotinia fuckeliana] gi|150851637|gb|EDN26830.1| BC1G_06849
  misc_feature (1)..(393): NCBI GI: 156039363 Blast Desc: SS1G_11818 [Sclerotinia sclerotiorum 1980] gi|154697555|gb|EDN97293.1| SS1G_11818 [Sclerotinia sclerotiorum 1980]
  misc_feature (1)..(398): NCBI GI: 85094599 Blast Desc: vacuolar protease A precursor [Neurospora crassa OR74A] gi|59802879|sp|Q01294.2|CARP_NEUCR RecName: Full=Vacuolar protease A; Flags: Precursor gi|28921374|gb|EAA30681.1| vacuolar
  misc_feature (1)..(398): NCBI GI: 171679543 Blast Desc: protein product [Podospora anserina] gi|170939397|emb|CAP64625.1| protein product [Podospora anserina]
  misc_feature (1)..(398): NCBI GI: 1039445 Blast Desc: vacuolar protease A [Neurospora crassa]
  misc_feature (1)..(398): NCBI GI: 110277433 Blast Desc: vacuolar protease A [Trichoderma atroviride]
  misc_feature (1)..(398): NCBI GI: 121705756 Blast Desc: aspartic endopeptidase Pep2 [Aspergillus clavatus NRRL 1] gi|119399287|gb|EAW09715.1| aspartic endopeptidase Pep2 [Aspergillus clavatus NRRL 1]
  misc_feature (14)..(398): NCBI GI: 256728939 Blast Desc: [Nectria haematococca mpVI 77-13-4]
  misc_feature (20)..(398): SWISSPROT Homolog: EC 3.4.23.25 Saccharopepsin
MKGALLGAAAVLLGAANADVHKMKLKKVPIADQLNAIPMEAQLRGLGQKYLGARPDFHAQAVFQPGNVHAEKDHPLPISNFMNAQYFSEISIGTPPQDFKVILDTGSSNLWVPSQSCGSIACYLHSKYDSSSSSTYKKNGTDFEIRYGSGSLSGFVSQDTVNIGDLTIKGQDFAEATNEPGLAFAFGRFDGILGMGFDRLSVNGIVPPFYQMVNQKLIDEPVFAFYLSGENGGDDSEVVFGGVDKDHYTGKITEIPLRRKAYWEVDLDSISFGKETAELDNTGVILDTGTSLIALPSDLAELLNKEMGAKKGYNGQYSIDCAKRDSLPDVTFKLSGYDFSISAYDYILEVSGSCISTFMGMDIPAPAGPLAILGDAFLRKYYSIYDLGKGTVGLAKAK

SEQ ID NO: 21267 - DNA, 1840 bp, Muscodor strobelii
  misc_feature: SGI EST ID NO. CUFF.49855.0
  misc_feature: Variant of the nucleotide sequence at SEQ ID NO 21265
cccaagcccatcgtccgtccttagcccgtccacgtacccgctgtaccttggcttatctgtggctccccagttccccagctgcatcatctgttccagctctcctctacctcctgctcctacatcataccgtcattcccgtcgctcttctctctttcacccattcatccaaccaaggtcgccatcagattggaacaattttattagtgtattctattgcgcccgacctcacccatctcccacagatcaacttgaaccgagttgcccatcatgaagggagctctgctgggtgccgcagctgtgctgctcggcgctgccaatgccgacgtccacaagatgaagctcaagaaggtccccattgctgaccagctgaatgccatccctatggaggcccagctccgcggtctcggccagaagtacctcggcgctcgccctgacttccacgcccaggccgtcttccagcctggcaatgtgcacgccgagaaggaccaccctctccccatctccaacttcatgaacgcacaatacttctccgagatcagcatcggaacgccaccacaggacttcaaggtcatcctcgacaccggaagctccaacctctgggtcccctcgcagtcttgcggtagcattgcctgctacctccactccaaatacgactcttcctcttcctccacctacaagaagaacgggaccgactttgagatccgctacggctctggcagcctgagcggttttgtctcccaggacaccgtcaacattggtgacttgaccatcaagggccaagacttcgccgaggccaccaatgaacctggcctggcttttgccttcggccgcttcgacggtatcctgggtatgggcttcgaccgtctctccgttaacggcatcgtcccccccttctaccagatggtcaaccagaagctcatcgacgagcctgtcttcgccttctacttgagcggagaaaacggtggtgacgactccgaggttgtcttcggtggtgtggacaaggaccactacactggcaagatcaccgagatccctctgcgccgcaaggcttactgggaggtcgatcttgactccatctccttcggcaaggagacggctgagctcgacaacaccggtgtcatcttggacactggtacctccttgatcgctctcccctccgacttggctgagctcctgaacaaggagatgggcgccaagaagggctacaatggccagtacagcatcgactgcgccaagcgtgactcgctgcccgacgtgactttcaagctgtccggctacgacttctccatctctgcctacgactacatcctcgaggtctctggtagctgcatctccaccttcatgggtatggacatccccgcccccgccgggccccttgccatcctaggtgatgccttcctccggaagtactactccatctacgatcttggcaagggcaccgttggtctcgccaaggccaagtaaaggagtggtaaaggagacgtgcagtgttcgagaagagatatactcgctggcgtgtgtggattcccgtatcagattgaactgcgtggaactggaactggagcagggcgctaagtgtggaaatgaatagcacatagtggtggtaattggcgtctctgcagggcttatctgcttgatttagcattccggctgtcccataaagatgataggatggggcttgtggttgtcgctacagaagttttcttaggtcatcattcatactgaatacccaatgccttgaaaaacggagttttatttgctgcatcggagaatagctggaagaattgtaatcacaacaatgcttgcttttacaagaatcgaaggacgagtacacgtaggc

SEQ ID NO: 21268 - DNA, 1662 bp, Muscodor strobelii
  misc_feature: SGI cDNA ID NO. 567198
  misc_feature: Encodes the peptide sequence at SEQ ID NO 21269
atgcttctaacactagctttctttgcactcagtgcaacgctcacgacagctcaagaaactccagttgtcagagtcctcaacggatcgtatcaaggtctatacagcaatgagtacgatcaagatttctttctcggcatgccatacgcgcaaccgcctttagggaaactgcgctggcgaaatgcacaatcattgaatactacatggacgggcacgcggaatgccatgacttattcagacgcttgttttggttacggccaagactcgatttggtacccaaactcggaggattgcttgacacttaacgtcgttagaccggctggtacaaacgaatcctcggactcacccgtcatgttctggattcatggcggtgggttgacaagtggcgccggttcggatcaacgatataacacgtctttcatcatcagtaacgccgtcaagattggaaaaccattcataagtgtgagcataaactaccgcctaggtccctacggcttcttctataacaacgacatcctcgccagcggacagacgaatgttgggtttagggaccagcgactcgcacttcattgggtacaagaaaacatcgcagcgtttggaggagatcctgcaagggtcactatcatgggtcagtcttcgggcgcagcatctgtagcatggcatttcgcggcttacggcggacgagacgacaatctattccgcgccggaatccaggaatcaggatcgctgattacggctggtgtatctggaactgtgccggggagtgcacaaccagcgtatcaacaattgctagatgacacgggatgtaatactgcgatcgatcgcctaggttgcttgcggaatctgaccggagaggagttgaacagttacatgaatggcacgaatgccgctctttatgctaatagttacggaatggtcgtcgatggagatatcgttccgatgataggttctcaggttctggctgaaggcaaattcgtaaaagcacctcttttggttggtgcaaatactgacgaagggattacatacgcacctctgggcgtcaatacgaccgaacagctttattacgggttgactactttatacggcttcccacctcaagctgcccagactctcctatctctgtacccggatggctctacaggagatccagcggcagtagcaacatggctcggcaacatgtccacagaagctgcaggacttatgtgggtgcgaactgcaacaatcgctggtgatatcgcgatgcactctggtcgacgcgctacgtgtgaagcatgggcccgcgaaagtgttccagcatactgctaccgtttcaacgtacgaaacacagatcaagggttctatgccggggcatcgcataccgccgaactgtcattcgtattcaacgacctactcggcgtaggctaccactacggactcccttttgacggaacaccggattcatacgcagagcttagcagcatgatggcgagtacgtggacaagtttcgtcgttgacttagatccgaactctagcggtgaaaataagaatacttggccaatttacgatttggaagaaccgaaggacttcttcttggatgcaaatacgacgagtagagcggagtcggatacatggagacgggaggggatcgcgtatcttaatagcatcgcttcggtgtttcctcgatga

SEQ ID NO: 21269 - protein, 553 aa, Muscodor strobelii
  misc_feature: SGI Peptide ID NO. 567198
  misc_feature (1)..(536): Pfam Id: PF00135 Pfam Desc: Carboxylesterase
  misc_feature (1)..(383): Pfam Id: PF00135 Pfam Desc: Carboxylesterase
  misc_feature (429)..(536): Pfam Id: PF00135 Pfam Desc: Carboxylesterase
  misc_feature (8)..(553): NCBI GI: 255938321 Blast Desc: Pc13g15360 [Penicillium chrysogenum Wisconsin 54-1255] gi|211584551|emb|CAP92605.1| Pc13g15360 [Penicillium chrysogenum Wisconsin 54-1255]
  misc_feature (3)..(553): NCBI GI: 119490705 Blast Desc: carboxylesterase family protein [Neosartorya fischeri NRRL 181] gi|119411235|gb|EAW21178.1| carboxylesterase family protein [Neosartorya fischeri NRRL 181]
  misc_feature (1)..(553): NCBI GI: 145233451 Blast Desc: An02g09690 [Aspergillus niger] gi|134057029|emb|CAK37838.1| protein product [Aspergillus niger]
  misc_feature (3)..(553): NCBI GI: 115391431 Blast Desc: cholinesterase [Aspergillus terreus NIH2624] gi|114194144|gb|EAU35844.1| cholinesterase [Aspergillus terreus NIH2624]
  misc_feature (2)..(553): NCBI GI: 67538302 Blast Desc: AN5321.2 [Aspergillus nidulans FGSC A4] gi|40743291|gb|EAA62481.1| AN5321.2 [Aspergillus nidulans FGSC A4] gi|259485238|tpe|CBF82104.1| TPA: extracellular lipase, FGSC
  misc_feature (2)..(553): NCBI GI: 70999029 Blast Desc: extracellular lipase [Aspergillus fumigatus Af293] gi|66851873|gb|EAL92198.1| extracellular lipase, [Aspergillus fumigatus Af293]
  misc_feature (21)..(553): NCBI GI: 169763652 Blast Desc: [Aspergillus oryzae RIB40] gi|83770754|dbj|BAE60887.1| protein product [Aspergillus oryzae]
  misc_feature (3)..(545): NCBI GI: 39968075 Blast Desc: MGG_02130 [Magnaporthe grisea 70-15] gi|145013018|gb|EDJ97659.1| MGG_02130 [Magnaporthe grisea 70-15]
  misc_feature (13)..(544): NCBI GI: 242770282 Blast Desc: extracellular lipase, [Talaromyces stipitatus ATCC 10500] gi|218725143|gb|EED24560.1| extracellular lipase, [Talaromyces stipitatus ATCC 10500]
  misc_feature (1)..(553): NCBI GI: 145250493 Blast Desc: An15g02210 [Aspergillus niger] gi|134082280|emb|CAK42324.1| protein product [Aspergillus niger]
  misc_feature (25)..(551): SWISSPROT Homolog: EC 3.1.1.3 Triacylglycerol lipase
MLLTLAFFALSATLTTAQETPVVRVLNGSYQGLYSNEYDQDFFLGMPYAQPPLGKLRWRNAQSLNTTWTGTRNAMTYSDACFGYGQDSIWYPNSEDCLTLNVVRPAGTNESSDSPVMFWIHGGGLTSGAGSDQRYNTSFIISNAVKIGKPFISVSINYRLGPYGFFYNNDILASGQTNVGFRDQRLALHWVQENIAAFGGDPARVTIMGQSSGAASVAWHFAAYGGRDDNLFRAGIQESGSLITAGVSGTVPGSAQPAYQQLLDDTGCNTAIDRLGCLRNLTGEELNSYMNGTNAALYANSYGMVVDGDIVPMIGSQVLAEGKFVKAPLLVGANTDEGITYAPLGVNTTEQLYYGLTTLYGFPPQAAQTLLSLYPDGSTGDPAAVATWLGNMSTEAAGLMWVRTATIAGDIAMHSGRRATCEAWARESVPAYCYRFNVRNTDQGFYAGASHTAELSFVFNDLLGVGYHYGLPFDGTPDSYAELSSMMASTWTSFVVDLDPNSSGENKNTWPIYDLEEPKDFFLDANTTSRAESDTWRREGIAYLNSIASVFPR

SEQ ID NO: 21270 - DNA, 2019 bp, Muscodor strobelii
  misc_feature: SGI EST ID NO. CUFF.49878.0
  misc_feature: Variant of the nucleotide sequence at SEQ ID NO 21268
tcgcgaaccaggatataaagaggtttggccaccttagtgcagctctgctgcagtattcctacgggataccaattccgaccaagtgtcgaattccatagcaagatctaggcctgaacctcggtcaatagaaaatcatagctggaaagaggatgggatatcaacctcagtacttgtaagggtagcatccccattatgtgtattcctcttgggtttctacctctctcatgtcatcagtcctatgacttcaaaactttaccaacgtgaacatgcttctaacactagctttctttgcactcagtgcaacgctcacgacagctcaagaaactccagttgtcagagtcctcaacggatcgtatcaaggtctatacagcaatgagtacgatcaagatttctttctcggcatgccatacgcgcaaccgcctttagggaaactgcgctggcgaaatgcacaatcattgaatactacatggacgggcacgcggaatgccatgacttattcagacgcttgttttggttacggcactcgatttggtacccaaactcggaggattgcttgacacttaacgtcgttagaccggctggtacaaacgaatcctcggactcacccgtcatgttctggattcatggcggtgggttgacaagtggcgccggttcggatcaacgatataacacgtctttcatcatcagtaacgccgtcaagattggaaaaccattcataagtgtgagcataaactaccgcctaggtccctacggcttcttctataacaacgacatcctcgccagcggacagacgaatgttgggtttagggaccagcgactcgcacttcattgggtacaagaaaacatcgcagcgtttggaggagatcctgcaagggtcactatcatgggtcagtcttcgggcgcagcatctgtagcatggcatttcgcggcttacggcggacgagacgacaatctattccgcgccggaatccaggaatcaggatcgctgattacggctggtgtatctggaactgtgccggggagtgcacaaccagcgtatcaacaattgctagatgacacgggatgtaatactgcgatcgatcgcctaggttgcttgcggaatctgaccggagaggagttgaacagttacatgaatggcacgaatgccgctctttatgctaatagttacggaatggtcgtcgatggagatatcgttccgatgataggttctcaggttctggctgaaggcaaattcgtaaaagcacctcttttggttggtgcaaatactgacgaagggattacatacgcacctctgggcgtcaatacgaccgaacagctttattacgggttgactactttatacggcttcccacctcaagctgcccagactctcctatctctgtacccggatggctctacaggagatccagcggcagtagcaacatggctcggcaacatgtccacagaagctgcaggacttatgtgggtgcgaactgcaacaatcgctggtgatatcgcgatgcactctggtcgacgcgctacgtgtgaagcatgggcccgcgaaagtgttccagcatactgctaccgtttcaacgtacgaaacacagatcaagggttctatgccggggcatcgcataccgccgaactgtcattcgtattcaacgacctactcggcgtaggctaccactacggactcccttttgacggaacaccggattcatacgcagagcttagcagcatgatggcgagtacgtggacaagtttcgtcgttgacttagatccgaactctagcggtgaaaataagaatacttggccaatttacgatttggaagaaccgaaggacttcttcttggatgcaaatacgacgagtagagcggagtcggatacatggagacgggaggggatcgcgtatcttaatagcatcgcttcggtgtttcctcgatgaatgatacctacctgtaattagatggatatcgtaagagacacaaacatgcactagaatttgataacaacatcattataatataatattgcaccgtg

SEQ ID NO: 21271 - DNA, 1296 bp, Muscodor strobelii
  misc_feature: SGI cDNA ID NO. 567199
  misc_feature: Reduced expression when VOC is produced
  misc_feature: Encodes the peptide sequence at SEQ ID NO 21272
atgggccatgtccgcactctttctcgataccggttcagacgtctgggcaaacttatcttcgtgctacttatagggtgtttcaccatgcacaaaatcctcgatcacttcaggaagcagggcgattctgcgccgtcgcagcaaccacatctacaatctcagccgcatgcgcaaaacgcctgtcccggtcatgaggctcaatatcaaaatccgcatgcccatgctcagcccttggcttggaaaatcagctccgagaccaaacccctgcatgagggtggcacatacccgcgtctctgtcggctatccgacggttcactcctctgctccgtgacgcgggtaaaagatgggatacacatcctctccgtgtcccgatctatggacaacgggcgctcgttcgcgccctacggtgaaatcacccgcggaaaaggagatgtcgataatgcgttcttactagaagtgcccgtcccgggacaaacccccactgtcctcgctgcattcagaaatcacaataaaggcgaagatggtaaacctacgcatttccgtattacagtgtgtaggagtacggacggaggaaagacttggaaattcgcgagccaggctgcaagccaatctgctgcgcagagtaaggggatgggtctttgggagccattcatgagacttagtgccagcgcgccgcatccacatacgggaattcccgtcgtgcaactcacgtattccggagagatggcaaagattaaccaagagacgttccgtgttgattctttcgacgctggctcgacctggagctcgccgccgagatgtctgaggtgtcatgataagatggagaatctgagagatggtatgcaggggattgccgtaacgcgggatgcggtcacgggccgaaatgcgcttgtcatggtctttgagacgacgaggaagaggccgcatttcagcctcgagtacgtcgtgtcgtatgacgacggcgagacgtggggtgatcgcggtgttgtgtacgtcccccgtggcgagggcaggaatgcaggcgcacctcagatcgccgcgtgtaagggcggtaagctggctgtggtgtttatgtgtgatgaggatgttccggagaagaaatggccacggtttgctgatgtcaaggctgttttctcagatggtttgagtaatggaagaatacattggacgccgcatccggttgtcgtacatgagtcaccatcgcattggcctggtgtgctttgcaccgctgaagacgaggtcatggcggtatatgagcatcgtgggaagccccttggcaggctgttacatgtcacatag

SEQ ID NO: 21272 - protein, 431 aa, Muscodor strobelii
  misc_feature: SGI Peptide ID NO. 567199
  misc_feature (92)..(428): NCBI GI: 238488337 Blast Desc: BNR/Asp-box repeat domain protein [Aspergillus flavus NRRL3357] gi|220697794|gb|EED54134.1| BNR/Asp-box repeat domain protein [Aspergillus flavus NRRL3357]
  misc_feature (92)..(428): NCBI GI: 169762534 Blast Desc: [Aspergillus oryzae RIB40] gi|83770195|dbj|BAE60328.1| protein product [Aspergillus oryzae]
  misc_feature (92)..(428): NCBI GI: 255939346 Blast Desc: Pc16g00170 [Penicillium chrysogenum Wisconsin 54-1255] gi|211585065|emb|CAP92687.1| Pc16g00170 [Penicillium chrysogenum Wisconsin 54-1255]
  misc_feature (70)..(418): NCBI GI: 115401884 Blast Desc: conserved [Aspergillus terreus NIH2624] gi|114190471|gb|EAU32171.1| conserved [Aspergillus terreus NIH2624]
  misc_feature (92)..(428): NCBI GI: 70986756 Blast Desc: BNR/Asp-box repeat domain protein [Aspergillus fumigatus Af293] gi|66846497|gb|EAL86829.1| BNR/Asp-box repeat domain protein [Aspergillus fumigatus Af293] BNR/Asp-box repeat
  misc_feature (92)..(428): NCBI GI: 119483134 Blast Desc: BNR/Asp-box repeat protein, [Neosartorya fischeri NRRL 181] gi|119409750|gb|EAW19698.1| BNR/Asp-box repeat protein, [Neosartorya fischeri NRRL 181]
  misc_feature (92)..(430): NCBI GI: 171678195 Blast Desc: protein product [Podospora anserina] gi|170937167|emb|CAP61824.1| protein product [Podospora anserina]
  misc_feature (92)..(418): NCBI GI: 67538122 Blast Desc: AN5231.2 [Aspergillus nidulans FGSC A4] gi|40743222|gb|EAA62412.1| AN5231.2 [Aspergillus nidulans FGSC A4] gi|259484692|tpe|CBF81131.1| TPA: BNR/Asp-box repeat domain
  misc_feature (62)..(428): NCBI GI: 121711735 Blast Desc: BNR/Asp-box repeat domain protein [Aspergillus clavatus NRRL 1] gi|119401634|gb|EAW12057.1| BNR/Asp-box repeat domain protein [Aspergillus clavatus NRRL 1]
  misc_feature (92)..(428): NCBI GI: 212545895 Blast Desc: BNR/Asp-box repeat domain protein [Penicillium marneffei ATCC 18224] gi|210064621|gb|EEA18716.1| BNR/Asp-box repeat domain protein [Penicillium marneffei ATCC 18224]
  misc_feature: Useful for introducing or modulating the production of volatile compounds
MGHVRTLSRYRFRRLGKLIFVLLIGCFTMHKILDHFRKQGDSAPSQQPHLQSQPHAQNACPGHEAQYQNPHAHAQPLAWKISSETKPLHEGGTYPRLCRLSDGSLLCSVTRVKDGIHILSVSRSMDNGRSFAPYGEITRGKGDVDNAFLLEVPVPGQTPTVLAAFRNHNKGEDGKPTHFRITVCRSTDGGKTWKFASQAASQSAAQSKGMGLWEPFMRLSASAPHPHTGIPVVQLTYSGEMAKINQETFRVDSFDAGSTWSSPPRCLRCHDKMENLRDGMQGIAVTRDAVTGRNALVMVFETTRKRPHFSLEYVVSYDDGETWGDRGVVYVPRGEGRNAGAPQIAACKGGKLAVVFMCDEDVPEKKWPRFADVKAVFSDGLSNGRIHWTPHPVVVHESPSHWPGVLCTAEDEVMAVYEHRGKPLGRLLHVT

SEQ ID NO: 21273 - DNA, 1575 bp, Muscodor strobelii
  misc_feature: SGI cDNA ID NO. 567200
  misc_feature: Reduced expression when VOC is produced
  misc_feature: Encodes the peptide sequence at SEQ ID NO 21274
atgaagaacttcatcaagcaaagggcgcctattcggccacccgcatcatcaaacaccatctaccagagcttacagacagaagatgtggatgatgatcaaaatgatacccggcagccgaatatggcgtacgtgtatggcctcacggccttcgtatcgcttggcggattcctgtttggttgggaccagggagtcatggcaatgattattgctgacgagcggtggttaaggcttatgaagcctgctaatgaatggtctattggtttcgtgatcagtatatacaacatcggatgcgtcatcggcgcgttgaccgtcggctatttcgctgatgtatgcggtcgagagcgtaccatctcactcgctagcacagtcttcatcgctggtgctttactccaagcagcgtcttacaccatcgctcaaattagcacaggccgtctgattctgggcctaggagtcggcgcctactccgccgccgtccccctctacatctctgagatctcacctgcagcgctcaggggccgaatagtaggcataatgatgatgatcctctgcttcgccgagatggtcgtcttcttcgtcgactacgcactattcttcctagactcagacggctggtggcgttggccgctcgctattcaagtcatacccgcgctcatcctcgccatcggctgctggagttgggtccccccatcaccccgctggctggtgtctgagggccggtatgattgtgcgcttgaagttttgtcgaggttgcatggttctgaggcggcgaaaaaggaaattcgagagatcagagagacggtcaacgaagagtcgagcgccgccaatggtgtatcgtggatggacatgttccgaggccctgtccttagagtcacccttttgggcacgggtgtgcagatgtttcagcagacgacgggtacgaatggtatcttctactacgcgccgaaactcttcaaaaaaggcgggatcacggacccggtattcgctaatctcgcaactggcggcgttggcgtgattttgttcctgagtggttggataccgatcctgtacttcgatcgctttggacgcaagacctggttccagatcggactcgtcggtatgatcgtcgcgcttacgggtatctgtgtgttgcagcagcatgctgctgattacccggacagtaaggtgaattaccttattgtgatcttcccgtatttgtattatatcttctttaatgcgagctggggcacggggagctggacatatgctgcggagattttccccatttctttacgggctaagggaaatgccctttgtacggcgactttatggcttgccaatttcgcggttgcgcaagtctcgccgccgattgaggaggcgacgggctatggtctttatatcttgtttatagtgatttgcgtcattgcgttcattttcgctagatatgcccttgttgaaacgaagggccggtcgctcgaggagatggccgagttgtttggactcgatggcctagatggcaaagaagaggatgtgagagattcagcgacacaagggttgcttcggtcatcaactgaagaagacggcttggcggagtcgtaa

SEQ ID NO: 21274 - protein, 524 aa, Muscodor strobelii
  misc_feature: SGI Peptide ID NO. 567200
  misc_feature (51)..(443): Pfam Id: PF07690 Pfam Desc: Major Facilitator Superfamily
  misc_feature (47)..(491): Pfam Id: PF00083 Pfam Desc: Sugar (and other) transporter
  misc_feature (86)..(443): Pfam Id: PF07690 Pfam Desc: Major Facilitator Superfamily
  misc_feature (5)..(495): NCBI GI: 238503642 Blast Desc: sugar transporter, [Aspergillus flavus NRRL3357] gi|220690524|gb|EED46873.1| sugar transporter, [Aspergillus flavus NRRL3357]
  misc_feature (5)..(495): NCBI GI: 169765077 Blast Desc: [Aspergillus oryzae RIB40] gi|83764864|dbj|BAE55008.1| protein product [Aspergillus oryzae]
  misc_feature (43)..(491): NCBI GI: 189194511 Blast Desc: arabinose-proton symporter [Pyrenophora tritici-repentis Pt-1C-BFP] gi|187979158|gb|EDU45784.1| arabinose-proton symporter [Pyrenophora tritici-repentis
  misc_feature (14)..(519): NCBI GI: 255948434 Blast Desc: Pc22g09740 [Penicillium chrysogenum Wisconsin 54-1255] gi|211592001|emb|CAP98262.1| Pc22g09740 [Penicillium chrysogenum Wisconsin 54-1255]
  misc_feature (23)..(517): NCBI GI: 70989599 Blast Desc: MFS monosaccharide transporter [Aspergillus fumigatus Af293] gi|66847280|gb|EAL87611.1| MFS monosaccharide transporter, [Aspergillus fumigatus Af293]
  misc_feature (1)..(504): NCBI GI: 255931101 Blast Desc: Pc12g02140 [Penicillium chrysogenum Wisconsin 54-1255] gi|211581726|emb|CAP79841.1| Pc12g02140 [Penicillium chrysogenum Wisconsin 54-1255]
  misc_feature (43)..(524): NCBI GI: 145244014 Blast Desc: An11g05280 [Aspergillus niger] gi|134079204|emb|CAL00378.1| protein product [Aspergillus niger]
  misc_feature (23)..(518): NCBI GI: 238487522 Blast Desc: MFS monosaccharide transporter, [Aspergillus flavus NRRL3357] gi|220699878|gb|EED56217.1| MFS monosaccharide transporter, [Aspergillus flavus NRRL3357]
  misc_feature (23)..(517): NCBI GI: 119480229 Blast Desc: MFS monosaccharide transporter, [Neosartorya fischeri NRRL 181] gi|119408297|gb|EAW18246.1| MFS monosaccharide transporter, [Neosartorya fischeri NRRL 181]
  misc_feature (23)..(518): NCBI GI: 169770105 Blast Desc: [Aspergillus oryzae RIB40] gi|83767381|dbj|BAE57520.1| protein product [Aspergillus oryzae]
  misc_feature: Useful for introducing or modulating the production of volatile compounds
MKNFIKQRAPIRPPASSNTIYQSLQTEDVDDDQNDTRQPNMAYVYGLTAFVSLGGFLFGWDQGVMAMIIADERWLRLMKPANEWSIGFVISIYNIGCVIGALTVGYFADVCGRERTISLASTVFIAGALLQAASYTIAQISTGRLILGLGVGAYSAAVPLYISEISPAALRGRIVGIMMMILCFAEMVVFFVDYALFFLDSDGWWRWPLAIQVIPALILAIGCWSWVPPSPRWLVSEGRYDCALEVLSRLHGSEAAKKEIREIRETVNEESSAANGVSWMDMFRGPVLRVTLLGTGVQMFQQTTGTNGIFYYAPKLFKKGGITDPVFANLATGGVGVILFLSGWIPILYFDRFGRKTWFQIGLVGMIVALTGICVLQQHAADYPDSKVNYLIVIFPYLYYIFFNASWGTGSWTYAAEIFPISLRAKGNALCTATLWLANFAVAQVSPPIEEATGYGLYILFIVICVIAFIFARYALVETKGRSLEEMAELFGLDGLDGKEEDVRDSATQGLLRSSTEEDGLAES

SEQ ID NO: 21275 - DNA, 5608 bp, Muscodor strobelii
  misc_feature: SGI EST ID NO. CUFF.50074.0
  misc_feature: Variant of the nucleotide sequence at SEQ ID NO 21273
agctgctactagattgtgtctattttatgtgcctatatcagtcttgctctgaatctatcagttgtcataagatgtcgttcgaattgtcttcattcattctcatgaatatctatgtgacatgtaacagcctgccaaggggcttcccacgatgctcatataccgccatgacctcgtcttcagcggtgcaaagcacaccaggccaatgcgatggtgactcatgtacgacaaccggatgcggcgtccaatgtattcttccattactcaaaccatctgagaaaacagccttgacatcagcaaaccgtggccatttcttctccggaacatcctcatcacacataaacaccacagccagcttaccgcccttacacgcggcgatctgaggtgcgcctgcattcctgccctcgccacgggggacgtacacaacaccgcgatcaccccacgtctcgccgtcgtcatacgacacgacgtactcgaggctgaaatgcggcctcttcctcgtcgtctcaaagaccatgacaagcgcatttcggcccgtgaccgcatcccgcgttacggcaatcccctgcataccatctctcagattctccatcttatcatgacacctcagacatctcggcggcgagctccaggtcgagccagcgtcgaaagaatcaacacggaacgtctcttggttaatctttgccatctctccggaatacgtgagttgcacgacgggaattcccgtatgtggatgcggcgcgctggcactaagtctcatgaatggctcccaaagacccatccccttactctgcgcagcagattggcttgcagcctggctcgcgaatttccaagtctttcctccgtccgtactcctacacactgtaatacggaaatgcgtaggtttaccatcttcgcctttattgtgatttctgaatgcagcgaggacagtgggggtttgtcccgggacgggcacttctagtaagaacgcattatcgacatctccttttccgcgggtgatttcaccgtagggcgcgaacgagcgcccgttgtccatagatcgggacacggagaggatgtgtatcccatcttttacccgcgtcacggagcagaggagtgaaccgtcggatagccgacagagacgcgggtatgtgccaccctcatgcaggggtttggtctcggagctgattttccaagccaagggctgagcatgggcatgcggattttgatattgagcctcatgaccgggacaggcgttttgcgcatgcggctgagattgtagatgtggttgctgcgacggcgcagaatcgccctgcttcctgaagtgatcgaggattttgtgcatggtgaaacaccctataagtagcacgaagataagtttgcccagacgtctgaaccggtatcgagaaagagtgcggacatggcccatttgcttgcgatctcagctcgtcgttgtggctattagtgagatggcggcgggatgacgaagcttggctccactaaacaggacatcttgatgttggatactcgtcattggcgtttggtctttggggcagtttcaagatgctgtacagtaaatcaccccacctatgcgcggcctcgggacggcggcacctacttgagattgctgttttgggcgattcagactacaggcttcaggagacaacatatcgccgtaatttaagacgattgcgcttggaactctcttcggattaattcatttgaaattcacatgcatttatgatactgtttgagtcttgagatcgttggtggatttgcaacacgcagggcaataagtcacgtgatcttcgggtcactgtcacccttgatcatgaggatagaagttcacgagaacaagaaccatcatctatgaccctgttgagatttcaagtcgcgaaactgatgttcactatttatctcattttcaattagcttatagagcatccaccagccaccccttgtcccgtgccagacatcaagtgccccaaaacgatgacactctaaccacagcgccaacctttcgggagtaagtccgatgaagaacttcatcaagcaaagggcgcctattcggccacccgcatcatcaaacaccatctaccagagcttacagacagaagatgtggatgatgatcaaaatgatacccggcagccgaatatggcgtacgtgtatggcctcacggccttcgtatcgcttggcggattcctgtttggttgggaccagggagtcatggcaatgattattgctgacgagcggtggttaaggcttatgaagcctgctaatgaatgtgagtttcttctcattcctagatttccgttgggatgggttggggtgcttgaaatgtttgatgagattatgcatattgatctattagactgttgatgttaaccactgttcacgaagggtctattggtttcgtgatcagtatatacaacatcggatgcgtcatcggcgcgttgaccgtcggctatttcgctgatgtatgcggtcgagagcgtaccatctcactcgctagcacagtcttcatcgctggtgctttactccaagcagcgtcttacaccatcgctcaaattagcacaggccgtctgattctgggcctaggagtcggcgcctactccgccgccgtccccctctacatctctgagatctcacctgcagcgctcaggggccgaatagtaggcataatgatgatgatcctctgcttcgccgagatggtcgtcttcttcgtcgactacgcactattcttcctagactcagacggctggtggcgttggccgctcgctattcaagtcatacccgcgctcatcctcgccatcggctgctggagttgggtccccccatcaccccgctggctggtgtctgagggccggtatgattgtgcgcttgaagttttgtcgaggttgcatggttctgaggcggcgaaaaaggaaattcgagagatcagagagacggtcaacgaagagtcgagcgccgccaatggtgtatcgtggatggacatgttccgaggccctgtccttagagtcacccttttgggcacgggtgtgcagatgtttcagcagacgacgggtacgaatggtatcttctactacgcgccgaaactcttcaaaaaaggcgggatcacggacccggtattcgctaatctcgcaactggcggcgttggcgtgattttgttcctgagtggttggataccgatcctgtacttcgatcgctttggacgcaagacctggttccagatcggactcgtcggtatgatcgtcgcgcttacgggtatctgtgtgttgcagcagcatgctgctgattacccggacagtaaggtgaattaccttattgtgatcttcccgtatttgtattatatcttctttaatgcgagctggggcacggggagctggacatatgctgcggagattttccccatttctttacgggctaagggaaatgccctttgtacggcgactttatggcttgccaatttcgcggttgcgcaagtctcgccgccgattgaggaggcgacgggctatggtctttatatcttgtttatagtgatttgcgtcattgcgttcattttcgctagatatgcccttgttgaaacgaagggccggtcgctcgaggagatggccgagttgtttggactcgatggcctagatggcaaagaagaggatgtgagagattcagcgacacaagggttgcttcggtcatcaactgaagaagacggcttggcggagtcgtaaagaaagaaagatatattgtagatttcgattatggtacggtgtagaatcaggaccaagcacacaggctggggtctttgtatatactctaatcgatcacatacatatctaccgtatacagggcaagttaagttcaaatgtttgtagcgctgccggattataatctacctccgtctgatttcaccaaacatgcattccagagcggtgttacgataatttcagggagggtagccatgtgctaggcacgttttaatctccctatctcagagttgggtatcatccgtttgatcaacgccatttaatgtacatttactttattcatttcgtttctgtcgcctcagcgacatcctcacgccatatcctcctcacctcaaacagaacctcgatagtgatcaaggctattatgatccactcaagcctatggccgtacttttcactgatcatttctcgcagaacagtcacgttctcatgagcataatcgattcgcttgttcaggatctcgatacgacggcgcacggccagagcagcgccaatctggttgtagtattcctccagcacagactcagactcccaaaacatgtctggaagctcttctgtgatgtcggaatagtggttcagttgtgagcgcaggttcagcagctgacctgtcatcttgaggattgactggcgcttgagtttgctctgtgaacccgctgcaaggacgtttaatgtcgccttggactcttgcagtaaatactcgaggtcggtttcgagcactgccagctttggactcctcgctagtccgcttgagaaggcgattttagctagtgtggtgtcgagcttgtcgttttcgagctcctgtgctctcgtacccagcacgacgacctcgcccttcatgaagctcgtgtctcttgtctcatcgggagtgaactcgagcatttctatctcggcacggtcgacgtgggggaagctagcggcgcggatcaagtgtttggatgcgagctttagcagggtgtcttcgggaacggaccaggtgacgacggtgccggagggaaagacgaagatgtcgccgttgttgacgcctctagcatgcacgacggcctgggtgtcgaactcggtgtggtcggggtccagctcgaagccgtggaagcggaggacctcctggacctgggccatgtcgaaggactgggcgacgcagatggcgcggacggtgcggctgtagtcggggacgtcatcgcggtcgagggcgtcttggacggcggtcttcttggtggtggtgggacgcttgctgggcttggtgacggcaccgagacgcagactcttggctgcagatgctcgcatgggcttccgcttcgctggatggggagtcttgttgttggtattattattctgatgggcgttggcggttgttgctgtgccggggtcagcggaaaggtcgccaagatcggtgggcttgtcgttgacgtcgaggagctggttggaggtgaagaaggtgcgtttgcgaggcagggaggcgagactcgtctgatggaagtatcgaaggggtcgcggggcgggtgccctggtgtgcagccctctggaaagtgtgaagaagggaggcgctatagccttgtgtagacaggatggcatggtgagtctgaggccatctgaagcagaagactctctactaattggtgtcgttggagctgtttttgagggcacacctcctcttcaatgcaagggaaagtgaaaaaaagaagcaagtcggaaagcagctgtgataagaacatgggtatgcaaggccaatgcttcaagtacccctctattttgctatgctaacacccttctatgaactgttgtacataagccgctgtgtttccaattggcctctaagttgcccttttgtcgcttcgggcaattctgagctgatagtatagagggcagaggaaag

SEQ ID NO: 21276 - DNA, 1290 bp, Muscodor strobelii
  misc_feature: SGI cDNA ID NO. 567201
  misc_feature: Reduced expression when VOC is produced
  misc_feature: Encodes the peptide sequence at SEQ ID NO 21277
atgccatcctgtctacacaaggctatagcgcctcccttcttcacactttccagagggctgcacaccagggcacccgccccgcgaccccttcgatacttccatcagacgagtctcgcctccctgcctcgcaaacgcaccttcttcacctccaaccagctcctcgacgtcaacgacaagcccaccgatcttggcgacctttccgctgaccccggcacagcaacaaccgccaacgcccatcagaataataataccaacaacaagactccccatccagcgaagcggaagcccatgcgagcatctgcagccaagagtctgcgtctcggtgccgtcaccaagcccagcaagcgtcccaccaccaccaagaagaccgccgtccaagacgccctcgaccgcgatgacgtccccgactacagccgcaccgtccgcgccatctgcgtcgcccagtccttcgacatggcccaggtccaggaggtcctccgcttccacggcttcgagctggaccccgaccacaccgagttcgacacccaggccgtcgtgcatgctagaggcgtcaacaacggcgacatcttcgtctttccctccggcaccgtcgtcacctggtccgttcccgaagacaccctgctaaagctcgcatccaaacacttgatccgcgccgctagcttcccccacgtcgaccgtgccgagatagaaatgctcgagttcactcccgatgagacaagagacacgagcttcatgaagggcgaggtcgtcgtgctgggtacgagagcacaggagctcgaaaacgacaagctcgacaccacactagctaaaatcgccttctcaagcggactagcgaggagtccaaagctggcagtgctcgaaaccgacctcgagtatttactgcaagagtccaaggcgacattaaacgtccttgcagcgggttcacagagcaaactcaagcgccagtcaatcctcaagatgacaggtcagctgctgaacctgcgctcacaactgaaccactattccgacatcacagaagagcttccagacatgttttgggagtctgagtctgtgctggaggaatactacaaccagattggcgctgctctggccgtgcgccgtcgtatcgagatcctgaacaagcgaatcgattatgctcatgagaacgtgactgttctgcgagaaatgatcagtgaaaagtacggccataggcttgagtggatcataatagccttgatcactatcgaggttctgtttgaggtgaggaggatatggcgtgaggatgtcgctgaggcgacagaaacgaaatga

SEQ ID NO: 21277 - protein, 429 aa, Muscodor strobelii
  misc_feature: SGI Peptide ID NO. 567201
  misc_feature (139)..(374): Pfam Id: PF02582 Pfam Desc: Uncharacterised ACR, YagE family COG1723
  misc_feature (268)..(374): Pfam Id: PF02582 Pfam Desc: Uncharacterised ACR, YagE family COG1723
  misc_feature (14)..(424): NCBI GI: 46138531 Blast Desc: FG10780.1 [Gibberella zeae PH-1]
  misc_feature (1)..(420): NCBI GI: 261355060 Blast Desc: sporulation protein RMD1 [Verticillium albo-atrum VaMs.102]
  misc_feature (18)..(424): NCBI GI: 256729143 Blast Desc: [Nectria haematococca mpVI 77-13-4]
  misc_feature (19)..(420): NCBI GI: 164426987 Blast Desc: NCU02271 [Neurospora crassa OR74A] gi|157071557|gb|EAA30679.2| conserved [Neurospora crassa OR74A]
  misc_feature (19)..(420): NCBI GI: 40804616 Blast Desc: conserved [Neurospora crassa]
  misc_feature (29)..(420): NCBI GI: 154293889 Blast Desc: BC1G_14016 [Botryotinia fuckeliana B05.10] gi|150845171|gb|EDN20364.1| BC1G_14016 [Botryotinia fuckeliana B05.10]
  misc_feature (76)..(420): NCBI GI: 171679551 Blast Desc: protein product [Podospora anserina] gi|170939401|emb|CAP64629.1| protein product [Podospora anserina]
  misc_feature (84)..(423): NCBI GI: 145610769 Blast Desc: MGG_00920 [Magnaporthe grisea 70-15] gi|145018132|gb|EDK02411.1| MGG_00920 [Magnaporthe grisea 70-15]
  misc_feature (152)..(420): NCBI GI: 156039729 Blast Desc: SS1G_12001 [Sclerotinia sclerotiorum 1980] gi|154697738|gb|EDN97476.1| SS1G_12001 [Sclerotinia sclerotiorum 1980]
  misc_feature (31)..(424): NCBI GI: 238486828 Blast Desc: YagE family protein [Aspergillus flavus NRRL3357] gi|220699531|gb|EED55870.1| YagE family protein [Aspergillus flavus NRRL3357]
  misc_feature: Useful for introducing or modulating the production of volatile compounds
MPSCLHKAIAPPFFTLSRGLHTRAPAPRPLRYFHQTSLASLPRKRTFFTSNQLLDVNDKPTDLGDLSADPGTATTANAHQNNNTNNKTPHPAKRKPMRASAAKSLRLGAVTKPSKRPTTTKKTAVQDALDRDDVPDYSRTVRAICVAQSFDMAQVQEVLRFHGFELDPDHTEFDTQAVVHARGVNNGDIFVFPSGTVVTWSVPEDTLLKLASKHLIRAASFPHVDRAEIEMLEFTPDETRDTSFMKGEVVVLGTRAQELENDKLDTTLAKIAFSSGLARSPKLAVLETDLEYLLQESKATLNVLAAGSQSKLKRQSILKMTGQLLNLRSQLNHYSDITEELPDMFWESESVLEEYYNQIGAALAVRRRIEILNKRIDYAHENVTVLREMISEKYGHRLEWIIIALITIEVLFEVRRIWREDVAEATETK

SEQ ID NO: 21278 - DNA, 2616 bp, Muscodor strobelii
  misc_feature: SGI cDNA ID NO. 567202
  misc_feature: Reduced expression when VOC is produced
  misc_feature: Encodes the peptide sequence at SEQ ID NO 21279
atgcgaacacctctcgcccacgctgcacgagggctgttcggctcagagcccgcctggggccaggccctctcgcgcgccacccgcaacaggacgaaacgattccgcgagctccctctctcgccgacgcgcatcctcgctctgcgcctgcgggccacaaacgacgaacagaggagaagatacgccaaactcttcctcatcggcgctggcatgcgcaacgaccgcctgcctgtcctgaccctgcagaacctactggccaagcaagacctgacctcggagccccagcttgcccacgctgttgctgctataaagcctgctgagtggaaggagacgattgttctgctcgagtcgaggggatggtcccaggaacacctcgaccattggacttggattctctctggcgagaacggcgaagctcgcgtgcgccgcttccttttcaccgacgataccaagcccatctttctcctcctcattctcctccagaacaactcagccttccatactgctgagtcgctgtctgcgttaattcactatgtgcgcaaacaccacatgcaaccactcaccgatgcctccaacaggccagcccaagcctccttggctgcacccaaagatgtcttcacggtgacacagttcaaacttctactacgccgtctggtaacccgcacccgatggttagccccacgctttatggtcactgttgctcgcctggtcgaggacttcattcgcggcgtccccacagacccacatcaccgtcgtggaggcaccgtctactcagaccagtgccaggtcttcaacactgctctgcgctatttcagcatccgagccatcgaccagcctttgaaaaacatggagttcaactggagagcgcaaaagacccttttagccagatcagacagcctcaagaagccattgatcatcaaccaggagagttatcggtccattcgcaaggttcttgttggattgaagaaatcaacaagcgagagattcgtggccatgagatatgcatcttcgtggccaccttatcggcaagatttcgacggcagggacgccaagcgcaccatcgaagatgatcagtcacgaagctacagagccggcattcttatgaaccaagctgggtacgtagcaaacgactatgatagcgctttggatgctttgggtggtatcagcgatggtactccgactatacagactcgaagtctcccaccgggacaggccaggggccctgacaaggaaaaagggaatgcatattcgaactgggccatgaatataagagcaacgcgcaacgcccaagaagcctggagagctttcaacaaatttgccgacaagaccaagatgcgtcccaatgcccaagtatacaacgagatgttcctcaaactcttagcagaagaagtgcctgacgacatgtcatccgaagtgctcccaggcgattcaaaggaaaattggccggtccatgacgccaattacagtgcatatgagcttgctagactttcgcccccgtcggttaaccagctttaccacgaaatgaggcacttcggtatcaaaccagagggcattggactagaggagcttgttaagaaagcagggtctgttgaaaacggtctgcactacatgagagacagtggcgtcccgtcttcagtcatcaagtccatcatgcccttcaaagagccttccaatcaagctcttcgaagccttccactaaggctcttcagctgctatgttcatttgctatgtaggctacagcccaagcgccaaggatatgaagcgatttcaaccaaagaactatatcacatccgccatgcgatcaagatcgtgacgttgagattgcaaccacatacaaccgagggtaccacgtttcgatcgccctggtatgctatcttacgtacacttgcgcgtccacaaatcgccatcagaaatggcagtgaatatcaaaataacgaagaactatttgcactattcttgaacactctcgaatctgctcatagcgctgtaggacacgatgcagatttttttcaacagctttgcatcgtgatccagaagatagcctcgtctacacttcaaggtcggcctgctgccgaacagacagagggagcattggtgccttcgggccaagatatgatccacaaactacgtgtcatgttttcgcatttaacaaagccggtgggaacagtcaaggacccatcgatgtcccttcttcaactttcatcacccctaggccccgaacacttacatgcatacatgcgtgccctcgccttcctcgaagcgaaggacgatatggtcgcccttatgacttggatattaactaatcatttatatctcgaagcggagatagatcaaatcggcgcaaaaggtcaggctatgcttgctaagacattgtgtgtcttccacgcatttgctggtcctcgtctggaaccggatgtctcagatagactgggtacgcacatggagcagttgatgctttatggtggcatttggcgatggccgacacatgaggaagttgatgagtattgtgctagagaccttaataaggctaccaagctcctgcagcggaggacacagttgatgtcttgtgcgaatcttttgcttggcgctgaggatctgcatcgacaagatatggtgtag

SEQ ID NO: 21279 - protein, 871 aa, Muscodor strobelii
  misc_feature: SGI Peptide ID NO. 567202
  misc_feature (106)..(769): NCBI GI: 85094498 Blast Desc: NCU02248 [Neurospora crassa OR74A] gi|28921349|gb|EAA30656.1| [Neurospora crassa OR74A]
  misc_feature (40)..(827): NCBI GI: 171679565 Blast Desc: protein product [Podospora anserina] gi|170939408|emb|CAP64636.1| protein product [Podospora anserina]
  misc_feature (38)..(803): NCBI GI: 116203489 Blast Desc: CHGG_09628 [Chaetomium globosum CBS 148.51] gi|88175756|gb|EAQ83224.1| CHGG_09628 [Chaetomium globosum CBS 148.51]
  misc_feature (67)..(554): NCBI GI: 145610803 Blast Desc: MGG_00890 [Magnaporthe grisea 70-15] gi|145018161|gb|EDK02440.1| MGG_00890 [Magnaporthe grisea 70-15]
  misc_feature (213)..(686): NCBI GI: 261355059 Blast Desc: conserved [Verticillium albo-atrum VaMs.102]
  misc_feature (68)..(834): NCBI GI: 256732933 Blast Desc: NECHADRAFT_38211 [Nectria haematococca mpVI 77-13-4]
  misc_feature (40)..(845): NCBI GI: 46123835 Blast Desc: FG06295.1 [Gibberella zeae PH-1]
  misc_feature (282)..(835): NCBI GI: 154293903 Blast Desc: BC1G_14023 [Botryotinia fuckeliana B05.10] gi|150845178|gb|EDN20371.1| BC1G_14023 [Botryotinia fuckeliana B05.10]
  misc_feature (114)..(835): NCBI GI: 255936753 Blast Desc: Pc13g09800 [Penicillium chrysogenum Wisconsin 54-1255] gi|211584023|emb|CAP92049.1| Pc13g09800 [Penicillium chrysogenum Wisconsin 54-1255]
  misc_feature (109)..(834): NCBI GI: 119491590 Blast Desc: NFIA_065830 [Neosartorya fischeri NRRL 181] gi|119411476|gb|EAW21419.1| conserved [Neosartorya fischeri NRRL 181]
  misc_feature: Useful for introducing or modulating the production of volatile compounds
MRTPLAHAARGLFGSEPAWGQALSRATRNRTKRFRELPLSPTRILALRLRATNDEQRRRYAKLFLIGAGMRNDRLPVLTLQNLLAKQDLTSEPQLAHAVAAIKPAEWKETIVLLESRGWSQEHLDHWTWILSGENGEARVRRFLFTDDTKPIFLLLILLQNNSAFHTAESLSALIHYVRKHHMQPLTDASNRPAQASLAAPKDVFTVTQFKLLLRRLVTRTRWLAPRFMVTVARLVEDFIRGVPTDPHHRRGGTVYSDQCQVFNTALRYFSIRAIDQPLKNMEFNWRAQKTLLARSDSLKKPLIINQESYRSIRKVLVGLKKSTSERFVAMRYASSWPPYRQDFDGRDAKRTIEDDQSRSYRAGILMNQAGYVANDYDSALDALGGISDGTPTIQTRSLPPGQARGPDKEKGNAYSNWAMNIRATRNAQEAWRAFNKFADKTKMRPNAQVYNEMFLKLLAEEVPDDMSSEVLPGDSKENWPVHDANYSAYELARLSPPSVNQLYHEMRHFGIKPEGIGLEELVKKAGSVENGLHYMRDSGVPSSVIKSIMPFKEPSNQALRSLPLRLFSCYVHLLCRLQPKRQGYEAISTKELYHIRHAIKIVTLRLQPHTTEGTTFRSPWYAILRTLARPQIAIRNGSEYQNNEELFALFLNTLESAHSAVGHDADFFQQLCIVIQKIASSTLQGRPAAEQTEGALVPSGQDMIHKLRVMFSHLTKPVGTVKDPSMSLLQLSSPLGPEHLHAYMRALAFLEAKDDMVALMTWILTNHLYLEAEIDQIGAKGQAMLAKTLCVFHAFAGPRLEPDVSDRLGTHMEQLMLYGGIWRWPTHEEVDEYCARDLNKATKLLQRRTQLMSCANLLLGAEDLHRQDMV

SEQ ID NO: 21280 - DNA, 3115 bp, Muscodor strobelii
  misc_feature: SGI EST ID NO. CUFF.49866.0
  misc_feature: Variant of the nucleotide sequence at SEQ ID NO 21278
ggggtgtacatacaagattcaaggggtgcatgtctagcaagagaccctcttcggaattgagtctcgcatctttaattcttgatagaccaattcgacaagcttcaagaaagtacattatcgactatcacttttgacggtgcttgcctaccactgaaaaaaagacaattttcaactgcaccaaattcttacgtattcccaacgaacctcgaccttgcattatagcctcgaattacgggattccacgcgttgctatcgagttcacaaagataatctcgacttcgtacacatgcagtcaaagtattgagcaacaacagctcagcatctcgatgcaatgtcctcgttgactagctataactctatattagagaaactttacatacatcatacatgcacgagccgtaggtagtagcacacgacgacgggggtctccctcctacctcccgaccgagaatgcgaacacctctcgcccacgctgcacgagggctgttcggctcagagcccgcctggggccaggccctctcgcgcgccacccgcaacaggacgaaacgattccgcgagctccctctctcgccgacgcgcatcctcgctctgcgcctgcgggccacaaacgacgaacagaggagaagatacgccaaactcttcctcatcggcgctggcatgcgcaacgaccgcctgcctgtcctgaccctgcagaacctactggccaagcaagacctgacctcggagccccagcttgcccacgctgttgctgctataaagcctgctgagtggaaggagacgattgttctgctcgagtcgaggggatggtcccaggaacacctcgaccattggacttggattctctctggcgagaacggcgaagctcgcgtgcgccgcttccttttcaccgacgataccaagcccatctttctcctcctcattctcctccagaacaactcagccttccatactgctgagtcgctgtctgcgttaattcactatgtgcgcaaacaccacatgcaaccactcaccgatgcctccaacaggccagcccaagcctccttggctgcacccaaagatgtcttcacggtgacacagttcaaacttctactacgccgtctggtaacccgcacccgatggttagccccacgctttatggtcactgttgctcgcctggtcgaggacttcattcgcggcgtccccacagacccacatcaccgtcgtggaggcaccgtctactcagaccagtgccaggtcttcaacactgctctgcgctatttcagcatccgagccatcgaccagcctttgaaaaacatggagttcaactggagagcgcaaaagacccttttagccagatcagacagcctcaagaagccattgatcatcaaccaggagagttatcggtccattcgcaaggttcttgttggattgaagaaatcaacaagcgagagattcgtggccatgagatatgcatcttcgtggccaccttatcggcaagatttcgacggcagggacgccaagcgcaccatcgaagatgatcagtcacgaagctacagagccggcattcttatgaaccaagctgggtacgtagcaaacgactatgatagcgctttggatgctttgggtggtatcagcgatggtactccgactatacagactcgaagtctcccaccgggacaggccaggggccctgacaaggaaaaagggaatgcatattcgaactgggccatgaatataagagcaacgcgcaacgcccaagaagcctggagagctttcaacaaatttgccgacaagaccaagatgcgtcccaatgcccaagtatacaacgagatgttcctcaaactcttagcagaagaagtgcctgacgacatgtcatccgaagtgctcccaggcgattcaaaggaaaattggccggtccatgacgccaattacagtgcatatgagcttgctagactttcgcccccgtcggttaaccagctttaccacgaaatgaggcacttcggtatcaaaccagagggcattggactagaggagcttgttaagaaagcagggtctgttgaaaacggtctgcactacatgagagacagtggcgtcccgtcttcagtcatcaagtccatcatgcccttcaaagagccttccaatcaagctcttcgaagccttccactaaggctcttcagctgctatgttcatttgctatgtaggctacagcccaagcgccaaggatatgaagcgatttcaaccaaagaactatatcacatccgccatgcgatcaagatcgtgacgttgagattgcaaccacatacaaccgagggtaccacgtttcgatcgccctggtatgctatcttacgtacacttgcgcgtccacaaatcgccatcagaaatggcagtgaatatcaaaataacgaagaactatttgcactattcttgaacactctcgaatctgctcatagcgctgtaggacacgatgcagatttttttcaacagctttgcatcgtgatccagaagatagcctcgtctacacttcaaggtcggcctgctgccgaacagacagagggagcattggtgccttcgggccaagatatgatccacaaactacgtgtcatgttttcgcatttaacaaagccggtgggaacagtcaaggacccatcgatgtcccttcttcaactttcatcacccctaggccccgaacacttacatgcatacatgcgtgccctcgccttcctcgaagcgaaggacgatatggtcgcccttatgacttggatattaactaatcatttatatctcgaagcggagatagatcaaatcggcgcaaaaggtcaggctatgcttgctaagacattgtgtgtcttccacgcatttgctggtcctcgtctggaaccggatgtctcagatagactgggtacgcacatggagcagttgatgctttatggtggcatttggcgatggccgacacatgaggaagttgatgagtattgtgctagagaccttaataaggctaccaagctcctgcagcggaggacacagttgatgtcttgtgcgaatcttttgcttggcgctgaggatctgcatcgacaagatatggtgtagatttatatgtaatttgttgtatatatgtaaatgaatacgaagatacccc

SEQ ID NO: 21281 - DNA, 1143 bp, Muscodor strobelii
  misc_feature: SGI cDNA ID NO. 567203
  misc_feature: Encodes the peptide sequence at SEQ ID NO 21282
atgacgctcccttttccttggcccgaggaggattttgaagagggcgtggggagacataagcagatctgtatcgaggatgataggagtgatggcgcgccgttttctgagttgataaggattatgactatttggtcttctgtggtttctttactcaagtctccggacgatacgagtcctcatatgcgcatcccagcgatcatggctctcgatgaacgacttgcgatgtggtggcgcgcactccccgcgacgttcaaactaacaccgtctacgatccacatcatgccacgagagatcattccaagaatcttgcacatcaacatgctgtatcatcaatctatctgcgccttacacgcttcgctagtacctctcttctgcggcagtcaaggcgaagaaggttggcatacgacacggcagctatcggcgcaggtggcattcgaacacgcatgtgaggtgtctgccctcgtcatcgctaccttggagatattcccacgtacctcggcattgccgatgttcatgggctatgcggcgtattgcggctgcgctattcagattccgttcatgacttgtataaaccagcaggttaaagaacgtgtgaccaggaatgttagggcgaattctagactgctgcaactgatgtctgaggattggaagtttgcttctctattgctgtcgtatatccactacctacacacactgcacagcaagcacgggatagtgttagaagacgaacctaagcacatccctagagagaggctcagtgtcttcaatggcgactcgttcaatgcgaagacatctatctatgagtatatcgaacttcttcgcactgagggcgggggctacgggagtgcagaggaaggtgatggtgtcgaagagcagcccgttgtcgtaccagaggctggagtgtcaacatcaacatcaaatttgaacaacgcccagagcagctcagttgaaactgcattttcctccgaagtacaggattttcccgcgatggatgggggaggtatgctggatcttctctatccgtttaatacggaagagttcagcttcgcgatggatgacgacatgttggacttctcgcagctggaggtagaccagcttggcttggggtatcttgatactgcaccttggagtcggcattactaa

SEQ ID NO: 21282 - protein, 380 aa, Muscodor strobelii
  misc_feature: SGI Peptide ID NO. 567203
  misc_feature (3)..(280): NCBI GI: 256731225 Blast Desc: expressed protein [Nectria haematococca mpVI 77-13-4]
  misc_feature (37)..(216): NCBI GI: 255942547 Blast Desc: Pc18g01980 [Penicillium chrysogenum Wisconsin 54-1255] gi|211586775|emb|CAP94422.1| Pc18g01980 [Penicillium chrysogenum Wisconsin 54-1255]
  misc_feature (37)..(216): NCBI GI: 119496643 Blast Desc: C6 transcription factor, [Neosartorya fischeri NRRL 181] gi|119413257|gb|EAW23198.1| C6 transcription factor, [Neosartorya fischeri NRRL 181]
  misc_feature (3)..(216): NCBI GI: 70990948 Blast Desc: C6 transcription factor [Aspergillus fumigatus Af293] gi|66847955|gb|EAL88285.1| C6 transcription factor, [Aspergillus fumigatus Af293]
  misc_feature (3)..(216): NCBI GI: 159130797 Blast Desc: C6 transcription factor, [Aspergillus fumigatus A1163]
  misc_feature (6)..(216): NCBI GI: 212527874 Blast Desc: C6 transcription factor, [Penicillium marneffei ATCC 18224] gi|210073492|gb|EEA27579.1| C6 transcription factor, [Penicillium marneffei ATCC 18224]
MTLPFPWPEEDFEEGVGRHKQICIEDDRSDGAPFSELIRIMTIWSSVVSLLKSPDDTSPHMRIPAIMALDERLAMWWRALPATFKLTPSTIHIMPREIIPRILHINMLYHQSICALHASLVPLFCGSQGEEGWHTTRQLSAQVAFEHACEVSALVIATLEIFPRTSALPMFMGYAAYCGCAIQIPFMTCINQQVKERVTRNVRANSRLLQLMSEDWKFASLLLSYIHYLHTLHSKHGIVLEDEPKHIPRERLSVFNGDSFNAKTSIYEYIELLRTEGGGYGSAEEGDGVEEQPVVVPEAGVSTSTSNLNNAQSSSVETAFSSEVQDFPAMDGGGMLDLLYPFNTEEFSFAMDDDMLDFSQLEVDQLGLGYLDTAPWSRHY

SEQ ID NO: 21283 - DNA, 1298 bp, Muscodor strobelii
  misc_feature: SGI EST ID NO. CUFF.49875.0
  misc_feature: Variant of the nucleotide sequence at SEQ ID NO 21281
cttgtataaaccagcaggttaaagaacgtgtgaccaggaatgttagggcgaattctagactgctgcaactgatgtctgaggattggaagtttgcttctctattgctgtcgtatatccactacctacacacactgcacagcaagcacgggatagtgttagaagacgaacctaagcacatccctagagagaggctcagtgtcttcaatggcgactcgttcaatgcgaagacatctatctatgagtatatcgaacttcttcgcactgagggcgggggctacgggagtgcagaggaaggtgatggtgtcgaagagcagcccgttgtcgtaccagaggctggagtgtcaacatcaacatcaaatttgaacaacgcccagagcagctcagttgaaactgcattttcctccgaagtacaggattttcccgcgatggatgggggaggtatgctggatcttctctatccgtttaatacggaagagttcagcttcgcgatggatgacgacatgttggacttctcgcagctggaggtagaccagcttggcttggggtatcttgatactgcaccttggagtcggcattactaaaaggaccgtatatactgagtaagtaatcgttgctttaactttggtctctctatacgctctattgcctgcattttggcgcagtgtgagtatattattaccaaccttcccagcctcctttctctcaaggatgccccgagagtcccaggtagtgactgaaggtggtagtgaccgatgatgaccagatggccaaacatgaccccattactcgcacgagccgtctagccacgactcaccgacaaatgaagagatcatcattcggtcgcatggatggagctagaaaagtgtgacaacgcaggtgcagcgctattgaaattgtaatgcgtgatttcttcagcgacatgcatccgaaacctggcagaaaggacctggtgcgacagggtgggatgggccaaacccactgaaaaataggaggcaaacaaatcacggcggctggttgcatgccattccggcttagtgaaggcttaccgaggacgtgctgggtaagatggcccgctcttgcgttaatatggccgaacctaaaatgtggacgggcacattgaatctcgtcagcactgtagcacatgcaatttccgtggtggacacaggtctcaatcatgctttatcctgcaaacttgttgagacgtggaagttaggatggacagactttagacggcaagaacgctggagttggaagtgatgtctaaaattgtctgtaccttcctcaagtgaatagagcag

SEQ ID NO: 21284 - DNA, 2907 bp, Muscodor strobelii
  misc_feature: SGI cDNA ID NO. 567204
  misc_feature: Reduced expression when VOC is produced
  misc_feature: Encodes the peptide sequence at SEQ ID NO 21285
atgggtcagaacgaaagccgccctcactacgaggaaaccgaggaaaacgagcccgaagtcatcggccccgacgtgtcttaccataatcaaaactcggacgatttggcattccctagccaaatccctagctccatccaaccgaaatacccaacaccacctccgcgccgtatccgcaaccgggacaccagctcgccaacccagctggtcttcggttcttctccatcctccaatcacaagtcccctgacccctttccagccctccccagcttcgctgccccggtcttcggcagtgatcgagccgacagcgaacagtcgtcgtcgaagaaaaggaagaggaataagcgtgtaagacgcggtaagaaccgtaccagctcgatgtcccaacacgatcatgatgaggttgttctttatgaacaagagcaccagaatggcatgcttgacggcctgagcaatgaggaccagatcttggatctgcagaagagagacaggaaggagttgagacgccaagccaagcttgcacgacagcaggagctggcaagtgcagctgtgaacatccatgagcaacaagagcccaaccgcttctctcagctatgggaacctcaagaccataccaaatacgagcctatcgaaggcgacatgccggaggatcttcctatccctatcgatccgaacctgttggacccggcaataatggaagagagcattccatcgtctaggagacgcaagagaaaggctcaggaccatgacgaggagcaatcggaacagaacggaaagaagaacaaacgttcgcgcagtcgacagatgggtaccgaagcagagaatggccatgagacaggtgacaatgacatcaacttcaacgatctagctgaacagatctactccgatcagaagaagacgtccttcatggacgacttccagtccgagactcacccagatggtacccatgatgcgatgactggactcgcaatagaagtcgacgacgatgcacatcccatgacgcgaatcgagagcgatttgcttgcaaatgcacagcacgagatggatacaggcgataagattgccgagagctatccggatgatgccatcgatggggactacgttgagcagaatgacactaatgatgcgtcttctacacatgatcagtcccaagttcatgtcacagaaggcgtcgatgtcaatgggcatggggatattcaagttccatcatctatacctcagccagatggtgtcgaggagctcaacttcagccgtattggggcaggcaaagctgctagtaccggtcgcagacgggttgccaaaccgaacttctttgatcgtgtccaggaacttgatgagaatggtcttcagtctccaactactgcggcagtgaatcgtaggaaaggcaaaggcaaacaggttgctgtgcctcagaatggagacgaggccggtccctcgaccgccaacggtaaagtcaagcaacctaagatatctagcatgctagagggagcagagggagtggagacaccatcaactaacagtgtggttcgtcttcgaactccccgcacacctgtcaccgtcactggagcgttcagtgacttcgagttacgaaacttatcccaagcgatagaccgctatcgcgaagacacaggcaagacccaacacgaggtcaacgatcttatccatggcaaccctaaagatgccaaaagtaacgagctgtgggagcgcatcatggcaacgtgcgttggtcgaagccgtcaaaaagtcatcaaccaaacgcgacgaaaattccacaacttcgtggcccgtggtacatggaccccggaacaagagcaggaacttcggcagatgtatgaacaatacggaaacaagtatgctctgattggtcagctcataaatcgacaccccgaagatatccgagatcgaatccgaaattaccttgtctgcggtgacaatcgacgcaaagaccaatggaaccaggaggagcaagaccagctcatcgccattgtggagcaagcgattgagcaaatccacgtcgagcgagccaaacagggcgacagcagtggacgacctgttgaagaagatatcaactggcagctggtcagtcagggaatgggccgcacccgtagtcgtcttcagtgtatctccaagtggaaggcaatcaagccacagcttgttggtggtggtctcgatggagagacggcccctatgcaggagatcattgagaaagcacgacagactgcaatcaccatgtcttaccgcaatcgctccctcgtcatccaagcgattcaacgcacaggagcaaacgctgacagtcgcattccctggctcaaagtccgcacagagcttaatatgcaatggaccaggccaccgttgatgattgtttggttccggcttcgacgaactgttgacaactggcagactctcaatgtcaaagagatttgcatttgtctcttgcagcgtttcaaagaaattcacaaactcgattacatcgaggacagcagtaatgatttcagcctcgaagctgaataccgcgaggttgagtacaagataaagaggggtcgcaaatcacataccaccattaagacgcctgctatcgcaaagactagtgatgatgaagacgacgctgtagtggacgagcttgaagcaccagcagctgaagcagttggaacagcagaagatgagatagtatctcatcgcacacgtagccatcgtcagagcagcgtcgacttaggcatgcacagtagtgctattgagaatgcggaggaacctgaggttgcggactctgacccggacgtcaagacccgtaatgctactcgaagtcggcgaacccgttcccaacccgatgatgttcaggaaagggggtatgagtcggacaatcagagcagtgatacacacgccagccaggcttctagcataccggctcgatga

SEQ ID NO: 21285 - protein, 968 aa, Muscodor strobelii
  misc_feature: SGI Peptide ID NO. 567204
  misc_feature (595)..(639): Pfam Id: PF00249 Pfam Desc: Myb-like DNA-binding domain
  misc_feature (341)..(820): NCBI GI: 256729123 Blast Desc: NECHADRAFT_93340 [Nectria haematococca mpVI 77-13-4]
  misc_feature (521)..(836): NCBI GI: 46138599 Blast Desc: FG10814.1 [Gibberella zeae PH-1]
  misc_feature (519)..(815): NCBI GI: 85092606 Blast Desc: NCU02315 [Neurospora crassa OR74A] gi|28920910|gb|EAA30242.1| [Neurospora crassa OR74A]
  misc_feature (521)..(859): NCBI GI: 145607575 Blast Desc: MGG_10426 [Magnaporthe grisea 70-15] gi|145015102|gb|EDJ99670.1| MGG_10426 [Magnaporthe grisea 70-15]
  misc_feature (520)..(814): NCBI GI: 116203419 Blast Desc: CHGG_09593 [Chaetomium globosum CBS 148.51] gi|88175721|gb|EAQ83189.1| CHGG_09593 [Chaetomium globosum CBS 148.51]
  misc_feature (519)..(816): NCBI GI: 171679689 Blast Desc: protein product [Podospora anserina] gi|170939470|emb|CAP64698.1| protein product [Podospora anserina]
  misc_feature (403)..(816): NCBI GI: 156042594 Blast Desc: SS1G_11095 [Sclerotinia sclerotiorum 1980] gi|154695481|gb|EDN95219.1| SS1G_11095 [Sclerotinia sclerotiorum 1980]
  misc_feature (522)..(811): NCBI GI: 255712559 Blast Desc: KLTH0C07788p [Lachancea thermotolerans] gi|238933941|emb|CAR22124.1| KLTH0C07788p [Lachancea thermotolerans]
  misc_feature (561)..(713): NCBI GI: 255726994 Blast Desc: [Candida tropicalis MYA-3404] gi|240134347|gb|EER33902.1| [Candida tropicalis MYA-3404]
  misc_feature (522)..(807): NCBI GI: 50310517 Blast Desc: REB1_KLULA [Kluyveromyces lactis] gi|52788277|sp|Q05950.2|REB1_KLULA RecName: Full=DNA-binding protein REB1; AltName: Full=QBP gi|49644414|emb|CAG97986.1|
  misc_feature: Useful for introducing or modulating the production of volatile compounds
MGQNESRPHYEETEENEPEVIGPDVSYHNQNSDDLAFPSQIPSSIQPKYPTPPPRRIRNRDTSSPTQLVFGSSPSSNHKSPDPFPALPSFAAPVFGSDRADSEQSSSKKRKRNKRVRRGKNRTSSMSQHDHDEVVLYEQEHQNGMLDGLSNEDQILDLQKRDRKELRRQAKLARQQELASAAVNIHEQQEPNRFSQLWEPQDHTKYEPIEGDMPEDLPIPIDPNLLDPAIMEESIPSSRRRKRKAQDHDEEQSEQNGKKNKRSRSRQMGTEAENGHETGDNDINFNDLAEQIYSDQKKTSFMDDFQSETHPDGTHDAMTGLAIEVDDDAHPMTRIESDLLANAQHEMDTGDKIAESYPDDAIDGDYVEQNDTNDASSTHDQSQVHVTEGVDVNGHGDIQVPSSIPQPDGVEELNFSRIGAGKAASTGRRRVAKPNFFDRVQELDENGLQSPTTAAVNRRKGKGKQVAVPQNGDEAGPSTANGKVKQPKISSMLEGAEGVETPSTNSVVRLRTPRTPVTVTGAFSDFELRNLSQAIDRYREDTGKTQHEVNDLIHGNPKDAKSNELWERIMATCVGRSRQKVINQTRRKFHNFVARGTWTPEQEQELRQMYEQYGNKYALIGQLINRHPEDIRDRIRNYLVCGDNRRKDQWNQEEQDQLIAIVEQAIEQIHVERAKQGDSSGRPVEEDINWQLVSQGMGRTRSRLQCISKWKAIKPQLVGGGLDGETAPMQEIIEKARQTAITMSYRNRSLVIQAIQRTGANADSRIPWLKVRTELNMQWTRPPLMIVWFRLRRTVDNWQTLNVKEICICLLQRFKEIHKLDYIEDSSNDFSLEAEYREVEYKIKRGRKSHTTIKTPAIAKTSDDEDDAVVDELEAPAAEAVGTAEDEIVSHRTRSHRQSSVDLGMHSSAIENAEEPEVADSDPDVKTRNATRSRRTRSQPDDVQERGYESDNQSSDTHASQASSIPAR

SEQ ID NO: 21286 - DNA, 3460 bp, Muscodor strobelii
  misc_feature: SGI EST ID NO. CUFF.49944.2
  misc_feature: Variant of the nucleotide sequence at SEQ ID NO 21284
aattgtttatcgatcgactcggcctcccttcgtccaatatcactaactattcccagcacaggcgtcaaacatcccatcccaaccataaccctgtcactctgcccgtgacggtctcgcgcgtcactagcagtcatgcgctgaactgcccatgggtcagaacgaaagccgccctcactacgaggaaaccgaggaaaacgagcccgaagtcatcggccccgacgtgtcttaccataatcaaaactcggacgatttggcattccctagccaaatccctagctccatccaaccgaaatacccaacaccacctccgcgccgtatccgcaaccgggacaccagctcgccaacccagctggtcttcggttcttctccatcctccaatcacaagtcccctgacccctttccagccctccccagcttcgctgccccggtcttcggcagtgatcgagccgacagcgaacagtcgtcgtcgaagaaaaggaagaggaataagcgtgtaagacgcggtaagaaccgtaccagctcgatgtcccaacacgatcatgatgaggttgttctttatgaacaagagcaccagaatggcatgcttgacggcctgagcaatgaggaccagatcttggatctgcagaagagagacaggaaggagttgagacgccaagccaagcttgcacgacagcaggagctggcaagtgcagctgtgaacatccatgagcaacaagagcccaaccgcttctctcagctatgggaacctcaagaccataccaaatacgagcctatcgaaggcgacatgccggaggatcttcctatccctatcgatccgaacctgttggacccggcaataatggaagagagcattccatcgtctaggagacgcaagagaaaggctcaggaccatgacgaggagcaatcggaacagaacggaaagaagaacaaacgttcgcgcagtcgacagatgggtaccgaagcagagaatggccatgagacaggtgacaatgacatcaacttcaacgatctagctgaacagatctactccgatcagaagaagacgtccttcatggacgacttccagtccgagactcacccagatggtacccatgatgcgatgactggactcgcaatagaagtcgacgacgatgcacatcccatgacgcgaatcgagagcgatttgcttgcaaatgcacagcacgagatggatacaggcgataagattgccgagagctatccggatgatgccatcgatggggactacgttgagcagaatgacactaatgatgcgtcttctacacatgatcagtcccaagttcatgtcacagaaggcgtcgatgtcaatgggcatggggatattcaagttccatcatctatacctcagccagatggtgtcgaggagctcaacttcagccgtattggggcaggcaaagctgctagtaccggtcgcagacgggttgccaaaccgaacttctttgatcgtgtccaggaacttgatgagaatggtcttcagtctccaactactgcggcagtgaatcgtaggaaaggcaaaggcaaacaggttgctgtgcctcagaatggagacgaggccggtccctcgaccgccaacggtaaagtcaagcaacctaagatatctagcatgctagagggagcagagggagtggagacaccatcaactaacagtgtggttcgtcttcgaactccccgcacacctgtcaccgtcactggagcgttcagtgacttcgagttacgaaacttatcccaagcgatagaccgctatcgcgaagacacaggcaagacccaacacgaggtcaacgatcttatccatggcaaccctaaagatgccaaaagtaacgagctgtgggagcgcatcatggcaacgtgcgttggtcgaagccgtcaaaaagtcatcaaccaaacgcgacgaaaattccacaacttcgtggcccgtggtacatggaccccggaacaagagcaggaacttcggcagatgtatgaacaatacggaaacaagtatgctctgattggtcagctcataaatcgacaccccgaagatatccgagatcgaatccgaaattaccttgtctgcggtgacaatcgacgcaaagaccaatggaaccaggaggagcaagaccagctcatcgccattgtggagcaagcgattgagcaaatccacgtcgagcgagccaaacagggcgacagcagtggacgacctgttgaagaagatatcaactggcagctggtcagtcagggaatgggccgcacccgtagtcgtcttcagtgtatctccaagtggaaggcaatcaagccacagcttgttggtggtggtctcgatggagagacggcccctatgcaggagatcattgagaaagcacgacagactgcaatcaccatgtcttaccgcaatcgctccctcgtcatccaagcgattcaacgcacaggagcaaacgctgacagtcgcattccctggctcaaagtccgcacagagcttaatatgcaatggaccaggccaccgttgatgattgtttggttccggcttcgacgaactgttgacaactggcagactctcaatgtcaaagagatttgcatttgtctcttgcagcgtttcaaagaaattcacaaactcgattacatcgaggacagcagtaatgatttcagcctcgaagctgaataccgcgaggttgagtacaagataaagaggggtcgcaaatcacataccaccattaagacgcctgctatcgcaaagactagtgatgatgaagacgacgctgtagtggacgagcttgaagcaccagcagctgaagcagttggaacagcagaagatgagatagtatctcatcgcacacgtagccatcgtcagagcagcgtcgacttaggcatgcacagtagtgctattgagaatgcggaggaacctgaggttgcggactctgacccggacgtcaagacccgtaatgctactcgaagtcggcgaacccgttcccaacccgatgatgttcaggaaagggggtatgagtcggacaatcagagcagtgatacacacgccagccaggcttctagcataccggctcgatgaatggagagtggatagagaatgagccctacggggcttacattggagatcagagtctactgctttcacttttgctgtcggcagacctcttgaaagctctgtctacacgtccttgtgagattatgataagacgtggcccagacacagaaaggttgaggggccttgctctaaggatcgatgatgaaaagctgccaatatcggatcttgtaaagacgcaaaaagtgtcggcatctgttataggtccccatgagaatgaataatgtcgtgtagtatagtcatatgttgttaatagctttcagctaaagttatagcttcttgagttccggttgctatcttagcttgagcctcataggtagacagactacccaatcatgccgatggcaatcattaaatattaactaatattct

SEQ ID NO: 21287 - DNA, 318 bp, Muscodor strobelii
  misc_feature: SGI cDNA ID NO. 567205
  misc_feature: Encodes the peptide sequence at SEQ ID NO 21288
atgacttcaccgacgcctggaggattctcgagtaacgtccgggacgacggattccccaccctcacggggcttctgaccaaggcattcaaagtcctgttcacaaccgtgttggagcaggagattttcgacgcatttgtcaaaaccaacaacaaaatcgccgacaccgataaacctcagacgatcagctacagtcacctgttcttcaccatggagttgcattggccagggaatgtcgaccctcggtcaggtacacgcccaagctcagacaagggacgcgacgaatgttgtggaagccagatttttatcttgtcctggtaa

SEQ ID NO: 21288 - protein, 105 aa, Muscodor strobelii
  misc_feature: SGI Peptide ID NO. 567205
MTSPTPGGFSSNVRDDGFPTLTGLLTKAFKVLFTTVLEQEIFDAFVKTNNKIADTDKPQTISYSHLFFTMELHWPGNVDPRSGTRPSSDKGRDECCGSQIFILSW

SEQ ID NO: 21289 - DNA, 1056 bp, Muscodor strobelii
  misc_feature: SGI cDNA ID NO. 567206
  misc_feature: Reduced expression when VOC is produced
  misc_feature: Encodes the peptide sequence at SEQ ID NO 21290
atggttcgcgaaaacaggacattcgtcctcgccaaacgccctaagggcgatatcgtgcccggcgagaccttcaggcttgagagaggtcccgcgccgaccgctgcagacttgaaagatggcgagattctgactgaggcgctgtttttatctcttgatcctgccatgcggggttatctgaatgatgcgcgatcctacatgccgcctgtcaagatcggcgagagaatgcgcggtggtaccgtgtcccgcgtcctcgcgagcaagaacccgaaagccaaggagggcgacattgtcactacgactaccggctggaccgaagtcgccattgcggacgagaagaattttgaagtccacgagttgcctgcgggaggaaaaattacagatttacaaggggtgttgggtttgacaggcataacggcctacgtaggactggacaacatcggcaagccgcaaccgggcgagacagtcgtagtgtcaggcgccgcaggcgcaaccggctctgtcgtaggccagatcgcgaagctccgcggctcgcgtgtaatcggtatcgcgggctcagaggacaaatgcgagtggttgacgaaagaactcggtttcgacgccgcgctaaactacaaatcacccaccttcgccaaggacttcgcgaaagcaacaccaaactacatcgacgtatactgggacaacgtcggcggcgaaatcctcgagcttgctctcaacagggcgaagaagcacgctaggttcgtgatgtgtggtagtatctcggggtataacaatactgggaagcctgcggtcggcattcggaatatcttccagcttacggcgcagagtattaggatggaggggtttatcattttcgatttcttgaaggatataccaagggcaagacgcgatcttgcgcagtggctgggcgagggcaagattaagaggaaggagactattgttaagggtgggttggagaaggcggattcggctattaaggacttgtttgctgggaagaatacggggaagttgcttttggagattaaggattctgaggtagttgcgagtccgaagttgtga

SEQ ID NO: 21290 - protein, 351 aa, Muscodor strobelii
  misc_feature: SGI Peptide ID NO. 567206
  misc_feature (151)..(299): Pfam Id: PF00107 Pfam Desc: Zinc-binding dehydrogenase
  misc_feature (2)..(342): NCBI GI: 261358021 Blast Desc: NADP-dependent leukotriene B4 12-hydroxydehydrogenase [Verticillium albo-atrum VaMs.102]
  misc_feature (1)..(344): NCBI GI: 39969607 Blast Desc: MGG_10413 [Magnaporthe grisea 70-15] gi|145015117|gb|EDJ99685.1| MGG_10413 [Magnaporthe grisea 70-15]
  misc_feature (1)..(342): NCBI GI: 256728879 Blast Desc: [Nectria haematococca mpVI 77-13-4]
  misc_feature (1)..(342): NCBI GI: 46138811 Blast Desc: FG10920.1 [Gibberella zeae PH-1]
  misc_feature (6)..(348): NCBI GI: 156042518 Blast Desc: SS1G_11056 [Sclerotinia sclerotiorum 1980] gi|154695443|gb|EDN95181.1| SS1G_11056 [Sclerotinia sclerotiorum 1980]
  misc_feature (1)..(342): NCBI GI: 116203435 Blast Desc: CHGG_09601 [Chaetomium globosum CBS 148.51] gi|88175729|gb|EAQ83197.1| CHGG_09601 [Chaetomium globosum CBS 148.51]
  misc_feature (6)..(348): NCBI GI: 154304584 Blast Desc: BC1G_08031 [Botryotinia fuckeliana B05.10] gi|150853931|gb|EDN29123.1| BC1G_08031 [Botryotinia fuckeliana B05.10]
  misc_feature (5)..(344): NCBI GI: 171679675 Blast Desc: protein product [Podospora anserina] gi|170939463|emb|CAP64691.1| protein product [Podospora anserina]
  misc_feature (10)..(344): NCBI GI: 164427009 Blast Desc: NCU02299 [Neurospora crassa OR74A] gi|157071566|gb|EAA30707.2| NCU02299 [Neurospora crassa OR74A]
  misc_feature (10)..(346): NCBI GI: 189203791 Blast Desc: NADP-dependent leukotriene B4 12-hydroxydehydrogenase [Pyrenophora tritici-repentis Pt-1C-BFP] gi|187985330|gb|EDU50818.1| NADP-dependent leukotriene B4
  misc_feature (37)..(338): SWISSPROT Homolog: EC 1.3.1.74 2-alkenal reductase
  misc_feature (37)..(338): SWISSPROT Homolog: EC 1.3.1.48 15-oxoprostaglandin 13-oxidase
  misc_feature: Useful for introducing or modulating the production of volatile compounds
MVRENRTFVLAKRPKGDIVPGETFRLERGPAPTAADLKDGEILTEALFLSLDPAMRGYLNDARSYMPPVKIGERMRGGTVSRVLASKNPKAKEGDIVTTTTGWTEVAIADEKNFEVHELPAGGKITDLQGVLGLTGITAYVGLDNIGKPQPGETVVVSGAAGATGSVVGQIAKLRGSRVIGIAGSEDKCEWLTKELGFDAALNYKSPTFAKDFAKATPNYIDVYWDNVGGEILELALNRAKKHARFVMCGSISGYNNTGKPAVGIRNIFQLTAQSIRMEGFIIFDFLKDIPRARRDLAQWLGEGKIKRKETIVKGGLEKADSAIKDLFAGKNTGKLLLEIKDSEVVASPKL

SEQ ID NO: 21291 - DNA, 1399 bp, Muscodor strobelii
  misc_feature: SGI EST ID NO. CUFF.49890.0
  misc_feature: Variant of the nucleotide sequence at SEQ ID NO 21289
tttagctctgagatgggaatagtcttagatgacgtatatatagcgttactccacgttgatattttcccttctttgtatgctgtttctactgtcaattgagctgtatcttcgtccaactgcatttcactgaggtatttacgattgtttgaccttccctcgagcttcaccaaccaacatataaagcgcaaatagacgcgataagcaacaatggttcgcgaaaacaggacattcgtcctcgccaaacgccctaagggcgatatcgtgcccggcgagaccttcaggcttgagagaggtcccgcgccgaccgctgcagacttgaaagatggcgagattctgactgaggcgctgtttttatctcttgatcctgccatgcggggttatctgaatgatgcgcgatcctacatgccgcctgtcaagatcggcgagagaatgcgcggtggtaccgtgtcccgcgtcctcgcgagcaagaacccgaaagccaaggagggcgacattgtcactacgactaccggctggaccgaagtcgccattgcggacgagaagaattttgaagtccacgagttgcctgcgggaggaaaaattacagatttacaaggggtgttgggtttgacaggcataacggcctacgtaggactggacaacatcggcaagccgcaaccgggcgagacagtcgtagtgtcaggcgccgcaggcgcaaccggctctgtcgtaggccagatcgcgaagctccgcggctcgcgtgtaatcggtatcgcgggctcagaggacaaatgcgagtggttgacgaaagaactcggtttcgacgccgcgctaaactacaaatcacccaccttcgccaaggacttcgcgaaagcaacaccaaactacatcgacgtatactgggacaacgtcggcggcgaaatcctcgagcttgctctcaacagggcgaagaagcacgctaggttcgtgatgtgtggtagtatctcggggtataacaatactgggaagcctgcggtcggcattcggaatatcttccagcttacggcgcagagtattaggatggaggggtttatcattttcgatttcttgaaggatataccaagggcaagacgcgatcttgcgcagtggctgggcgagggcaagattaagaggaaggagactattgttaagggtgggttggagaaggcggattcggctattaaggacttgtttgctgggaagaatacggggaagttgcttttggagattaaggattctgaggtagttgcgagtccgaagttgtgaggtcgaggagttatatatgaatgccaaacgacgaagtttatggctcattgtcggaatcccttgcataactagacgaatacctcctattatggtaaacatgatatgctatctacatgcaaggtacagctgatgaatg

SEQ ID NO: 21292 - DNA, 2469 bp, Muscodor strobelii
  misc_feature: SGI cDNA ID NO. 567207
  misc_feature: Encodes the peptide sequence at SEQ ID NO 21293
atgggtttccgtagacgcgatctagtttctctcctcctgaccgcgccggtcttagttgccagtgctgcagactttgaccctctcgagtatgttgaccagctcatcggctcagcaaatggaggcaatgtctttccaggagcaacgattccctacggaatggccaaggccgtggccgatacgaactctggaagcaaccagggtggtttcacgctcgacggctcaccgattactgggttttcatcacttcatgacagtggaacaggaggctcgccgtcactcggcaacttccctctgttcccatatgctgcctgccctggcgatgatttggatgcttgcgcgtacccaaagaaaacgcgggccaagttcggagcattcaataattcgacagtgacggcagcccctgggttctttgaagtgacgcttaattcgggtatcaaggcagaaatgaccgcagctcatcacacatccttattccgttttaccttccctaccagcggagcgggtggatcatatccccttctcatgcaagatctgactgatctttccgactctcgccaggataatggcacgatttctgttgatcccgacacgggacggattacgggccatgcaaaattcgttgcgagcttcagtcaaggccaatatactccatacttctgcaccgacttctcggggcctaagattcacgatagtggtatctttgttaacagcagagccagtgcagatgttcagaatctgactatctcacggtcaatcaatgggtaccctctgccaggcggagctttcatcagatttgagtctgcggcagaaccagtatacgcacgtgtgggcttgagtttcatcagctctgagcaggcttgcgcaaacgctgaggctgagatccctgactatgatttcgacagcatcaagacagctgcaaatgatgcttggagagaaaagctgagcccgatcgtggtttcgaccgcaggtggagttaacacctcattcgtcaccaatttttacagcggaatatatcgaacgctggtaaaccctcagaattatacgggtgaaaatccgatttggtctagcgaggagccatattttgactctttctactgtttatgggactctttccgatctcagatcccgttcctgacaatccttgatccctcatctgtggagcagatgatccgcggtttgatcgatatctacagacatgagggatggctaccagattgccatatgtcgttctcaaagggatatactcagggtggctctaacgctgatgttgtccttgttgatggctacttgaaaggtctggatggtggcataaattgggatgacggttatgctgccgtagtcaaagacgcagaagtagagccctttgactggtgctgccatggccggggcggtctagatagttggaaatctcttggctatatacccgttcaggacttcgattacaagggcttcggcactatgacgagaagtatttcacgaacgttggaatacagctacaatgactataccatcgctttaatggccaaagcattgggcaagtccgcagatgctgaaaagtatctcgattccagcgccaattgggcgaatctcttcaagcagaatcaaacatcttctttgtcctcgggcgccgacaccggatttgttggtttcttccagcccaagtaccttaatcagacttggggtttccaggatccattgcagtgcagtaacatagacaccaatccgaactccatttgctctcttcaaaacactgcaggcgagactttcgagagttccatctgggaatatggctttttcgtcccacacaaccaaggtgatctcatcactctttatggtggtcccaatggctttgtcaacaggctcaactacctccacgacacggacattacttacatcggtaacgagccggctttcttgactgtctttcagtaccactatgctggacgtcctggcgaatccgcgaggcgcagccatttctacattcccaaattctttgacaccacccctgcaggtctccctggaaatgatgatagcggagctatgggctctttcgtagctttcagtatgatgggtctcttcccgaacccaggtcaagacgtctacctcatcacacctccgttctttgagagcgtgaacatcacctcgccagtgacaggcaagacagccacgattcgcaacgtcaatttcgatcccacctacgaagctatctacatccagagcgcaacgctagatggtaagccatataccaagaactggatcgatcatagcttcttcacagagggcaaagaacttgttctcactctcgggaagaatgagagctcctggggaactcatgttgccgacctaccgcccagcgttggcgagtatgtcggctttaacggcacgagaacatccagaagagcactctccgagaacctcagacggaacccgattatgttcgacaggacagggatggcaacgatgttgtaa

SEQ ID NO: 21293 - protein, 822 aa, Muscodor strobelii
  misc_feature: SGI Peptide ID NO. 567207
  misc_feature (254)..(772): Pfam Id: PF07971 Pfam Desc: Glycosyl hydrolase family 92
  misc_feature (254)..(555): Pfam Id: PF07971 Pfam Desc: Glycosyl hydrolase family 92
  misc_feature (590)..(772): Pfam Id: PF07971 Pfam Desc: Glycosyl hydrolase family 92
  misc_feature (8)..(794): NCBI GI: 170940196 Blast Desc: protein product [Podospora anserina]
  misc_feature (18)..(791): NCBI GI: 156063808 Blast Desc: SS1G_02022 [Sclerotinia sclerotiorum 1980] gi|154697356|gb|EDN97094.1| SS1G_02022 [Sclerotinia sclerotiorum 1980]
  misc_feature (13)..(816): NCBI GI: 119495827 Blast Desc: alpha-1,2-mannosidase family protein, [Neosartorya fischeri NRRL 181] gi|119412852|gb|EAW22793.1| alpha-1,2-mannosidase family protein, [Neosartorya fischeri NRRL
  misc_feature (13)..(814): NCBI GI: 70995374 Blast Desc: alpha-1,2-mannosidase family protein [Aspergillus fumigatus Af293] gi|66850079|gb|EAL90406.1| alpha-1,2-mannosidase family protein, [Aspergillus fumigatus Af293] family protein,
  misc_feature (53)..(815): NCBI GI: 154292881 Blast Desc: BC1G_14472 [Botryotinia fuckeliana B05.10] gi|150845749|gb|EDN20942.1| BC1G_14472 [Botryotinia fuckeliana B05.10]
  misc_feature (8)..(802): NCBI GI: 121701835 Blast Desc: alpha-1,2-mannosidase family protein, [Aspergillus clavatus NRRL 1] gi|119397325|gb|EAW07756.1| alpha-1,2-mannosidase family protein, [Aspergillus clavatus NRRL
  misc_feature (24)..(786): NCBI GI: 212529492 Blast Desc: alpha-1,2-mannosidase family protein, [Penicillium marneffei ATCC 18224] gi|210074301|gb|EEA28388.1| alpha-1,2-mannosidase family protein, [Penicillium marneffei ATCC
  misc_feature (24)..(786): NCBI GI: 242762998 Blast Desc: alpha-1,2-mannosidase family protein, [Talaromyces stipitatus ATCC 10500] gi|218723686|gb|EED23103.1| alpha-1,2-mannosidase family protein, [Talaromyces stipitatus
  misc_feature (9)..(786): NCBI GI: 238498414 Blast Desc: alpha-1,2-mannosidase family protein, [Aspergillus flavus NRRL3357] gi|220693716|gb|EED50061.1| alpha-1,2-mannosidase family protein, [Aspergillus flavus
  misc_feature (21)..(786): NCBI GI: 145239553 Blast Desc: An08g03060 [Aspergillus niger] gi|134076934|emb|CAK45343.1| protein product [Aspergillus niger]
MGFRRRDLVSLLLTAPVLVASAADFDPLEYVDQLIGSANGGNVFPGATIPYGMAKAVADTNSGSNQGGFTLDGSPITGFSSLHDSGTGGSPSLGNFPLFPYAACPGDDLDACAYPKKTRAKFGAFNNSTVTAAPGFFEVTLNSGIKAEMTAAHHTSLFRFTFPTSGAGGSYPLLMQDLTDLSDSRQDNGTISVDPDTGRITGHAKFVASFSQGQYTPYFCTDFSGPKIHDSGIFVNSRASADVQNLTISRSINGYPLPGGAFIRFESAAEPVYARVGLSFISSEQACANAEAEIPDYDFDSIKTAANDAWREKLSPIVVSTAGGVNTSFVTNFYSGIYRTLVNPQNYTGENPIWSSEEPYFDSFYCLWDSFRSQIPFLTILDPSSVEQMIRGLIDIYRHEGWLPDCHMSFSKGYTQGGSNADVVLVDGYLKGLDGGINWDDGYAAVVKDAEVEPFDWCCHGRGGLDSWKSLGYIPVQDFDYKGFGTMTRSISRTLEYSYNDYTIALMAKALGKSADAEKYLDSSANWANLFKQNQTSSLSSGADTGFVGFFQPKYLNQTWGFQDPLQCSNIDTNPNSICSLQNTAGETFESSIWEYGFFVPHNQGDLITLYGGPNGFVNRLNYLHDTDITYIGNEPAFLTVFQYHYAGRPGESARRSHFYIPKFFDTTPAGLPGNDDSGAMGSFVAFSMMGLFPNPGQDVYLITPPFFESVNITSPVTGKTATIRNVNFDPTYEAIYIQSATLDGKPYTKNWIDHSFFTEGKELVLTLGKNESSWGTHVADLPPSVGEYVGFNGTRTSRRALSENLRRNPIMFDRTGMATML

SEQ ID NO: 21294 - DNA, 3086 bp, Muscodor strobelii
  misc_feature: SGI EST ID NO. CUFF.49899.0
  misc_feature: Variant of the nucleotide sequence at SEQ ID NO 21292
tttcgatgcttgcaccatgccattgcgttcccgacttctcatctttgcatgaggccatggacacggtcacgatagcctaccccacgttcgccaggattggaaggttcctctcaacatcgtcatgaccaacgacaggtgatgagcagcaagcttgaccgagacactgtctcgcgcctctgcaacccttcgatgacacagcatgactagaccgtatcttatcgggatcgacagcaactcgctttagtgtcattttttgcccctgtcttttatactaggtattctaatacgtgcttgacttcatggcacaaggcatctcgggtcgttcccgttgtgcggcgtaatgaaacgacatgcattagaagtcgtactatataatatccgtgccgtgtctggtggcagatattaatttctcgccccggctgcgctccgttgcttctctcgtccgctggcacattgcgcgtgttcaagatgggtttccgtagacgcgatctagtttctctcctcctgaccgcgccggtcttagttgccagtgctgcagactttgaccctctcgagtatgttgaccagctcatcggctcagcaaatggaggcaatgtctttccaggagcaacgattccctacggaatggccaaggccgtggccgatacgaactctggaagcaaccagggtggtttcacgctcgacggctcaccgattactgggttttcatcacttcatgacagtggaacaggaggctcgccgtcactcggcaacttccctctgttcccatatgctgcctgccctggcgatgatttggatgcttgcgcgtacccaaagaaaacgcgggccaagttcggagcattcaataattcgacagtgacggcagcccctgggttctttgaagtgacgcttaattcgggtatcaaggcagaaatgaccgcagctcatcacacatccttattccgttttaccttccctaccagcggagcgggtggatcatatccccttctcatgcaagatctgactgatctttccgactctcgccaggataatggcacgatttctgttgatcccgacacgggacggattacgggccatgcaaaattcgttgcgagcttcagtcaaggccaatatactccatacttctgcaccgacttctcggggcctaagattcacgatagtggtatctttgttaacagcagagccagtgcagatgttcagaatctgactatctcacggtcaatcaatgggtaccctctgccaggcggagctttcatcagatttgagtctgcggcagaaccagtatacgcacgtgtgggcttgagtttcatcagctctgagcaggcttgcgcaaacgctgaggctgagatccctgactatgatttcgacagcatcaagacagctgcaaatgatgcttggagagaaaagctgagcccgatcgtggtttcgaccgcaggtggagttaacacctcattcgtcaccaatttttacagcggaatatatcgaacgctggtaaaccctcagaattatacgggtgaaaatccgatttggtctagcgaggagccatattttgactctttctactgtttatgggactctttccgatctcagatcccgttcctgacaatccttgatccctcatctgtggagcagatgatccgcggtttgatcgatatctacagacatgagggatggctaccagattgccatatgtcgttctcaaagggatatactcagggtggctctaacgctgatgttgtccttgttgatggctacttgaaaggtctggatggtggcataaattgggatgacggttatgctgccgtagtcaaagacgcagaagtagagccctttgactggtgctgccatggccggggcggtctagatagttggaaatctcttggctatatacccgttcaggacttcgattacaagggcttcggcactatgacgagaagtatttcacgaacgttggaatacagctacaatgactataccatcgctttaatggccaaagcattgggcaagtccgcagatgctgaaaagtatctcgattccagcgccaattgggcgaatctcttcaagcagaatcaaacatcttctttgtcctcgggcgccgacaccggatttgttggtttcttccagcccaagtaccttaatcagacttggggtttccaggatccattgcagtgcagtaacatagacaccaatccgaactccatttgctctcttcaaaacactgcaggcgagactttcgagagttccatctgggaatatggctttttcgtcccacacaaccaaggtgatctcatcactctttatggtggtcccaatggctttgtcaacaggctcaactacctccacgacacggacattacttacatcggtaacgagccggctttcttgactgtctttcagtaccactatgctggacgtcctggcgaatccgcgaggcgcagccatttctacattcccaaattctttgacaccacccctgcaggtctccctggaaatgatgatagcggagctatgggctctttcgtagctttcagtatgatgggtctcttcccgaacccaggtcaagacgtctacctcatcacacctccgttctttgagagcgtgaacatcacctcgccagtgacaggcaagacagccacgattcgcaacgtcaatttcgatcccacctacgaagctatctacatccagagcgcaacgctagatggtaagccatataccaagaactggatcgatcatagcttcttcacagagggcaaagaacttgttctcactctcgggaagaatgagagctcctggggaactcatgttgccgacctaccgcccagcgttggcgagtatgtcggctttaacggcacgagaacatccagaagagcactctccgagaacctcagacggaacccgattatgttcgacaggacagggatggcaacgatgttgtaattgtaatgaaggctacgttagaccagccttagatcaggcctgtgattaataggataggatagtctatgagtatatgatacaagacgggcatatgagcataagtgttgaataagaaacatcaatacaggactcgtattctttatccttga

SEQ ID NO: 21295 - DNA, 2193 bp, Muscodor strobelii
  misc_feature: SGI cDNA ID NO. 567208
  misc_feature: Elevated expression when VOC is produced
  misc_feature: Encodes the peptide sequence at SEQ ID NO 21296
atggatgggccacatgcgatcgcaccaggcacaactggaccccaacagtggtctgagcgacggaagtcctccgccgatgacagctcatcggccgtcccatcagcctctcctcgatggacgcatcaatcaccctcatctgctcgggcacgcacaggtcctttgtcacccattagtcctgagttgggggttgtgtacgtcgatggaggctccgggttcacaacgcaggcggctcctcaatcagcacattcttcgagcgccggcagttggcgtaccagtcatgatatgacccgtgatgtggaagagacaggccgcggtgtgcattgggaacgtgagtcggacgatgaatcggcggtgcccaagatagaacctgttgaagacgataacttcctcttggatgatattgagcaagttccccgcacgccggcctcagatacacaacctgctgcaccaaatcatgcaaaagttaagaggccacgagggcggccacggaagcatcctctgactccacagatatccgccaacaaagtagcaaagggacgttcaaaaactggctgtataacctgtcgcaaaaggaagaagaagtgcgacgaggccaaaccacgttgcttgaattgcgaaaagaacgcagtggtctgcgaaggctatcacgaaaagacattatggaaaagcggaagggaaaaagcagaagaagagcaccacaagaggcagagtctgccgcacattactcttcagcccatatttcaaggtgtcgagacacctgaagataagatctttttcagccattatatcgcccacctaagcggcgttctcactgtcgagggtcaacacaaaaatgccttcaaggacatgctactacagatggccttagagcaccgggggttaatgcactccatcctctcgcttgcaagtaaacacatcgatttcgacacaccctatggcaataaacttcttagccccccttccaaagtcacttacgcatctctcatggagcgatctgaataccaccatacgactgccatggagcagctgctcgcatggaaagggaccgagaccggtgaaaatgagtcagaagaaaaggcaaggttagcacctcgttacgggcagatgctatgcttgttactacagacagcagctgaaggcaactcgactggcgcacatcgagtgcacctacaggcctataagagtctgatatcggaaaccccgccgccagacaaggctttcgtgacttttatcactgaatttttccagtatcgcgtcttcgcagatgagcttatccgctatccagacccacaaactacacgacttgctaccgaagattgggaaccctgggttacaattgaaccagcacgattaatcggtgtgggtgatgggttgttccactacctcgcaaagatcacgacaattcggaacacaatacgagacaacatcaatgccggtgtagatcctgttgtagactatggctcgctctatcgtgccgccgaaatcgaaagtgctattcgggaatgggcgccaaattggccgtcgggagacaaccgagaccgtgtcagcttactctacaagcagatgatgtgggtgtatctattccggacggtatatccacctttgacttcctcacccgcgccacggtatccggcgtcaatggtagataacatgacgatggtggtgaacactggcctgcatgccgacatacgtgaagagacgtgtaccatatctagtagcaccaccgtgccgctctctccagcctcgactcaaccctgttcttccggacactctccaccttcattatctctccacgtatcggatcgtcgacgatccagcgggaatatgctgcatctctgcgctgatccacagccaacatctatccgatatcctccgcatcatgattcgcgcattactcttgctgtcgacgagtctctagcgattttggagtcattgaaagcaagtgatcccgtgcaaacccttctactggtcccttgtttcgtcatcggttgcgcatcctttgctccactacagcaagaccgagtccgcgcagccattcgcattgttcgtgggtatacggggctgaggaattgcgaccgtgttattgagctcctggaagaaatatggcgacttatgggccggagcgagtggatgcgtgtctgggactggcaaagcgtggcaagaaatatgcacctcgattttgcttgcgtttga

SEQ ID NO: 21296 - protein, 730 aa, Muscodor strobelii
  misc_feature: SGI Peptide ID NO. 567208
  misc_feature (183)..(222): Pfam Id: PF00172 Pfam Desc: Fungal Zn(2)-Cys(6) binuclear cluster domain
  misc_feature (49)..(727): NCBI GI: 164427013 Blast Desc: NCU02307 [Neurospora crassa OR74A] gi|157071568|gb|EAA30715.2| conserved [Neurospora crassa OR74A]
  misc_feature (108)..(727): NCBI GI: 171679683 Blast Desc: protein product [Podospora anserina] gi|170939467|emb|CAP64695.1| protein product [Podospora anserina]
  misc_feature (83)..(729): NCBI GI: 256728932 Blast Desc: [Nectria haematococca mpVI 77-13-4]
  misc_feature (80)..(730): NCBI GI: 46138595 Blast Desc: FG10812.1 [Gibberella zeae PH-1]
  misc_feature (49)..(727): NCBI GI: 116203425 Blast Desc: CHGG_09596 [Chaetomium globosum CBS 148.51] gi|88175724|gb|EAQ83192.1| CHGG_09596 [Chaetomium globosum CBS 148.51]
  misc_feature (100)..(729): NCBI GI: 145607581 Blast Desc: MGG_10422 [Magnaporthe grisea 70-15] gi|145015107|gb|EDJ99675.1| MGG_10422 [Magnaporthe grisea 70-15]
  misc_feature (113)..(730): NCBI GI: 261354924 Blast Desc: C6 transcription factor OefC [Verticillium albo-atrum VaMs.102]
  misc_feature (119)..(487): NCBI GI: 154304694 Blast Desc: BC1G_08086 [Botryotinia fuckeliana B05.10] gi|150853986|gb|EDN29178.1| BC1G_08086 [Botryotinia fuckeliana B05.10]
  misc_feature (75)..(533): NCBI GI: 261206096 Blast Desc: OefC [Ajellomyces dermatitidis SLH14081] gi|239592844|gb|EEQ75425.1| OefC [Ajellomyces dermatitidis SLH14081]
  misc_feature (113)..(559): NCBI GI: 240105041 Blast Desc: Fungal Zn binuclear cluster domain containing protein [Coccidioides posadasii C735 delta SOWgp]
  misc_feature: Useful for introducing or modulating the production of volatile compounds
MDGPHAIAPGTTGPQQWSERRKSSADDSSSAVPSASPRWTHQSPSSARARTGPLSPISPELGVVYVDGGSGFTTQAAPQSAHSSSAGSWRTSHDMTRDVEETGRGVHWERESDDESAVPKIEPVEDDNFLLDDIEQVPRTPASDTQPAAPNHAKVKRPRGRPRKHPLTPQISANKVAKGRSKTGCITCRKRKKKCDEAKPRCLNCEKNAVVCEGYHEKTLWKSGREKAEEEHHKRQSLPHITLQPIFQGVETPEDKIFFSHYIAHLSGVLTVEGQHKNAFKDMLLQMALEHRGLMHSILSLASKHIDFDTPYGNKLLSPPSKVTYASLMERSEYHHTTAMEQLLAWKGTETGENESEEKARLAPRYGQMLCLLLQTAAEGNSTGAHRVHLQAYKSLISETPPPDKAFVTFITEFFQYRVFADELIRYPDPQTTRLATEDWEPWVTIEPARLIGVGDGLFHYLAKITTIRNTIRDNINAGVDPVVDYGSLYRAAEIESAIREWAPNWPSGDNRDRVSLLYKQMMWVYLFRTVYPPLTSSPAPRYPASMVDNMTMVVNTGLHADIREETCTISSSTTVPLSPASTQPCSSGHSPPSLSLHVSDRRRSSGNMLHLCADPQPTSIRYPPHHDSRITLAVDESLAILESLKASDPVQTLLLVPCFVIGCASFAPLQQDRVRAAIRIVRGYTGLRNCDRVIELLEEIWRLMGRSEWMRVWDWQSVARNMHLDFACV

SEQ ID NO: 21297 - DNA, 4162 bp, Muscodor strobelii
  misc_feature: SGI EST ID NO. CUFF.49989.0
  misc_feature: Variant of the nucleotide sequence at SEQ ID NO 21295
gcagtatgttggaaccatggtgacatgactgacgaccctagatgatcctaagctggctagttggatggccagatggctggctcacaccgcactgccgttcgacccaggttacacattttgtgctttacgtcgtcgcgtgtgcaagcggctagtatgcatgccaaccatgtcgcgatcgatgtggacggcgcccgctggcgggaagaaggtgggtggggacagtccaccgtcacacacagtgaccttcaacggcgctcatcttccaccccatccagagcccatcctcgcccgtcctctgcctgtcttacacccttctcgcgagtgcatgtatttacgaccctatcctagtaagtcatgcccatagcagccgtatttgggatgtgcatcttctgcccatagttgtcgtttggctgtccctgtgccgagtggccccacgatatcaacttcaggtccaaataagacagccacctccatactttctttgccccagctcaacccctcctccatctacttccccgttttccacgttgtgccgacctatcatctcagctcttccagtatatgatttgtcggccatcctcccctcaatcccatttgtagtggcattcgcaagtcgtgctgatctgtgagaatgagtcggcgttttctggctatgatctgctcaccttgaccctttctccattcgagctggaatgggcttataagccaaactaggcgggttgaccaccattgtgggctgctcgtttctgggaaactccgaactctgaaagtccgtctctagggtctctgcttcacgattgacaattctcatgaatgacataatttgggagcttcaccatggatgggccacatgcgatcgcaccaggcacaactggaccccaacagtggtctgagcgacggaagtcctccgccgatgacagctcatcggccgtcccatcagcctctcctcgatggacgcatcaatcaccctcatctgctcgggcacgcacaggtcctttgtcacccattagtcctgagttgggggttgtgtacgtcgatggaggctccgggttcacaacgcaggcggctcctcaatcagcacattcttcgagcgccggcagttggcgtaccagtcatgatatgacccgtgatgtggaagagacaggccgcggtgtgcattgggaacgtgagtcggacgatgaatcggcggtgcccaagatagaacctgttgaagacgataacttcctcttggatgatattgagcaagttccccgcacgccggcctcagatacacaacctgctgcaccaaatcatgcaaaagttaagaggccacgagggcggccacggaagcatcctctgactccacagatatccgccaacaaagtagcaaagggacgttcaaaaactggctgtataacctgtcgcaaaaggaagaagaagtgcgacgaggccaaaccacgttgcttgaattgcgaaaagaacgcagtggtctgcgaaggctatcacgaaaagacattatggaaaagcggaagggaaaaagcagaagaagagcaccacaagaggcagagtctgccgcacattactcttcagcccatatttcaaggtgtcgagacacctgaagataagatctttttcagccattatatcgcccacctaagcggcgttctcactgtcgagggtcaacacaaaaatgccttcaaggacatgctactacagatggccttagagcaccgggggttaatgcactccatcctctcgcttgcaagtaaacacatcgatttcgacacaccctatggcaataaacttcttagccccccttccaaagtcacttacgcatctctcatggagcgatctgaataccaccatacgactgccatggagcagctgctcgcatggaaagggaccgagaccggtgaaaatgagtcagaagaaaaggcaaggttagcacctcgttacgggcagatgctatgcttgttactacagacagcagctgaaggcaactcgactggcgcacatcgagtgcacctacaggcctataagagtctgatatcggaaaccccgccgccagacaaggctttcgtgacttttatcactgaatttttccagtatcgcgtcttcgcagatgagcttatccgctatccagacccacaaactacacgacttgctaccgaagattgggaaccctgggttacaattgaaccagcacgattaatcggtgtgggtgatgggttgttccactacctcgcaaagatcacgacaattcggaacacaatacgagacaacatcaatgccggtgtagatcctgttgtagactatggctcgctctatcgtgccgccgaaatcgaaagtgctattcgggaatgggcgccaaattggccgtcgggagacaaccgagaccgtgtcagcttactctacaagcagatgatgtgggtgtatctattccggacggtatatccacctttgacttcctcacccgcgccacggtatccggcgtcaatggtagataacatgacgatggtggtgaacactggcctgcatgccgacatacgtgaagagacgtgtaccatatctagtagcaccaccgtgccgctctctccagcctcgactcaaccctgttcttccggacactctccaccttcattatctctccacgtatcggatcgtcgacgatccagcgggaatatgctgcatctctgcgctgatccacagccaacatctatccgatatcctccgcatcatgattcgcgcattactcttgctgtcgacgagtctctagcgattttggagtcattgaaagcaagtgatcccgtgcaaacccttctactggtcccttgtttcgtcatcggttgcgcatcctttgctccactacagcaagaccgagtccgcgcagccattcgcattgttcgtgggtatacggggctgaggaattgcgaccgtgttattgagctcctggaagaaatatggcgacttatgggccggagcgagtggatgcgtgtctgggactggcaaagcgtggcaagaaatatgcacctcgattttgcttgcgtttgaaacaggtctcatcatggtctcgtcagatcgagactctgctcttccattcatcatttttcttccatacctaccgacccttgtcggtctcactttggagccatggtttggacatgtgggagttggggacatcgtttcctgattggaccggccatcttctccgaattgccactgtgtacatctcgatactcaagtggacattctaaaacgtcatgcggattttgggcacgacgacatggagtttgggaggggcctcacatggtcaatcggcgttgggtgttcaagaattgcatatgcgccacagatctcgtgtctgcttgcatttacgtacacggctcttgccttgcatgtttcgttacggcatgtttccattaaggagcgcggctgaactatataccccttttgtctttcatgtggcatctgcaaatatggtggttcggcgtcttgataccaaagtctctgaaagaggctgagctactccggatatatatgacttctaggtctagttgcatgatgatgttaggaggctttctggtaattcaaagacggcattgtagaatagtaatatttcgatgcaagtcttatactgaaggcaaatataaatcggcaactgccatattttgaagactgtaactgttatgttttgagtactcaaatgcttaaaatctgctcctcttatgttgcctattttaacgtagctttcatctcacgagcgtggtcgatgatacgaacaagaaactggcgtggttccaatccctttctcggttgaaatgcacttataagatgttccatcgtaatatccattgatagtgcccatcagcttaagcatattaatttccaaatgcagactttgtattaactgccttgtcaacattacacctcccagaggcatgataccagtatcatcatctcgataattcattactaagggtaagggggttgtccaaacctagacattggactgctggcttagggaaaactcagatcgggtccacccgaatgtgtcaagcaggtcaaagtcaaagccaacctgtgttgacagatcccaatcgaaggcgaacccatctgtgtttgtaaagcctggtgccggcgcgttgagtgcttggtcaagaacgtgtttaataatcgtcttgca

SEQ ID NO: 21298 - DNA, 2055 bp, Muscodor strobelii
  misc_feature: SGI cDNA ID NO. 567209
  misc_feature: Encodes the peptide sequence at SEQ ID NO 21299
atgtcggcaaagcctgtgcttcgacgacccaatggtcggccacaggcatgtgaaccctgtcgaaaacgaaaagtggcttgcgatcataatcagccaatatgcgagcgatgcatcaagagacgccagattggagattgtgtctacatagtatcatcaggaagcccgaaaccggcaataggatccaggttaccgccgccttcgcctgcagcttcggcttcacccaaagaatatcaaaactgcatatcaagtattcgaaccgaagggtctacacctagaagtcccgaagggctgaatccgagagcgactgcaccgggctatctcggctttacgagtttttcagccgtgttcgaggagacacaaattagtctgagcgaacacactcgacttcaaggaacccaggagacacctcccgcatctgatgatctgagtcaaacgtcaccggtacaagagatattcagccttgacccacgtactttagaagcatgcatgtacgtcttgcgaaatgtcccagagccatcgagaggcaaaatctgtcttcgtggaagcccagtagagtcatgggtttactatttcctggatgaggtacttgattcgttgtatgctacattcggacattacttcggacctcagagatcagaagcatctctccaggagctagccagaatcatatctcggaacacagcgcttccattctccgacgacgatgacatcgctccaagcgagtggatggctcagttctcaggccccaatatacggtgggagactttaggtcttctcttcgcattttgggacttcactgttaagtctatatcactagagaagagtttaactcaagacgagtatgggcgaccaagcaggattacaaaagatgctgttgacttttgtgtagaactttgcaatgagttttctccggcaaattccatgtttctctttcttagctatcgacgactcattgtcgagacattaatcaacggcgacatcaatcgtcaatcatggaaattcctctcagaaacgattgctctgttgacctatatgggttaccatgtactccccgatacgcccaaatacataccaacattcgcttcagagataaaaagaaaactctattaccacgtttacacaatccatatgtctctcgtgtcactcacgggacggccacccctaatgagtcaccgatactgtacaacacctatcccattagaccttaaaaatagcgttctgttttgcgatgacaaggaagcgtttgtcaaagcactagaaggtatcgacgataagggatgggacaaggcagggagaaaactaagtactagccccatgcgggcgcgggcaaaaacggccctgttgcgtgaggaaatactgtatttcgccctcggaccgaagcaagacgtctcggtcgaagcactcgaagacgtaaaagctcgagtatcgaagttgtactacgaagagtttccgaaatttttgcagaaccacaatggcctatttgacagtgggaacgaggttggggttatatacttcaggctgctaatcagccttgagcatctactgaacaggttcttcattgagcggctattattgaggcacggccacatccagaatgagcttctctccgtcagctttgacatggttaccaacacattgctcttctggactcatcaagatagtttatctccttggcgagccgattgcgaatggctcatcatggcttttggagtgccagcaggtggtattctttgccaagaactgctgaagcctaccgtccataacgacccaagaatcacgcggtcaaccataatacagaaattgagtctgctcgttggattcctcgactggatcaagccctcggccccaaacggagacttatgtggcaaatgcaagacgattattaaacacgttcttgaccaagcactcaacgcgccggcaccaggctttacaaacacagatgggttcgccttcgattgggatctgtcaacacaggttggctttgactttgacctgcttgacacattcgggtggacccgatctgagttttccctaagccagcagtccaatgtctag

SEQ ID NO: 21299 - protein, 684 aa, Muscodor strobelii
  misc_feature: SGI Peptide ID NO. 567209
  misc_feature (15)..(55): Pfam Id: PF00172 Pfam Desc: Fungal Zn(2)-Cys(6) binuclear cluster domain
  misc_feature (6)..(675): NCBI GI: 261360600 Blast Desc: conserved [Verticillium albo-atrum VaMs.102]
  misc_feature (111)..(675): NCBI GI: 261353905 Blast Desc: conserved [Verticillium albo-atrum VaMs.102]
  misc_feature (1)..(565): NCBI GI: 46109666 Blast Desc: FG01715.1 [Gibberella zeae PH-1]
  misc_feature (103)..(674): NCBI GI: 256727516 Blast Desc: NECHADRAFT_91033 [Nectria haematococca mpVI 77-13-4]
  misc_feature (1)..(565): NCBI GI: 256730689 Blast Desc: NECHADRAFT_29793 [Nectria haematococca mpVI 77-13-4]
  misc_feature (86)..(671): NCBI GI: 46136455 Blast Desc: FG09743.1 [Gibberella zeae PH-1]
  misc_feature (6)..(639): NCBI GI: 145604402 Blast Desc: MGG_13994 [Magnaporthe grisea 70-15] gi|145012402|gb|EDJ97058.1| MGG_13994 [Magnaporthe grisea 70-15]
  misc_feature (5)..(670): NCBI GI: 145250989 Blast Desc: An15g04740 [Aspergillus niger] gi|134082535|emb|CAK42451.1| protein product [Aspergillus niger]
  misc_feature (5)..(671): NCBI GI: 145244921 Blast Desc: An11g07610 [Aspergillus niger] gi|134079423|emb|CAK45955.1| protein product [Aspergillus niger]
  misc_feature (6)..(648): NCBI GI: 154294588 Blast Desc: BC1G_13764 [Botryotinia fuckeliana B05.10] gi|150844643|gb|EDN19836.1| BC1G_13764 [Botryotinia fuckeliana B05.10]
MSAKPVLRRPNGRPQACEPCRKRKVACDHNQPICERCIKRRQIGDCVYIVSSGSPKPAIGSRLPPPSPAASASPKEYQNCISSIRTEGSTPRSPEGLNPRATAPGYLGFTSFSAVFEETQISLSEHTRLQGTQETPPASDDLSQTSPVQEIFSLDPRTLEACMYVLRNVPEPSRGKICLRGSPVESWVYYFLDEVLDSLYATFGHYFGPQRSEASLQELARIISRNTALPFSDDDDIAPSEWMAQFSGPNIRWETLGLLFAFWDFTVKSISLEKSLTQDEYGRPSRITKDAVDFCVELCNEFSPANSMFLFLSYRRLIVETLINGDINRQSWKFLSETIALLTYMGYHVLPDTPKYIPTFASEIKRKLYYHVYTIHMSLVSLTGRPPLMSHRYCTTPIPLDLKNSVLFCDDKEAFVKALEGIDDKGWDKAGRKLSTSPMRARAKTALLREEILYFALGPKQDVSVEALEDVKARVSKLYYEEFPKFLQNHNGLFDSGNEVGVIYFRLLISLEHLLNRFFIERLLLRHGHIQNELLSVSFDMVTNTLLFWTHQDSLSPWRADCEWLIMAFGVPAGGILCQELLKPTVHNDPRITRSTIIQKLSLLVGFLDWIKPSAPNGDLCGKCKTIIKHVLDQALNAPAPGFTNTDGFAFDWDLSTQVGFDFDLLDTFGWTRSEFSLSQQSNV

SEQ ID NO: 21300 - DNA, 4775 bp, Muscodor strobelii
  misc_feature: SGI EST ID NO. CUFF.49990.1
  misc_feature: Variant of the nucleotide sequence at SEQ ID NO 21298
atgcgcactgatcaattgatgcttcggattaagtattgaaacttgtctcgcccggtattcgtagagtcattgcatatgtcggcaaagcctgtgcttcgacgacccaatggtcggccacaggcatgtgaagtgagccgagcgttccctagcatcgtgcattgtaaactgattatgactggtagccctgtcgaaaacgaaaagtggcttgcgatcataatcagccaatatgcgagcgatgcatcaagagacgccagattggagattgtgtctacatagtatcatcaggaagcccgaaaccggcaataggatccaggttaccgccgccttcgcctgcagcttcggcttcacccaaagaatatcaaaactgcatatcaagtattcgaaccgaagggtctacacctagaagtcccgaagggctgaatccgagagcgactgcaccgggctatctcggctttacgagtttttcagccgtgttcgaggagacacaaattagtctgagcgaacacactcgacttcaaggaacccaggagacacctcccgcatctgatgatctgagtcaaacgtcaccggtacaagagatattcagccttgacccacgtactttagaagcatgcatgtacgtcttgcgaaatgtcccagagccatcgagaggcaaaatctgtcttcgtggaagcccagtagagtcatgggtttactatttcctggatgaggtacttgattcgttgtatgctacattcggacattacttcggacctcagagatcagaagcatctctccaggagctagccagaatcatatctcggaacacagcgcttccattctccgacgacgatgacatcgctccaagcgagtggatggctcagttctcaggccccaatatacggtgggagactttaggtcttctcttcgcattttgggacttcactgttaagtctatatcactagagaagagtttaactcaagacgagtatgggcgaccaagcaggattacaaaagatgctgttgacttttgtgtagaactttgcaatgagttttctccggcaaattccatgtttctctttcttagctatcgacgactcattgtcgagacattaatcaacggcgacatcaatcgtcaatcatggaaattcctctcagaaacgattgctctgttgacctatatgggttaccatgtactccccgatacgcccaaatacataccaacattcgcttcagagataaaaagaaaactctattaccacgtttacacaatccatatgtctctcgtgtcactcacgggacggccacccctaatgagtcaccgatactgtacaacacctatcccattagaccttaaaaatagcgttctgttttgcgatgacaaggaagcgtttgtcaaagcactagaaggtatcgacgataagggatgggacaaggcagggagaaaactaagtactagccccatgcgggcgcgggcaaaaacggccctgttgcgtgaggaaatactgtatttcgccctcggaccgaagcaagacgtctcggtcgaagcactcgaagacgtaaaagctcgagtatcgaagttgtactacgaagagtttccgaaatttttgcagaaccacaatggcctatttgacagtgggaacgaggttggggttatatacttcaggctgctaatcagccttgagcatctactgaacaggttcttcattgagcggctattattgaggcacggccacatccagaatgagcttctctccgtcagctttgacatggttaccaacacattgctcttctggactcatcaagatagtttatctccttggcgagccgattgcgaatggctcatcatggcttttggagtgccagcaggtggtattctttgccaagaactgctgaagcctaccgtccataacgacccaagaatcacgcggtcaaccataatacagaaattgagtctgctcgttggattcctcgactggatcaagccctcggccccaaacggagacttatgtggcaaatgcaagacgattattaaacacgttcttgaccaagcactcaacgcgccggcaccaggctttacaaacacagatgggttcgccttcgattgggatctgtcaacacaggttggctttgactttgacctgcttgacacattcgggtggacccgatctgagttttccctaagccagcagtccaatgtctaggtttggacaacccccttacccttagtaatgaattatcgagatgatgatactggtatcatgcctctgggaggtgtaatgttgacaaggcagttaatacaaagtctgcatttggaaattaatatgcttaagctgatgggcactatcaatggatattacgatggaacatcttataagtgcatttcaaccgagaaagggattggaaccacgccagtttcttgttcgtatcatcgaccacgctcgtgagatgaaagctacgttaaaataggcaacataagaggagcagattttaagcatttgagtactcaaaacataacagttacagtcttcaaaatatggcagttgccgatttatatttgccttcagtataagacttgcatcgaaatattactattctacaatgccgtctttgaattaccagaaagcctcctaacatcatcatgcaactagacctagaagtcatatatatccggagtagctcagcctctttcagagactttggtatcaagacgccgaaccaccatatttgcagatgccacatgaaagacaaaaggggtatatagttcagccgcgctccttaatggaaacatgccgtaacgaaacatgcaaggcaagagccgtgtacgtaaatgcaagcagacacgagatctgtggcgcatatgcaattcttgaacacccaacgccgattgaccatgtgaggcccctcccaaactccatgtcgtcgtgcccaaaatccgcatgacgttttagaatgtccacttgagtatcgagatgtacacagtggcaattcggagaagatggccggtccaatcaggaaacgatgtccccaactcccacatgtccaaaccatggctccaaagtgagaccgacaagggtcggtaggtatggaagaaaaatgatgaatggaagagcagagtctcgatctgacgagaccatgatgagacctgtttcaaacgcaagcaaaatcgaggtgcatatttcttgccacgctttgccagtcccagacacgcatccactcgctccggcccataagtcgccatatttcttccaggagctcaataacacggtcgcaattcctcagccccgtatacccacgaacaatgcgaatggctgcgcggactcggtcttgctgtagtggagcaaaggatgcgcaaccgatgacgaaacaagggaccagtagaagggtttgcacgggatcacttgctttcaatgactccaaaatcgctagagactcgtcgacagcaagagtaatgcgcgaatcatgatgcggaggatatcggatagatgttggctgtggatcagcgcagagatgcagcatattcccgctggatcgtcgacgatccgatacgtggagagataatgaaggtggagagtgtccggaagaacagggttgagtcgaggctggagagagcggcacggtggtgctactagatatggtacacgtctcttcacgtatgtcggcatgcaggccagtgttcaccaccatcgtcatgttatctaccattgacgccggataccgtggcgcgggtgaggaagtcaaaggtggatataccgtccggaatagatacacccacatcatctgcttgtagagtaagctgacacggtctcggttgtctcccgacggccaatttggcgcccattcccgaatagcactttcgatttcggcggcacgatagagcgagccatagtctacaacaggatctacaccggcattgatgttgtctcgtattgtgttccgaattgtcgtgatctttgcgaggtagtggaacaacccatcacccacaccgattaatcgtgctggttcaattgtaacccagggttcccaatcttcggtagcaagtcgtgtagtttgtgggtctggatagcggataagctcatctgcgaagacgcgatactggaaaaattcagtgataaaagtcacgaaagccttgtctggcggcggggtttccgatatcagactcttataggcctgtaggtgcactcgatgtgcgccagtcgagttgccttcagctgctgtctgtagtaacaagcatagcatctgcccgtaacgaggtgctaaccttgccttttcttctgactcattttcaccggtctcggtccctttccatgcgagcagctgctccatggcagtcgtatggtggtattcagatcgctccatgagagatgcgtaagtgactttggaaggggggctaagaagtttattgccatagggtgtgtcgaaatcgatgtgtttacttgcaagcgagaggatggagtgcattaacccccggtgctctaaggccatctgtagtagcatgtccttgaaggcatttttgtgttgaccctcgacagtgagaacgccgcttaggtgggcgatataatggctgaaaaagatcttatcttcaggtgtctcgacaccttgaaatatgggctgaagagtaatgtgcggcagactctgcctcttgtggtgctctagtggtaaaagtaagcataccagagaatgacggcttcgggacctctcctcgcttaccttcttctgctttttcccttccgcttttccataatgtcttttcgtgatagccttcgcagaccactgcgttcttttcgcaattcaag

SEQ ID NO: 21301 - DNA, 2037 bp, Muscodor strobelii
  misc_feature: SGI cDNA ID NO. 567210
  misc_feature: Encodes the peptide sequence at SEQ ID NO 21302
atgtcggcaaagcctgtgcttcgacgacccaatggtcggccacaggcatgtgaaccctgtcgaaaacgaaaagtggcttgcgatcataatcagccaatatgcgagcgatgcatcaagagacgccagattggagattgtgtctacatagtatcatcaggaagcccgaaaccggcaataggatccaggttaccgccgccttcgcctgcagcttcggcttcacccaaagaatatcaaaactgcatatcaagtattcgaaccgaagggtctacacctagaagtcccgaagggctgaatccgagagcgactgcaccgggctatctcggctttacgagtttttcagccgtgttcgaggagacacaaattagtctgagcgaacacactcgacttcaaggaacccaggagacacctcccgcatctgatgatctgagtcaaacgtcaccggtacaagagatattcagccttgacccacgtactttagaagcatgcatgtacgtcttgcgaaatgtcccagagccatcgagaggcaaaatctgtcttcgtggaagcccagtagagtcatgggtttactatttcctggatgaggtacttgattcgttgtatgctacattcggacattacttcggacctcagagatcagaagcatctctccaggagctagccagaatcatatctcggaacacagcgcttccattctccgacgacgatgacatcgctccaagcgagtggatggctcagttctcaggccccaatatacggtgggagactttaggtcttctcttcgcattttgggacttcactgttaagtctatatcactagagaagagtttaactcaagacgagtatgggcgaccaagcaggattacaaaagatgctgttgacttttgtgtagaactttgcaatgagttttctccggcaaattccatgtttctctttcttagctatcgacgactcattgtcgagacattaatcaacggcgacatcaatcgtcaatcatggaaattcctctcagaaacgattgctctgttgacctatatgggttaccatgtactccccgatacgcccaaatacataccaacattcgcttcagagataaaaagaaaactctattaccacgtttacacaatccatatgtctctcgtgtcactcacgggacggccacccctaatgagtcaccgatactgtacaacacctatcccattagaccttaaaaatagcgttctgttttgcgatgacaaggaagcgtttgtcaaagcactagaaggtatcgacgataagggatgggacaaggcagggagaaaactaagtactagccccatgcgggcgcgggcaaaaacggccctgttgcgtgaggaaatactgtatttcgccctcggaccgaagcaagacgtctcggtcgaagcactcgaagacgtaaaagctcgagtatcgaagttgtactacgaagagtttccgaaatttttgcagaaccacaatggcctatttgacagtgggaacgaggttggggttatatacttcaggctgctaatcagccttgagcatctactgaacaggttcttcattgagcggctattattgaggcacggccacatccagaatgagcttctctccgtcagctttgacatggttaccaacacattgctcttctggactcatcaagtaactaataacgtatctaagatcatggcttttggagtgccagcaggtggtattctttgccaagaactgctgaagcctaccgtccataacgacccaagaatcacgcggtcaaccataatacagaaattgagtctgctcgttggattcctcgactggatcaagccctcggccccaaacggagacttatgtggcaaatgcaagacgattattaaacacgttcttgaccaagcactcaacgcgccggcaccaggctttacaaacacagatgggttcgccttcgattgggatctgtcaacacaggttggctttgactttgacctgcttgacacattcgggtggacccgatctgagttttccctaagccagcagtccaatgtctag

SEQ ID NO: 21302 - protein, 678 aa, Muscodor strobelii
  misc_feature: SGI Peptide ID NO. 567210
  misc_feature (15)..(55): Pfam Id: PF00172 Pfam Desc: Fungal Zn(2)-Cys(6) binuclear cluster domain
  misc_feature (6)..(669): NCBI GI: 261360600 Blast Desc: conserved [Verticillium albo-atrum VaMs.102]
  misc_feature (111)..(669): NCBI GI: 261353905 Blast Desc: conserved [Verticillium albo-atrum VaMs.102]
  misc_feature (1)..(552): NCBI GI: 46109666 Blast Desc: FG01715.1 [Gibberella zeae PH-1]
  misc_feature (1)..(552): NCBI GI: 256730689 Blast Desc: NECHADRAFT_29793 [Nectria haematococca mpVI 77-13-4]
  misc_feature (103)..(668): NCBI GI: 256727516 Blast Desc: NECHADRAFT_91033 [Nectria haematococca mpVI 77-13-4]
  misc_feature (86)..(665): NCBI GI: 46136455 Blast Desc: FG09743.1 [Gibberella zeae PH-1]
  misc_feature (6)..(633): NCBI GI: 145604402 Blast Desc: MGG_13994 [Magnaporthe grisea 70-15] gi|145012402|gb|EDJ97058.1| MGG_13994 [Magnaporthe grisea 70-15]
  misc_feature (5)..(664): NCBI GI: 145250989 Blast Desc: An15g04740 [Aspergillus niger] gi|134082535|emb|CAK42451.1| protein product [Aspergillus niger]
  misc_feature (5)..(665): NCBI GI: 145244921 Blast Desc: An11g07610 [Aspergillus niger] gi|134079423|emb|CAK45955.1| protein product [Aspergillus niger]
  misc_feature (6)..(642): NCBI GI: 154294588 Blast Desc: BC1G_13764 [Botryotinia fuckeliana B05.10] gi|150844643|gb|EDN19836.1| BC1G_13764 [Botryotinia fuckeliana B05.10]
MSAKPVLRRPNGRPQACEPCRKRKVACDHNQPICERCIKRRQIGDCVYIVSSGSPKPAIGSRLPPPSPAASASPKEYQNCISSIRTEGSTPRSPEGLNPRATAPGYLGFTSFSAVFEETQISLSEHTRLQGTQETPPASDDLSQTSPVQEIFSLDPRTLEACMYVLRNVPEPSRGKICLRGSPVESWVYYFLDEVLDSLYATFGHYFGPQRSEASLQELARIISRNTALPFSDDDDIAPSEWMAQFSGPNIRWETLGLLFAFWDFTVKSISLEKSLTQDEYGRPSRITKDAVDFCVELCNEFSPANSMFLFLSYRRLIVETLINGDINRQSWKFLSETIALLTYMGYHVLPDTPKYIPTFASEIKRKLYYHVYTIHMSLVSLTGRPPLMSHRYCTTPIPLDLKNSVLFCDDKEAFVKALEGIDDKGWDKAGRKLSTSPMRARAKTALLREEILYFALGPKQDVSVEALEDVKARVSKLYYEEFPKFLQNHNGLFDSGNEVGVIYFRLLISLEHLLNRFFIERLLLRHGHIQNELLSVSFDMVTNTLLFWTHQVTNNVSKIMAFGVPAGGILCQELLKPTVHNDPRITRSTIIQKLSLLVGFLDWIKPSAPNGDLCGKCKTIIKHVLDQALNAPAPGFTNTDGFAFDWDLSTQVGFDFDLLDTFGWTRSEFSLSQQSNV

SEQ ID NO: 21303 - DNA, 4775 bp, Muscodor strobelii; identical to SEQ ID NO: 21300
  misc_feature: SGI EST ID NO. CUFF.49990.1
  misc_feature: Variant of the nucleotide sequence at SEQ ID NO 21301

SEQ ID NO: 21304 - DNA, 348 bp, Muscodor strobelii
  misc_feature: SGI cDNA ID NO. 567211
  misc_feature: Reduced expression when VOC is produced
  misc_feature: Encodes the peptide sequence at SEQ ID NO 21305
atgccaggtccacattcaacgtctgaggttccaccttcggaaggtcacatacgaagttccacacgcagaggctcaacttcgaccgagaggacgcttacggacgacgtatcgggctatgctgagaatcttctcaactatgaattagaaaacgggccctttgatgactgccagaccctctcagatgttccacttgtccaaaaaacgaaggcatcgaaagccatcggcaagatcaagtccaggcttggcgtgaaggatgacagaagcccgaaacccaagaagtgcataccaacaaactactatccaaatacccgtgtcacattccaagcgctggcagagtttcgacaataa

SEQ ID NO: 21305 - protein, 115 aa, Muscodor strobelii
  misc_feature: SGI Peptide ID NO. 567211
  misc_feature: Useful for introducing or modulating the production of volatile compounds
MPGPHSTSEVPPSEGHIRSSTRRGSTSTERTLTDDVSGYAENLLNYELENGPFDDCQTLSDVPLVQKTKASKAIGKIKSRLGVKDDRSPKPKKCIPTNYYPNTRVTFQALAEFRQ

SEQ ID NO: 21306 - DNA, 2878 bp, Muscodor strobelii
  misc_feature: SGI EST ID NO. CUFF.50014.0
  misc_feature: Variant of the nucleotide sequence at SEQ ID NO 21304
gagacaacaccttgagggtcacatagtgttgctggccctgtatattaagtctcaagtagctcgatttaatcagttgtagaaaacaatctgtatctatacttatctgacgttatttgcaaaagtgaaaagatattttctaaacttagcaacttgaataaactctatctatcacttacacatacaactcctagccacctatcatccttcacaatgccaggtccacattcaacgtctgaggttccaccttcggaaggtcacatacgaagttccacacgcagaggctcaacttcgaccgagaggacgcttacggacgacgtatcgggctatgctgagaatcttctcaactatgaattagaaaacgggccctttgatgactgccagaccctctcagatgttccacttgtccaaaaaacgaaggcatcgaaagccatcggcaagatcaagtccaggcttggcgtgaaggatgacagaagcccgaaacccaagaagtgcataccaacaaactactatccaaatacccgtgtcacattccaagcgctggcaggtaagtggagcgcaacctcaaaagtcttgccaatacatgatgcaaggagttgactttagcaacagagtttcgacaataaatacgacatgctggctctccctacaatatcctacagacttttctaatatcacgaaatacgaatacaattagttacaactatacaactatacaaagcaactgcagtaacggacatggacatggatggagttagaatcggtgtctctttaaacaaggaagagggcagaatgcgatttatgtagaccacatggagtactggaggggcacgggaagaaaattgttttctcggggacgatagaatgcatcagggaaacacaaacggaataaagcattagcgttcggacaacaaattggacgtttaggaataataataatttgcaagtgagtatgccacgtcttaaactattatgtctctaaacctcttgaataatacgtcgttatgcacgaccaacatgggctctaccagacatactcggaagcatgctcagaccataatccgaaatctaatacgacacccaggccaaggctatggttgagttgcctttccatataggaggacagcacttgctctacttatgatatttgagattccttcttctttgaaatcattaccctgtttcgaggagttgtgaagacatatgtcgccaaaaagacttgagagtaaaaagcatcgtacaatccaagtttgatacgaagtatagaacgagtattgagcactatcataaactaaatcgtagtcgctacaagtctgggtgctattaagctaagctcagggtcgtggaagccggatcaatgaaactaaagagttcgctgcgaggcaaataatagcatagaactgctgtaggatacggtaatgaagtatgcaaagctctcggctcgaaaaatgacacgtggcttggcacttatttcgcaaggcgtacagaagaccaactcaactaggtgagcacgattcgctggcactcggactggctgattgaatactgcgcaatcagatctatcccgcttccttgaggaaaccgaaaattgatggacaataggaaccaggcaaccgagatggccttcagcggacgagaatgtactgctatcgggactatggtaaatccggaaatggcaggtggtatgtataggcaagtaggtataaatgaggtgcatgattagatccaattaattcagaaacgttactggtttcttgtaggggaaaaagatttagatgcgcttatcaaccagattggccaatgcgaagaagaaagctgtatgtcatcgaccattgcacacgctgaatttcgacgggtaatcgagagatagcatcgacagccttcgtaatactgcacgacacgtctgttttccccatgtaagattttgtgccttagaggttttttgccacggtatggcgacactgggagtatcgcttgatgcacatttctgctaatgaatcaggcgctctctgactcgaccagcagaatgatctcattggtaaacactttgcgaacttaagtcttgtgatagtgctgaattctctgcatcttggtccatttggaggagaaaatgaatggtagcaaccactggttactcaatcattactcgactgattcaaatataagcatcggaggcgaccggtgttgccggatcggggtagaagacgaaggcatcgcgagagagactgtcgaaactgtgacgtgatgattactcgaccgattgctcgatagaatcgagcaattaaatcaattcaaccccgataaggacgattagacactgggtgcctgacccttatccattttgagcgggcaaaactggctgcctcctgtctggtcttcccgtaagcctttgagatcgattcagtctggaagtggaacgttccacagtggacctggtcgttgattttggtggattaacggccgctccggatgttatttctttaggtctgactgcaacaggtcattgcaagcgaacgcagtttgtgatgctctcttgtcatctccgaacatactttatgaaggaaagggatgcaacggggctgacggctttcataagtaccccgaatagttccaatactgtaaaaatgcgccgagctctttatcttcagcttgaggcggggtggtgcgcagttgcgcctcgcctggggtttctggggcaagcagggccgaagtttagataatgcagtgtagctccgaagataggatatgcagatggtggcgtgcgcaacggccaacgacccctccaccgctatctctcgattcctggtgcgtgtcaccaccagaccgtgacccaatcacggccacgcgataacacaactgttgctcgatccagacatccggc

SEQ ID NO: 21307 - DNA, 1593 bp, Muscodor strobelii
  misc_feature: SGI cDNA ID NO. 567212
  misc_feature: Encodes the peptide sequence at SEQ ID NO 21308
atgacagttccggagagccctggagcgctgaccgtgcttgtatcaacgaaggcagtcctgactttgcctgatgatacacttctgcttacaccggcgaccatatccgtgtcttcagctactggaaaaatagtagccattgttcctgtagtgcttcctaagacttcgtttccttcaaatgccacctatattcactatggctccaaagttttgatgccgggtttggttgacgcccatgtccatctcaatgagcctggtcgaactgagtgggagggtttcaacacaggtaccagagcggcagcatctgggggtgtaacgacggtagttgatatgccattgaatgctattccgcccaccacaacacttgcagggttcaaagagaagctggccgccagtcaaggccagtgttgggtcgatgttggcttctacggaggtgtgatacctggcaatgcggacgagttgcttcctttggtagatgccggcgtgcgcggattcaaagggtttctgatagagtcgggtgttgaagaatttccagctatatcatcgaccgacattgaacttgccatgaggacgttgaacgggattccgacaacgctcatgttccatgccgagatgatcccccccatcactgattctataggtgatgctgtccagatttctgagccgccactggcacctcacggtgatctgaaaacatatcagacgttcttggaatctcgcccaccctcttttgagacctatgcaattgacgagattatctcgttatctcatcttgctactaaccttcaccttcacattgttcacttgtccgctactcaggccataccaattctcaagaaagcacgcaacgatggtgtcaacatcaccgcagagacctgcttccattatcttggattgtctgcggagggtgttgaggatggtgactgtcgatacaagtgttgccccccgatccgtgaacagtcgaaccaagacggactctgggacgagttgcaagcagtagactcgtgcatcaagactgtcgtgtcagaccattctccatgtacgcccgaactcaagctcttgcctccacacttgcaaacaatcgaagctacgtcaatgcaccattccgactctggtgtcgatatgagggccgatttggagctcgaagttaagcaaacaacagcctcttctcagggcgactttttcgccgcttggggtggtatttcatccgtgggccttggtttaccaattctccacacttcggctaagaagcgtgcggccgacggtagtaaatcggtcccgagtatcgtggacatggtgcgattatgctgtttagccacagccaagcaggtagggctatcgcatcggaagggagcactcaaagttggcatggatgccgacatttgcgtattcgacgacacggaagagtgggtattgcagtcgcacggaatgcactggaaaaatcgctgttcgccgtgggagggtcacaacttcacgggccgggtgaaggaaacctggttgcgcggtcgcaaagtttttgaacatggtggtacaaatggcggctttgtgagccatatgccgcttggtcaaccgatcactgagaaacgcgtagcttga

SEQ ID NO: 21308 - protein, 530 aa, Muscodor strobelii
  misc_feature: SGI Peptide ID NO. 567212
  misc_feature (69)..(464): Pfam Id: PF01979 Pfam Desc: Amidohydrolase family
  misc_feature (69)..(172): Pfam Id: PF01979 Pfam Desc: Amidohydrolase family
  misc_feature (365)..(464): Pfam Id: PF01979 Pfam Desc: Amidohydrolase family
  misc_feature (431)..(462): Pfam Id: PF07969 Pfam Desc: Amidohydrolase family
  misc_feature (21)..(528): NCBI GI: 46138839 Blast Desc: FG10934.1 [Gibberella zeae PH-1]
  misc_feature (10)..(529): NCBI GI: 85094693 Blast Desc: allantoinase [Neurospora crassa OR74A] gi|28921397|gb|EAA30704.1| allantoinase [Neurospora crassa OR74A]
  misc_feature (10)..(530): NCBI GI: 39969605 Blast Desc: MGG_10412 [Magnaporthe grisea 70-15] gi|145015118|gb|EDJ99686.1| MGG_10412 [Magnaporthe grisea 70-15]
  misc_feature (1)..(528): NCBI GI: 261354754 Blast Desc: allantoinase [Verticillium albo-atrum VaMs.102]
  misc_feature (5)..(529): NCBI GI: 156042538 Blast Desc: SS1G_11067 [Sclerotinia sclerotiorum 1980] gi|154695453|gb|EDN95191.1| SS1G_11067 [Sclerotinia sclerotiorum 1980]
  misc_feature (5)..(528): NCBI GI: 154304616 Blast Desc: BC1G_08047 [Botryotinia fuckeliana B05.10] gi|150853947|gb|EDN29139.1| BC1G_08047 [Botryotinia fuckeliana B05.10]
  misc_feature (9)..(528): NCBI GI: 212543101 Blast Desc: allantoinase Dal1, [Penicillium marneffei ATCC 18224] gi|210066612|gb|EEA20705.1| allantoinase Dal1, [Penicillium marneffei ATCC 18224]
  misc_feature (1)..(529): NCBI GI: 119498067 Blast Desc: allantoinase Dal1, [Neosartorya fischeri NRRL 181] gi|119413955|gb|EAW23894.1| allantoinase Dal1, [Neosartorya fischeri NRRL 181]
  misc_feature (9)..(528): NCBI GI: 242785661 Blast Desc: allantoinase Dal1, [Talaromyces stipitatus ATCC 10500] gi|218720788|gb|EED20207.1| allantoinase Dal1, [Talaromyces stipitatus ATCC 10500]
  misc_feature (1)..(529): NCBI GI: 121710738 Blast Desc: allantoinase Dal1, [Aspergillus clavatus NRRL 1] gi|119401135|gb|EAW11559.1| allantoinase Dal1, [Aspergillus clavatus NRRL 1]
  misc_feature (32)..(528): SWISSPROT Homolog: EC 3.5.2.5 Allantoinase
MTVPESPGALTVLVSTKAVLTLPDDTLLLTPATISVSSATGKIVAIVPVVLPKTSFPSNATYIHYGSKVLMPGLVDAHVHLNEPGRTEWEGFNTGTRAAASGGVTTVVDMPLNAIPPTTTLAGFKEKLAASQGQCWVDVGFYGGVIPGNADELLPLVDAGVRGFKGFLIESGVEEFPAISSTDIELAMRTLNGIPTTLMFHAEMIPPITDSIGDAVQISEPPLAPHGDLKTYQTFLESRPPSFETYAIDEIISLSHLATNLHLHIVHLSATQAIPILKKARNDGVNITAETCFHYLGLSAEGVEDGDCRYKCCPPIREQSNQDGLWDELQAVDSCIKTVVSDHSPCTPELKLLPPHLQTIEATSMHHSDSGVDMRADLELEVKQTTASSQGDFFAAWGGISSVGLGLPILHTSAKKRAADGSKSVPSIVDMVRLCCLATAKQVGLSHRKGALKVGMDADICVFDDTEEWVLQSHGMHWKNRCSPWEGHNFTGRVKETWLRGRKVFEHGGTNGGFVSHMPLGQPITEKRVA

SEQ ID NO: 21309 - DNA, 1723 bp, Muscodor strobelii
  misc_feature: SGI EST ID NO. CUFF.49953.0
  misc_feature: Variant of the nucleotide sequence at SEQ ID NO 21307
cgaccatatccgtgtcttcagctactggaaaaatagtagccattgttcctgtagtgcttcctaagacttcgtttccttcaaatgccacctatattcactatggctccaaagttttgatgccgggtttggttgacgcccatgtccatctcaatgagcctggtcgaactgagtgggagggtttcaacacaggtaccagagcggcagcatctgggggtgtaacgacggtagttgatatgccattgaatgctattccgcccaccacaacacttgcagggttcaaagagaagctggccgccagtcaaggccagtgttgggtcgatgttggcttctacggaggtgtgatacctggcaatgcggacgagttgcttcctttggtagatgccggcgtgcgcggattcaaagggtttctgatagagtcgggtgttgaagaatttccagctatatcatcgaccgacattgaacttgccatgaggacgttgaacgggattccgacaacgctcatgttccatgccgagatgatcccccccatcactgattctataggtgatgctgtccagatttctgagccgccactggcacctcacggtgatctgaaaacatatcagacgttcttggaatctcgcccaccctcttttgagacctatgcaattgacgagattatctcgttatctcatcttgctactaaccttcaccttcacattgttcacttgtccgctactcaggccataccaattctcaagaaagcacgcaacgatggtgtcaacatcaccgcagagacctgcttccattatcttggattgtctgcggagggtgttgaggatggtgactgtcgatacaagtgttgccccccgatccgtgaacagtcgaaccaagacggactctgggacgagttgcaagcagtagactcgtgcatcaagactgtcgtgtcagaccattctccatgtacgcccgaactcaagctcttgcctccacacttgcaaacaatcgaagctacgtcaatgcaccattccgactctggtgtcgatatgagggccgatttggagctcgaagttaagcaaacaacagcctcttctcagggcgactttttcgccgcttggggtggtatttcatccgtgggccttggtttaccaattctccacacttcggctaagaagcgtgcggccgacggtagtaaatcggtcccgagtatcgtggacatggtgcgattatgctgtttagccacagccaagcaggtagggctatcgcatcggaagggagcactcaaagttggcatggatgccgacatttgcgtattcgacgacacggaagagtgggtattgcagtcgcacggaatgcactggaaaaatcgctgttcgccgtgggagggtcacaacttcacgggccgggtgaaggaaacctggttgcgcggtcgcaaagtttttgaacatggtggtacaaatggcggctttgtgagccatatgccgcttggtcaaccgatcactgagaaacgcgtagcttgaaattactttgaatgccttcaactagtttttatatggtcaagtcgaagaattatgaggggttgtccagagcgacatggtccttgacgggtacagattggagaaggaggagaacctccggtcgcgtcattgtacataaaaagcacatctccatttcatagcacagctacgacgattaactagttaacaaataccggatgaatagcacctcaatagtgtacgggaat

SEQ ID NO: 21310 - DNA, 1644 bp, Muscodor strobelii
  misc_feature: SGI cDNA ID NO. 567213
  misc_feature: Encodes the peptide sequence at SEQ ID NO 21311
atgaagatgggactgaaggactgcgcagacaacctgatcggcgacgaccgcataaagggcatatcaggtggagagaagaggcgggtgagtattgcagttcagatccttactgatcctaaagtcctcctactcgatgaacccaccagtggactggatgctttcacagcaagcaacatcgtggaagtgctccaaggccttgcgagtgaaggcagaaccatcatcctaaccatccaccaagccaggtccgatcttttcaagagttttggcaacattctactccttgctaggggaggatcgcccgtctatagcggcgcggcgaaaaatatgctcgattattttcagaatctaggctaccattgccctcgaaatactaatcctgcggatttcgctctggatcttatcacaatcaatcttcaagaagagaatcaggagacggagagccgcgaaagggtcacaaaattgatcagttcttgggatatgatcgttcgagatgctcggactaatccctttcataccgcaatagacgaaaatgcagatgtaccagaagcggagaagccactacagccggaaaatggagctcatcgagatgggtttcatagcgccaaggtgacagaaattgatcaaatcggagcagaacgcgatacgagtgtcgcaggcaagggagaaacagatgtaatccctcaaaacacgttgccatccatgatagcgccgcgacagtctttccacaaagccaagttgtcaacaccggctgaacttggagcactcgcgcataagagagcaccgtttatgactgcctttccgattctcctacagcgtgccgtgatcaaccttcgtcgacagccgcccttggcacttgcgcgacttctccaggtcgtcggtctttctgtcgtgctcgcgcttttctttgcgccacttcgtcacaactactacagcattcagaatcgtattggattcgtacaggagatatgcgcattttactttgttggcatgttgcaaaatgtcgccatttatccagcagaaagagacgtgttctaccgcgaggatgatgattcagtgtatagtatcgaggcttttcttgccacgtatactctcttagaagtgccattcgaaatattcagttgcctcatttttggcatcttggctgacttcgcgattgggttgccgcacacacccgagctttattttgtttgcgtcttctgtgcctttggtatcgtatcgtgtggcgagagcctaggaattatgttcaacacgttgtttaaccatacagggttcgctgtgaacattatctcggtcttactctcagtcgcacaggtcattgctggtatcatcagtattgacatgccgcgcatttttcaaatattcaattatatcagtccaacgaagtacgctgtcgcagctctggcggaattcagtcttgatggcgtggagtttacatgtgatgacacgcacaagcttgatgacggcgagtgcgtcatttcgacgggcaggcaggtactagcattgtatgatctggatactcagggtgtgaggaacgtggtagctctcgctgggactgtaattgtataccgagttgttgcgtggttgctgctgagggtggtgcgaattaggtggaggggtcttgccgataagatgaagaggcattga

SEQ ID NO: 21311 - protein, 547 aa, Muscodor strobelii
  misc_feature: SGI Peptide ID NO. 567213
  misc_feature (264)..(472): Pfam Id: PF01061 Pfam Desc: ABC-2 type transporter
  misc_feature (2)..(97): Pfam Id: PF00005 Pfam Desc: ABC transporter
  misc_feature (1)..(538): NCBI GI: 39969601 Blast Desc: MGG_10410 [Magnaporthe grisea 70-15] gi|145015120|gb|EDJ99688.1| MGG_10410 [Magnaporthe grisea 70-15]
  misc_feature (1)..(546): NCBI GI: 46138841 Blast Desc: FG10935.1 [Gibberella zeae PH-1]
  misc_feature (1)..(539): NCBI GI: 256728869 Blast Desc: [Nectria haematococca mpVI 77-13-4]
  misc_feature (1)..(475): NCBI GI: 261354922 Blast Desc: ATP-dependent permease PDR10 [Verticillium albo-atrum VaMs.102]
  misc_feature (1)..(540): NCBI GI: 121705400 Blast Desc: ABC transporter, [Aspergillus clavatus NRRL 1] gi|119399109|gb|EAW09537.1| ABC transporter, [Aspergillus clavatus NRRL 1]
  misc_feature (1)..(534): NCBI GI: 226288005 Blast Desc: ATP-binding cassette sub-family G member 5 [Paracoccidioides brasiliensis Pb18]
  misc_feature (1)..(479): NCBI GI: 225679074 Blast Desc: ATP-binding cassette sub-family G member 5 [Paracoccidioides brasiliensis Pb03]
  misc_feature (1)..(540): NCBI GI: 119491995 Blast Desc: ABC transporter, [Neosartorya fischeri NRRL 181] gi|119411652|gb|EAW21595.1| ABC transporter, [Neosartorya fischeri NRRL 181]
  misc_feature (1)..(540): NCBI GI: 70999868 Blast Desc: ABC efflux transporter [Aspergillus fumigatus Af293] gi|66852288|gb|EAL92613.1| ABC efflux transporter, [Aspergillus fumigatus Af293]
  misc_feature (1)..(519): NCBI GI: 226281954 Blast Desc: ATP-binding cassette sub-family G member 5 [Paracoccidioides brasiliensis Pb01]
MKMGLKDCADNLIGDDRIKGISGGEKRRVSIAVQILTDPKVLLLDEPTSGLDAFTASNIVEVLQGLASEGRTIILTIHQARSDLFKSFGNILLLARGGSPVYSGAAKNMLDYFQNLGYHCPRNTNPADFALDLITINLQEENQETESRERVTKLISSWDMIVRDARTNPFHTAIDENADVPEAEKPLQPENGAHRDGFHSAKVTEIDQIGAERDTSVAGKGETDVIPQNTLPSMIAPRQSFHKAKLSTPAELGALAHKRAPFMTAFPILLQRAVINLRRQPPLALARLLQVVGLSVVLALFFAPLRHNYYSIQNRIGFVQEICAFYFVGMLQNVAIYPAERDVFYREDDDSVYSIEAFLATYTLLEVPFEIFSCLIFGILADFAIGLPHTPELYFVCVFCAFGIVSCGESLGIMFNTLFNHTGFAVNIISVLLSVAQVIAGIISIDMPRIFQIFNYISPTKYAVAALAEFSLDGVEFTCDDTHKLDDGECVISTGRQVLALYDLDTQGVRNVVALAGTVIVYRVVAWLLLRVVRIRWRGLADKMKRH

SEQ ID NO: 21312 - DNA, 1671 bp, Muscodor strobelii
  misc_feature: SGI cDNA ID NO. 567214
  misc_feature: Encodes the peptide sequence at SEQ ID NO 21313
atgagcaaaaagagtgaagcttattatgatctggggtcataccgtcgctcactcagcgccagcaatacggaggtaatggagtggttcaatcgtggtctcatttggagctatgcgttcaaccacgaagaagccgcgaagtgctttgagagagccattgagagagatgacaactgttgcatggcatattggggacttgcatacactcttggcccgaactacaataagccgtgggaattcttcgatgcggtcgagctcgaagctatagttcaacgaacccacggtgcggtgaaaaaggccaggtcttgcgcggcggcatcgaatgttacaccacttgagaaggcattggtagaagcactacaagccagatatccgcatgaacatgccgatgaaagcgactgctctatatggaaccaaggctatgcagacgcgatgcaaaaagtctacgaatgttttcccgatgaccttgacgttgctgcgttgtatgttgacgcgcttatgaatcttactccctggcagttatgggagctggagaagggacagcctgcctctggtgctcgcactctcgaagcaaaggtcattctcgagcgctctatggctctgccaggaggcgctcgtcatcccggccttctgcatctctatattcatcttatggaaatgtctccgacgccggaaacggcgttgcacgcagctaatgcactacgcgatcttgtcccagatgcaggacatctcagacacatgccaacacatatcgatatcctggtgggcgactaccagtcagctatcaaatccaatgagaaagcaattcttgcagacgaagccttcttcgctcgcgaggatcccctgaaattttataccctatatcgagctcacgattttcattttcgtatatatgcagcgatgtttgcgggacagtatactatcgcactggacacagtctctcgtctagagtcggcattgtctgcagagctcttatgtgttaagtcgccacctatggccgactggctagaaggatttctggctatgcgtgtgcatgtcttcattcgcttcggccgctggcaggatatccttgacctcgctattccaaatgataccacgttatacagcgtgacagcagcaatgattcactatgctaaaggagtggcgcttgctgcaatgggtaagattcaagatgcagaggaagaacgagcgatgttcatagaggcattcaaagccgttccggagtcgaggatgttgttcaacaacaaatgcgtcgacattctccaagttgcagagaagatgttagacggcgaattagagtacaggagagaaaattatgatgctgccttttcgtacctgcgcgaggcaaatcgtctaagctatgcgctaccgtatgacgaaccatggggctggatgcaaccgccaagtcatgctctcggtgccctactaatagaacggaggcaattttccgaggctattgatatatatgctgaggacctagggattggtggcgcgctaccccgagcactgcaacacccgaagaacgtatgggcacttcatggctatcatgagtgtctcataaagcttggtcagattgaagaagcggaagtaatcaagccgcagttagatgcggcgactggaaatgctgacattgttattgaatcttcgtgtttctgccgcaatcagacatcatga

SEQ ID NO: 21313 - protein, 556 aa, Muscodor strobelii
  misc_feature: SGI Peptide ID NO. 567214
  misc_feature (25)..(58): Pfam Id: PF00515 Pfam Desc: Tetratricopeptide repeat
  misc_feature (25)..(58): Pfam Id: PF07719 Pfam Desc: Tetratricopeptide repeat
  misc_feature (6)..(552): NCBI GI: 121716521 Blast Desc: TPR domain protein [Aspergillus clavatus NRRL 1] gi|119403989|gb|EAW14406.1| TPR domain protein [Aspergillus clavatus NRRL 1]
  misc_feature (2)..(556): NCBI GI: 169762846 Blast Desc: [Aspergillus oryzae RIB40] gi|83770351|dbj|BAE60484.1| protein product [Aspergillus oryzae]
  misc_feature (5)..(552): NCBI GI: 119481965 Blast Desc: TPR domain protein [Neosartorya fischeri NRRL 181] gi|119409165|gb|EAW19114.1| TPR domain protein [Neosartorya fischeri NRRL 181]
  misc_feature (3)..(552): NCBI GI: 71002406 Blast Desc: TPR domain protein [Aspergillus fumigatus Af293] gi|66853522|gb|EAL93846.1| TPR domain protein [Aspergillus fumigatus Af293] gi|159129939|gb|EDP55053.1| TPR domain protein
  misc_feature (7)..(555): NCBI GI: 240105154 Blast Desc: tetratricopeptide repeat domain containing protein [Coccidioides posadasii C735 delta SOWgp]
  misc_feature (8)..(556): NCBI GI: 256806674 Blast Desc: SvirD4_38279 [Streptomyces viridochromogenes DSM 40736]
  misc_feature (7)..(545): NCBI GI: 119194797 Blast Desc: CIMG_01773 [Coccidioides immitis RS]
  misc_feature (8)..(552): NCBI GI: 117164841 Blast Desc: conserved [Streptomyces ambofaciens ATCC 23877]
  misc_feature (8)..(552): NCBI GI: 29827347 Blast Desc: SAV_806 [Streptomyces avermitilis MA-4680] gi|29604446|dbj|BAC68516.1| [Streptomyces avermitilis MA-4680]
  misc_feature (2)..(555): NCBI GI: 212536885 Blast Desc: TPR domain protein [Penicillium marneffei ATCC 18224] gi|210068340|gb|EEA22431.1| TPR domain protein [Penicillium marneffei ATCC 18224]
MSKKSEAYYDLGSYRRSLSASNTEVMEWFNRGLIWSYAFNHEEAAKCFERAIERDDNCCMAYWGLAYTLGPNYNKPWEFFDAVELEAIVQRTHGAVKKARSCAAASNVTPLEKALVEALQARYPHEHADESDCSIWNQGYADAMQKVYECFPDDLDVAALYVDALMNLTPWQLWELEKGQPASGARTLEAKVILERSMALPGGARHPGLLHLYIHLMEMSPTPETALHAANALRDLVPDAGHLRHMPTHIDILVGDYQSAIKSNEKAILADEAFFAREDPLKFYTLYRAHDFHFRIYAAMFAGQYTIALDTVSRLESALSAELLCVKSPPMADWLEGFLAMRVHVFIRFGRWQDILDLAIPNDTTLYSVTAAMIHYAKGVALAAMGKIQDAEEERAMFIEAFKAVPESRMLFNNKCVDILQVAEKMLDGELEYRRENYDAAFSYLREANRLSYALPYDEPWGWMQPPSHALGALLIERRQFSEAIDIYAEDLGIGGALPRALQHPKNVWALHGYHECLIKLGQIEEAEVIKPQLDAATGNADIVIESSCFCRNQTS

SEQ ID NO: 21314 - DNA, 4103 bp, Muscodor strobelii
  misc_feature: SGI EST ID NO. CUFF.49977.0
  misc_feature: Variant of the nucleotide sequence at SEQ ID NO 21312
tatctcgtcacttcgctctggaacgatcggcaagaaagtctaatttccccgagaatgagcaaaaagagtgaagcttattatgatctggggtcataccgtcgctcactcagcgccagcaatacggaggtaatggagtggttcaatcgtggtctcatttggagctatgcgttcaaccacgaagaagccgcgaagtgctttgagagagccattgagagagatgacaactgttgcatggcatattggggacttgcatacactcttggcccgaactacaataagccgtgggaattcttcgatgcggtcgagctcgaagctatagttcaacgaacccacggtgcggtgaaaaaggccaggtcttgcgcggcggcatcgaatgttacaccacttgagaaggcattggtagaagcactacaagccagatatccgcatgaacatgccgatgaaagcgactgctctatatggaaccaaggctatgcagacgcgatgcaaaaagtctacgaatgttttcccgatgaccttgacgttgctgcgttgtatgttgacgcgcttatgaatcttactccctggcagttatgggagctggagaagggacagcctgcctctggtgctcgcactctcgaagcaaaggtcattctcgagcgctctatggctctgccaggaggcgctcgtcatcccggccttctgcatctctatattcatcttatggaaatgtctccgacgccggaaacggcgttgcacgcagctaatgcactacgcgatcttgtcccagatgcaggacatctcagacacatgccaacacatatcgatatcctggtgggcgactaccagtcagctatcaaatccaatgagaaagcaattcttgcagacgaagccttcttcgctcgcgaggatcccctgaaattttataccctatatcgagctcacgattttcattttcgtatatatgcagcgatgtttgcgggacagtatactatcgcactggacacagtctctcgtctagagtcggcattgtctgcagagctcttatgtgttaagtcgccacctatggccgactggctagaaggatttctggctatgcgtgtgcatgtcttcattcgcttcggccgctggcaggatatccttgacctcgctattccaaatgataccacgttatacagcgtgacagcagcaatgattcactatgctaaaggagtggcgcttgctgcaatgggtaagattcaagatgcagaggaagaacgagcgatgttcatagaggcattcaaagccgttccggagtcgaggatgttgttcaacaacaaatgcgtcgacattctccaagttgcagagaagatgttagacggcgaattagagtacaggagagaaaattatgatgctgccttttcgtacctgcgcgaggcaaatcgtctaagctatgcgctaccgtatgacgaaccatggggctggatgcaaccgccaagtcatgctctcggtgccctactaatagaacggaggcaattttccgaggctattgatatatatgctgaggacctagggattggtggcgcgctaccccgagcactgcaacacccgaagaacgtatgggcacttcatggctatcatgagtgtctcataaagcttggtcagattgaagaagcggaagtaatcaagccgcagttagatgcggcgactggaaatgctgacattgttattgaatcttcgtgtttctgccgcaatcagacatcatgagagaatcataaaggatgcagatggccgtataatcaagcaacagctacgcgcattgctaagcggtaattatctgcaaaacaaccttattatataggcttggctctatccggtcaagctcaaatgactctctctatgaacttttccagttcgttcagttactacctgttttattgttcaagaacacgagacacgcctgaggtcatatgaggaatataaacattttacatgagatgataaccttgacaaatcaatgcctcttcatcttatcggcaagacccctccacctaattcgcaccaccctcagcagcaaccacgcaacaactcggtatacaattacagtcccagcgagagctaccacgttcctcacaccctgagtatccagatcatacaatgctagtacctgcctgcccgtcgaaatgacgcactcgccgtcatcaagcttgtgcgtgtcatcacatgtaaactccacgccatcaagactgaattccgccagagctgcgacagcgtacttcgttggactgatataattgaatatttgaaaaatgcgcggcatgtcaatactgatgataccagcaatgacctgtgcgactgagagtaagaccgagataatgttcacagcgaaccctgtatggttaaacaacgtgttgaacataattcctaggctctcgccacacgatacgataccaaaggcacagaagacgcaaacaaaataaagctcgggtgtgtgcggcaacccaatcgcgaagtcagccaagatgccaaaaatgaggcaactgaatatttcgaatggcacttctaagagagtatacgtggcaagaaaagcctcgatactatacactgaatcatcatcctcgcggtagaacacgtctctttctgctggataaatggcgacattttgcaacctgactcaaagaaatagatcgtaccatcagctcaggctcaagttcttgattacttttcgtggtactcacatgccaacaaagtaaaatgcgcatatctcctgtacgaatccaatacgattctgaatgctgtagtagttgtgacgaagtggcgcaaagaaaagcgcgagcacgacagaaagaccgacgacctggagaagtcgcgcaagtgccaagggcggctgtcgacgaaggttgatcacggcacgctgtaggagaatcggaaaggcagtcataaacggtgctctcttatgcgcgagtgctccaagttcagccggtgttgacaacttggctttgtggaaagactgtcgcggcgctatcatggatggcaacgtgttttgagggattacatctgtttctcccttgcctgcgacactcgtatcgcgttctgctccgatttgatcaatttctgtcaccttggcgctatgaaacccatctcgatgagctccattttccggctgtagtggcttctccgcttctggtacatctgcattttcgtctattgcggtatgaaagggattagtccgagcatctcgaacgatcatatcccaagaactgatcaattttgtgaccctttcgcggctctccgtctcctgattctcttcttgaagattgattgtgataagatccagagcgaaatccgcaggattagtatttcgagggcaatggtagcctagattctgaaaataatcgagcatatttttcgccgcgccgctatagacgggcgatcctcccctagcaaggagtagaatgttgccaaaactcttgaaaagatcggacctggcttggtggatggttaggatgatggttctgccttcactcgcaaggccttggagcacttccacgatgttgcttgctgtgaaagcatccagtccactggtgggttcatcgagtaggaggactttaggatcagtaaggatctgaactgcaatactcacccgcctcttctctccacctgatatgccctttatgcggtcgtcgccgatcaggttgtctgcgcagtccttcagtcccatcttcatcctggttgccgggaaggtatcgcgttagttatttttcacgaattgaccctgtggagccgtgggttgcaaagatggatcaggtttcgatatttaaccgattagatcacttactgcaggggtgttagtacaatgtcttaggaatacaatcagaaaataagtcgcataggatctttctacacataccaagaccagttcggctctattcgttttttcttctttgctcatccaagaaggcaatcggagcccggccgcaaagcggagtgtctctcgaaccgtcaacgatggcaacagtgcctcatcatcttgacaaacataagacactacagaccggactacagaactggaaggcgcagcatcattaaagaaaagttgcccagttcttcggtacttgtctcgaaaagtgtcatttagacgttgt

SEQ ID NO: 21315 - DNA, 915 bp, Muscodor strobelii
  misc_feature: SGI cDNA ID NO. 567215
  misc_feature: Reduced expression when VOC is produced
  misc_feature: Encodes the peptide sequence at SEQ ID NO 21316
atgcgcgctttatcccgcggccgcgagctggaactgactaggcttcggaaatctcaagcccgtcgtcgctcaccgccaccctcccgcgatggcgatgacgctcacgcggctgttggcttgtccagtctcccacttgaattacatcaactcatcatcgcctacttagatattgacagtctgtgtcttgctgtgcctggactccacaatcttgtcacagacagcaacttggatgatggttcgtggcggtccgtatgcttcagatgctggggccaacgtattactcgggattaccatctcaatccgtggccagtcattcatctcgccaatggtagcgaaggttatatatgtcacttttgcaattggcctgtcgtaaacacacagcctggcagtggcgttaaccgcatccatgcagcctgccagtcgaggaggcgtaccgttgtcctggtgtggatgttcatggcatttcttcagttcggcctcggcgttctctgcgctgtcttgggatggactaggtatagacacaacgacaaaatcctcatacccgcaagcatcgattttgctctagcaatgttctctgttgctgccttcatattccggatctataccatcgatgagcgtcgttatgcccgggcgttgtttcttgaacttttactcactatattacggattcctccggtcgcgtattccgcacgttcagctgtcgtcatcagattgaatgccggcctacttccgaggttcgggtttggagtcttcgtgataaatcttatctttcgtgtactggacttcgctggacacgctctattaaatgccggatacgacccgagaaggtttctgcaagtcggcttgacgaggaggaagaagctcctctatggattttgtacatttttggtatattttgcatatatcccattttga

SEQ ID NO: 21316 - protein, 304 aa, Muscodor strobelii
  misc_feature: SGI Peptide ID NO. 567215
  misc_feature (105)..(188): NCBI GI: 145603178 Blast Desc: MGG_06215 [Magnaporthe grisea 70-15] gi|145011466|gb|EDJ96122.1| MGG_06215 [Magnaporthe grisea 70-15]
  misc_feature (48)..(303): NCBI GI: 171683806 Blast Desc: protein product [Podospora anserina] gi|170941863|emb|CAP67516.1| protein product [Podospora anserina]
  misc_feature (94)..(301): NCBI GI: 261357144 Blast Desc: conserved [Verticillium albo-atrum VaMs.102]
  misc_feature: Useful for introducing or modulating the production of volatile compounds
MRALSRGRELELTRLRKSQARRRSPPPSRDGDDAHAAVGLSSLPLELHQLIIAYLDIDSLCLAVPGLHNLVTDSNLDDGSWRSVCFRCWGQRITRDYHLNPWPVIHLANGSEGYICHFCNWPVVNTQPGSGVNRIHAACQSRRRTVVLVWMFMAFLQFGLGVLCAVLGWTRYRHNDKILIPASIDFALAMFSVAAFIFRIYTIDERRYARALFLELLLTILRIPPVAYSARSAVVIRLNAGLLPRFGFGVFVINLIFRVLDFAGHALLNAGYDPRRFLQVGLTRRKKLLYGFCTFLVYFAYIPF

SEQ ID NO: 21317 - DNA, 1974 bp, Muscodor strobelii
  misc_feature: SGI EST ID NO. CUFF.50150.0
  misc_feature: Variant of the nucleotide sequence at SEQ ID NO 21315
cggaacatcggcacatgcgacactgtctaggctcgaatcgcgaaagtcgttgcaagtccaaatcggacccctacagccgtgcgatgcatcactcactgccgtgtatccgtttgacggcgggcaatgtctgatgtaaactgcagatgctcgaattcttctcaccctcatatccagtctcatcggtctcggtctcatcctcaatctcgtgctcatggaccttccattaatccctcgctccgcgttgtctctcacccaagagagcaatcctgctcctgagccctggacgtcttcgtgaatgtcactgttgccactctcctcgacctggcgtcgtcttcaccatgcgcgctttatcccgcggccgcgagctggaactgactaggcttcggaaatctcaagcccgtcgtcgctcaccgccaccctcccgcgatggcgatgacgctcacgcggctgttggcttgtccagtctcccacttgaattacatcaactcatcatcgcctacttagatattgacagtctggtagccttacggcgcacatgcagactttattatcacgtaattaacatcgatctcgtccgccaacttttcacacgcaatggccggccaagcgtgtctctaacagcctgttgcaaccagtgtcttgctgtgcctggactccacaatcttgtcacagacagcaacttggatgatggttcgtggcggtccgtatgcttcagatgctggggccaacgtattactcgggattaccatctcaatccgtggccagtcattcatctcgccaatggtagcgaaggttatatatgtcacttttgcaattggcctgtcgtaaacacacagcctggcagtggcgttaaccgcatccatgcagcctgccagtcgaggaggcgtaccgttgtcctggtgtggatgttcatggcatttcttcagttcggcctcggcgttctctgcgctgtcttgggatggactaggtatagacacaacgacaaaatcctcatacccgcaagcatcgattttgctctagcaatgttctctgttgctgccttcatattccggatctataccatcgatgagcgtcgttatgcccgggcgttgtttcttgaacttttactcactatattacggattcctccggtcgcgtattccgcacgttcagctgtcgtcatcagattgaatgccggcctacttccgaggttcgggtttggagtcttcgtgataaatcttatctttcgtgtactggacttcgctggacacgctctattaaatgccggatacgacccgagaaggtttctgcaagtcggcttgacgaggaggaagaagctcctctatggattttgtacatttttggtatattttgcatatatcccattttgaggcgttgtgttgcgcatcgccatcttttaacactcaatttacgcatttcaagcgagagaaagcatcagcgtcgttatagcagagggtgttcggcggtcaaatgagagggctacgtcaggccgataactccatcacaactgcgcaggacaggcggtcaaagatgtgtatgcatcagggctgtacattgatctaatcacgatttgccgaataatatgatcctgccttgcaaaggagactacctcggcggtggatatacaacgcagaggtcggtcttggaaaccaaaccaaacgaatgacggcccaatattacgtgacgagatacgatcaatagctatgacgacaaataggtagcatgctgggggtgtatatagcctggtatatatcagactatactgccgataataatatttgactcccttcaattactgcggcccgtagctgtgttcacaggttcgatggaagcttgtgctatccatcttgtctataataccgttgcagtcaatcgttgagaatcaagactgcattcaaatcacaatgtagccactgcgaacagttgtataaaatgctcagaaactggccgacttgtcagcgtcccggaatacat

SEQ ID NO: 21318 - DNA, 1620 bp, Muscodor strobelii
  misc_feature: SGI cDNA ID NO. 567216
  misc_feature: Encodes the peptide sequence at SEQ ID NO 21319
atgacgactttatctctagccttgttccatgctgctcctcgtatcctaggagtagtgtcgatactcgcattgaccgtaacgttttgcaatttactccgtcgtttattctcggatgcttcactacctcacaatttgccctgggtcggtgtcgaagaacactcaagccctttgggtaaagccaaggctaatctcctgagcttcttcaacctcagagatctgttggacgaaggttacacgaattattcgaaaaaagaccagacatacgtgctcccatactacataaatggaccgcaggtcatcttgcctccctctcagattccgtggttgatagagcagcccgacgatgtcctcagtcaagagcatgtcaaccgccagtttctccaggcagagtatgcattcatgcatgcaaatctagtcaaagatccggtgcatcccgacataatccaccatgagcttaccaagaagattaacaacttcgccgatgacattgtggaagagataaatgctagtcttgaagacaactggggcacagacaccgaagaatggcgggaggttaaagtatacgataccatgctcgacgtggtcgctcggctttcggtgcgagtactcatgggtttgccgctctgtcgcaacaaggtttttcttagtatctgcagcaacttcatccgacaggtcgccctggccgcagccgcaataagcctcttccccgaatttcttaagccgctcgttggacccgtctttacgctgtacgaccgtatcctgtatatgcgtagtaggggctttctaatgccgattatccgtgagcggctccaacgtctgagagacccggatattgcgaaaacacatgaagactcgacaccaccaaatgactacgtgcaatggtccatcgaccacgctcttgccaaatcagtcatgaacccggttgagctcgatccacgagtcatagccagtagattctccgttctcgcattcgcagcgatccagtcctcggtcatcacattgaccaacacgttatttgatctcgccgcctcgccaaactgcgcttcctggctcgcatccatgcgcgaagaggtcatccgagagaccgaagactcggtccaggtagccacaggcacaggccagctcggctggaccagaaacatcttgtccaaaatgacgcacgtcgattctgcgttgcgtgaaagtttgcgactaaacgggttcattgagcgcggcatcatgaagatggttgtagcacccgagggcgtgacattgccagatggttcccacattccatgtggaacgaaggtcggtatctccggctatagcgtgcatcacgacacagcgaattaccccaacgctatgcaatatgacgcgtttcgctttgcccgcgacgagagtgaggacaagaagcctcaagggctcataaacactagtgagaagtttctgggttttagtcatggttctcatgcttgtcccggtcgattttttgcaacaaatcagctcaagatcgcacttggacacattgcgctgttgtatgaaatcgaaccgattcctgagaggcccatgaataaatggttctttggccacattgcgccgcctctgacggagacgcttagagtccgacgtaggaagatctaa

SEQ ID NO: 21319 - protein, 539 aa, Muscodor strobelii
  misc_feature: SGI Peptide ID NO. 567216
  misc_feature (56)..(532): Pfam Id: PF00067 Pfam Desc: Cytochrome P450
  misc_feature (382)..(532): Pfam Id: PF00067 Pfam Desc: Cytochrome P450
  misc_feature (14)..(538): NCBI GI: 39974563 Blast Desc: MGG_00572 [Magnaporthe grisea 70-15] gi|145018527|gb|EDK02806.1| MGG_00572 [Magnaporthe grisea 70-15]
  misc_feature (40)..(539): NCBI GI: 171682280 Blast Desc: protein product [Podospora anserina] gi|170941099|emb|CAP66749.1| protein product [Podospora anserina]
  misc_feature (17)..(538): NCBI GI: 85090779 Blast Desc: NCU05967 [Neurospora crassa OR74A] gi|28919954|gb|EAA29345.1| conserved [Neurospora crassa OR74A]
  misc_feature (24)..(536): NCBI GI: 46139535 Blast Desc: FG11282.1 [Gibberella zeae PH-1]
  misc_feature (40)..(538): NCBI GI: 261359324 Blast Desc: cytochrome P450 [Verticillium albo-atrum VaMs.102]
  misc_feature (44)..(538): NCBI GI: 145609640 Blast Desc: MGG_03104 [Magnaporthe grisea 70-15] gi|149210871|ref|XP_001522810.1| MGCH7_ch7g908 [Magnaporthe grisea 70-15] gi|86196863|gb|EAQ71501.1| MGCH7_ch7g908 grisea
  misc_feature (74)..(538): NCBI GI: 116202391 Blast Desc: CHGG_09080 [Chaetomium globosum CBS 148.51] gi|88177598|gb|EAQ85066.1| CHGG_09080 [Chaetomium globosum CBS 148.51]
  misc_feature (33)..(537): NCBI GI: 242811722 Blast Desc: cytochrome P450, [Talaromyces stipitatus ATCC 10500] gi|218714147|gb|EED13570.1| cytochrome P450, [Talaromyces stipitatus ATCC 10500]
  misc_feature (60)..(537): NCBI GI: 212541759 Blast Desc: cytochrome P450, [Penicillium marneffei ATCC 18224] gi|210065941|gb|EEA20034.1| cytochrome P450, [Penicillium marneffei ATCC 18224]
  misc_feature (7)..(538): NCBI GI: 169615519 Blast Desc: SNOG_10917 [Phaeosphaeria nodorum SN15] gi|111060296|gb|EAT81416.1| SNOG_10917 [Phaeosphaeria nodorum SN15]
  misc_feature (147)..(539): SWISSPROT Homolog: EC 1.14.13.78 Ent-kaurene oxidase
MTTLSLALFHAAPRILGVVSILALTVTFCNLLRRLFSDASLPHNLPWVGVEEHSSPLGKAKANLLSFFNLRDLLDEGYTNYSKKDQTYVLPYYINGPQVILPPSQIPWLIEQPDDVLSQEHVNRQFLQAEYAFMHANLVKDPVHPDIIHHELTKKINNFADDIVEEINASLEDNWGTDTEEWREVKVYDTMLDVVARLSVRVLMGLPLCRNKVFLSICSNFIRQVALAAAAISLFPEFLKPLVGPVFTLYDRILYMRSRGFLMPIIRERLQRLRDPDIAKTHEDSTPPNDYVQWSIDHALAKSVMNPVELDPRVIASRFSVLAFAAIQSSVITLTNTLFDLAASPNCASWLASMREEVIRETEDSVQVATGTGQLGWTRNILSKMTHVDSALRESLRLNGFIERGIMKMVVAPEGVTLPDGSHIPCGTKVGISGYSVHHDTANYPNAMQYDAFRFARDESEDKKPQGLINTSEKFLGFSHGSHACPGRFFATNQLKIALGHIALLYEIEPIPERPMNKWFFGHIAPPLTETLRVRRRKI

SEQ ID NO: 21320 - DNA, 3832 bp, Muscodor strobelii
  misc_feature: SGI EST ID NO. CUFF.50151.1
  misc_feature: Variant of the nucleotide sequence at SEQ ID NO 21318
gagcttaccaagaagattaacaacttcgccgatgacattgtggaagagataaatgctagtcttgaagacaactggggcacagacaccgaagaatggcgggaggttaaagtatacgataccatgctcgacgtggtcgctcggctttcggtgcgagtactcatgggtttgccgctctgtcgcaacaaggtttttcttagtatctgcagcaacttcatccgacaggtcgccctggccgcagccgcaataagcctcttccccgaatttcttaagccgtaagttacacgaactttcgagtctagatgcggtaccgaaaccctggattcaaggggtctatcgtgtcacgcgacaatatgatactaacactcgagggatgcaggctcgttggacccgtctttacgctgtacgaccgtatcctgtatatgcgtagtaggggctttctaatgccgattatccgtgagcggctccaacgtctgagagacccggatattgcgaaaacacatgaagactcgacaccaccagtaagatgctgctttcgttagtgttacagacaacttactatataagaaatcttcctaacgaagagcatagaatgactacgtgcaatggtccatcgaccacgctcttgccaaatcagtcatgaacccggttgagctcgatccacgagtcatagccagtagattctccgttctcgcattcgcagcgatccagtcctcggtcatcacattgaccaacacgttatttgatctcgccgcctcgccaaactgcgcttcctggctcgcatccatgcgcgaagaggtcatccgagagaccgaagactcggtccaggtagccacaggcacaggccagctcggctggaccagaaacatcttgtccaaaatgacgcacgtcgattctgcgttgcgtgaaagtttgcgactaaacgggttcattgagcgcggcatcatgaagatggttgtagcacccgagggcgtgacattgccagatggttcccacattccatgtggaacgaaggtcggtatctccggctatagcgtgcatcacgacacagcgaattaccccaacgctatgcaatatgacgcgtttcgctttgcccgcgacgagagtgaggacaagaagcctcaagggctcataaacactagtgagaagtttctgggttttagtcatggttctcatgcttgtcccggtcgattttttgcaacaaatcagctcaagatcgcacttggacacattgcgctgttgtatgaaatcgaaccgattcctgagaggcccatgaataaatggttctttggccacattgcgccgcctctgacggagacgcttagagtccgacgtaggaagatctaatcgcaagttgaggatgtatctaatcatttcgaggaaaattcctagtataggtgtttgggatacacatagactgacggtggtcacaccggtgagctttctcgcctggggtccatcgaggaattagcgtttccatccgtttcaaaagaatacaaataatctttagcttgtctatattaaagtcggcgtctctatcgcaagttattgcacgaaaacactccggttggacgctgacctgacgacatgcgtgcctctcctgcgcctcttgtgcctactttggcgatagagcaaagcctcatatcctgatgaagggcaccaaaagcgttgtactcggcattctcctcttcttggcacttataagctcatgtctaaagaagcagtcatgtattccgggacgctgacaagtcggccagtttctgagcattttatacaactgttcgcagtggctacattgtgatttgaatgcagtcttgattctcaacgattgactgcaacggtattatagacaagatggatagcacaagcttccatcgaacctgtgaacacagctacgggccgcagtaattgaagggagtcaaatattattatcggcagtatagtctgatatataccaggctatatacacccccagcatgctacctatttgtcgtcatagctattgatcgtatctcgtcacgtaatattgggccgtcattcgtttggtttggtttccaagaccgacctctgcgttgtatatccaccgccgaggtagtctcctttgcaaggcaggatcatattattcggcaaatcgtgattagatcaatgtacagccctgatgcatacacatctttgaccgcctgtcctgcgcagttgtgatggagttatcggcctgacgtagccctctcatttgaccgccgaacaccctctgctataacgacgctgatgctttctctcgcttgaaatgcgtaaattgagtgttaaaagatggcgatgcgcaacacaacgcctcaaaatgggatatatgcaaaatataccaaaaatgtacaaaatccatagaggagcttcttcctcctcgtcaagccgacttgcagaaaccttctcgggtcgtatccggcatttaatagagcgtgtccagcgaagtccagtacacgaaagatactatcaggcaaatgagtatgctgagatgacgaaaaccgtatacacagagggagtctctgtcggacccataactcacagatttatcacgaagactccaaacccgaacctcggaagtaggccggcattcaatctgatgacgacagctgaacgtgcggaatacgcgaccggaggaatccgtaatatagtgagtaaaagttcaagaaacaacgcccgggcataacgacgctcatcgatggtatagatccggaatatgaaggcagcaacagagaacattgctagagcaaaatcgatctatatatagtacgttagaaaagaagagcacagttatgaagattgaagatcatgcgtacgcttgcgggtatgaggattttgtcgttgtgtctatacctagtccatcccaagacagcgcagagaacgccgaggccgaactgaagaaatgccatgaacatccacaccaggacaacggtacgcctcctcgactggcaggctgcatggatgcggttaacgccactgccaggctgtgtgtttacgacaggccaattgcaaaagtgacatatataaccttcgctaccattggcgagatgaatgactggccacggattgagatggtaatcccgagtaatacgttggccccagcatctgaagcatacggaccgccacgaaccatcatccaagttgctgtctgtgacaagattgtggagtccaggcacagcaagacactggttgcaacaggctgttagagacacgcttggccggccattgcgtgtgaaaagttggcggacgagatcgatgttaattacgtgataataaagtctgcatgtgcgccgtaaggctaccagactgtcaatatctaagtaggcgatgatgagttgatgtaattcaagtgggagactggacaagccaacagccgcgtgagcgtcatcgccatcgcgggagggtggcggtgagcgacgacgggcttgagatttccgaagcctagtcagttccagctcgcggccgcgggataaagcgcgcatggtgaagacgacgccaggtcgaggagagtggcaacagtgacattcacgaagacgtccagggctcaggagcaggattgctctcttgggtgagagacaacgcggagcgagggattaatggaaggtccatgagcacgagattgaggatgagaccgagaccgatgagactggatatgagggtgagaagaattcgagcatctgcagtttacatcagacattgcccgccgtcaaacggatacacggcagtgagtgatgcatcgcacggctgtaggggtccgatttggacttgcaacgactttcgcgattcgagcctagacagtgtcgcatgtgccgatgttccg

SEQ ID NO: 21321 - DNA, 435 bp, Muscodor strobelii
  misc_feature: SGI cDNA ID NO. 567217
  misc_feature: Encodes the peptide sequence at SEQ ID NO 21322
atgctattctcattcatcctctcattagcattgctaaccccattaactacggcggagcccggactgctcgacctcctctcacacccaacgaaaacagcaagcgtagccggcgcattgcagacgctcttaggaaacataggaaacttccaaccgcccgccctcctatggacaccgcacccctccccagagtgcgccatagcgaagggcgggaacggaggccaactgcagtgctgccgcgcgaccgtggcgggcgatcaaccgctcgttgtttttcttgcggagatctatgggtataatttgaatcctaatgatgtcaatgggcttgtttgtgatcaacaacttgagaattgtcctggtgttagggtttgttgtgaggtcactgctttgaatcctctgttgtcgttgtactgcgcagattataatccttctggttga

SEQ ID NO: 21322 - protein, 144 aa, Muscodor strobelii
  misc_feature: SGI Peptide ID NO. 567217
MLFSFILSLALLTPLTTAEPGLLDLLSHPTKTASVAGALQTLLGNIGNFQPPALLWTPHPSPECAIAKGGNGGQLQCCRATVAGDQPLVVFLAEIYGYNLNPNDVNGLVCDQQLENCPGVRVCCEVTALNPLLSLYCADYNPSG

SEQ ID NO: 21323 - DNA, 2135 bp, Muscodor strobelii
  misc_feature: SGI EST ID NO. CUFF.50080.0
  misc_feature: Variant of the nucleotide sequence at SEQ ID NO 21321
ggtgatcaacaacttgagaattgtcctggtgttagggtttgttgtgaggtcactgctttgaatcctctgttgtcgttgtactgcgcagattataatccttctggttgaatccagagaagcatatatctgtttcgacggaatttgctttgtctttagatgctgtatctcggagtccaaggttcaactgaatagcgttcatctacagatgatagagttctcacttcggaatacagcgatgtgacaaaggcattggtagagcaggaccatggcccgggattcatgtttacatgttcgggattaaggtttcttttggactatatagttattgagttggtagttgctttatactgcaaaaagctgtccaatcattcttgtcgccctcgtttggttatacattttgcttgcattgatgcgatgcgactctgcggtggtcctctatgcgcgcttatatgtacattgggccacccactcacatcctcctagtctaatacttctatgatgcagtagttttacagtattcatgttgtacaagttttaataattacttttggcgttttagcgtcttcatggccatctcgatgaggccgtcttttgcttcgctatcggggaatgtgtcgagtgcggcgattgccctctcagagtagtcttcggctaacgcgcgtgtctgttcaatcccgtcgctttcaatgacaatttgtcgtgcctattcggtgttaatcgggtgatactcggtgcgtcaagtgctcgggaatatgggacttaccctctgaacatcaccctcctgttcgaatttcctgcccaccaaagcgcccaattcaggatttgtcttccaggcgaataacagtggtgctgttgctaatcccaactcaaggtcggcccccgcgggtttgccgagatctttcccagactttgtgtaatccaacatgtcatccaccaactgaaacgccagtccaatattccggccatacgaatatgcagcgtcgaccgtcgtggcgtcagcgcgaccaagtagtgcagtcgcccgacacgactttgatatcaggctcgcggtcttgagataagttttctgcaggtaatagttgaagctctcttctgagtatttggggttccgttcatctcgcgccgtgttcttcagctgcataaactcgccctcgacgagattggcgataaccgtggccagcaattcgatgacctcggcgtttcgtagtcgcgctaatgagactgaagctcggccgagcaagaaatcacccgccaacacggccatcttattcccgaactcgtaattcgcggaaggggagcctcggcgggagacagaatgatcaacaacatcgtcatggaggagagaagctgtgtgaatcagctctgtgatctcggcaagtcggcgctgggaaggaaggatatcgctatttgtcgacccaggctccgacgagtagtcggacaggggagaggaggggttgttgtcggttagtatgtcgagaggagatatggaggtgttgatggtgtcgtgtgtcgaggccggggcaaactcgttcttgggacagagggctgttgcacgagacatgaggagcactattagtggtcgtacgtgtttgccttcggcctgggtatagtatttggcgactcggtctagtgaaggatgacctgatcctaggagtttcctgatgtttccagtcaagaacttcatttccttcgctacggtccgcagagggtcgatatgcatatcgcccttattgcgtgagacagcattggtgacgatgttggatgccaccgaaacggcagcggcccacgcggaggatcgttgtggcgtgttgtggtaatgcctcctcctcagctcaagtgacgaggcggcccggcaatctggacatcctgagaacagagcttggcgaccgatggcgcgggaactgcgcaagactgaagcagcggttcgaagctggagatcggccggcattttgacctcggaatggtcgcaaaagccccaattggcttggtataaagcctaagttgttgagtatatcatacgtgaatgtgctgaggttgaactcgaagattttgatcgggcgttgagttgaatgtcttggcgaaagaagggttgcgacaataacagtcgcttgttcacagctccgggtgacgccgac

SEQ ID NO: 21324 - DNA, 1347 bp, Muscodor strobelii
  misc_feature: SGI cDNA ID NO. 567218
  misc_feature: Reduced expression when VOC is produced
  misc_feature: Encodes the peptide sequence at SEQ ID NO 21325
atgccggccgatctccagcttcgaaccgctgcttcagtcttgcgcagttcccgcgccatcggtcgccaagctctgttctcaggatgtccagattgccgggccgcctcgtcacttgagctgaggaggaggcattaccacaacacgccacaacgatcctccgcgtgggccgctgccgtttcggtggcatccaacatcgtcaccaatgctgtctcacgcaataagggcgatatgcatatcgaccctctgcggaccgtagcgaaggaaatgaagttcttgactggaaacatcaggaaactcctaggatcaggtcatccttcactagaccgagtcgccaaatactatacccaggccgaaggcaaacacgtacgaccactaatagtgctcctcatgtctcgtgcaacagccctctgtcccaagaacgagtttgccccggcctcgacacacgacaccatcaacacctccatatctcctctcgacatactaaccgacaacaacccctcctctcccctgtccgactactcgtcggagcctgggtcgacaaatagcgatatccttccttcccagcgccgacttgccgagatcacagagctgattcacacagcttctctcctccatgacgatgttgttgatcattctgtctcccgccgaggctccccttccgcgaattacgagttcgggaataagatggccgtgttggcgggtgatttcttgctcggccgagcttcagtctcattagcgcgactacgaaacgccgaggtcatcgaattgctggccacggttatcgccaatctcgtcgagggcgagtttatgcagctgaagaacacggcgcgagatgaacggaaccccaaatactcagaagagagcttcaactattacctgcagaaaacttatctcaagaccgcgagcctgatatcaaagtcgtgtcgggcgactgcactacttggtcgcgctgacgccacgacggtcgacgctgcatattcgtatggccggaatattggactggcgtttcagttggtggatgacatgttggattacacaaagtctgggaaagatctcggcaaacccgcgggggccgaccttgagttgggattagcaacagcaccactgttattcgcctggaagacaaatcctgaattgggcgctttggtgggcaggaaattcgaacaggagggtgatgttcagagggcacgacaaattgtcattgaaagcgacgggattgaacagacacgcgcgttagccgaagactactctgagagggcaatcgccgcactcgacacattccccgatagcgaagcaaaagacggcctcatcgagatggccatgaagacgctaaaacgccaaaagtaa

SEQ ID NO: 21325 - protein, 448 aa, Muscodor strobelii
  misc_feature: SGI Peptide ID NO. 567218
  misc_feature (166)..(414): Pfam Id: PF00348 Pfam Desc: Polyprenyl synthetase
  misc_feature (189)..(414): Pfam Id: PF00348 Pfam Desc: Polyprenyl synthetase
  misc_feature (5)..(448): NCBI GI: 261354752 Blast Desc: decaprenyl-diphosphate synthase subunit 1 [Verticillium albo-atrum VaMs.102]
  misc_feature (29)..(448): NCBI GI: 256728867 Blast Desc: [Nectria haematococca mpVI 77-13-4]
  misc_feature (46)..(448): NCBI GI: 46138837 Blast Desc: FG10933.1 [Gibberella zeae PH-1]
  misc_feature (5)..(448): NCBI GI: 85094730 Blast Desc: decaprenyl-diphosphate synthase subunit 1 [Neurospora crassa OR74A] gi|60389720|sp|Q7S565.1|COQ1_NEUCR RecName: Full= hexaprenyl pyrophosphate synthetase, mitochondrial; Short=HPS; 1
  misc_feature (23)..(448): NCBI GI: 171679677 Blast Desc: protein product [Podospora anserina] gi|170939464|emb|CAP64692.1| protein product [Podospora anserina]
  misc_feature (5)..(448): NCBI GI: 116203433 Blast Desc: conserved [Chaetomium globosum CBS 148.51] gi|88175728|gb|EAQ83196.1| conserved [Chaetomium globosum CBS 148.51]
  misc_feature (89)..(448): NCBI GI: 145608148 Blast Desc: conserved [Magnaporthe grisea 70-15] gi|145015645|gb|EDK00135.1| conserved [Magnaporthe grisea 70-15]
  misc_feature (9)..(448): NCBI GI: 71000625 Blast Desc: hexaprenyl pyrophosphate synthetase Coq1 [Aspergillus fumigatus Af293] gi|66852631|gb|EAL92956.1| hexaprenyl pyrophosphate synthetase Coq1, [Aspergillus fumigatus Af293]
  misc_feature (13)..(448): NCBI GI: 119493298 Blast Desc: hexaprenyl pyrophosphate synthetase Coq1, [Neosartorya fischeri NRRL 181] gi|119411999|gb|EAW21942.1| hexaprenyl pyrophosphate synthetase Coq1, [Neosartorya fischeri NRRL 181]
  misc_feature (43)..(448): NCBI GI: 212544820 Blast Desc: hexaprenyl pyrophosphate synthetase Coq1, [Penicillium marneffei ATCC 18224] gi|210065533|gb|EEA19627.1| hexaprenyl pyrophosphate synthetase Coq1, [Penicillium marneffei ATCC 18224]
  misc_feature (185)..(446): SWISSPROT Homolog: EC 2.5.1.30 Trans-hexaprenyltranstransferase
  misc_feature: Useful for introducing or modulating the production of volatile compounds
MPADLQLRTAASVLRSSRAIGRQALFSGCPDCRAASSLELRRRHYHNTPQRSSAWAAAVSVASNIVTNAVSRNKGDMHIDPLRTVAKEMKFLTGNIRKLLGSGHPSLDRVAKYYTQAEGKHVRPLIVLLMSRATALCPKNEFAPASTHDTINTSISPLDILTDNNPSSPLSDYSSEPGSTNSDILPSQRRLAEITELIHTASLLHDDVVDHSVSRRGSPSANYEFGNKMAVLAGDFLLGRASVSLARLRNAEVIELLATVIANLVEGEFMQLKNTARDERNPKYSEESFNYYLQKTYLKTASLISKSCRATALLGRADATTVDAAYSYGRNIGLAFQLVDDMLDYTKSGKDLGKPAGADLELGLATAPLLFAWKTNPELGALVGRKFEQEGDVQRARQIVIESDGIEQTRALAEDYSERAIAALDTFPDSEAKDGLIEMAMKTLKRQK

SEQ ID NO: 21326 - DNA, 1951 bp, Muscodor strobelii
  misc_feature: SGI EST ID NO. CUFF.50081.1
  misc_feature: Variant of the nucleotide sequence at SEQ ID NO 21324
cgtcggcgtcacccggagctgtgaacaagcgactgttattgtcgcaacccttctttcgccaagacattcaactcaacgcccgatcaaaatcttcgagttcaacctcagcacattcacgtatgatatactcaacaacttaggctttataccaagccaattggggcttttgcgaccattccgaggtcaaaatgccggccgatctccagcttcgaaccgctgcttcagtcttgcgcagttcccgcgccatcggtcgccaagctctgttctcaggatgtccagattgccgggccgcctcgtcacttgagctgaggaggaggcattaccacaacacgccacaacgatcctccgcgtgggccgctgccgtttcggtggcatccaacatcgtcaccaatgctgtctcacgcaataagggcgatatgcatatcgaccctctgcggaccgtagcgaaggaaatgaagttcttgactggaaacatcaggaaactcctaggatcaggtcatccttcactagaccgagtcgccaaatactatacccaggccgaaggcaaacacgtacgaccactaatagtgctcctcatgtctcgtgcaacagccctctgtcccaagaacgagtttgccccggcctcgacacacgacaccatcaacacctccatatctcctctcgacatactaaccgacaacaacccctcctctcccctgtccgactactcgtcggagcctgggtcgacaaatagcgatatccttccttcccagcgccgacttgccgagatcacagagctgattcacacagcttctctcctccatgacgatgttgttgatcattctgtctcccgccgaggctccccttccgcgaattacgagttcgggaataagatggccgtgttggcgggtgatttcttgctcggccgagcttcagtctcattagcgcgactacgaaacgccgaggtcatcgaattgctggccacggttatcgccaatctcgtcgagggcgagtttatgcagctgaagaacacggcgcgagatgaacggaaccccaaatactcagaagagagcttcaactattacctgcagaaaacttatctcaagaccgcgagcctgatatcaaagtcgtgtcgggcgactgcactacttggtcgcgctgacgccacgacggtcgacgctgcatattcgtatggccggaatattggactggcgtttcagttggtggatgacatgttggattacacaaagtctgggaaagatctcggcaaacccgcgggggccgaccttgagttgggattagcaacagcaccactgttattcgcctggaagacaaatcctgaattgggcgctttggtgggcaggaaattcgaacaggagggtgatgttcagagggcacgacaaattgtcattgaaagcgacgggattgaacagacacgcgcgttagccgaagactactctgagagggcaatcgccgcactcgacacattccccgatagcgaagcaaaagacggcctcatcgagatggccatgaagacgctaaaacgccaaaagtaattattaaaacttgtacaacatgaatactgtaaaactactgcatcatagaagtattagactaggaggatgtgagtgggtggcccaatgtacatataagcgcgcatagaggaccaccgcagagtcgcatcgcatcaatgcaagcaaaatgtataaccaaacgagggcgacaagaatgattggacagctttttgcagtataaagcaactaccaactcaataactatatagtccaaaagaaaccttaatcccgaacatgtaaacatgaatcccgggccatggtcctgctctaccaatgcctttgtcacatcgctgtattccgaagtgagaactctatcatctgtagatgaacgctattcagttgaaccttggactccgagatacagcatctaaagacaaagcaaattccgtcgaaacaga

SEQ ID NO: 21327 - DNA, 843 bp, Muscodor strobelii
  misc_feature: SGI cDNA ID NO. 567219
  misc_feature: Encodes the peptide sequence at SEQ ID NO 21328
atggttttgctcaccatgacagcttccatcgtggaagctgtcaaagtttcaaagtctttgatttccgacggagagcttcaggctcacgccaacccaacagcaggctacgaccttcaagatccatcgctggaaagtcctgctatcggcgagcccataagccatggccaaatcatcgatatgtggaaaagcttgcgtgagaaaggcaatacagattataacttagaacaattgctccgtgggtctacgatctatgtgccaccgccgccacccaaggcggaacctaccaatgaatacaaagctttgatggcacggcttcggcgagaggaggaagaacgatcatacgaacgtatgatacagaaagcacccgctcgagaatcgtttgcccaaagattccccatggcgccgatggcccactcattcgccgaggtgaacaaaccctccaaggagtcagattggggtgtcgatgatatcgagtatggagatgtacagaagcaggtcacgctcttgatcaatttcctggtcagcgttgtgggatgtggtgctgcactctggaaggcggctcagtggtggccggtcacagcaagactattcctcagcctaggtggagccattgtggtagccatcgtcgaagtagctgtttattcggcctatacatggagaatgtccgaaggcgaaaagaaggagaataagaagaaggaggtgaaagaaattgtccagacgtgggttatgggcgaagaggatcaaggcaccggctcaccagagtctacgataatcccatccgcagagcagagcatgcaaggtgcagagacgagtctgcgcaaaagattaaaagtaccagcataa

SEQ ID NO: 21328 - protein, 280 aa, Muscodor strobelii
  misc_feature: SGI Peptide ID NO. 567219
  misc_feature (15)..(249): NCBI GI: 116203431 Blast Desc: CHGG_09599 [Chaetomium globosum CBS 148.51] gi|88175727|gb|EAQ83195.1| CHGG_09599 [Chaetomium globosum CBS 148.51]
  misc_feature (1)..(277): NCBI GI: 171679679 Blast Desc: protein product [Podospora anserina] gi|170939465|emb|CAP64693.1| protein product [Podospora anserina]
  misc_feature (1)..(275): NCBI GI: 256729051 Blast Desc: NECHADRAFT_60693 [Nectria haematococca mpVI 77-13-4]
  misc_feature (6)..(277): NCBI GI: 261354751 Blast Desc: conserved [Verticillium albo-atrum VaMs.102]
  misc_feature (1)..(277): NCBI GI: 85094726 Blast Desc: NCU02304 [Neurospora crassa OR74A] gi|28921405|gb|EAA30712.1| conserved [Neurospora crassa OR74A]
  misc_feature (21)..(244): NCBI GI: 156042582 Blast Desc: SS1G_11089 [Sclerotinia sclerotiorum 1980] gi|154695475|gb|EDN95213.1| SS1G_11089 [Sclerotinia sclerotiorum 1980]
  misc_feature (1)..(227): NCBI GI: 154304672 Blast Desc: BC1G_08075 [Botryotinia fuckeliana B05.10] gi|150853975|gb|EDN29167.1| BC1G_08075 [Botryotinia fuckeliana B05.10]
  misc_feature (1)..(262): NCBI GI: 145608146 Blast Desc: MGG_03344 [Magnaporthe grisea 70-15] gi|145015644|gb|EDK00134.1| MGG_03344 [Magnaporthe grisea 70-15]
  misc_feature (6)..(246): NCBI GI: 189192556 Blast Desc: conserved [Pyrenophora tritici-repentis Pt-1C-BFP] gi|187974223|gb|EDU41722.1| conserved [Pyrenophora tritici-repentis Pt-1C-BFP]
  misc_feature (1)..(249): NCBI GI: 169600421 Blast Desc: SNOG_03044 [Phaeosphaeria nodorum SN15] gi|111068655|gb|EAT89775.1| SNOG_03044 [Phaeosphaeria nodorum SN15]
MVLLTMTASIVEAVKVSKSLISDGELQAHANPTAGYDLQDPSLESPAIGEPISHGQIIDMWKSLREKGNTDYNLEQLLRGSTIYVPPPPPKAEPTNEYKALMARLRREEEERSYERMIQKAPARESFAQRFPMAPMAHSFAEVNKPSKESDWGVDDIEYGDVQKQVTLLINFLVSVVGCGAALWKAAQWWPVTARLFLSLGGAIVVAIVEVAVYSAYTWRMSEGEKKENKKKEVKEIVQTWVMGEEDQGTGSPESTIIPSAEQSMQGAETSLRKRLKVPA

SEQ ID NO: 21329 - DNA, 2898 bp, Muscodor strobelii
  misc_feature: SGI EST ID NO. CUFF.50021.1
  misc_feature: Variant of the nucleotide sequence at SEQ ID NO 21327
aagccacagctcacttttggtccttatgtgacagcttctaggcatcttttcatcacatcactgagagggaaagcgatgagtctgagtagctcaaggtgaagcatcttttttcaatacaaggatggttttgctcaccatgacagcttccatcgtggaagctgtcaaagtttcaaagtctttgatttccgacggagagcttcaggctcacgccaacccaacagcaggctacgaccttcaagatccatcgctggaaagtcctgctatcggcgagcccataagccatggccaaatcatcgatatgtggaaaagcttgcgtgagaaaggcaatacagattataacttagaacaattgctccgtgggtctacgatctatgtgccaccgccgccacccaaggcggaacctaccaatgaatacaaagctttgatggcacggcttcggcgagaggaggaagaacgatcatacgaacgtatgatacagaaagcacccgctcgagaatcgtttgcccaaagattccccatggcgccgatggcccactcattcgccgaggtgaacaaaccctccaaggagtcagattggggtgtcgatgatatcgagtatggagatgtacagaagcaggtcacgctcttgatcaatttcctggtcagcgttgtgggatgtggtgctgcactctggaaggcggctcagtggtggccggtcacagcaagactattcctcagcctaggtggagccattgtggtagccatcgtcgaagtagctgtttattcggcctatacatggagaatgtccgaaggcgaaaagaaggagaataagaagaaggaggtgaaagaaattgtccagacgtgggttatgggcgaagaggatcaaggcaccggctcaccagagtctacgataatcccatccgcagagcagagcatgcaaggtgcagagacgagtctgcgcaaaagattaaaagtaccagcataatcaaccgaattatcactacactataaacaataatattcttcaaaagtctcattacgcaacctgtttcctccatcatgcctaacttagcagagtgcatttactgcctctgcacctacctaccttaaggtattggattagggtgctggctagcggggtcaactgatgctcagctgctgtgggcctgtggtaggcagctagcgcaaccaataagttgatcccaactttaatgcgcgtcattgatgcgcgatcagcgacgcgtcttcgggaccaattaacgcgctaccgctaccataattcattgctttcgaagttcggtcttggcatgtcaatagtccaccatcgtgaatttaccacccctcataacacccgatcgaccatcttgacgtctccattgttggacagtacttgtttgcaacccgtgtgtcttggaccattccacgcgccttggcttgattttgttttgatgttgaattttgaagtctcgccaatggagttttccagtacgcaactcaaagaagagacaaggttgccgagaaaaccagagcgtccatatgtctcgtctctcaagtcctattcgagtcgcagcacaatggatgctcgtcgacgaccactgcgaacttatggcaagcgcacatcgtcaaccgagtcaagcgagccgcccgttaaaaggcggcgcgtcaacaatgactctacgcctatcccccaaaacccattagtccctatgagggcgcttgaaccagtcgagatattacaagatcaaccatcaacaccaacagatgcactaccgccgcctgcaaagaagggcacaatcatggtatatttcaagaaaatacagcccgagtccgacagtacgacaccttcagagctatcatcagaactcgaacagcccacaacgacaccgccgtcatcacccccaatcattacatcgggcaagagaagaatcagacggctccgaaccagagtagcgaaacatcacaaatatgacgagagcaacaacgatgacggaacagacaaggagaatggggacgcaactgccactccgatatccgatcgaccacgaaccgcagctctgtcagcttcaaacacgagtgctctaaatcaggcaaacatcaccccagaagctacaaaacgcagcaaagtcccgcgagagaaaagacgagcatcggtgcagaccacgctgagtctgtctctgacggataagggatatgctgagtgcaaggagtgcgatatgttgtataaccctctgcacgagagtgatgccaaacaccatgctcgtcgacatgcggcattgctcaagttaaaggccaaaggtgctgtaaaggatgatgatgttgactaaatgttgtgttgggttagggagtgctgaattgtttgaattattgatcgattgacggtttgaacctctgcggatgggagtattggtgttgctggcgagatggagtacggaagtgtttcgttacgatcgttattggtgtaaaggcatcttttgtttgattcgtgcataagggagaatcatggttgcatttgtatggcgttcgagcattaatagcattttcacggttgaaaatgatgaattacagagagatcctgtttgctctcactccatatgcactcactcaactctttgcataagtgggtggtcagccgttgaacgtgcctcgcaacaatgctattgaaagctaggacacgtcctgttcatacatcgtgcaaagccaatatgcctctatctgtacatcctacaataatgctccaacagaagctaattaatatgttaacaccgggtttttctattacaaaagattatggatctccgtagtacttggcgtgtcataccagtctggcatgttgagagttgtgtcaggatcctgtgtaagtgtaagctcctacaactcaaattgaccgaatctcgaagcgacttagaagtatgaggcaac

SEQ ID NO: 21330 - DNA, 825 bp, Muscodor strobelii
  misc_feature: SGI cDNA ID NO. 567220
  misc_feature: Encodes the peptide sequence at SEQ ID NO 21331
atgtcatataggttgccgagaaaaccagagcgtccatatgtctcgtctctcaagtcctattcgagtcgcagcacaatggatgctcgtcgacgaccactgcgaacttatggcaagcgcacatcgtcaaccgagtcaagcgagccgcccgttaaaaggcggcgcgtcaacaatgactctacgcctatcccccaaaacccattagtccctatgagggcgcttgaaccagtcgagatattacaagatcaaccatcaacaccaacagatgcactaccgccgcctgcaaagaagggcacaatcatggtatatttcaagaaaatacagcccgagtccgacagtacgacaccttcagagctatcatcagaactcgaacagcccacaacgacaccgccgtcatcacccccaatcattacatcgggcaagagaagaatcagacggctccgaaccagagtagcgaaacatcacaaatatgacgagagcaacaacgatgacggaacagacaaggagaatggggacgcaactgccactccgatatccgatcgaccacgaaccgcagctctgtcagcttcaaacacgagtgctctaaatcaggcaaacatcaccccagaagctacaaaacgcagcaaagtcccgcgagagaaaagacgagcatcggtgcagaccacgctgagtctgtctctgacggataagggatatgctgagtgcaaggagtgcgatatgttgtataaccctctgcacgagagtgatgccaaacaccatgctcgtcgacatgcggcattgctcaagttaaaggccaaaggtgctgtaaaggatgatgatgttgactaa

SEQ ID NO: 21331 - protein, 274 aa, Muscodor strobelii
  misc_feature: SGI Peptide ID NO. 567220
  misc_feature (25)..(265): NCBI GI: 85094722 Blast Desc: NCU02303 [Neurospora crassa OR74A] gi|28921404|gb|EAA30711.1| [Neurospora crassa OR74A]
  misc_feature (24)..(265): NCBI GI: 46138835 Blast Desc: FG10932.1 [Gibberella zeae PH-1]
  misc_feature (24)..(265): NCBI GI: 256729050 Blast Desc: NECHADRAFT_79936 [Nectria haematococca mpVI 77-13-4]
  misc_feature (197)..(265): NCBI GI: 261354750 Blast Desc: VDBG_03287 [Verticillium albo-atrum VaMs.102]
  misc_feature (28)..(259): NCBI GI: 116203429 Blast Desc: CHGG_09598 [Chaetomium globosum CBS 148.51] gi|88175726|gb|EAQ83194.1| CHGG_09598 [Chaetomium globosum CBS 148.51]
MSYRLPRKPERPYVSSLKSYSSRSTMDARRRPLRTYGKRTSSTESSEPPVKRRRVNNDSTPIPQNPLVPMRALEPVEILQDQPSTPTDALPPPAKKGTIMVYFKKIQPESDSTTPSELSSELEQPTTTPPSSPPIITSGKRRIRRLRTRVAKHHKYDESNNDDGTDKENGDATATPISDRPRTAALSASNTSALNQANITPEATKRSKVPREKRRASVQTTLSLSLTDKGYAECKECDMLYNPLHESDAKHHARRHAALLKLKAKGAVKDDDVD

SEQ ID NO: 21332 - DNA, 2898 bp, Muscodor strobelii; identical to SEQ ID NO: 21329
  misc_feature: SGI EST ID NO. CUFF.50021.1
  misc_feature: Variant of the nucleotide sequence at SEQ ID NO 21330

SEQ ID NO: 21333 - DNA, 1677 bp, Muscodor strobelii
  misc_feature: SGI cDNA ID NO. 567221
  misc_feature: Encodes the peptide sequence at SEQ ID NO 21334
atgtcggaggcagccagcacacgtcgttgggctaaaggctatggaccaaagctactgcaagatccaatgccctctttgaatgacactatacccgtcaaaactgtgtgcgatcaagctattgatggttaccttcgcacctatgagccaatgtttcgtattttgcacattccttccttcttgagggaatacgaagattattggactaatatccagccgccacggattgagttcctcatgaagctgtctatggtcattgctattggcgctgtttttttctcagatcgtgccttgtctctcgaaatcaagaaggctgcacagaattgggtatacgcggtgcaatggtggcttgttgggccgacagaacgtgatgccatgagtatcagcggagtgcaggtcttctgtctatcaatacttgctcgacaaacctttgccattggcggaacagcttccataatcacagaatctctcttgaagctctccttcacgattggtctgcatttggatccccaatttctccccgctatgccacctctggaaaccgaattacgtcgcaggctatggataacagttctcgagctgactacagtcacatctctaaactcaactcttcctcttctcgtctctctcgacgattctcgtatcagattaccatcaaatatcgcagactcgaaattaattatggatgaaaacaccgcagacaactcggaacatagcaggtacgcacaactcgactgctctctccaactccttctggcaaaatcgctacgactccgtatgagactcgtccgagaactcaatgacatgggtcgcgaatcctcctatcaaagagttctcgacgctaccgaaactctcaaagctcactgccgtgagatcgcagtattcttccaggcccaaaaccaaggacagaacctcaagtctacatctgcatcctttcattcaaaatttctagactcctacatccggcgcctaatcctcttcctccaccgcccgttctccaaccacgctgcgaaagaccaccgattcttcctctcacgaaagatctgtctagaatgcagcctcacaattgcatcccacatccccgccgatatctcagtggcgacagatgacgactatctccactgctgtatggcaggaagcgggatgttcaaaggtgccttaggtctagacgtcatctgcgccgtatcactcgaaatcgtgactcagctcgaagaagaaggggccagcgacactacccaagcggactcgaggagaattgacccccttacaagtctgtcacgcgcaagcagaaaacctctaatcgactatctggagcgcacgagagaccaatggagacaaaacctgatcctaggtcgtccaagtatgaagcagtacctgtttatatcgtgtatgctgagccatatcaaggtcatggagtctggcggggaccaaaaaagggaaatggttgagacgattaagacgggccttcgggggtgtacgcgtttcatgcaggactcgcctgcttatgggaatgtctcggagggagtttcggagtggactgggactgatgcttcgtcgtttgatttggatcctatggctctttttgggtttgactttggtgttatggatcctgacacaactctcaacatgccagactggtatgacacgccaagtactacggagatccataatcttttgtaa

SEQ ID NO: 21334 - protein, 558 aa, Muscodor strobelii
  misc_feature: SGI Peptide ID NO. 567221
  misc_feature (126)..(223): Pfam Id: PF04082 Pfam Desc: Fungal specific transcription factor domain
  misc_feature (19)..(543): NCBI GI: 70981506 Blast Desc: C6 transcription factor [Aspergillus fumigatus Af293] gi|66843904|gb|EAL84245.1| C6 transcription factor, [Aspergillus fumigatus Af293] gi|159122757|gb|EDP47878.1| C6 transcription
  misc_feature (19)..(543): NCBI GI: 119466985 Blast Desc: C6 transcription factor, [Neosartorya fischeri NRRL 181] gi|119405451|gb|EAW15402.1| C6 transcription factor, [Neosartorya fischeri NRRL 181]
  misc_feature (1)..(542): NCBI GI: 119473645 Blast Desc: C6 zinc finger domain protein [Neosartorya fischeri NRRL 181] gi|119406851|gb|EAW16801.1| C6 zinc finger domain protein [Neosartorya fischeri NRRL 181]
  misc_feature (1)..(534): NCBI GI: 238504238 Blast Desc: C6 transcription factor, [Aspergillus flavus NRRL3357] gi|220690821|gb|EED47170.1| C6 transcription factor, [Aspergillus flavus NRRL3357]
  misc_feature (1)..(530): NCBI GI: 67900690 Blast Desc: AN7332.2 [Aspergillus nidulans FGSC A4] gi|40742193|gb|EAA61383.1| AN7332.2 [Aspergillus nidulans FGSC A4] gi|259483315|tpe|CBF78601.1| TPA: Zn(II)2Cys6 transcription
  misc_feature (1)..(536): NCBI GI: 158392451 Blast Desc: transcription factor [Penicillium expansum]
  misc_feature (1)..(500): NCBI GI: 256735384 Blast Desc: NECHADRAFT_90271 [Nectria haematococca mpVI 77-13-4]
  misc_feature (1)..(521): NCBI GI: 46107484 Blast Desc: FG00625.1 [Gibberella zeae PH-1]
  misc_feature (22)..(510): NCBI GI: 212540902 Blast Desc: C6 transcription factor, [Penicillium marneffei ATCC 18224] gi|210067905|gb|EEA21997.1| C6 transcription factor, [Penicillium marneffei ATCC 18224]
  misc_feature (19)..(522): NCBI GI: 145249370 Blast Desc: An14g04000 [Aspergillus niger] gi|134081702|emb|CAK46636.1| protein product [Aspergillus niger]
MSEAASTRRWAKGYGPKLLQDPMPSLNDTIPVKTVCDQAIDGYLRTYEPMFRILHIPSFLREYEDYWTNIQPPRIEFLMKLSMVIAIGAVFFSDRALSLEIKKAAQNWVYAVQWWLVGPTERDAMSISGVQVFCLSILARQTFAIGGTASIITESLLKLSFTIGLHLDPQFLPAMPPLETELRRRLWITVLELTTVTSLNSTLPLLVSLDDSRIRLPSNIADSKLIMDENTADNSEHSRYAQLDCSLQLLLAKSLRLRMRLVRELNDMGRESSYQRVLDATETLKAHCREIAVFFQAQNQGQNLKSTSASFHSKFLDSYIRRLILFLHRPFSNHAAKDHRFFLSRKICLECSLTIASHIPADISVATDDDYLHCCMAGSGMFKGALGLDVICAVSLEIVTQLEEEGASDTTQADSRRIDPLTSLSRASRKPLIDYLERTRDQWRQNLILGRPSMKQYLFISCMLSHIKVMESGGDQKREMVETIKTGLRGCTRFMQDSPAYGNVSEGVSEWTGTDASSFDLDPMALFGFDFGVMDPDTTLNMPDWYDTPSTTEIHNLL

SEQ ID NO: 21335 - DNA, 3761 bp, Muscodor strobelii
  misc_feature: SGI EST ID NO. CUFF.50022.2
  misc_feature: Variant of the nucleotide sequence at SEQ ID NO 21333
cgagaactcaatgacatgggtcgcgaatcctcctatcaaagagttctcgacgctaccgaaactctcaaagctcactgccgtgagatcgcagtattcttccaggcccaaaaccaaggacagaacctcaagtctacatctgcatcctttcattcaaaatttctagactcctacatccggcgcctaatcctcttcctccaccgcccgttctccaaccacgctgcgaaagaccaccgattcttcctctcacgaaagatctgtctagaatgcagcctcacaattgcatcccacatccccgccgatatctcagtggcgacagatgacgactatctccactgctgtatggcaggaagcgggatgttcaaaggtgccttaggtctagacgtcatctgcgccgtatcactcgaaatcgtgactcagctcgaagaagaaggggccagcgacactacccaagcggactcgaggagaattgacccccttacaagtctgtcacgcgcaagcagaaaacctctaatcgactatctggagcgcacgagagaccaatggagacaaaacctgatcctaggtcgtccaagtatgaagcagtacctgtttatatcgtgtatgctgagccatatcaaggtcatggagtctggcggggaccaaaaaagggaaatggttgagacgattaagacgggccttcgggggtgtacgcgtttcatgcaggactcgcctgcttatgggaatgtctcggagggagtttcggagtggactgggactgatgcttcgtcgtttgatttggatcctatggctctttttgggtttgactttggtgttatggatcctgacacaactctcaacatgccagactggtatgacacgccaagtactacggagatccataatcttttgtaatagaaaaacccggtgttaacatattaattagcttctgttggagcattattgtaggatgtacagatagaggcatattggctttgcacgatgtatgaacaggacgtgtcctagctttcaatagcattgttgcgaggcacgttcaacggctgaccacccacttatgcaaagagttgagtgagtgcatatggagtgagagcaaacaggatctctctgtaattcatcattttcaaccgtgaaaatgctattaatgctcgaacgccatacaaatgcaaccatgattctcccttatgcacgaatcaaacaaaagatgcctttacaccaataacgatcgtaacgaaacacttccgtactccatctcgccagcaacaccaatactcccatccgcagaggttcaaaccgtcaatcgatcaataattcaaacaattcagcactccctaacccaacacaacatttagtcaacatcatcatcctttacagcacctttggcctttaacttgagcaatgccgcatgtcgacgagcatggtgtttggcatcactctcgtgcagagggttatacaacatatcgcactccttgcactcagcatatcccttatccgtcagagacagactcagcgtggtctgcaccgatgctcgtcttttctctcgcgggactttgctgcgttttgtagcttctggggtgatgtttgcctgatttagagcactcgtgtttgaagctgacagagctgcggttcgtggtcgatcggatatcggagtggcagttgcgtccccattctccttgtctgttccgtcatcgttgttgctctcgtcatatttgtgatgtttcgctactctggttcggagccgtctgattcttctcttgcccgatgtaatgattgggggtgatgacggcggtgtcgttgtgggctgttcgagttctgatgatagctctgaaggtgtcgtactgtcggactcgggctgtattttcttgaaatataccatgattgtgcccttctttgcaggcggcggtagtgcatctgttggtgttgatggttgatcttgtaatatctcgactggttcaagcgccctcatagggactaatgggttttgggggataggcgtagagtcattgttgacgcgccgccttttaacgggcggctcgcttgactcggttgacgatgtgcgcttgccataagttcgcagtggtcgtcgacgagcatccattgtgctgcgactcgaataggacttgagagacgagacatatggacgctctggttttctcggcaacctatatgacatgcattggtaggtgtaactttgttgttcgggtgatcatggcataccttgtctcttctttgagttgcgtactggaaaactccattggcgagacttcaaaattcaacatcaaaacaaaatcaagccaaggcgcgtggaatggtccaagacacacgggttgcaaacaagtactgtccaacaatggagacgtcaagatggtcgatcgggtgttatgaggggtggtaaattcacgatggtggactattgacatgccaagaccgaacttcgaaagcaatgaattatggtagcggtagcgcgttaattggtcccgaagacgcgtcgctgatcgcgcatcaatgacgcgcattaaagttgggatcaacttattggttgcgctagctgcctaccacaggcccacagcagctgagcatcagttgaccccgctagccagcaccctaatccaataccttaaggtaggtaggtgcagaggcagtaaatgcactctgctaagttaggcatgatggaggaaacaggttgcgtaatgagacttttgaagaatattattgtttatagtgtagtgataattcggttgattatgctggtacttttaatcttttgcgcagactcgtctctgcaccttgcatgctctgctctgcggatgggattatcgtagactctggtgagccggtgccttgatcctcttcgcccataacccacgtctggacaatttctttcacctccttcttcttattctccttcttttcgccttcggacattctccatgtataggccgaataaacagctacttcgacgatggctaccacaatggctccacctaggctgaggaatagtcttgctgtgaccggccaccactgagccgccttccagagtgcagcaccacatcccacaacgctgaccaggaaattgatcaagagcgtgacctgcttctgtacatctccatactcgatatcatcgacaccccaatctgactccttggagggtttgttcacctcggcgaatgagtgggccatcggcgccatggggaatctttgggcaaacgattctcgagcgggtgctttctgtatcatacgttcgtatgatcgttcttcctcctctcgccgaagccgtgccatcaaagctttgtattcattggtctgtgactggttagcttctgtcctctctttccgttattggtggtttatggaatcgacaaacaggttccgccttgggtggcggcggtggcacatagatcgtagacccacggagcaattgttctaagttataatctgtattgcctttctcacgcaagcttttccacatatcgatgatttggccatggcttatgggctcgccgatagcaggactttccagcgatggatcttgaaggtcgtagcctgctgttgggttggcgtgagcctgaagctctccgtcggaaatcaaagactttgaaactttgacagcttccacgatggaagctgtcatggtgagcaaaaccatccttgtattgaaaaaagatgcttcaccttgagctactcagactcatcgctttccctctcagtgatgtgatgaaaagatgcctagaagctgtcacataaggaccaaaagtgagctgtggctt

SEQ ID NO: 21336 - DNA, 2529 bp, Muscodor strobelii
  misc_feature: SGI cDNA ID NO. 567222
  misc_feature: Encodes the peptide sequence at SEQ ID NO 21337
atggcccgatttcagcagcttctgctcgttactgttgtagcgtttgctgcaattcttcacagtgtcacggcacaaggtccggtttactcaccagctcggccaccggcccttcccttggctgtcaggaacccttacacgaatgcatggtcaagtacagcaaaggatggaactcttaacagccagatgccgatcttcggttcgccgaatgatccactgggctgggagggtatcgttgtggtcgatgatattgcatatgagtatctaggcaatgagacggaagagttgccggcgctgaccaacttcaagaaagctgtgccactggaagtcacatttgattcccagtactcaaacttcacgtttcgagctgggccagtgatcctagaagctagctttctatcacccgtcattccgaaggatatttgtcgttcttcgctcccacttagctacttgacgaccagtgtcaaatccgatgatggccagcctcatcgtatccgattttattccgatgtaagctcttcgtggctgaaattgaagacatcagaccaagtctcctggagcctcaaaagaaacagcgccactgttgggcaagttcaaaatgcgactaccgcatcgcccgatgacatcttcacctggctacagtcttcaaataaacctgatacgtactcggaggatggagactttccaaaatggggtaacctcacttacaatacaagtccatcagccgccaagaacttcacttacgaatgcggcgaagcgactgctgtgcgtttatcatttgtccaaaattacggtcttagcaataacctcgcctctttccgtaccgattttggtgatcatacaccagtatttgcgtatgcccacgatattggtatcgtatgctctacatcagtgcgatgcactatcggctcagtgcaggatccccttgttgagtacattacagataatggtctaaaggatctaacgccatggtggtcgagatgctatggcgacatggactcgatgatccattttcactggcatgactattctcaggtccaggcactcgcagactcgttcgagagacagctcaaggctgatgtaaatgccttttgggaaggcaaagagccgccggtctacagcgaaagcccgtctgttccgtcaactacgttcacgaatggtaccgatcagtttggccaaaatttcctttttgatagcgatacgagttatggttttatcaatacggaggactggactggaatatcagtaccatttgtttctgaggcgcagtcgtattactgcatcgtcgccctttcggcccgtcagactatgggcgcctacgtctttgcggtgcatcccgacccgactgtgtctgatccattggtctttcagaaagagatctcaagtaacggcaatgtgaatatagtggacgttctgtaccctgcgacaccattcttcctatacgctaatccacatttgcttcgctatactcttcaaccgatatacgaatttcaggagggaaaattctaccctaatgactactgtattcatgacctcggaactcatttcccacacgccatcggacacaccgatggtagcgacgaatacatgccagttgaagaaagtgccaatttcattctaatgagctacgcgtattacaagttcacaggtgatcaggcctggttggcgagccactacgtgcttctcaaacagttcactaattatttgatctcttcctcgttgattctagagaaacagctgagtactgacgatttcgccggggagttagtcaatcagacaaatcttgccctcaaaggcattataggactacaggcgatgtcatcgattgctacactggtcaacaacacaaatgacgcgctagaattctccagtacagctatcaaatattacgataagtgggagtactacggtatagacccaagtcacaaacatacgatgcttgcataccaatggcgctctagctggggtttgctttataatctttacttcgacaagctactcaatatgggactggtcaacgaatctgtctacacaatgcagtcggaatggtatcccgtcgtatcgcaagtttatggcgtacctcttgacattcggcatcattacactaagtctgactgggaaatatgggctgcggctacatgtcatgcaagcacgcgaaggctcttagtcaacaatttgctgtattggctcaacaacacagtcagcggtgcaccattcactgatctatacgaatgcattggtggtggcgatcagccggacatccacttcagcgcacggcctgttgcgggtggacatttcgcactacttgcacttggaaagacaggccagaccgctagctcggagggaggaacgacgagtggctcactgttcgccaagaatagtactcaagctttgcccgtggctaagtatgaacctagtagcttaccgcaagcagggaatttcactcgcgaacagaaggacaataacaggaagcgtgttcagacgattttgacgagccagcgcagaacggtccggaagagtctatctccttaa

SEQ ID NO: 21337 - protein, 842 aa, Muscodor strobelii
  misc_feature: SGI Peptide ID NO. 567222
  misc_feature (600)..(770): Pfam Id: PF08760 Pfam Desc: Domain of function (DUF1793)
  misc_feature (29)..(772): NCBI GI: 121704918 Blast Desc: glutaminase GtaA [Aspergillus clavatus NRRL 1] gi|119398868|gb|EAW09296.1| glutaminase GtaA [Aspergillus clavatus NRRL 1]
  misc_feature (12)..(770): NCBI GI: 212545941 Blast Desc: glutaminase GtaA [Penicillium marneffei ATCC 18224] gi|210064644|gb|EEA18739.1| glutaminase GtaA [Penicillium marneffei ATCC 18224]
  misc_feature (12)..(772): NCBI GI: 116201609 Blast Desc: CHGG_08689 [Chaetomium globosum CBS 148.51] gi|88177207|gb|EAQ84675.1| CHGG_08689 [Chaetomium globosum CBS 148.51]
  misc_feature (1)..(770): NCBI GI: 115402455 Blast Desc: ATEG_08718 [Aspergillus terreus NIH2624] gi|114189150|gb|EAU30850.1| ATEG_08718 [Aspergillus terreus NIH2624]
  misc_feature (7)..(772): NCBI GI: 171677997 Blast Desc: protein product [Podospora anserina] gi|170937067|emb|CAP61726.1| protein product [Podospora anserina]
  misc_feature (17)..(770): NCBI GI: 238505548 Blast Desc: glutaminase GtaA [Aspergillus flavus NRRL3357] gi|6456478|dbj|BAA86934.1| glutaminase A [Aspergillus oryzae] gi|220690109|gb|EED46459.1| glutaminase GtaA [Aspergillus flavus
  misc_feature (17)..(770): NCBI GI: 169780334 Blast Desc: [Aspergillus oryzae RIB40] gi|83773371|dbj|BAE63498.1| protein product [Aspergillus oryzae]
  misc_feature (17)..(770): NCBI GI: 9954449 Blast Desc: glutaminase [Aspergillus oryzae]
  misc_feature (4)..(770): NCBI GI: 71000415 Blast Desc: glutaminase GtaA [Aspergillus fumigatus Af293] gi|66852539|gb|EAL92864.1| glutaminase GtaA [Aspergillus fumigatus Af293] gi|159127916|gb|EDP53031.1| glutaminase GtaA
  misc_feature (15)..(770): NCBI GI: 156048316 Blast Desc: SS1G_08889 [Sclerotinia sclerotiorum 1980] gi|154693286|gb|EDN93024.1| SS1G_08889 [Sclerotinia sclerotiorum 1980]
MARFQQLLLVTVVAFAAILHSVTAQGPVYSPARPPALPLAVRNPYTNAWSSTAKDGTLNSQMPIFGSPNDPLGWEGIVVVDDIAYEYLGNETEELPALTNFKKAVPLEVTFDSQYSNFTFRAGPVILEASFLSPVIPKDICRSSLPLSYLTTSVKSDDGQPHRIRFYSDVSSSWLKLKTSDQVSWSLKRNSATVGQVQNATTASPDDIFTWLQSSNKPDTYSEDGDFPKWGNLTYNTSPSAAKNFTYECGEATAVRLSFVQNYGLSNNLASFRTDFGDHTPVFAYAHDIGIVCSTSVRCTIGSVQDPLVEYITDNGLKDLTPWWSRCYGDMDSMIHFHWHDYSQVQALADSFERQLKADVNAFWEGKEPPVYSESPSVPSTTFTNGTDQFGQNFLFDSDTSYGFINTEDWTGISVPFVSEAQSYYCIVALSARQTMGAYVFAVHPDPTVSDPLVFQKEISSNGNVNIVDVLYPATPFFLYANPHLLRYTLQPIYEFQEGKFYPNDYCIHDLGTHFPHAIGHTDGSDEYMPVEESANFILMSYAYYKFTGDQAWLASHYVLLKQFTNYLISSSLILEKQLSTDDFAGELVNQTNLALKGIIGLQAMSSIATLVNNTNDALEFSSTAIKYYDKWEYYGIDPSHKHTMLAYQWRSSWGLLYNLYFDKLLNMGLVNESVYTMQSEWYPVVSQVYGVPLDIRHHYTKSDWEIWAAATCHASTRRLLVNNLLYWLNNTVSGAPFTDLYECIGGGDQPDIHFSARPVAGGHFALLALGKTGQTASSEGGTTSGSLFAKNSTQALPVAKYEPSSLPQAGNFTREQKDNNRKRVQTILTSQRRTVRKSLSP

SEQ ID NO: 21338 - DNA, 1194 bp, Muscodor strobelii
  misc_feature: SGI cDNA ID NO. 567223
  misc_feature: Encodes the peptide sequence at SEQ ID NO 21339
atgtcaggtgttatcgacattgatattacatcgattgcggaaatcctcatgaatcaggctcctggttctgatgtccccgcgagccaccgcgaggttcaagaccatttcaatcggcagtcaagatacacatacgaaaagtttcttgggcgtggtgctttcggcgagacacatcttattacccatcggcgtagaaatggtagttcaaggaggctcgtgatcaagaggatcattgacaaagaggatgaggatcaattgagatctgagattagaatattgagactgttaggtggcgcggcgcatatcgtgaagttaatcgcggctcgagacgacgtcaatgctcccagagggttcctccttcgcgcaatcaagcggtggaggcaacgattaaaagatcggataaacgggccaaaatacaacaaggcaagcaccttcttgataggacttcaaggccctgtttcgataatggaatatctcgagaacggagatttgatgcgtctcctggagcgtctgggtcgggcaggccaggcacttccaaacagagtgctctggagtttctttctttgcttgacgagagcgtgtgtagggatggcatatccgcaaagacgaaacgacgatcctccgttaaggctcgaggttgtacccgataatgatatatcgataaacggtctggtgcatgacgattttcaatggggaaatgtgatggtcggaacccccggtgatttccctgaggagcacggcatcattccgcccttgaagctcattgactttggactggcaaaagacgtcacggagccagaaagtccatttgttcccgcaaagagtgctacgactgcagttatggaaaatatagtttctgctacccgtatagtgatcggcctgattgcgcggaaagtcgttgttggctctttcgataatatggacaattttgcatccgaaattgccctccaaaccggtagtccgaatccgtatccaacactcgatccccaactccgccgcctactaattagatgccttcatcctgatcatgcccgacgtccgacacttacacagctactgcaaatgactttcactgctgtgcaaacaaagactgcaacttcttttgcccccaatgcacacctagagtctgatgacgcagtcaggcaagttttacaacagtttatctatgatgccgatgcccaggcatcaaatgcctag

SEQ ID NO: 21339 - protein, 397 aa, Muscodor strobelii
  misc_feature: SGI Peptide ID NO. 567223
  misc_feature (42)..(107): Pfam Id: PF00069 Pfam Desc: Protein kinase domain
  misc_feature (44)..(260): NCBI GI: 85109420 Blast Desc: NCU05722 [Neurospora crassa OR74A] gi|28924551|gb|EAA33672.1| [Neurospora crassa OR74A]
  misc_feature (41)..(257): NCBI GI: 256730581 Blast Desc: NECHADRAFT_74247 [Nectria haematococca mpVI 77-13-4]
  misc_feature (115)..(259): NCBI GI: 171695774 Blast Desc: protein product [Podospora anserina] gi|170948129|emb|CAP60293.1| protein product [Podospora anserina]
  misc_feature (41)..(380): NCBI GI: 134115042 Blast Desc: CNBH2710 [Cryptococcus neoformans var. neoformans B-3501A] gi|50256447|gb|EAL19172.1| CNBH2710 [Cryptococcus neoformans var. neoformans B-3501A]
  misc_feature (41)..(380): NCBI GI: 58271504 Blast Desc: [Cryptococcus neoformans var. neoformans JEC21] gi|57229167|gb|AAW45601.1| conserved [Cryptococcus neoformans var. neoformans JEC21]
  misc_feature (39)..(110): NCBI GI: 14970920 Blast Desc: calcium dependent calmodulin independent protein kinase [Cucumis sativus] gi|15011837|gb|AAK26164.2| calcium-dependent calmodulin-independent protein kinase 5
  misc_feature (39)..(110): NCBI GI: 255570203 Blast Desc: calcium-dependent protein kinase, [Ricinus communis] gi|223534643|gb|EEF36339.1| calcium-dependent protein kinase, [Ricinus communis]
  misc_feature (154)..(263): NCBI GI: 85081014 Blast Desc: NCU05146 [Neurospora crassa OR74A] gi|28881434|emb|CAD70551.1| [Neurospora crassa] gi|28917716|gb|EAA27408.1| [Neurospora crassa OR74A]
  misc_feature (128)..(365): NCBI GI: 162452039 Blast Desc: protein kinase [Sorangium cellulosum 'So ce 56'] gi|161162621|emb|CAN93926.1| Protein kinase [Sorangium cellulosum 'So ce 56']
  misc_feature (46)..(259): NCBI GI: 85092153 Blast Desc: NCU06906 [Neurospora crassa OR74A] gi|28920656|gb|EAA30017.1| [Neurospora crassa OR74A]
MSGVIDIDITSIAEILMNQAPGSDVPASHREVQDHFNRQSRYTYEKFLGRGAFGETHLITHRRRNGSSRRLVIKRIIDKEDEDQLRSEIRILRLLGGAAHIVKLIAARDDVNAPRGFLLRAIKRWRQRLKDRINGPKYNKASTFLIGLQGPVSIMEYLENGDLMRLLERLGRAGQALPNRVLWSFFLCLTRACVGMAYPQRRNDDPPLRLEVVPDNDISINGLVHDDFQWGNVMVGTPGDFPEEHGIIPPLKLIDFGLAKDVTEPESPFVPAKSATTAVMENIVSATRIVIGLIARKVVVGSFDNMDNFASEIALQTGSPNPYPTLDPQLRRLLIRCLHPDHARRPTLTQLLQMTFTAVQTKTATSFAPNAHLESDDAVRQVLQQFIYDADAQASNA

SEQ ID NO: 21340 - DNA, 2721 bp, Muscodor strobelii
  misc_feature: SGI cDNA ID NO. 567224
  misc_feature: Encodes the peptide sequence at SEQ ID NO 21341
atgaatctccaggatacgtcgctgttgaacatcgcatccggacggctgggacccagccgacacgatatcagtggagcaacttcaacagatcaacttcatgagcaaataagcgagcctgacctacaaagagcgcctgtgccaaattaccgaccagtggctttaagatggtggttcttagctgtcttagggattctgtttgcactcttcggtgggcttcttgagttggcgattcacaaacttccagcccaagataataatggcggaattactctccccacaagagcctacaatgacagggggtttcaatctcctggcagcgatatagtcaagcttgcaggagaatggctcgaccaattaagccaattaacccagctagagtttcctggcttttcatatgtcgaagaccgtgtcgtgaaactcaccactgcctcaacgcactatctagaatcgtactatttagaatcccgacaggaactagataaactccttgctcatgttatgaagaaggaccgcttgcacagagctactaaaccaaaagctttaccctcaaacgcttatcaattatacctctctaagtataacattagtgttgttcctgcaccgacatcacggacaatcacgttcatccggccagagcgcttttcagatcttaccacggccacccagacgccagttcttcgaactgttaaaaagagagttccgtcagataactcatttggttcctgggggccacgcacagtaacatcataccgtcctccggcatcaagcatacctccttcatacatacctccctctagtataccaccgaccactcctgcacccactcccaaagcaacggagggagttacaactggtgtcagcactccagctcccactttgccggaagcgccagagacccatgatgagagtccaacgccgccaccgccgccacctcagacagtcacggctgataatcatcctatatcaccgagtggcatgtcagcgagcattccgtccgttgacggcgtgtcgccaaccgcatcagacccctcatccgtttctatttactcatcaagttacggcgctcggtcctttagcactgagcctgcagcctcaacacctacgatagcgccaaatgctactgtaccaccaagcacgccagatgtccctcctgctccacctgttccttctggaggtttcttgggagcctacaccgaactctacttcatctctcaggcagactatttcctgggaacatttggtgctactctcgtgactagcattctttcaattgtaatccgaataatcaatctcaacgcccaacgcttccagccgttccacgaattagctagtcccgagggagcaacagcagcagcgtcgctttgtaggaaagctggaagttttcacggcttttttcaagaccttaaccatctcttccgaggtagatggccaccattcacacttttgaccgcctcaatgattatcttctcgaccctagcaacaagtttttcatcggaggtttttgcagtcgttacccacggatcctgcagcgcagggggggcagacaactgcgcatggacactggcaatttctgttactagggcacgtatagtgcaagtgttcctttttgttgttgcagttcagatagctcttgcgccgttaattctgcgaaaatggcgcaccggggtcagcagaaacccttggagtatagccgggactgcttcccttcttgcgcaccccggcactcgtgaaattctgggtgagctatccgtaagagatgcaaagctcccagattcgaggatacgacgagaacttgccccgtatattttcagactggatcatttccacagcagaagcgaggttcaatatggtatcatcgcctatagaacgggacaaactaatgggcctctggaccctttgtctttccttggcctcaggagtcaactgaaaaacatcccgagccgcgttagtcgtaagcgacgaggcaactcacagccattctttgcgttgagtattgtagggcgtatccttattctagcgttcaccctgggagtaatagggttgatcgggtattacaacggccctcgaacgactgcgtcgtttgagcaattcatagacagtgaatcattcggggttcgtttgctgtttacagcgattggtattatcgtcacttttgcatggagtgcctttttcactggggtttcctatcttacgccttatcgacgtatggctagatcgcccgagatagctcgacggtcgatagaaatatcaccacccaccaattctttctctggattctactcggcattcgtacaacgggatttctttatgggtttggtagctggtattgggatgctctcggaattcctccctgtacttctgagtaacgtcccctatcaaattactcaaactagggaggtacatcacattagtacttggatctctgtaggaattatgggtatcatggttttcatcatgatagggtcgttcatcgttcgatggccaccattcccagtcgacgtacggacaattgctggcgccgcctactacgtggttgattcacgcctagcacaaagtacaatttcgtcagatgtcgatctcacaaagggactgcaggagaaaacaaatgtttctcacgagaaatacacatttggcgagatggttggtgtatcaggccgtcaaagagttggtgtcactattcatgaggactattcaactgccgaagctggtatcaggaactga

SEQ ID NO: 21341 - protein, 906 aa, Muscodor strobelii
  misc_feature: SGI Peptide ID NO. 567224
  misc_feature (380)..(898): NCBI GI: 171691236 Blast Desc: protein product [Podospora anserina] gi|170945566|emb|CAP71679.1| protein product [Podospora anserina]
  misc_feature (386)..(883): NCBI GI: 116195274 Blast Desc: CHGG_04235 [Chaetomium globosum CBS 148.51] gi|88180148|gb|EAQ87616.1| CHGG_04235 [Chaetomium globosum CBS 148.51]
  misc_feature (391)..(891): NCBI GI: 256725755 Blast Desc: NECHADRAFT_43287 [Nectria haematococca mpVI 77-13-4]
  misc_feature (401)..(891): NCBI GI: 46116628 Blast Desc: FG04156.1 [Gibberella zeae PH-1]
  misc_feature (363)..(847): NCBI GI: 46123099 Blast Desc: FG05927.1 [Gibberella zeae PH-1]
  misc_feature (404)..(905): NCBI GI: 171678505 Blast Desc: protein product [Podospora anserina] gi|170937322|emb|CAP61980.1| protein product [Podospora anserina]
  misc_feature (398)..(847): NCBI GI: 171695510 Blast Desc: protein product [Podospora anserina] gi|170947997|emb|CAP60161.1| protein product [Podospora anserina]
  misc_feature (399)..(905): NCBI GI: 171695872 Blast Desc: protein product [Podospora anserina] gi|170948178|emb|CAP60342.1| protein product [Podospora anserina]
  misc_feature (404)..(905): NCBI GI: 171679900 Blast Desc: protein product [Podospora anserina] gi|170939576|emb|CAP64803.1| protein product [Podospora anserina]
  misc_feature (659)..(900): NCBI GI: 39945810 Blast Desc: MGG_08025 [Magnaporthe grisea 70-15] gi|145019260|gb|EDK03488.1| MGG_08025 [Magnaporthe grisea 70-15]
MNLQDTSLLNIASGRLGPSRHDISGATSTDQLHEQISEPDLQRAPVPNYRPVALRWWFLAVLGILFALFGGLLELAIHKLPAQDNNGGITLPTRAYNDRGFQSPGSDIVKLAGEWLDQLSQLTQLEFPGFSYVEDRVVKLTTASTHYLESYYLESRQELDKLLAHVMKKDRLHRATKPKALPSNAYQLYLSKYNISVVPAPTSRTITFIRPERFSDLTTATQTPVLRTVKKRVPSDNSFGSWGPRTVTSYRPPASSIPPSYIPPSSIPPTTPAPTPKATEGVTTGVSTPAPTLPEAPETHDESPTPPPPPPQTVTADNHPISPSGMSASIPSVDGVSPTASDPSSVSIYSSSYGARSFSTEPAASTPTIAPNATVPPSTPDVPPAPPVPSGGFLGAYTELYFISQADYFLGTFGATLVTSILSIVIRIINLNAQRFQPFHELASPEGATAAASLCRKAGSFHGFFQDLNHLFRGRWPPFTLLTASMIIFSTLATSFSSEVFAVVTHGSCSAGGADNCAWTLAISVTRARIVQVFLFVVAVQIALAPLILRKWRTGVSRNPWSIAGTASLLAHPGTREILGELSVRDAKLPDSRIRRELAPYIFRLDHFHSRSEVQYGIIAYRTGQTNGPLDPLSFLGLRSQLKNIPSRVSRKRRGNSQPFFALSIVGRILILAFTLGVIGLIGYYNGPRTTASFEQFIDSESFGVRLLFTAIGIIVTFAWSAFFTGVSYLTPYRRMARSPEIARRSIEISPPTNSFSGFYSAFVQRDFFMGLVAGIGMLSEFLPVLLSNVPYQITQTREVHHISTWISVGIMGIMVFIMIGSFIVRWPPFPVDVRTIAGAAYYVVDSRLAQSTISSDVDLTKGLQEKTNVSHEKYTFGEMVGVSGRQRVGVTIHEDYSTAEAGIRN

SEQ ID NO: 21342 - DNA, 3334 bp, Muscodor strobelii
  misc_feature: SGI EST ID NO. CUFF.50038.4
  misc_feature: Variant of the nucleotide sequence at SEQ ID NO 21340
caacaacaacaaaacaattgcttttctgacagaggacatggccttttcaaatcaaatactcaatgatacagcgcaaatgtcacctcgaaagcgtctttcacgacctttgagccacataatcttggaggaccctgagaatcctcggttttcagctaggccatcattgtagctcgcgacgttgcattattctacctcgccgcttggcggcaggtctcaggcggaccacgcgactagtctttcttggaggcgaagcagctcacctttataaacaatgttggtgccgagtacactcgtcaatggcaaggtagaatctcatatcgattgttggttgtcgtcttcgctcgctaaaaatccatcacgacacgccgtactggcatagcatcaacgccgcacccgtacatcttcaagccgttcatccaactacgaactgcattaaacgataaattcaatcatagaaaagaagactaattcgatatacgacgtttcgctcagacagccaatgaatctccaggatacgtcgctgttgaacatcgcatccggacggctgggacccagccgacacgatatcagtggagcaacttcaacagatcaacttcatgagcaaataagcgagcctgacctacaaagagcgcctgtgccaaattaccgaccagtggctttaagatggtggttcttagctgtcttagggattctgtttgcactcttcggtgggcttcttgagttggcgattcacaaacttccagcccaagataataatggcggaattactctccccacaagagcctacaatgacagggggtttcaatctcctggcagcgatatagtcaagcttgcaggagaatggctcgaccaattaagccaattaacccagctagagtttcctggcttttcatatgtcgaagaccgtgtcgtgaaactcaccactgcctcaacgcactatctagaatcgtactatttagaatcccgacaggaactagataaactccttgctcatgttatgaagaaggaccgcttgcacagagctactaaaccaaaagctttaccctcaaacgcttatcaattatacctctctaagtataacattagtgttgttcctgcaccgacatcacggacaatcacgttcatccggccagagcgcttttcagatcttaccacggccacccagacgccagttcttcgaactgttaaaaagagagttccgtcagataactcatttggttcctgggggccacgcacagtaacatcataccgtcctccggcatcaagcatacctccttcatacatacctccctctagtataccaccgaccactcctgcacccactcccaaagcaacggagggagttacaactggtgtcagcactccagctcccactttgccggaagcgccagagacccatgatgagagtccaacgccgccaccgccgccacctcagacagtcacggctgataatcatcctatatcaccgagtggcatgtcagcgagcattccgtccgttgacggcgtgtcgccaaccgcatcagacccctcatccgtttctatttactcatcaagttacggcgctcggtcctttagcactgagcctgcagcctcaacacctacgatagcgccaaatgctactgtaccaccaagcacgccagatgtccctcctgctccacctgttccttctggaggtttcttgggagcctacaccgaactctacttcatctctcaggcagactatttcctgggaacatttggtgctactctcgtgactagcattctttcaattgtaatccgaataatcaatctcaacgcccaacgcttccagccgttccacgaattagctagtcccgagggagcaacagcagcagcgtcgctttgtaggaaagctggaagttttcacggcttttttcaagaccttaaccatctcttccgaggtagatggccaccattcacacttttgaccgcctcaatgattatcttctcgaccctagcaacaagtttttcatcggaggtttttgcagtcgttacccacggatcctgcagcgcagggggggcagacaactgcgcatggacactggcaatttctgttactagggcacgtatagtgcaagtgttcctttttgttgttgcagttcagatagctcttgcgccgttaattctgcgaaaatggcgcaccggggtcagcagaaacccttggagtatagccgggactgcttcccttcttgcgcaccccggcactcgtgaaattctgggtgagctatccgtaagagatgcaaagctcccagattcgaggatacgacgagaacttgccccgtatattttcagactggatcatttccacagcagaagcgaggttcaatatggtatcatcgcctatagaacgggacaaactaatgggcctctggaccctttgtctttccttggcctcaggagtcaactgaaaaacatcccgagccgcgttagtcgtaagcgacgaggcaactcacagccattctttgcgttgagtattgtagggcgtatccttattctagcgttcaccctgggagtaatagggttgatcgggtattacaacggccctcgaacgactgcgtcgtttgagcaattcatagacagtgaatcattcggggttcgtttgctgtttacagcgattggtattatcgtcacttttgcatggagtgcctttttcactggggtttcctatcttacgccttatcgacgtatggctagatcgcccgagatagctcgacggtcgatagaaatatcaccacccaccaattctttctctggattctactcggcattcgtacaacgggatttctttatgggtttggtagctggtattgggatgctctcggaattcctccctgtacttctgagtaacgtcccctatcaaattactcaaactagggaggtacatcacattagtacttggatctctgtaggaattatgggtatcatggttttcatcatgatagggtcgttcatcgttcgatggccaccattcccagtcgacgtacggacaattgctggcgccgcctactacgtggttgattcacgcctagcacaaagtacaatttcgtcagatgtcgatctcacaaagggactgcaggagaaaacaaatgtttctcacgagaaatacacatttggcgagatggttggtgtatcaggccgtcaaagagttggtgtcactattcatgaggactattcaactgccgaagctggtatcaggaactgaaacaatgaccgaaccagctcgcaggtgtggcagtaacgtagtagttactagaaactagcgtgcatagagatggtagcttaatatatgcattgtttgatgcagtcagaacacacg

SEQ ID NO: 21343 - DNA, 2718 bp, Muscodor strobelii
  misc_feature: SGI cDNA ID NO. 567225
  misc_feature: Encodes the peptide sequence at SEQ ID NO 21344
atgaatctccaggatacgtcgctgttgaacatcgcatccggacggctgggacccagccgacacgatatcagtggagcaacttcaacagatcaacttcatgagcaaataagcgagcctgacctacaaagagcgcctgtgccaaattaccgaccagtggctttaagatggtggttcttagctgtcttagggattctgtttgcactcttcggtgggcttcttgagttggcgattcacaaacttccagcccaagataataatggcggaattactctccccacaagagcctacaatgacagggggtttcaatctcctggcagcgatatagtcaagcttgcaggagaatggctcgaccaattaagccaattaacccagctagagtttcctggcttttcatatgtcgaagaccgtgtcgtgaaactcaccactgcctcaacgcactatctagaatcgtactatttagaatcccgacaggaactagataaactccttgctcatgttatgaagaaggaccgcttgcacagagctactaaaccaaaagctttaccctcaaacgcttatcaattatacctctctaagtataacattagtgttgttcctgcaccgacatcacggacaatcacgttcatccggccagagcgcttttcagatcttaccacggccacccagacgccagttcttcgaactgttaaaaagagagttccgtcagataactcatttggttcctgggggccacgcacagtaacatcataccgtcctccggcatcaagcatacctccttcatacatacctccctctagtataccaccgaccactcctgcacccactcccaaagcaacggagggagttacaactggtgtcagcactccagctcccactttgccggaagcgccagagacccatgatgagagtccaacgccgccaccgccgccacctcagacagtcacggctgataatcatcctatatcaccgagtggcatgtcagcgagcattccgtccgttgacggcgtgtcgccaaccgcatcagacccctcatccgtttctatttactcatcaagttacggcgctcggtcctttagcactgagcctgcctcaacacctacgatagcgccaaatgctactgtaccaccaagcacgccagatgtccctcctgctccacctgttccttctggaggtttcttgggagcctacaccgaactctacttcatctctcaggcagactatttcctgggaacatttggtgctactctcgtgactagcattctttcaattgtaatccgaataatcaatctcaacgcccaacgcttccagccgttccacgaattagctagtcccgagggagcaacagcagcagcgtcgctttgtaggaaagctggaagttttcacggcttttttcaagaccttaaccatctcttccgaggtagatggccaccattcacacttttgaccgcctcaatgattatcttctcgaccctagcaacaagtttttcatcggaggtttttgcagtcgttacccacggatcctgcagcgcagggggggcagacaactgcgcatggacactggcaatttctgttactagggcacgtatagtgcaagtgttcctttttgttgttgcagttcagatagctcttgcgccgttaattctgcgaaaatggcgcaccggggtcagcagaaacccttggagtatagccgggactgcttcccttcttgcgcaccccggcactcgtgaaattctgggtgagctatccgtaagagatgcaaagctcccagattcgaggatacgacgagaacttgccccgtatattttcagactggatcatttccacagcagaagcgaggttcaatatggtatcatcgcctatagaacgggacaaactaatgggcctctggaccctttgtctttccttggcctcaggagtcaactgaaaaacatcccgagccgcgttagtcgtaagcgacgaggcaactcacagccattctttgcgttgagtattgtagggcgtatccttattctagcgttcaccctgggagtaatagggttgatcgggtattacaacggccctcgaacgactgcgtcgtttgagcaattcatagacagtgaatcattcggggttcgtttgctgtttacagcgattggtattatcgtcacttttgcatggagtgcctttttcactggggtttcctatcttacgccttatcgacgtatggctagatcgcccgagatagctcgacggtcgatagaaatatcaccacccaccaattctttctctggattctactcggcattcgtacaacgggatttctttatgggtttggtagctggtattgggatgctctcggaattcctccctgtacttctgagtaacgtcccctatcaaattactcaaactagggaggtacatcacattagtacttggatctctgtaggaattatgggtatcatggttttcatcatgatagggtcgttcatcgttcgatggccaccattcccagtcgacgtacggacaattgctggcgccgcctactacgtggttgattcacgcctagcacaaagtacaatttcgtcagatgtcgatctcacaaagggactgcaggagaaaacaaatgtttctcacgagaaatacacatttggcgagatggttggtgtatcaggccgtcaaagagttggtgtcactattcatgaggactattcaactgccgaagctggtatcaggaactga

SEQ ID NO: 21344 - protein, 905 aa, Muscodor strobelii
  misc_feature: SGI Peptide ID NO. 567225
  misc_feature (379)..(897): NCBI GI: 171691236 Blast Desc: protein product [Podospora anserina] gi|170945566|emb|CAP71679.1| protein product [Podospora anserina]
  misc_feature (385)..(882): NCBI GI: 116195274 Blast Desc: CHGG_04235 [Chaetomium globosum CBS 148.51] gi|88180148|gb|EAQ87616.1| CHGG_04235 [Chaetomium globosum CBS 148.51]
  misc_feature (390)..(890): NCBI GI: 256725755 Blast Desc: NECHADRAFT_43287 [Nectria haematococca mpVI 77-13-4]
  misc_feature (400)..(890): NCBI GI: 46116628 Blast Desc: FG04156.1 [Gibberella zeae PH-1]
  misc_feature (364)..(846): NCBI GI: 46123099 Blast Desc: FG05927.1 [Gibberella zeae PH-1]
  misc_feature (403)..(904): NCBI GI: 171678505 Blast Desc: protein product [Podospora anserina] gi|170937322|emb|CAP61980.1| protein product [Podospora anserina]
  misc_feature (397)..(846): NCBI GI: 171695510 Blast Desc: protein product [Podospora anserina] gi|170947997|emb|CAP60161.1| protein product [Podospora anserina]
  misc_feature (398)..(904): NCBI GI: 171695872 Blast Desc: protein product [Podospora anserina] gi|170948178|emb|CAP60342.1| protein product [Podospora anserina]
  misc_feature (403)..(904): NCBI GI: 171679900 Blast Desc: protein product [Podospora anserina] gi|170939576|emb|CAP64803.1| protein product [Podospora anserina]
  misc_feature (658)..(899): NCBI GI: 39945810 Blast Desc: MGG_08025 [Magnaporthe grisea 70-15] gi|145019260|gb|EDK03488.1| MGG_08025 [Magnaporthe grisea 70-15]
MNLQDTSLLNIASGRLGPSRHDISGATSTDQLHEQISEPDLQRAPVPNYRPVALRWWFLAVLGILFALFGGLLELAIHKLPAQDNNGGITLPTRAYNDRGFQSPGSDIVKLAGEWLDQLSQLTQLEFPGFSYVEDRVVKLTTASTHYLESYYLESRQELDKLLAHVMKKDRLHRATKPKALPSNAYQLYLSKYNISVVPAPTSRTITFIRPERFSDLTTATQTPVLRTVKKRVPSDNSFGSWGPRTVTSYRPPASSIPPSYIPPSSIPPTTPAPTPKATEGVTTGVSTPAPTLPEAPETHDESPTPPPPPPQTVTADNHPISPSGMSASIPSVDGVSPTASDPSSVSIYSSSYGARSFSTEPASTPTIAPNATVPPSTPDVPPAPPVPSGGFLGAYTELYFISQADYFLGTFGATLVTSILSIVIRIINLNAQRFQPFHELASPEGATAAASLCRKAGSFHGFFQDLNHLFRGRWPPFTLLTASMIIFSTLATSFSSEVFAVVTHGSCSAGGADNCAWTLAISVTRARIVQVFLFVVAVQIALAPLILRKWRTGVSRNPWSIAGTASLLAHPGTREILGELSVRDAKLPDSRIRRELAPYIFRLDHFHSRSEVQYGIIAYRTGQTNGPLDPLSFLGLRSQLKNIPSRVSRKRRGNSQPFFALSIVGRILILAFTLGVIGLIGYYNGPRTTASFEQFIDSESFGVRLLFTAIGIIVTFAWSAFFTGVSYLTPYRRMARSPEIARRSIEISPPTNSFSGFYSAFVQRDFFMGLVAGIGMLSEFLPVLLSNVPYQITQTREVHHISTWISVGIMGIMVFIMIGSFIVRWPPFPVDVRTIAGAAYYVVDSRLAQSTISSDVDLTKGLQEKTNVSHEKYTFGEMVGVSGRQRVGVTIHEDYSTAEAGIRN

SEQ ID NO: 21345 - DNA, 3334 bp, Muscodor strobelii; identical to SEQ ID NO: 21342
  misc_feature: SGI EST ID NO. CUFF.50038.4
  misc_feature: Variant of the nucleotide sequence at SEQ ID NO 21343

SEQ ID NO: 21346 - DNA, 1455 bp, Muscodor strobelii
  misc_feature: SGI cDNA ID NO. 567226
  misc_feature: Encodes the peptide sequence at SEQ ID NO 21347
atggcgaggaataatccgccctgggcccttcgctggcgatcaaatacacttttcatcctgtcgactgtcgccgtcggtcttttcactgatctcttcctttatgggctggttgttcctgtcctgccctttatgctacagaatagattatctattccagaggaccaaatacagtcgcatgtgtccggtctgcttgccgcctatgccggcgcatctgtcgtattttcagtgccggcaggatggattgcggatcgaaccagctcccgacaaggccccttcttgtgtgggcttgttgctctccttgttggaacaataatgttagctgtggggcagagtatcgctgtcctaatcattgctcgtgtcctgcaaggtatcagcgcagccgtcgtgtggactgttggtcttgccatggtactcgatactgttgggccgcagaatctcggcaaagtgatcggctcgatattttcgttcatttccattggggaactgctatcgcctgtcattgggggcgtgctgtataacaagactggatatactggagtgttcggtctaggtgccggtctaatagcagtagactttgttatgcggttgtttgtcattgaaaagaagacagccgcaaaatacgacgagactagtcaagccggcggatcaaatcctcgtgatttcggatctcgaaccgacgaaaatagggagcagagcgaaagagaggcaactgaagaagatactcttctaccaaagaaaccagaagaacgattcataatttccggagagcgaaacaaagtcacgcgtgctcttccaatcctcttatgtttcaagaatccaagactgttgatggcgctatgcctagctttcgtgcaagcatcgctcttggcgctgtatgacgcaactcttccaacagaagcacaagatctcttcaacttctcctctttggaggctggactgttgttcatagcactcgatgtaccctatctaattctgggtccaattgcgggctgggcggttgatcggtacggcactaaacgtgcagcagttttcggatttggatttatggtaccagctctcgttgttctaaggctaccatcggcaaagctgcttcccaagtctgacaatatcttcctactctgtggactattagcgataaatggaatcggattggctgtcattggatcgccggcggtagtagaggccagtgacattgttcagaaatatgacaaggcgaaccccggcgtgtttggagaaaacggcccatatgctcaactatacggcttcaactccctattcttctgttccggacttgctatcggccctgtttttgccggcgtactacgtgatagtgttggttacggaaatatgaatttggtgtttgccgttatatctggtgtcacagccgttctgtcattctttatcattggaggcaagccgtctattctaaatagaggaacaagaggaacaaattag

SEQ ID NO: 21347 - protein, 484 aa, Muscodor strobelii
  misc_feature: SGI Peptide ID NO. 567226
  misc_feature (23)..(435): Pfam Id: PF07690 Pfam Desc: Major Facilitator Superfamily
  misc_feature (7)..(474): NCBI GI: 149211343 Blast Desc: MGCH7_ch7g1128 [Magnaporthe grisea 70-15] gi|86197083|gb|EAQ71721.1| MGCH7_ch7g1128 [Magnaporthe grisea 70-15]
  misc_feature (6)..(477): NCBI GI: 169611636 Blast Desc: SNOG_08933 [Phaeosphaeria nodorum SN15] gi|160702334|gb|EAT84101.2| SNOG_08933 [Phaeosphaeria nodorum SN15]
  misc_feature (8)..(446): NCBI GI: 145601482 Blast Desc: MGG_14227 [Magnaporthe grisea 70-15] gi|145009544|gb|EDJ94211.1| MGG_14227 [Magnaporthe grisea 70-15]
  misc_feature (108)..(474): NCBI GI: 156033197 Blast Desc: SS1G_13674 [Sclerotinia sclerotiorum 1980] gi|154699077|gb|EDN98815.1| SS1G_13674 [Sclerotinia sclerotiorum 1980]
  misc_feature (10)..(447): NCBI GI: 19075881 Blast Desc: membrane transporter [Schizosaccharomyces pombe] gi|74626917|sp|O74852.1|YQ92_SCHPO RecName: Full=Uncharacterized MFS-type transporter C18.02 gi|3766364|emb|CAA21416.1| membrane
  misc_feature (4)..(471): NCBI GI: 189197113 Blast Desc: conserved [Pyrenophora tritici-repentis Pt-1C-BFP] gi|187980842|gb|EDU47468.1| conserved [Pyrenophora tritici-repentis Pt-1C-BFP]
  misc_feature (7)..(474): NCBI GI: 156043127 Blast Desc: SS1G_10566 [Sclerotinia sclerotiorum 1980] gi|154694954|gb|EDN94692.1| SS1G_10566 [Sclerotinia sclerotiorum 1980]
  misc_feature (7)..(471): NCBI GI: 154300974 Blast Desc: BC1G_10625 [Botryotinia fuckeliana B05.10] gi|150856373|gb|EDN31565.1| BC1G_10625 [Botryotinia fuckeliana B05.10]
  misc_feature (138)..(478): NCBI GI: 154290935 Blast Desc: BC1G_15531 [Botryotinia fuckeliana B05.10] gi|150847167|gb|EDN22360.1| BC1G_15531 [Botryotinia fuckeliana B05.10]
  misc_feature (13)..(472): NCBI GI: 154296677 Blast Desc: BC1G_12366 [Botryotinia fuckeliana B05.10] gi|150843205|gb|EDN18398.1| BC1G_12366 [Botryotinia fuckeliana B05.10]
MARNNPPWALRWRSNTLFILSTVAVGLFTDLFLYGLVVPVLPFMLQNRLSIPEDQIQSHVSGLLAAYAGASVVFSVPAGWIADRTSSRQGPFLCGLVALLVGTIMLAVGQSIAVLIIARVLQGISAAVVWTVGLAMVLDTVGPQNLGKVIGSIFSFISIGELLSPVIGGVLYNKTGYTGVFGLGAGLIAVDFVMRLFVIEKKTAAKYDETSQAGGSNPRDFGSRTDENREQSEREATEEDTLLPKKPEERFIISGERNKVTRALPILLCFKNPRLLMALCLAFVQASLLALYDATLPTEAQDLFNFSSLEAGLLFIALDVPYLILGPIAGWAVDRYGTKRAAVFGFGFMVPALVVLRLPSAKLLPKSDNIFLLCGLLAINGIGLAVIGSPAVVEASDIVQKYDKANPGVFGENGPYAQLYGFNSLFFCSGLAIGPVFAGVLRDSVGYGNMNLVFAVISGVTAVLSFFIIGGKPSILNRGTRGTN

SEQ ID NO: 21348 - DNA, 2114 bp, Muscodor strobelii
  misc_feature: SGI EST ID NO. CUFF.50053.1
  misc_feature: Variant of the nucleotide sequence at SEQ ID NO 21346
cagtactgtcaagatctatcgaatcgatactacgacgtcggatcttacagatgaaccgttctgaatcgttctgaaacgtatggccaatagtttttaataatgtgaaaatattgcagtgtcctgctggattatggccggatcaaggttacgccatgcagcggctgcagccgtgactatccacttacccattgccatgtagtggctactaggccctggcggttctctcagcttcactcccttatatacctgtgggtaagtacctcttgtgaccatccggcaaatacatataggcagatggtgaattcacaatcgcttctagataacccatggtgaaacgtattatatgagattagggaaatggtatatgatgtttgagaacggacagcttcaatgcttcgttggttccatggttgtggagagtacgcttgctttctagctttacaaaccttcgatcgcacggaggttggtaatgatcacgaatgaggtcatcgatctgtagagacatgcaaaatgcatctgcatctactcaaccaccacgacccaggaatcatttgaacttccccgactactctactatcatagattttgagtctcacgacaaccatggcgaggaataatccgccctgggcccttcgctggcgatcaaatacacttttcatcctgtcgactgtcgccgtcggtcttttcactgatctcttcctttatgggctggttgttcctgtcctgccctttatgctacagaatagattatctattccagaggaccaaatacagtcgcatgtgtccggtctgcttgccgcctatgccggcgcatctgtcgtattttcagtgccggcaggatggattgcggatcgaaccagctcccgacaaggccccttcttgtgtgggcttgttgctctccttgttggaacaataatgttagctgtggggcagagtatcgctgtcctaatcattgctcgtgtcctgcaaggtatcagcgcagccgtcgtgtggactgttggtcttgccatggtactcgatactgttgggccgcagaatctcggcaaagtgatcggctcgatattttcgttcatttccattggggaactgctatcgcctgtcattgggggcgtgctgtataacaagactggatatactggagtgttcggtctaggtgccggtctaatagcagtagactttgttatgcggttgtttgtcattgaaaagaagacagccgcaaaatacgacgagactagtcaagccggcggatcaaatcctcgtgatttcggatctcgaaccgacgaaaatagggagcagagcgaaagagaggcaactgaagaagatactcttctaccaaagaaaccagaagaacgattcataatttccggagagcgaaacaaagtcacgcgtgctcttccaatcctcttatgtttcaagaatccaagactgttgatggcgctatgcctagctttcgtgcaagcatcgctcttggcgctgtatgacgcaactcttccaacagaagcacaagatctcttcaacttctcctctttggaggctggactgttgttcatagcactcgatgtaccctatctaattctgggtccaattgcgggctgggcggttgatcggtacggcactaaacgtgcagcagttttcggatttggatttatggtaccagctctcgttgttctaaggctaccatcggcaaagctgcttcccaagtctgacaatatcttcctactctgtggactattagcgataaatggaatcggattggctgtcattggatcgccggcggtagtagaggccagtgacattgttcagaaatatgacaaggcgaaccccggcgtgtttggagaaaacggcccatatgctcaactatacggcttcaactccctattcttctgttccggacttgctatcggccctgtttttgccggcgtactacgtgatagtgttggttacggaaatatgaatttggtgtttgccgttatatctggtgtcacagccgttctgtcattctttatcattggaggcaagccgtctattctaaatagaggaacaagaggaacaaattagattgttaaaatcttcttactttactacagctctgcaatttacatacatctgacccg

SEQ ID NO: 21349 - DNA, 1101 bp, Muscodor strobelii
  misc_feature: SGI cDNA ID NO. 567227
  misc_feature: Encodes the peptide sequence at SEQ ID NO 21350
atgcgcggcgcggcgattccgccaacattgaccgcgcttcagcctttggcttccctcaccagaactagtctgtcacagtcgaggcaggctctcaaccacaaaatcagcgccactggcattcgccatgcaagcacgataactcactcgcctttctcccagtctatcgaacctggtgtcatcttgaagggctactccggaagggagtatacgatcgaaaatgtgctacaggacagacagaaccgccaggttttcctggctagagcggaggagaagatgtttgtcctgaagagtctcttcgagaaggactacgaatattcactgcctctacagttgagactcaaccagtctccatatctcagggctctccgcgatacagttcccgatcaaaagatgtttgtcaacgaatacttgaccgaccatctccttaattttgctttcaaggacatctctatggcaacccaaaagcgcattcttcgtgactcgttgcgaggtctagctactctgcactctcagaatattgcccaccttgacgtaaaggccaacaatatcatggttgattaccacgatactcccgagggaatcgtggtcgagcgggttcaattgtcagatctcgaggactctacacatatcccacctggccaagccttgaatggcgtccaggttggaaaccagctgtggagaagccccgaggctcatgttcagggagctgttggcaaaccgtcagacgtattctcccttgccatagtgttcatcttcatgcgtctacgtagtgtcatcttcctcgctgacggcgccccgaagctcgaccccacccaggatattctcatgaaacagatttcctacttcgcggattgcaaggactttgacggtttcctgcattgcttggggcgtcgtcatccctgggcagcctcccttcgacgcatggccgactcgtttgatggggagaaccctcgccgacctttcgctctctggaagagcgacctgcttgagcccgaattcaaagacctcatcggcaaaatgaccaacttcgacccacgaaagaggatcacggccgaacaagctcttgatcacccttacttccacgatgtggcggacgaatag

SEQ ID NO: 21350 - protein, 366 aa, Muscodor strobelii
  misc_feature: SGI Peptide ID NO. 567227
  misc_feature (317)..(360): Pfam Id: PF00069 Pfam Desc: Protein kinase domain
  misc_feature (162)..(260): Pfam Id: PF00069 Pfam Desc: Protein kinase domain
  misc_feature (63)..(363): NCBI GI: 225555192 Blast Desc: conserved [Ajellomyces capsulatus G186AR]
  misc_feature (63)..(360): NCBI GI: 258572116 Blast Desc: [Uncinocarpus reesii 1704] gi|237905098|gb|EEP79499.1| [Uncinocarpus reesii 1704]
  misc_feature (61)..(360): NCBI GI: 119181927 Blast Desc: CIMG_06026 [Coccidioides immitis RS]
  misc_feature (58)..(365): NCBI GI: 225555286 Blast Desc: conserved [Ajellomyces capsulatus G186AR]
  misc_feature (63)..(363): NCBI GI: 240281414 Blast Desc: calcium/calmodulin dependent protein kinase [Ajellomyces capsulatus H143]
  misc_feature (61)..(363): NCBI GI: 242763479 Blast Desc: conserved [Talaromyces stipitatus ATCC 10500] gi|218723778|gb|EED23195.1| conserved [Talaromyces stipitatus ATCC 10500]
  misc_feature (63)..(363): NCBI GI: 154276764 Blast Desc: [Ajellomyces capsulatus NAm1] gi|150414300|gb|EDN09665.1| [Ajellomyces capsulatus NAm1]
  misc_feature (63)..(363): NCBI GI: 238843679 Blast Desc: conserved [Microsporum canis CBS 113480]
  misc_feature (3)..(361): NCBI GI: 238842520 Blast Desc: conserved [Microsporum canis CBS 113480]
  misc_feature (63)..(363): NCBI GI: 239612367 Blast Desc: calcium/calmodulin dependent protein kinase [Ajellomyces dermatitidis ER-3]
  misc_feature (133)..(363): SWISSPROT Homolog: EC 2.7.11.22 Cyclin-dependent kinase
MRGAAIPPTLTALQPLASLTRTSLSQSRQALNHKISATGIRHASTITHSPFSQSIEPGVILKGYSGREYTIENVLQDRQNRQVFLARAEEKMFVLKSLFEKDYEYSLPLQLRLNQSPYLRALRDTVPDQKMFVNEYLTDHLLNFAFKDISMATQKRILRDSLRGLATLHSQNIAHLDVKANNIMVDYHDTPEGIVVERVQLSDLEDSTHIPPGQALNGVQVGNQLWRSPEAHVQGAVGKPSDVFSLAIVFIFMRLRSVIFLADGAPKLDPTQDILMKQISYFADCKDFDGFLHCLGRRHPWAASLRRMADSFDGENPRRPFALWKSDLLEPEFKDLIGKMTNFDPRKRITAEQALDHPYFHDVADE

SEQ ID NO: 21351 - DNA, 1718 bp, Muscodor strobelii
  misc_feature: SGI EST ID NO. CUFF.50048.0
  misc_feature: Variant of the nucleotide sequence at SEQ ID NO 21349
aatacatattgctatccaataaatatcaatcttgtgtaaccgtagatctcccctctccctcttgataaattctagacgcccttatatatcaaaaccataactcctccagtgctcaccgtctcctcgaccttaccgccgtatacacacgaattttataacggtaaacaatactcgccatattcatcaagcactgccccttggtgaagttcgatcctacacggtaccgacgaagttaataatatgcgcggcgcggcgattccgccaacattgaccgcgcttcagcctttggcttccctcaccagaactagtctgtcacagtcgaggcaggctctcaaccacaaaatcagcgccactggcattcgccatgcaagcacgataactcactcgcctttctcccagtctatcgaacctggtgtcatcttgaagggctactccggaagggagtatacgatcgaaaatgtgctacaggacagacagaaccgccaggttttcctggctagagcggaggagaagatgtttgtcctgaagagtctcttcgagaaggactacgaatattcactgcctctacagttgagactcaaccagtctccatatctcagggctctccgcgatacagttcccgatcaaaagatgtttgtcaacgaatacttgaccgaccatctccttaattttgctttcaaggacatctctatggcaacccaaaagcgcattcttcgtgactcgttgcgaggtctagctactctgcactctcagaatattgcccaccttgacgtaaaggccaacaatatcatggttgattaccacgatactcccgagggaatcgtggtcgagcgggttcaattgtcagatctcgaggactctacacatatcccacctggccaagccttgaatggcgtccaggttggaaaccagctgtggagaagccccgaggctcatgttcagggagctgttggcaaaccgtcagacgtattctcccttgccatagtgttcatcttcatgcgtctacgtagtgtcatcttcctcgctgacggcgccccgaagctcgaccccacccaggatattctcatgaaacagatttcctacttcgcggattgcaaggactttgacggtttcctgcattgcttggggcgtcgtcatccctgggcagcctcccttcgacgcatggccgactcgtttgatggggagaaccctcgccgacctttcgctctctggaagagcgacctgcttgagcccgaattcaaagacctcatcggcaaaatgaccaacttcgacccacgaaagaggatcacggccgaacaagctcttgatcacccttacttccacgatgtggcggacgaatagagttgattcctcaatcagcagtccatgctacttttatttgtgcattaccagcgggcgtccgggatcaaaaagaatagatttgaattggtttcgggatacatagacaaaacagaaagcgtctgatagactcaaaagagacatagatttagaggcataccctaaaggcgtaggggccagccatgccttcttaatcctaatactacgagcaagtcgccgatggcgcaaatcatcatcattttttcgacgcatgttcccttacaccattgaggaatcatgcttacatgcctttgtcttgcctcttccttcagtagagcggctcatattgtagaagagaagcttatgtgtttattgcttatagtgtggactctcatctacgg

SEQ ID NO: 21352 - DNA, 1173 bp, Muscodor strobelii
  misc_feature: SGI cDNA ID NO. 567228
  misc_feature: Encodes the peptide sequence at SEQ ID NO 21353
atgacctcggatctgctcgaagaagccaatgtattcgtttcacagcttgagaagctgagtggccaaaatggtcaattcggctccgtctttcagcttgaggagaaaactaccaatctcacatttgatgtcatctgtagagcggcacttggcatgagactcaatgaacagtctcgatccgaagcctcccccctcaaggtcgcttttatgtcattgatcgatgtcatgaattcgggcgccaacgctgccagagctctacctatcgggcgtatgccgtggcaaaaagcagctgcgcgacgcaacaaccaaattatcagggatatcttgacacctcagatcgaagcgcaaaaacagattggcccgaacgattctcaggtaaagacaatcactgacctagcgatcaagcatgtcgacaaagactatccagacccaaaggaggacaagactggattcgtcgatctgttgatctctaatctcaaggcatttctctttgcgggtcatgatactacatcgtcaacaatatgcttcatgaccaagctgttgcaggataacccggaatgtatggccaagcttcgcgcggaacatgactctgtttttggatcggatcctttcaaagcggcggctgctattgcggaatcaccacacttgctgtacttgctcccttatactcttggtgtcataaaggagacacttcgtatctaccctctcgccgcgactttgcgttcatcctatccaggcttaaagcttgccgtatctgggtcacaggttcagtatccaatggatggatatggaatgtgggtggcaacgccagcacttcatcgcaaccccgcgttttggccacgacccaatgagttcctcccggaacgatggatggtgccggaaggtgaccctttacacgcttccaatatcgcttatgcaccattctctatcggtccgcggaattgtattggtatggagttggcgctactagagctacggattgtgtcggtcctcattgctcggcggttcgagatagaagaggcgtgggacaagtgggatcagcttaaagggtctaaagctactcctaacctaaaagtcgacggtcagcgctgctacacgtgtggcgacggcacagttcaccccaaggatggtctgcctgttcacgtcaggctcagagaacatatcccaagtgtctaa

SEQ ID NO: 21353 - protein, 390 aa, Muscodor strobelii
  misc_feature: SGI Peptide ID NO. 567228
  misc_feature (1)..(364): Pfam Id: PF00067 Pfam Desc: Cytochrome P450
  misc_feature (270)..(364): Pfam Id: PF00067 Pfam Desc: Cytochrome P450
  misc_feature (161)..(239): Pfam Id: PF00067 Pfam Desc: Cytochrome P450
  misc_feature (3)..(384): NCBI GI: 115402821 Blast Desc: conserved [Aspergillus terreus NIH2624] gi|114189333|gb|EAU31033.1| conserved [Aspergillus terreus NIH2624]
  misc_feature (5)..(385): NCBI GI: 238839665 Blast Desc: VerA [Microsporum canis CBS 113480]
  misc_feature (5)..(385): NCBI GI: 261354657 Blast Desc: cytochrome P450 4V3 [Verticillium albo-atrum VaMs.102]
  misc_feature (1)..(384): NCBI GI: 170940186 Blast Desc: protein product [Podospora anserina]
  misc_feature (6)..(384): NCBI GI: 240275889 Blast Desc: sterigmatocystin biosynthesis P450 monooxygenase StcS [Ajellomyces capsulatus H143]
  misc_feature (1)..(384): NCBI GI: 208879566 Blast Desc: AflN [Aspergillus ochraceoroseus]
  misc_feature (6)..(378): NCBI GI: 154281857 Blast Desc: [Ajellomyces capsulatus NAm1] gi|150411920|gb|EDN07308.1| [Ajellomyces capsulatus NAm1]
  misc_feature (1)..(383): NCBI GI: 154320460 Blast Desc: BC1G_01702 [Botryotinia fuckeliana B05.10] gi|150853391|gb|EDN28583.1| BC1G_01702 [Botryotinia fuckeliana B05.10]
  misc_feature (5)..(381): NCBI GI: 156042896 Blast Desc: SS1G_11247 [Sclerotinia sclerotiorum 1980] gi|154695632|gb|EDN95370.1| SS1G_11247 [Sclerotinia sclerotiorum 1980]
  misc_feature (1)..(384): NCBI GI: 46370633 Blast Desc: verA [Aspergillus flavus]
MTSDLLEEANVFVSQLEKLSGQNGQFGSVFQLEEKTTNLTFDVICRAALGMRLNEQSRSEASPLKVAFMSLIDVMNSGANAARALPIGRMPWQKAAARRNNQIIRDILTPQIEAQKQIGPNDSQVKTITDLAIKHVDKDYPDPKEDKTGFVDLLISNLKAFLFAGHDTTSSTICFMTKLLQDNPECMAKLRAEHDSVFGSDPFKAAAAIAESPHLLYLLPYTLGVIKETLRIYPLAATLRSSYPGLKLAVSGSQVQYPMDGYGMWVATPALHRNPAFWPRPNEFLPERWMVPEGDPLHASNIAYAPFSIGPRNCIGMELALLELRIVSVLIARRFEIEEAWDKWDQLKGSKATPNLKVDGQRCYTCGDGTVHPKDGLPVHVRLREHIPSV

SEQ ID NO: 21354 - DNA, 2657 bp, Muscodor strobelii
  misc_feature: SGI EST ID NO. CUFF.50164.2
  misc_feature: Variant of the nucleotide sequence at SEQ ID NO 21352
aaggtctccagtggaagacgtggcgttcgagattcaacccaggcttcagtcagcgaaatctcctcgctatgacctcggatctgctcgaagaagccaatgtattcgtttcacagcttgagaagctgagtggccaaaatggtcaattcggctccgtctttcagcttgaggagaaaactaccaatctcacatttgatgtcatctgtagagcggcacttggcatgagactcaatgaacagtctcgatccgaagcctcccccctcaaggtcgcttttatgtcattgatcgatgtcatgaattcgggcgccaacgctgccagagctctacctatcgggcgtatgccgtggcaaaaagcagctgcgcgacgcaacaaccaaattatcagggatatcttgacacctcagatcgaagcgcaaaaacagattggcccgaacgattctcaggtaaagacaatcactgacctagcgatcaagcatgtcgacaaagactatccagacccaaaggaggacaagactggattcgtcgatctgttgatctctaatctcaaggcatttctctttgcgggtcatgatactacatcgtcaacaatatgcttcatgaccaagctgttgcaggataacccggaatgtatggccaagcttcgcgcggaacatgactctgtttttggatcggatcctttcaaagcggcggctgctattgcggaatcaccacacttgctgtacttgctcccttatactcttggtgtcataaaggagacacttcgtatctaccctctcgccgcgactttgcgttcatcctatccaggcttaaagcttgccgtatctgggtcacaggttcagtatccaatggatggatatggaatgtgggtggcaacgccagcacttcatcgcaaccccgcgttttggccacgacccaatgagttcctcccggaacgatggatggtgccggaaggtgaccctttacacgcttccaatatcgcttatgcaccattctctatcggtccgcggaattgtattggtatggagttggcgctactagagctacggattgtgtcggtcctcattgctcggcggttcgagatagaagaggcgtgggacaagtgggatcagcttaaagggtctaaagctactcctaacctaaaagtcgacggtcagcgctgctacacgtgtggcgacggcacagttcaccccaaggatggtctgcctgttcacgtcaggctcagagaacatatcccaagtgtctaattaggatgggacattgagtttcacagtttccagttggtctgttctcaagtctataccgttctcccaagaggatatttgcatttgtgtgaagatccttcgggtcatgtgagagtaagcatgcatggcgaacccatacgatagcaagagtcgaactcaacaataatagattatacacacttatccgtatagttccgctaggtgcttgttcgtcctgtatgagatctatgcatggatgctttaggcatcacatacaaacaaaagtgtttggtggactgacgtacatgatagacgctgtcaatcaccaacacgccaacacgtcaagaagttaatgagagaaaatttagtcagtttcgttggtggttagtgtctcgactgaattgagcgctatgtatctgccgctaagatttcagatggctgagacctgagtattgcgaataggaacgaggaggaacgaggagcatcttgataaggtaatctgtcttacaagttggtgttgttcaaatgatatcactgaaagcaccctcggcactcaaccaccggtcttttctaacagagcacagctttgtagcagcaacttgcggttcggttccgagcaggtgtagcttgtcgactcctagatcatgttgatacaccggtgtgaatcacatatcatagttaggcatgttatgtggcatttgttttttttcgactcgagaagtgtgaacaccatgaccgctaccccggatttgagcgattgcgtaaacgacaagtcccccagagttgtgtgcaacagcaaacatcgtcatggattcatgacagctggctggtgttcgtgaaacgggttgtccagttgtgcagtgggccagactgctaccagaaactaggaatcattaatctcacgatgtccatacggggcatacgctagcccccctcgtcctccctgagtttatatgacagattgctggcaaagcgcgtgagatggaaagtcacgacatagcgcatgcagacgcacaacagagtggacatattggggaggtcggagcggtgagaccagcgcaaagattgtgcttgtggtttggtcatcgtgtgactttgcacaacagagacaggtccagaagcgtggcgaaaccaaaatgatagacagagtaattatgtgcccttatgacgacgaatgacgatgtatagcttgaagaattgaatatggcagtttgataagattagtatcattctccatttcgccactcgcaaattctgctactctgcaacgcagcaaaggtggtgaccgtgactcagtgtgcctcgacgacgaaacggcataggccagctggcattctcactcggccttggaggctgacggacctggacaggtggacaggtacccgctgtcttgactcggataaagaatttcgtcggtttgcggctcactaactcatccct

SEQ ID NO: 21355 - DNA, 513 bp, Muscodor strobelii
  misc_feature: SGI cDNA ID NO. 567229
  misc_feature: Encodes the peptide sequence at SEQ ID NO 21356
atggcgttaggtgttacgggatcgattctcatccgcgcagtcggtgtggtcttcgtgctctttttgggccgatccctgtatcgcggttaccagatccgctcgaaaacgaaggcactacaggctcaaggcatcccaattctgcctcattcatggtttcttggtcacttagttctgctcggtgagctgatttctgctttagactttcgaaatgattatccccatgatgtcaacttctacgcatttcatacatggcttattgacaattgccaaaaatactttcccggccgagacttcccaccgccgatagtctatctggatctgtggccgatagaacatcctttagctatggtgatggacccagtcgctgcatcgcaatttgcgatcaatccaagtctaccaaagatggctttcactaaggagttcttagaccctttgactggcgggaccgacggcatgtataaaaagatcccgcgcgagttattttttgaccgtgctcctaagacatcgtactaa

SEQ ID NO: 21356 - protein, 170 aa, Muscodor strobelii
  misc_feature: SGI Peptide ID NO. 567229
  misc_feature (9)..(150): NCBI GI: 115402821 Blast Desc: conserved [Aspergillus terreus NIH2624] gi|114189333|gb|EAU31033.1| conserved [Aspergillus terreus NIH2624]
  misc_feature (11)..(150): NCBI GI: 261354657 Blast Desc: cytochrome P450 4V3 [Verticillium albo-atrum VaMs.102]
  misc_feature (1)..(157): NCBI GI: 240275889 Blast Desc: sterigmatocystin biosynthesis P450 monooxygenase StcS [Ajellomyces capsulatus H143]
  misc_feature (1)..(157): NCBI GI: 154281857 Blast Desc: [Ajellomyces capsulatus NAm1] gi|150411920|gb|EDN07308.1| [Ajellomyces capsulatus NAm1]
  misc_feature (6)..(157): NCBI GI: 225563301 Blast Desc: sterigmatocystin biosynthesis P450 monooxygenase StcS [Ajellomyces capsulatus G186AR]
  misc_feature (3)..(150): NCBI GI: 145607880 Blast Desc: MGG_13612 [Magnaporthe grisea 70-15] gi|145015362|gb|EDJ99898.1| MGG_13612 [Magnaporthe grisea 70-15]
  misc_feature (43)..(150): NCBI GI: 154301127 Blast Desc: BC1G_10536 [Botryotinia fuckeliana B05.10] gi|150856284|gb|EDN31476.1| BC1G_10536 [Botryotinia fuckeliana B05.10]
  misc_feature (10)..(150): NCBI GI: 156042896 Blast Desc: SS1G_11247 [Sclerotinia sclerotiorum 1980] gi|154695632|gb|EDN95370.1| SS1G_11247 [Sclerotinia sclerotiorum 1980]
  misc_feature (10)..(150): NCBI GI: 238839665 Blast Desc: VerA [Microsporum canis CBS 113480]
  misc_feature (3)..(150): NCBI GI: 154320460 Blast Desc: BC1G_01702 [Botryotinia fuckeliana B05.10] gi|150853391|gb|EDN28583.1| BC1G_01702 [Botryotinia fuckeliana B05.10]
MALGVTGSILIRAVGVVFVLFLGRSLYRGYQIRSKTKALQAQGIPILPHSWFLGHLVLLGELISALDFRNDYPHDVNFYAFHTWLIDNCQKYFPGRDFPPPIVYLDLWPIEHPLAMVMDPVAASQFAINPSLPKMAFTKEFLDPLTGGTDGMYKKIPRELFFDRAPKTSY

SEQ ID NO: 21357 - DNA, 1225 bp, Muscodor strobelii
  misc_feature: SGI EST ID NO. CUFF.50168.0
  misc_feature: Variant of the nucleotide sequence at SEQ ID NO 21355
agggaatcgggagtgtcacattagtattgatactcggaaacagaagaactatctgaactgaagccatttgcctcgtatccgtgtaatcgggtgtgcattacaagtcggtcgttgggtcttgtttaggtagttcaatagaacattcatctcggtcgagacttcgcatgctaggcgccggaggtctcctgttgccgcgcgtgaacaaattctttcttatcattgccgttgccgtattgaaggcgtatgtgttgagattgtaccggaagttggaaccgataccatgtgctgatgatgcttcgaggccgacatcacactgcccctcattggccaaggcctaaacgagggtatctccccccagattgagaactttcaaaatcatctcagcggaccagggtatccatacttctttcaatttaaaggcaggcaatagcgtgtcagccctactttgaatcctgtgaaaacccgatcgcgcggcgtattatttccctgaaagcgaaagatatgatgaaaaggtagtggtctcgtcgggctgccatgtggactaggccgtggtagcccggtttatttttggttgatagcaagacaagacccaatcaaagcggctgaaatattgttcgccaggcacgcccagaggtcaaatttcaactaagacgggagctatgaattgctaagaagccgatcaatgacgacctgatgtttcagtgttcttactcctcttgcacttgacattcgctttagcattttatgtaaacaatcgagcgtcaacaagcagacaccgcttatacacgtgaagctcgcaacatggcgttaggtgttacgggatcgattctcatccgcgcagtcggtgtggtcttcgtgctctttttgggccgatccctgtatcgcggttaccagatccgctcgaaaacgaaggcactacaggctcaaggcatcccaattctgcctcattcatggtttcttggtcacttagttctgctcggtgactttcgaaatgattatccccatgatgtcaacttctacgcatttcatacatggcttattgacaattgccaaaaatactttcccggccgagacttcccaccgccgatagtctatctggatctgtggccgatagaacatcctttagctatggtgatggacccagtcgctgcatcgcaatttgcgatcaatccaagtctaccaaagatggctttcactaaggagttcttagaccctttgactggcg

SEQ ID NO: 21358 - DNA, 1302 bp, Muscodor strobelii
  misc_feature: SGI cDNA ID NO. 567230
  misc_feature: Encodes the peptide sequence at SEQ ID NO 21359
atgcctattggtaaggagggaaacgtcaaatgggtcgatggccttcgaggtctggcttcatctctggtcgttctgacacacattgcgcgtgccttcgatggcgaccttttcttgcccgcgtcggccgccggcgcggctccccgggtcctccagtggcccttcctccgcattctggtccagggccgtattggtgtgaccattttttccctcgttacaggctatgtctgcgctctcaagcccattaagctctaccgccagaaccagcaagaagctgccttcaactcgatcgccaaatccgctcttcgccgtgttcctcgactgattatcccctgctctttcgccacattcctcatctggatcatggcacagttgggtatgttcctggttggaaaatcaagtgactgctggtggtgtggtaagaccgctcccgaccaaatgcacagcatcttttccgccatcaacagtctcgtcttcaacatcatcaacacctggacacacggagccaatgcctacgatggaaatcagtggacgctcttgcccctattgcgaggaagtatgcaggtctataccttcatcgtggccacatcctacctgcaacctcggtatcgaatgatttgtagcatgatcgtgtactggtatttctatattggcggtgactctgcctttggtatgcaattcttttggggcgtcttcctctgcgatgtgcagaatcaccctgccgccaacgagttccttgtgaaacggcctaagacgtcaaagatattggctgtcatcttcttgatcctcggtctctacgtggcctcctaccctgagggtcatgcagactgggttacctggtcccgatggcaatacaacgtcctccgacacatcaccccgaagaatgccgagatcccacgatttgcctcgggtatcggtttacagttgattacgattggtctccacttcagcccagctttgagggatatcctctcgtccaagcctcttctttggctgggaaagcagtcatttgccgtctatctgcttcacggtcctcttctgcgcagtgttctttgctggatggtctacggcatctacgtgcccccggatatcaccaatgaggctggagaggttcttcacggcaagctcatgttccccggtggtatgagactactgctatctttgcccttttggattcctctcaactatggtgccgccatgctctggaccacttacgtcgatccttattgtgccaacctgacggagaaaattgtcaaatatgcaatgctcgaacgagacgaaaaaggcgctctgttaccacaatag

SEQ ID NO: 21359 - protein, 433 aa, Muscodor strobelii
  misc_feature: SGI Peptide ID NO. 567230
  misc_feature (5)..(423): NCBI GI: 156039557 Blast Desc: SS1G_11915 [Sclerotinia sclerotiorum 1980] gi|154697652|gb|EDN97390.1| SS1G_11915 [Sclerotinia sclerotiorum 1980]
  misc_feature (8)..(432): NCBI GI: 115433058 Blast Desc: conserved [Aspergillus terreus NIH2624] gi|114189518|gb|EAU31218.1| conserved [Aspergillus terreus NIH2624]
  misc_feature (8)..(429): NCBI GI: 67902486 Blast Desc: AN8230.2 [Aspergillus nidulans FGSC A4] gi|40739696|gb|EAA58886.1| AN8230.2 [Aspergillus nidulans FGSC A4]
  misc_feature (8)..(429): NCBI GI: 259481012 Blast Desc: TPA: conserved [Aspergillus nidulans FGSC A4]
  misc_feature (4)..(428): NCBI GI: 239615294 Blast Desc: conserved [Ajellomyces dermatitidis ER-3]
  misc_feature (6)..(430): NCBI GI: 255952891 Blast Desc: Pc21g01270 [Penicillium chrysogenum Wisconsin 54-1255] gi|211588909|emb|CAP95024.1| Pc21g01270 [Penicillium chrysogenum Wisconsin 54-1255]
  misc_feature (8)..(430): NCBI GI: 119178466 Blast Desc: CIMG_08069 [Coccidioides immitis RS]
  misc_feature (8)..(430): NCBI GI: 240104872 Blast Desc: Acyltransferase family protein [Coccidioides posadasii C735 delta SOWgp]
  misc_feature (8)..(428): NCBI GI: 255935665 Blast Desc: Pc13g04230 [Penicillium chrysogenum Wisconsin 54-1255] gi|211583479|emb|CAP91492.1| Pc13g04230 [Penicillium chrysogenum Wisconsin 54-1255]
  misc_feature (4)..(427): NCBI GI: 154272029 Blast Desc: [Ajellomyces capsulatus NAm1] gi|150408854|gb|EDN04310.1| [Ajellomyces capsulatus NAm1]
MPIGKEGNVKWVDGLRGLASSLVVLTHIARAFDGDLFLPASAAGAAPRVLQWPFLRILVQGRIGVTIFSLVTGYVCALKPIKLYRQNQQEAAFNSIAKSALRRVPRLIIPCSFATFLIWIMAQLGMFLVGKSSDCWWCGKTAPDQMHSIFSAINSLVFNIINTWTHGANAYDGNQWTLLPLLRGSMQVYTFIVATSYLQPRYRMICSMIVYWYFYIGGDSAFGMQFFWGVFLCDVQNHPAANEFLVKRPKTSKILAVIFLILGLYVASYPEGHADWVTWSRWQYNVLRHITPKNAEIPRFASGIGLQLITIGLHFSPALRDILSSKPLLWLGKQSFAVYLLHGPLLRSVLCWMVYGIYVPPDITNEAGEVLHGKLMFPGGMRLLLSLPFWIPLNYGAAMLWTTYVDPYCANLTEKIVKYAMLERDEKGALLPQ

SEQ ID NO: 21360 - DNA, 2517 bp, Muscodor strobelii
  misc_feature: SGI EST ID NO. CUFF.50557.1
  misc_feature: Variant of the nucleotide sequence at SEQ ID NO 21358
ttttattttcttccttgtccgacattgtgcatctcgtctctccgtccttggagtgtgttcctgttcctcgagataattctctctttccttcgcgaccgtgtgttgagtgctgtcctgcggccacgtgcccgcctgtgtgttgcgacgttcgtcttcctttcgcctgcgcaccggtattggatctatacgcccatatccatacctcgcctctactatcatacctatacttaatttataccctacaatttgcctcgtttggcccagtcactcgctcaagacgcactcgtctgcccacattcgatccgataataatcatcagtctcgtctcaacttgtattctccgcgctgtgtgccctcgtacacccgaactacacctcttaatcgatcgatcttcattgtacgctgtactactgtaacccaaacccggttctatcgcgtcttgtgctccgtcgacttgagattcagtcgtcgccttgtgagactcgcgctaccagacgttctcgactggtgactagtggctcgatcactccaaactaccaacgatctttccatcctccagctactctcattgcgttatgatataacgaaccaggtggaagacgctgctcggataatcatacaaaatgcctattggtaaggagggaaacgtcaaatgggtcgatggccttcgaggtctggcttcatctctggtcgttctgacacacattgcgcgtgccttcgatggcgaccttttcttgcccgcgtcggccgccggcgcggctccccgggtcctccagtggcccttcctccgcattctggtccagggccgtattggtgtgaccattttttccctcgttacaggctatgtctgcgctctcaagcccattaagctctaccgccagaaccagcaagaagctgccttcaactcgatcgccaaatccgctcttcgccgtgttcctcgactgattatcccctgctctttcgccacattcctcatctggatcatggcacagttgggtatgttcctggttggaaaatcaagtgactgctggtggtgtggtaagaccgctcccgaccaaatgcacagcatcttttccgccatcaacagtctcgtcttcaacatcatcaacacctggacacacggagccaatgcctacgatggaaatcagtggacgctcttgcccctattgcgaggaagtatgcaggtctataccttcatcgtggccacatcctacctgcaacctcggtatcgaatgatttgtagcatgatcgtgtactggtatttctatattggcggtgactctgcctttggtatgcaattcttttggggcgtcttcctctgcgatgtgcagaatcaccctgccgccaacgagttccttgtgaaacggcctaagacgtcaaagatattggctgtcatcttcttgatcctcggtctctacgtggcctcctaccctgagggtcatgcagactgggttacctggtcccgatggcaatacaacgtcctccgacacatcaccccgaagaatgccgagatcccacgatttgcctcgggtatcggtttacagttgattacgattggtctccacttcagcccagctttgagggatatcctctcgtccaagcctcttctttggctgggaaagcagtcatttgccgtctatctgcttcacggtcctcttctgcgcagtgttctttgctggatggtctacggcatctacgtgcccccggatatcaccaatgaggctggagaggttcttcacggcaagctcatgttccccggtggtatgagactactgctatctttgcccttttggattcctctcaactatggtgccgccatgctctggaccacttacgtcgatccttattgtgccaacctgacggagaaaattgtcaaatatgcaatgctcgaacgagacgaaaaaggcgctctgttaccacaatagacgaatcatatctatttcggtaggatgacaggcaggcttatatccagatttcactggaaacggtgtactgaggtataaactcggtcgcgcaaactgcttcctgttgctggtcgtaccagctagtccggcatgcgatggcctgaaatgaattggcctaagggtatcaagtgtacaaaattcagacgtgggcatttgtttcgtcaattgctggctaaatctcacgagtaccatcaaaatgatttgcttggcatttacgagcctggcgtttatcattggtttatggagtacggggcctgggtaaattattcgcatcgaggacggaagcacgagacaagcgagcattcatgaagaagccatatacacaaagcctccagctcggctgtcgcgcggccaagttggattaatcaattggtgacatggagaataggagagaagtcaagtgatgacttgtagatgacgattgggatcaatgatacacctcgctcatcgaccgcgtggcgttttatgatgattttcgccggcgcaccgggcgatgttagacttgtagatatcatgcacttataaatacctaacttattattttcaattcttg

SEQ ID NO: 21361 - DNA, 1230 bp, Muscodor strobelii
  misc_feature: SGI cDNA ID NO. 567231
  misc_feature: Encodes the peptide sequence at SEQ ID NO 21362
atgaaacggaaacgcaagaggaagcaaatagacaccagcgacgagtctgacggttctgatgggaatgacggtcatggaaagcgtcctagggtaggccaaggccaagatgaggatccaggacgggaaggcgaatcatcccttcggaatgtcctaagacgtcatggatggccacaggtattgttcttacaagaagtcaagatcaagtacggtgacgatcgaatgatggatgcagctcgcgtagctgtgaacgacacgtctccgagatcaactacctcatcaaaagacgccagagagaggaaacgaggtatcgataatgaccaggtgaaagatgcagatcatactcaccgtcttagcgatggcggtcctgcttacgatgttcacttcaaccttccctatgataagcataacgcaacagggtggggaggtaagctttatggagtggcggccatcgttcggagagactttgctgaaacatacgtggactgtgttcgtgatgttgattgggacagagagggccgcatccaagtcatcgagacgaagaatctcacatcttccatacacaaacctacgcatatcaaagaaacttcgaccacgagccaacaagagcagaaaaacaaaatcggcctcatcaacatctacgccgtgaatggcacatcggccgcgtaccgctcatcggagacagggttggtcataggcacgcgccacgaccggaagctagcagtacattacgagctgttgtgcgaggctaaacgtcttgaagcgaggggcttcgctgttgtcatcgctggtgacttgaacgtggctagagacgctcgagatgggtacccaaatctgcgcacgaatccgtatcagcatgtgatcaataggacggacttcaaccagaaattcttctcagatggcactgtgagtcttgacgttggggccagacgtgctttgtactcgaatgagtatgaaaaggggcacgaaatcggaaagcacctggctggcttagatgctatcgatacgttccgatttgtaaggggtgctgagaggagatatagctactatcctcgtggaagggaatggggtagtagctgcgatcgagttgatctggtcgtagcatcgaagacgctgaatggttttattgttgatgctgggatatgtgacaatcaacgggataggggaccgagtgaccactgcccggtctggatcgtgctagggcaacgacttaggaagaaggggccgaaatag

SEQ ID NO: 21362 - protein, 409 aa, Muscodor strobelii
  misc_feature: SGI Peptide ID NO. 567231
  misc_feature (29)..(399): Pfam Id: PF03372 Pfam Desc: Endonuclease/Exonuclease/phosphatase family
  misc_feature (57)..(399): Pfam Id: PF03372 Pfam Desc: Endonuclease/Exonuclease/phosphatase family
  misc_feature (45)..(397): NCBI GI: 171676872 Blast Desc: protein product [Podospora anserina] gi|170936503|emb|CAP61163.1| protein product [Podospora anserina]
  misc_feature (46)..(404): NCBI GI: 169595532 Blast Desc: SNOG_00506 [Phaeosphaeria nodorum SN15] gi|111070881|gb|EAT92001.1| SNOG_00506 [Phaeosphaeria nodorum SN15]
  misc_feature (12)..(397): NCBI GI: 164423689 Blast Desc: NCU07891 [Neurospora crassa OR74A] gi|157070199|gb|EAA32544.2| [Neurospora crassa OR74A]
  misc_feature (34)..(399): NCBI GI: 242208449 Blast Desc: [Postia placenta Mad-698-R] gi|220730827|gb|EED84678.1| [Postia placenta Mad-698-R]
  misc_feature (189)..(399): NCBI GI: 150376441 Blast Desc: exodeoxyribonuclease III Xth [Sinorhizobium medicae WSM419] gi|150030988|gb|ABR63104.1| exodeoxyribonuclease III Xth [Sinorhizobium medicae WSM419]
MKRKRKRKQIDTSDESDGSDGNDGHGKRPRVGQGQDEDPGREGESSLRNVLRRHGWPQVLFLQEVKIKYGDDRMMDAARVAVNDTSPRSTTSSKDARERKRGIDNDQVKDADHTHRLSDGGPAYDVHFNLPYDKHNATGWGGKLYGVAAIVRRDFAETYVDCVRDVDWDREGRIQVIETKNLTSSIHKPTHIKETSTTSQQEQKNKIGLINIYAVNGTSAAYRSSETGLVIGTRHDRKLAVHYELLCEAKRLEARGFAVVIAGDLNVARDARDGYPNLRTNPYQHVINRTDFNQKFFSDGTVSLDVGARRALYSNEYEKGHEIGKHLAGLDAIDTFRFVRGAERRYSYYPRGREWGSSCDRVDLVVASKTLNGFIVDAGICDNQRDRGPSDHCPVWIVLGQRLRKKGPK

SEQ ID NO: 21363 - DNA, 304 bp, Muscodor strobelii
  misc_feature: SGI EST ID NO. CUFF.50141.0
  misc_feature: Variant of the nucleotide sequence at SEQ ID NO 21361
agacgtgctttgtactcgaatgagtatgaaaaggggcacgaaatcggaaagcacctggctggcttagatgctatcgatacgttccgatttgtaaggggtgctgagaggagatatagctactatcctcgtggaagggaatggggtagtagctgcgatcgagttgatctggtcgtagcatcgaagacgctgaatggttttattgttgatgctgggatatgtgacaatcaacgggataggggaccgagtgaccactgcccggtctggatcgtgctagggcaacgacttaggaagaaggggccgaaat

SEQ ID NO: 21364 - DNA, 357 bp, Muscodor strobelii
  misc_feature: SGI cDNA ID NO. 567232
  misc_feature: Reduced expression when VOC is produced
  misc_feature: Encodes the peptide sequence at SEQ ID NO 21365
atgtcgttcctcacagaatccgccatccgccgcctggctctgacatccagagtcactgccatccaggcaccccgccaatttagtactagcatggctgctcgcaagaccgtcacagagagtgccaaggacaccttgaagtctgtagaccgcaaagtctccgataagctagtcgatggaatcaacgttggtgccaaggccgcagagaaggtatccggcaaagccactgaggccagctacaaggcatctggcaccgcagaagagatccgaggaaaggctaagggggaggccgaggagttgaagggcaaagccaagggcgctgccacggaggctgagggtaaagtcaagagttcgatttaa

SEQ ID NO: 21365 - protein, 118 aa, Muscodor strobelii
  misc_feature: SGI Peptide ID NO. 567232
  misc_feature (1)..(117): NCBI GI: 46123409 Blast Desc: FG06082.1 [Gibberella zeae PH-1]
  misc_feature (1)..(115): NCBI GI: 256733027 Blast Desc: NECHADRAFT_100013 [Nectria haematococca mpVI 77-13-4]
  misc_feature (1)..(115): NCBI GI: 171679012 Blast Desc: protein product [Podospora anserina] gi|170937577|emb|CAP62234.1| protein product [Podospora anserina]
  misc_feature (1)..(115): NCBI GI: 39942512 Blast Desc: MGG_03336 [Magnaporthe grisea 70-15] gi|145015651|gb|EDK00141.1| MGG_03336 [Magnaporthe grisea 70-15]
  misc_feature (27)..(115): NCBI GI: 116204103 Blast Desc: CHGG_09935 [Chaetomium globosum CBS 148.51] gi|88176063|gb|EAQ83531.1| CHGG_09935 [Chaetomium globosum CBS 148.51]
  misc_feature (1)..(109): NCBI GI: 242781822 Blast Desc: LEA domain protein [Talaromyces stipitatus ATCC 10500] gi|242781827|ref|XP_002479879.1| LEA domain protein [Talaromyces stipitatus ATCC 10500] gi|218720025|gb|EED19444.1| LEA domain LEA
  misc_feature (1)..(114): NCBI GI: 154301226 Blast Desc: [Botryotinia fuckeliana B05.10] gi|150856184|gb|EDN31376.1| [Botryotinia fuckeliana B05.10]
  misc_feature (1)..(114): NCBI GI: 156039497 Blast Desc: [Sclerotinia sclerotiorum 1980] gi|154697622|gb|EDN97360.1| [Sclerotinia sclerotiorum 1980]
  misc_feature (8)..(110): NCBI GI: 85090738 Blast Desc: NCU09057 [Neurospora crassa OR74A] gi|28919933|gb|EAA29325.1| [Neurospora crassa OR74A]
  misc_feature (1)..(115): NCBI GI: 145232993 Blast Desc: An02g07350 [Aspergillus niger] gi|134056791|emb|CAK37699.1| protein product [Aspergillus niger]
  misc_feature: Useful for introducing or modulating the production of volatile compounds
MSFLTESAIRRLALTSRVTAIQAPRQFSTSMAARKTVTESAKDTLKSVDRKVSDKLVDGINVGAKAAEKVSGKATEASYKASGTAEEIRGKAKGEAEELKGKAKGAATEAEGKVKSSI

SEQ ID NO: 21366 - DNA, 1049 bp, Muscodor strobelii
  misc_feature: SGI EST ID NO. CUFF.50357.1
  misc_feature: Variant of the nucleotide sequence at SEQ ID NO 21364
ctcccaatcacacaccaatttttacatgctacgatcactaaatcactaacctcaaacaacccgattcatacttcattctctgagcctgcacaaagccagctcatctacagcctcatctccaatcaacgcgacaataaacaagtcatttcgcctcatccacaatttcacgaaaatgtcgttcctcacagaatccgccatccgccgcctggctctgacatccagagtcactgccatccaggcaccccgccaatttagtactagcatggctgctcgcaagaccgtcacagagagtgccaaggacaccttgaagtctgtagaccgcaaagtctccgataagctagtcgatggaatcaacgttggtgccaaggccgcagagaaggtatccggcaaagccactgaggccagctacaaggcatctggcaccgcagaagagatccgaggaaaggctaagggggaggccgaggagttgaagggcaaagccaagggcgctgccacggaggctgagggtaaagtcaagagttcgatttaagactgcgttcggagcatttacatcatttgcatcactcggtgttcaggaagggaaacgtctacggcacttactatcccctgtactataaagcagtgcctggcatgacttgatggcgttctgagcatttttgtacgatagattcagtcatgaaacctatgaaaagcaacgctgaattcgttggttaggaccacattgtccgccaaccacaacgtacgaagtcacacggccttaagtatgctgttcatgtaaacgtccctcactaatatcgcaacaactgtgcatatgaagcagcctccggtaacaggtaactactgggaatcgaggacttaaagcaggcattgatgtttgttctctgattatgtgtctctggaggaaaccgctgacgtcatggtcattttgatgctgtctgaaatccatctagggttgagctccagtgagtggcattgcattcagacaagtaaggaagtcacgaatgttttttatgtaggcctctcgtacgcaaattcaccggccccgtcgc

SEQ ID NO: 21367 - DNA, 1506 bp, Muscodor strobelii
  misc_feature: SGI cDNA ID NO. 567233
  misc_feature: Encodes the peptide sequence at SEQ ID NO 21368
atgttgacctttactcggctcaccactgccgtcgtctgcgctgcacatctgggcgtggcagcacctttctaccccaatacagcgagatctcagaagatatcatggggttcgtgcgcggagagttatcctgacactccgttccccagcaatcttacatgtgcgactctgattgttccccgagactgggatcatccggatggtaatgagacgatatcactcggaatggtgcgtttggaagccaccgatgaagacaaccgtattggatacctattcgccaacccgggcggacccggtggccctgcaactgggttagtatcagcactcgtggaagaacccgatatcctcgaccccgaaatcttcgccaagttcgatatcatcggcttggacccccgaggcgtcggcattagcacaccactacagtgtgacccgagcgtctacaacgagcgtgtcaaagcctctcccaagacggaggaagagtttgatgctttggttcaacataacaaggacctggcagccagctgcatcgctagaacgggctccctgcttcagcacattgacaccataagtgccgcaaaagaccatgaagcggtacgcatagccttagggggtgagaaggcatcgttccttggactttcgtatggctcccagctcttcagccaatatgcgtcactataccctcacagcttccgcgctatgattctcgacggcaatcttgagcactcgcagtccgaagcctcaaatattctgaccgagactttgacgtaccaggccactttgcgccagttcttcaagtggtgtgctggtaatgacgagtgtgcgctacaaggacaggatgctgaggcggtgttcacgagcttgatagaacaagcagcagcgtcgcccatccctgcgccgggttgcgacggaagcagctgccggatcgaagtcaccgacgaggatatcctgttcggcacacaaggctttctcactgagcaatcgaattggccagtactggctgctgcgctcctcgaggcgagcgctggtaacgcaactatcatgtctcagggcacccagctagcagttggtgacccatataatgattctggactcttcgcaggtgtgggtattgcttgccaagactgggctcacttctcaacatctcttgccgatgtcacccagaagcagacgattggtaacgcgttcgctccactgacacgcggcgcaagccagagctaccgcatccaaaccgattgtatcggctggcccggtgccctggtgaacccgcccgccgctgtcaagtataccggcgatgtcacattattgcagatcaactccgtctacgacccgtctacttcatacgcctgggctgtcggcctcgaggctgaactcggcgctaacacggtgctcttaacccgcaatgggtccggtcatacgagctatatactcggtggtgagacgaccaaaatcgcaaatgcgtatttgttgaatcttgaaataccttctccaggtacggttgtggcgacgtag

SEQ ID NO: 21368 - protein, 501 aa, Muscodor strobelii
  misc_feature: SGI Peptide ID NO. 567233
  misc_feature (123)..(430): Pfam Id: PF00561 Pfam Desc: alpha/beta hydrolase fold
  misc_feature (395)..(499): Pfam Id: PF08386 Pfam Desc: TAP-like protein
  misc_feature (123)..(268): Pfam Id: PF00561 Pfam Desc: alpha/beta hydrolase fold
  misc_feature (75)..(501): NCBI GI: 169619802 Blast Desc: SNOG_13098 [Phaeosphaeria nodorum SN15] gi|160703905|gb|EAT79425.2| SNOG_13098 [Phaeosphaeria nodorum SN15]
  misc_feature (49)..(501): NCBI GI: 67903568 Blast Desc: AN8771.2 [Aspergillus nidulans FGSC A4] gi|40741374|gb|EAA60564.1| AN8771.2 [Aspergillus nidulans FGSC A4]
  misc_feature (49)..(501): NCBI GI: 259483025 Blast Desc: TPA: conserved [Aspergillus nidulans FGSC A4]
  misc_feature (30)..(497): NCBI GI: 256728785 Blast Desc: NECHADRAFT_72599 [Nectria haematococca mpVI 77-13-4]
  misc_feature (28)..(501): NCBI GI: 46110451 Blast Desc: FG02107.1 [Gibberella zeae PH-1]
  misc_feature (28)..(498): NCBI GI: 229864051 Blast Desc: hydrolase or acyltransferase of alpha/beta superfamily [Stackebrandtia nassauensis DSM 44728] gi|229749367|gb|EEP07161.1| hydrolase or acyltransferase of DSM
  misc_feature (33)..(497): NCBI GI: 256806829 Blast Desc: hydrolase [Streptomyces viridochromogenes DSM 40736]
  misc_feature (33)..(496): NCBI GI: 229861446 Blast Desc: alpha/beta hydrolase family protein [Stackebrandtia nassauensis DSM 44728] gi|229750097|gb|EEP07889.1| alpha/beta hydrolase family protein [Stackebrandtia nassauensis DSM 44728]
  misc_feature (32)..(496): NCBI GI: 260645096 Blast Desc: ase ( secreted protein) [Streptomyces scabiei 87.22]
  misc_feature (33)..(500): NCBI GI: 256376849 Blast Desc: TAP domain protein [Actinosynnema mirum DSM 43827] gi|255921152|gb|ACU36663.1| TAP domain protein [Actinosynnema mirum DSM 43827]
MLTFTRLTTAVVCAAHLGVAAPFYPNTARSQKISWGSCAESYPDTPFPSNLTCATLIVPRDWDHPDGNETISLGMVRLEATDEDNRIGYLFANPGGPGGPATGLVSALVEEPDILDPEIFAKFDIIGLDPRGVGISTPLQCDPSVYNERVKASPKTEEEFDALVQHNKDLAASCIARTGSLLQHIDTISAAKDHEAVRIALGGEKASFLGLSYGSQLFSQYASLYPHSFRAMILDGNLEHSQSEASNILTETLTYQATLRQFFKWCAGNDECALQGQDAEAVFTSLIEQAAASPIPAPGCDGSSCRIEVTDEDILFGTQGFLTEQSNWPVLAAALLEASAGNATIMSQGTQLAVGDPYNDSGLFAGVGIACQDWAHFSTSLADVTQKQTIGNAFAPLTRGASQSYRIQTDCIGWPGALVNPPAAVKYTGDVTLLQINSVYDPSTSYAWAVGLEAELGANTVLLTRNGSGHTSYILGGETTKIANAYLLNLEIPSPGTVVAT

SEQ ID NO: 21369 - DNA, 2592 bp, Muscodor strobelii
  misc_feature: SGI EST ID NO. CUFF.50096.0
  misc_feature: Variant of the nucleotide sequence at SEQ ID NO 21367
ttttaaatagcagtaaaggtcgtctccgcataactcctaaacgccgacccaatatggtagcctggagtctgacgatgttgatgaggcggagtagctgaatgattgattgtagcctagaattgagaggttatccgtacctggggcatatcatgaaagtgccagcaaagggtcatgcgttagtcacagcgtcgcagcattcatccgttcattctcaatggtaattgtatcccaacttacacacgtaatttagatcattccgattccacaaggtgttgcatgatgatcattgcctgattgagacccgatcaaccactgcctcgctacatagagcatgtctgtctactaaaaataccccgtagtatctgttttggggcgcatgagtgcatgagagtaaatgagttgcgctcccagagtaagggcaaagacgatatagagcacacgactctcgcgtcgattgtcacatccgtttccgactaccgcctctcacctctgaatccaacatcatcgtcgtcacaactcgcgagaaaatgttgacctttactcggctcaccactgccgtcgtctgcgctgcacatctgggcgtggcagcacctttctaccccaatacagcgagatctcagaagatatcatggggttcgtgcgcggagagttatcctgacactccgttccccagcaatcttacatgtgcgactctgattgttccccgagactgggatcatccggatggtaatgagacgatatcactcggaatggtgcgtttggaagccaccgatgaagacaaccgtattggatacctattcgccaacccgggcggacccggtggccctgcaactgggttagtatcagcactcgtggaagaacccgatatcctcgaccccgaaatcttcgccaagttcgatatcatcggcttggacccccgaggcgtcggcattagcacaccactacagtgtgacccgagcgtctacaacgagcgtgtcaaagcctctcccaagacggaggaagagtttgatgctttggttcaacataacaaggacctggcagccagctgcatcgctagaacgggctccctgcttcagcacattgacaccataagtgccgcaaaagaccatgaagcggtacgcatagccttagggggtgagaaggcatcgttccttggactttcgtatggctcccagctcttcagccaatatgcgtcactataccctcacagcttccgcgctatgattctcgacggcaatcttgagcactcgcagtccgaagcctcaaatattctgaccgagactttgacgtaccaggccactttgcgccagttcttcaagtggtgtgctggtaatgacgagtgtgcgctacaaggacaggatgctgaggcggtgttcacgagcttgatagaacaagcagcagcgtcgcccatccctgcgccgggttgcgacggaagcagctgccggatcgaagtcaccgacgaggatatcctgttcggcacacaaggctttctcactgagcaatcgaattggccagtactggctgctgcgctcctcgaggcgagcgctggtaacgcaactatcatgtctcagggcacccagctagcagttggtgacccatataatgattctggactcttcgcaggtgtgggtattgcttgccaagactgggctcacttctcaacatctcttgccgatgtcacccagaagcagacgattggtaacgcgttcgctccactgacacgcggcgcaagccagagctaccgcatccaaaccgattgtatcggctggcccggtgccctggtgaacccgcccgccgctgtcaagtataccggcgatgtcacattattgcagatcaactccgtctacgacccgtctacttcatacgcctgggctgtcggcctcgaggctgaactcggcgctaacacggtgctcttaacccgcaatgggtccggtcatacgagctatatactcggtggtgagacgaccaaaatcgcaaatgcgtatttgttgaatcttgaaataccttctccaggtacggttgtggcgacgtagtagaaattaacaataatcgtaatatggttgggctcggtcttgtactaacaacatattccttgcataatgacttaatctgcaaaatgacatctatttttgtctatcttctctggcgcctagtcaacccttgattaacaattgcattatcgcttgacacttactgtgaagtggtggaactgatatatgcaagaggctcgttcctgagactccgtctattataccaccaacacacccgcgtctcactttgacgcacgcttaggtgctgtcatctcctcgaatccttccttctgcgcctcgactcgtgctagtgcatactttttgagctctctcttttcctcctcgctcaacgattcataaacccctagccccgattctaagcagctctctcgggtctcgacgagcttcgcctccaggtcatccccgtgtaagtcgctgaactcgaaacttcgcatggtggcgtttccatagctcgtgaagtactcatctgacaagccagcgaaatcaccggtcaagaagtgcagaaatcctccgtgcgaaactaccacaatgtgcgcattat

SEQ ID NO: 21370 - DNA, 777 bp, Muscodor strobelii
  misc_feature: SGI cDNA ID NO. 567234
  misc_feature: Encodes the peptide sequence at SEQ ID NO 21371
atggctccgatcatagatgtcattcgacatggcgaagcaacgcacaacgtgactggaaacgtatgggagcgcgatcctaagctcacgagagaaggcaaagcccaagccggccggttacgtcgctcttacccctatacgaggctcatataccgcgtcgttagctctccgatgcagcgcgctgtagagactgcgctaatcgccttcgagtatcacacgtcaggtagacctgctatcttgctccccgagctgcaggagactggcgtgtatccgagcgaccatgggcttccacgaggtgatatctacgcaagatttcgtccgtacgtcgacgtcgacttgctagacgaaaactggaattataagggtcaaggctctaaataccagcctgatgtgccgctagtagaagcgcgagctcgagaggctcgagtgtttcttagggacctagcccgtaaggctcctgataatgcgcacattgtggtagtttcgcacggaggatttctgcacttcttgaccggtgatttcgctggcttgtcagatgagtacttcacgagctatggaaacgccaccatgcgaagtttcgagttcagcgacttacacggggatgacctggaggcgaagctcgtcgagacccgagagagctgcttagaatcggggctaggggtttatgaatcgttgagcgaggaggaaaagagagagctcaaaaagtatgcactagcacgagtcgaggcgcagaaggaaggattcgaggagatgacagcacctaagcgtgcgtcaaagtga

SEQ ID NO: 21371 - protein, 258 aa, Muscodor strobelii
  misc_feature: SGI Peptide ID NO. 567234
  misc_feature (4)..(169): Pfam Id: PF00300 Pfam Desc: Phosphoglycerate mutase family
  misc_feature (1)..(236): NCBI GI: 46128337 Blast Desc: FG08546.1 [Gibberella zeae PH-1]
  misc_feature (1)..(240): NCBI GI: 256734112 Blast Desc: NECHADRAFT_92004 [Nectria haematococca mpVI 77-13-4]
  misc_feature (1)..(249): NCBI GI: 156060535 Blast Desc: SS1G_02406 [Sclerotinia sclerotiorum 1980] gi|154699814|gb|EDN99552.1| SS1G_02406 [Sclerotinia sclerotiorum 1980]
  misc_feature (1)..(257): NCBI GI: 119489888 Blast Desc: phosphoglycerate mutase family protein [Neosartorya fischeri NRRL 181] gi|119411064|gb|EAW21007.1| phosphoglycerate mutase family protein [Neosartorya fischeri NRRL 181]
  misc_feature (1)..(241): NCBI GI: 171682482 Blast Desc: protein product [Podospora anserina] gi|170941200|emb|CAP66850.1| protein product [Podospora anserina]
  misc_feature (1)..(258): NCBI GI: 255932905 Blast Desc: Pc12g11030 [Penicillium chrysogenum Wisconsin 54-1255] gi|211582542|emb|CAP80730.1| Pc12g11030 [Penicillium chrysogenum Wisconsin 54-1255]
  misc_feature (1)..(212): NCBI GI: 168830922 Blast Desc: CtnF [Monascus aurantiacus]
  misc_feature (1)..(255): NCBI GI: 225557474 Blast Desc: phosphoglycerate mutase [Ajellomyces capsulatus G186AR]
  misc_feature (1)..(217): NCBI GI: 226292127 Blast Desc: phosphoglycerate mutase family protein [Paracoccidioides brasiliensis Pb18]
  misc_feature (1)..(257): NCBI GI: 154274826 Blast Desc: [Ajellomyces capsulatus NAm1] gi|150414704|gb|EDN10066.1| [Ajellomyces capsulatus NAm1]
  misc_feature (8)..(163): SWISSPROT Homolog: EC 5.4.2.1 Phosphoglycerate mutase
MAPIIDVIRHGEATHNVTGNVWERDPKLTREGKAQAGRLRRSYPYTRLIYRVVSSPMQRAVETALIAFEYHTSGRPAILLPELQETGVYPSDHGLPRGDIYARFRPYVDVDLLDENWNYKGQGSKYQPDVPLVEARAREARVFLRDLARKAPDNAHIVVVSHGGFLHFLTGDFAGLSDEYFTSYGNATMRSFEFSDLHGDDLEAKLVETRESCLESGLGVYESLSEEEKRELKKYALARVEAQKEGFEEMTAPKRASK

SEQ ID NO: 21372 - DNA, 1431 bp, Muscodor strobelii
  misc_feature: SGI cDNA ID NO. 567235
  misc_feature: Encodes the peptide sequence at SEQ ID NO 21373
atgtccgaacgtgccgagagctcatgttccgaagaatcactctcagtatggaaccaatgtgctccccgggtatatctctgcgtggtgctttgctttccatatgatgatggacctcgagttaatacaattcaccatttacgtaatgccctacggcggcttgctgctgagcgcccaatttttgctggacgtcttgttggcacccttgatggcaaagttattctgcaacgatcacgatcatttcagatccccttcgaagttgttcacaatacagacaaggacgacataggttatgcacagctgagagacgaagaattccctcctagtcatttcgttcatcctcggtttggaatacctggcggaatagatttcgaaggccccgagagaccagtatctaaagtcaacgccacgttcactcaaggtggattgttactctcaatcttcctgcatcacgcacttgccgacggtgcatcgcttcgagtgttcttagagagtttcggtaaccaaacgcgaagtatttcgacaaacttgccctctgatcaaaggcttcttgctccaagcattcgtccctatagtgtacctagccgtaagctatcagatatgtcctcgtacaaaaggctcacagccacctgccacgaatacaccacacttcccgatctcagcgggccaacgcagccacggctttacaagacaggcacttccatggataatataaacaagatagggagaatatttgttttcacaaccgagcgactgcagcaacttcgtgagctagtgaggacaagaaacggaacccgagacctaccaacagcctacaccagtctcgctgccttagcattcgcacatatcaccgacgcacgaatgaaatccgacacgttcctcacaggcattataccaagccagacctccttattgtggaattcggtcaattggaggccacgggcgtttcacggtactacgaacaattattttggcaacgcagctttaccggtcttgaccaaggtctcaagagaaaagctcatccgtgcttgccatgatgatgccgacctggcacaattggctccaatgattaaagagtcaattgacgtggtggacgaggaatacgtgagccggaggcagaccatgatgtccttagctcccaatccgcggatggttggtgttaactacgatccacgctcacccgagtccttagcatttaacacctggcgtcactttggggccgacgttgagtgggacataccaggcgttcctaccactaagcccgatgcgattcgacgagcttctggagcttggaatctaggaacagcgctgctactgccggccagagcagacgctccccaacaagaattattcatcagcttatcggtggaatctatgaatctcctctgtcaagatcagaggtggatgcaatgggtagacaggattattggttga

SEQ ID NO: 21373 - protein, 476 aa, Muscodor strobelii
  misc_feature: SGI Peptide ID NO. 567235
  misc_feature (1)..(468): Pfam Id: PF02458 Pfam Desc: Transferase family
  misc_feature (14)..(476): NCBI GI: 145605808 Blast Desc: MGG_06851 [Magnaporthe grisea 70-15] gi|145013591|gb|EDJ98232.1| MGG_06851 [Magnaporthe grisea 70-15]
  misc_feature (12)..(475): NCBI GI: 261360017 Blast Desc: conserved [Verticillium albo-atrum VaMs.102]
  misc_feature (14)..(446): NCBI GI: 164429173 Blast Desc: NCU05183 [Neurospora crassa OR74A] gi|157072968|gb|EDO65425.1| [Neurospora crassa OR74A]
  misc_feature (14)..(446): NCBI GI: 40882282 Blast Desc: [Neurospora crassa]
  misc_feature (14)..(475): NCBI GI: 40882283 Blast Desc: [Neurospora crassa]
  misc_feature (14)..(469): NCBI GI: 164429173 Blast Desc: NCU05183 [Neurospora crassa OR74A] gi|157072968|gb|EDO65425.1| [Neurospora crassa OR74A]
  misc_feature (21)..(475): NCBI GI: 145604020 Blast Desc: [Magnaporthe grisea 70-15] gi|145012122|gb|EDJ96778.1| [Magnaporthe grisea 70-15]
  misc_feature (95)..(475): NCBI GI: 171694642 Blast Desc: protein product [Podospora anserina] gi|170947563|emb|CAP59724.1| protein product [Podospora anserina]
  misc_feature (14)..(475): NCBI GI: 189195712 Blast Desc: [Pyrenophora tritici-repentis Pt-1C-BFP] gi|187980073|gb|EDU46699.1| [Pyrenophora tritici-repentis Pt-1C-BFP]
  misc_feature (10)..(472): NCBI GI: 46105218 Blast Desc: FG00237.1 [Gibberella zeae PH-1]
MSERAESSCSEESLSVWNQCAPRVYLCVVLCFPYDDGPRVNTIHHLRNALRRLAAERPIFAGRLVGTLDGKVILQRSRSFQIPFEVVHNTDKDDIGYAQLRDEEFPPSHFVHPRFGIPGGIDFEGPERPVSKVNATFTQGGLLLSIFLHHALADGASLRVFLESFGNQTRSISTNLPSDQRLLAPSIRPYSVPSRKLSDMSSYKRLTATCHEYTTLPDLSGPTQPRLYKTGTSMDNINKIGRIFVFTTERLQQLRELVRTRNGTRDLPTAYTSLAALAFAHITDARMKSDTFLTGIIPSQTSLLWNSVNWRPRAFHGTTNNYFGNAALPVLTKVSREKLIRACHDDADLAQLAPMIKESIDVVDEEYVSRRQTMMSLAPNPRMVGVNYDPRSPESLAFNTWRHFGADVEWDIPGVPTTKPDAIRRASGAWNLGTALLLPARADAPQQELFISLSVESMNLLCQDQRWMQWVDRIIG

SEQ ID NO: 21374 - DNA, 2974 bp, Muscodor strobelii
  misc_feature: SGI EST ID NO. CUFF.50224.2
  misc_feature: Variant of the nucleotide sequence at SEQ ID NO 21372
accaaatgtagtcttgacgtcttttggtcttgtgctaccgtttctgaaatatgagcctagtgctatgatcagctggggaggcgctgtcattgtgtacatctcggaagcgtcgtagtagactctatatcgtattgagcatgctgttatccttgtaattccaagcatactacctggcctcgagccagtcctaagaccgccagtcttacgctcttcagtctcagccttaatgaggggcgcaagagatcttcatcatctgtggtctttggcgctaagctgcggctggcgagcattcccttcggtcaaggaatcattcacctttttccctccttgtatatccaagtatctccaggcccgtgttttctccaactccttcaatattgctactctctctagatacactcttccactcatcagttgtcaagtcttgctaccctggtattttggtgtgcatataacaaacaacaacacgctatactcgccattgatatataaagagcacgccaagaacggtgtgacagtcagttattacagtcttactatcttctatatcctcccgcccgagtcgtagcagctggcttctctcacggaagatgcacctcccacagtcgcagactgtcggtttcggtgtaccgggtcgacatcgtcatcactgtcttcacaattccattgacataacaccgataccacacgatacgtggataggtcttgagccaaaacacccatgcgcaatgtccgaacgtgccgagagctcatgttccgaagaatcactctcagtatggaaccaatgtgctccccgggtatatctctgcgtggtgctttgctttccatatgatgatggacctcgagttaatacaattcaccatttacgtaatgccctacggcggcttgctgctgagcgcccaatttttgctggacgtcttgttggcacccttgatggcaaagttattctgcaacgatcacgatcatttcagatccccttcgaagttgttcacaatacagacaaggacgacataggttatgcacagctgagagacgaagaattccctcctagtcatttcgttcatcctcggtttggaatacctggcggaatagatttcgaaggccccgagagaccagtatctaaagtcaacgccacgttcactcaaggtggattgttactctcaatcttcctgcatcacgcacttgccgacggtgcatcgcttcgagtgttcttagagagtttcggtaaccaaacgcgaagtatttcgacaaacttgccctctgatcaaaggcttcttgctccaagcattcgtccctatagtgtacctagccgtaagctatcagatatgtcctcgtacaaaaggctcacagccacctgccacgaatacaccacacttcccgatctcagcgggccaacgcagccacggctttacaagacaggcacttccatggataatataaacaagatagggagaatatttgttttcacaaccgagcgactgcagcaacttcgtgagctagtgaggacaagaaacggaacccgagacctaccaacagcctacaccagtctcgctgccttagcattcgcacatatcaccgacgcacgaatgaaatccgacacgttcctcacaggcattataccaagccagacctccttattgtggaattcggtcaattggaggccacgggcgtttcacggtactacgaacaattattttggcaacgcagctttaccggtcttgaccaaggtctcaagagaaaagctcatccgtgcttgccatgatgatgccgacctggcacaattggctccaatgattaaagagtcaattgacgtggtggacgaggaatacgtgagccggaggcagaccatgatgtccttagctcccaatccgcggatggttggtgttaactacgatccacgctcacccgagtccttagcatttaacacctggcgtcactttggggccgacgttgagtgggacataccaggcgttcctaccactaagcccgatgcgattcgacgagcttctggagcttggaatctaggaacagcgctgctactgccggccagagcagacgctccccaacaagaattattcatcagcttatcggtggaatctatgaatctcctctgtcaagatcagaggtggatgcaatgggtagacaggattattggttgaacgctctaatgatacgcgggtacatacatggacggacatgatgctgtacagtaggaaaaagaaaggacctttggctgataatttgcccgctcatgacacatacaacatgattttccattgcccgtgataaatctggctctgctcactggcagatctggggaagatcttgagccttgggcaatttcctagagtgatttaccttgttccctaatgattgaggttcagttgctattcaataggtaggtcaaacaatagtctagtcacatctccctgtcgcgattttgtcgcctgcgtactatgtcctgcgtcatttcccgtagcttctgccttcttttcgccttgttgtttttctttttcgaggcaaccggatcttccccgttagtcaactggcatatttcgtctttacactcttcaccgtgtgacgcttaccatgtttccgcatgtcctcgctacctaacatagactgcgtcgagtctgaccttgccaaattacattacagggcgcgtgcaacacagaagggtctacaattttgaagtatagtaaagcgtgttagcagtgaggcgtcgttcctggcctcgacccacatggttggtgggagggtacatgtggatagtctccgcttaccacgccaatacccatgatttcccattttcccccaatttctccaacttcaaggctacctcccaagacctgcttatttctcaaatccgattcatgaagggtgcttgttgcactcactcctacaagcaaagcgctcggtgaatcgtatgactacgcgtcaacaagaatcctgagtgctacgtcgtggtcatcat

SEQ ID NO: 21375 - DNA, 573 bp, Muscodor strobelii
  misc_feature: SGI cDNA ID NO. 567236
  misc_feature: Encodes the peptide sequence at SEQ ID NO 21376
atgaaatccgacacgttcctcacaggcattataccaagccagacctccttattgtggaattcggtcaattggaggccacgggcgtttcacggtactacgaacaattattttggcaacgcagctttaccggtcttgaccaaggtctcaagagaaaagctcatccgtgcttgccatgatgatgccgacctggcacaattggctccaatgattaaagagtcaattgacgtggtggacgaggaatacgtgagccggaggcagaccatgatgtccttagctcccaatccgcggatggttggtgttaactacgatccacgctcacccgagtccttagcatttaacacctggcgtcactttggggccgacgttgagtgggacataccaggcgttcctaccactaagcccgatgcgattcgacgagcttctggagcttggaatctaggaacagcgctgctactgccggccagagcagacgctccccaacaagaattattcatcagcttatcggtggaatctatgaatctcctctgtcaagatcagaggtggatgcaatgggtagacaggattattggttga

SEQ ID NO: 21376 - protein, 190 aa, Muscodor strobelii
  misc_feature: SGI Peptide ID NO. 567236
  misc_feature (34)..(190): NCBI GI: 145605808 Blast Desc: MGG_06851 [Magnaporthe grisea 70-15] gi|145013591|gb|EDJ98232.1| MGG_06851 [Magnaporthe grisea 70-15]
  misc_feature (14)..(189): NCBI GI: 145604020 Blast Desc: [Magnaporthe grisea 70-15] gi|145012122|gb|EDJ96778.1| [Magnaporthe grisea 70-15]
  misc_feature (22)..(189): NCBI GI: 261360017 Blast Desc: conserved [Verticillium albo-atrum VaMs.102]
  misc_feature (33)..(189): NCBI GI: 40882283 Blast Desc: [Neurospora crassa]
  misc_feature (33)..(183): NCBI GI: 164429173 Blast Desc: NCU05183 [Neurospora crassa OR74A] gi|157072968|gb|EDO65425.1| [Neurospora crassa OR74A]
  misc_feature (32)..(160): NCBI GI: 164429173 Blast Desc: NCU05183 [Neurospora crassa OR74A] gi|157072968|gb|EDO65425.1| [Neurospora crassa OR74A]
  misc_feature (32)..(160): NCBI GI: 40882282 Blast Desc: [Neurospora crassa]
  misc_feature (63)..(189): NCBI GI: 171694642 Blast Desc: protein product [Podospora anserina] gi|170947563|emb|CAP59724.1| protein product [Podospora anserina]
MKSDTFLTGIIPSQTSLLWNSVNWRPRAFHGTTNNYFGNAALPVLTKVSREKLIRACHDDADLAQLAPMIKESIDVVDEEYVSRRQTMMSLAPNPRMVGVNYDPRSPESLAFNTWRHFGADVEWDIPGVPTTKPDAIRRASGAWNLGTALLLPARADAPQQELFISLSVESMNLLCQDQRWMQWVDRIIG

SEQ ID NO: 21377 - DNA, 2974 bp, Muscodor strobelii; identical to SEQ ID NO: 21374
  misc_feature: SGI EST ID NO. CUFF.50224.2
  misc_feature: Variant of the nucleotide sequence at SEQ ID NO 21375

SEQ ID NO: 21378 - DNA, 789 bp, Muscodor strobelii
  misc_feature: SGI cDNA ID NO. 567237
  misc_feature: Encodes the peptide sequence at SEQ ID NO 21379
atgcgcaatccctccaacctcttcgatctcaagtcggatgatccaaagcgaaatgagtatatcatcaagaaagcaaaagatgctgtgaaggatcatgttcacggacacgaggagacactaaaggaaatcaacaagattgtttgcattggccttggttctacagttggtgtatggaacacatcatctcaaggttgtgagaaggccgagcaataccgcgtctgtgcccagtactcaacagcacttgctctcgcagaactaattcgggaaatcaacggtaaagatgtagaaatttttgcttccgaccccaagttgacgataggagaaattgaatgctttcctaaagtgggtatacaggttgttaatccacacaaccacgaagtatacggcttgatagattccaacacattcgttttgtccatttgcgccgaacgacaaatgaagctagaaaacattcttatgcagactagcaggccggcaggcatgttgatagagccctacgtcctacggaaaagagggaaacggattttggcattctatagagactatacgtatgttgattgcgaagccttcaagaagagatacattacttttgaggatcaaaagactcttgctcctttgggacctggcaccgccctattcatcaagcgtcctcagtctctgacgactaacacaacggaacagaaaaagttgagtggagaaacgattactcaaacttcgaaagaatcaactacaaagaaaagaaaacgagagtcggacgaggatgagcggccagcaaagagaagaaggtga

SEQ ID NO: 21379 - protein, 262 aa, Muscodor strobelii
  misc_feature: SGI Peptide ID NO. 567237
  misc_feature (43)..(162): NCBI GI: 145246068 Blast Desc: An12g01970 [Aspergillus niger] gi|134079995|emb|CAK48479.1| protein product [Aspergillus niger]
MRNPSNLFDLKSDDPKRNEYIIKKAKDAVKDHVHGHEETLKEINKIVCIGLGSTVGVWNTSSQGCEKAEQYRVCAQYSTALALAELIREINGKDVEIFASDPKLTIGEIECFPKVGIQVVNPHNHEVYGLIDSNTFVLSICAERQMKLENILMQTSRPAGMLIEPYVLRKRGKRILAFYRDYTYVDCEAFKKRYITFEDQKTLAPLGPGTALFIKRPQSLTTNTTEQKKLSGETITQTSKESTTKKRKRESDEDERPAKRRR

SEQ ID NO: 21380 - DNA, 1278 bp, Muscodor strobelii
  misc_feature: SGI cDNA ID NO. 567238
  misc_feature: Reduced expression when VOC is produced
  misc_feature: Encodes the peptide sequence at SEQ ID NO 21381
atgagttccaccgatcggaaacctatccttatctcaggcgccggcctggcctctcttctgctcgcacaagctttgctccgcgctaacattccctttcgtatcttcgagaaggacaaagacatcagttttcgcgcccagggatataggctccgtctttcgatcgaagggctcgatgctatcgaagctgttctcgggcccgaagggttcaagaaattttgggagacttgtggaaagacgggaggtgctggcttcgcggcgatcaatgcgataaccggggaaagaatattcgaagggccgccagattaccagagctcggagaaggatgccactgatgaagctccaaaggtccttaaagagaaattggtttcacgcggcggtcaagttgttggaatatcaagaggcgatatgcgcagactcttcctagaaggatgcgagcctttcattgactggtcacaccaagtcatgggctacgaattgacagagtccggagttcgcgccatcttcgccgatggatccaaatctgtggagggagagatgcttataggtggcgaaggcatttactctcgcgttgctgaacaactctccgaaggcaggctcaaagtctttgacactggtgcccgaggaatccacggtcaggcaccgacgactgccttcaaacagctaggagagggtgtcttcagggtggccgatgacacgcgacctgatgggaaagtttttgcaatcaccaatgtacggtcgggcgacatggaaaatcccgatatagagtttggttggacgttaagaaagctggctgacatatctctgaatactaggatgggcgctcaaccaggtgtcatcaaagcaccgaatgatgattacactattaccggagcggcagcggcagacattgcgaaatcaatcaccgccaactggcatacaagcttgaaacctctctttgatcaaatgtctgtgagcaatgctgcattctggaagataacttgtagcaacccatcgggtgtgccagaatggacgaatcagccacgggtgacagtgattggagatgcagctcactcgatgacaccagcaggaggtattggagccaatactgctgtacgagactctgctcttctcggcagactacttgctgaaagcaaagggttcagtgacggcgtcacagctgcgtatgaaaaggaaatgagaatttatgctagtgaagccgttcgaactagctacggaatggccagaggccaattcggcgttacaattgacgaaaatacggcgactattcgaagatcctaa

SEQ ID NO: 21381 - protein, 425 aa, Muscodor strobelii
  misc_feature: SGI Peptide ID NO. 567238
  misc_feature (6)..(403): Pfam Id: PF01494 Pfam Desc: FAD binding domain
  misc_feature (345)..(376): Pfam Id: PF01494 Pfam Desc: FAD binding domain
  misc_feature (6)..(422): NCBI GI: 169626178 Blast Desc: SNOG_16367 [Phaeosphaeria nodorum SN15] gi|111055072|gb|EAT76192.1| SNOG_16367 [Phaeosphaeria nodorum SN15]
  misc_feature (4)..(420): NCBI GI: 171676338 Blast Desc: protein product [Podospora anserina] gi|170936235|emb|CAP60894.1| protein product [Podospora anserina]
  misc_feature (7)..(422): NCBI GI: 256730391 Blast Desc: NECHADRAFT_82847 [Nectria haematococca mpVI 77-13-4]
  misc_feature (4)..(416): NCBI GI: 189206592 Blast Desc: conserved [Pyrenophora tritici-repentis Pt-1C-BFP] gi|187975723|gb|EDU42349.1| conserved [Pyrenophora tritici-repentis Pt-1C-BFP]
  misc_feature (238)..(420): NCBI GI: 261352855 Blast Desc: conserved [Verticillium albo-atrum VaMs.102]
  misc_feature (21)..(413): NCBI GI: 169765924 Blast Desc: [Aspergillus oryzae RIB40] gi|238482537|ref|XP_002372507.1| conserved [Aspergillus flavus NRRL3357] gi|83765288|dbj|BAE55431.1| protein product oryzae]
  misc_feature (19)..(403): NCBI GI: 66807967 Blast Desc: DDB_G0286363 [Dictyostelium discoideum AX4] gi|60466143|gb|EAL64206.1| DDB_G0286363 [Dictyostelium discoideum AX4]
  misc_feature (21)..(424): NCBI GI: 238842571 Blast Desc: cercosporin toxin biosynthesis protein [Microsporum canis CBS 113480]
  misc_feature (9)..(410): NCBI GI: 154623208 Blast Desc: FAD-depending monooxygenase [Streptomyces tendae]
  misc_feature (27)..(404): NCBI GI: 145258566 Blast Desc: An04g07370 [Aspergillus niger] gi|134074705|emb|CAK44737.1| protein product [Aspergillus niger]
  misc_feature: Useful for introducing or modulating the production of volatile compounds
MSSTDRKPILISGAGLASLLLAQALLRANIPFRIFEKDKDISFRAQGYRLRLSIEGLDAIEAVLGPEGFKKFWETCGKTGGAGFAAINAITGERIFEGPPDYQSSEKDATDEAPKVLKEKLVSRGGQVVGISRGDMRRLFLEGCEPFIDWSHQVMGYELTESGVRAIFADGSKSVEGEMLIGGEGIYSRVAEQLSEGRLKVFDTGARGIHGQAPTTAFKQLGEGVFRVADDTRPDGKVFAITNVRSGDMENPDIEFGWTLRKLADISLNTRMGAQPGVIKAPNDDYTITGAAAADIAKSITANWHTSLKPLFDQMSVSNAAFWKITCSNPSGVPEWTNQPRVTVIGDAAHSMTPAGGIGANTAVRDSALLGRLLAESKGFSDGVTAAYEKEMRIYASEAVRTSYGMARGQFGVTIDENTATIRRS

SEQ ID NO: 21382 - DNA, 1905 bp, Muscodor strobelii
  misc_feature: SGI EST ID NO. CUFF.50416.1
  misc_feature: Variant of the nucleotide sequence at SEQ ID NO 21380
cttgcaagtacttggatagaatttcgctgattgatttgatgacaagtctttgatttcaaatggaaggcactaagtcgcgatggcgagcctagtgagcaatgcccccgcttttgggattgcctgctgcaattgatctcatcatcttcaagacaagattcgtcatcccagtggcatataaacatcgagatagctacctgcttaatatagagaagacgcgtcgaggaaatatataccttttaatagtcttattagttgcttccgttccaacacagtgttctaccataattcttgatcgaaccctcacgttgataactagcacattcgtctaccataatgagttccaccgatcggaaacctatccttatctcaggcgccggcctggcctctcttctgctcgcacaagctttgctccgcgctaacattccctttcgtatcttcgagaaggacaaagacatcagttttcgcgcccagggatataggctccgtctttcgatcgaagggctcgatgctatcgaagctgttctcgggcccgaagggttcaagaaattttgggagacttgtggaaagacgggaggtgctggcttcgcggcgatcaatgcgataaccggggaaagaatattcgaagggccgccagattaccagagctcggagaaggatgccactgatgaagctccaaaggtccttaaagagaaattggtttcacgcggcggtcaagttgttggaatatcaagaggcgatatgcgcagactcttcctagaaggatgcgagcctttcattgactggtcacaccaagtcatgggctacgaattgacagagtccggagttcgcgccatcttcgccgatggatccaaatctgtggagggagagatgcttataggtggcgaaggcatttactctcgcgttgctgaacaactctccgaaggcaggctcaaagtctttgacactggtgcccgaggaatccacggtcaggcaccgacgactgccttcaaacagctaggagagggtgtcttcagggtggccgatgacacgcgacctgatgggaaagtttttgcaatcaccaatgtacggtcgggcgacatggaaaatcccgatatagagtttggttggacggtatgtgaaagactctgcgctcccgattagaaaacccctcgctcatagagagtctatttgtatgtttctgctaactatcaaaacagatgggcgctcaaccaggtgtcatcaaagcaccgaatgatgattacactattaccggagcggcagcggcagacattgcgaaatcaatcaccgccaactggcatacaagcttgaaacctctctttgatcaaatgtctgtgagcaatgctgcattctggaagataacttgtagcaacccatcgggtgtgccagaatggacgaatcagccacgggtgacagtgattggagatgcagctcactcgatgacaccagcaggaggtattggagccaatactgctgtacgagactctgctcttctcggcagactacttgctgaaagcaaagggttcagtgacggcgtcacagctgcgtatgaaaaggaaatgagaatttatgctagtgaagccgttcgaactagctacggaatggccagaggccaattcggcgttacaattgacgaaaatacggcgactattcgaagatcctaaacaccaaactaggcacaagtttggacttttccgagttcatgattttaacgcaattgatggttcaagacttcagcatatagcgaatccgggaaggtagacttacacgtccaacgatgaaggctgagctctaggacgtagaatagactcatgtatgaccatagactcggaattagaactgattcatgcttcaattagccttcattaaccatcatgaacacgccaatatacatttatccacaatgat

SEQ ID NO: 21383 - DNA, 1254 bp, Muscodor strobelii
  misc_feature: SGI cDNA ID NO. 567239
  misc_feature: Reduced expression when VOC is produced
  misc_feature: Encodes the peptide sequence at SEQ ID NO 21384
atgagttccaccgatcggaaacctatccttatctcaggcgccggcctggcctctcttctgctcgcacaagctttgctccgcgctaacattccctttcgtatcttcgagaaggacaaagacatcagttttcgcgcccagggatataggctccgtctttcgatcgaagggctcgatgctatcgaagctgttctcgggcccgaagggttcaagaaattttgggagacttgtggaaagacgggaggtgctggcttcgcggcgatcaatgcgataaccggggaaagaatattcgaagggccgccagattaccagagctcggagaaggatgccactgatgaagctccaaaggtccttaaagagaaattggtttcacgcggcggtcaagttgttggaatatcaagaggcgatatgcgcagactcttcctagaaggatgcgagcctttcattgactggtcacaccaagtcatgggctacgaattgacagagtccggagttcgcgccatcttcgccgatggatccaaatctgtggagggagagatgcttataggtggcgaaggcatttactctcgcgttgctgaacaactctccgaaggcaggctcaaagtctttgacactggtgcccgaggaatccacggtcaggcaccgacgactgccttcaaacagctaggagagggtgtcttcagggtggccgatgacacgcgacctgatgggaaagtttttgcaatcaccaatgtacggtcgggcgacatggaaaatcccgatatagagtttggttggacgagagtctatttgatgggcgctcaaccaggtgtcatcaaagcaccgaatgatgattacactattaccggagcggcagcggcagacattgcgaaatcaatcaccgccaactggcatacaagcttgaaacctctctttgatcaaatgtctgtgagcaatgctgcattctggaagataacttgtagcaacccatcgggtgtgccagaatggacgaatcagccacgggtgacagtgattggagatgcagctcactcgatgacaccagcaggaggtattggagccaatactgctgtacgagactctgctcttctcggcagactacttgctgaaagcaaagggttcagtgacggcgtcacagctgcgtatgaaaaggaaatgagaatttatgctagtgaagccgttcgaactagctacggaatggccagaggccaattcggcgttacaattgacgaaaatacggcgactattcgaagatcctaa

SEQ ID NO: 21384 - protein, 417 aa, Muscodor strobelii
  misc_feature: SGI Peptide ID NO. 567239
  misc_feature (6)..(395): Pfam Id: PF01494 Pfam Desc: FAD binding domain
  misc_feature (337)..(368): Pfam Id: PF01494 Pfam Desc: FAD binding domain
  misc_feature (6)..(414): NCBI GI: 169626178 Blast Desc: SNOG_16367 [Phaeosphaeria nodorum SN15] gi|111055072|gb|EAT76192.1| SNOG_16367 [Phaeosphaeria nodorum SN15]
  misc_feature (4)..(412): NCBI GI: 171676338 Blast Desc: protein product [Podospora anserina] gi|170936235|emb|CAP60894.1| protein product [Podospora anserina]
  misc_feature (7)..(414): NCBI GI: 256730391 Blast Desc: NECHADRAFT_82847 [Nectria haematococca mpVI 77-13-4]
  misc_feature (4)..(408): NCBI GI: 189206592 Blast Desc: conserved [Pyrenophora tritici-repentis Pt-1C-BFP] gi|187975723|gb|EDU42349.1| conserved [Pyrenophora tritici-repentis Pt-1C-BFP]
  misc_feature (238)..(412): NCBI GI: 261352855 Blast Desc: conserved [Verticillium albo-atrum VaMs.102]
  misc_feature (21)..(405): NCBI GI: 169765924 Blast Desc: [Aspergillus oryzae RIB40] gi|238482537|ref|XP_002372507.1| conserved [Aspergillus flavus NRRL3357] gi|83765288|dbj|BAE55431.1| protein product oryzae]
  misc_feature (9)..(402): NCBI GI: 154623208 Blast Desc: FAD-depending monooxygenase [Streptomyces tendae]
  misc_feature (19)..(395): NCBI GI: 66807967 Blast Desc: DDB_G0286363 [Dictyostelium discoideum AX4] gi|60466143|gb|EAL64206.1| DDB_G0286363 [Dictyostelium discoideum AX4]
  misc_feature (21)..(416): NCBI GI: 238842571 Blast Desc: cercosporin toxin biosynthesis protein [Microsporum canis CBS 113480]
  misc_feature (27)..(396): NCBI GI: 145258566 Blast Desc: An04g07370 [Aspergillus niger] gi|134074705|emb|CAK44737.1| protein product [Aspergillus niger]
  misc_feature: Useful for introducing or modulating the production of volatile compounds
MSSTDRKPILISGAGLASLLLAQALLRANIPFRIFEKDKDISFRAQGYRLRLSIEGLDAIEAVLGPEGFKKFWETCGKTGGAGFAAINAITGERIFEGPPDYQSSEKDATDEAPKVLKEKLVSRGGQVVGISRGDMRRLFLEGCEPFIDWSHQVMGYELTESGVRAIFADGSKSVEGEMLIGGEGIYSRVAEQLSEGRLKVFDTGARGIHGQAPTTAFKQLGEGVFRVADDTRPDGKVFAITNVRSGDMENPDIEFGWTRVYLMGAQPGVIKAPNDDYTITGAAAADIAKSITANWHTSLKPLFDQMSVSNAAFWKITCSNPSGVPEWTNQPRVTVIGDAAHSMTPAGGIGANTAVRDSALLGRLLAESKGFSDGVTAAYEKEMRIYASEAVRTSYGMARGQFGVTIDENTATIRRS

SEQ ID NO: 21385 - DNA, 1905 bp, Muscodor strobelii; identical to SEQ ID NO: 21382
  misc_feature: SGI EST ID NO. CUFF.50416.1
  misc_feature: Variant of the nucleotide sequence at SEQ ID NO 21383

SEQ ID NO: 21386 - DNA, 1800 bp, Muscodor strobelii
  misc_feature: SGI cDNA ID NO. 567240
  misc_feature: Encodes the peptide sequence at SEQ ID NO 21387
atgccactctggtcatcggtctggagtcctaacatatacgcctttttcagtttcggtactaccttcactggcgttgtgtgggctcacacatcgaacccgaaattccagacaatcgaaaactggccacaggggctagacggcattgctggaactaaagttccaacaaaactcatgtattcagtcaaccaagatttttcttggggatatgctgccgaggagagctctggccaggttcattctctattcaagcttgctcttgagccccagaagtacaatgatgctgttagcactctgggtgcgacgttgcattacccaaatcttgaccaaatgatcaccgattatcttactggagtgtttcgacatgtaatgcaaactattcgtcggtccattgggatagctatggtcgaccgagccgcaactcgcgtggttgtgacggtgcccgctatttggaccgaacgctccaggcagcgcactcttcaagccgtaaaaaacatccccggacttccacagcccttcgaggcatcattgttctcagagcctgaggcagctgccttgtcttcgctccaacagctcaaagacctcaacagtcgcgaagcactaagtatcggagacaccttcattgttgtagatgcaggcggcggtacagttgacttagtcacttacactatcagcgagactttgccaactttggtggtaaaagaagctgcagaaggcacgggaagtatctgcggtgctgccctcgcaactttgcggtttgagcattttcttgagtccaaactaggcaaagaggcgggatgggacaatgaaacattgcaagaagcggcccggacattcgaaacacgagtaagttcatatgcaatcttgcatagacggaactctataactgattccattaaggtgaaaagaagttttactgcagatgatgttgtggccaacagaacttataacattcctgtacctggacttcgcctcaataaggacattgatgttactcgcaacgggcgtttttccctcaaagcagctgatgttcacatgttcttcgagcctgacatcctggaaataattcgcttggtcaaggagcagattgccatgtgcacgaccacagttcattccatcttattggtgggaggatatgggcaatcaaactatctaagagaaagattgagcttggttttcgaaaaaggagcaaatattcaaatgcccattccaattcttcagccaccgaaagcatggatcgccgtcgcccaaggtgctgcaatgaaagcattaacagaagtgaagccagaatttgatgggccagtttcccgtgtcaaatcaaggatcgcccgcaagcattatggcatacaactcggtgtccagttcattcccaccacccatgcaaaattatccgatcggaaatactgggacagctatggaggcatttggcgcgtccaagctatgaactggcttcttactcgtggacaggaagtatctgagagtgtgccattccgggaagagttcatgattacatggcctgtgagcactcaatattcgcgaaaattcacacttgatgtgtactgtgacagcacatctactacggcaccgattgaacgctcccccaatgtcgagtatctctgtcgcttgacagctaacctgagtgctattccggatgaccagctagagaagaaacgaggtgctgacggcaacatgcactatattgtggatttcgagattgaatcactgtatcacgcagcacacacagaatatgcgctcatttacaaagatcagcgatatgataccgtcactgcagagtatatctaa

SEQ ID NO: 21387 - protein, 599 aa, Muscodor strobelii
  misc_feature: SGI Peptide ID NO. 567240
  misc_feature (12)..(599): NCBI GI: 46123273 Blast Desc: FG06014.1 [Gibberella zeae PH-1]
  misc_feature (12)..(599): NCBI GI: 256732552 Blast Desc: [Nectria haematococca mpVI 77-13-4]
  misc_feature (6)..(597): NCBI GI: 116205369 Blast Desc: CHGG_10568 [Chaetomium globosum CBS 148.51] gi|88176696|gb|EAQ84164.1| CHGG_10568 [Chaetomium globosum CBS 148.51]
  misc_feature (11)..(599): NCBI GI: 261357181 Blast Desc: Hsp70-like protein [Verticillium albo-atrum VaMs.102]
  misc_feature (18)..(598): NCBI GI: 67516611 Blast Desc: AN0587.2 [Aspergillus nidulans FGSC A4] gi|40747530|gb|EAA66686.1| AN0587.2 [Aspergillus nidulans FGSC A4] gi|259489146|tpe|CBF89177.1| TPA: Hsp70 family chaperone, A4]
  misc_feature (18)..(598): NCBI GI: 212545460 Blast Desc: conserved [Penicillium marneffei ATCC 18224] gi|210065853|gb|EEA19947.1| conserved [Penicillium marneffei ATCC 18224]
  misc_feature (18)..(599): NCBI GI: 115395926 Blast Desc: [Aspergillus terreus NIH2624] gi|114193171|gb|EAU34871.1| [Aspergillus terreus NIH2624]
  misc_feature (36)..(582): NCBI GI: 242815794 Blast Desc: Hsp70 family chaperone, [Talaromyces stipitatus ATCC 10500] gi|218714979|gb|EED14402.1| Hsp70 family chaperone, [Talaromyces stipitatus ATCC 10500]
  misc_feature (83)..(599): NCBI GI: 145252644 Blast Desc: An16g05270 [Aspergillus niger] gi|134083388|emb|CAK97381.1| protein product [Aspergillus niger]
  misc_feature (143)..(598): NCBI GI: 169777005 Blast Desc: [Aspergillus oryzae RIB40] gi|83771705|dbj|BAE61835.1| protein product [Aspergillus oryzae]
MPLWSSVWSPNIYAFFSFGTTFTGVVWAHTSNPKFQTIENWPQGLDGIAGTKVPTKLMYSVNQDFSWGYAAEESSGQVHSLFKLALEPQKYNDAVSTLGATLHYPNLDQMITDYLTGVFRHVMQTIRRSIGIAMVDRAATRVVVTVPAIWTERSRQRTLQAVKNIPGLPQPFEASLFSEPEAAALSSLQQLKDLNSREALSIGDTFIVVDAGGGTVDLVTYTISETLPTLVVKEAAEGTGSICGAALATLRFEHFLESKLGKEAGWDNETLQEAARTFETRVSSYAILHRRNSITDSIKVKRSFTADDVVANRTYNIPVPGLRLNKDIDVTRNGRFSLKAADVHMFFEPDILEIIRLVKEQIAMCTTTVHSILLVGGYGQSNYLRERLSLVFEKGANIQMPIPILQPPKAWIAVAQGAAMKALTEVKPEFDGPVSRVKSRIARKHYGIQLGVQFIPTTHAKLSDRKYWDSYGGIWRVQAMNWLLTRGQEVSESVPFREEFMITWPVSTQYSRKFTLDVYCDSTSTTAPIERSPNVEYLCRLTANLSAIPDDQLEKKRGADGNMHYIVDFEIESLYHAAHTEYALIYKDQRYDTVTAEYI

SEQ ID NO: 21388 - DNA, 471 bp, Muscodor strobelii
  misc_feature: SGI cDNA ID NO. 567241
  misc_feature: Encodes the peptide sequence at SEQ ID NO 21389
atgccaacgctcattctgctctcgtgcgacgaatatgacctgtttcggcgagaccctaatttcaaaagtgctttacaacttcaagctatcagggaggaaaaggactctcgggagaatgaggaaatgctacgacaaatcaaagaagccgaagatcgatatacccagagtctgctcgacgaggaagcagcagcagcggctcggcgtcaggcagaaattgagcgccaggaacgcgaaccacacaaggcagaggaaaaatcaagactgaaagagcagcaaagattgagacaaattgcaatagaccttgaaaaacgcaaacgaaaggaagagtcgaaaacccaaggcgttctccctcagctggccaagaaatgtcctggctgtcaacgtcctattcaaaagaacggcggctgtgaccatatgtactgcacccagtgtggtactcacttcaactggagtggtacgcgatacggctag

SEQ ID NO: 21389 - protein, 156 aa, Muscodor strobelii
  misc_feature: SGI Peptide ID NO. 567241
  misc_feature (7)..(148): NCBI GI: 256732993 Blast Desc: NECHADRAFT_59963 [Nectria haematococca mpVI 77-13-4]
  misc_feature (105)..(150): NCBI GI: 50557084 Blast Desc: YALI0F27511p [Yarrowia lipolytica] gi|49651820|emb|CAG78762.1| YALI0F27511p [Yarrowia lipolytica]
  misc_feature (7)..(148): NCBI GI: 46123271 Blast Desc: FG06013.1 [Gibberella zeae PH-1]
  misc_feature (7)..(150): NCBI GI: 116205373 Blast Desc: CHGG_10570 [Chaetomium globosum CBS 148.51] gi|88176698|gb|EAQ84166.1| CHGG_10570 [Chaetomium globosum CBS 148.51]
  misc_feature (7)..(142): NCBI GI: 261357183 Blast Desc: conserved [Verticillium albo-atrum VaMs.102]
  misc_feature (7)..(139): NCBI GI: 212545456 Blast Desc: RING finger protein, [Penicillium marneffei ATCC 18224] gi|210065851|gb|EEA19945.1| RING finger protein, [Penicillium marneffei ATCC 18224]
  misc_feature (105)..(150): NCBI GI: 284089961 Blast Desc: [Naegleria gruberi]
  misc_feature (96)..(150): NCBI GI: 116060524 Blast Desc: E3 ubiquitin ligase (ISS) [Ostreococcus tauri]
  misc_feature (101)..(150): NCBI GI: 15232252 Blast Desc: zinc finger protein-related [Arabidopsis thaliana]
  misc_feature (101)..(150): NCBI GI: 218563493 Blast Desc: zinc finger protein-related [Arabidopsis thaliana]
MPTLILLSCDEYDLFRRDPNFKSALQLQAIREEKDSRENEEMLRQIKEAEDRYTQSLLDEEAAAAARRQAEIERQEREPHKAEEKSRLKEQQRLRQIAIDLEKRKRKEESKTQGVLPQLAKKCPGCQRPIQKNGGCDHMYCTQCGTHFNWSGTRYG

SEQ ID NO: 21390 - DNA, 1599 bp, Muscodor strobelii
  misc_feature: SGI cDNA ID NO. 567242
  misc_feature: Encodes the peptide sequence at SEQ ID NO 21391
atggcaaagaatattgcttgtcttataattggtggtggtccgacgggaatggcgctggctctcgagctcgccgtccaaaagggagttacatttcgtatcattgacaaagccaccgacaggtcaccctactctcgcgccttagtgatgcagcctaggacattagagcttctcagacgacacggacctatcgacgacctcatcaatgccggaaccacagccgacggagtatctatgtgtgttctgggcaagaaaatcgtcgacatcaacgtcgcagatgtagcgattccaggcactcagtttcctcagttaggagtgtctcaatgcgaaaccgaaaagtggctagagaaaacccttcgtctcaaacacggagtccaagtcgagatgggaatacaggccaagactattacgcaggacacggaaggtgttacggttgtcacatcggcagaagatgggtctgaagaggtcatacacgccaaatatataattggtgccgatggcgctcacagtgtggttcgccatgctgcaaaaaatctgacctttgagggtgatgcatatcgccaggagttcatcctcgcggattgtcatttgaaaagcgagtaccctccaaaccgagcctatatgtgcttaggcaaaggcgtgatggtagttttaccaatgaacaggagcggattggtgcgactcgtagtatctcgccctggtcaagacaatagcagagatccgaaacttgaagactttgaagagttcatgcaagagatattccctggaggcggttcgctgcatgacccaacttggataacacggttccgtcttcaccatcgtggagtcaacaactaccgtgatggaagactgtttgtcgcaggcgatgccgcccatattcacagtccagctggaggacaaggcatgaatacaggcatccaagactcgatcaacctggggtggaaattaggggctgtacttcgtggcgagaaaccagattcattcctcgattcctaccacgatgaacgacatcctgtcggacaacacctgctcaccaatacagacaagaacttcacatacgtaacaactaccaatccaatcctactgtttctgcgaaatctgattctgccttgggtactaccgctggtaacgaaggacaaatcgcgagtaagaaatcaattgatgttccagtcacagctgaaaattcgttatcggcacagcagcattgtcggcaccgcagcaggattctccggtgcccttcaaggaggcaacagagcacctgatgccaaaattgagagcaccgatggtgagaaatggcttctggatctgctcactcctgagcaccaccacctcctgctcttctctgggaccagttctggagccagcgagggcgacttacgtcgagcggaagagacgttctcagggcacgtgcaaggtaccgccaaggtacacatgatattcagcaaaggacacaacgagcaagtgggatacgtcgatgtggaagatgagctacatcggtcgtttggaatcgaaaatgcagggtatgcacttgttcgtccggactgctatcttgctcacattgggccgctgtctgcagttgacgaagcagctaaatggctttga

SEQ ID NO: 21391 - protein, 532 aa, Muscodor strobelii
  misc_feature: SGI Peptide ID NO. 567242
  misc_feature (4)..(346): Pfam Id: PF01494 Pfam Desc: FAD binding domain
  misc_feature (7)..(532): NCBI GI: 171692455 Blast Desc: protein product [Podospora anserina] gi|170946176|emb|CAP72977.1| protein product [Podospora anserina]
  misc_feature (3)..(527): NCBI GI: 39942302 Blast Desc: MGG_03231 [Magnaporthe grisea 70-15] gi|145015778|gb|EDK00268.1| MGG_03231 [Magnaporthe grisea 70-15]
  misc_feature (3)..(531): NCBI GI: 154298299 Blast Desc: BC1G_11994 [Botryotinia fuckeliana B05.10] gi|150858180|gb|EDN33372.1| BC1G_11994 [Botryotinia fuckeliana B05.10]
  misc_feature (8)..(530): NCBI GI: 164425356 Blast Desc: NCU04591 [Neurospora crassa OR74A] gi|157070895|gb|EAA28689.2| [Neurospora crassa OR74A]
  misc_feature (8)..(530): NCBI GI: 28950031 Blast Desc: related to pentachlorophenol 4-monooxygenase [Neurospora crassa]
  misc_feature (3)..(343): NCBI GI: 156050477 Blast Desc: SS1G_07825 [Sclerotinia sclerotiorum 1980] gi|154692226|gb|EDN91964.1| SS1G_07825 [Sclerotinia sclerotiorum 1980]
  misc_feature (8)..(516): NCBI GI: 160872369 Blast Desc: monooxygenase, FAD-binding [Rickettsiella grylli] gi|159121168|gb|EDP46506.1| monooxygenase, FAD-binding [Rickettsiella grylli]
  misc_feature (1)..(441): NCBI GI: 256806664 Blast Desc: monooxygenase FAD-binding protein [Streptomyces viridochromogenes DSM 40736]
  misc_feature (8)..(516): NCBI GI: 162448335 Blast Desc: pentachlorophenol monooxygenase [Sorangium cellulosum 'So ce 56'] gi|161158917|emb|CAN90222.1| Pentachlorophenol monooxygenase [Sorangium cellulosum 'So ce 56']
  misc_feature (8)..(532): NCBI GI: 196254678 Blast Desc: monooxygenase FAD-binding [Cyanothece sp. PCC 7822] gi|196203875|gb|EDX98691.1| monooxygenase FAD-binding [Cyanothece sp. PCC 7822]
  misc_feature (2)..(346): SWISSPROT Homolog: EC 1.14.13.50 Pentachlorophenol monooxygenase
MAKNIACLIIGGGPTGMALALELAVQKGVTFRIIDKATDRSPYSRALVMQPRTLELLRRHGPIDDLINAGTTADGVSMCVLGKKIVDINVADVAIPGTQFPQLGVSQCETEKWLEKTLRLKHGVQVEMGIQAKTITQDTEGVTVVTSAEDGSEEVIHAKYIIGADGAHSVVRHAAKNLTFEGDAYRQEFILADCHLKSEYPPNRAYMCLGKGVMVVLPMNRSGLVRLVVSRPGQDNSRDPKLEDFEEFMQEIFPGGGSLHDPTWITRFRLHHRGVNNYRDGRLFVAGDAAHIHSPAGGQGMNTGIQDSINLGWKLGAVLRGEKPDSFLDSYHDERHPVGQHLLTNTDKNFTYVTTTNPILLFLRNLILPWVLPLVTKDKSRVRNQLMFQSQLKIRYRHSSIVGTAAGFSGALQGGNRAPDAKIESTDGEKWLLDLLTPEHHHLLLFSGTSSGASEGDLRRAEETFSGHVQGTAKVHMIFSKGHNEQVGYVDVEDELHRSFGIENAGYALVRPDCYLAHIGPLSAVDEAAKWL

SEQ ID NO: 21392 - DNA, 2165 bp, Muscodor strobelii
  misc_feature: SGI EST ID NO. CUFF.50185.0
  misc_feature: Variant of the nucleotide sequence at SEQ ID NO 21390
gtatgaactatttttggtgccttggtgccagaagcaagactgtcggggaaaatcggtaggtgttaggacgcgagatcctaaaatgccctattgctctccgtgattgcctctattcccatcgcagagatctcagtatgactcaatcattgcccgagtctcttgcgccaccttctaatacaattacacctcgcataactttacgcgacaagaagcgtctactgatgtctgagatgcaattcggtggcttcaacttgaggccccagcagcctctcggccgattatggccccaagctgttgcggtctagcttgtgggtcgttgaataagacttggatcagatacaagaagaacgagtcgccgtcagagtcaccgattaaatctccttcgaagaatcaatctaccttctttctgtgttaacaactatttcagaaatggcaaagaatattgcttgtcttataattggtggtggtccgacgggaatggcgctggctctcgagctcgccgtccaaaagggagttacatttcgtatcattgacaaagccaccgacaggtcaccctactctcgcgccttagtgatgcagcctaggacattagagcttctcagacgacacggacctatcgacgacctcatcaatgccggaaccacagccgacggagtatctatgtgtgttctgggcaagaaaatcgtcgacatcaacgtcgcagatgtagcgattccaggcactcagtttcctcagttaggagtgtctcaatgcgaaaccgaaaagtggctagagaaaacccttcgtctcaaacacggagtccaagtcgagatgggaatacaggccaagactattacgcaggacacggaaggtgttacggttgtcacatcggcagaagatgggtctgaagaggtcatacacgccaaatatataattggtgccgatggcgctcacagtgtggttcgccatgctgcaaaaaatctgacctttgagggtgatgcatatcgccaggagttcatcctcgcggattgtcatttgaaaagcgagtaccctccaaaccgagcctatatgtgcttaggcaaaggcgtgatggtagttttaccaatgaacaggagcggattggtgcgactcgtagtatctcgccctggtcaagacaatagcagagatccgaaacttgaagactttgaagagttcatgcaagagatattccctggaggcggttcgctgcatgacccaacttggataacacggttccgtcttcaccatcgtggagtcaacaactaccgtgatggaagactgtttgtcgcaggcgatgccgcccatattcacagtccagctggaggacaaggcatgaatacaggcatccaagactcgatcaacctggggtggaaattaggggctgtacttcgtggcgagaaaccagattcattcctcgattcctaccacgatgaacgacatcctgtcggacaacacctgctcaccaatacagacaagaacttcacatacgtaacaactaccaatccaatcctactgtttctgcgaaatctgattctgccttgggtactaccgctggtaacgaaggacaaatcgcgagtaagaaatcaattgatgttccagtcacagctgaaaattcgttatcggcacagcagcattgtcggcaccgcagcaggattctccggtgcccttcaaggaggcaacagagcacctgatgccaaaattgagagcaccgatggtgagaaatggcttctggatctgctcactcctgagcaccaccacctcctgctcttctctgggaccagttctggagccagcgagggcgacttacgtcgagcggaagagacgttctcagggcacgtgcaaggtaccgccaaggtacacatgatattcagcaaaggacacaacgagcaagtgggatacgtcgatgtggaagatgagctacatcggtcgtttggaatcgaaaatgcagggtatgcacttgttcgtccggactgctatcttgctcacattgggccgctgtctgcagttgacgaagcagctaaatggctttgatgcgaacttttacaaaagcttcgtttgttgttataataagatatcccacctcctttctaaataggctctaaaatattgcagcgagaaatcatcgttcgaatattgcgaattttcaagagaataaataagctactgtc

SEQ ID NO: 21393 - DNA, 1296 bp, Muscodor strobelii
  misc_feature: SGI cDNA ID NO. 567243
  misc_feature: Elevated expression when VOC is produced
  misc_feature: Encodes the peptide sequence at SEQ ID NO 21394
atgcgatactcaatcgtatcacaggccctctgcggcgccgttacggtaaccgctttagccctgccaaacgtccgactccaaaaacgagtaaaactagtagacctatcgaacttccagagcttcgaaactatggaccctcaagaaatactagacaatgccgacgaagctatgaaagagttgtttagccaaggcgtcttcaatgatgggccaatggattcgctaggcaacttcctcagtgacaccaaggatacttcgaagagcaagagcccattcggcttgtttgaagattttcaagacgagtttgaggaacaattcgaagaattcaaagacaaaataaaaagtcctatccaggatatcagcggcgagaacgatagtgacatcactacggtgacggataattcccaaaaggctactaacgcagctgctgcgggcacctgcgatcctagcaaccctgaagttcgctttgaatggtcgaattacgccaatagtgatcgaaccgcattcgtgaatgctattaaatgcctgatggacaagccctctggtggcagtcaattcacaggatcccaaaaccgctatgaagatcttgcgtcaacacaccgtcaaatgactgccaatatccatcagacgtcactcttcatggtttggcaccgttacttcgtctgggtctttgagcagatgctccgtgatgagtgtggctttgacaaggcaatgccctggtgggacgagaccaagcacgctggtaacttcgccggctctgatgtttttactgatgcttggtttgggcaccttcctgcgaaaacttctgatggacagggaacttgcatcgtgtcgggcgcatttgcgggcacaacgctccacgtcggtcctggaactgctaatcaagatcactgtttatcgcgaggagtagacgaatctcaaaccgcgcaagccagtgcggactatactaactcctgtctgtcacgaagtgattataatgacttccgaggatgttttgagcttggaccccacggttacggacacaacgggataggtgctgtcatgcaggaggtttcatcctccgttggtgatccgatattcttcatgcaccactctttcgtcgaccatacattccgcatttggcaaaacgcagactcttcgcgcactcaaaccattgatggatgcgccgacacggctaatccctgcacaccaatctcattagacactgtgatgagttcgaacaatttgcaaccagatattactgtcggagaggctctgaacacactcggcggtacattctgttaccgttatgactactaa

SEQ ID NO: 21394 - protein, 431 aa, Muscodor strobelii
  misc_feature: SGI Peptide ID NO. 567243
  misc_feature (73)..(431): NCBI GI: 240281068 Blast Desc: tyrosinase [Ajellomyces capsulatus H143]
  misc_feature (73)..(431): NCBI GI: 225562498 Blast Desc: conserved [Ajellomyces capsulatus G186AR]
  misc_feature (89)..(431): NCBI GI: 154279366 Blast Desc: [Ajellomyces capsulatus NAm1] gi|150412439|gb|EDN07826.1| [Ajellomyces capsulatus NAm1]
  misc_feature (153)..(431): NCBI GI: 225680996 Blast Desc: conserved [Paracoccidioides brasiliensis Pb03] gi|226292709|gb|EEH48129.1| conserved [Paracoccidioides brasiliensis Pb18]
  misc_feature (90)..(431): NCBI GI: 261205108 Blast Desc: tyrosinase [Ajellomyces dermatitidis SLH14081] gi|239592350|gb|EEQ74931.1| tyrosinase [Ajellomyces dermatitidis SLH14081] gi|239611493|gb|EEQ88480.1| tyrosinase [Ajellomyces
  misc_feature (143)..(431): NCBI GI: 226283985 Blast Desc: conserved [Paracoccidioides brasiliensis Pb01]
  misc_feature (135)..(431): NCBI GI: 145603725 Blast Desc: MGG_05862 [Magnaporthe grisea 70-15] gi|145011893|gb|EDJ96549.1| MGG_05862 [Magnaporthe grisea 70-15]
  misc_feature (1)..(431): NCBI GI: 169622300 Blast Desc: SNOG_14370 [Phaeosphaeria nodorum SN15] gi|111057121|gb|EAT78241.1| SNOG_14370 [Phaeosphaeria nodorum SN15]
  misc_feature (140)..(431): NCBI GI: 189191358 Blast Desc: conserved [Pyrenophora tritici-repentis Pt-1C-BFP] gi|187973624|gb|EDU41123.1| conserved [Pyrenophora tritici-repentis Pt-1C-BFP]
  misc_feature (145)..(431): NCBI GI: 169596702 Blast Desc: SNOG_01119 [Phaeosphaeria nodorum SN15] gi|160701375|gb|EAT92614.2| SNOG_01119 [Phaeosphaeria nodorum SN15]
  misc_feature: Useful for introducing or modulating the production of volatile compounds
MRYSIVSQALCGAVTVTALALPNVRLQKRVKLVDLSNFQSFETMDPQEILDNADEAMKELFSQGVFNDGPMDSLGNFLSDTKDTSKSKSPFGLFEDFQDEFEEQFEEFKDKIKSPIQDISGENDSDITTVTDNSQKATNAAAAGTCDPSNPEVRFEWSNYANSDRTAFVNAIKCLMDKPSGGSQFTGSQNRYEDLASTHRQMTANIHQTSLFMVWHRYFVWVFEQMLRDECGFDKAMPWWDETKHAGNFAGSDVFTDAWFGHLPAKTSDGQGTCIVSGAFAGTTLHVGPGTANQDHCLSRGVDESQTAQASADYTNSCLSRSDYNDFRGCFELGPHGYGHNGIGAVMQEVSSSVGDPIFFMHHSFVDHTFRIWQNADSSRTQTIDGCADTANPCTPISLDTVMSSNNLQPDITVGEALNTLGGTFCYRYDY

SEQ ID NO: 21395 - DNA, 2101 bp, Muscodor strobelii
  misc_feature: SGI EST ID NO. CUFF.50197.0
  misc_feature: Variant of the nucleotide sequence at SEQ ID NO 21393
cggaaccgcccagaccagcaagttgcagcaagtcatgaacacccctagtccccacgatgaagactcagcgccactgtctgacttacaacatctcgcagcaaccgttgcaaaaatgacgatcgacgaatcgctgtccaccaatatattaaaggcacacctgatgcctcttctttcactgaaaatgataccaatccatctcgcgtctgctggcaccagtattccttttggtgaccttgtgccctaaggctcgattgattaatcgtaatacctatcgtggcgatctttcaggattgctttcattattcttcacatcgaatctctcctaggtcatcactatgcgatactcaatcgtatcacaggccctctgcggcgccgttacggtaaccgctttagccctgccaaacgtccgactccaaaaacgagtaaaactagtagacctatcgaacttccagagcttcgaaactatggaccctcaagaaatactagacaatgccgacgaagctatgaaagagttgtttagccaaggcgtcttcaatgatgggccaatggattcgctaggcaacttcctcagtgacaccaaggatacttcgaagagcaagagcccattcggcttgtttgaagattttcaagacgagtttgaggaacaattcgaagaattcaaagacaaaataaaaagtcctatccaggatatcagcggcgagaacgatagtgacatcactacggtgacggataattcccaaaaggctactaacgcagctgctgcgggcacctgcgatcctagcaaccctgaagttcgctttgaatggtcgaattacgccaatagtgatcgaaccgcattcgtgaatgctattaaatgcctgatggacaagccctctggtggcagtcaattcacaggatcccaaaaccgctatgaagatcttgcgtcaacacaccgtcaaatgactgccaatatccatcagacgtcactcttcatggtttggcaccgttacttcgtctgggtctttgagcagatgctccgtgatgagtgtggctttgacaaggcaatgccctggtgggacgagaccaagcacgctggtaacttcgccggctctgatgtttttactgatgcttggtttgggcaccttcctgcgaaaacttctgatggacagggaacttgcatcgtgtcgggcgcatttgcgggcacaacgctccacgtcggtcctggaactgctaatcaagatcactgtttatcgcgaggagtagacgaatctcaaaccgcgcaagccagtgcggactatactaactcctgtctgtcacgaagtgattataatgacttccgaggatgttttgagcttggaccccacggttacggacacaacgggataggtgctgtcatgcaggaggtttcatcctccgttggtgatccgatattcttcatgcaccactctttcgtcgaccatacattccgcatttggcaaaacgcagactcttcgcgcactcaaaccattgatggatgcgccgacacggctaatccctgcacaccaatctcattagacactgtgatgagttcgaacaatttgcaaccagatattactgtcggagaggctctgaacacactcggcggtacattctgttaccgttatgactactaattacccgccaactgatggaaatttgagcatacggacacactcctaaaactcacgcttaacgtatgcacttgcatgggtccatgtgcaagacaagcttcgctacgataacttgccctattagtacccggaaacgccagagcattactttgccgctgatttcaaaagtcttattgctttctcctacttggcggtctattatgagattgcgagttataattccactttccttacgactatcctcatttattcttcttgtacataattgccctgtatatatcagcctattgatcatgtccatggatgagcatttggattggaaactagcggctgattgtaacacgatccctaccgacttgacgcagctggatggatgttttataccccggagacgacgatatcaatgatgtttacgattagcgcagttgtcatatgcagccataatttatgacgtttttcaacattgcttagcc

SEQ ID NO: 21396 - DNA, 1605 bp, Muscodor strobelii
  misc_feature: SGI cDNA ID NO. 567244
  misc_feature: Encodes the peptide sequence at SEQ ID NO 21397
atgtccgatatcgaaacaccacccacaggtgatcgtcgactacttctcgtgtccaatcggctccccataacgataaagcgaaaggatgaaggcgattatagtttctcgatgtcatccggtggccttgtcactggcttaagtggcctgagcaagacgacaagctttcagtggtatgggtggccgggattagaggttcccgaaggcgaggtagcgtcggtgacgcaaacgctccagaacaaatacaatgcccatcccatattcgttgacgatgaactcgccgacagacattacaacggttttagcaattcaattctgtggcctttatttcactatcatcctggagaaatcacattcgacgagggtgcctgggctgcctacaaagaagtcaaccatctttttgcgcagaccgtcttgaaagacgtacgagatggtgatatgatctgggtacacgattaccatctgatgttgcttcccgagatgctgagaagagaacttggcgacaaaaaggacgtcaagatcggcttttttctgcatactccatttcctagcagtgaagtctatcgtatcctcccagttcgagaagcgctactcgagggacttctgcagtgcgatctgatcgggttccacacttacgactacgcgaggcatttcctcagctcctgtgctcgcattctcgaaacgcagactaccccgaacggagtcgaataccaaggaaaattcgtcactgtaggcgcatttcccatcggtatagatccggaaaaattcgttgaggggctcaaaaaggataaagtgcaacatcgcattgccacattatctcggaaattcgagggcgtgaagctcatcgtcggtgtagaccgactagactatatcaaaggcgtaccgcaaaagcttcatgcactcgaggtatttttgacagaacatccagagtggatcgggaaagttgtcttggtacaagttgctgtcccttcgagacaggacgtcgaggagtaccaaaatctgagagctgtggtgaatgaattagtagggagaatcaatggcaaattcggcacggtggaattcatgccaatccattttctccaccaaagtatgaacttcgacgagctgtgcgcattgtacgcggtatccgatgcttgtctcgtcagctcgacccgagacggtatgaatcttgtctcgtatgaatatattgcaacacagcgcaaacgccatggcgtcatgattctctccgaattcacaggggcagcccaatcgctgaatggcagtcttatagtaaacccttggaatactgaagagctcgcaaatgcaattcacgatgcagtcaccatgtcccccgagatacgcgaggctaactttcgcaagcttgagcgttacgtcttcaagtacacctctgcctggtggggtaagagcttcgtcacggagttgaccaaagtcgacgccaaagcgcaaggcggtgtcgcctcaataaaccataattcgaaaccgtcgataatacatgagaacgggcacgcgctctcgggcgtcttcgaaagcatacaagcggctgcacgtgctggcacaccatcaggacagattgtcgcgtctgaattgagcaaacatttggatgtatag

SEQ ID NO: 21397 - protein, 534 aa, Muscodor strobelii
  misc_feature: SGI Peptide ID NO. 567244
  misc_feature (12)..(475): Pfam Id: PF00982 Pfam Desc: Glycosyltransferase family 20
  misc_feature (8)..(518): NCBI GI: 85091545 Blast Desc: alpha,alpha-trehalose-phosphate synthase [Neurospora crassa OR74A] gi|28920347|gb|EAA29718.1| alpha,alpha-trehalose-phosphate synthase [Neurospora crassa
  misc_feature (8)..(485): NCBI GI: 145606919 Blast Desc: trehalose-6-phosphate synthase subunit 1 [Magnaporthe grisea 70-15] gi|28557450|gb|AAN46744.1| trehalose-6-phosphate synthase subunit 1 [Magnaporthe grisea] trehalose-6-phosphate 1
  misc_feature (13)..(480): NCBI GI: 46123347 Blast Desc: FG06051.1 [Gibberella zeae PH-1]
  misc_feature (13)..(511): NCBI GI: 171678633 Blast Desc: protein product [Podospora anserina] gi|170937386|emb|CAP62044.1| protein product [Podospora anserina]
  misc_feature (13)..(514): NCBI GI: 256732570 Blast Desc: glycosyltransferase family 20 [Nectria haematococca mpVI 77-13-4]
  misc_feature (2)..(486): NCBI GI: 156039421 Blast Desc: SS1G_11847 [Sclerotinia sclerotiorum 1980] gi|154697584|gb|EDN97322.1| SS1G_11847 [Sclerotinia sclerotiorum 1980]
  misc_feature (8)..(480): NCBI GI: 109137809 Blast Desc: trehalose-6-phosphate synthase [Botryotinia fuckeliana]
  misc_feature (13)..(479): NCBI GI: 61744010 Blast Desc: trehalose-6-phosphate synthase 1 [Metarhizium acridum]
  misc_feature (22)..(510): NCBI GI: 261354544 Blast Desc: alpha,alpha-trehalose-phosphate synthase [Verticillium albo-atrum VaMs.102]
  misc_feature (1)..(496): NCBI GI: 115390000 Blast Desc: alpha,alpha-trehalose-phosphate synthase 1 [Aspergillus terreus NIH2624] gi|114194901|gb|EAU36601.1| alpha,alpha-trehalose-phosphate synthase 1 [Aspergillus terreus
  misc_feature (1)..(506): SWISSPROT Homolog: EC 2.4.1.15 Alpha,alpha-trehalose-phosphate synthase (UDP-forming)
MSDIETPPTGDRRLLLVSNRLPITIKRKDEGDYSFSMSSGGLVTGLSGLSKTTSFQWYGWPGLEVPEGEVASVTQTLQNKYNAHPIFVDDELADRHYNGFSNSILWPLFHYHPGEITFDEGAWAAYKEVNHLFAQTVLKDVRDGDMIWVHDYHLMLLPEMLRRELGDKKDVKIGFFLHTPFPSSEVYRILPVREALLEGLLQCDLIGFHTYDYARHFLSSCARILETQTTPNGVEYQGKFVTVGAFPIGIDPEKFVEGLKKDKVQHRIATLSRKFEGVKLIVGVDRLDYIKGVPQKLHALEVFLTEHPEWIGKVVLVQVAVPSRQDVEEYQNLRAVVNELVGRINGKFGTVEFMPIHFLHQSMNFDELCALYAVSDACLVSSTRDGMNLVSYEYIATQRKRHGVMILSEFTGAAQSLNGSLIVNPWNTEELANAIHDAVTMSPEIREANFRKLERYVFKYTSAWWGKSFVTELTKVDAKAQGGVASINHNSKPSIIHENGHALSGVFESIQAAARAGTPSGQIVASELSKHLDV

SEQ ID NO: 21398 - DNA, 450 bp, Muscodor strobelii
  misc_feature: SGI cDNA ID NO. 567245
  misc_feature: Encodes the peptide sequence at SEQ ID NO 21399
atgccagataaaagcgaaggcaaatcaatcgaggacagagacgaccttggtgagctcttcaagaaaggtctagatgtgcgtggcgaggtgctcgggcaagaatacgtcggcaaggctctcgcgctccgcgaagatgaatactggaagccgttccaggagctcatgactgagttcgcatggggcacggtgtgggaacggccgggcttggaaaggaaacaacggagtttgctgaatatcgcgtggcttatagcgatgaagagctggcccgaactcgcacttcatacccgcggtgctctgcgtaatggggttaccgagatagagattagagaggctgttattcagtctatggtttattgtggtgcgccgacggcgctggaggctatgcgtacgacgtataaggctattcaggagcacaaggagcaggagaaggcgggaaataaggaggcataa

SEQ ID NO: 21399 - protein, 149 aa, Muscodor strobelii
  misc_feature: SGI Peptide ID NO. 567245
  misc_feature (49)..(133): Pfam Id: PF02627 Pfam Desc: Carboxymuconolactone decarboxylase family
  misc_feature (14)..(149): NCBI GI: 256723609 Blast Desc: NECHADRAFT_52308 [Nectria haematococca mpVI 77-13-4]
  misc_feature (14)..(137): NCBI GI: 145235663 Blast Desc: An03g06020 [Aspergillus niger] gi|134058167|emb|CAK38361.1| protein product [Aspergillus niger]
  misc_feature (18)..(141): NCBI GI: 255931017 Blast Desc: Pc12g01700 [Penicillium chrysogenum Wisconsin 54-1255] gi|211581684|emb|CAP79797.1| Pc12g01700 [Penicillium chrysogenum Wisconsin 54-1255]
  misc_feature (18)..(141): NCBI GI: 115385513 Blast Desc: ATEG_10001 [Aspergillus terreus NIH2624] gi|114187750|gb|EAU29450.1| ATEG_10001 [Aspergillus terreus NIH2624]
  misc_feature (18)..(141): NCBI GI: 121701947 Blast Desc: 4-carboxymuconolactone decarboxylase, [Aspergillus clavatus NRRL 1] gi|119397381|gb|EAW07812.1| 4-carboxymuconolactone decarboxylase, [Aspergillus clavatus NRRL
  misc_feature (18)..(141): NCBI GI: 256724078 Blast Desc: NECHADRAFT_86291 [Nectria haematococca mpVI 77-13-4]
  misc_feature (18)..(141): NCBI GI: 240110632 Blast Desc: 4-carboxymuconolactone decarboxylase family protein [Coccidioides posadasii C735 delta SOWgp]
  misc_feature (18)..(141): NCBI GI: 119196105 Blast Desc: CIMG_02427 [Coccidioides immitis RS]
  misc_feature (19)..(141): NCBI GI: 212538403 Blast Desc: 4-carboxymuconolactone decarboxylase, [Penicillium marneffei ATCC 18224] gi|210069099|gb|EEA23190.1| 4-carboxymuconolactone decarboxylase, [Penicillium marneffei ATCC
  misc_feature (20)..(141): NCBI GI: 115491347 Blast Desc: conserved [Aspergillus terreus NIH2624] gi|114197161|gb|EAU38861.1| conserved [Aspergillus terreus NIH2624]
  misc_feature (20)..(137): SWISSPROT Homolog: EC 4.1.1.44 4-carboxymuconolactone decarboxylase
MPDKSEGKSIEDRDDLGELFKKGLDVRGEVLGQEYVGKALALREDEYWKPFQELMTEFAWGTVWERPGLERKQRSLLNIAWLIAMKSWPELALHTRGALRNGVTEIEIREAVIQSMVYCGAPTALEAMRTTYKAIQEHKEQEKAGNKEA

SEQ ID NO: 21400 - DNA, 1304 bp, Muscodor strobelii
  misc_feature: SGI EST ID NO. CUFF.50212.0
  misc_feature: Variant of the nucleotide sequence at SEQ ID NO 21398
tatgccttcattattctagtctgatataattcatacgcacttcttatatctgctaatccctgataccgcaacgaatgcaccatgccagataaaagcgaaggcaaatcaatcgaggacagagacgaccttggtgagctcttcaagaaaggtctagatgtgcgtggcgaggtgctcgggcaagaatacgtcggcaaggctctcgcgctccgcgaagatgaatactggaagccgttccaggagctcatgactgagttcgcatggggcacggtgtgggaacggccgggcttggaaaggaaacaacggagtttgctgaatatcgcgtggcttatagcgatgaagagctggcccgaactcgcacttcatacccgcggtgctctgcgtaatggggttaccgagatagagattagagaggctgttattcagtctatggtttattgtggtgcgccgacggcgctggaggctatgcgtacgacgtataaggctattcaggagcacaaggagcaggagaaggcgggaaataaggaggcataatcctggcgtacagggggaggcgaacgatgatattagtgaagatcatgcgaaaattgagaacaagacgatatatgagagaaattgagagcattcaaatttcttcctcacgacatcgctcgatccacgagcatatgatcagctcattatgtacctatttgaaacccactcatgtgtacctctaagagcacccttatcacttattcctaatattattggcacatgcgtctcttgcccactcatcactgtctgctcatcacccatccctcccaagctcaattctcaaagctaaaggctcaacgcttgtcgccctcccatcagcaccaagcgtaaatacgaactgatcaagcggataatccgcatacaccgccgccgtctgactaacccacgtcccacaattcgtcgagaacatcttttcccttctgtccggggcagcagtattctctatcatagccttaaaagcgattctcttcgtcccatcgctattcgtagtctgcagcccagtgggaaataatcgtaaactcggacctgtgacgttgtagttcagcgtgtaacgaatcgcgataggtatcatatccgtgccattacttatccaacgatctataccgatgccgggttttgacgggtcagtagacagggtcagagaagagtctatatctgatttggcggtatacgtcccgccgtagttatcctgtgcttgctctcgcgccgcggcttcgagggcggggatcagtattgggccgatgacatctgccatgtcccagtttgcgtttccc

SEQ ID NO: 21401 - DNA, 1764 bp, Muscodor strobelii
  misc_feature: SGI cDNA ID NO. 567246
  misc_feature: Encodes the peptide sequence at SEQ ID NO 21402
atgataccaagatgtattcgcgcggcggcgttcgtcgtgacttcgatccttgcatcaacatcattcgctattcctaattgtccttttcaaggcccagcctttccccaacccacaaatctggctgcttcaccggtcatacaagcagcgcttaagaacctcactgcggccttcgacttatacgacacgacaccaagtaataaccctaatgggacatcatggtctcttcaggtcttttccgcctcaacagacgagcccgtatgggagcattaccacaccgcgacaaatctgaagaatacccagagcacagagaatgtgactgtagggcctgatacgatataccgcctgggcagcttgacgaaaatcttcactatcatgacatttttggcagagggcggagaggaccattggatgagtcctgtgacgagatatgtacccgagttgcagttgcttgcggaaaaggctcagtcagatccaatcttgaacgtagactgggagggcgtaacgctgagtagcctggcgagtcacactgcgggaatcatgcgagattatgcgatagaaggagagttaacacaggagcactaccaaagtgagctgattgatcaaggctttccgccagcgcccgagcggatggtgccagcatgtggtgaatattatatctgcgaccgaactcaaacattcagcggtctggcaaatatcccaccgagtttcgctccctctcaaacacctggatactcaaatctcgggtatcaactcctagcctacgcgctcgaaggcatcacaaataagaacttcgcagaaatgttacagacagatatcattaagaagctcaatttgaatcatacgtattatcggaccgtaccgccaaattccctcggtgtcatcccgccaggaacggaaaatgggtggaatcatagtcttggagatgctagcccgacaggaaacatgtactcctcagtctccgatcttgcgaccctcggccgcgccatcttccggcacaccattctctccgcagcgcaaacccgtcgctggttaaagcccgccgcaacaacagccgaaatatacgaagggatatcctacccctggggctaccggcgcatcccccttggcgcaccaggcacaaacctcgagaaccggatcgtagacgcctacagcaaagcaggcagcatcacagcctacgccgccctcctagtcctccttccagattacgacgtaggattcacagcacttctcgcaggcggctggccgggaaacgcaaactgggacatggcagatgtcatcggcccaatactgatccccgccctcgaagccgcggcgcgagagcaagcacaggataactacggcgggacgtataccgccaaatcagatatagactcttctctgaccctgtctactgacccgtcaaaacccggcatcggtatagatcgttggataagtaatggcacggatatgatacctatcgcgattcgttacacgctgaactacaacgtcacaggtccgagtttacgattatttcccactgggctgcagactacgaatagcgatgggacgaagagaatcgcttttaaggctatgatagagaatactgctgccccggacagaagggaaaagatgttctcgacgaattgtgggacgtgggttagtcagacggcggcggtgtatgcggattatccgcttgatcagttcgtatttacgcttggtgctgatgggagggcgacaagcgttgagcctttagctttgagaattgagcttgggagggatgggtga

SEQ ID NO: 21402 - protein, 587 aa, Muscodor strobelii
  misc_feature: SGI Peptide ID NO. 567246
  misc_feature (78)..(431): Pfam Id: PF00144 Pfam Desc: Beta-lactamase
  misc_feature (107)..(431): Pfam Id: PF00144 Pfam Desc: Beta-lactamase
  misc_feature (26)..(585): NCBI GI: 145604126 Blast Desc: MGG_10744 [Magnaporthe grisea 70-15] gi|145012195|gb|EDJ96851.1| MGG_10744 [Magnaporthe grisea 70-15]
  misc_feature (10)..(542): NCBI GI: 116182952 Blast Desc: CHGG_02104 [Chaetomium globosum CBS 148.51] gi|88186401|gb|EAQ93869.1| CHGG_02104 [Chaetomium globosum CBS 148.51]
  misc_feature (23)..(585): NCBI GI: 164428737 Blast Desc: NCU00993 [Neurospora crassa OR74A] gi|157072259|gb|EAA34667.2| [Neurospora crassa OR74A]
  misc_feature (6)..(586): NCBI GI: 169615793 Blast Desc: SNOG_11060 [Phaeosphaeria nodorum SN15] gi|160703048|gb|EAT81559.2| SNOG_11060 [Phaeosphaeria nodorum SN15]
  misc_feature (9)..(585): NCBI GI: 116198601 Blast Desc: CHGG_07456 [Chaetomium globosum CBS 148.51] gi|88178735|gb|EAQ86203.1| CHGG_07456 [Chaetomium globosum CBS 148.51]
  misc_feature (13)..(587): NCBI GI: 164426216 Blast Desc: NCU01038 [Neurospora crassa OR74A] gi|16415969|emb|CAD01102.1| conserved [Neurospora crassa] gi|157071245|gb|EAA32414.2| [Neurospora crassa OR74A]
  misc_feature (27)..(585): NCBI GI: 169765968 Blast Desc: [Aspergillus oryzae RIB40] gi|83765310|dbj|BAE55453.1| protein product [Aspergillus oryzae]
  misc_feature (17)..(585): NCBI GI: 255948050 Blast Desc: Pc22g07760 [Penicillium chrysogenum Wisconsin 54-1255] gi|211591809|emb|CAP98064.1| Pc22g07760 [Penicillium chrysogenum Wisconsin 54-1255]
  misc_feature (10)..(583): NCBI GI: 145601307 Blast Desc: MGG_14134 [Magnaporthe grisea 70-15] gi|145009316|gb|EDJ94027.1| MGG_14134 [Magnaporthe grisea 70-15]
  misc_feature (1)..(576): NCBI GI: 238492251 Blast Desc: beta-lactamase, [Aspergillus flavus NRRL3357] gi|220695856|gb|EED52198.1| beta-lactamase, [Aspergillus flavus NRRL3357]
MIPRCIRAAAFVVTSILASTSFAIPNCPFQGPAFPQPTNLAASPVIQAALKNLTAAFDLYDTTPSNNPNGTSWSLQVFSASTDEPVWEHYHTATNLKNTQSTENVTVGPDTIYRLGSLTKIFTIMTFLAEGGEDHWMSPVTRYVPELQLLAEKAQSDPILNVDWEGVTLSSLASHTAGIMRDYAIEGELTQEHYQSELIDQGFPPAPERMVPACGEYYICDRTQTFSGLANIPPSFAPSQTPGYSNLGYQLLAYALEGITNKNFAEMLQTDIIKKLNLNHTYYRTVPPNSLGVIPPGTENGWNHSLGDASPTGNMYSSVSDLATLGRAIFRHTILSAAQTRRWLKPAATTAEIYEGISYPWGYRRIPLGAPGTNLENRIVDAYSKAGSITAYAALLVLLPDYDVGFTALLAGGWPGNANWDMADVIGPILIPALEAAAREQAQDNYGGTYTAKSDIDSSLTLSTDPSKPGIGIDRWISNGTDMIPIAIRYTLNYNVTGPSLRLFPTGLQTTNSDGTKRIAFKAMIENTAAPDRREKMFSTNCGTWVSQTAAVYADYPLDQFVFTLGADGRATSVEPLALRIELGRDG

SEQ ID NO: 21403 - DNA, 567 bp, Muscodor strobelii
  misc_feature: SGI EST ID NO. CUFF.50219.0
  misc_feature: Variant of the nucleotide sequence at SEQ ID NO 21401
cgaaaatcttcactatcatgacatttttggcagagggcggagaggaccattggatgagtcctgtgacgagatatgtacccgagttgcagttgcttgcggaaaaggctcagtcagatccaatcttgaacgtagactgggagggcgtaacgctgagtagcctggcgagtcacactgcgggaatcatgcgagattatgcgatagaaggagagttaacacaggagcactaccaaagtgagctgattgatcaaggctttccgccagcgcccgagcggatggtgccagcatgtggtgaatattatatctgcgaccgaactcaaacattcagcggtctggcaaatatcccaccgagtttcgctccctctcaaacacctggatactcaaatctcgggtatcaactcctagcctacgcgctcgaaggcatcacaaataagaacttcgcagaaatgttacagacagatatcattaagaagctcaatttgaatcatacgtattatcggaccgtaccgccaaattccctcggtgtcatcccgccaggaacggaaaatgggtggaatcatagtcttggag

SEQ ID NO: 21404 - DNA, 1500 bp, Muscodor strobelii
  misc_feature: SGI cDNA ID NO. 567247
  misc_feature: Elevated expression when VOC is produced
  misc_feature: Encodes the peptide sequence at SEQ ID NO 21405
atgggattgtgtgtccgggatacggatgaaaaacaaccattgcgatgggtcaagccagggcaggtgacggcgcgcaatcgtcgacggccgagaaagactggcggacgcgcgcgtggaggtaaaagcagcagcgataccgaagatcgatctgaaacggagttttccacgacctcgacagtccccttcgtggatgagagtgacaatgaagcgatgaagcacaagttcggcgggttgaacatatttggtgctatgcagtctagggctctggataagatcatgcagtttgatatcacgcaggaggatttcgccgcatgtcaagcatcgtattactataatgtcgaggtctatgagcgctgttcgccactcaagttgctgcttgaggaccaacgagttcagcttcccacggccgcggcatattcactgctgccagagccgctcaaatgcatgtttatcttgatcacgatggcgcatcaagcgcaccacttgccgcagaatgcggaccgagaattagtacaacgctcacgttcggctctcgctcactggacgtatcagtcggttcagacgttaaatcgagatattgagaaagaggagacgcgaattacggatgggacaattaccagcgtctttgtgcttatgagtgctgatcaacagctatatccctcaacccgttggcggattcactggaagggtatggcgaagatgatcgagttacgaggcggtgttgaaaaggtgtgggatcaagctcctaatctacgggttgggatgctcagtgtgatcttggcggaggcttttggaaattctaccagtccgagtgacgaccagctctccgattttaccaacccgaaagccctcaagttcttcaaaggggtgtggaaggatgtgaaattctctatcgctaattttgatacatacatgggctctatatgcccgccagcactcttctttgatgtgattcgaatcaatcatatccgtgctcgcgcaaaaataggtgttcctgctggtgatactagcatctatgctgatgcccaagccgctttggatagcgtacttgctttttccatcgagaaatacgccgagggcaacgcaaacgggaacaaaaggacataccctaaatggattctaataacccgcattcatcactcagccgtcatactctactgcatcctatcgctgcaatatttctacctcctcccacagagcaagaaaatcgagcgcatcgcgaatgaacgttatgattctctgctgctcgacttgaaggaagcttatgcccatagaaacttcaagaactgccttatctggtgtctggcggttgctgggacacgcgccgtgactgggacatcgttcgagcgtgcgtttcttgtcgacttgttaaatgggtgtaagagggatataggaagccttgtacctatttatttacgcaataccttggctacattctgggactctggaaaaaaggggtgggaagattgctgggaccaaccatatttctggataacttaa

SEQ ID NO: 21405 - protein, 499 aa, Muscodor strobelii
  misc_feature: SGI Peptide ID NO. 567247
  misc_feature (9)..(499): NCBI GI: 121719962 Blast Desc: C6 zinc finger domain protein [Aspergillus clavatus NRRL 1] gi|119404891|gb|EAW15253.1| C6 zinc finger domain protein [Aspergillus clavatus NRRL 1]
  misc_feature (186)..(495): NCBI GI: 115385921 Blast Desc: [Aspergillus terreus NIH2624] gi|114187954|gb|EAU29654.1| [Aspergillus terreus NIH2624]
  misc_feature (173)..(499): NCBI GI: 159128496 Blast Desc: C6 finger domain protein, [Aspergillus fumigatus A1163]
  misc_feature (173)..(499): NCBI GI: 70985727 Blast Desc: C6 finger domain protein [Aspergillus fumigatus Af293] gi|66845998|gb|EAL86331.1| C6 finger domain protein, [Aspergillus fumigatus Af293]
  misc_feature (9)..(499): NCBI GI: 119484962 Blast Desc: C6 zinc finger domain protein [Neosartorya fischeri NRRL 181] gi|119410279|gb|EAW20226.1| C6 zinc finger domain protein [Neosartorya fischeri NRRL 181]
  misc_feature (2)..(494): NCBI GI: 116192603 Blast Desc: [Chaetomium globosum CBS 148.51] gi|88181932|gb|EAQ89400.1| [Chaetomium globosum CBS 148.51]
  misc_feature (221)..(499): NCBI GI: 256723583 Blast Desc: NECHADRAFT_42089 [Nectria haematococca mpVI 77-13-4]
  misc_feature (2)..(498): NCBI GI: 171684271 Blast Desc: protein product [Podospora anserina] gi|170942096|emb|CAP67748.1| protein product [Podospora anserina]
  misc_feature (177)..(499): NCBI GI: 258569168 Blast Desc: [Uncinocarpus reesii 1704] gi|237906774|gb|EEP81175.1| [Uncinocarpus reesii 1704]
  misc_feature (233)..(499): NCBI GI: 115390410 Blast Desc: [Aspergillus terreus NIH2624] gi|114195106|gb|EAU36806.1| [Aspergillus terreus NIH2624]
  misc_feature: Useful for introducing or modulating the production of volatile compounds
MGLCVRDTDEKQPLRWVKPGQVTARNRRRPRKTGGRARGGKSSSDTEDRSETEFSTTSTVPFVDESDNEAMKHKFGGLNIFGAMQSRALDKIMQFDITQEDFAACQASYYYNVEVYERCSPLKLLLEDQRVQLPTAAAYSLLPEPLKCMFILITMAHQAHHLPQNADRELVQRSRSALAHWTYQSVQTLNRDIEKEETRITDGTITSVFVLMSADQQLYPSTRWRIHWKGMAKMIELRGGVEKVWDQAPNLRVGMLSVILAEAFGNSTSPSDDQLSDFTNPKALKFFKGVWKDVKFSIANFDTYMGSICPPALFFDVIRINHIRARAKIGVPAGDTSIYADAQAALDSVLAFSIEKYAEGNANGNKRTYPKWILITRIHHSAVILYCILSLQYFYLLPQSKKIERIANERYDSLLLDLKEAYAHRNFKNCLIWCLAVAGTRAVTGTSFERAFLVDLLNGCKRDIGSLVPIYLRNTLATFWDSGKKGWEDCWDQPYFWIT

SEQ ID NO: 21406 - DNA, 2231 bp, Muscodor strobelii
  misc_feature: SGI EST ID NO. CUFF.50229.0
  misc_feature: Variant of the nucleotide sequence at SEQ ID NO 21404
ttgaaatctaaatgtaaaatgataaaacgactttgactttactcattttggtgtttgaatgagttcattgattaagtgttagtagaaacgtcaattagccccctatacggacgcaattcgcgtgtctgggaatcggaaagtttctagagaagcatttcggccaatagctggtcgcgccggcattgggatgacacaactgacagagttatctttgaatacgcgagcagagggaccaaagaagcattgctgggaatgtctcaggcgtagactggtttgcgactccatccaacctgcatgcgatcgttgtcgcaataatgggattgtgtgtccgggatacggatgaaaaacaaccattgcgatgggtcaagccagggcaggtgacggcgcgcaatcgtcgacggccgagaaagactggcggacgcgcgcgtggaggtaaaagcagcagcgataccgaagatcgatctgaaacggagttttccacgacctcgacagtccccttcgtggatgagagtgacaatgaagcgatgaagcacaagttcggcgggttgaacatatttggtgctatgcagtctagggctctggataagatcatgcagtttgatatcacgcaggaggatttcgccgcatgtcaagcatcgtattactataatgtcgaggtctatgagcgctgttcgccactcaagttgctgcttgaggaccaacgagttcagcttcccacggccgcggcatattcactgctgccagagccgctcaaatgcatgtttatcttgatcacgatggcgcatcaagcgcaccacttgccgcagaatgcggaccgagaattagtacaacgctcacgttcggctctcgctcactggacgtatcagtcggttcagacgttaaatcgagatattgagaaagaggagacgcgaattacggatgggacaattaccagcgtctttgtgcttatgagtgctgatcaacagctatatccctcaacccgttggcggattcactggaagggtatggcgaagatgatcgagttacgaggcggtgttgaaaaggtgtgggatcaagctcctaatctacgggttgggatgctcagtgtgatcttggcggaggcttttggaaattctaccagtccgagtgacgaccagctctccgattttaccaacccgaaagccctcaagttcttcaaaggggtgtggaaggatgtgaaattctctatcggtatgcttccagacttcttgtgatagttcttacataagcctatctcaacaatttggtttgcagcacagctaattttgatacatacatgggctctatatgcccgccagcactcttctttgatgtgattcgaatcaatcatatccgtgctcgcgcaaaaataggtgttcctgctggtgatactagcatctatgctgatgcccaagccgctttggatagcgtacttgctttttccatcgagaaatacgccgagggcaacgcaaacgggaacaaaaggacataccctaaatggattctaataacccgcattcatcactcagccgtcatactctactgcatcctatcgctgcaatatttctacctcctcccacagagcaagaaaatcgagcgcatcgcgaatgaacgttatgattctctgctgctcgacttgaaggaagcttatgcccatagaaacttcaagaactgccttatctggtgtctggcggttgctgggacacgcgccgtgactgggacatcgttcgagcgtgcgtttcttgtcgacttgttaaatgggtgtaagagggatataggaagccttgtacctatttatttacgcaataccttggctacattctgggactctggaaaaaaggggtgggaagattgctgggaccaaccatatttctggataacttaaatccgcatcaggaaacgaagataaccgggctggtcccaggttcggacggagaaattcaacgctcacgcgcaccaattgcttcaccactcacatgcacagctttgggcggacaactcaactcagcctatggctcacgcaaaccaatatagagcattagatatatgtcgatcacaactaatgcgagatcttcgatcatgtaccatcaaaaccttgcacaccgcgcggagctcagggtgtgagtttccaaacaacccaccatcccatttatccggtgcagaaaattaatatacaggcattcgaacctggattatacatattagatactaggaagaaacttactattcttggc

SEQ ID NO: 21407 - DNA, 2259 bp, Muscodor strobelii
  misc_feature: SGI cDNA ID NO. 567248
  misc_feature: Encodes the peptide sequence at SEQ ID NO 21408
atgatcgagttacgaggcggtgttgaaaaggtgtgggatcaagctcctaatctacgggttgggatgctcagtgtgatcttggcggaggcttttggaaattctaccagtccgagtgacgaccagctctccgattttaccaacccgaaagccctcaagttcttcaaaggggtgtggaaggatgtgaaattctctatcggtgttcctgctggtgatactagcatctatgctgatgcccaagccgctttggatagcgtacttgctttttccatcgagaaatacgccgagggcaacgcaaacgggaacaaaaggacataccctaaatggattctaataacccgcattcatcactcagccgtcatactctactgcatcctatcgctgcaatatttctacctcctcccacagagcaagaaaatcgagcgcatcgcgaatgaacgttatgattctctgctgctcgacttgaaggaagcttatgcccatagaaacttcaagaactgccttatctggtgtctggcggttgctgggacacgcgccgtgactgggacatcgttcgagcgtgcgtttcttgtcgacttgttaaatgggtgcccagcctttccccaacccacaaatctggctgcttcaccggtcatacaagcagcgcttaagaacctcactgcggccttcgacttatacgacacgacaccaagtaataaccctaatgggacatcatggtctcttcaggtcttttccgcctcaacagacgagcccgtatgggagcattaccacaccgcgacaaatctgaagaatacccagagcacagagaatgtgactgtagggcctgatacgatataccgcctgggcagcttgacgaaaatcttcactatcatgacatttttggcagagggcggagaggaccattggatgagtcctgtgacgagatatgtacccgagttgcagttgcttgcggaaaaggctcagtcagatccaatcttgaacgtagactgggagggcgtaacgctgagtagcctggcgagtcacactgcgggaatcatgcgagattatgcgatagaaggagagttaacacaggagcactaccaaagtgagctgattgatcaaggctttccgccagcgcccgagcggatggtgccagcatgtggtgaatattatatctgcgaccgaactcaaacattcagcggtctggcaaatatcccaccgagtttcgctccctctcaaacacctggatactcaaatctcgggtatcaactcctagcctacgcgctcgaaggcatcacaaataagaacttcgcagaaatgttacagacagatatcattaagaagctcaatttgaatcatacgtattatcggaccgtaccgccaaattccctcggtgtcatcccgccaggaacggaaaatgggtggaatcatagtcttggagatgctagcccgacaggaaacatgtactcctcagtctccgatcttgcgaccctcggccgcgccatcttccggcacaccattctctccgcagcgcaaacccgtcgctggttaaagcccgccgcaacaacagccgaaatatacgaagggatatcctacccctggggctaccggcgcatcccccttggcgcaccaggcacaaacctcgagaaccggatcgtagacgcctacagcaaagcaggcagcatcacagcctacgccgccctcctagtcctccttccagattacgacgtaggattcacagcacttctcgcaggcggctggccgggaaacgcaaactgggacatggcagatgtcatcggcccaatactgatccccgccctcgaagccgcggcgcgagagcaagcacaggataactacggcgggacgtataccgccaaatcagatatagactcttctctgaccctgtctactgacccgtcaaaacccggcatcggtatagatcgttggataagtaatggcacggatatgatacctatcgcgattcgttacacgctgaactacaacgtcacaggtccgagtttacgattatttcccactgggctgcagactacgaatagcgatgggacgaagagaatcgcttttaaggctatgatagagaatactgctgccccggacagaagggaaaagatgttctcgacgaattgtgggacgtgggttagtcagacggcggcggtgtatgcggattatccgcttgatcagttcgtatttacgcttggtgctgatgggagggcgacaagcgttgagcctttagctttgagaattgagcttgggagggatgggtga

SEQ ID NO: 21408 - protein, 752 aa, Muscodor strobelii
  misc_feature: SGI Peptide ID NO. 567248
  misc_feature (243)..(596): Pfam Id: PF00144 Pfam Desc: Beta-lactamase
  misc_feature (272)..(596): Pfam Id: PF00144 Pfam Desc: Beta-lactamase
  misc_feature (184)..(750): NCBI GI: 145604126 Blast Desc: MGG_10744 [Magnaporthe grisea 70-15] gi|145012195|gb|EDJ96851.1| MGG_10744 [Magnaporthe grisea 70-15]
  misc_feature (197)..(707): NCBI GI: 116182952 Blast Desc: CHGG_02104 [Chaetomium globosum CBS 148.51] gi|88186401|gb|EAQ93869.1| CHGG_02104 [Chaetomium globosum CBS 148.51]
  misc_feature (197)..(750): NCBI GI: 164428737 Blast Desc: NCU00993 [Neurospora crassa OR74A] gi|157072259|gb|EAA34667.2| [Neurospora crassa OR74A]
  misc_feature (197)..(751): NCBI GI: 169615793 Blast Desc: SNOG_11060 [Phaeosphaeria nodorum SN15] gi|160703048|gb|EAT81559.2| SNOG_11060 [Phaeosphaeria nodorum SN15]
  misc_feature (197)..(750): NCBI GI: 116198601 Blast Desc: CHGG_07456 [Chaetomium globosum CBS 148.51] gi|88178735|gb|EAQ86203.1| CHGG_07456 [Chaetomium globosum CBS 148.51]
  misc_feature (197)..(752): NCBI GI: 164426216 Blast Desc: NCU01038 [Neurospora crassa OR74A] gi|16415969|emb|CAD01102.1| conserved [Neurospora crassa] gi|157071245|gb|EAA32414.2| [Neurospora crassa OR74A]
  misc_feature (195)..(750): NCBI GI: 255948050 Blast Desc: Pc22g07760 [Penicillium chrysogenum Wisconsin 54-1255] gi|211591809|emb|CAP98064.1| Pc22g07760 [Penicillium chrysogenum Wisconsin 54-1255]
  misc_feature (197)..(750): NCBI GI: 169765968 Blast Desc: [Aspergillus oryzae RIB40] gi|83765310|dbj|BAE55453.1| protein product [Aspergillus oryzae]
  misc_feature (197)..(741): NCBI GI: 238492251 Blast Desc: beta-lactamase, [Aspergillus flavus NRRL3357] gi|220695856|gb|EED52198.1| beta-lactamase, [Aspergillus flavus NRRL3357]
  misc_feature (196)..(748): NCBI GI: 145601307 Blast Desc: MGG_14134 [Magnaporthe grisea 70-15] gi|145009316|gb|EDJ94027.1| MGG_14134 [Magnaporthe grisea 70-15]
MIELRGGVEKVWDQAPNLRVGMLSVILAEAFGNSTSPSDDQLSDFTNPKALKFFKGVWKDVKFSIGVPAGDTSIYADAQAALDSVLAFSIEKYAEGNANGNKRTYPKWILITRIHHSAVILYCILSLQYFYLLPQSKKIERIANERYDSLLLDLKEAYAHRNFKNCLIWCLAVAGTRAVTGTSFERAFLVDLLNGCPAFPQPTNLAASPVIQAALKNLTAAFDLYDTTPSNNPNGTSWSLQVFSASTDEPVWEHYHTATNLKNTQSTENVTVGPDTIYRLGSLTKIFTIMTFLAEGGEDHWMSPVTRYVPELQLLAEKAQSDPILNVDWEGVTLSSLASHTAGIMRDYAIEGELTQEHYQSELIDQGFPPAPERMVPACGEYYICDRTQTFSGLANIPPSFAPSQTPGYSNLGYQLLAYALEGITNKNFAEMLQTDIIKKLNLNHTYYRTVPPNSLGVIPPGTENGWNHSLGDASPTGNMYSSVSDLATLGRAIFRHTILSAAQTRRWLKPAATTAEIYEGISYPWGYRRIPLGAPGTNLENRIVDAYSKAGSITAYAALLVLLPDYDVGFTALLAGGWPGNANWDMADVIGPILIPALEAAAREQAQDNYGGTYTAKSDIDSSLTLSTDPSKPGIGIDRWISNGTDMIPIAIRYTLNYNVTGPSLRLFPTGLQTTNSDGTKRIAFKAMIENTAAPDRREKMFSTNCGTWVSQTAAVYADYPLDQFVFTLGADGRATSVEPLALRIELGRDG

SEQ ID NO: 21409 - DNA, 2231 bp, Muscodor strobelii; identical to SEQ ID NO: 21406
  misc_feature: SGI EST ID NO. CUFF.50229.0
  misc_feature: Variant of the nucleotide sequence at SEQ ID NO 21407

SEQ ID NO: 21410 - DNA, 2472 bp, Muscodor strobelii
  misc_feature: SGI cDNA ID NO. 567249
  misc_feature: Reduced expression when VOC is produced
  misc_feature: Encodes the peptide sequence at SEQ ID NO 21411
atgtttgtcctcaaaaatgtgggcaagctcctctttggcagcaacagccaggagtctatgattgagctgcctcagggccagctctacctcgtccgaccactctcccccaaaggatactccgaactcatcttcaaagacgccgccgcccgcatccgacgcaccggccaagacttccaataccaacttgtcgtccagcgcgtctacgaggagggcgaggctgagcttctcgccgaagagcaaggcgaagacgctgaactcgacgcccttgctactgagcgagatgaaaagacgttcctcctagacgaagccatccacttccgagtcgaaagccggccgggatccgagagagtcatcgcctggaaggacctcagcggtgacgtcggtgacctctacgagtttgtatgtgattcttccgttcagtccgcccaggtcgaggcgttcgatcgcatcgcaaaagagtgccagtacgagaggaaataccgaaaacccaacaccactgcttccgacgaagacctacagcagttcgagttcgacgacgagcagcctattccccaggctagcccaatccatagcccgactcttacgcgttccatcgagtcaaccgacgccatgttccagctcaagaacgaggccaacatggccgcgaagagagatctggctgaacacagctctagccttgctaccgacaccgcagtccaaccagctcccgaaaaggaggtcgccgcatccaaccccaagctaccacccagccctcccccgcaacccgagccgctcgaaattctttccatggagcttgctgaactgcacttcttcgatttcccttccggttcgttcgttcttcgtgatgcttcggttacggcccaggtgtcagatattggcaaatggaactactggctacatgtcgctagcaaggaacaagattggctgggaatcccagtcatcgccgacatgaaccctgtcttcaacttcgagtttctgtccttcatcttcaatcaatttaccgaggatgggtctgcctactcttggctattgagattcaaagaccaaaacactctcactcgcttccaggaaggtctcatgagcgcgctctgggagcagctcaatgagcagaagtggtccagagtgaaagaacaggaacgtcagtatgtactcgatgcctttgaggacctgaacatggacgatgcgcctgcggaggaagaagaggaggaggaggctgaaagcgaagcgggtgatgacgaccaacctaggagtgagcactacgatagcgaagaggaagatgacgatgtcgagacccagccgcaggatgataatatcaattctcagttggcggtcggatacaaacacgatcgatccttcgttgtccgtggctccaagattggagtcttcaaacataccccgaacaaccacctggagttctctaccaacatttctaaggtcgagacccccaagggcgcactgttcagtccaaagaaggtcatgctgcacaatgaggaccgcaacatggttctacagaacgagtcggacccgaacaagctttatcgcatggatctcgagtacggcaaggttgtcgatgaatggaatgttcatgatgatattcctgttctagagttcgctcccgaaaacaaatttgcccagatgactcacgaacaaacattcttgggtatctcgaaaaacgccctgtaccgcattgaccctcgcctagctggctccaagctcgttgattcgcagctgaaacagtacgcctctaaaaacgacttctccgcagtgtcaacaacagaaaagggtcatatcgccgtggcttctaacaagggagacattcgattgtttgaccgtctcggcattaacgctaagactcacattcctgcgctcggtgaacccattattggtctcgacgtttctgctgacggtcgttgggtattggcaacctgccgtacatacctgctcctgattgatgctttgcaaaaatcaggaaagaacgaaggcaaattgggctttgagaaaccctttgcggctgactcaaagccccaaccacgccgtcttgctcttaccccggagcatgtggcacaattccaccacgagaccggaaagggtgtagcattcacaccagccaggttcaacaccagtcagaaaggggatgagacgtcgatcatcacagcaacaggtccttacatcatcaactgggatctagcgaagacggtgaagggtcataagtcgccgtatatcatcaagcgctacacggataatgtgaaagccgatgacttcaagtttggatctgaccagagcgtcatcgtggcactacctaacgaagtgaccatggtcggcaagaagcagctgaaccgaccgacacgtgagagtattgcgggcgatttccaacggctcagtactccgagacgaagttccgggcgtgttggaaataagcagagtgggcgatataaactaggcaaggacgatgttgtggactcgcctttctga

SEQ ID NO: 21411 - protein, 823 aa, Muscodor strobelii
  misc_feature: SGI Peptide ID NO. 567249
  misc_feature (1)..(823): Pfam Id: PF08553 Pfam Desc: VID27 cytoplasmic protein
  misc_feature (1)..(823): NCBI GI: 116204119 Blast Desc: CHGG_09943 [Chaetomium globosum CBS 148.51] gi|88176071|gb|EAQ83539.1| CHGG_09943 [Chaetomium globosum CBS 148.51]
  misc_feature (1)..(823): NCBI GI: 171678611 Blast Desc: protein product [Podospora anserina] gi|170937375|emb|CAP62033.1| protein product [Podospora anserina]
  misc_feature (1)..(823): NCBI GI: 39943696 Blast Desc: MGG_03859 [Magnaporthe grisea 70-15] gi|145014547|gb|EDJ99115.1| MGG_03859 [Magnaporthe grisea 70-15]
  misc_feature (1)..(823): NCBI GI: 85091537 Blast Desc: NCU09711 [Neurospora crassa OR74A] gi|28920343|gb|EAA29714.1| conserved [Neurospora crassa OR74A]
  misc_feature (1)..(823): NCBI GI: 256733009 Blast Desc: [Nectria haematococca mpVI 77-13-4]
  misc_feature (1)..(823): NCBI GI: 46123349 Blast Desc: FG06052.1 [Gibberella zeae PH-1]
  misc_feature (1)..(823): NCBI GI: 156050763 Blast Desc: SS1G_07969 [Sclerotinia sclerotiorum 1980] gi|154692369|gb|EDN92107.1| SS1G_07969 [Sclerotinia sclerotiorum 1980]
  misc_feature (1)..(823): NCBI GI: 154290376 Blast Desc: BC1G_15742 [Botryotinia fuckeliana B05.10] gi|150847764|gb|EDN22957.1| BC1G_15742 [Botryotinia fuckeliana B05.10]
  misc_feature (1)..(823): NCBI GI: 169767698 Blast Desc: [Aspergillus oryzae RIB40] gi|83766175|dbj|BAE56318.1| protein product [Aspergillus oryzae]
  misc_feature (1)..(823): NCBI GI: 159127749 Blast Desc: conserved [Aspergillus fumigatus A1163]
  misc_feature: Useful for introducing or modulating the production of volatile compounds
MFVLKNVGKLLFGSNSQESMIELPQGQLYLVRPLSPKGYSELIFKDAAARIRRTGQDFQYQLVVQRVYEEGEAELLAEEQGEDAELDALATERDEKTFLLDEAIHFRVESRPGSERVIAWKDLSGDVGDLYEFVCDSSVQSAQVEAFDRIAKECQYERKYRKPNTTASDEDLQQFEFDDEQPIPQASPIHSPTLTRSIESTDAMFQLKNEANMAAKRDLAEHSSSLATDTAVQPAPEKEVAASNPKLPPSPPPQPEPLEILSMELAELHFFDFPSGSFVLRDASVTAQVSDIGKWNYWLHVASKEQDWLGIPVIADMNPVFNFEFLSFIFNQFTEDGSAYSWLLRFKDQNTLTRFQEGLMSALWEQLNEQKWSRVKEQERQYVLDAFEDLNMDDAPAEEEEEEEAESEAGDDDQPRSEHYDSEEEDDDVETQPQDDNINSQLAVGYKHDRSFVVRGSKIGVFKHTPNNHLEFSTNISKVETPKGALFSPKKVMLHNEDRNMVLQNESDPNKLYRMDLEYGKVVDEWNVHDDIPVLEFAPENKFAQMTHEQTFLGISKNALYRIDPRLAGSKLVDSQLKQYASKNDFSAVSTTEKGHIAVASNKGDIRLFDRLGINAKTHIPALGEPIIGLDVSADGRWVLATCRTYLLLIDALQKSGKNEGKLGFEKPFAADSKPQPRRLALTPEHVAQFHHETGKGVAFTPARFNTSQKGDETSIITATGPYIINWDLAKTVKGHKSPYIIKRYTDNVKADDFKFGSDQSVIVALPNEVTMVGKKQLNRPTRESIAGDFQRLSTPRRSSGRVGNKQSGRYKLGKDDVVDSPF

SEQ ID NO: 21412 - DNA, 3035 bp, Muscodor strobelii
  misc_feature: SGI EST ID NO. CUFF.50447.1
  misc_feature: Variant of the nucleotide sequence at SEQ ID NO 21410
gccaagattgacgatagccatcctctgcactttttcccgctcgcaacaaacccgcccactctacatcgccaacttgttcatcgcggcgcgttagcatagtgcatatatcttgactttgccctttttcatcaggtcgaccatacatgctcacaacccaactgaacatcttgcgtggacagcagtccgacaaacaaacaccatgtttgtcctcaaaaatgtgggcaagctcctctttggcagcaacagccaggagtctatgattgagctgcctcagggccagctctacctcgtccgaccactctcccccaaaggatactccgaactcatcttcaaagacgccgccgcccgcatccgacgcaccggccaagacttccaataccaacttgtcgtccagcgcgtctacgaggagggcgaggctgagcttctcgccgaagagcaaggcgaagacgctgaactcgacgcccttgctactgagcgagatgaaaagacgttcctcctagacgaagccatccacttccgagtcgaaagccggccgggatccgagagagtcatcgcctggaaggacctcagcggtgacgtcggtgacctctacgagtttgtatgtgattcttccgttcagtccgcccaggtcgaggcgttcgatcgcatcgcaaaagagtgccagtacgagaggaaataccgaaaacccaacaccactgcttccgacgaagacctacagcagttcgagttcgacgacgagcagcctattccccaggctagcccaatccatagcccgactcttacgcgttccatcgagtcaaccgacgccatgttccagctcaagaacgaggccaacatggccgcgaagagagatctggctgaacacagctctagccttgctaccgacaccgcagtccaaccagctcccgaaaaggaggtcgccgcatccaaccccaagctaccacccagccctcccccgcaacccgagccgctcgaaattctttccatggagcttgctgaactgcacttcttcgatttcccttccggttcgttcgttcttcgtgatgcttcggttacggcccaggtgtcagatattggcaaatggaactactggctacatgtcgctagcaaggaacaagattggctgggaatcccagtcatcgccgacatgaaccctgtcttcaacttcgagtttctgtccttcatcttcaatcaatttaccgaggatgggtctgcctactcttggctattgagattcaaagaccaaaacactctcactcgcttccaggaaggtctcatgagcgcgctctgggagcagctcaatgagcagaagtggtccagagtgaaagaacaggaacgtcagtatgtactcgatgcctttgaggacctgaacatggacgatgcgcctgcggaggaagaagaggaggaggaggctgaaagcgaagcgggtgatgacgaccaacctaggagtgagcactacgatagcgaagaggaagatgacgatgtcgagacccagccgcaggatgataatatcaattctcagttggcggtcggatacaaacacgatcgatccttcgttgtccgtggctccaagattggagtcttcaaacataccccgaacaaccacctggagttctctaccaacatttctaaggtcgagacccccaagggcgcactgttcagtccaaagaaggtcatgctgcacaatgaggaccgcaacatggttctacagaacgagtcggacccgaacaagctttatcgcatggatctcgagtacggcaaggttgtcgatgaatggaatgttcatgatgatattcctgttctagagttcgctcccgaaaacaaatttgcccagatgactcacgaacaaacattcttgggtatctcgaaaaacgccctgtaccgcattgaccctcgcctagctggctccaagctcgttgattcgcagctgaaacagtacgcctctaaaaacgacttctccgcagtgtcaacaacagaaaagggtcatatcgccgtggcttctaacaagggagacattcgattgtttgaccgtctcggcattaacgctaagactcacattcctgcgctcggtgaacccattattggtctcgacgtttctgctgacggtcgttgggtattggcaacctgccgtacatacctgctcctgattgatgctttgcaaaaatcaggaaagaacgaaggcaaattgggctttgagaaaccctttgcggctgactcaaagccccaaccacgccgtcttgctcttaccccggagcatgtggcacaattccaccacgagaccggaaagggtgtagcattcacaccagccaggttcaacaccagtcagaaaggggatgagacgtcgatcatcacagcaacaggtccttacatcatcaactgggatctagcgaagacggtgaagggtcataagtcgccgtatatcatcaagcgctacacggataatgtgaaagccgatgacttcaagtttggatctgaccagagcgtcatcgtggcactacctaacgaagtgaccatggtcggcaagaagcagctgaaccgaccgacacgtgagagtattgcgggcgatttccaacggctcagtactccgagacgaagttccgggcgtgttggaaataagcagagtgggcgatataaactaggcaaggacgatgttgtggactcgcctttctgaacgctggctttgactacttaattttctcctttacttgtgcagaggatacggattttatgagacaatgtttccgaacgcgagagaaggttatggtttctttcccaacaatacccccggagtttaaggctggttagatttacagagggagatggtggttatcatttgcacttcgatttgctgttacgtacttagacagtacctaggtagtaatctatgtcgctcatgaatattgttagccttggaacatatgagtaagagcatgtttgaaatgccgagacttgacctacatcctcgccccattcgactacttgtttgacgcgcttggtagggatgcataggactgtaagtcgtaggtagaccaatg

SEQ ID NO: 21413 - DNA, 1614 bp, Muscodor strobelii
  misc_feature: SGI cDNA ID NO. 567250
  misc_feature: Encodes the peptide sequence at SEQ ID NO 21414
atggatgaattagacgtgttgccggacattcaagcgaactacaacaaagtctttgccgagttggaagacgagcacaagtacaaatacacggggaagtggcgcagtccctgcctttctgaacgcgcccaacgcattcccatgaacagaaacatatatggtgttgatgagagagaatttgactctgttctaagccaaaataacgacaccgacctgtctgggcaatctgagcagtactggaaagcagtgctgagcaagattgcacccagaccgtacatgcgactgtcgttggtgcattcctacttagcgaaggcgcgcccaaaagaaacaccaagcaattcgcctatttggaaaataggtaataagtggcttgacgacgccgtaaaacaacttcacgatactggagggtcacctggtacacgtatcatgatgccacccgtcgattctgagctgtttgaggccatccgcatcaatggcagcgcccagcaaggtctcggaaagatgccggaggccattgtgacaaagatgagacgggttcaagccgcatggatggtcggagaccctgtcaacaggattgttccggaaatatggaagttgtatctcgatggatacgagaactccgtgaaggtccgacaagccgcttcgagcagggaattgcaggcatcaggaaatgatctggattacgcagacgatgagcgctgcgtgccccatgcgatagaaggcgatgattcaggcactcctgctttcgctggcgcatcgaatacggctactgaagtcttgaagaaggacaaagaacctcaatcgcccaaggttcccgagctacatacgaatctggtggtatcagggcagctcgcatctaccgcgatttccggacaacgttcgagtctcatagctcctaatcactctcttgtgcctgtgacttctgaaccatcagaccaaccagaccaaatggtcgagctcttctgggatgggcttcgtaacaagtgcagactagacataataacagaagcagagaaagtggtcagagtgagccgggaaggagcaccgataaaggcaaaaatcgaagagatgatgacctctgcattaaaaacgctgggaatatccgacatccgcgagcaggaaaagactgttcgtcgcgttctgatggagagtttgaaagcccaccattccccatctggcagactcacagtctttggcgatttgctctcatcggacgacgttttcaaggcgctgcaagagatactcgaaaatttttcgcagaaaacggactcagaacttgcgaatttgaggcaggaggattcaatgctacgaaaagcaattgtatcttgcgagcaacgcatcgagaaactagagcagagtcgctccagcaaggatcacaaaaacgtaccggaggacaacaaaatgactgtccaacagaagatgagcaagttcatcgattcgaaacgaaacgagatcaaacgagaggccgcagactctgtgacatcgaaatcttcaaagaaagcgaagaccattggcgaggtagagaccggtgctaaagaggctggcaagaaagtagtgaaacatgaggtagatgatgagatccagttcatgggagtgaagaaagtatccagggcctag

SEQ ID NO: 21414 - protein, 537 aa, Muscodor strobelii
  misc_feature: SGI Peptide ID NO. 567250
MDELDVLPDIQANYNKVFAELEDEHKYKYTGKWRSPCLSERAQRIPMNRNIYGVDEREFDSVLSQNNDTDLSGQSEQYWKAVLSKIAPRPYMRLSLVHSYLAKARPKETPSNSPIWKIGNKWLDDAVKQLHDTGGSPGTRIMMPPVDSELFEAIRINGSAQQGLGKMPEAIVTKMRRVQAAWMVGDPVNRIVPEIWKLYLDGYENSVKVRQAASSRELQASGNDLDYADDERCVPHAIEGDDSGTPAFAGASNTATEVLKKDKEPQSPKVPELHTNLVVSGQLASTAISGQRSSLIAPNHSLVPVTSEPSDQPDQMVELFWDGLRNKCRLDIITEAEKVVRVSREGAPIKAKIEEMMTSALKTLGISDIREQEKTVRRVLMESLKAHHSPSGRLTVFGDLLSSDDVFKALQEILENFSQKTDSELANLRQEDSMLRKAIVSCEQRIEKLEQSRSSKDHKNVPEDNKMTVQQKMSKFIDSKRNEIKREAADSVTSKSSKKAKTIGEVETGAKEAGKKVVKHEVDDEIQFMGVKKVSRA

SEQ ID NO: 21415 - DNA, 584 bp, Muscodor strobelii
  misc_feature: SGI EST ID NO. CUFF.50234.0
  misc_feature: Variant of the nucleotide sequence at SEQ ID NO 21413
ccggaaatatggaagttgtatctcgatggatacgagaactccgtgaaggtccgacaagccgcttcgagcagggaattgcaggcatcaggaaatgatctggattacgcagacgatgagcgctgcgtgccccatgcgatagaaggcgatgattcaggcactcctgctttcgctggcgcatcgaatacggctactgaagtcttgaagaaggacaaagaacctcaatcgcccaaggttcccgagctacatacgaatctggtggtatcagggcagctcgcatctaccgcgatttccggacaacgttcgagtctcatagctcctaatcactctcttgtgcctgtgacttctgaaccatcagaccaaccagaccaaatggtcgagctcttctgggatgggcttcgtaacaagtgcagactagacataataacagaagcagagaaagtggtcagagtgagccgggaaggagcaccgataaaggcaaaaatcgaagagatgatgacctctgcattaaaaacgctgggaatatccgacatccgcgagcaggaaaagactgttcgtcgcgttctgatggagagtttgaaagccca

SEQ ID NO: 21416 - DNA, 669 bp, Muscodor strobelii
  misc_feature: SGI cDNA ID NO. 567251
  misc_feature: Encodes the peptide sequence at SEQ ID NO 21417
atggtcgagctcttctgggatgggcttcgtaacaagtgcagactagacataataacagaagcagagaaagtggtcagagtgagccgggaaggagcaccgataaaggcaaaaatcgaagagatgatgacctctgcattaaaaacgctgggaatatccgacatccgcgagcaggaaaagactgttcgtcgcgttctgatggagagtttgaaagcccaccattccccatctggcagactcacagtctttggcgatttgctctcatcggacgacgttttcaaggcgctgcaagagatactcgaaaatttttcgcagaaaacggactcagaacttgcgaatttgaggcaggaggattcaatgctacgaaaagcaattgtatcttgcgagcaacgcatcgagaaactagagcagagtcgctccagcaaggatcacaaaaacgtaccggaggacaacaaaatgactgtccaacagaagatgagcaagttcatcgattcgaaacgaaacgagatcaaacgagaggccgcagactctgtgacatcgaaatcttcaaagaaagcgaagaccattggcgaggtagagaccggtgctaaagaggctggcaagaaagtagtgaaacatgaggtagatgatgagatccagttcatgggagtgaagaaagtatccagggcctag

SEQ ID NO: 21417 - protein, 222 aa, Muscodor strobelii
  misc_feature: SGI Peptide ID NO. 567251
MVELFWDGLRNKCRLDIITEAEKVVRVSREGAPIKAKIEEMMTSALKTLGISDIREQEKTVRRVLMESLKAHHSPSGRLTVFGDLLSSDDVFKALQEILENFSQKTDSELANLRQEDSMLRKAIVSCEQRIEKLEQSRSSKDHKNVPEDNKMTVQQKMSKFIDSKRNEIKREAADSVTSKSSKKAKTIGEVETGAKEAGKKVVKHEVDDEIQFMGVKKVSRA

SEQ ID NO: 21418 - DNA, 608 bp, Muscodor strobelii
  misc_feature: SGI EST ID NO. CUFF.50231.0
  misc_feature: Variant of the nucleotide sequence at SEQ ID NO 21416
ccggaggacaacaaaatgactgtccaacagaagatgagcaagttcatcgattcgaaacgaaacgagatcaaacgagaggccgcagactctgtgacatcgaaatcttcaaagaaagcgaagaccattggcgaggtagagaccggtgctaaagaggctggcaagaaagtagtgaaacatgaggtagatgatgagatccagttcatgggagtgaagaaagtatccagggcctagagcaccgtcctatgtgccttacaacttacttgagagacacgatagacgacacacggcatcgttgtccacctgattgctagtgctcatctcccagcatcatgccgtcttaaaagccggcttactgccattcctaaatcggagagtaacgaagactggctttacgattgtgaatgggaagaaacgcctgagggttcatacacaccagacgctctgcaactgctgaccttcagaggacgggagaggagaggtcagtagagatcttcagcaaaatggtgaacgcggcataaaggcgatgtaaattaacctttgaagtcaaacatcaagcagcatacctgcaggctgaagatcagtctggttgatacactagagcttaggag

SEQ ID NO: 21419 - DNA, 801 bp, Muscodor strobelii
  misc_feature: SGI cDNA ID NO. 567252
  misc_feature: Encodes the peptide sequence at SEQ ID NO 21420
atgtcaaagataatggacttcaaatgcgccatcgtcaccggcggtggtggtggaattggaaaagccctctcggcgtacttcatttccaaaggcaagaaagtcttcatagccggccgcaccgaatccaagctgcagagcaccgctaaagagattggggctgccgggtactacgtgctagacactggaagcatttccgacatacctgctttcatcaagaagatcacttctgctcatccagaactggactgtctcgtcaacaatgccggcgtgcagaggccattgcaagtacagaagcaagacgcggatgagttcctttccaaggcagatcaggaaatcgatatcaatacccgcgggccgatgcaccttgcggtaggcttacttcctcatttcagagccaagcctcacgctctgatcataaatgtttcgagcgtcctcggcttcataccattttccatcatcaacccagtgtataacggtacaaaggcgtggttgcatttttggtcgatgaacctacgcagccaactccacgatacaaatatcaaagtagtagagattgcaccgcccacagtggcaaccgatctgcaccgcgagcgagaagacacaaatgacaacaagaaggagaacaatcccaacgcgttatcacttgatgaattcatggacgaagtatctgctaagctagaagatgatgttgatatgatcggggcgggcatggcacacgacatcgtcaaggactggcataatgcgttctctgacatgtatcacaagtcggaagccaagtttgttggcgaggcagggaagtga

SEQ ID NO: 21420 - protein, 266 aa, Muscodor strobelii
  misc_feature: SGI Peptide ID NO. 567252
  misc_feature (8)..(176): Pfam Id: PF00106 Pfam Desc: short chain dehydrogenase
  misc_feature (5)..(260): NCBI GI: 46114688 Blast Desc: FG03186.1 [Gibberella zeae PH-1]
  misc_feature (5)..(259): NCBI GI: 67538772 Blast Desc: AN5556.2 [Aspergillus nidulans FGSC A4] gi|40743071|gb|EAA62261.1| AN5556.2 [Aspergillus nidulans FGSC A4] gi|259484986|tpe|CBF81674.1| TPA: conserved [Aspergillus FGSC
  misc_feature (5)..(248): NCBI GI: 171688090 Blast Desc: protein product [Podospora anserina] gi|170944007|emb|CAP70117.1| protein product [Podospora anserina]
  misc_feature (5)..(253): NCBI GI: 238500662 Blast Desc: short-chain dehydrogenases/reductase, [Aspergillus flavus NRRL3357] gi|220691802|gb|EED48149.1| short-chain dehydrogenases/reductase, [Aspergillus flavus NRRL3357]
  misc_feature (5)..(253): NCBI GI: 169782221 Blast Desc: [Aspergillus oryzae RIB40] gi|83774316|dbj|BAE64440.1| protein product [Aspergillus oryzae]
  misc_feature (7)..(245): NCBI GI: 169620556 Blast Desc: SNOG_13477 [Phaeosphaeria nodorum SN15] gi|160704060|gb|EAT78924.2| SNOG_13477 [Phaeosphaeria nodorum SN15]
  misc_feature (5)..(255): NCBI GI: 145246130 Blast Desc: An12g02320 [Aspergillus niger] gi|134080027|emb|CAK41074.1| protein product [Aspergillus niger]
  misc_feature (1)..(260): NCBI GI: 71003123 Blast Desc: UM00095.1 [Ustilago maydis 521] gi|46096247|gb|EAK81480.1| UM00095.1 [Ustilago maydis 521]
  misc_feature (1)..(255): NCBI GI: 242819157 Blast Desc: steroid dehydrogenase, [Talaromyces stipitatus ATCC 10500] gi|218713724|gb|EED13148.1| steroid dehydrogenase, [Talaromyces stipitatus ATCC 10500]
  misc_feature (11)..(231): NCBI GI: 15888205 Blast Desc: oxidoreductase [Agrobacterium tumefaciens str. C58] gi|15155853|gb|AAK86671.1| oxidoreductase [Agrobacterium tumefaciens str. C58]
  misc_feature (11)..(208): SWISSPROT Homolog: EC 1.1.1.276 Serine 3-dehydrogenase
MSKIMDFKCAIVTGGGGGIGKALSAYFISKGKKVFIAGRTESKLQSTAKEIGAAGYYVLDTGSISDIPAFIKKITSAHPELDCLVNNAGVQRPLQVQKQDADEFLSKADQEIDINTRGPMHLAVGLLPHFRAKPHALIINVSSVLGFIPFSIINPVYNGTKAWLHFWSMNLRSQLHDTNIKVVEIAPPTVATDLHREREDTNDNKKENNPNALSLDEFMDEVSAKLEDDVDMIGAGMAHDIVKDWHNAFSDMYHKSEAKFVGEAGK

SEQ ID NO: 21421 - DNA, 430 bp, Muscodor strobelii
  misc_feature: SGI EST ID NO. CUFF.50243.0
  misc_feature: Variant of the nucleotide sequence at SEQ ID NO 21419
atttaactctccaaatatatcagtcccaaagactgtgcagtatgtcaaagataatggacttcaaatgcgccatcgtcaccggcggtggtggtggaattggaaaagccctctcggcgtacttcatttccaaaggcaagaaagtcttcatagccggccgcaccgaatccaagctgcagagcaccgctaaagagattggggctgccgggtactacgtgctagacactggaagcatttccgacatacctgctttcatcaagaagatcacttctgctcatccagaactggactgtctcgtcaacaatgccggcgtgcagaggccattgcaagtacagaagcaagacgcggatgagttcctttccaaggcagatcaggaaatcgatatcaatacccgcgggccgatgcaccttgcggtaggcttacttcctcattt

SEQ ID NO: 21422 - DNA, 1092 bp, Muscodor strobelii
  misc_feature: SGI cDNA ID NO. 567253
  misc_feature: Elevated expression when VOC is produced
  misc_feature: Encodes the peptide sequence at SEQ ID NO 21423
atgtcgtacttcgggagtccagattcggccggtggccgcgggtacaacggctacaataactccactggcattcctttggaatcatcgcctgttccgtcgacggtcaaatatcacgttccaattcaacgcgagttgctcgatgttgggattttcaaagatacaatcttcccgagcctctcactccatgcgccgctggcggtgatcgcatatggcgttggaagagctaccaacagcgtcgaagccaaagattggctgtggccgcttgcacctatggtcaatggatggtggagcgccatcggtaggaaagtatatgttcgtggtctgacgttcggacaagcccttgggactttatctaggcctgaacgacttcttctgacaggagtcactctttggggaggaagactcttttaccggatcgctagtagaagcgtcaaacgaagacgccagggcaagggcaccgatgattcgagatatgagatgcagaagcttgaagaggggttttggaataaggcactcttcaccctatttttaccggaggccgtgatccagaccatcatctcactgccgattactgcgcccttccaccatcaaggtgctgtattgactggttatcacccggctgttcaagctttggccgttggtctgttctctgccggattcgcactggaggtcttggcagatactcaactagagaaattcaaagatacagcggaagacagccgctcagtttgtaaagaaggtgtttggagcctcgttcggcaccccaactatcttggtgatgccttggttcacctatcattccctctgttgctttacggatcagacatgcttgcacccatcgagattctaggcgcaatcgccaattacctattccttcgttacgtcggcggagacaagcaaaccgaacgccatcagcatcggcgatactctgagtcgaatcctgaaaagtttgcagacttccagaaacgcagagagagtcacaattcattctggcctaaggctgatgtgttgacaaacaaatggttgtggattgttgcgggagctggcgctactggcgctgctgttgagcaagcaattcatcaattaatctga

SEQ ID NO: 21423 - protein, 363 aa, Muscodor strobelii
  misc_feature: SGI Peptide ID NO. 567253
  misc_feature (69)..(324): Pfam Id: PF06966 Pfam Desc: Domain of function (DUF1295)
  misc_feature (16)..(362): NCBI GI: 169610970 Blast Desc: SNOG_08594 [Phaeosphaeria nodorum SN15] gi|111062642|gb|EAT83762.1| SNOG_08594 [Phaeosphaeria nodorum SN15]
  misc_feature (45)..(359): NCBI GI: 189205849 Blast Desc: PTRG_08927 [Pyrenophora tritici-repentis Pt-1C-BFP] gi|187975352|gb|EDU41978.1| PTRG_08927 [Pyrenophora tritici-repentis Pt-1C-BFP]
  misc_feature (45)..(349): NCBI GI: 85092387 Blast Desc: NCU04921 [Neurospora crassa OR74A] gi|28920774|gb|EAA30133.1| conserved [Neurospora crassa OR74A]
  misc_feature (29)..(360): NCBI GI: 39940588 Blast Desc: MGG_04946 [Magnaporthe grisea 70-15] gi|145010819|gb|EDJ95475.1| MGG_04946 [Magnaporthe grisea 70-15]
  misc_feature (48)..(359): NCBI GI: 259487809 Blast Desc: TPA: DUF1295 domain protein (AFU_orthologue; AFUA_8G05810) [Aspergillus nidulans FGSC A4]
  misc_feature (48)..(363): NCBI GI: 46117534 Blast Desc: FG04609.1 [Gibberella zeae PH-1]
  misc_feature (48)..(359): NCBI GI: 67523897 Blast Desc: AN2404.2 [Aspergillus nidulans FGSC A4] gi|40745359|gb|EAA64515.1| AN2404.2 [Aspergillus nidulans FGSC A4]
  misc_feature (47)..(359): NCBI GI: 119484966 Blast Desc: NFIA_098580 [Neosartorya fischeri NRRL 181] gi|119410281|gb|EAW20228.1| conserved [Neosartorya fischeri NRRL 181]
  misc_feature (47)..(361): NCBI GI: 146324759 Blast Desc: DUF1295 domain protein [Aspergillus fumigatus Af293] gi|129556140|gb|EAL85345.2| DUF1295 domain protein [Aspergillus fumigatus Af293]
  misc_feature (47)..(359): NCBI GI: 145250977 Blast Desc: An15g04670 [Aspergillus niger] gi|134082529|emb|CAK42445.1| protein product [Aspergillus niger]
  misc_feature: Useful for introducing or modulating the production of volatile compounds
MSYFGSPDSAGGRGYNGYNNSTGIPLESSPVPSTVKYHVPIQRELLDVGIFKDTIFPSLSLHAPLAVIAYGVGRATNSVEAKDWLWPLAPMVNGWWSAIGRKVYVRGLTFGQALGTLSRPERLLLTGVTLWGGRLFYRIASRSVKRRRQGKGTDDSRYEMQKLEEGFWNKALFTLFLPEAVIQTIISLPITAPFHHQGAVLTGYHPAVQALAVGLFSAGFALEVLADTQLEKFKDTAEDSRSVCKEGVWSLVRHPNYLGDALVHLSFPLLLYGSDMLAPIEILGAIANYLFLRYVGGDKQTERHQHRRYSESNPEKFADFQKRRESHNSFWPKADVLTNKWLWIVAGAGATGAAVEQAIHQLI

SEQ ID NO: 21424 - DNA, 1394 bp, Muscodor strobelii
  misc_feature: SGI EST ID NO. CUFF.50250.0
  misc_feature: Variant of the nucleotide sequence at SEQ ID NO 21422
ttacatatctttttcctacatcgaaggtatgggagatgctcaattgacgcgttagcagcgcccttgaaccatcaccagacctgccgaatctataatcaattttgattacttaccttaggcttagtggtagatactatgtcgtacttcgggagtccagattcggccggtggccgcgggtacaacggctacaataactccactggcattcctttggaatcatcgcctgttccgtcgacggtcaaatatcacgttccaattcaacgcgagttgctcgatgttgggattttcaaagatacaatcttcccgagcctctcactccatgcgccgctggcggtgatcgcatatggcgttggaagagctaccaacagcgtcgaagccaaagattggctgtggccgcttgcacctatggtcaatggatggtggagcgccatcggtaggaaagtatatgttcgtggtctgacgttcggacaagcccttgggactttatctaggcctgaacgacttcttctgacaggagtcactctttggggaggaagactcttttaccggatcgctagtagaagcgtcaaacgaagacgccagggcaagggcaccgatgattcgagatatgagatgcagaagcttgaagaggggttttggaataaggcactcttcaccctatttttaccggaggccgtgatccagaccatcatctcactgccgattactgcgcccttccaccatcaaggtgctgtattgactggttatcacccggctgttcaagctttggccgttggtctgttctctgccggattcgcactggaggtcttggcagatactcaactagagaaattcaaagatacagcggaagacagccgctcagtttgtaaagaaggtgtttggagcctcgttcggcaccccaactatcttggtgatgccttggttcacctatcattccctctgttgctttacggatcagacatgcttgcacccatcgagattctaggcgcaatcgccaattacctattccttcgttacgtcggcggagacaagcaaaccgaacgccatcagcatcggcgatactctgagtcgaatcctgaaaagtttgcagacttccagaaacgcagagagagtcacaattcattctggcctaaggctgatgtgttgacaaacaaatggttgtggattgttgcgggagctggcgctactggcgctgctgttgagcaagcaattcatcaattaatctgataatgtattttggaactgtttctctacttggatctgaggttactacgctttctcaaaacatttcctgcaatactctgaacgtcaagggatgtctttacggaattatggtgtacttctacgcagatatataagcagacttaaaacgcttacaaatcctacctcattat

SEQ ID NO: 21425 - DNA, 1245 bp, Muscodor strobelii
  misc_feature: SGI cDNA ID NO. 567254
  misc_feature: Encodes the peptide sequence at SEQ ID NO 21426
atgaagtataactcgttcaagccaattacgcccggcatacagctcattccagaaaatgaacttgacttgcgacctgacgcagaactcatcgaggctttgaaacggcctggcccggtgcgccatgagcgcaatgtgtgggctttctggaacaccggttgggatgcaatgcgtccctggacgcagcgtaatgtccttggctgggtgcgccgtcagggcccatcttgggatgtccgtctcttggatatggtgccggggtcacctacgaatgtgcagaacttcgtgcccccagagtccttaccagagtgcttcaagaacaacacgatggatggacacgcaaaaggccaacatgcgagtgatatggcgagattagcgttactatatctgcacggtggcatctggctcgattgtggctcagtcctttttcgaaaattcgatgacatattttggagcgacttagaggatccgaattctccattcgaaatgggcatcacgctatttcagtctagaaaacatatcggtcaatgtttgacgggctttattggggcaagaaaaggcaatccgttcatcgaacgctggatgcgattatggctcgagctctggaagggccgtactaattgtttcaacttacacgagcatcctctgctcaagcctcttgggctgatcgtcccaccggagaagcaggagcttgagaatcctcgaagtattgatatgggaggaaaaggtgttttcgatttgaagatcacaaccgactatctggccttgaatatggcttacgagcgcgtgagactactcgtagataacgagacgggatggaacggcccggagtacttccggcgccatgtgcatttgcttgacacagtggatgaattgtggaaatctcatgaattgctcttggaggatgaactgtttccgctcctatcccttccattcgagcctaacaatgtagacattgatccaaagcaaaaggctgcgtcggattatgttggatatgtgctagcgaaatctagtatggcaaaatatagccaaggacattggcaacctggcgccagggtgccgctcgcaatgagctggagcatgcccgagaacgccgacgccgatgtgaaggttgggacatgggctgagtattttcgatgggcgagcatgttctgcgaccagacgaggtcaaagggtgcgtgtctgccgagtctccgcctcggtgaagagagagatgatgttatccaggcaggacttctagaagccaagtga

SEQ ID NO: 21426 - protein, 414 aa, Muscodor strobelii
  misc_feature: SGI Peptide ID NO. 567254
  misc_feature (9)..(387): NCBI GI: 242804552 Blast Desc: capsule polysaccharide biosynthesis protein, [Talaromyces stipitatus ATCC 10500] gi|218717743|gb|EED17164.1| capsule polysaccharide biosynthesis protein, [Talaromyces ATCC
  misc_feature (11)..(387): NCBI GI: 212539426 Blast Desc: conserved [Penicillium marneffei ATCC 18224] gi|210067167|gb|EEA21259.1| conserved [Penicillium marneffei ATCC 18224]
  misc_feature (26)..(413): NCBI GI: 121701753 Blast Desc: conserved [Aspergillus clavatus NRRL 1] gi|119397284|gb|EAW07715.1| conserved [Aspergillus clavatus NRRL 1]
  misc_feature (16)..(413): NCBI GI: 70985642 Blast Desc: capsule polysaccharide biosynthesis protein [Aspergillus fumigatus Af293] gi|66845955|gb|EAL86289.1| capsule polysaccharide biosynthesis protein, [Aspergillus fumigatus
  misc_feature (22)..(412): NCBI GI: 212538985 Blast Desc: capsule polysaccharide biosynthesis protein, [Penicillium marneffei ATCC 18224] gi|210069390|gb|EEA23481.1| capsule polysaccharide biosynthesis protein, [Penicillium ATCC
  misc_feature (12)..(387): NCBI GI: 46127047 Blast Desc: FG07901.1 [Gibberella zeae PH-1]
  misc_feature (14)..(388): NCBI GI: 67538582 Blast Desc: AN5461.2 [Aspergillus nidulans FGSC A4] gi|40743431|gb|EAA62621.1| [Aspergillus nidulans FGSC A4] gi|259485092|tpe|CBF81870.1| TPA: capsule polysaccharide protein,
  misc_feature (12)..(413): NCBI GI: 256724493 Blast Desc: NECHADRAFT_106564 [Nectria haematococca mpVI 77-13-4]
  misc_feature (21)..(412): NCBI GI: 225683496 Blast Desc: conserved [Paracoccidioides brasiliensis Pb03]
  misc_feature (22)..(291): NCBI GI: 240104775 Blast Desc: CPC735_019980 [Coccidioides posadasii C735 delta SOWgp]
MKYNSFKPITPGIQLIPENELDLRPDAELIEALKRPGPVRHERNVWAFWNTGWDAMRPWTQRNVLGWVRRQGPSWDVRLLDMVPGSPTNVQNFVPPESLPECFKNNTMDGHAKGQHASDMARLALLYLHGGIWLDCGSVLFRKFDDIFWSDLEDPNSPFEMGITLFQSRKHIGQCLTGFIGARKGNPFIERWMRLWLELWKGRTNCFNLHEHPLLKPLGLIVPPEKQELENPRSIDMGGKGVFDLKITTDYLALNMAYERVRLLVDNETGWNGPEYFRRHVHLLDTVDELWKSHELLLEDELFPLLSLPFEPNNVDIDPKQKAASDYVGYVLAKSSMAKYSQGHWQPGARVPLAMSWSMPENADADVKVGTWAEYFRWASMFCDQTRSKGACLPSLRLGEERDDVIQAGLLEAK

SEQ ID NO: 21427 - DNA, 835 bp, Muscodor strobelii
  misc_feature: SGI EST ID NO. CUFF.50253.0
  misc_feature: Variant of the nucleotide sequence at SEQ ID NO 21425
tttcaacttacacgagcatcctctgctcaagcctcttgggctgatcgtcccaccggagaagcaggagcttgagaatcctcgaagtattgatatgggaggaaaaggtgttttcgatttgaagatcacaaccgactatctggccttgaatatggcttacgagcgcgtgagactactcgtagataacgagacgggatggaacggcccggagtacttccggcgccatgtgcatttgcttgacacagtggatgaattgtggaaatctcatgaattgctcttggaggatgaactgtttccgctcctatcccttccattcgagcctaacaatgtagacattgatccaaagcaaaaggctgcgtcggattatgttggatatgtgctagcgaaatctagtatggcaaaatatagccaaggacattggcaacctggcgccagggtgccgctcgcaatgagctggagcatgcccgagaacgccgacgccgatgtgaaggttgggacatgggctgagtattttcgatgggcgagcatgttctgcgaccagacgaggtcaaagggtgcgtgtctgccgagtctccgcctcggtgaagagagagatgatgttatccaggcaggacttctagaagccaagtgaaaagacaaccattgtaatattctctggcgaagaacacatgtgtttttcgtacacatctgtgccgagtgtaaatctacctccgtgtaaacagaggtgactgtagatttagtaccgaaatcagttctagctcaatctacccaaatggcccaatcgatctactaaggtgaaccccatggggtaatttgtcttgctgcaggcgagcatgta

SEQ ID NO: 21428 - DNA, 1662 bp, Muscodor strobelii
  misc_feature: SGI cDNA ID NO. 567255
  misc_feature: Encodes the peptide sequence at SEQ ID NO 21429
atgcaggctaggcacggagctcgccggttcttgagctccgtagcgacgaatcagcgcctttgtataacctcacctccggaagtgcggcatctctggcccccactccagcatagaggcttcgtgtccacgccgggcttcagaaatcaagggtccggcgcggaggaagctccgaagcgtgaagatgcaccgaattccatcggtgccaaagcggtggaatcggcaatgaccacattagcttccgttttagtgcttggtttaggctttgctggcgctgggtatgcctaccacaggtcttacaaatacatacaactcaggaaaatggagaatgcatttgagccaggcgatcctgtgttggatttggcagcttttgggaaagacatcccttcgccggccgctgcagaacattggatcgcgcgtgaagagcaagacaagatcgacgcaattatttctggccaagacaagggtcattactatctcataatgggcgacaagggatgtggtaagagcagtatgctactggatgcaatgcggaagatcgacggcgaggcatgcgccatgttcgaggcacattcggatttggagatctttcggatacgactaggcaaagcacttgattacgagttccacgaagattacattggtggttatttcagtgaacgtggacctcgagataccaccgctctgcttgacatcgaacgagctatgaacaagctggagaaagtcgcattgaaacatcgagcaaagaagaataagccgcttgtcctcatcgtcaaccaaacgcatctcattcgagatgatgatgacgggcgcgatcttctcgagctcctccagcagagagccgagcagtgggctgctgcgaatctggttactatgatcttcaatactgatgattactgggtctacgagcgattcaaacagcttgcaacaaggttggaggtcattccagtggcagacctgcccaagaaagaagcgatttcggcattgaagcgatatcgccttcgctacttccatgaagaagtcccgcacaccatgctagaagaggtttacgatcggattggtggtcgactttcgttcctgaaccgcgctgccaagtcccgtgacatgctaggcacgtgtgacctcatcaaagaaacggagaagacgtggtttctaaaccaatgctggattctcggaatggaaatggatgacgacgttatggatcagcagaaatgggcctctgctgcgatgacactggcacagtcgctagtcgacaaagaggaggagatggacaagatatacgacagagagacaggacatgtcatgccgagttatgcaatgcacaaggcccagcagatcatgacgcgatccgacttcattagagagctcgaccggctgaatctgtttaccatcacgagtacagcccaggttcgcgcgagctcggtaccgatgcaccgagcttttaaggaaatttgcgcagaagaaggcttccgaccgttccttgaggacactttacaacgaattagtgacattgagagtttgggccgcactagagaactcgtggcgaaggaccttgttcttggcggacagtacgagatcgagacaggccaaggcaaaaacggcaaggtcgtctttacattaagacagaaagaagaagaagatcaaactgacgagacgaagaaatga

SEQ ID NO: 21429 - protein, 553 aa, Muscodor strobelii
  misc_feature: SGI Peptide ID NO. 567255
  misc_feature (9)..(528): NCBI GI: 256729123 Blast Desc: NECHADRAFT_93340 [Nectria haematococca mpVI 77-13-4]
  misc_feature (1)..(526): NCBI GI: 46138599 Blast Desc: FG10814.1 [Gibberella zeae PH-1]
  misc_feature (42)..(537): NCBI GI: 164427017 Blast Desc: NCU02310 [Neurospora crassa OR74A] gi|157071570|gb|EAA30237.2| conserved [Neurospora crassa OR74A]
  misc_feature (71)..(530): NCBI GI: 171679685 Blast Desc: protein product [Podospora anserina] gi|170939468|emb|CAP64696.1| protein product [Podospora anserina]
  misc_feature (60)..(530): NCBI GI: 116203423 Blast Desc: CHGG_09595 [Chaetomium globosum CBS 148.51] gi|88175723|gb|EAQ83191.1| CHGG_09595 [Chaetomium globosum CBS 148.51]
  misc_feature (65)..(550): NCBI GI: 156042598 Blast Desc: SS1G_11097 [Sclerotinia sclerotiorum 1980] gi|154695483|gb|EDN95221.1| SS1G_11097 [Sclerotinia sclerotiorum 1980]
  misc_feature (72)..(530): NCBI GI: 145607583 Blast Desc: MGG_10420 [Magnaporthe grisea 70-15] gi|145015108|gb|EDJ99676.1| MGG_10420 [Magnaporthe grisea 70-15]
  misc_feature (43)..(546): NCBI GI: 154304684 Blast Desc: BC1G_08081 [Botryotinia fuckeliana B05.10] gi|150853981|gb|EDN29173.1| BC1G_08081 [Botryotinia fuckeliana B05.10]
  misc_feature (32)..(545): NCBI GI: 212527700 Blast Desc: conserved [Penicillium marneffei ATCC 18224] gi|210073405|gb|EEA27492.1| conserved [Penicillium marneffei ATCC 18224]
  misc_feature (7)..(546): NCBI GI: 119491769 Blast Desc: NFIA_066460 [Neosartorya fischeri NRRL 181] gi|119411539|gb|EAW21482.1| conserved [Neosartorya fischeri NRRL 181]
MQARHGARRFLSSVATNQRLCITSPPEVRHLWPPLQHRGFVSTPGFRNQGSGAEEAPKREDAPNSIGAKAVESAMTTLASVLVLGLGFAGAGYAYHRSYKYIQLRKMENAFEPGDPVLDLAAFGKDIPSPAAAEHWIAREEQDKIDAIISGQDKGHYYLIMGDKGCGKSSMLLDAMRKIDGEACAMFEAHSDLEIFRIRLGKALDYEFHEDYIGGYFSERGPRDTTALLDIERAMNKLEKVALKHRAKKNKPLVLIVNQTHLIRDDDDGRDLLELLQQRAEQWAAANLVTMIFNTDDYWVYERFKQLATRLEVIPVADLPKKEAISALKRYRLRYFHEEVPHTMLEEVYDRIGGRLSFLNRAAKSRDMLGTCDLIKETEKTWFLNQCWILGMEMDDDVMDQQKWASAAMTLAQSLVDKEEEMDKIYDRETGHVMPSYAMHKAQQIMTRSDFIRELDRLNLFTITSTAQVRASSVPMHRAFKEICAEEGFRPFLEDTLQRISDIESLGRTRELVAKDLVLGGQYEIETGQGKNGKVVFTLRQKEEEDQTDETKK

SEQ ID NO: 21430 - DNA, 2174 bp, Muscodor strobelii
  misc_feature: SGI EST ID NO. CUFF.50259.0
  misc_feature: Variant of the nucleotide sequence at SEQ ID NO 21428
gcggcatcagcgctagccactatgagtgcgccagctaaccaatagaagtttagaatcaggaacagcgagctcgaaagtgggctagattagccgtaccgttcacgtatcagacgaaagatcaagccacgaatgctgccagtacctatcctccagtggggcgttgtgctggtatggtttgtgttactaggacgcttggctcgaaaattccgcgttctccttttcctcgaattccgctcaccgagacgggcggcctcatctttcgcgtcaagaacggaagacatcgcgatgtgactagacactagggagtcctaaacgtctgcaacaacatatacagcctgcaattgccatcatgcaggctaggcacggagctcgccggttcttgagctccgtagcgacgaatcagcgcctttgtataacctcacctccggaagtgcggcatctctggcccccactccagcatagaggcttcgtgtccacgccgggcttcagaaatcaagggtccggcgcggaggaagctccgaagcgtgaagatgcaccgaattccatcggtgccaaagcggtggaatcggcaatgaccacattagcttccgttttagtgcttggtttaggctttgctggcgctgggtatgcctaccacaggtcttacaaatacatacaactcaggaaaatggagaatgcatttgagccaggcgatcctgtgttggatttggcagcttttgggaaagacatcccttcgccggccgctgcagaacattggatcgcgcgtgaagagcaagacaagatcgacgcaattatttctggccaagacaagggtcattactatctcataatgggcgacaagggatgtggtaagagcagtatgctactggatgcaatgcggaagatcgacggcgaggcatgcgccatgttcgaggcacattcggatttggagatctttcggatacgactaggcaaagcacttgattacgagttccacgaagattacattggtggttatttcagtgaacgtggacctcgagataccaccgctctgcttgacatcgaacgagctatgaacaagctggagaaagtcgcattgaaacatcgagcaaagaagaataagccgcttgtcctcatcgtcaaccaaacgcatctcattcgagatgatgatgacgggcgcgatcttctcgagctcctccagcagagagccgagcagtgggctgctgcgaatctggttactatgatcttcaatactgatgattactgggtctacgagcgattcaaacagcttgcaacaaggttggaggtcattccagtggcagacctgcccaagaaagaagcgatttcggcattgaagcgatatcgccttcgctacttccatgaagaagtcccgcacaccatgctagaagaggtttacgatcggattggtggtcgactttcgttcctgaaccgcgctgccaagtcccgtgacatgctaggcacgtgtgacctcatcaaagaaacggagaagacgtggtttctaaaccaatgctggattctcggaatggaaatggatgacgacgttatggatcagcagaaatgggcctctgctgcgatgacactggcacagtcgctagtcgacaaagaggaggagatggacaagatatacgacagagagacaggacatgtcatgccgagttatgcaatgcacaaggcccagcagatcatgacgcgatccgacttcattagagagctcgaccggctgaatctgtttaccatcacgagtacagcccaggttcgcgcgagctcggtaccgatgcaccgagcttttaaggaaatttgcgcagaagaaggcttccgaccgttccttgaggacactttacaacgaattagtgacattgagagtttgggccgcactagagaactcgtggcgaaggaccttgttcttggcggacagtacgagatcgagacaggccaaggcaaaaacggcaaggtcgtctttacattaagacagaaagaagaagaagatcaaactgacgagacgaagaaatgaggatgtttggggagtttaatggtagaactgagacaggcatactgtcgtcaaacattagccgcatagccagctttttctcatttgtgtgtacaacttgtatagaatatgtaaataggatgcactttgtatgatggcaatggagtttcaatgatactgatttttt

SEQ ID NO: 21431 - DNA, 1446 bp, Muscodor strobelii
  misc_feature: SGI cDNA ID NO. 567256
  misc_feature: Encodes the peptide sequence at SEQ ID NO 21432
atggtcgttcgatcagaggacaaagaaactgatgtcgatttgtctggaagttgtaatacttcgcctatcgcaatcgagggctcggataatgctcgatatacagttgatgagagagatgctgatcccaatatgcacggtgcattattttcggccgagcagatggtccgctgcgattcccctattctctgggaggactctgaatacggcgaagaagattgtgatagctttatctcagataatggcagtgtcattgaagatgtcaacggctctatgccattgtttgcggatgatctggttgagtcgacacatgctatcagaagtgaaatccgagccacgagggaccgccttggtctcgacgaggacgcctcaattccagctccgctaagactgcgttcaactaagactgcacagagactggcttgtatcgaagaagcaagtgagagtagcccatctcccaagaagcccgatgcactcaagcccctaaattgcatgctcaagccgcaactcagttctcttcagccgctttctggttctagcaacttgacgttaccgcagcgacagacctccacagttgcagataagggcaagggcattgcaacttcctttccacctactaccactagtttctcttccacttgttttcttgcccccattccgccacgagcaccagagagagtttcgcccagcaatctacccatgccacgatcaggcagtatggcacccgaggcacaatcatccggtggccaggcttcatcagagtcgcgatcacaatcactatcgcaagagtccagcacgatgcgccccgtctcaaccgcaatgatgttgccacccccctgcaatcctcttcctccttgcccaggtccgccacctcgccgacctcagcctcccattcccgcgcaacgtgaaatacagcgacagctagaatccattcccgatgctagcaatgcctatgtggtcagcaatgcccctaacgcgatgagagcctcgcttgctgcacctacatctattgccaacggcagcgcctcgtcgttcgtcacacgccccacatcaggctcctcggtctttgggcctggcccagttgtcggtcgtgaggaagaacccaagaccttgacgcgcgaacaagcacgacgcatcgcactggccccgggccgcatcctcccctgcccctacgagggggttgtgatgcgcgacttctctttgagcacaagcttccagatgcttgaagacaagcacaaagagatcctggagatacgcgccaaggcggaggcacggcgtatggtcgccagaaccttgcgccctttctcttcagaggagttagagcgcttgggtctggcacctgccgtgcctcctgccgaggctgcaggaaacacgtccgcaggcgccgccgacaacaacaccatctccaccacgaccaagccggaggagaacgacgaggaagagaagtga

SEQ ID NO: 21432 - protein, 481 aa, Muscodor strobelii
  misc_feature: SGI Peptide ID NO. 567256
MVVRSEDKETDVDLSGSCNTSPIAIEGSDNARYTVDERDADPNMHGALFSAEQMVRCDSPILWEDSEYGEEDCDSFISDNGSVIEDVNGSMPLFADDLVESTHAIRSEIRATRDRLGLDEDASIPAPLRLRSTKTAQRLACIEEASESSPSPKKPDALKPLNCMLKPQLSSLQPLSGSSNLTLPQRQTSTVADKGKGIATSFPPTTTSFSSTCFLAPIPPRAPERVSPSNLPMPRSGSMAPEAQSSGGQASSESRSQSLSQESSTMRPVSTAMMLPPPCNPLPPCPGPPPRRPQPPIPAQREIQRQLESIPDASNAYVVSNAPNAMRASLAAPTSIANGSASSFVTRPTSGSSVFGPGPVVGREEEPKTLTREQARRIALAPGRILPCPYEGVVMRDFSLSTSFQMLEDKHKEILEIRAKAEARRMVARTLRPFSSEELERLGLAPAVPPAEAAGNTSAGAADNNTISTTTKPEENDEEEK

SEQ ID NO: 21433 - DNA, 745 bp, Muscodor strobelii
  misc_feature: SGI EST ID NO. CUFF.50264.0
  misc_feature: Variant of the nucleotide sequence at SEQ ID NO 21431
caagccgcaactcagttctcttcagccgctttctggttctagcaacttgacgttaccgcagcgacagacctccacagttgcagataagggcaagggcattgcaacttcctttccacctactaccactagtttctcttccacttgttttcttgcccccattccgccacgagcaccagagagagtttcgcccagcaatctacccatgccacgatcaggcagtatggcacccgaggcacaatcatccggtggccaggcttcatcagagtcgcgatcacaatcactatcgcaagagtccagcacgatgcgccccgtctcaaccgcaatgatgttgccacccccctgcaatcctcttcctccttgcccaggtccgccacctcgccgacctcagcctcccattcccgcgcaacgtgaaatacagcgacagctagaatccattcccgatgctagcaatgcctatgtggtcagcaatgcccctagtaagttctccacctccaattttggcatttggggcaaaacatcgccctgtgaattgtcctgaagtggaacctgacatgccttaccttttagacgcgatgagagcctcgcttgctgcacctacatctattgccaacggcagcgcctcgtcgttcgtcacacgccccacatcaggctcctcggtctttgggcctggcccagttgtcggtcgtgaggaagaacccaagaccttgacgcgcgaacaagcacgacgcatcgcactggccccggg

SEQ ID NO: 21434 - DNA, 2126 bp, Muscodor strobelii
  misc_feature: SGI cDNA ID NO. 567257
  misc_feature: Encodes the peptide sequence at SEQ ID NO 21435
atgcgtcggtcaaagggactgagagttcttgcgcttgcttgtctagctttcattgtctatgctcaatggaaacaaatcggctcatcaaagccgattgcatcaccgctgtccattgcgaggcttgaggaggacctgaaagtgtgctcaaaactccagtcaaaacccaaagaccccataggcgctggacgagatcgcaatgcgcgctatattgatggatataagccgactctcattaaaaatgcaactatttgggtcggtgagcctgctgaaggtactagtgacgaagacgcgcgtattggcaaggggttttcatggatcaccggcgacgtatttcttgagtacggcctgatcaaacaggttggtgatattgacgaaaccgcgctctcgtccaatactattgtatggaatgcagaaggaagacgacttaccaccggtatcatcgatatgcacagtcattctggtgtcgatgacattcccgtgttagagggaaatgacgacgtgaatgaattgagctcggatattactcctttcgtacgctctatcgacggtctgaatcccctagatcatcagattcaagtcataaaatctggcggagtgacaacaagtctggtcctgcccgggtctgctaacaatatgggcggagaagcttttgttgtcaaacatgccgtgggcaatgccgatggtcgcaatgagatttctgctacggacatgttggccgatcctgaccagaactggcgatttatcaaaatggcctgtggagaaaatcccaagagagtgagcaagtaccgcaagtctggtccattgagccgcttaggagaagcttgggagtttcggcatgcattcgagcaagctgagagcttggttaggagtcaggatgactggtgtgcaactgcagatgccatcggtatgcagaaaatggacagctacttgccccaagatttgaaatgggaaacattgggcgccgtgctgcgtggacaggtccatgtcaatacccactgttacaccatacccgatcttgaatcgttcgtgagttacacgaacgaattcagattcgcgatccgcgcgtttcatcatgctcaccagacgtttcttgttcccgagattctaaagcgcgcatggggagattctccaccagcatctgcccttttcgccgacaacatgtggtacaaggcagaatcttatatcggctcagaacacgcgggcaaggttctgtatgaaaatggactgacgcccatctatgttagtgacaatcctgtgatcaacgcccagcatgtggtttttgaggctgctaaggcctataaatatggcttgccataccatgctgcgctagcttcggtgaccacggctcctgctgaaagactgggtttcaaacatcgtctaggcaagatcaaaccaggattcgatgccgatattgtggtctgggacagtgaccctctcagtgttggcgctgcgccagttcaagtctggattgatggaaccgctcagttcgagaatccagtagagctgcggaaacccttcgaagtacataccaatgttccagaaaacattcgaatcacattagatgaacctatttccgcgcataccgtcatcgtaacgggaatatccaagtcgttcttcacttcagcaatccgcagtcaagctgaggggtcgtcaaatctcaccgcaatcatatcagatggcaaattgacttgcctcggagaatgtgcggaagaacttattgcagcccagcaggtggatgctcgtacattacacctccaaaatgggtacatgacaaaacctttcacagcctttggagctcatctcgggctccaggaaattgacgctgaaagcgacacggacaatggtggtggtcgtgagattttcagtcgtggcgtcgatggtcttgccttagacaccaaaaaaatacactatgcacacaagtacggtgtcacccgagccatctcggctcctagctatctaggaaccagtgctggcttccggacaggcgccaagcatactcttgaaaagggtgcagtctttgttgctgatgctgctctgcattatacacttgacttgaacgtcaagaatgacaagacatccatctctagcgcagctggagcccttagaaagaagcttctcgaggccat

SEQ ID NO: 21435 - protein, 708 aa, Muscodor strobelii
  misc_feature: SGI Peptide ID NO. 567257
  misc_feature (141)..(475): Pfam Id: PF01979 Pfam Desc: Amidohydrolase family
  misc_feature (432)..(475): Pfam Id: PF01979 Pfam Desc: Amidohydrolase family
  misc_feature (437)..(473): Pfam Id: PF07969 Pfam Desc: Amidohydrolase family
  misc_feature (1)..(708): NCBI GI: 85095435 Blast Desc: NCU05828 [Neurospora crassa OR74A] gi|28921547|gb|EAA30852.1| conserved [Neurospora crassa OR74A]
  misc_feature (9)..(708): NCBI GI: 256725756 Blast Desc: NECHADRAFT_43475 [Nectria haematococca mpVI 77-13-4]
  misc_feature (9)..(708): NCBI GI: 171678477 Blast Desc: protein product [Podospora anserina] gi|170937308|emb|CAP61965.1| protein product [Podospora anserina]
  misc_feature (6)..(708): NCBI GI: 46111205 Blast Desc: FG02484.1 [Gibberella zeae PH-1]
  misc_feature (2)..(708): NCBI GI: 116204329 Blast Desc: CHGG_10048 [Chaetomium globosum CBS 148.51] gi|88176176|gb|EAQ83644.1| CHGG_10048 [Chaetomium globosum CBS 148.51]
  misc_feature (1)..(708): NCBI GI: 39969795 Blast Desc: MGG_10507 [Magnaporthe grisea 70-15] gi|145022810|gb|EDK06583.1| MGG_10507 [Magnaporthe grisea 70-15]
  misc_feature (3)..(706): NCBI GI: 170117387 Blast Desc: carbohydrate esterase family 9 protein [Laccaria bicolor S238N-H82] gi|164635221|gb|EDQ99532.1| carbohydrate esterase family 9 protein [Laccaria bicolor S238N-H82]
  misc_feature (48)..(706): NCBI GI: 170097768 Blast Desc: carbohydrate esterase family 9 protein [Laccaria bicolor S238N-H82] gi|164644541|gb|EDR08790.1| carbohydrate esterase family 9 protein [Laccaria bicolor S238N-H82]
  misc_feature (25)..(705): NCBI GI: 169846802 Blast Desc: CC1G_04548 [Coprinopsis cinerea okayama7#130] gi|116508885|gb|EAU91780.1| CC1G_04548 [Coprinopsis cinerea okayama7#130]
  misc_feature (48)..(705): NCBI GI: 169847171 Blast Desc: CC1G_01933 [Coprinopsis cinerea okayama7#130] gi|116508549|gb|EAU91444.1| CC1G_01933 [Coprinopsis cinerea okayama7#130]
MRRSKGLRVLALACLAFIVYAQWKQIGSSKPIASPLSIARLEEDLKVCSKLQSKPKDPIGAGRDRNARYIDGYKPTLIKNATIWVGEPAEGTSDEDARIGKGFSWITGDVFLEYGLIKQVGDIDETALSSNTIVWNAEGRRLTTGIIDMHSHSGVDDIPVLEGNDDVNELSSDITPFVRSIDGLNPLDHQIQVIKSGGVTTSLVLPGSANNMGGEAFVVKHAVGNADGRNEISATDMLADPDQNWRFIKMACGENPKRVSKYRKSGPLSRLGEAWEFRHAFEQAESLVRSQDDWCATADAIGMQKMDSYLPQDLKWETLGAVLRGQVHVNTHCYTIPDLESFVSYTNEFRFAIRAFHHAHQTFLVPEILKRAWGDSPPASALFADNMWYKAESYIGSEHAGKVLYENGLTPIYVSDNPVINAQHVVFEAAKAYKYGLPYHAALASVTTAPAERLGFKHRLGKIKPGFDADIVVWDSDPLSVGAAPVQVWIDGTAQFENPVELRKPFEVHTNVPENIRITLDEPISAHTVIVTGISKSFFTSAIRSQAEGSSNLTAIISDGKLTCLGECAEELIAAQQVDARTLHLQNGYMTKPFTAFGAHLGLQEIDAESDTDNGGGREIFSRGVDGLALDTKKIHYAHKYGVTRAISAPSYLGTSAGFRTGAKHTLEKGAVFVADAALHYTLDLNVKNDKTSISSAAGALRKKLLEA

SEQ ID NO: 21436 - DNA, 2780 bp, Muscodor strobelii
  misc_feature: SGI EST ID NO. CUFF.50324.0
  misc_feature: Variant of the nucleotide sequence at SEQ ID NO 21434
cgattccaaatcgcatggttagcatcttaaaagtaaagtctacactttgtcccgctcgcctccaaagagaaagctgagggcttccatatacaaatttcaattctcatggttgaggttattgagccgaaaatgagatacatacctacacatacttattagcggatcgaacaccgaatacatcaatggtggtagatttcaatccgaacagtgaggatgatgatactgtagttacagttcgtaacgtcaggtaagagagcagtctgtctacaacagcctgataaaccataggtagtttagcagtgattgatgcgtgtgggtgatggttggcgcgttgtactccggttgcaaaggaaaagtcggtggctggtctgcataaggaaggcaggtcgatccttgctggttcacgggtatgcgcgttatcttggcggggcatgatgacattattatgtcggaatactgcttcaaatggttagatttacattgagtgctaccttaacggaagcaacgtctaacgtctaacgtcttgcttcaatcttttttcgacctgttacctattgtctatttcttaatattcatccgaactctagctgcgtgctggcgtgcgggaatgatggatcacaagaatggactaccaccatatagcgccgtagctggctcagaatggccacggcgtcatcgggcaatgcgtcggtcaaagggactgagagttcttgcgcttgcttgtctagctttcattgtctatgctcaatggaaacaaatcggctcatcaaagccgattgcatcaccgctgtccattgcgaggcttgaggaggacctgaaagtgtgctcaaaactccagtcaaaacccaaagaccccataggcgctggacgagatcgcaatgcgcgctatattgatggatataagccgactctcattaaaaatgcaactatttgggtcggtgagcctgctgaaggtactagtgacgaagacgcgcgtattggcaaggggttttcatggatcaccggcgacgtatttcttgagtacggcctgatcaaacaggttggtgatattgacgaaaccgcgctctcgtccaatactattgtatggaatgcagaaggaagacgacttaccaccggtatcatcgatatgcacagtcattctggtgtcgatgacattcccgtgttagagggaaatgacgacgtgaatgaattgagctcggatattactcctttcgtacgctctatcgacggtctgaatcccctagatcatcagattcaagtcataaaatctggcggagtgacaacaagtctggtcctgcccgggtctgctaacaatatgggcggagaagcttttgttgtcaaacatgccgtgggcaatgccgatggtcgcaatgagatttctgctacggacatgttggccgatcctgaccagaactggcgatttatcaaaatggcctgtggagaaaatcccaagagagtgagcaagtaccgcaagtctggtccattgagccgcttaggagaagcttgggagtttcggcatgcattcgagcaagctgagagcttggttaggagtcaggatgactggtgtgcaactgcagatgccatcggtatgcagaaaatggacagctacttgccccaagatttgaaatgggaaacattgggcgccgtgctgcgtggacaggtccatgtcaatacccactgttacaccatacccgatcttgaatcgttcgtgagttacacgaacgaattcagattcgcgatccgcgcgtttcatcatgctcaccagacgtttcttgttcccgagattctaaagcgcgcatggggagattctccaccagcatctgcccttttcgccgacaacatgtggtacaaggcagaatcttatatcggctcagaacacgcgggcaaggttctgtatgaaaatggactgacgcccatctatgttagtgacaatcctgtgatcaacgcccagcatgtggtttttgaggctgctaaggcctataaatatggcttgccataccatgctgcgctagcttcggtgaccacggctcctgctgaaagactgggtttcaaacatcgtctaggcaagatcaaaccaggattcgatgccgatattgtggtctgggacagtgaccctctcagtgttggcgctgcgccagttcaagtctggattgatggaaccgctcagttcgagaatccagtagagctgcggaaacccttcgaagtacataccaatgttccagaaaacattcgaatcacattagatgaacctatttccgcgcataccgtcatcgtaacgggaatatccaagtcgttcttcacttcagcaatccgcagtcaagctgaggggtcgtcaaatctcaccgcaatcatatcagatggcaaattgacttgcctcggagaatgtgcggaagaacttattgcagcccagcaggtggatgctcgtacattacacctccaaaatgggtacatgacaaaacctttcacagcctttggagctcatctcgggctccaggaaattgacgctgaaagcgacacggacaatggtggtggtcgtgagattttcagtcgtggcgtcgatggtcttgccttagacaccaaaaaaatacactatgcacacaagtacggtgtcacccgagccatctcggctcctagctatctaggaaccagtgctggcttccggacaggcgccaagcatactcttgaaaagggtgcagtctttgttgctgatgctgctctgcattatacacttgacttgaacgtcaagaatgacaagacatccatctctagcgcagctggag

SEQ ID NO: 21437 - DNA, 435 bp, Muscodor strobelii
  misc_feature: SGI cDNA ID NO. 567258
  misc_feature: Elevated expression when VOC is produced
  misc_feature: Encodes the peptide sequence at SEQ ID NO 21438
atggctcctggcacttcagtacctccgcattggcacaatgacttttctgagacctttgacttgcaaaaagcctctgctcaagaccttgaagtcggcaagccagttacagtaccaactggtcgataccatcaatacaaagttggaggagaagagacagtgcttcgatgtgtcgtgacgccgggaaacgaaggctttgagaggctactcaagatcatgaatggcctaggcgcagatggaaaactgcaggaaatgggagacagtgtcgaacttatggcaattgctatggagctaggcaatgcctttctcattggtcccacgaaggatatgctcgacggcgtcaaagcagcgaaaaacgatgagattgaggctctgaagaaggaactttatgcgaaatatgatacggaagaagctttgaaggcgctcttgatgacttga

SEQ ID NO: 21438 - protein, 144 aa, Muscodor strobelii
  misc_feature: SGI Peptide ID NO. 567258
  misc_feature (2)..(142): NCBI GI: 238501114 Blast Desc: AFLA_125980 [Aspergillus flavus NRRL3357] gi|220692028|gb|EED48375.1| AFLA_125980 [Aspergillus flavus NRRL3357]
  misc_feature (4)..(142): NCBI GI: 169781260 Blast Desc: [Aspergillus oryzae RIB40] gi|83773835|dbj|BAE63960.1| protein product [Aspergillus oryzae]
  misc_feature (1)..(139): NCBI GI: 255035237 Blast Desc: Cupin 2 conserved barrel domain protein [Dyadobacter fermentans DSM 18053] gi|254947993|gb|ACT92693.1| Cupin 2 conserved barrel domain protein [Dyadobacter fermentans DSM
  misc_feature (1)..(107): NCBI GI: 227366977 Blast Desc: conserved [Chryseobacterium gleum ATCC 35910] gi|227109914|gb|EEI44879.1| conserved [Chryseobacterium gleum ATCC 35910]
  misc_feature: Useful for introducing or modulating the production of volatile compounds
MAPGTSVPPHWHNDFSETFDLQKASAQDLEVGKPVTVPTGRYHQYKVGGEETVLRCVVTPGNEGFERLLKIMNGLGADGKLQEMGDSVELMAIAMELGNAFLIGPTKDMLDGVKAAKNDEIEALKKELYAKYDTEEALKALLMT

SEQ ID NO: 21439 - DNA, 1716 bp, Muscodor strobelii
  misc_feature: SGI cDNA ID NO. 567259
  misc_feature: Encodes the peptide sequence at SEQ ID NO 21440
atggctgagcttggagagagctctcagcagatgcccaattttgctagcattgctgaggctgctactgccagttggcttgcacatcgagcctcaactccaaactcaggtcaacgaacaaaaacgcagacacccgtgcctatttctggtggcgagtcgaagtcagcatcgttagctccagagtcggcatcagcatcttcagttgtgcccacaccaacaccagcacccgcttcagcacctgcgaagccaccatcttcatcgacttcggcttatctattatcaaccagaccgcaggttgagactccagtaccagtaccggtttacccaggctcagctccatctgcccctggtgtttctgttccacctccactgacggccaaatccccagccacatcatctagtcacacaagcagtgtgacccaagaaactggcgagtcaactacgcatgcagacattcgcagcgatatcatcgcctgggaaagtgctctgcaagccctgccggaagagttcaaagacagagaactcccgagccatccattgacggaggctctacataagcagccgaccatacggcctgttgagtggaaccagtaccgccagcagggtggctttgtcccgcggacagctcatgacttcgcctctctcatgatatacctctgtggtcaggtgaatccaaacccgtgccgaaattgccaactgaggaatggtcccttcagccgttgcgttgtttcaccgccccaagtcctaggcatatcttttcttcggcacgcctgcgccaactgcacctatcagaatcaatacaagagatgcaccaacgagccgatcactgaagcagagaaggtccgcagtgacctcttgagaactgtcgtaagaccccgacacagcattcccaagcctactatcgcgaagcggcctaaagcgcccaacagacacaaagtctcgcgagaccacaaatttgagcggagagagcaagtccaacaacgcgaatcagagcacagtcggcaggaagaacatctgcacccagcaatcatgcctcctcgagcggataggcgttatagcgaaccgcagaatacgccgaatacgcaataccaacaccagactcagcctgagcctccttcgacacagataccaatgggcgagactccgaacttgacgtttgatgagaaactaagacgcgcacgagagatgacgccacagctacgtaagcggatgaaggccgaagtaacgcaatggcaggcggcgatcatgacggttgaggcagaagagcctactcctgggcctatgccaattccgacgctaacatctgtccctactccttacggatctgctttgaatcccaaacgacaacgcatgaattcatacggctcgacccccaatagtgtatatacaacggctaattctcgtcttattggaccgacgccatcctacgtggagcccttggggccacccgtatccgtagcgatcgcccaagatcgcttaagaagaccaagtcaaccccaaactccgtcacagccagctcgcgttccagttgctccgttcgcaattacttcgttcgctcaggtttcgtctgcaggatcgagcaaaggggctcgcgaggaagacgctactatggaggatgagagcgaggaagaggaggataatcggggatacgtcgatgaaggcgtgtgttacggctggagtgatgacgagactccccaaatcaaggccccgcgatcttag

SEQ ID NO: 21440 - protein, 571 aa, Muscodor strobelii
  misc_feature: SGI Peptide ID NO. 567259
  misc_feature (61)..(267): NCBI GI: 145608576 Blast Desc: MGG_06529 [Magnaporthe grisea 70-15] gi|145016035|gb|EDK00525.1| MGG_06529 [Magnaporthe grisea 70-15]
  misc_feature (173)..(283): NCBI GI: 116195166 Blast Desc: CHGG_04181 [Chaetomium globosum CBS 148.51] gi|88180094|gb|EAQ87562.1| CHGG_04181 [Chaetomium globosum CBS 148.51]
  misc_feature (172)..(380): NCBI GI: 154294576 Blast Desc: [Botryotinia fuckeliana B05.10] gi|150844637|gb|EDN19830.1| [Botryotinia fuckeliana B05.10]
  misc_feature (169)..(270): NCBI GI: 145611468 Blast Desc: MGG_00366 [Magnaporthe grisea 70-15] gi|145018743|gb|EDK03022.1| MGG_00366 [Magnaporthe grisea 70-15]
  misc_feature (69)..(272): NCBI GI: 116195166 Blast Desc: CHGG_04181 [Chaetomium globosum CBS 148.51] gi|88180094|gb|EAQ87562.1| CHGG_04181 [Chaetomium globosum CBS 148.51]
MAELGESSQQMPNFASIAEAATASWLAHRASTPNSGQRTKTQTPVPISGGESKSASLAPESASASSVVPTPTPAPASAPAKPPSSSTSAYLLSTRPQVETPVPVPVYPGSAPSAPGVSVPPPLTAKSPATSSSHTSSVTQETGESTTHADIRSDIIAWESALQALPEEFKDRELPSHPLTEALHKQPTIRPVEWNQYRQQGGFVPRTAHDFASLMIYLCGQVNPNPCRNCQLRNGPFSRCVVSPPQVLGISFLRHACANCTYQNQYKRCTNEPITEAEKVRSDLLRTVVRPRHSIPKPTIAKRPKAPNRHKVSRDHKFERREQVQQRESEHSRQEEHLHPAIMPPRADRRYSEPQNTPNTQYQHQTQPEPPSTQIPMGETPNLTFDEKLRRAREMTPQLRKRMKAEVTQWQAAIMTVEAEEPTPGPMPIPTLTSVPTPYGSALNPKRQRMNSYGSTPNSVYTTANSRLIGPTPSYVEPLGPPVSVAIAQDRLRRPSQPQTPSQPARVPVAPFAITSFAQVSSAGSSKGAREEDATMEDESEEEEDNRGYVDEGVCYGWSDDETPQIKAPRS

SEQ ID NO: 21441 - DNA, 2334 bp, Muscodor strobelii
  misc_feature: SGI EST ID NO. CUFF.50331.0
  misc_feature: Variant of the nucleotide sequence at SEQ ID NO 21439
gccgtgcgaagccgcactttgtgattattcggactgtggtcgatttctagattcgacgcgttcacttcagccggtagttgcacatacccgtctgatggcaggtatgcgcgacaccacatcatgctttatcaactcattcaacgctgaggttgtacggagtgctaggaagggaccacacactcaaatcaactcaccttttatcctccatatgctcctaattggatggttctttacctctgcttacctctcacctgaaggatcatctcattctgctggtttaccagcctatctcatgtagttctgctcgccttctcgttgtactcaccaaacaatcatggctgagcttggagagagctctcagcagatgcccaattttgctagcattgctgaggctgctactgccagttggcttgcacatcgagcctcaactccaaactcaggtcaacgaacaaaaacgcagacacccgtgcctatttctggtggcgagtcgaagtcagcatcgttagctccagagtcggcatcagcatcttcagttgtgcccacaccaacaccagcacccgcttcagcacctgcgaagccaccatcttcatcgacttcggcttatctattatcaaccagaccgcaggttgagactccagtaccagtaccggtttacccaggctcagctccatctgcccctggtgtttctgttccacctccactgacggccaaatccccagccacatcatctagtcacacaagcagtgtgacccaagaaactggcgagtcaactacgcatgcagacattcgcagcgatatcatcgcctgggaaagtgctctgcaagccctgccggaagagttcaaagacagagaactcccgagccatccattgacggaggctctacataagcagccgaccatacggcctgttgagtggaaccagtaccgccagcagggtggctttgtcccgcggacagctcatgacttcgcctctctcatgatatacctctgtggtcaggtgaatccaaacccgtgccgaaattgccaactgaggaatggtcccttcagccgttgcgttgtttcaccgccccaagtcctaggcatatcttttcttcggcacgcctgcgccaactgcacctatcagaatcaatacaagagatgcaccaacgagccgatcactgaagcagagaaggtccgcagtgacctcttgagaactgtcgtaagaccccgacacagcattcccaagcctactatcgcgaagcggcctaaagcgcccaacagacacaaagtctcgcgagaccacaaatttgagcggagagagcaagtccaacaacgcgaatcagagcacagtcggcaggaagaacatctgcacccagcaatcatgcctcctcgagcggataggcgttatagcgaaccgcagaatacgccgaatacgcaataccaacaccagactcagcctgagcctccttcgacacagataccaatgggcgagactccgaacttgacgtttgatgagaaactaagacgcgcacgagagatgacgccacagctacgtaagcggatgaaggccgaagtaacgcaatggcaggcggcgatcatgacggttgaggcagaagagcctactcctgggcctatgccaattccgacgctaacatctgtccctactccttacggatctgctttgaatcccaaacgacaacgcatgaattcatacggctcgacccccaatagtgtatatacaacggctaattctcgtcttattggaccgacgccatcctacgtggagcccttggggccacccgtatccgtagcgatcgcccaagatcgcttaagaagaccaagtcaaccccaaactccgtcacagccagctcgcgttccagttgctccgttcgcaattacttcgttcgctcaggtttcgtctgcaggatcgagcaaaggggctcgcgaggaagacgctactatggaggatgagagcgaggaagaggaggataatcggggatacgtcgatgaaggcgtgtgttacggctggagtgatgacgagactccccaaatcaaggccccgcgatcttagcggactcttttcgaatcaccatccgcgttgatgtgtattgaatgggcggaggaaaattagatggatgacggcagaaggcgaagcattggccaatcggcgtttctctggttgggctgatccgaagtgcttcggatcgagctccggaccaggcttcggattgtgctccatggtcatgctattctaactcctttcgaatgagaaccgaataaaaatcggcttcatgtgcacatatcgaggtcgctttctgtaattatgtatgatacccattagctcctcaatcaaac

SEQ ID NO: 21442 - DNA, 1689 bp, Muscodor strobelii
  misc_feature: SGI cDNA ID NO. 567260
  misc_feature: Encodes the peptide sequence at SEQ ID NO 21443
atggcatcctacactatacgggatgaggcttcacgcatcttcaactccgtcttactagcagacacccgactctcgctctcttcggcggtcctcgaagccgcaaagcgcacctcattcgactcatccgcgatttctacaccctttctcccggcacctgtaaaatgtacagagtcgagcacagccctctgggcgcttctgggcactttcgggaatgccattgcggaagaacgctacggaatcactcaggattgcgttgtgaacagcgatgtcgcaaccttgttcttgttctcattcatcttgatgagggtaggcggaaaaccgataggagacctcgacatcataaagcgatactcaatttacgataccgcgaataatatgacgccctggcgccgtcttgtcacgaatgtctattatacgcgtgacagtcgctggtatcatacccacgggagcatgaactcagacaaggtcctacgaatgcttggtctcccagaaaaccaggatatcacagacgagctggaagtcatcccacgcttagccgaagccgttgcaaagcacgatgctgagtggcttgacatggaaacgaacgaacactggagacaagccggtgctattgtcatgacgcctgaagaatatcgccaaagtgaacatggaaaagccgtgtcgaacgaccctctatacaccatcgaagagttcccacacaaggacctccctcccgtcccctggccccaagtcaacacaaagaccttccgacccctcgaaggcataaaactccttgacctcacacgtgcaatagcaggtccaacaatcgcccgtctagctgctttattcggcgcaaccgtggttcgcgtctccagcacctccatgccagatctgggcatcgtgctcttcgaatccaacctcggaaaacgagacgtagatctaaacctcaagaccgagtccggccgcgcagcccttcacaacctgatccaagacgccgacgtcgtcctcgacggctaccgccccggcgccctcgagaagctcggcttcggtccgacctacgttcacgaagtcgcgaagcgccgcgggaaaggtatagtctacgcgcgagaagactgctacggctggaccgggccttgggcacatcgcagtggatggcaacaagtcagcgacgccgtgacaggcatcggctggctttacgggcagatgtgggataagaacgagcccgtcatgccgttcctacctaactccgatttccagaccggaatagcgggctgtatcgggatcatgaatgcgttagatagacgagcgagaaagggcggcaattatctcgtttctacgtctctgaatgcgcataatagctatttgatgtcgctcgggctccaaaatccggaagtacaacaggatctaaaagagaaatggccggagatgaaggatacacggcattatgatgatttgcatcgccagatgaggattctcacagcaggtctcccaagagtagccccagaagtcttccaaccgaagtatttccagaccataaaagcagacctcggtgtcccagaggaagacatgatcttccttggtcctgcggtcacgtacgggactacgaagctgttttacaactcggggagttgtctgcgaggcacgcataccgctaaatggcccgaggaagactctgatgcatggagcacggtatcgacgattgttgaataa

SEQ ID NO: 21443 - protein, 562 aa, Muscodor strobelii
  misc_feature: SGI Peptide ID NO. 567260
  misc_feature (305)..(505): Pfam Id: PF02515 Pfam Desc: CoA-transferase family III
  misc_feature (305)..(432): Pfam Id: PF02515 Pfam Desc: CoA-transferase family III
  misc_feature (3)..(548): NCBI GI: 145601353 Blast Desc: MGG_08800 [Magnaporthe grisea 70-15] gi|145009356|gb|EDJ94067.1| MGG_08800 [Magnaporthe grisea 70-15]
  misc_feature (5)..(547): NCBI GI: 256720385 Blast Desc: NECHADRAFT_55996 [Nectria haematococca mpVI 77-13-4]
  misc_feature (4)..(522): NCBI GI: 145604765 Blast Desc: MGG_07891 [Magnaporthe grisea 70-15] gi|145012700|gb|EDJ97354.1| MGG_07891 [Magnaporthe grisea 70-15]
  misc_feature (1)..(546): NCBI GI: 67541256 Blast Desc: AN6798.2 [Aspergillus nidulans FGSC A4] gi|40739426|gb|EAA58616.1| AN6798.2 [Aspergillus nidulans FGSC A4] gi|259480393|tpe|CBF71482.1| TPA: conserved [Aspergillus FGSC
  misc_feature (69)..(548): NCBI GI: 189199458 Blast Desc: CAIB/BAIF family protein [Pyrenophora tritici-repentis Pt-1C-BFP] gi|187983165|gb|EDU48653.1| CAIB/BAIF family protein [Pyrenophora tritici-repentis Pt-1C-BFP]
  misc_feature (1)..(546): NCBI GI: 256733827 Blast Desc: NECHADRAFT_35125 [Nectria haematococca mpVI 77-13-4]
  misc_feature (1)..(546): NCBI GI: 256720606 Blast Desc: NECHADRAFT_49826 [Nectria haematococca mpVI 77-13-4]
  misc_feature (1)..(546): NCBI GI: 256721495 Blast Desc: NECHADRAFT_93162 [Nectria haematococca mpVI 77-13-4]
  misc_feature (1)..(546): NCBI GI: 199430850 Blast Desc: DEHA2C14894p [Debaryomyces hansenii]
  misc_feature (3)..(549): NCBI GI: 238507157 Blast Desc: alpha methylacyl-CoA racemase, [Aspergillus flavus NRRL3357] gi|220689493|gb|EED45844.1| alpha methylacyl-CoA racemase, [Aspergillus flavus NRRL3357]
MASYTIRDEASRIFNSVLLADTRLSLSSAVLEAAKRTSFDSSAISTPFLPAPVKCTESSTALWALLGTFGNAIAEERYGITQDCVVNSDVATLFLFSFILMRVGGKPIGDLDIIKRYSIYDTANNMTPWRRLVTNVYYTRDSRWYHTHGSMNSDKVLRMLGLPENQDITDELEVIPRLAEAVAKHDAEWLDMETNEHWRQAGAIVMTPEEYRQSEHGKAVSNDPLYTIEEFPHKDLPPVPWPQVNTKTFRPLEGIKLLDLTRAIAGPTIARLAALFGATVVRVSSTSMPDLGIVLFESNLGKRDVDLNLKTESGRAALHNLIQDADVVLDGYRPGALEKLGFGPTYVHEVAKRRGKGIVYAREDCYGWTGPWAHRSGWQQVSDAVTGIGWLYGQMWDKNEPVMPFLPNSDFQTGIAGCIGIMNALDRRARKGGNYLVSTSLNAHNSYLMSLGLQNPEVQQDLKEKWPEMKDTRHYDDLHRQMRILTAGLPRVAPEVFQPKYFQTIKADLGVPEEDMIFLGPAVTYGTTKLFYNSGSCLRGTHTAKWPEEDSDAWSTVSTIVE

SEQ ID NO: 21444 - DNA, 6296 bp, Muscodor strobelii
  misc_feature: SGI EST ID NO. CUFF.50335.0
  misc_feature: Variant of the nucleotide sequence at SEQ ID NO 21442
gcgcgcgatgagatggttggtgtctatggatttgtgtttcatcgtgatggcgagtggatatctgtcatcatcgacgacaagttgttcctgatcaaacctgactttgatgaaagttatctcgagcgcgcactctgggaggatcgtgaacgtgtcaattccgaagagcagtatcgcatggcgtaccagagtgggtccggagctctatactttgcgcaatgcgagcatgccaatgaaacttggcttccgctgctggaaaaagcttatgcgaaagcacatggagactatgcagcgatcgaaggtggcttcacgggcgagggcatcgaggacttaactggtggcgtcacgactgagctctacactacagatatcttggacaaagagtatttctggaaagaggagctcatgaaggtcaacgatgaattcctctttggatgctcaacggggatgtgggggaccggcagccgtggcgaccgcaatggtatcgtcgaattgcatgcttactcaatcatgcgagctgtggaaattgacggccagagactcgtcttgctcaagaatccttggggcaaaggcgagtggaagggcgcttggagcgatggatcgaaagagtggactgccgaatggcttctcaagctcaatcatcgctttggtgacgatggcaatttctggatctcgtacgccgatctccttcgcaaataccaagctttcgacagaacacgactattcagctcggattggaaggtcacatcgatttggacaacagtctcggttccttggacactcgattaccacgacacctacttcgacttatcacttgcaaagactggtcctgtcgttttagtgctctcgcagcttgatgatcgatactattgcggtctcgagggccagtatcgatttgaactcaagttccgtctccataaaaagggcaaagaagactatgttgtccgcagcatttctccatactgtcaaaatcgttcagtcaatgtcgagctggagctggaagcaggcgaatacaccgttttgatgaagatcaacgcgacccgagatctagacatattgccgatagaagaggtgatccgcaaccatgctcgggatcgtagagacaagctcgtgaccgtggggatgtcttatgacttagctcacagcaaaggcgaaatagtggaaacggaagaagagaagaaagcgagaaaggctttcgagaagcgcaagaaagataaagaacgagatgatataaggaagaaaatcatggagtccagaaaccaaagacattacgttcaagtcaaagcgttcaagaagcgccaggagaagaaagcaaaggccaaagctaagcaccaagcccaggttgaaaagagacaagctgtcgaaatagaactcgacgagcgggagaatacaaagatgggacatgaggtcgacgacaagtcagcccctgacgcttcggagaaggcaccggctcagatgccgtctcctgaaccaacccctgagccgactaccgagccaagtagtggaaacagcattaacaccccttctgtcgattctggcgataccaatgccagcgcccaagaggaggctaagacgaaagctgcggagcctgctccggtggacgaaatcaatgccgatgagaaatccacaccggagtccaaggcgccagaaagtagcaatgaaccggccgttagccccaagcagactgttgctcctggtccgccagtacttgatgcgctcgagcccatcgcggaagaggaggctatggacccgcgcgatatgagaagggaaagacgtagagctcgtcgtcctcctccaagatcagtacttgaggctgaattcgaagatgagtccgacatctcgtcggtatcggagatcagtgatacggaactcgatcacattctcaagcatcgggctaatggcccaatgccagcgccggttccccaacctgtaactaacaatgtagaggaggaagatgagtttgaaagcaacccatggaacgccgtcgccaccgtgggccttcgcgtctactacaaagttgccgaggaagacaaggccaaagaggttgtcaagctacgcgtcatccgaccgaacccctatgccaagaaagactcggaggccgccgacggggaagataagaaggacggcgacgagaatggcaaagacggggataaagacggggaggaaaagaccgagatgaaatcttccatgggtctagacgtcgacgatagctccaaagatgcgacgctcgagggtagccctgagcagaggaagaagagcatcttgtcgctcgtacctctcctcaaggaagagatagagtaacggcttttctgcttcgaggctcgaaaacgcgggtgcatgtttgagagggcatcgaggcaaattgtagaccaggctgaagaaattgggtcacgactcttggttcactcgaacttggtattagccaaatagcatttacgttagcataggataagtagaatgattaattcaacaactcgcttttgaacatcgctaggcgttccaagcatattttcagtacgtgatcgagcgattcattcccttttcatcaattcatcattttgattgggggtatctcgaaatagaagcatgaccaaccatgcagcatgcccaagcagtcgcctatttcccgaacgccaaactcctctcatgcacatggaaacgcattttcaactgatttcgtctcgtgactactaaagctcgatgtttcaagagaactctcagaaaccatctaagagattgtccgtcttgtctctctgtctctcgtcaagatccattgcatcaccgccataatcttcttcgtcagctgtattgcgatccgggaactgggcgattcgtcccgacactcgagccagtagcagtcgcatcctctcgagctctttctctatgtcgccgtttcgcgtgatcagattctcctgaacagacgtctttgtctcttgcgtgccgtccatactcatctgtgtattgtcgtcggccttagtggaatcgaagggtttgagtagtgcggccatttttcgcaagcgctcgacacgttggcgaacttgcttccggcgcgcagagagagagttgagttctgcggctagctctgtgtatcggcgtgcttcgagggggttgtcggaggcttcgcgcggcttgtggatgccccaatctgctggcagggaggcgatggcttcgtcggtagctgtgagtcgtatgtatcgttagcttgttgcagcgacacaaagagagagagagagagcatgcagcattgttggtagtagggcgtagcgtagcgtaccaaagtcagcaccgatattcaacttgacgccttccgcctcgccatcctcgtcttggtcctcttgctcgcccctcatggccctttcggcagcatcgtgaaacagcgtctcgatctgctcggcgacatggcgcgtggcttgcggtgcgtagacacggcgggcgtgttgggtaagagtgttgttcaggcgatacagcgcatcttcgactgcccgggcagagacaccgtcttcggcactatcgttgctttcgcgccagttgcgggaaggcgccagaggcttggacagctgcagggtttgcgtcgtcaagaatgtcgacttgtgcgcgatgatggtgggcggggccatgatggactaaatgacgacgatgccatcaagacatgcattgaagatatggatgagatgtattgcgcaacatacctctactcgatgcagcagcgaagttggaaaatgaacacgcaaacgcgatgatgaaatgccccgcggttccagcgttggacgcgtcgcaacaccactaaaccccccgcacataaacccgggtgccacaccctatcgagccctaaaggaaccccttgtcagaaccccctctattcgacatcgctcttactgctgccattcctttttgctacacccgctctcgatgtgcttttcaccctttctttcctactacagtttacaatatcctactctttcctaccaggaatcaaacgtatgctaccgcaatcgtatcaattcggtttgcatcctgttgtatttggaaccttccgaataagatccaacaaattcccaataatgcgtagacggactagccagcagagcagcttgtattttctctttgcattgggaacgactcataaccggcggctatagaatacaaaatgccctttgctggactggtcagccatatgacgagtatggataaactgtcatatatcggaaactttccccgcagctagaatcattctcgatactattatagatctatcgaaaatcccatctagggtgttggtcctacctgtttcgtgactgcatgagtttaggagtgtcgaacgcgttcttgtctcgttaaaaagtcatcatcagtagaaggttgaaagttcagacgcatcaattgacaagatggcatcctacactatacgggatgaggcttcacgcatcttcaactccgtcttactagcagacacccgactctcgctctcttcggcggtcctcgaagccgcaaagcgcacctcattcgactcatccgcgatttctacaccctttctcccggcacctgtaaaatgtacagagtcgagcacagccctctgggcgcttctgggcactttcgggaatgccattgcggaagaacgctacggaatcactcaggattgcgttgtgaacagcgatgtcgcaaccttgttcttgttctcattcatcttgatgagggtaggcggaaaaccgataggagacctcgacatcataaagcgatactcaatttacgataccgcgaataatatgacgccctggcgccgtcttgtcacgaatgtctattatacgcgtgacagtcgctggtatcatacccacgggagcatgaactcagacaaggtcctacgaatgcttggtctcccagaaaaccaggatatcacagacgagctggaagtcatcccacgcttagccgaagccgttgcaaagcacgatgctgagtggcttgacatggaaacgaacgaacactggagacaagccggtgctattgtcatgacgcctgaagaatatcgccaaagtgaacatggaaaagccgtgtcgaacgaccctctatacaccatcgaagagttcccacacaaggacctccctcccgtcccctggccccaagtcaacacaaagaccttccgacccctcgaaggcataaaactccttgacctcacacgtgcaatagcaggtccaacaatcgcccgtctagctgctttattcggcgcaaccgtggttcgcgtctccagcacctccatgccagatctgggcatcgtgctcttcgaatccaacctcggaaaacgagacgtagatctaaacctcaagaccgagtccggccgcgcagcccttcacaacctgatccaagacgccgacgtcgtcctcgacggctaccgccccggcgccctcgagaagctcggcttcggtccgacctacgttcacgaagtcgcgaagcgccgcgggaaaggtatagtctacgcgcgagaagactgctacggctggaccgggccttgggcacatcgcagtggatggcaacaagtcagcgacgccgtgacaggcatcggctggctttacgggcagatgtgggataagaacgagcccgtcatgccgttcctacctaactccgatttccagaccggaatagcgggctgtatcgggatcatgaatgcgttagatagacgagcgagaaagggcggcaattatctcgtttctacgtctctgaatgcgcataatagctatttgatgtcgctcgggctccaaaatccggaagtacaacaggatctaaaagagaaatggccggagatgaaggatacacggcattatgatgatttgcatcgccagatgaggattctcacagcaggtctcccaagagtagccccagaagtcttccaaccgaagtatttccagaccataaaagcagacctcggtgtcccagaggaagacatgatcttccttggtcctgcggtcacgtacgggactacgaagctgttttacaactcggggagttgtctgcgaggcacgcataccgctaaatggcccgaggaagactctgatgcatggagcacggtatcgacgattgttgaataagtagtttggacaagtcatactgcccctccagtggtcatgtgttatccgacaaagaattaatagcctattgtttatacgacgaaaaagaagatattagtattcgctctatcttcgttgtgcatttggtcgtttctactatcgcttatgccgtagaataggagcttactaatgacttgttttatgatcttgtgcgttctttaatcgctattgagttcaatttaa

SEQ ID NO: 21445 - DNA, 804 bp, Muscodor strobelii
  misc_feature: SGI cDNA ID NO. 567261
  misc_feature: Encodes the peptide sequence at SEQ ID NO 21446
atggccccgcccaccatcatcgcgcacaagtcgacattcttgacgacgcaaaccctgcagctgtccaagcctctggcgccttcccgcaactggcgcgaaagcaacgatagtgccgaagacggtgtctctgcccgggcagtcgaagatgcgctgtatcgcctgaacaacactcttacccaacacgcccgccgtgtctacgcaccgcaagccacgcgccatgtcgccgagcagatcgagacgctgtttcacgatgctgccgaaagggccatgaggggcgagcaagaggaccaagacgaggatggcgaggcggaaggcgtcaagttgaatatcggtgctgactttgctaccgacgaagccatcgcctccctgccagcagattggggcatccacaagccgcgcgaagcctccgacaaccccctcgaagcacgccgatacacagagctagccgcagaactcaactctctctctgcgcgccggaagcaagttcgccaacgtgtcgagcgcttgcgaaaaatggccgcactactcaaacccttcgattccactaaggccgacgacaatacacagatgagtatggacggcacgcaagagacaaagacgtctgttcaggagaatctgatcacgcgaaacggcgacatagagaaagagctcgagaggatgcgactgctactggctcgagtgtcgggacgaatcgcccagttcccggatcgcaatacagctgacgaagaagattatggcggtgatgcaatggatcttgacgagagacagagagacaagacggacaatctcttagatggtttctga

SEQ ID NO: 21446 - protein, 267 aa, Muscodor strobelii
  misc_feature: SGI Peptide ID NO. 567261
  misc_feature (4)..(241): NCBI GI: 46111489 Blast Desc: FG02626.1 [Gibberella zeae PH-1]
  misc_feature (4)..(236): NCBI GI: 256725855 Blast Desc: NECHADRAFT_81981 [Nectria haematococca mpVI 77-13-4]
  misc_feature (1)..(267): NCBI GI: 116180096 Blast Desc: CHGG_00676 [Chaetomium globosum CBS 148.51] gi|88184973|gb|EAQ92441.1| CHGG_00676 [Chaetomium globosum CBS 148.51]
  misc_feature (2)..(239): NCBI GI: 261355764 Blast Desc: conserved [Verticillium albo-atrum VaMs.102]
  misc_feature (5)..(267): NCBI GI: 85103913 Blast Desc: NCU11272 [Neurospora crassa OR74A] gi|28923165|gb|EAA32381.1| [Neurospora crassa OR74A] gi|28950076|emb|CAD70829.1| conserved [Neurospora crassa]
  misc_feature (4)..(253): NCBI GI: 156065983 Blast Desc: SS1G_01002 [Sclerotinia sclerotiorum 1980] gi|154691861|gb|EDN91599.1| SS1G_01002 [Sclerotinia sclerotiorum 1980]
  misc_feature (2)..(267): NCBI GI: 145612061 Blast Desc: MGG_08068 [Magnaporthe grisea 70-15] gi|145019306|gb|EDK03534.1| MGG_08068 [Magnaporthe grisea 70-15]
  misc_feature (5)..(232): NCBI GI: 239609977 Blast Desc: conserved [Ajellomyces dermatitidis ER-3]
  misc_feature (5)..(232): NCBI GI: 261198691 Blast Desc: conserved [Ajellomyces dermatitidis SLH14081] gi|239594899|gb|EEQ77480.1| conserved [Ajellomyces dermatitidis SLH14081]
  misc_feature (5)..(233): NCBI GI: 225683050 Blast Desc: [Paracoccidioides brasiliensis Pb03]
MAPPTIIAHKSTFLTTQTLQLSKPLAPSRNWRESNDSAEDGVSARAVEDALYRLNNTLTQHARRVYAPQATRHVAEQIETLFHDAAERAMRGEQEDQDEDGEAEGVKLNIGADFATDEAIASLPADWGIHKPREASDNPLEARRYTELAAELNSLSARRKQVRQRVERLRKMAALLKPFDSTKADDNTQMSMDGTQETKTSVQENLITRNGDIEKELERMRLLLARVSGRIAQFPDRNTADEEDYGGDAMDLDERQRDKTDNLLDGF

SEQ ID NO: 21447 - DNA, 5785 bp, Muscodor strobelii
  misc_feature: SGI EST ID NO. CUFF.50334.1
  misc_feature: Variant of the nucleotide sequence at SEQ ID NO 21445
gccgaagcacgtacaatcctcatctggcgatgcaaatcatcataatgccgtgtatccttcatctccggccatttctcttttagatcctgttgtacttccggattttggagcccgagcgacatcaaatagctattatgcgcattcagagacgtagaaacgagataattgccgccctttctcgctcgtctatctaacgcattcatgatcccgatacagcccgctattccggtctggaaatcggagttaggtaggaacggcatgacgggctcgttcttatcccacatctgcccgtaaagccagccgatgcctgtcacggcgtcgctgacttgttgccatccactgcgatgtgcccaaggcccggtccagccgtagcagtcttctcgcgcgtagactatacctttcccgcggcgcttcgcgacttcgtgaacgtaggtcggaccgaagccgagcttctcgagggcgccggggcggtagccgtcgaggacgacgtcggcgtcttggatcaggttgtgaagggctgcgcggccggactcggtcttgaggtttagatctacgtctcgttttccgaggttggattcgaagagcacgatgcccagatctggcatggaggtgctggagacgcgaaccacggttgcgccgaataaagcagctagacgggcgattgttggacctgctattgcacgtgtgaggtcaaggagttttatgccttcgaggggtcggaaggtctttgtgttgacttggggccaggggacgggagggaggtccttgtgtgggaactcttcgatggtgtatagagggtcgttcgacacggcttttccatgttcactttggcgatattcttcaggcgtcatgacaatagcaccggcttgtctccagtgttcgttcgtttccatgtcaagccactcagcatcgtgctttgcaacggcttcggctaagcgtgggatgacttccagctcgtctgtgatatcctggttttctgggagaccaagcattcgtaggaccttgtctgagttcatgctcccgtgggtatgataccagcgactgtcacgcgtataatagacattcgtgacaagacggcgccagggcgtcatattattcgcggtatcgtaaattgagtatcgctttatgatgtcgaggtctcctatcggttttccgcctaccctcatcaagatgaatgagaacaagaacaaggttgcgacatcgctgttcacaacgcaatcctgagtgattccgtagcgttcttccgcaatggcattcccgaaagtgcccagaagcgcccagagggctgtgctcgactctgtacattttacaggtgccgggagaaagggtgtagaaatcgcggatgagtcgaatgaggtgcgctttgcggcttcgaggaccgccgaagagagcgagagtcgggtgtctgctagtaagacggagttgaagatgcgtgaagcctcatcccgtatagtgtaggatgccatcttgtcaattgatgcgtctgaactttcaaccttctactgatgatgactttttaacgagacaagaacgcgttcgacactcctaaactcatgcagtcacgaaacaggtaggaccaacaccctagatgggattttcgatagatctataatagtatcgagaatgattctagctgcggggaaagtttccgatatatgacagtttatccatactcgtcatatggctgaccagtccagcaaagggcattttgtattctatagccgccggttatgagtcgttcccaatgcaaagagaaaatacaagctgctctgctggctagtccgtctacgcattattgggaatttgttggatcttattcggaaggttccaaatacaacaggatgcaaaccgaattgatacgattgcggtagcatacgtttgattcctggtaggaaagagtaggatattgtaaactgtagtaggaaagaaagggtgaaaagcacatcgagagcgggtgtagcaaaaaggaatggcagcagtaagagcgatgtcgaatagagggggttctgacaaggggttcctttagggctcgatagggtgtggcacccgggtttatgtgcggggggtttagtggtgttgcgacgcgtccaacgctggaaccgcggggcatttcatcatcgcgtttgcgtgttcattttccaacttcgctgctgcatcgagtagaggtatgttgcgcaatacatctcatccatatcttcaatgcatgtcttgatggcatcgtcgtcatttagtccatcatggccccgcccaccatcatcgcgcacaagtcgacattcttgacgacgcaaaccctgcagctgtccaagcctctggcgccttcccgcaactggcgcgaaagcaacgatagtgccgaagacggtgtctctgcccgggcagtcgaagatgcgctgtatcgcctgaacaacactcttacccaacacgcccgccgtgtctacgcaccgcaagccacgcgccatgtcgccgagcagatcgagacgctgtttcacgatgctgccgaaagggccatgaggggcgagcaagaggaccaagacgaggatggcgaggcggaaggcgtcaagttgaatatcggtgctgactttgctaccgacgaagccatcgcctccctgccagcagattggggcatccacaagccgcgcgaagcctccgacaaccccctcgaagcacgccgatacacagagctagccgcagaactcaactctctctctgcgcgccggaagcaagttcgccaacgtgtcgagcgcttgcgaaaaatggccgcactactcaaacccttcgattccactaaggccgacgacaatacacagatgagtatggacggcacgcaagagacaaagacgtctgttcaggagaatctgatcacgcgaaacggcgacatagagaaagagctcgagaggatgcgactgctactggctcgagtgtcgggacgaatcgcccagttcccggatcgcaatacagctgacgaagaagattatggcggtgatgcaatggatcttgacgagagacagagagacaagacggacaatctcttagatggtttctgagagttctcttgaaacatcgagctttagtagtcacgagacgaaatcagttgaaaatgcgtttccatgtgcatgagaggagtttggcgttcgggaaataggcgactgcttgggcatgctgcatggttggtcatgcttctatttcgagatacccccaatcaaaatgatgaattgatgaaaagggaatgaatcgctcgatcacgtactgaaaatatgcttggaacgcctagcgatgttcaaaagcgagttgttgaattaatcattctacttatcctatgctaacgtaaatgctatttggctaataccaagttcgagtgaaccaagagtcgtgacccaatttcttcagcctggtctacaatttgcctcgatgccctctcaaacatgcacccgcgttttcgagcctcgaagcagaaaagccgttactctatctcttccttgaggagaggtacgagcgacaagatgctcttcttcctctgctcagggctaccctcgagcgtcgcatctttggagctatcgtcgacgtctagacccatggaagatttcatctcggtcttttcctccccgtctttatccccgtctttgccattctcgtcgccgtccttcttatcttccccgtcggcggcctccgagtctttcttggcataggggttcggtcggatgacgcgtagcttgacaacctctttggccttgtcttcctcggcaactttgtagtagacgcgaaggcccacggtggcgacggcgttccacttgagttttgctggttagcagactgtgctcggattttaaaaaggaaggatactcactgggttgctttcaaactcatcttcctcctctacattgttagttacaggttggggaaccggcgctggcattgggccattagcccgatgcttgagaatgtgatcgagttccgtatcactgatctccgataccgacgagatgtcggactcatcttcgaattcagcctcaagtactgatcttggaggaggacgacgagctctacgtctttcccttctcatatcgcgcgggtccatagcctcctcttccgcgatgggctcgagcgcatcaagtactggcggaccaggagcaacagtctgcttggggctaacggccggttcattgctactttctggcgccttggactccggtgtggatttctcatcggcattgatttcgtccaccggagcaggctccgcagctttcgtcttagcctcctcttgggcgctggcattggtatcgccagaatcgacagaaggggtgttaatgctgtttccactacttggctcggtagtcggctcaggggttggttcaggagacggcatctgagccggtgccttctccgaagcgtcaggggctgacttgtcgtcgacctcatgtcccatctttgtattctcccgctcgtcgagttctatttcgacagcttgtctcttttcaacctgggcttggtgcttagctttggcctttgctttcttctcctggcgcttcttgaacgctttgacttgaacgtaatgtctttggtttctggactccatgattttcttccttatatcatctcgttctttatctttcttgcgcttctcgaaagcctttctcgctttcttctcttcttccgtttccactatttcgcctttgctgtgagctaagtcataagacatccccacggtcacgagcttgtctctacgatcccgagcatggttgcggatcacctcttctatcggcaatatgtctagatctcgggtcgcgttgatcttcatcaaaacggtgtattcgcctgcttccagctccagctcgacattgactgaacgattttgacagtatggagaaatgctgcggacaacatagtcttctttgccctttttatggagacggaacttgagttcaaatcgatactggccctcgagaccgcaatagtatcgatcatcaagctgcgagagcactaaaacgacaggaccagtctttgcaagtgataagtcgaagtaggtgtcgtggtaatcgagtgtccaaggaaccgagactgttgtccaaatcgatgtgaccttccaatccgagctgaatagtcgtgttctgtcgaaagcttggtatttgcgaaggagatcggcgtacgagatccagaaattgccatcgtcaccaaagcgatgattgagcttgagaagccattcggcagtccactctttcgatccatcgctccaagcgcccttccactcgcctttgccccaaggattcttgagcaagacgagtctctggccgtcaatttccacagctcgcatgattgagtaagcatgcaattcgacgataccattgcggtcgccacggctgccggtcccccacatccccgttgagcatccaaagaggaattcatcgttgaccttcatgagctcctctttccagaaatactctttgtccaagatatctgtagtgtagagctcagtcgtgacgccaccagttaagtcctcgatgccctcgcccgtgaagccaccttcgatcgctgcatagtctccatgtgctttcgcataagctttttccagcagcggaagccaagtttcattggcatgctcgcattgcgcaaagtatagagctccggacccactctggtacgccatgcgatactgctcttcggaattgacacgttcacgatcctcccagagtgcgcgctcgagataactttcatcaaagtcaggtttgatcaggaacaacttgtcgtcgatgatgacagatatccactcgccatcacgatgaaacacaaatcc

SEQ ID NO: 21448 - DNA, 2922 bp, Muscodor strobelii
  misc_feature: SGI cDNA ID NO. 567262
  misc_feature: Encodes the peptide sequence at SEQ ID NO 21449
atgtctcgtgcagggcctcgaccgccgccgtcagaggcagattattacctaggagacgatggcggacctcaaactgtcatggcagaaattcccgtaacattatctcgagcccctaagaaaaacaaacagcaaactcctcaggaggctattgatgaattctggactaaattctcaacgaaggcgcctggaaaagcgactacgatcattcctcacaatgagtatgcggagcgcgcgagccgacggtcaagcaaaatcgtgggcatcacgactcaagcatcatacgaggacgccgcagaggtctgcagagcaaaagtcgacaagattgtcaaagaatgtcggcgagtgaaccaaaaataccgggatcctcacttcgatcttgagttcgacgtgaagtggggttgtcgagatacactcgagtcgctgtgcaacacgaaccaaaagccttcgactaccttccaacctaaaagtgtcaaacgcgtcactgatatctttgatgatcccaagttctatatcgatggcccgactgccaatgatgtgcgccagggccgcgatggtgactgttggcttctcgcagcgctgtgcacgctgagcaacaaacccagtttgattgagcgcgtgtgcgtggcgcgcgatgagatggttggtgtctatggatttgtgtttcatcgtgatggcgagtggatatctgtcatcatcgacgacaagttgttcctgatcaaacctgactttgatgaaagttatctcgagcgcgcactctgggaggatcgtgaacgtgtcaattccgaagagcagtatcgcatggcgtaccagagtgggtccggagctctatactttgcgcaatgcgagcatgccaatgaaacttggcttccgctgctggaaaaagcttatgcgaaagcacatggagactatgcagcgatcgaaggtggcttcacgggcgagggcatcgaggacttaactggtggcgtcacgactgagctctacactacagatatcttggacaaagagtatttctggaaagaggagctcatgaaggtcaacgatgaattcctctttggatgctcaacggggatgtgggggaccggcagccgtggcgaccgcaatggtatcgtcgaattgcatgcttactcaatcatgcgagctgtggaaattgacggccagagactcgtcttgctcaagaatccttggggcaaaggcgagtggaagggcgcttggagcgatggatcgaaagagtggactgccgaatggcttctcaagctcaatcatcgctttggtgacgatggcaatttctggatctcgtacgccgatctccttcgcaaataccaagctttcgacagaacacgactattcagctcggattggaaggtcacatcgatttggacaacagtctcggttccttggacactcgattaccacgacacctacttcgacttatcacttgcaaagactggtcctgtcgttttagtgctctcgcagcttgatgatcgatactattgcggtctcgagggccagtatcgatttgaactcaagttccgtctccataaaaagggcaaagaagactatgttgtccgcagcatttctccatactgtcaaaatcgttcagtcaatgtcgagctggagctggaagcaggcgaatacaccgttttgatgaagatcaacgcgacccgagatctagacatattgccgatagaagaggtgatccgcaaccatgctcgggatcgtagagacaagctcgtgaccgtggggatgtcttatgacttagctcacagcaaaggcgaaatagtggaaacggaagaagagaagaaagcgagaaaggctttcgagaagcgcaagaaagataaagaacgagatgatataaggaagaaaatcatggagtccagaaaccaaagacattacgttcaagtcaaagcgttcaagaagcgccaggagaagaaagcaaaggccaaagctaagcaccaagcccaggttgaaaagagacaagctgtcgaaatagaactcgacgagcgggagaatacaaagatgggacatgaggtcgacgacaagtcagcccctgacgcttcggagaaggcaccggctcagatgccgtctcctgaaccaacccctgagccgactaccgagccaagtagtggaaacagcattaacaccccttctgtcgattctggcgataccaatgccagcgcccaagaggaggctaagacgaaagctgcggagcctgctccggtggacgaaatcaatgccgatgagaaatccacaccggagtccaaggcgccagaaagtagcaatgaaccggccgttagccccaagcagactgttgctcctggtccgccagtacttgatgcgctcgagcccatcgcggaagaggaggctatggacccgcgcgatatgagaagggaaagacgtagagctcgtcgtcctcctccaagatcagtacttgaggctgaattcgaagatgagtccgacatctcgtcggtatcggagatcagtgatacggaactcgatcacattctcaagcatcgggctaatggcccaatgccagcgccggttccccaacctgtaactaacaatgtagaggaggaagatgagtttgaaagcaacccatggaacgccgtcgccaccgtgggccttcgcgtctactacaaagttgccgaggaagacaaggccaaagaggttgtcaagctacgcgtcatccgaccgaacccctatgccaagaaagactcggaggccgccgacggggaagataagaaggacggcgacgagaatggcaaagacggggataaagacggggaggaaaagaccgagatgaaatcttccatgggtctagacgtcgacgatagctccaaagatgcgacgctcgagggtagccctgagcagaggaagaagagcatcttgtcgctcgtacctctcctcaaggaagagatagagtaa

SEQ ID NO: 21449 - protein, 973 aa, Muscodor strobelii
  misc_feature: SGI Peptide ID NO. 567262
  misc_feature (146)..(449): Pfam Id: PF00648 Pfam Desc: Calpain family cysteine protease
  misc_feature (367)..(440): Pfam Id: PF00648 Pfam Desc: Calpain family cysteine protease
  misc_feature (158)..(236): Pfam Id: PF00648 Pfam Desc: Calpain family cysteine protease
  misc_feature (274)..(323): Pfam Id: PF00648 Pfam Desc: Calpain family cysteine protease
  misc_feature (39)..(629): NCBI GI: 156065703 Blast Desc: SS1G_00862 [Sclerotinia sclerotiorum 1980] gi|154691721|gb|EDN91459.1| SS1G_00862 [Sclerotinia sclerotiorum 1980]
  misc_feature (45)..(648): NCBI GI: 256725847 Blast Desc: NECHADRAFT_11769 [Nectria haematococca mpVI 77-13-4]
  misc_feature (40)..(629): NCBI GI: 261355765 Blast Desc: calpain-5 [Verticillium albo-atrum VaMs.102]
  misc_feature (39)..(879): NCBI GI: 154304885 Blast Desc: BC1G_09028 [Botryotinia fuckeliana B05.10] gi|150853890|gb|EDN29082.1| BC1G_09028 [Botryotinia fuckeliana B05.10]
  misc_feature (35)..(692): NCBI GI: 169618225 Blast Desc: SNOG_12303 [Phaeosphaeria nodorum SN15] gi|160703578|gb|EAT80116.2| SNOG_12303 [Phaeosphaeria nodorum SN15]
  misc_feature (33)..(662): NCBI GI: 169769787 Blast Desc: [Aspergillus oryzae RIB40] gi|83767222|dbj|BAE57361.1| protein product [Aspergillus oryzae]
  misc_feature (38)..(602): NCBI GI: 121699377 Blast Desc: calpain, [Aspergillus clavatus NRRL 1] gi|119396143|gb|EAW06575.1| calpain, [Aspergillus clavatus NRRL 1]
  misc_feature (33)..(602): NCBI GI: 119469232 Blast Desc: calpain-like protein [Neosartorya fischeri NRRL 181] gi|119406070|gb|EAW16021.1| calpain-like protein [Neosartorya fischeri NRRL 181]
  misc_feature (33)..(602): NCBI GI: 70991679 Blast Desc: calpain-like protein [Aspergillus fumigatus Af293] gi|66848321|gb|EAL88650.1| calpain-like protein [Aspergillus fumigatus Af293]
  misc_feature (33)..(602): NCBI GI: 159124251 Blast Desc: calpain-like protein [Aspergillus fumigatus A1163]
MSRAGPRPPPSEADYYLGDDGGPQTVMAEIPVTLSRAPKKNKQQTPQEAIDEFWTKFSTKAPGKATTIIPHNEYAERASRRSSKIVGITTQASYEDAAEVCRAKVDKIVKECRRVNQKYRDPHFDLEFDVKWGCRDTLESLCNTNQKPSTTFQPKSVKRVTDIFDDPKFYIDGPTANDVRQGRDGDCWLLAALCTLSNKPSLIERVCVARDEMVGVYGFVFHRDGEWISVIIDDKLFLIKPDFDESYLERALWEDRERVNSEEQYRMAYQSGSGALYFAQCEHANETWLPLLEKAYAKAHGDYAAIEGGFTGEGIEDLTGGVTTELYTTDILDKEYFWKEELMKVNDEFLFGCSTGMWGTGSRGDRNGIVELHAYSIMRAVEIDGQRLVLLKNPWGKGEWKGAWSDGSKEWTAEWLLKLNHRFGDDGNFWISYADLLRKYQAFDRTRLFSSDWKVTSIWTTVSVPWTLDYHDTYFDLSLAKTGPVVLVLSQLDDRYYCGLEGQYRFELKFRLHKKGKEDYVVRSISPYCQNRSVNVELELEAGEYTVLMKINATRDLDILPIEEVIRNHARDRRDKLVTVGMSYDLAHSKGEIVETEEEKKARKAFEKRKKDKERDDIRKKIMESRNQRHYVQVKAFKKRQEKKAKAKAKHQAQVEKRQAVEIELDERENTKMGHEVDDKSAPDASEKAPAQMPSPEPTPEPTTEPSSGNSINTPSVDSGDTNASAQEEAKTKAAEPAPVDEINADEKSTPESKAPESSNEPAVSPKQTVAPGPPVLDALEPIAEEEAMDPRDMRRERRRARRPPPRSVLEAEFEDESDISSVSEISDTELDHILKHRANGPMPAPVPQPVTNNVEEEDEFESNPWNAVATVGLRVYYKVAEEDKAKEVVKLRVIRPNPYAKKDSEAADGEDKKDGDENGKDGDKDGEEKTEMKSSMGLDVDDSSKDATLEGSPEQRKKSILSLVPLLKEEIE

SEQ ID NO: 21450 - DNA, 6296 bp, Muscodor strobelii; identical to SEQ ID NO: 21444
  misc_feature: SGI EST ID NO. CUFF.50335.0
  misc_feature: Variant of the nucleotide sequence at SEQ ID NO 21448

SEQ ID NO: 21451 - DNA, 1557 bp, Muscodor strobelii
  misc_feature: SGI cDNA ID NO. 567263
  misc_feature: Encodes the peptide sequence at SEQ ID NO 21452
atggacttggttccagaacccgataggcctaaagatgagggagttgaaatcgagaagggagaggttctggaggtcaatgagaagtcggattctatatctagcgatgttttagatacaaacccggagtatacagaagagcagtacaaaaagctcaagagaaaggccgatagatatctcctcccgctgatgtggctctgttatggcatccagcaagtcgacaagacgtcgctaggaacacaagctacttttggtctacgagaggatactggtctggtgggacagcaatactcatggcttacaaccatcttctatctggcatatctcctcttcgagctaccgtcaaacttcgtcatacaacgatacaagatgggccgaacgctaagtctttacatgcttagctggggtgtcatcgtgctcaatattgggttcgcaaagaatttcaagcacctgatcgcgctacgtgctcttcagggattcttcgagtgctgcatctcgcccggattcatcctcattgtgggctcatggtatacaacgcgagagcatgcatcgaggtcactggtgttccagagtgcaaatgcgggcttcggaataatagccaatctcattttgtatggaattgggtccactcaatattctcacgggccagattaccagccctggcgatatatctcttatttcttagggagcttaactatcctcgctggaacattgtgtctctttttgctaggcacgccatctgaagtccgttggctatcggccgaagaaaagaaaatcgcacacgcgcgaatcatgaccaacaacaccggacatgaccgaactggagttaagacttggaagtgggagcaagtcagagaatgtctcatggacccttgcttctggttctcaggaatcaatgccttcctttcctccgtccctaatggcggcctcactacctttagcggtatcatcaacactggattcggtttcaccaatctgcaggtcattcttcttgacattccacggaatgtcatatcggtcgtttacttcatcatcattggtataatttgcagcaaatggaagaacctccgcatgtacttcatgatgttctccgtggttcctccatttattggattcatcatattgtcactactacctaacgactctcactatagatggatcaaatggggaggctacgtcatgacggtcactgcgacaattggactttttctaggttggactcttataccctccaacattgccgggcggacgaagcgaactctcacctcatccttcacgtttgttgggtactgtgtgggtaacatcgtaggatcacagatattcaactataaagacgctccaagatacatccctgggacaacaggatgtgcagtgtcttacggactccagtttctggtacttgtcacatggcgactcaccctcgtgctacgtaaccgtcggcgagtcaggttattgcgcgagcagggtctcgccgaaggggatagggtggcgaaagctaaagcgctgggcgaagaagacaagacggactttgagaacatttatttcaggtatacaatgtga

SEQ ID NO: 21452 - protein, 518 aa, Muscodor strobelii
  misc_feature: SGI Peptide ID NO. 567263
  misc_feature (63)..(437): Pfam Id: PF07690 Pfam Desc: Major Facilitator Superfamily
  misc_feature (8)..(517): NCBI GI: 58268218 Blast Desc: CNF01220 [Cryptococcus neoformans var. neoformans JEC21] gi|58268220|ref|XP_571266.1| CNF01220 [Cryptococcus neoformans var. neoformans JEC21] gi|57227500|gb|AAW43958.1| var.
  misc_feature (8)..(517): NCBI GI: 58271576 Blast Desc: [Cryptococcus neoformans var. neoformans JEC21] gi|57229203|gb|AAW45637.1| conserved [Cryptococcus neoformans var. neoformans JEC21]
  misc_feature (8)..(517): NCBI GI: 134115170 Blast Desc: CNBH3350 [Cryptococcus neoformans var. neoformans B-3501A] gi|50256511|gb|EAL19236.1| CNBH3350 [Cryptococcus neoformans var. neoformans B-3501A]
  misc_feature (8)..(467): NCBI GI: 134113290 Blast Desc: CNBF3490 [Cryptococcus neoformans var. neoformans B-3501A] gi|50257314|gb|EAL20023.1| CNBF3490 [Cryptococcus neoformans var. neoformans B-3501A]
  misc_feature (42)..(518): NCBI GI: 256725527 Blast Desc: NECHADRAFT_55673 [Nectria haematococca mpVI 77-13-4]
  misc_feature (21)..(516): NCBI GI: 256720678 Blast Desc: NECHADRAFT_96676 [Nectria haematococca mpVI 77-13-4]
  misc_feature (26)..(518): NCBI GI: 145231315 Blast Desc: An02g00040 [Aspergillus niger] gi|134056044|emb|CAK96219.1| protein product [Aspergillus niger]
  misc_feature (13)..(518): NCBI GI: 256722151 Blast Desc: NECHADRAFT_88772 [Nectria haematococca mpVI 77-13-4]
  misc_feature (4)..(407): NCBI GI: 145250911 Blast Desc: An15g04340 [Aspergillus niger] gi|134082495|emb|CAK97301.1| protein product [Aspergillus niger]
  misc_feature (2)..(516): NCBI GI: 269856964 Blast Desc: CNF01220-like protein [Cryptococcus heveanensis]
MDLVPEPDRPKDEGVEIEKGEVLEVNEKSDSISSDVLDTNPEYTEEQYKKLKRKADRYLLPLMWLCYGIQQVDKTSLGTQATFGLREDTGLVGQQYSWLTTIFYLAYLLFELPSNFVIQRYKMGRTLSLYMLSWGVIVLNIGFAKNFKHLIALRALQGFFECCISPGFILIVGSWYTTREHASRSLVFQSANAGFGIIANLILYGIGSTQYSHGPDYQPWRYISYFLGSLTILAGTLCLFLLGTPSEVRWLSAEEKKIAHARIMTNNTGHDRTGVKTWKWEQVRECLMDPCFWFSGINAFLSSVPNGGLTTFSGIINTGFGFTNLQVILLDIPRNVISVVYFIIIGIICSKWKNLRMYFMMFSVVPPFIGFIILSLLPNDSHYRWIKWGGYVMTVTATIGLFLGWTLIPSNIAGRTKRTLTSSFTFVGYCVGNIVGSQIFNYKDAPRYIPGTTGCAVSYGLQFLVLVTWRLTLVLRNRRRVRLLREQGLAEGDRVAKAKALGEEDKTDFENIYFRYTM

SEQ ID NO: 21453 - DNA, 1717 bp, Muscodor strobelii
  misc_feature: SGI EST ID NO. CUFF.50350.0
  misc_feature: Variant of the nucleotide sequence at SEQ ID NO 21451
aaactctagaagcgtaagagcaattcaaaatttgattcaacgctgacgcgtcatacaacgaatatgaccgaggacgtgcttctatgcgaaggagtagaatttggtctgaaatagattgtggtcaaaagtttgttgtggagagaaaagcatggcagtttataagaaacgaaaccccaaacttcgacttggtagccctgttgcccgttttcacctttagtccttcacggcacttttgtcaatttttcacgtaaatcgaacgcgtttctatggcagatctacttgaattcgaattgcggcggctccactcccaaagttccagtgtacacctacgtcaacgtcagagtaatagatctatgccatgcagcttgtcatctccaagtctgaaatatgatatgatctaggaactgcgcatattcgcgctatgcaagtaccagaagcggggatcatcgtctcctgaatctgacgaacgcacttcaattggcacacctggaacaagcaacctatcagagggtgcataaacaatcgataactccaagattatgaaggtgctttggggtctcgttctcttaaagagagtgttctagacactgcaggttgtctgttacacgttgagaagaggggaatgccggatgatatcccgaagagcactgaggcacttacatttcaatcgcatccaatagataacgacgatatgcccccatgatatacgaatcgtgttcaaagcgcagcatcttctgaatgataaccttgttctacctgcctgattaacttcaattacatggccagtctgtcggccaagacttcgagataaggacaaggacccatgttccgctatgcatatcccctcaacacgctaccctatactacaatctagggtctacagagcagatccgaggagaacgtcacaatgagcacccgtcatggcgacacgcgaacgtgggggagtaggctatctggaggtgtttgtgcatgcgataagccgcgagacgagtcgagaatgcgatactataagtacaaacgattgtaccttctctcgtgatgtgaatgcctgcacttatcattaatttttccgatccagactttgtatgcgatcattgtggtaaatcgttattttatacacattctactcttccacgaggccagggagtacatctacaacggtcaatatggacttggttccagaacccgataggcctaaagatgagggagttgaaatcgagaagggagaggttctggaggtcaatgagaagtcggattctatatctagcgatgttttagatacaaacccggagtatacagaagagcagtacaaaaagctcaagagaaaggccgatagatatctcctcccgctgatgtggctctgttatggcatccagcaagtcgacaagacgtcgctaggaacacaagctacttttggtctacgagaggatactggtctggtgggacagcaatactcatggcttacaaccatcttctatctggcatatctcctcttcgagctaccgtcaaacttcgtcatacaacgatacaagatgggccgaacgctaagtctttacatgcttagctggggtgtcatcgtgctcaatattgggttcgcaaagaatttcaagcacctgatcgcgctacgtgctcttcagggattcttcgagtgctgcatctcgcccggattcatcctcattgtgggctcatggtatacaacgcgagagcatgcatcgag

SEQ ID NO: 21454 - DNA, 846 bp, Muscodor strobelii
  misc_feature: SGI cDNA ID NO. 567264
  misc_feature: Elevated expression when VOC is produced
  misc_feature: Encodes the peptide sequence at SEQ ID NO 21455
atgcgttctcaaagcatattgctatctttgctacccacccttgtagctggtatcactcctcccaatgtgggtggaatgaacttgatgtggtctgatgacttcgagggcccagcgggatcatctccggataccaaaacctggaacatcatgaccgatatcgatacaaacaatgaagtcgagacatacacaactgcaaatagcaatctacaaatcagcggcggaggcactgttcagtttgtccctcgaaagtcgccaactggccattggacatctggccgcatcgagacaaaagaatcttggacaccaactcccggcaaggtgatgatggtttcagccaacatactcatcggcgacaatgcggcagcgaacaagcagggcatatggccagcgttttggctacttggcgaggctgtaagacatggaacggagtggcccgggtgcggtgagatcgatatcttcgaacaggtcaacggtatgactgaagctcatggaacgcttcattgcggcacagagtctggaggcccatgcaacgagacaaatggtaaaaccggtaccgtgtcgattcccaccagcggatttcacacctggtcgaccaagattgatctgacaagttcagattggcgagctcagacaatttctttccagctagatggcgcgactttctattctgtaagcggtgctgtcatcaatgaccaggcggtctggtcaactctcgcacacagcccaatgtatatgattctcaacgttgctgtcggaggtaactggcctggtgctccaaatgatgcaactctagatggttacggagccatgatggaagttcagtgggtggctgtctacacctcatag

SEQ ID NO: 21455 - protein, 281 aa, Muscodor strobelii
  misc_feature: SGI Peptide ID NO. 567264
  misc_feature (57)..(277): Pfam Id: PF00722 Pfam Desc: Glycosyl hydrolases family 16
  misc_feature (121)..(277): Pfam Id: PF00722 Pfam Desc: Glycosyl hydrolases family 16
  misc_feature (1)..(281): NCBI GI: 116201025 Blast Desc: CHGG_08397 [Chaetomium globosum CBS 148.51] gi|88176915|gb|EAQ84383.1| CHGG_08397 [Chaetomium globosum CBS 148.51]
  misc_feature (22)..(281): NCBI GI: 145602919 Blast Desc: MGG_13777 [Magnaporthe grisea 70-15] gi|145011271|gb|EDJ95927.1| MGG_13777 [Magnaporthe grisea 70-15]
  misc_feature (6)..(281): NCBI GI: 256725844 Blast Desc: NECHADRAFT_44066 [Nectria haematococca mpVI 77-13-4]
  misc_feature (11)..(281): NCBI GI: 242769808 Blast Desc: endo-1,3(4)-beta-glucanase, [Talaromyces stipitatus ATCC 10500] gi|218725045|gb|EED24462.1| endo-1,3(4)-beta-glucanase, [Talaromyces stipitatus ATCC 10500]
  misc_feature (1)..(281): NCBI GI: 171677466 Blast Desc: protein product [Podospora anserina] gi|170936801|emb|CAP61459.1| protein product [Podospora anserina]
  misc_feature (1)..(281): NCBI GI: 70986272 Blast Desc: endo-1,3(4)-beta-glucanase [Aspergillus fumigatus Af293] gi|66846259|gb|EAL86592.1| endo-1,3(4)-beta-glucanase, [Aspergillus fumigatus Af293] gi|159128225|gb|EDP53340.1| A1163]
  misc_feature (1)..(281): NCBI GI: 119474307 Blast Desc: secreted glucosidase [Neosartorya fischeri NRRL 181] gi|119407182|gb|EAW17132.1| secreted glucosidase [Neosartorya fischeri NRRL 181]
  misc_feature (20)..(279): NCBI GI: 212542069 Blast Desc: endo-1,3(4)-beta-glucanase, [Penicillium marneffei ATCC 18224] gi|210066096|gb|EEA20189.1| endo-1,3(4)-beta-glucanase, [Penicillium marneffei ATCC 18224]
  misc_feature (7)..(281): NCBI GI: 119473375 Blast Desc: secreted glucosidase [Neosartorya fischeri NRRL 181] gi|119406739|gb|EAW16690.1| secreted glucosidase [Neosartorya fischeri NRRL 181]
  misc_feature (21)..(281): NCBI GI: 46111539 Blast Desc: FG02651.1 [Gibberella zeae PH-1]
  misc_feature (19)..(279): SWISSPROT Homolog: EC 3.2.1.39 Glucan endo-1,3-beta-D-glucosidase
  misc_feature: Useful for introducing or modulating the production of volatile compounds
MRSQSILLSLLPTLVAGITPPNVGGMNLMWSDDFEGPAGSSPDTKTWNIMTDIDTNNEVETYTTANSNLQISGGGTVQFVPRKSPTGHWTSGRIETKESWTPTPGKVMMVSANILIGDNAAANKQGIWPAFWLLGEAVRHGTEWPGCGEIDIFEQVNGMTEAHGTLHCGTESGGPCNETNGKTGTVSIPTSGFHTWSTKIDLTSSDWRAQTISFQLDGATFYSVSGAVINDQAVWSTLAHSPMYMILNVAVGGNWPGAPNDATLDGYGAMMEVQWVAVYTS

SEQ ID NO: 21456 - DNA, 2677 bp, Muscodor strobelii
  misc_feature: SGI EST ID NO. CUFF.50488.1
  misc_feature: Variant of the nucleotide sequence at SEQ ID NO 21454
cccctctcgccacattcatgcgtcaaaagaactgctcgatatttcaaacaactactcaaaaaagccggctcgtatcgacacgcttctgcgcccgtgaggcattatgccacctgcggaagtcaagaagcgagtttagatcacacaagggtaatgggagacggtgtcggattaggcattaagtcggcaatgaaaatcgaccattcatgtttcaaagatggtattttcccttcggccgttctactgcgaagactaactggtagcactatttcaacgtcggcaacgtatccgcttaggggtcttggtgatgtggatcatgtgcagttcttcaacagcgaagatgcgctgacgctgactactatcggcgatgcgcacactgctacccctgcactaaacgaagtttcatcttttcttaattccgcagggacaacactaccatgccaaatccaatggtcaccgtgtcttgcgccctgacgaccctggtcagctagcatggctccctacgctctggttggtatggcgcacgggacccttgtcaacatctcggcagagtatactctcaatttcgacatctcatgctcttttcgtctttgttcggtaggccaccaaacaagccaaatacctatccaggcggtgggtcttgaataacaagaacaaagcaggccatggcagactcggcaggtatcccgttgccatatcccggtgtcgaggtagcaatttaatatatttgtccatggcaggccgctttctacatcttgttcttgctctcgatccgttctctctctctccaagttcaatcttgctttcattcctttcttttctatacttgccaccttgatagccgagctataacatcacattcctttcgcttcccgacctgctagagccaaagcttagctttttttagttctcaccgtggtctctccttgactttcatatttacaaggtccctgcaagacaggctcgttatatttacgcaaactcacatctttgcgttatcattatctcaaacttggaaccatttttttcatttgccttcttagcaagatacgaactagaaaacgaacaaaacagttactctcttacatccacttgatatctcctgttcatcatgcgttctcaaagcatattgctatctttgctacccacccttgtagctggtatcactcctcccaatgtgggtggaatgaacttgatgtggtctgatgacttcgagggcccagcgggatcatctccggataccaaaacctggaacatcatgaccgatatcgatacaaacaatgaagtcgagacatacacaactgcaaatagcaatctacaaatcagcggcggaggcactgttcagtttgtccctcgaaagtcgccaactggccattggacatctggccgcatcgagacaaaagaatcttggacaccaactcccggcaaggtgatgatggtttcagccaacatactcatcggcgacaatgcggcagcgaacaagcagggcatatggccagcgttttggctacttggcgaggctgtaagacatggaacggagtggcccgggtgcggtgagatcgatatcttcgaacaggtcaacggtatgactgaagctcatggaacgcttcattgcggcacagagtctggaggcccatgcaacgagacaaatggtaaaaccggtaccgtgtcgattcccaccagcggatttcacacctggtcgaccaagattgatctgacaagttcagattggcgagctcagacaatttctttccagctagatggcgcgactttctattctgtaagcggtgctgtcatcaatgaccaggcggtctggtcaactctcgcacacagcccaatgtatatgattctcaacgttgctgtcggaggtaactggcctggtgctccaaatgatgcaactctagatggttacggagccatgatggaagttcagtgggtggctgtctacacctcataggacgcctggcacttgaaatatatggacacattgcatcggagttaggatatctgggtcggcgttttaagaagacggattttgtggtttatattcaagatacctttttgtttgcacttgttaaatttttatatccatctacggagtttgtgtatagagagatgggctgctggcgatgagagacaccagccaatgacttcctgacagatgttcgtatcaaagacgtctaatggatgttcctatgaatacacaacttgttctagctggatagagcacaatttacattcgtcttgccggttgtcgtcgcatcgacaatcaaagcagctctttgcagccccgaagtatgacacatcacgatctgatttagtcaagcttgcgcattagaccaattgtgcctgccgtttagaaataaggatacatgcgttcggccatattctcaatgcgtggtgatgccttaattcgcaatggcattactgcagggtgcctcctttctaacgcatgctattgcgctctagactcaatcgtgagagcggcttcaacttttgcactcatgcattgctcttctcgactgcatcgaagtagttgtactctttcaaagaatgacgtctcgagtgacacatatattgcgcctttccggacatactgaagagtgcaaagttgactttgaaggaacaacactaagtaacctcaaaacctagtacccttatcaccaccgattcttctcac

SEQ ID NO: 21457 - DNA, 1836 bp, Muscodor strobelii
  misc_feature: SGI cDNA ID NO. 567265
  misc_feature: Encodes the peptide sequence at SEQ ID NO 21458
atgggctcatcagacgctggtgatcctcgaaagctaccagtctttgcgcacgttgaatgcattcagcaagactatgctaataatgtcaatgcgaggatactcaacccgttgatcggcgtctctaaaggggatctgaagacccaagttcaagccttctgcaacgaatacggcttccaagacaaactcgagattttctaccgcggcgctcttgccgctcagaatgccgagaattttgatgaaattgaagagcttattacggaagataaggagtgtcttcggaaggaaatcacacatcgctggcatctccccaaacacttgtattatacgatcgcactttgctctttgggctctgctattcaaggttgggacaatactggtgcgaatggggcaaatctgagttttccgagggagtttggtattgaagacaatacgtggctcgtaggggctatcaactctgctcccacgctttttggccttctttctgcatgggccgccgacccgatcaataatgcgctaggaagacgggggacaatcttcttgagcggtctattctgcgtgtttcctgtcttagcccaagcgttcactcgtaattggtgggaacttttgatcacgcggctattcattgggctgggtgctggaattaaaatatcgaccatacctgtcttcacagcagaggtcgcgccagccgttgtacgaggcgggattgtaacatcatttcagctctgggtcgcttttggcatcttggctggacaagcatctaatctcatcttctacaagattggagacttagcgtggaggtttcagcttgccgctgcgttcgcgccggcaatacctgttttgatatttgtttggttttgcccagagagccctagatggctcatgaagaaacaccggtaccaggagtccttcgcctcgttctgcaagctccgtaattccgaaatgcaagctgcaagagatctatattacgcctaccgccaggtagccgaagagcacaacgctttcggcggcgtgagtcttgctaaacgagccatcgagctcttcacggttccccgtatccgccgtgccaccatcgcttctgcctggatcgtcatctcacagcaattcagcggtattaatatcatgtctttctattcttcaacgattttcgccgatgcagggtactcggagaaaagttgtcttctagcatctcttggatttggccttgttatgtttatctttgcgttcccagctgtatatacaatggacaccttcggacgacgcaacttactgctatcgacatttccaaatatggcctggtgtttgcttgttgtcggattcctatttctattgcctgaagcctcaggtgcaagaatcccgctaattgcactttttatatatcttttcacagcgctttacggtcctggtattggcccaatgccatctatctacttttcggaatcgttcccactttcgcatcgcgagatcggcgcggcgttcacaatctgtgtcaacaatactgtcggcagcgccctcacgttatcatttccttcactcctagcaaatatagggccgacggcatcttttgggatttatgctgcgcttaatattgttgctttcattggagtttttttcattgttagagagaccaaacaacgaacgctcgaagagttagactacatttttggtgtccctacagcatggcatatttcgtatcagtttcggacatggcttccttggatggtcaagcggtacatatttcggcagaaggcgacattggagcctctttatcatactgagggtccctctgggacttactcgaaggcaaaatctggctctgacgcaacacgggatgtgtag

SEQ ID NO: 21458 - protein, 611 aa, Muscodor strobelii
  misc_feature: SGI Peptide ID NO. 567265
  misc_feature (113)..(505): Pfam Id: PF07690 Pfam Desc: Major Facilitator Superfamily
  misc_feature (109)..(554): Pfam Id: PF00083 Pfam Desc: Sugar (and other) transporter
  misc_feature (3)..(592): NCBI GI: 261356444 Blast Desc: proton myo-inositol cotransporter [Verticillium albo-atrum VaMs.102]
  misc_feature (3)..(593): NCBI GI: 58264198 Blast Desc: hexose transport-related protein [Cryptococcus neoformans var. neoformans JEC21] gi|134107764|ref|XP_777493.1| CNBB0670 [Cryptococcus neoformans var. neoformans B-3501A] var.
  misc_feature (21)..(590): NCBI GI: 170096338 Blast Desc: [Laccaria bicolor S238N-H82] gi|164645757|gb|EDR10004.1| [Laccaria bicolor S238N-H82]
  misc_feature (4)..(605): NCBI GI: 169867172 Blast Desc: CC1G_02630 [Coprinopsis cinerea okayama7#130] gi|116498719|gb|EAU81614.1| CC1G_02630 [Coprinopsis cinerea okayama7#130]
  misc_feature (17)..(590): NCBI GI: 242780591 Blast Desc: galactose-proton symport, [Talaromyces stipitatus ATCC 10500] gi|218719775|gb|EED19194.1| galactose-proton symport, [Talaromyces stipitatus ATCC 10500]
  misc_feature (16)..(590): NCBI GI: 121705830 Blast Desc: sugar transporter [Aspergillus clavatus NRRL 1] gi|119399324|gb|EAW09752.1| sugar transporter [Aspergillus clavatus NRRL 1]
  misc_feature (7)..(608): NCBI GI: 240272922 Blast Desc: sugar transporter [Ajellomyces capsulatus H143]
  misc_feature (7)..(608): NCBI GI: 225557931 Blast Desc: sugar transporter [Ajellomyces capsulatus G186AR]
  misc_feature (22)..(594): NCBI GI: 169615893 Blast Desc: SNOG_11113 [Phaeosphaeria nodorum SN15] gi|111060492|gb|EAT81612.1| SNOG_11113 [Phaeosphaeria nodorum SN15]
  misc_feature (3)..(596): NCBI GI: 212526342 Blast Desc: galactose-proton symport, [Penicillium marneffei ATCC 18224] gi|210072726|gb|EEA26813.1| galactose-proton symport, [Penicillium marneffei ATCC 18224]
MGSSDAGDPRKLPVFAHVECIQQDYANNVNARILNPLIGVSKGDLKTQVQAFCNEYGFQDKLEIFYRGALAAQNAENFDEIEELITEDKECLRKEITHRWHLPKHLYYTIALCSLGSAIQGWDNTGANGANLSFPREFGIEDNTWLVGAINSAPTLFGLLSAWAADPINNALGRRGTIFLSGLFCVFPVLAQAFTRNWWELLITRLFIGLGAGIKISTIPVFTAEVAPAVVRGGIVTSFQLWVAFGILAGQASNLIFYKIGDLAWRFQLAAAFAPAIPVLIFVWFCPESPRWLMKKHRYQESFASFCKLRNSEMQAARDLYYAYRQVAEEHNAFGGVSLAKRAIELFTVPRIRRATIASAWIVISQQFSGINIMSFYSSTIFADAGYSEKSCLLASLGFGLVMFIFAFPAVYTMDTFGRRNLLLSTFPNMAWCLLVVGFLFLLPEASGARIPLIALFIYLFTALYGPGIGPMPSIYFSESFPLSHREIGAAFTICVNNTVGSALTLSFPSLLANIGPTASFGIYAALNIVAFIGVFFIVRETKQRTLEELDYIFGVPTAWHISYQFRTWLPWMVKRYIFRQKATLEPLYHTEGPSGTYSKAKSGSDATRDV

SEQ ID NO: 21459 - DNA, 419 bp, Muscodor strobelii
  misc_feature: SGI EST ID NO. CUFF.50373.0
  misc_feature: Variant of the nucleotide sequence at SEQ ID NO 21457
tgctaaacgagccatcgagctcttcacggttccccgtatccgccgtgccaccatcgcttctgcctggatcgtcatctcacagcaattcagcggtattaatatcatgtctttctattcttcaacgattttcgccgatgcagggtactcggagaaaagttgtcttctagcatctcttggatttggccttgttatgtttatctttgcgttcccagctgtatatacaatggacaccttcggacgacgcaacttactgctatcgacatttccaaatatggcctggtgtttgcttgttgtcggattcctatttctattgcctgaagcctcaggtgcaagaatcccgctaattgcactttttatatatcttttcacagcgctttacggtcctggtattggcccaatgccatctatctacttttcgg

SEQ ID NO: 21460 - DNA, 1113 bp, Muscodor strobelii
  misc_feature: SGI cDNA ID NO. 567266
  misc_feature: Elevated expression when VOC is produced
  misc_feature: Encodes the peptide sequence at SEQ ID NO 21461
atgggagcccttgcggagcaaacctggctggaaaagctggaagaacagctgaatgtcgatgtcgactggatggatcctgaatacgtcaagaacggcattgctaacttttttgtaatgcccatcaaaccccatgatcagacaagcaaccaactttgggtgaatatccagctacaccacgagagcaacgctgagcttctcaagcaaacagctgaggaattgaaagaccaaggatggttggcggccgtgttaatgtgcaagaaaaacattgacaatattcgaggtcgcgtattactgcagacactaccgtcaaaagcatacgataccgagaagaccctcgatcacgcgcgcctatacgacaaagaattcgcacgtgcaggcatcggcagagaccgttactgcatcaaaataccctctacaggaccagcactcaacgcagccaagattctgacgcaagaaggtattccaacactaggtactgcattatttggactgcctcaagctatcgcgtgtagtcaagctggttgcctttatatcagcccatattacaacgagacgcgtgcccatgacgacttaaaactttggcctgatgtgaaagatcccgccaaggagcatcctaatagccctcgcatcatccatatcatcgagacatataagcgtctgtacaaggagaccggtaaggagcagccgctcgtcaaaaacgctagtttcatcacaccaaaggaggcaatggccgcagcagagcttgggtgccattccgctactatttcccacaccgtactcaacgagttggcgaaattaaagtacaatgccgctgaacagccaggcgaaggcacacccaagcccgtgcatgtttacaagaatgcgggtccgacacccgcacggctcattgagctatcgaagattgatcccttaacggccaattttgatggcaaactagccagtacggacatcgactacctcgcgaacggaggcgctgagcttgagaaggctatcaagaacgatcccattgctaccaatcgtctcaaggatgctctgacgcttttcattggtgatgatgagaacggcgagatcagtagccgaaagcattgcgaggaagccttgaggaatgtgtaa

SEQ ID NO: 21461 - protein, 370 aa, Muscodor strobelii
  misc_feature: SGI Peptide ID NO. 567266
  misc_feature (30)..(315): Pfam Id: PF00923 Pfam Desc: Transaldolase
  misc_feature (105)..(181): Pfam Id: PF00923 Pfam Desc: Transaldolase
  misc_feature (1)..(367): NCBI GI: 261356443 Blast Desc: transaldolase [Verticillium albo-atrum VaMs.102]
  misc_feature (24)..(370): NCBI GI: 145607794 Blast Desc: MGG_10076 [Magnaporthe grisea 70-15] gi|145015290|gb|EDJ99826.1| MGG_10076 [Magnaporthe grisea 70-15]
  misc_feature (1)..(349): NCBI GI: 67539886 Blast Desc: AN6113.2 [Aspergillus nidulans FGSC A4] gi|40738898|gb|EAA58088.1| AN6113.2 [Aspergillus nidulans FGSC A4] gi|259479697|tpe|CBF70159.1| TPA: conserved [Aspergillus FGSC
  misc_feature (1)..(364): NCBI GI: 134107762 Blast Desc: CNBB0660 [Cryptococcus neoformans var. neoformans B-3501A] gi|50260184|gb|EAL22845.1| CNBB0660 [Cryptococcus neoformans var. neoformans B-3501A]
  misc_feature (1)..(364): NCBI GI: 58264202 Blast Desc: transaldolase [Cryptococcus neoformans var. neoformans JEC21] gi|57223907|gb|AAW41950.1| transaldolase, [Cryptococcus neoformans var. neoformans JEC21]
  misc_feature (1)..(353): NCBI GI: 242799010 Blast Desc: transaldolase, [Talaromyces stipitatus ATCC 10500] gi|218716631|gb|EED16052.1| transaldolase, [Talaromyces stipitatus ATCC 10500]
  misc_feature (4)..(356): NCBI GI: 115391823 Blast Desc: [Aspergillus terreus NIH2624] gi|114194340|gb|EAU36040.1| [Aspergillus terreus NIH2624]
  misc_feature (15)..(370): NCBI GI: 71024741 Blast Desc: UM06453.1 [Ustilago maydis 521] gi|46101927|gb|EAK87160.1| UM06453.1 [Ustilago maydis 521]
  misc_feature (143)..(348): NCBI GI: 238581037 Blast Desc: MPER_11386 [Moniliophthora perniciosa FA553] gi|215451792|gb|EEB90412.1| MPER_11386 [Moniliophthora perniciosa FA553]
  misc_feature (10)..(351): NCBI GI: 33592549 Blast Desc: transaldolase B [Bordetella pertussis Tohama I] gi|39932120|sp|Q7VY99.1|TAL_BORPE RecName: Full=Transaldolase gi|33572195|emb|CAE41741.1| transaldolase B [Bordetella pertussis
  misc_feature (10)..(351): SWISSPROT Homolog: EC 2.2.1.2 Transaldolase
  misc_feature: Useful for introducing or modulating the production of volatile compounds
MGALAEQTWLEKLEEQLNVDVDWMDPEYVKNGIANFFVMPIKPHDQTSNQLWVNIQLHHESNAELLKQTAEELKDQGWLAAVLMCKKNIDNIRGRVLLQTLPSKAYDTEKTLDHARLYDKEFARAGIGRDRYCIKIPSTGPALNAAKILTQEGIPTLGTALFGLPQAIACSQAGCLYISPYYNETRAHDDLKLWPDVKDPAKEHPNSPRIIHIIETYKRLYKETGKEQPLVKNASFITPKEAMAAAELGCHSATISHTVLNELAKLKYNAAEQPGEGTPKPVHVYKNAGPTPARLIELSKIDPLTANFDGKLASTDIDYLANGGAELEKAIKNDPIATNRLKDALTLFIGDDENGEISSRKHCEEALRNV

SEQ ID NO: 21462 - DNA, 1817 bp, Muscodor strobelii
  misc_feature: SGI EST ID NO. CUFF.50384.0
  misc_feature: Variant of the nucleotide sequence at SEQ ID NO 21460
agatgcccatcaaaccccatgatcagacaagcaaccaactttgggtgaatatccagctacaccacgagagcaacgctgagcttctcaagcaaacagctgaggaattgaaagaccaaggatggttggcggtctatacaagaatggccgtgttaatgtgcaagaaaaacattgacaatattcgaggtcgcgtattactgcagacactaccgtcaaaagcatacgataccgagaagaccctcgatcacgcgcgcctatacgacaaagaattcgcacgtgcaggcatcggcagagaccgttactgcatcaaaataccctctacaggaccagcactcaacgcagccaagattctgacgcaagaaggtattccaacactaggtactgcattatttggactgcctcaagctatcgcgtgtagtcaagctggttgcctttatatcagcccatattacaacgagacgcgtgcccatgacgacttaaaactttggcctgatgtgaaagatcccgccaaggagcatcctaatagccctcgcatcatccatatcatcgagacatataagcgtctgtacaaggagaccggtaaggagcagccgctcgtcaaaaacgctagtttcatcacaccaaaggaggcaatggccgcagcagagcttgggtgccattccgctactatttcccacaccgtactcaacgagttggcgaaattaaagtacaatgccgctgaacagccaggcgaaggcacacccaagcccgtgcatgtttacaagaatgcgggtccgacacccgcacggctcattgagctatcgaagattgatcccttaacggccaattttgatggcaaactagccagtacggacatcgactacctcgcgaacggaggcgctgagcttgagaaggctatcaagaacgatcccattgctaccaatcgtctcaaggatgctctgacgcttttcattggtgatgatgagaacggcgagatcagtagccgaaagcattgcgaggaagccttgaggaatgtgtaaataacgacgtcttttgcccttcgtcactagctttgacaaaataagatagcttcgcttgaatctagtgttgattatcctggtcgatcaatgggtttccaatatgatcgtgtgacatgtgcatgcccggcagacgatgacaatggattcagcatctgatttatggtggcatataatttagaggcactggcgcctgcatgaaaccaggctgcgggaaaccaccatgattaaatgtttgctctggctcgtatgacatatacatagggtcttgctgtgtcacattaacattgaactgggctggatggtttggttgaggatcctggtatgttggtatggtcactggatttggagcaggcatattactaggtccactgtcgcctgcaggctgatttggatttaagtcatagactacatctccgaggcttgagttctcgaagctgctccaagacaggtctgcgccggtagtgtttcttcgtaatggaggaatacctggtccacgaagcggattggcaacaaaagcgtcgggccttttactggtaacagataatgaagtaccagtaggctgcagcactgttggtaattcgttcgacacgacatcggctcgtgtttcaatatcttcatcgtgacgcgtcaattgattcatgggattagcgtgtcgcggttccatcccagcgccgcttctccactgattcacttcgaccagaagctggtcgcgctcggttgtcatagcttgaaggtgttctgcggtagatctaatctggtctcgctgcgaggaaataaaagatatactctcgtctacaacca

SEQ ID NO: 21463 - DNA, 882 bp, Muscodor strobelii
  misc_feature: SGI cDNA ID NO. 567267
  misc_feature: Elevated expression when VOC is produced
  misc_feature: Encodes the peptide sequence at SEQ ID NO 21464
atgtcgtcaagcggccacgatgacgaaccttctccgaggctgaggagcccagtcggtgccacctccagcaactcccgcactaaaaagaaacgagttcgaaatttcaccgcagacgatcgcgctgcgcatcgtattttcgaaaagtcgagacgagaggccttcaaggaagccttgaccaaccttgcagctcttctcccggccctgtcagacacagatccccaacggctgtcaaagcatgtggttgtagacgagagtatatcttttatttcctcgcagcgagaccagattagatctaccgcagaacaccttcaagctatgacaaccgagcgcgaccagcttctggtcgaagtgaatcagtggagaagcggcgctgggatggaaccgcgacacgctaatcccatgaatcaattgacgcgtcacgatgaagatattgaaacacgagccgatgtcgtgtcgaacgaattaccaacagtgctgcagcctactggtacttcattatctgttaccagtaaaaggcccgacgcttttgttgccaatccgcttcgtggaccaggtattcctccattacgaagaaacactaccggcgcagacctgtcttggagcagcttcgagaactcaagcctcggagatgtagtctatgacttaaatccaaatcagcctgcaggcgacagtggacctagtaatatgcctgctccaaatccagtgaccataccaacataccaggatcctcaaccaaaccatccagcccagttcaatgttaatgtgacacagcaagaccctatgtatatgtcatacgagccagagcaaacatttaatcatggtggtttcccgcagcctggtttcatgcaggcgccagtgcctctaaattatatgccaccataa

SEQ ID NO: 21464 - protein, 293 aa, Muscodor strobelii
  misc_feature: SGI Peptide ID NO. 567267
  misc_feature (39)..(93): Pfam Id: PF00010 Pfam Desc: Helix-loop-helix DNA-binding domain
  misc_feature (36)..(137): NCBI GI: 71004850 Blast Desc: UM00944.1 [Ustilago maydis 521] gi|46096895|gb|EAK82128.1| UM00944.1 [Ustilago maydis 521]
  misc_feature: Useful for introducing or modulating the production of volatile compounds
MSSSGHDDEPSPRLRSPVGATSSNSRTKKKRVRNFTADDRAAHRIFEKSRREAFKEALTNLAALLPALSDTDPQRLSKHVVVDESISFISSQRDQIRSTAEHLQAMTTERDQLLVEVNQWRSGAGMEPRHANPMNQLTRHDEDIETRADVVSNELPTVLQPTGTSLSVTSKRPDAFVANPLRGPGIPPLRRNTTGADLSWSSFENSSLGDVVYDLNPNQPAGDSGPSNMPAPNPVTIPTYQDPQPNHPAQFNVNVTQQDPMYMSYEPEQTFNHGGFPQPGFMQAPVPLNYMPP

SEQ ID NO: 21465 - DNA, 2249 bp, Muscodor strobelii
  misc_feature: SGI EST ID NO. CUFF.50385.2
  misc_feature: Variant of the nucleotide sequence at SEQ ID NO 21463
ctggaaccgacaacagacaagtgcgagccgacgcgagagtgtggagatggcgctgaaggaattcccattcaaatggtcacgcatgccgacttgcgcttcagctgagtcggtcgatgcaaagccttctcctcatgttgcccaacgtcaagcctccctcgttcatctctgctaacgagctcatggggtcgcaaatctttctcggagcgcggcaagagatgttttccctctatcgacatcaacagtagacgtatttatcaaatgtcgtcaagcggccacgatgacgaaccttctccgaggctgaggagcccagtcggtgccacctccagcaactcccgcactaaaaagaaacgagttcgaaatttcaccgcagacgatcgcgctgcgcatcgtattttcgaaaagtcgagacgagaggccttcaaggaagccttgaccaaccttgcagctcttctcccggccctgtcagacacagatccccaacggctgtcaaagcatgtggttgtagacgagagtatatcttttatttcctcgcagcgagaccagattagatctaccgcagaacaccttcaagctatgacaaccgagcgcgaccagcttctggtcgaagtgaatcagtggagaagcggcgctgggatggaaccgcgacacgctaatcccatgaatcaattgacgcgtcacgatgaagatattgaaacacgagccgatgtcgtgtcgaacgaattaccaacagtgctgcagcctactggtacttcattatctgttaccagtaaaaggcccgacgcttttgttgccaatccgcttcgtggaccaggtattcctccattacgaagaaacactaccggcgcagacctgtcttggagcagcttcgagaactcaagcctcggagatgtagtctatgacttaaatccaaatcagcctgcaggcgacagtggacctagtaatatgcctgctccaaatccagtgaccataccaacataccaggatcctcaaccaaaccatccagcccagttcaatgttaatgtgacacagcaagaccctatgtatatgtcatacgagccagagcaaacatttaatcatggtggtttcccgcagcctggtttcatgcaggcgccagtgcctctaaattatatgccaccataaatcagatgctgaatccattgtcatcgtctgccgggcatgcacatgtcacacgatcatattggaaacccattgatcgaccaggataatcaacactagattcaagcgaagctatcttattttgtcaaagctagtgacgaagggcaaaagacgtcgttatttacacattcctcaaggcttcctcgcaatgctttcggctactgatctcgccgttctcatcatcaccaatgaaaagcgtcagagcatccttgagacgattggtagcaatgggatcgttcttgatagccttctcaagctcagcgcctccgttcgcgaggtagtcgatgtccgtactggctagtttgccatcaaaattggccgttaagggatcaatcttcgatagctcaatgagccgtgcgggtgtcggacccgcattcttgtaaacatgcacgggcttgggtgtgccttcgcctggctgttcagcggcattgtactttaatttcgccaactcgttgagtacggtgtgggaaatagtagcggaatggcacccaagctctgctgcggccattgcctcctttggtgtgatgaaactgcccaatgtcaatttgatgcctcttaactaccattcaggtaacacacctagcgtttttgacgagcggctgctccttaccggtctccttgtacagacgcttatatgtctcgatgatatggatgatgcgagggctattaggatgctccttggcgggatctttcacatcaggccaaagttttaagtcgtcatgggcacgcgtctctgttcaccaaataagccaacatccaagcattattcaatcattggtgcagtacactgaccgttgtaatatgggctgatataaaggcaaccagcttgactacacgcgatagcttgaggcagtccaaataatgcagtacctagtgttggaataccttcttgcgtcagaatcttggctgcgttgagtgctggtcctgtagagggtattttgatgcagtaacggtctctgccgatgcctgcacgtgcgaattctttgtcgtataggcgcgcgtgatcgagggtcttctcggtatcgtatgcttttgacggtagtgtctgcagtaatacgcgacctcgaatattg

SEQ ID NO: 21466 - DNA, 579 bp, Muscodor strobelii
  misc_feature: SGI cDNA ID NO. 567268
  misc_feature: Encodes the peptide sequence at SEQ ID NO 21467
atgaccagtgacagtcgagaacagccgccggaatggcaccacttcgctgctatttcgtggtgcgcacaacatttgaaaagtagcggcatcatatgttggacgcctacttattggcaccctgttaaagagcttagtcgcccccatgcaaaggaccatctatggaagacaatcctgagcagagaggatgcaatttctgcttatctgttcttctacgagaatccctcccacccaaatcatcgggtggatgagttgaaggcattcatcacccttgaatggggtgtcggcggctttccggggatcgcacatggaggtatcacgactgtgatatttgacgagatgctagggttacatggaactctcaacaatcagttaggaacactgattgggtcgcatatgaccctgtcgctgaccacggtcttcctcaaacccgtcaaagttccaagcacagtcctggttatctcgacaattgtgaggacggagaatcggaaattgaacttcgccgcagagattcaggacgaagaggagaatgtgcttgccagggcagaaggcttatttatcagagtgattggcaggctctga

SEQ ID NO: 21467 - protein, 192 aa, Muscodor strobelii
  misc_feature: SGI Peptide ID NO. 567268
  misc_feature (98)..(179): Pfam Id: PF03061 Pfam Desc: Thioesterase superfamily
  misc_feature (10)..(192): NCBI GI: 261352324 Blast Desc: conserved [Verticillium albo-atrum VaMs.102]
  misc_feature (11)..(188): NCBI GI: 171694461 Blast Desc: protein product [Podospora anserina] gi|170947179|emb|CAP73984.1| protein product [Podospora anserina]
  misc_feature (11)..(186): NCBI GI: 156060749 Blast Desc: SS1G_02517 [Sclerotinia sclerotiorum 1980] gi|154699921|gb|EDN99659.1| SS1G_02517 [Sclerotinia sclerotiorum 1980]
  misc_feature (11)..(192): NCBI GI: 256726796 Blast Desc: NECHADRAFT_76148 [Nectria haematococca mpVI 77-13-4]
  misc_feature (2)..(186): NCBI GI: 145610400 Blast Desc: MGG_11096 [Magnaporthe grisea 70-15] gi|149209495|ref|XP_001522122.1| MGCH7_ch7g231 [Magnaporthe grisea 70-15] gi|86196186|gb|EAQ70824.1| MGCH7_ch7g231 grisea
  misc_feature (15)..(179): NCBI GI: 261353832 Blast Desc: conserved [Verticillium albo-atrum VaMs.102]
  misc_feature (11)..(182): NCBI GI: 46136353 Blast Desc: FG09692.1 [Gibberella zeae PH-1]
  misc_feature (11)..(175): NCBI GI: 85090356 Blast Desc: NCU09853 [Neurospora crassa OR74A] gi|28919735|gb|EAA29141.1| [Neurospora crassa OR74A]
  misc_feature (11)..(192): NCBI GI: 115397829 Blast Desc: conserved [Aspergillus terreus NIH2624] gi|114192697|gb|EAU34397.1| conserved [Aspergillus terreus NIH2624]
  misc_feature (47)..(192): NCBI GI: 145615408 Blast Desc: MGG_05567 [Magnaporthe grisea 70-15] gi|145022239|gb|EDK06259.1| MGG_05567 [Magnaporthe grisea 70-15]
MTSDSREQPPEWHHFAAISWCAQHLKSSGIICWTPTYWHPVKELSRPHAKDHLWKTILSREDAISAYLFFYENPSHPNHRVDELKAFITLEWGVGGFPGIAHGGITTVIFDEMLGLHGTLNNQLGTLIGSHMTLSLTTVFLKPVKVPSTVLVISTIVRTENRKLNFAAEIQDEEENVLARAEGLFIRVIGRL

SEQ ID NO: 21468 - DNA, 720 bp, Muscodor strobelii
  misc_feature: SGI EST ID NO. CUFF.50391.0
  misc_feature: Variant of the nucleotide sequence at SEQ ID NO 21466
tgcaatttctgcttatctgttcttctacgagaatccctcccacccaaatcatcgggtggatgagttgaaggcattcatcacccttgaatggggtgtcggcggctttccggggatcgcacatggaggtatcacgactgtgatatttgacgagatgctagggttacatggaactctcaacaatcagttaggaacactgattgggtcgcatatgaccctgtcgctgaccacggtcttcctcaaacccgtcaaagttccaagcacagtcctggttatctcgacaattgtgaggacggagaatcggaaattgaacttcgccgcagagattcaggacgaagaggagaatgtgcttgccagggcagaaggcttatttatcagagtgattggcaggctctgataagggaccgagacgttagacgtttagaagaagccgcatctgaacaaacgttgcgtaacttctagataaaccaccacatggacccccatccacataatgacgcggtcctcactaacgaacctggaaacaaagataatgactccgagatgtctcgtgtcagtctcttcttcctacgtggattttgcgtgtctcgtctcggcaaacaataatcacaccctgtcgtcggcaagctcgtccgaaatgttacaggaaatgtgtgctacacaggtggctcatcttatcctaccacccgagaaagctcggtgcatttcgccacgaaagttgag

SEQ ID NO: 21469 - DNA, 828 bp, Muscodor strobelii
  misc_feature: SGI cDNA ID NO. 567269
  misc_feature: Encodes the peptide sequence at SEQ ID NO 21470
atgcggcaagttctcacgaccggtcttctcctactcgacgcacatgtcgcagcacatggctacgtgcaacagattcttcttggcgacaatttagttgatggacatagtactaacttctttgtaacttggaacccttacaaggatccccagaaggtgccggccgtgagcaagatcaccaggcacttcctcgataacggacccgtcactgatgacatgttcacgactgatgccatcacttgtaattacggcgctaaggggcaatctaacaacactcccgtcaatgtgactgctgaggtacctgccggtagcaaggttactttctactggaccgactggcagtcagatcacccaggcccaatcatgacatacctcgccgactgtgggggcccttgtgaggacttctctggtgccactggcgatgtctgggttaagattcaccaggcgggctacgacgcctccttcgatgtgccgtgggcgtcaaaaagattgccgacacaaaacagtacctggacagtaacattgccttctagcttagctcccggcgagtacatattgcgccatgagatcctcggcctccagcgcacaaacacgaacggtagtctagctcaattctacccaggatgccatcagatcaccgtcattggtagtggctccgcgaccctccctaagggcattgcgctaccaggggcataccagccggatgacacaacaagcatattccttgagtatcgcgatatatcggcagataacccatacacagcgccgggtggacaggtctggggggataacggctggtccgatgagcagaatatggatgccactcagtaa

SEQ ID NO: 21470 - protein, 275 aa, Muscodor strobelii
  misc_feature: SGI Peptide ID NO. 567269
  misc_feature (9)..(254): Pfam Id: PF03443 Pfam Desc: Glycosyl hydrolase family 61
  misc_feature (87)..(235): Pfam Id: PF03443 Pfam Desc: Glycosyl hydrolase family 61
  misc_feature (25)..(267): NCBI GI: 21694047 Blast Desc: family 61 endoglucanase [Phanerochaete chrysosporium]
  misc_feature (1)..(262): NCBI GI: 116199041 Blast Desc: CHGG_07676 [Chaetomium globosum CBS 148.51] gi|88178955|gb|EAQ86423.1| CHGG_07676 [Chaetomium globosum CBS 148.51]
  misc_feature (1)..(262): NCBI GI: 171693141 Blast Desc: protein product [Podospora anserina] gi|170946519|emb|CAP73320.1| protein product [Podospora anserina]
  misc_feature (1)..(244): NCBI GI: 256726169 Blast Desc: NECHADRAFT_44104 [Nectria haematococca mpVI 77-13-4]
  misc_feature (1)..(260): NCBI GI: 209570284 Blast Desc: [Glomerella graminicola]
  misc_feature (9)..(260): NCBI GI: 85107660 Blast Desc: NCU07898 [Neurospora crassa OR74A] gi|28924020|gb|EAA33178.1| [Neurospora crassa OR74A]
  misc_feature (9)..(260): NCBI GI: 154291544 Blast Desc: BC1G_15017 [Botryotinia fuckeliana B05.10] gi|150846733|gb|EDN21926.1| BC1G_15017 [Botryotinia fuckeliana B05.10]
  misc_feature (3)..(260): NCBI GI: 169862699 Blast Desc: CC1G_09526 [Coprinopsis cinerea okayama7#130] gi|116500962|gb|EAU83857.1| CC1G_09526 [Coprinopsis cinerea okayama7#130]
  misc_feature (9)..(260): NCBI GI: 169855583 Blast Desc: CC1G_02194 [Coprinopsis cinerea okayama7#130] gi|116504540|gb|EAU87435.1| CC1G_02194 [Coprinopsis cinerea okayama7#130]
  misc_feature (5)..(260): NCBI GI: 169855585 Blast Desc: CC1G_02195 [Coprinopsis cinerea okayama7#130] gi|116504541|gb|EAU87436.1| CC1G_02195 [Coprinopsis cinerea okayama7#130]
  misc_feature (5)..(260): SWISSPROT Homolog: EC 3.2.1.4 Cellulase
MRQVLTTGLLLLDAHVAAHGYVQQILLGDNLVDGHSTNFFVTWNPYKDPQKVPAVSKITRHFLDNGPVTDDMFTTDAITCNYGAKGQSNNTPVNVTAEVPAGSKVTFYWTDWQSDHPGPIMTYLADCGGPCEDFSGATGDVWVKIHQAGYDASFDVPWASKRLPTQNSTWTVTLPSSLAPGEYILRHEILGLQRTNTNGSLAQFYPGCHQITVIGSGSATLPKGIALPGAYQPDDTTSIFLEYRDISADNPYTAPGGQVWGDNGWSDEQNMDATQ

SEQ ID NO: 21471 - DNA, 517 bp, Muscodor strobelii
  misc_feature: SGI EST ID NO. CUFF.50404.0
  misc_feature: Variant of the nucleotide sequence at SEQ ID NO 21469
gggggcccttgtgaggacttctctggtgccactggcgatgtctgggttaagattcaccaggcgggctacgacgcctccttcgatgtgccgtgggcgtcaaaaagattgccgacacaaaacagtacctggacagtaacattgccttctagcttagctcccggcgagtacatattgcgccatgagatcctcggcctccagcgcacaaacacgaacggtagtctagctcaattctacccaggatgccatcagatcaccgtcattggtagtggctccgcgaccctccctaagggcattgcgctaccaggggcataccagccggatgacacaacaagcatattccttgagtatcgcgatatatcggcagataacccatacacagcgccgggtggacaggtctggggggataacggctggtccgatgagcagaatatggatgccactcagtaatgtgcgatggctgagctgcagttctattgtatgtttctgatgagcttatgtagaaatacatggatatgac

SEQ ID NO: 21472 - DNA, 1746 bp, Muscodor strobelii
  misc_feature: SGI cDNA ID NO. 567270
  misc_feature: Encodes the peptide sequence at SEQ ID NO 21473
atgttgaggactattctgggagttggcagcttggctagcctggctcttggtcaagctgcaccattggtagatcttggctacgcagtatatcaaggcacatacaattctcaatctgaccagaacattttttacggatttgcggctcagccagctcgttggcaactaccaacagctcctatggtggaccgaagccaggttcttcctgccacctcatacgctccaatatgtcctcaagttgggcctgccccgagtagctcaactagtcagccttcgggctccgaggattgtcttttcttaaatgttcaagctccggcaggaaaaacaggactgcctgtaatggtatggatccatggcggcggctatggtggtggaagcgcgcaaatggaatgggagaacttaatagtctcgaacggtaattcattcgtagtcgttaccattcagtatcgacttggcgcatttgggtttctttcgtccgctgatcttgtcgcaaatggtggtgttccaaatgtcggcctgcacgaccagcgatttgctctgcagtgggtaaaggaccacatcgatcaatttggaggcgatcccacgaaagtaacaatctacggtgagtccgctggaggaggttccgtgatgctgcaggcgatggcgaatggtggcaccgaaggaaacgcattgttctccggtgcaatcccgtcctcgccatatctgccaacgcaatggaactacgatggagtttggcccgaaacctcttatagtaaactccttaccgcagctgggtgctcttcatatagctgtcttgcgaaaacagtcgactcaagtacacttcagcaggctaataacctggtaaactcgcagggagatttcggccagtggaccttcattccagtcacagatggcacattggttcgaaaattgccttcagaacaactcacacttgacaagaaagtcaatggaaacacactgctcgtgggcaataatgcgaatgaaggggtggttttcacgcctcaaaatataacaaatcaagcagactttgtgacgtttgtgctcacaaactatcccgatctcagtgagctcaacttgacgagcattgtggcattatattccgtaccggataactatccatctgtcttcgaaaactcggatggtcttgcggcgccattctcgacgagcaactccgaatttgcagttggctggcagcaggccgctaacaatctctatgctgagtccacctttgtatgtcctgcttactggatggcggacgcatactctgaagagggaagttcctggaagtatcaatactcagtcacaccgtcgctgcacggagccgatctcgagcccctttatgatccttacaccacgtcaggcaccggtacaaacgcggtattccgcgttgctatgcagcagatatggggtaacttcatcaccacaggcaaccctactctcactacagcgcaaaatcggcctacggatggcggcaacatcacagccgccatgacacgagtctggacccagtggggcggatcagaaggcaaggattcgatgctcaatttgaacatgaccggtggctcgccagtggttacgcagcagacctatgatggagtcccgattaacgtcgttagttatatggacagcaacggtacatgcactcccctgaagactgacttttctctcgttgaaggatattcatgggaaggtggtcgtggtgcaagatgtcagttgtgggctgatctaggtccatgggctatgatgtga

SEQ ID NO: 21473 - protein, 581 aa, Muscodor strobelii
  misc_feature: SGI Peptide ID NO. 567270
  misc_feature (1)..(532): Pfam Id: PF00135 Pfam Desc: Carboxylesterase
  misc_feature (1)..(477): Pfam Id: PF00135 Pfam Desc: Carboxylesterase
  misc_feature (46)..(576): NCBI GI: 156048032 Blast Desc: SS1G_08747 [Sclerotinia sclerotiorum 1980] gi|154693144|gb|EDN92882.1| SS1G_08747 [Sclerotinia sclerotiorum 1980]
  misc_feature (23)..(576): NCBI GI: 242777825 Blast Desc: carboxylesterase, [Talaromyces stipitatus ATCC 10500] gi|218722731|gb|EED22149.1| carboxylesterase, [Talaromyces stipitatus ATCC 10500]
  misc_feature (113)..(576): NCBI GI: 154305906 Blast Desc: BC1G_08184 [Botryotinia fuckeliana B05.10] gi|150853069|gb|EDN28261.1| BC1G_08184 [Botryotinia fuckeliana B05.10]
  misc_feature (23)..(576): NCBI GI: 189190722 Blast Desc: acetylcholinesterase precursor [Pyrenophora tritici-repentis Pt-1C-BFP] gi|187973306|gb|EDU40805.1| acetylcholinesterase precursor [Pyrenophora tritici-repentis
  misc_feature (23)..(576): NCBI GI: 212533339 Blast Desc: carboxylesterase, [Penicillium marneffei ATCC 18224] gi|210072190|gb|EEA26279.1| carboxylesterase, [Penicillium marneffei ATCC 18224]
  misc_feature (13)..(577): NCBI GI: 85078059 Blast Desc: NCU08752 [Neurospora crassa OR74A] gi|28917148|gb|EAA26865.1| [Neurospora crassa OR74A]
  misc_feature (1)..(572): NCBI GI: 169777437 Blast Desc: [Aspergillus oryzae RIB40] gi|83771921|dbj|BAE62051.1| protein product [Aspergillus oryzae]
  misc_feature (3)..(572): NCBI GI: 121717237 Blast Desc: carboxylesterase family protein [Aspergillus clavatus NRRL 1] gi|119404206|gb|EAW14623.1| carboxylesterase family protein [Aspergillus clavatus NRRL 1]
  misc_feature (21)..(571): NCBI GI: 145234378 Blast Desc: An02g14290 [Aspergillus niger] gi|134057506|emb|CAK48860.1| protein product [Aspergillus niger]
  misc_feature (1)..(572): NCBI GI: 238494574 Blast Desc: carboxylesterase, [Aspergillus flavus NRRL3357] gi|220695173|gb|EED51516.1| carboxylesterase, [Aspergillus flavus NRRL3357]
  misc_feature (94)..(365): SWISSPROT Homolog: EC 3.1.1.3 Triacylglycerol lipase
MLRTILGVGSLASLALGQAAPLVDLGYAVYQGTYNSQSDQNIFYGFAAQPARWQLPTAPMVDRSQVLPATSYAPICPQVGPAPSSSTSQPSGSEDCLFLNVQAPAGKTGLPVMVWIHGGGYGGGSAQMEWENLIVSNGNSFVVVTIQYRLGAFGFLSSADLVANGGVPNVGLHDQRFALQWVKDHIDQFGGDPTKVTIYGESAGGGSVMLQAMANGGTEGNALFSGAIPSSPYLPTQWNYDGVWPETSYSKLLTAAGCSSYSCLAKTVDSSTLQQANNLVNSQGDFGQWTFIPVTDGTLVRKLPSEQLTLDKKVNGNTLLVGNNANEGVVFTPQNITNQADFVTFVLTNYPDLSELNLTSIVALYSVPDNYPSVFENSDGLAAPFSTSNSEFAVGWQQAANNLYAESTFVCPAYWMADAYSEEGSSWKYQYSVTPSLHGADLEPLYDPYTTSGTGTNAVFRVAMQQIWGNFITTGNPTLTTAQNRPTDGGNITAAMTRVWTQWGGSEGKDSMLNLNMTGGSPVVTQQTYDGVPINVVSYMDSNGTCTPLKTDFSLVEGYSWEGGRGARCQLWADLGPWAMM

SEQ ID NO: 21474 - DNA, 1272 bp, Muscodor strobelii
  misc_feature: SGI cDNA ID NO. 567271
  misc_feature: Encodes the peptide sequence at SEQ ID NO 21475
atgaacatcctcctagctttctctactacttttacagttgcgaatctatactatccacagcctattttaaatgtcatcgccgaagattttggcgttagctacgagcgttcttccaacgtggcaacgttgtcgcaagccggctatgcagttggattgctcttcttatgcccacttgctgatatggtcccgagaagaccattcattttgttcttgatatggcttactgctacattgtggatcggattatgtctaacgaaaagttttgatgcatttcttagcttgtcctttctgtgcggcgtaggcaccgttacacctcaactaatgctcccattagtaggtgatcttgctccagccaaccgccgtgccgcctctctttccattgttgtgtcaggattagccctaggcctattaattgccagagtgctatccggtatcgtcgcaaacttcacgtattggagaaacatctactggcttgctctcggggcccaatacttgacgttcattctcctgttcttcacgctaccagactacccagcgaagaacaaaggcctaaattatttcaaagcactatggcaaatggcaatgatggtcgtcacggagccgttgctcactcagaattgtcttatgggtttcttgctaagcggtgcattcacaaacttctggacaacgttgacgtttcttctggcggatcctccgtataattacagttccttggatattggcctttttgcatttataggaatagcggtgatcacgctggcacccgtatggtcccggctcgtcacagatagatttgtctttttgttttcaagcatagtgggtctttcgttcgaactcgttggtattgtgatagggacatttatcggccctttcacagtcgctggtcccattatcgaggcaatcttcatggacacaggagcgaatttcacacacacagcgaaccggagtaatgtgtataacttagaccccaaagcacgcaatcgagtgaataccgcgtatatggtgttcagctttgccggacaactaacaggtactgcccttgggaatcgactacattgtgctaacttcatcgcaatcgcgttcatcggtgccggcattctcattggcctagctaggggtcctagagagaccaggtggtttggttggaggggaggatggaacatcagaaaagatgaagacattgcgaagaaagccgcacaggaacaagaggcagtagagacaagcgaatctccgttgaaggaagataagcagaaaacccgaagggcagactag

SEQ ID NO: 21475 - protein, 423 aa, Muscodor strobelii
  misc_feature: SGI Peptide ID NO. 567271
  misc_feature (5)..(345): Pfam Id: PF07690 Pfam Desc: Major Facilitator Superfamily
  misc_feature (3)..(414): NCBI GI: 256732642 Blast Desc: NECHADRAFT_100067 [Nectria haematococca mpVI 77-13-4]
  misc_feature (8)..(421): NCBI GI: 164424366 Blast Desc: NCU07343 [Neurospora crassa OR74A] gi|157070483|gb|EAA33265.2| conserved [Neurospora crassa OR74A]
  misc_feature (3)..(418): NCBI GI: 46125965 Blast Desc: FG07360.1 [Gibberella zeae PH-1]
  misc_feature (1)..(421): NCBI GI: 171676778 Blast Desc: protein product [Podospora anserina] gi|170936456|emb|CAP61113.1| protein product [Podospora anserina]
  misc_feature (1)..(419): NCBI GI: 259488015 Blast Desc: TPA: conserved [Aspergillus nidulans FGSC A4]
  misc_feature (1)..(423): NCBI GI: 242799714 Blast Desc: conserved [Talaromyces stipitatus ATCC 10500] gi|218716782|gb|EED16203.1| conserved [Talaromyces stipitatus ATCC 10500]
  misc_feature (1)..(419): NCBI GI: 67524243 Blast Desc: AN2579.2 [Aspergillus nidulans FGSC A4] gi|40745528|gb|EAA64684.1| AN2579.2 [Aspergillus nidulans FGSC A4]
  misc_feature (45)..(418): NCBI GI: 169610605 Blast Desc: SNOG_08408 [Phaeosphaeria nodorum SN15] gi|160702107|gb|EAT84684.2| SNOG_08408 [Phaeosphaeria nodorum SN15]
  misc_feature (1)..(392): NCBI GI: 255941074 Blast Desc: Pc16g09960 [Penicillium chrysogenum Wisconsin 54-1255] gi|211585929|emb|CAP93666.1| Pc16g09960 [Penicillium chrysogenum Wisconsin 54-1255]
  misc_feature (1)..(390): NCBI GI: 115443228 Blast Desc: [Aspergillus terreus NIH2624] gi|114188290|gb|EAU29990.1| [Aspergillus terreus NIH2624]
MNILLAFSTTFTVANLYYPQPILNVIAEDFGVSYERSSNVATLSQAGYAVGLLFLCPLADMVPRRPFILFLIWLTATLWIGLCLTKSFDAFLSLSFLCGVGTVTPQLMLPLVGDLAPANRRAASLSIVVSGLALGLLIARVLSGIVANFTYWRNIYWLALGAQYLTFILLFFTLPDYPAKNKGLNYFKALWQMAMMVVTEPLLTQNCLMGFLLSGAFTNFWTTLTFLLADPPYNYSSLDIGLFAFIGIAVITLAPVWSRLVTDRFVFLFSSIVGLSFELVGIVIGTFIGPFTVAGPIIEAIFMDTGANFTHTANRSNVYNLDPKARNRVNTAYMVFSFAGQLTGTALGNRLHCANFIAIAFIGAGILIGLARGPRETRWFGWRGGWNIRKDEDIAKKAAQEQEAVETSESPLKEDKQKTRRAD

SEQ ID NO: 21476 - DNA, 2205 bp, Muscodor strobelii
  misc_feature: SGI EST ID NO. CUFF.50443.0
  misc_feature: Variant of the nucleotide sequence at SEQ ID NO 21474
atcgggactaatatttcggcactgaaagaccataatagtgagtaataatgtctacaaacaaaactgaatgaatattgctgttgtcttcacactgtttctgaacagaaatttccagccgtaccgggcctgatgaaaaagccaatctgtttttctataacattggacataaagggtgaaagtctctctcagtttaacgaacaatcgcgatggggatttaagtccaaaacattacgtgcaggacgagtcgactacctatgtaaatttaggtacgcagatagaagattctggacttcggtatctagtacactcaatactgtcatgtctccgatcattgtcatgacgctctcattccccgcaaataaaggaaaatcatcatacatcctatcaaaaagtgaagacgtatgtaccccaatcatccaatactactctagcaagaatgctgatcgttccgcaacgtatcgccgacgatcggatcgggtgttaactctaagcggcggtctcaaagcgggcttcggatgcaggctgtcggaactctctatctacttctacaaacaatccctcccgcacagtcttttacatgtcatcttatttattaattgcttttgcatccatatttccattttaggttccggactctccaatcgcaaaatcctgcagctatcctgaaggtgttatttcacggtttgatgacgtcgcattcattaaagacgtcacaaataccattgccgacttccggatttagacttcatctgaattaaggttgagtagtcgcagaattatcccagagacgtagaaatctattgtttcttttcgggttcaatcgcattatcattctggcagtttgctttactcttaaagtcggacgtgtccgactgtggaagctagacgcaagggataggcgacatgaccgaggcggttggggagacgattccgtcagaaccacaatcaacaatcgagactgccagtgcggaccaggttgtccccgaaattagtggacataacggaggtcatcagaggagaattattgccagaatactacgatatctcaattggatgccctcatggtgtcgatatgacgcacagagtcctcctagattcacgctctcaatgaacatcctcctagctttcttgcgaatctatactatccacagcctattttaaatgtcatcgccgaagattttggcgttagctacgagcgttcttccaacgtggcaacgttgtcgcaagccggctatgcagttggattgctcttcttatgcccacttgctgatatggtcccgagaagaccattcattttgttcttgatatggcttactgctacattgtggatcggattatgtctaacgaaaagttttgatgcatttcttagcttgtcctttctgtgcggcgtaggcaccgttacacctcaactaatgctcccattagtaggtgatcttgctccagccaaccgccgtgccgcctctctttccattgttgtgtcaggattagccctaggcctattaattgccagagtgctatccggtatcgtcgcaaacttcacgtattggagaaacatctactggcttgctctcggggcccaatacttgacgttcattctcctgttcttcacgctaccagactacccagcgaagaacaaaggcctaaattatttcaaagcactatggcaaatggcaatgatggtcgtcacggagccgttgctcactcagaattgtcttatgggtttcttgctaagcggtgcattcacaaacttctggacaacgttgacgtttcttctggcggatcctccgtataattacagttccttggatattggcctttttgcatttataggaatagcggtgatcacgctggcacccgtatggtcccggctcgtcacagatagatttgtctttttgttttcaagcatagtgggtctttcgttcgaactcgttggtattgtgatagggacatttatcggccctttcacagtcgctggtcccattatcgaggcaatcttcatggacacaggagcgaatttcacacacacagcgaaccggagtaatgtgtataacttagaccccaaagcacgcaatcgagtgaataccgcgtatatggtgttcagctttgccggacaactaacaggtactgcccttgggaatcgactgtatgcgcaaggtggttggatttggagcggtagcgctaacggcatgtataaaacgatccccc

SEQ ID NO: 21477 - DNA, 1674 bp, Muscodor strobelii
  misc_feature: SGI cDNA ID NO. 567272
  misc_feature: Reduced expression when VOC is produced
  misc_feature: Encodes the peptide sequence at SEQ ID NO 21478
atggcgaacgacgagcgcacacccttgctcgccaacggaagtggcaacggcgagggacagaggagaggatcgctcgcgaatgcaggcgctgccgtcgccaagtcggccttcagcgtcgcgaaccgaatcttactcgccgggttcttaatgtccttcacattggggattacacaagttcctatcgtctacgtattccggctcatggaatgcgacatattctatacgcataatccaccccatgacggacctgcgggtacgcggtgtcaccaccgggagatcgattcaaacgcggctctccaattctccatcctcgggatgacgacgtcgctaagcggtgtcttcaacttatttgtttgtgggtttttcatcaagcgttggggtcctcgctgggcctatgtctctcagacatcacttctgggcgttcgagtctctacgcaagtcattggtgtgacgctcggaggacgagttggtgagattgtctttcaaacttgccagatgattggaattatcggagggcccagaggatatcaattggtcttgaacaccgctgtagcagaggttgttgctgccaaagaccgcactgctgtctttggccgattgcagggcagcattatggtgcttggcacggctttcggctatcttcttggtggtgtgcttggcgacgtgtacggcatccgacggcccttcgaggttgctttcttcctatacgtgatttcaaccgtatacggcgggctcttcatgccggacagcgtatcaatagctgacagcgataagaagcagtccaaaggcgggctagaaggattctttgctcctatcaaggtcataagaccccacaggtatcgcttagagtccggaaagataatcaagaattatgggctcatattcctcgctcttggcatctttctcggtgtctctgcctcgggatacgcacctctcttgttgcagctgtatgctacgtcggtgtttgacttcaacacgacgaagaatggttatcttatgttcggtatctcgtctatacgcggcttattcttgctattcatgttcccgaagatcatctcaaaaggaagggcatggttcaacgggctatcggagcaccaaaatactacagaccttgcagctgaacatcaaaccatacccacgagcccaggggagttcaccactaccgaagccggattagaggtagcccaggaaccagtacaagcacctgaacctgacgatgaggattcgggcacaggtttcgatctcctcttcgtgcgttggagcttggttgttgattcgctggtgacgctattcgcggctttctcgtccagagcatggcatgtgtatctcgccggattcctcctcccatttgcttctggttcagccccagcagccaaaggggtcatgacggcgctatgtccgccgtatcagcgatcagatgccatcagcgccatcactcttgtcgaggcttccgcgacgatgttgactcagggtgtattcggactgatattttccgcattttccagcatggggaagccaagtctgacgttcttttgcaatgcgggattcgcggcttttgcgtcttctgtgctttggctagcgcggcttccgcctacaaatagccagcgtgttgatgacgataatagtgatgaagatctgttggatgatgagacacacaatggcaattctgaataa

SEQ ID NO: 21478 - protein, 557 aa, Muscodor strobelii
  misc_feature: SGI Peptide ID NO. 567272
  misc_feature (1)..(553): NCBI GI: 261361065 Blast Desc: conserved [Verticillium albo-atrum VaMs.102]
  misc_feature (1)..(537): NCBI GI: 256723665 Blast Desc: NECHADRAFT_52291 [Nectria haematococca mpVI 77-13-4]
  misc_feature (39)..(546): NCBI GI: 85110741 Blast Desc: NCU08748 [Neurospora crassa OR74A] gi|28925294|gb|EAA34373.1| conserved [Neurospora crassa OR74A] gi|38524240|emb|CAE75706.1| conserved [Neurospora crassa]
  misc_feature (4)..(543): NCBI GI: 145603534 Blast Desc: MGG_05979 [Magnaporthe grisea 70-15] gi|145011747|gb|EDJ96403.1| MGG_05979 [Magnaporthe grisea 70-15]
  misc_feature (38)..(514): NCBI GI: 171677219 Blast Desc: protein product [Podospora anserina] gi|170936677|emb|CAP61336.1| protein product [Podospora anserina]
  misc_feature (1)..(550): NCBI GI: 46114484 Blast Desc: FG03084.1 [Gibberella zeae PH-1]
  misc_feature (56)..(542): NCBI GI: 256725402 Blast Desc: NECHADRAFT_82986 [Nectria haematococca mpVI 77-13-4]
  misc_feature (39)..(443): NCBI GI: 116205627 Blast Desc: CHGG_10697 [Chaetomium globosum CBS 148.51] gi|88176825|gb|EAQ84293.1| CHGG_10697 [Chaetomium globosum CBS 148.51]
  misc_feature (4)..(537): NCBI GI: 189196098 Blast Desc: conserved [Pyrenophora tritici-repentis Pt-1C-BFP] gi|187980266|gb|EDU46892.1| conserved [Pyrenophora tritici-repentis Pt-1C-BFP]
  misc_feature (68)..(538): NCBI GI: 169605091 Blast Desc: SNOG_05561 [Phaeosphaeria nodorum SN15] gi|160706706|gb|EAT86625.2| SNOG_05561 [Phaeosphaeria nodorum SN15]
  misc_feature: Useful for introducing or modulating the production of volatile compounds
MANDERTPLLANGSGNGEGQRRGSLANAGAAVAKSAFSVANRILLAGFLMSFTLGITQVPIVYVFRLMECDIFYTHNPPHDGPAGTRCHHREIDSNAALQFSILGMTTSLSGVFNLFVCGFFIKRWGPRWAYVSQTSLLGVRVSTQVIGVTLGGRVGEIVFQTCQMIGIIGGPRGYQLVLNTAVAEVVAAKDRTAVFGRLQGSIMVLGTAFGYLLGGVLGDVYGIRRPFEVAFFLYVISTVYGGLFMPDSVSIADSDKKQSKGGLEGFFAPIKVIRPHRYRLESGKIIKNYGLIFLALGIFLGVSASGYAPLLLQLYATSVFDFNTTKNGYLMFGISSIRGLFLLFMFPKIISKGRAWFNGLSEHQNTTDLAAEHQTIPTSPGEFTTTEAGLEVAQEPVQAPEPDDEDSGTGFDLLFVRWSLVVDSLVTLFAAFSSRAWHVYLAGFLLPFASGSAPAAKGVMTALCPPYQRSDAISAITLVEASATMLTQGVFGLIFSAFSSMGKPSLTFFCNAGFAAFASSVLWLARLPPTNSQRVDDDNSDEDLLDDETHNGNSE

SEQ ID NO: 21479 - DNA, 2273 bp, Muscodor strobelii
  misc_feature: SGI EST ID NO. CUFF.50475.1
  misc_feature: Variant of the nucleotide sequence at SEQ ID NO 21477
cggccgtgttcctcttcctgcatcgttcctctgcatttctcatttgactgctgcgaaagacggaaacggccatggcgaacgacgagcgcacacccttgctcgccaacggaagtggcaacggcgagggacagaggagaggatcgctcgcgaatgcaggcgctgccgtcgccaagtcggccttcagcgtcgcgaaccgaatcttactcgccgggttcttaatgtccttcacattggggattacacaagttcctatcgtctacgtattccggctcatggaatgcgacatattctatacgcataatccaccccatgacggacctgcgggtacgcggtgtcaccaccgggagatcgattcaaacgcggctctccaattctccatcctcgggatgacgacgtcgctaagcggtgtcttcaacttatttgtttgtgggtttttcatcaagcgttggggtcctcgctgggcctatgtctctcagacatcacttctgggcgttcgagtctctacgcaagtcattggtgtgacgctcggaggacgagttggtgagattgtctttcaaacttgccagatgattggaattatcggagggcccagaggatatcaattggtcttgaacaccgctgtagcagaggttgttgctgccaaagaccgcactgctgtctttggccgattgcagggcagcattatgtgggtattctttgttttgatttaaaaaccggcgtgagcctggaaattctagagcataacgattccatttcagacctcgacgaataaaaaaagggactgacatgttttaacacgctaggcttggcacggctttcggctatcttcttggtggtgtgcttggcgacgtgtacggcatccgacggcccttcgaggttgctttcttcctatacgtgatttcaaccgtatacggcgggctcttcatgccggacagcgtatcaatagctgacagcgataagaagcagtccaaaggcgggctagaaggattctttgctcctatcaaggtcataagaccccacaggtatcgcttagagtccggaaagataatcaagaattatgggctcatattcctcgctcttggcatctttctcggtgtctctgcctcgggatacgcacctctcttgttgcagctgtatgctacgtcggtgtttgacttcaacacgacgaagaatggttatcttatgttcggtatctcgtctatacgcggcttattcttgctattcatgttcccgaagatcatctcaaaaggaagggcatggttcaacgggctatcggagcaccaaaatactacagaccttgcagctgaacatcaaaccatacccacgagcccaggggagttcaccactaccgaagccggattagaggtagcccaggaaccagtacaagcacctgaacctgacgatgaggattcgggcacaggtttcgatctcctcttcgtgcgttggagcttggttgttgattcgctggtgacgctattcgcggctttctcgtccagagcatggcatgtgtatctcgccggattcctcctcccatttgcttctggttcagccccagcagccaaaggggtcatgacggcgctatgtccgccgtatcagcgatcagatgccatcagcgccatcactcttgtcgaggcttccgcgacgatgttgactcagggtgtattcggactgatattttccgcattttccagcatggggaagccaagtctgacgttcttttgcaatgcgggattcgcggcttttgcgtcttctgtgctttggctagcgcggcttccgcctacaaatagccagcgtgttgatgacgataatagtgatgaagatctgttggatgatgagacacacaatggcaattctgaataagataccctgtagatacgacacccctgaaattatcaaccccttagaaatgttagtttttggcctaaagcacacggcggtttcgctcagaggtgttcaggtcatcattgaataaatcttcaattgaaactttgaatttcaacaccacttacaactttctcttatcttcaatgatctcgcttaactagtctgcccttcgggttttctgcttatcttccttcaacggagattcgcttgtctctactgcctcttgttcctgtgcggctttcttcgcaatgtcttcatcttttctgatgttccatcctcccctccaaccaaaccacctggtctctctaggacccctagctaggccaatgagaatgccggcaccgatgaacgcgatctggtagccggaaggatgccgcgttagttatttt

SEQ ID NO: 21480 - DNA, 1758 bp, Muscodor strobelii
  misc_feature: SGI cDNA ID NO. 567273
  misc_feature: Encodes the peptide sequence at SEQ ID NO 21481
atggacctgatggacctcgacccggtgacagaggctgctctataccagcctctatcgcccactcaattccgcgttctcctcatccgcccaggacctctctcgtcccctctaatgacagacctcgtctcagtctcaatccagaaccctccggaatatgacggaatatcctacgtatggggcgactctcgtcagctcgtgtccatactttgcgacggtgtctggaccgaaatcactgcaaatctgttctgggcactcgcacgagcccgtctacccgatcgaccgcgcttagtctgggcagatgcgctatgtatcaaccagaatgacctcgcggaacgcagtaaacaagtcacgctgatgaggcatatatattctaacacgcgggttgtgctcgcgtgcatgggtcccgattccgacggtgctggtcaccatgttgcgtcgctcgtagaccagtatcagccctggttggcacggggagagacagatatggtcgccgcttggagtcaaaacggcggttcacgtgataggcttgagcggtggcgctacttggggggtctacttggacgcccttggttcagacgagcttgggtgttacaagaagtcgggcttgcgaagaatcccagggtcatttatggtgatgtcgagttcagttatcgagctatgatagcgcttgtacgttgggtgcggacgtacgatcccgcgttcgcgacaagtgtcaatctcggttcactgttaatacatacgcactgggctgactggaacagggaggccagttcggcactaggatcactcaactttgtcgatttgctagatcacggcgcattgctcgagtgccatgatccgcgggataagatttatgctttccttggacatcctttggctagtcagggaaccacaattacaccggactatacgaaggacattttacaagtctatcgggaggcgacggtactgctgcttcgagcggcgggagtgagagttctctcctctgtcgaacacagccacgcgactattcaggaggattgtccgtcttgggtcatacggtggaatgtgggtttcgtgatgaataacatctacacacatcctcattgtccatatgacgcaagccatatgatgttgaatgccacggctcgcatcgacggcgatcgaattgccattcagggcgtcattttcgacactatcaaatccgcgtttgtcatagatacctatgatgacattgacagctatgatgatctacttctacttcgatttcgtctctccgaaagcaccgagcaaatgtcattgctcgacctaatcgagtacctagatcagcatacgatgccctgtgcctatgagaatccgcgtagctctcatcttgcacacgcccttttatgtctattgcctacaggcaacgatgttccgcgtatgctctcactctggtctcactaccttctatggctgcgacaggaatgcccgaaccagaataccagctccatacgcatgctatacgctgcgctgcatgcgcaatgtaagggcagagccttgattgtcacccagacaggtcattatggcctggcatcgcatgtcaccaagcctggagataaatgctgtattttacaaggaagcaaagtgcctttcatcatcagacgtatgccgactgtcagtggcatcgacgagttgcgactagtcggggaggcatttgttcacggtgtcatggcaggcgaggtaagtaacaaagtgaggctaggtcaattgacggaagaaaccattttccttcgatga

SEQ ID NO: 21481 - protein, 585 aa, Muscodor strobelii
  misc_feature: SGI Peptide ID NO. 567273
  misc_feature (52)..(199): Pfam Id: PF06985 Pfam Desc: Heterokaryon incompatibility protein (HET)
  misc_feature (13)..(582): NCBI GI: 39969983 Blast Desc: MGG_10600 [Magnaporthe grisea 70-15] gi|149209321|ref|XP_001522035.1| MGCH7_ch7g153 [Magnaporthe grisea 70-15] gi|86196108|gb|EAQ70746.1| MGCH7_ch7g153 grisea
  misc_feature (15)..(560): NCBI GI: 170940109 Blast Desc: protein product [Podospora anserina]
  misc_feature (23)..(542): NCBI GI: 169604834 Blast Desc: SNOG_05433 [Phaeosphaeria nodorum SN15] gi|111066704|gb|EAT87824.1| SNOG_05433 [Phaeosphaeria nodorum SN15]
  misc_feature (8)..(568): NCBI GI: 46109348 Blast Desc: FG01556.1 [Gibberella zeae PH-1]
  misc_feature (1)..(585): NCBI GI: 239612306 Blast Desc: conserved [Ajellomyces dermatitidis ER-3]
  misc_feature (1)..(571): NCBI GI: 261202540 Blast Desc: conserved [Ajellomyces dermatitidis SLH14081] gi|239590581|gb|EEQ73162.1| conserved [Ajellomyces dermatitidis SLH14081]
  misc_feature (14)..(574): NCBI GI: 154292443 Blast Desc: BC1G_14540 [Botryotinia fuckeliana B05.10] gi|150846126|gb|EDN21319.1| BC1G_14540 [Botryotinia fuckeliana B05.10]
  misc_feature (14)..(417): NCBI GI: 154305655 Blast Desc: BC1G_07642 [Botryotinia fuckeliana B05.10] gi|150853161|gb|EDN28353.1| BC1G_07642 [Botryotinia fuckeliana B05.10]
  misc_feature (23)..(567): NCBI GI: 226287224 Blast Desc: conserved [Paracoccidioides brasiliensis Pb18]
  misc_feature (18)..(571): NCBI GI: 256733343 Blast Desc: NECHADRAFT_77319 [Nectria haematococca mpVI 77-13-4]
MDLMDLDPVTEAALYQPLSPTQFRVLLIRPGPLSSPLMTDLVSVSIQNPPEYDGISYVWGDSRQLVSILCDGVWTEITANLFWALARARLPDRPRLVWADALCINQNDLAERSKQVTLMRHIYSNTRVVLACMGPDSDGAGHHVASLVDQYQPWLARGETDMVAAWSQNGGSRDRLERWRYLGGLLGRPWFRRAWVLQEVGLAKNPRVIYGDVEFSYRAMIALVRWVRTYDPAFATSVNLGSLLIHTHWADWNREASSALGSLNFVDLLDHGALLECHDPRDKIYAFLGHPLASQGTTITPDYTKDILQVYREATVLLLRAAGVRVLSSVEHSHATIQEDCPSWVIRWNVGFVMNNIYTHPHCPYDASHMMLNATARIDGDRIAIQGVIFDTIKSAFVIDTYDDIDSYDDLLLLRFRLSESTEQMSLLDLIEYLDQHTMPCAYENPRSSHLAHALLCLLPTGNDVPRMLSLWSHYLLWLRQECPNQNTSSIRMLYAALHAQCKGRALIVTQTGHYGLASHVTKPGDKCCILQGSKVPFIIRRMPTVSGIDELRLVGEAFVHGVMAGEVSNKVRLGQLTEETIFLR

SEQ ID NO: 21482 - DNA, 1537 bp, Muscodor strobelii
  misc_feature: SGI EST ID NO. CUFF.50440.0
  misc_feature: Variant of the nucleotide sequence at SEQ ID NO 21480
cgctgatgaggcatatatattctaacacgcgggttgtgctcgcgtgcatgggtcccgattccgacggtgctggtcaccatgttgcgtcgctcgtagaccagtatcagccctggttggcacggggagagacagatatggtcgccgcttggagtcaaaacggcggttcacgtgataggcttgagcggtggcgctacttggggggtctacttggacgcccttggttcagacgagcttgggtgttacaagaagtcgggcttgcgaagaatcccagggtcatttatggtgatgtcgagttcagttatcgagctatgatagcgcttgtacgttgggtgcggacgtacgatcccgcgttcgcgacaagtgtcaatctcggttcactgttaatacatacgcactgggctgactggaacagggaggccagttcggcactaggatcactcaactttgtcgatttgctagatcacggcgcattgctcgagtgccatgatccgcgggataagatttatgctttccttggacatcctttggctagtcagggaaccacaattacaccggactatacgaaggacattttacaagtctatcgggaggcgacggtactgctgcttcgagcggcgggagtgagagttctctcctctgtcgaacacagccacgcgactattcaggaggattgtccgtcttgggtcatacggtggaatgtgggtttcgtgatgaataacatctacacacatcctcattgtccatatgacgcaagccatatgatgttgaatgccacggctcgcatcgacggcgatcgaattgccattcagggcgtcattttcgacactatcaaatccgcgtttgtcatagatacctatgatgacattgacagctatgatgatctacttctacttcgatttcgtctctccgaaagcaccgagcaaatgtcattgctcgacctaatcgagtacctagatcagcatacgatgccctgtgcctatgagaatccgcgtagctctcatcttgcacacgcccttttatgtctattgcctacaggcaacgatgttccgcgtatgctctcactctggtctcactaccttctatggctgcgacaggaatgcccgaaccagaataccagctccatacgcatgctatacgctgcgctgcatgcgcaatgtaagggcagagccttgattgtcacccagacaggtcattatggcctggcatcgcatgtcaccaagcctggagataaatgctgtattttacaaggaagcaaagtgcctttcatcatcagacgtatgccgactgtcagtggcatcgacgagttgcgactagtcggggaggcatttgttcacggtgtcatggcaggcgaggtaagtaacaaagtgaggctaggtcaattgacggaagaaaccattttccttcgatgagttttctgtatcaaaccatatagcagtaataaatactttgtctgcttgctagtgctttataagtccccgagaacttgatcctggtcgcgatgggtcaggtatcaacactttatgagttgaccgatatt

SEQ ID NO: 21483 - DNA, 936 bp, Muscodor strobelii
  misc_feature: SGI cDNA ID NO. 567274
  misc_feature: Reduced expression when VOC is produced
  misc_feature: Encodes the peptide sequence at SEQ ID NO 21484
atgaagcgcggaacaccgcagatgggcgcggctggcataccatcaccactgcccgagggacagcgacccggggggtcgccaaatgccatgggcttcatgccaaacggcatggatcccaacatgcaaaagcagttctatccaaacatgaatggcatggagaatggcatggttcctgctggacagatgaacggcggcatgcgaccgccaagttcacacccgaaccagccgttcaacggccagatgaaccaacagatgttgagacagcaaggaccacaagcaggaccacagcagatgggctggaatggtccaaatggcaacggcatggcccctcagggcccgcctcagggcaatccgcaacaaaggatgccgcctccttcggctccagccgccgctgcgaataccaacggccggacgaacacttcttcgcctcagaccagcaacgctgctccccctacaccacagcagtccactaaggctccacctaataagaagaaggaggctaagaacaccaaaaagggcgccgcaaccaagaaggcggcacaagctccaggggccggagccactcctgctgctgatgccagccaggatccagaaccacccacgcctgcaactcccattacgcctgtgaatccagggaacttcaagccaggccagaacaatggggctgtgcaacccgccgccccagcttcggtcgcgcaggctcctccagcgcaagtggccgtaccggactcagccatggacttcactggtttgggcggtggtgacggtctgaactttggtattggagacttcctcccgggcaacggtgatgttctgccggactttgactttgactcgttcctccacgataatggcgatggcggtgatggagggttcgatttcaacccggccaccttcggcatgggtgaagagcaggggcagattggagccgagtag

SEQ ID NO: 21484 - protein, 311 aa, Muscodor strobelii
  misc_feature: SGI Peptide ID NO. 567274
  misc_feature (1)..(311): NCBI GI: 261355772 Blast Desc: SOM1 protein [Verticillium albo-atrum VaMs.102]
  misc_feature (1)..(303): NCBI GI: 156065911 Blast Desc: SS1G_00966 [Sclerotinia sclerotiorum 1980] gi|154691825|gb|EDN91563.1| SS1G_00966 [Sclerotinia sclerotiorum 1980]
  misc_feature (1)..(311): NCBI GI: 256726248 Blast Desc: NECHADRAFT_81962 [Nectria haematococca mpVI 77-13-4]
  misc_feature (1)..(293): NCBI GI: 145602925 Blast Desc: MGG_04708 [Magnaporthe grisea 70-15] gi|145011274|gb|EDJ95930.1| MGG_04708 [Magnaporthe grisea 70-15]
  misc_feature (1)..(294): NCBI GI: 116201035 Blast Desc: CHGG_08402 [Chaetomium globosum CBS 148.51] gi|88176920|gb|EAQ84388.1| CHGG_08402 [Chaetomium globosum CBS 148.51]
  misc_feature (37)..(305): NCBI GI: 154305588 Blast Desc: BC1G_08563 [Botryotinia fuckeliana B05.10] gi|150853350|gb|EDN28542.1| BC1G_08563 [Botryotinia fuckeliana B05.10]
  misc_feature (1)..(311): NCBI GI: 46111537 Blast Desc: FG02650.1 [Gibberella zeae PH-1]
  misc_feature (1)..(222): NCBI GI: 171677472 Blast Desc: protein product [Podospora anserina] gi|170936804|emb|CAP61462.1| protein product [Podospora anserina]
  misc_feature (1)..(306): NCBI GI: 115385352 Blast Desc: ATEG_01858 [Aspergillus terreus NIH2624] gi|114196915|gb|EAU38615.1| ATEG_01858 [Aspergillus terreus NIH2624]
  misc_feature (1)..(306): NCBI GI: 255954925 Blast Desc: Pc21g11840 [Penicillium chrysogenum Wisconsin 54-1255] gi|211589926|emb|CAP96081.1| Pc21g11840 [Penicillium chrysogenum Wisconsin 54-1255]
  misc_feature: Useful for introducing or modulating the production of volatile compounds
MKRGTPQMGAAGIPSPLPEGQRPGGSPNAMGFMPNGMDPNMQKQFYPNMNGMENGMVPAGQMNGGMRPPSSHPNQPFNGQMNQQMLRQQGPQAGPQQMGWNGPNGNGMAPQGPPQGNPQQRMPPPSAPAAAANTNGRTNTSSPQTSNAAPPTPQQSTKAPPNKKKEAKNTKKGAATKKAAQAPGAGATPAADASQDPEPPTPATPITPVNPGNFKPGQNNGAVQPAAPASVAQAPPAQVAVPDSAMDFTGLGGGDGLNFGIGDFLPGNGDVLPDFDFDSFLHDNGDGGDGGFDFNPATFGMGEEQGQIGAE

SEQ ID NO: 21485 - DNA, 4763 bp, Muscodor strobelii
  misc_feature: SGI EST ID NO. CUFF.50735.2
  misc_feature: Variant of the nucleotide sequence at SEQ ID NO 21483
agacagtgggagaagcgagcaggtcttggcccacaacaggactgacgggaaggagagaccaaacctgaatgaatatgaaccacgacggggaactccacttcttgcaaccgtcctcccgtcaatccatccaccttttcccgcctttgcggtctactgcctgcctccacgatactaataataccgcctgggaacgcttcaatagccttgtccgtctgtctcggcgacacaagtctgcaacggcaacaggcacctgctagctccagaattgcacggcaagccattgagttcgttgcaactgcacctcgtcaagagcgtcaatacgggcgagcgctgtgaccctttgggctcaaccctgcccagcctgccctggtaatcgacattggaagcaacagcagcaccagcgagctgtgtcaaccctgcccccgagctgctactgctactgctacgcagaggccagccgcactgcgacgggcgaatggttccttctctggcatcgccttttctctatcgggaccttgtcacttccatttgtggccatatcaacgtctgaagggcagctcttgtcattccatccttcgcaattcctggaggggcactcttgatctctgccagaagttcgcaactggccggcaggacaggccatcaccagatacttgaacaatttcccgatctccaacagccgtcctcgatccaagctcgcactggccaaaagtgccaactgcccaggctttggcccagtgccgacctttttttgacagcacctctcacttcgttccctctcgcacccacccacacgccaaccggccacgccccagccccccagcacgtcaacctggcactgtctgttcccactgtccgcccccgaacttgggactgacttgggactgaggtgcgggtcactctgggagcaccacaccacctctcccgaccgcctgttgcctcaccaggctctgcccacgctcacctcacccagtacgcccctgcgctattggcactgggcgctcgctgcccactggatctttgtgaggccgtcttgccaatccccatccacgactgccaaccatcttcgccttcgccgtcggtgcaaaatcgcacacagtcaccaccctcatccttcttacttctccccttgcactaatcccatcttccggccgccctccccaggtcgcgtcattctccatttatcattcgtcccattcttgttttgtcgccatttcccaccgtttgccatcattatcatttctgtataccacccaacccgccttcctgcgtggttttcccctcgcagcctcccctagagcctaccgcaacagggttcttccgccacttcatcgacgctttcgccgtcgtggaggtgaccgctctgtagagagtgtgtttgatcgtctggccactgctccgactctcgacgcgctctcaatcccgcttggtcctgatccttggccggtgactctccgacgatcccgacttccgtccacaaggctttcgcgggcgccaaacagcacacgcccggcgatccctggggatacctgaggtcgcacgccgtcggtgacctctaccgcctgttgcatccgtcggtcccgacttgcacctaccgtgagacgaatcggatgcgagcaactacttgcatctcccctttgattgaatcgcgcagatctcggcagatccgctctgtccagttcgcgtcatgaacaccgtcaacatgaatagcatgcctatggctggcggccccgtcggtggtcccatgcccatggctggcaacaacgcccttgccgcgggcagccaggttcagcgcccacccgagaacaaccgcgccaacctgaacacatacatctacgactacttcatccgagagcaaatgtacgactgcgcccgcgctatgttgaacagcgaccaggccctcaacgtccacaagaactcgcctcgtcgcagcgacgatatgggcgatgatcccatggacactgacagcaaggacgatttagattcgaagcgacccgctgatcttcctgccccgaatgtgcccaacggaggtgacagctgctttctgtacgagtggttctgcctcttctgggacatgttatcggcacagcgcaataagggtggcgtcagccccaacgtgagcgcatatgtcaatcacacacagaacaccgtcagaatgcggcaggcccagcaggcagaaatgctgcgagggatgccctacaacaacggcagcatgatgcgcttgcccaacggcatgccgatgaaccccaagggaccccagagcttagtgaggacagcgatgcaaaacaatcagaacaatccagccatgatgctgcaagccaacaagaaccagatgcaacgcgatggatcgaatatggacggcaacgcaaaccgccctgcctcgccaggcggtgccgaaaatgcgccgtcacccagcaagaggcctcgactggatggaggcggtccgttcaacccgcagcacccgaacatgatgaatggacagcgacctcagccaggaggacaggggttcaccaacttccaaaaagagaacccccacaaccaggctggctcgattcggacatacgcacaaacgttgcagcagcaccatggcaaccagatgcccaacaagcaaggcccgaatcccgctggtcctcaagggcaaggctccccctccatgatgcagggcgccgacggcagcacgccgctaggcaacttctacaacgccgagatgggccctcaaaacatgcgacagggggctggtccgggccagaccggcggcagcaaccacgctctccaagattatcagatgcagttgatgcttctcgagcaacagaacaagaagaggctcatgatggcaaggcaagaacaggacagcatgggcgggatgccacgcggcgacggctcgggacccaatggtccaggcggacccccggtcccaacgggcaatcattccaggacggatcacctcagggtgtgagacctggcgcatctcctaatccgtcagagcagatgaagcgcggaacaccgcagatgggcgcggctggcataccatcaccactgcccgagggacagcgacccggggggtcgccaaatgccatgggcttcatgccaaacggcatggatcccaacatgcaaaagcagttctatccaaacatgaatggcatggagaatggcatggttcctgctggacagatgaacggcggcatgcgaccgccaagttcacacccgaaccagccgttcaacggccagatgaaccaacagatgttgagacagcaaggaccacaagcaggaccacagcagatgggctggaatggtccaaatggcaacggcatggcccctcagggcccgcctcagggcaatccgcaacaaaggatgccgcctccttcggctccagccgccgctgcgaataccaacggccggacgaacacttcttcgcctcagaccagcaacgctgctccccctacaccacagcagtccactaaggctccacctaataagaagaaggaggctaagaacaccaaaaagggcgccgcaaccaagaaggcggcacaagctccaggggccggagccactcctgctgctgatgccagccaggatccagaaccacccacgcctgcaactcccattacgcctgtgaatccagggaacttcaagccaggccagaacaatggggctgtgcaacccgccgccccagcttcggtcgcgcaggctcctccagcgcaagtggccgtaccggactcagccatggacttcactggtttgggcggtggtgacggtctgaactttggtattggagacttcctcccgggcaacggtgatgttctgccggactttgactttgactcgttcctccacgataatggcgatggcggtgatggagggttcgatttcaacccggccaccttcggcatgggtgaagagcaggggcagattggagccgagtagaatctgcatacattttgaacgtgcaatctctttgatatggtttcagggcatgtcgcggcgttttgtcggctggtttactctcgcatctggaattcggtcacgttcttagcggccgtcgcacgctcgacaggccagacatgaaatacgatgacctcgaaaagcctctcccatggccacccctcggttgttttattttccttttagacggcggtctcgacatctttcctcgcgcgggtcttgattcaatcgttcccatctgtcctagccgtcttggcgaggactttgtcattttgcgcaacacaaacttgtatttttcgggcgttggtccaccctgtcgttcgggattctgtctcacctcaccgatcaggtgtattggtagggcgacccgttcctatctgcatgccgatcaagaaggctgagaggggagacgtatgcttggtggccgcaacgggtccagtgaggagttgggagccattaattagtatattgcatcaaataccggtcaccgattctaggctctaaggcggaactatttctcatccatcgagcaagagtaagcgcagtggcagactttggaaattttatctggttaaaatttttcttcctattacatgatatccaacgaaggggccaggggaagacatcatcaacgataccggtgcggcgaagatggagaaaaaacaagtgagatgatgagggttcattcggtccagactgggcgcgtctaatctatctcatgtgtattcaatagaaccttactcgtcaatgctgcattgtttccaagtgcttagagtgataatttgcttcgctgcaatactattgcacccataataagcttg

SEQ ID NO: 21486 - DNA, 1353 bp, Muscodor strobelii
  misc_feature: SGI cDNA ID NO. 567275
  misc_feature: Reduced expression when VOC is produced
  misc_feature: Encodes the peptide sequence at SEQ ID NO 21487
atgaacaccgtcaacatgaatagcatgcctatggctggcggccccgtcggtggtcccatgcccatggctggcaacaacgcccttgccgcgggcagccaggttcagcgcccacccgagaacaaccgcgccaacctgaacacatacatctacgactacttcatccgagagcaaatgtacgactgcgcccgcgctatgttgaacagcgaccaggccctcaacgtccacaagaactcgcctcgtcgcagcgacgatatgggcgatgatcccatggacactgacagcaaggacgatttagattcgaagcgacccgctgatcttcctgccccgaatgtgcccaacggaggtgacagctgctttctgtacgagtggttctgcctcttctgggacatgttatcggcacagcgcaataagggtggcgtcagccccaacgtgagcgcatatgtcaatcacacacagaacaccgtcagaatgcggcaggcccagcaggcagaaatgctgcgagggatgccctacaacaacggcagcatgatgcgcttgcccaacggcatgccgatgaaccccaagggaccccagagcttagtgaggacagcgatgcaaaacaatcagaacaatccagccatgatgctgcaagccaacaagaaccagatgcaacgcgatggatcgaatatggacggcaacgcaaaccgccctgcctcgccaggcggtgccgaaaatgcgccgtcacccagcaagaggcctcgactggatggaggcggtccgttcaacccgcagcacccgaacatgatgaatggacagcgacctcagccaggaggacagggggtaggcgattccaaagctgcagccgtggctaaacacatgctcctcacaaatggcatcccaccgactaatctaactgatgagcagttcaccaacttccaaaaagagaacccccacaaccaggctggctcgattcggacatacgcacaaacgttgcagcagcaccatggcaaccagatgcccaacaagcaaggcccgaatcccgctggtcctcaagggcaaggctccccctccatgatgcagggcgccgacggcagcacgccgctaggcaacttctacaacgccgagatgggccctcaaaacatgcgacagggggctggtccgggccagaccggcggcagcaaccacgctctccaagattatcagatgcagttgatgcttctcgagcaacagaacaagaagaggctcatgatggcaaggcaagaacaggacagcatgggcgggatgccacgcggcgacggctcgggacccaatggtccaggcggacccccggtcccaacgggcaatcattccaggacggatcacctcagggtgtga

SEQ ID NO: 21487 - protein, 450 aa, Muscodor strobelii
  misc_feature: SGI Peptide ID NO. 567275
  misc_feature (5)..(416): NCBI GI: 171677472 Blast Desc: protein product [Podospora anserina] gi|170936804|emb|CAP61462.1| protein product [Podospora anserina]
  misc_feature (13)..(423): NCBI GI: 46111537 Blast Desc: FG02650.1 [Gibberella zeae PH-1]
  misc_feature (5)..(416): NCBI GI: 116201035 Blast Desc: CHGG_08402 [Chaetomium globosum CBS 148.51] gi|88176920|gb|EAQ84388.1| CHGG_08402 [Chaetomium globosum CBS 148.51]
  misc_feature (4)..(423): NCBI GI: 256726248 Blast Desc: NECHADRAFT_81962 [Nectria haematococca mpVI 77-13-4]
  misc_feature (13)..(423): NCBI GI: 261355772 Blast Desc: SOM1 protein [Verticillium albo-atrum VaMs.102]
  misc_feature (13)..(423): NCBI GI: 164425460 Blast Desc: NCU05791 [Neurospora crassa OR74A] gi|157070934|gb|EAA30815.2| [Neurospora crassa OR74A]
  misc_feature (13)..(423): NCBI GI: 8453194 Blast Desc: AF265233_1 SOM1 protein [Neurospora crassa]
  misc_feature (45)..(425): NCBI GI: 145602925 Blast Desc: MGG_04708 [Magnaporthe grisea 70-15] gi|145011274|gb|EDJ95930.1| MGG_04708 [Magnaporthe grisea 70-15]
  misc_feature (1)..(440): NCBI GI: 239609778 Blast Desc: cAMP-dependent protein kinase pathway protein [Ajellomyces dermatitidis ER-3]
  misc_feature (1)..(427): NCBI GI: 261199121 Blast Desc: cAMP-dependent protein kinase pathway protein [Ajellomyces dermatitidis SLH14081] gi|239595114|gb|EEQ77695.1| cAMP-dependent protein kinase pathway protein [Ajellomyces
  misc_feature: Useful for introducing or modulating the production of volatile compounds
MNTVNMNSMPMAGGPVGGPMPMAGNNALAAGSQVQRPPENNRANLNTYIYDYFIREQMYDCARAMLNSDQALNVHKNSPRRSDDMGDDPMDTDSKDDLDSKRPADLPAPNVPNGGDSCFLYEWFCLFWDMLSAQRNKGGVSPNVSAYVNHTQNTVRMRQAQQAEMLRGMPYNNGSMMRLPNGMPMNPKGPQSLVRTAMQNNQNNPAMMLQANKNQMQRDGSNMDGNANRPASPGGAENAPSPSKRPRLDGGGPFNPQHPNMMNGQRPQPGGQGVGDSKAAAVAKHMLLTNGIPPTNLTDEQFTNFQKENPHNQAGSIRTYAQTLQQHHGNQMPNKQGPNPAGPQGQGSPSMMQGADGSTPLGNFYNAEMGPQNMRQGAGPGQTGGSNHALQDYQMQLMLLEQQNKKRLMMARQEQDSMGGMPRGDGSGPNGPGGPPVPTGNHSRTDHLRV

SEQ ID NO: 21488 - DNA, 4763 bp, Muscodor strobelii; identical to SEQ ID NO: 21485
  misc_feature: SGI EST ID NO. CUFF.50735.2
  misc_feature: Variant of the nucleotide sequence at SEQ ID NO 21486

SEQ ID NO: 21489 - DNA, 1269 bp, Muscodor strobelii
  misc_feature: SGI cDNA ID NO. 567276
  misc_feature: Encodes the peptide sequence at SEQ ID NO 21490
atgaacaccgtcaacatgaatagcatgcctatggctggcggccccgtcggtggtcccatgcccatggctggcaacaacgcccttgccgcgggcagccaggttcagcgcccacccgagaacaaccgcgccaacctgaacacatacatctacgactacttcatccgagagcaaatgtacgactgcgcccgcgctatgttgaacagcgaccaggccctcaacgtccacaagaactcgcctcgtcgcagcgacgatatgggcgatgatcccatggacactgacagcaaggacgatttagattcgaagcgacccgctgatcttcctgccccgaatgtgcccaacggaggtgacagctgctttctgtacgagtggttctgcctcttctgggacatgttatcggcacagcgcaataagggtggcgtcagccccaacgtgagcgcatatgtcaatcacacacagaacaccgtcagaatgcggcaggcccagcaggcagaaatgctgcgagggatgccctacaacaacggcagcatgatgcgcttgcccaacggcatgccgatgaaccccaagggaccccagagcttagtgaggacagcgatgcaaaacaatcagaacaatccagccatgatgctgcaagccaacaagaaccagatgcaacgcgatggatcgaatatggacggcaacgcaaaccgccctgcctcgccaggcggtgccgaaaatgcgccgtcacccagcaagaggcctcgactggatggaggcggtccgttcaacccgcagcacccgaacatgatgaatggacagcgacctcagccaggaggacaggggttcaccaacttccaaaaagagaacccccacaaccaggctggctcgattcggacatacgcacaaacgttgcagcagcaccatggcaaccagatgcccaacaagcaaggcccgaatcccgctggtcctcaagggcaaggctccccctccatgatgcagggcgccgacggcagcacgccgctaggcaacttctacaacgccgagatgggccctcaaaacatgcgacagggggctggtccgggccagaccggcggcagcaaccacgctctccaagattatcagatgcagttgatgcttctcgagcaacagaacaagaagaggctcatgatggcaaggcaagaacaggacagcatgggcgggatgccacgcggcgacggctcgggacccaatggtccaggcggacccccggtcccaacgggcaatcattccaggacggatcacctcagggtgtga

SEQ ID NO: 21490 - protein, 422 aa, Muscodor strobelii
  misc_feature: SGI Peptide ID NO. 567276
  misc_feature (5)..(388): NCBI GI: 171677472 Blast Desc: protein product [Podospora anserina] gi|170936804|emb|CAP61462.1| protein product [Podospora anserina]
  misc_feature (13)..(395): NCBI GI: 46111537 Blast Desc: FG02650.1 [Gibberella zeae PH-1]
  misc_feature (5)..(388): NCBI GI: 116201035 Blast Desc: CHGG_08402 [Chaetomium globosum CBS 148.51] gi|88176920|gb|EAQ84388.1| CHGG_08402 [Chaetomium globosum CBS 148.51]
  misc_feature (45)..(397): NCBI GI: 145602925 Blast Desc: MGG_04708 [Magnaporthe grisea 70-15] gi|145011274|gb|EDJ95930.1| MGG_04708 [Magnaporthe grisea 70-15]
  misc_feature (4)..(395): NCBI GI: 256726248 Blast Desc: NECHADRAFT_81962 [Nectria haematococca mpVI 77-13-4]
  misc_feature (13)..(395): NCBI GI: 164425460 Blast Desc: NCU05791 [Neurospora crassa OR74A] gi|157070934|gb|EAA30815.2| [Neurospora crassa OR74A]
  misc_feature (13)..(395): NCBI GI: 8453194 Blast Desc: AF265233_1 SOM1 protein [Neurospora crassa]
  misc_feature (13)..(395): NCBI GI: 261355772 Blast Desc: SOM1 protein [Verticillium albo-atrum VaMs.102]
  misc_feature (1)..(398): NCBI GI: 240107600 Blast Desc: CPC735_042230 [Coccidioides posadasii C735 delta SOWgp]
  misc_feature (1)..(401): NCBI GI: 115385352 Blast Desc: ATEG_01858 [Aspergillus terreus NIH2624] gi|114196915|gb|EAU38615.1| ATEG_01858 [Aspergillus terreus NIH2624]
MNTVNMNSMPMAGGPVGGPMPMAGNNALAAGSQVQRPPENNRANLNTYIYDYFIREQMYDCARAMLNSDQALNVHKNSPRRSDDMGDDPMDTDSKDDLDSKRPADLPAPNVPNGGDSCFLYEWFCLFWDMLSAQRNKGGVSPNVSAYVNHTQNTVRMRQAQQAEMLRGMPYNNGSMMRLPNGMPMNPKGPQSLVRTAMQNNQNNPAMMLQANKNQMQRDGSNMDGNANRPASPGGAENAPSPSKRPRLDGGGPFNPQHPNMMNGQRPQPGGQGFTNFQKENPHNQAGSIRTYAQTLQQHHGNQMPNKQGPNPAGPQGQGSPSMMQGADGSTPLGNFYNAEMGPQNMRQGAGPGQTGGSNHALQDYQMQLMLLEQQNKKRLMMARQEQDSMGGMPRGDGSGPNGPGGPPVPTGNHSRTDHLRV

SEQ ID NO: 21491 - DNA, 4763 bp, Muscodor strobelii; identical to SEQ ID NO: 21485
  misc_feature: SGI EST ID NO. CUFF.50735.2
  misc_feature: Variant of the nucleotide sequence at SEQ ID NO 21489

SEQ ID NO: 21492 - DNA, 579 bp, Muscodor strobelii
  misc_feature: SGI cDNA ID NO. 567277
  misc_feature: Encodes the peptide sequence at SEQ ID NO 21493
atgtcagccagcaaagccgcccgcgtgggcgaggaaatatggaagggccggatcgacaaagtcaatgccgaactcgtcgtcttgacctacggcaccattgtcgcacagctgtgtaaagacttcgatagcgactataaccaggtgaacaaacaactcgacaggatgggctacaacattggtctccgtctgatcgaggactacctggccaagtccaacaccatgcgccgatgcagcaactttcgcgagactgccgatatgctggccaaggtgggcttcaagatctttctcaatattacacccaccgtgacgaactggacgagtgacaacaaacaattctctcttgtctttgaggagaacccgcttgccgacttcgttgagctgcctgacgacgggcgagctcaagacgagctctggtactccaatatcttttgcggcgttgtgcgaggtgccctggagatggtacagatgcaggtcgaggcccattttatcagtgacgtgctgaggggcaacgatacaacagagatgcgcgtctcgctcattcgatacattgaagacgagctaccgcccgaggacgactaa

SEQ ID NO: 21493 - protein, 192 aa, Muscodor strobelii
  misc_feature: SGI Peptide ID NO. 567277
  misc_feature (25)..(180): Pfam Id: PF04051 Pfam Desc: Transport protein particle (TRAPP) component, Bet3
  misc_feature (1)..(192): NCBI GI: 39945424 Blast Desc: conserved [Magnaporthe grisea 70-15] gi|145011275|gb|EDJ95931.1| conserved [Magnaporthe grisea 70-15]
  misc_feature (1)..(192): NCBI GI: 261355771 Blast Desc: trafficking protein particle complex subunit 3 [Verticillium albo-atrum VaMs.102]
  misc_feature (1)..(192): NCBI GI: 256726249 Blast Desc: [Nectria haematococca mpVI 77-13-4]
  misc_feature (1)..(192): NCBI GI: 171677454 Blast Desc: protein product [Podospora anserina] gi|170936795|emb|CAP61453.1| protein product [Podospora anserina]
  misc_feature (1)..(191): NCBI GI: 226292798 Blast Desc: trafficking protein particle complex subunit 3 [Paracoccidioides brasiliensis Pb18]
  misc_feature (1)..(192): NCBI GI: 238498932 Blast Desc: TRAPP complex component Bet3, [Aspergillus flavus NRRL3357] gi|220693975|gb|EED50320.1| TRAPP complex component Bet3, [Aspergillus flavus NRRL3357]
  misc_feature (1)..(192): NCBI GI: 156065919 Blast Desc: conserved [Sclerotinia sclerotiorum 1980] gi|154691829|gb|EDN91567.1| conserved [Sclerotinia sclerotiorum 1980]
  misc_feature (1)..(192): NCBI GI: 116201041 Blast Desc: conserved [Chaetomium globosum CBS 148.51] gi|88176923|gb|EAQ84391.1| conserved [Chaetomium globosum CBS 148.51]
  misc_feature (1)..(192): NCBI GI: 154305578 Blast Desc: conserved [Botryotinia fuckeliana B05.10] gi|150853345|gb|EDN28537.1| conserved [Botryotinia fuckeliana B05.10]
  misc_feature (1)..(192): NCBI GI: 46111535 Blast Desc: FG02649.1 [Gibberella zeae PH-1]
MSASKAARVGEEIWKGRIDKVNAELVVLTYGTIVAQLCKDFDSDYNQVNKQLDRMGYNIGLRLIEDYLAKSNTMRRCSNFRETADMLAKVGFKIFLNITPTVTNWTSDNKQFSLVFEENPLADFVELPDDGRAQDELWYSNIFCGVVRGALEMVQMQVEAHFISDVLRGNDTTEMRVSLIRYIEDELPPEDD

SEQ ID NO: 21494 - DNA, 2464 bp, Muscodor strobelii
  misc_feature: SGI EST ID NO. CUFF.50738.0
  misc_feature: Variant of the nucleotide sequence at SEQ ID NO 21492
ggggacgtgcagactgccccacgccgggcatgacatgctacctaggttccctccagctgcatcacaatcgcctcaccgcccgacatactgccacatgtctaccgctgtctttccctctttcacctgatatttaccctcactcttcgaccccctttcccttctccacgctgttgatgtgattgcactatctcgtcttccgagcacttcggtgtcccatgctttgaccagacctgacttcccgctcgcgagccgagcatgtcagccagcaaagccgcccgcgtgggcgaggaaatatggaagggccggatcgacaaagtcaatgccgaactcgtcgtcttgacctacggcaccattgtcgcacagctgtgtaaagacttcgatagcgactataaccaggtgaacaaacaactcgacaggatgggctacaacattggtctccgtctgatcgaggactacctggccaagtccaacaccatgcgccgatgcagcaactttcgcgagactgccgatatgctggccaaggtgggcttcaagatctttctcaatattacacccaccgtgacgaactggacgagtgacaacaaacaattctctcttgtctttgaggagaacccgcttgccgacttcgttgagctgcctgacgacgggcgagctcaagacgagctctggtactccaatatcttttgcggcgttgtgcgaggtgccctggagatggtacagatgcaggtcgaggcccattttatcagtgacgtgctgaggggcaacgatacaacagagatgcgcgtctcgctcattcgatacattgaagacgagctaccgcccgaggacgactaacgctatcacgacgaatgaatattgcaatctaaagccatggacacgctggagccacacttggcgtcgtcattccactgggttctgaccatgtgacatgacacctccttgcaaatttttagagcacatagacgtcaatttgtctgcatacggcagatatgtatgtaaacgaggcagttcgctaagaacagtgaaggaggcggtgccaccgaaagaggccggaacaaatgaagaaataaatgagtccatgccctgctgggaagcgcagaaacaaaagaacaaaagcaacgaaaatggatgtctcccgtacagtcgctatgttcatggcagcgtaaccatgaccttggttcagtgatggagctcgatacgctccaagtaaggaggccccggccagcctcgtacacaaccgtccaatgtctcggctgtgggaaaggcgtgcgggcagccagctcgggactcaaattgcagcaccggcaaggcggacggagacggcacgcgccgtatgatgaaatgtgtttcgcgatcgaggaacccaaccagcgcagccaggacctcggccgcttgcatatatcgcataggattgccaacgttgtacggagacgatctgtgtgtccctccgcgatccttcttgcaagatcccctcgaaaagcacgttgcgatgcgtcgtacgagttggcatgcgcctacttaatggaggtcagatttaaccaatttcgcggaaaatggtgtcgtttgttgcggcgctgaatgtgaatgttggcgatatcacctaagtaggctgtcagtgcgcgtctatgcagtgttcctgcgtccgcccgtcgcgccgcttgatttcttagcgtgccgctgcgatgggagtttctaccatccatgctagctcggctttattcccgcctccggatctaagtacttaggttcatgggatacctatttcctatgctatcttctcttatgatcgcccctccaacgttatcatgtgaacgattgaatattttctgcccataagccgtcaaaacacgagctttccgcttaagaacgacacttcgataatatttgctgaaactaaagccagttgataccaaccatattgaactagcatgtcgaaggatgcgataccagtaagacgcacgatcaagacgaaggaaagggtcggataccttagtaatcacgacagggtgacaccagcaacaaagacgcatttcgctgactgcaatatcacgctgcatgaaaactaatcataagacagccgagggcagccagatgagcacatgctactaccttagttgtgagcatagagatcgttcctacataacacctttgaaatcatgtggcaatgtcctctcaagatatcacgcaagatcaagacagtcattgtagacgcatgttagacaactagaggcaaagttcgtcgcatgttagacaactagaggcaaagttcgtcgcatgaatcggaatagggaaacctgcaattgccaatatccaattcgtcatgctaccatcgatgagcatccttgtaatctcccgacgcggagaagttcaaaatgatatcgccctcgatcgactgtattacgctccagctcctagacttcaagttatgaaagacattcacgcaaatccaagtgacttgggtata

SEQ ID NO: 21495 - DNA, 1068 bp, Muscodor strobelii
  misc_feature: SGI cDNA ID NO. 567278
  misc_feature: Reduced expression when VOC is produced
  misc_feature: Encodes the peptide sequence at SEQ ID NO 21496
atgtcggcggagaagagaccggctggcgacgacgcgggcgccggccaactgatcgtcaagcgacagaagccaggcaccagcaccgccctctcgcggcgcgatggtcctccgggaagcaatgccctcgtccaatccgtcgtgaggacgagcaacctcgaggcgcccgtgatggagctgggcggccactcgggcgagatcttctcggccagattcgaccccaccggcaggttcgtcgcgtccgggtccatggacaggaacatactgttgtggaactcgtccggcgcgtgcgacaactacggcatgttgaccggccacaagggcgccatcctcgacctgcagtggtcccgcgactccgagatcctctactccgcctccgccgacatgcacctggccagctgggacctgacctcgggcgcccgcatacgacgctacgtcggccacgaagagatcatcaacaccttggacatcagcaagcgaggcgaggagctgctcatcagcggcagcgacgacggctccatcggcgtctgggacccccgctccaagaatgccgtcgaccacatcgagaccgacttccccataaccgccgtcgccgtctccgaggccggcaacgagatctactccggcggcatcgacaacgacatcaaggtctgggacatacgcaagaaggccgtcgtctattccatgctcggccacaacgacaccgtcaccagtctgcgtgtttcgcccgactcccagtcgctcctctcctactcccacgactcgaccgcgaagacctgggacatccgccccttcgccccgacagaacgccacatccggacctttgatggcgcgcagatgggcatcgagaagaacctcatccgcgccagctgggacaaggacggcaagaagattgccgtcggtgcaggtgacgggactaccgtcgtgtggtcaagcgacaacggcaagcttctgtacaagctccctggacacaagggcaccgtcaactgcgccgaattcactcccaatgatgagcccattctgttatccgcatcttctgaccgtcgcatactgcttggtgagctgcggtga

SEQ ID NO: 21496 - protein, 355 aa, Muscodor strobelii
  misc_feature: SGI Peptide ID NO. 567278
  misc_feature (53)..(91): Pfam Id: PF00400 Pfam Desc: WD domain, G-beta repeat
  misc_feature (138)..(177): Pfam Id: PF00400 Pfam Desc: WD domain, G-beta repeat
  misc_feature (222)..(260): Pfam Id: PF00400 Pfam Desc: WD domain, G-beta repeat
  misc_feature (314)..(353): Pfam Id: PF00400 Pfam Desc: WD domain, G-beta repeat
  misc_feature (96)..(134): Pfam Id: PF00400 Pfam Desc: WD domain, G-beta repeat
  misc_feature (181)..(218): Pfam Id: PF00400 Pfam Desc: WD domain, G-beta repeat
  misc_feature (1)..(355): NCBI GI: 256725845 Blast Desc: NECHADRAFT_43255 [Nectria haematococca mpVI 77-13-4]
  misc_feature (1)..(355): NCBI GI: 85095314 Blast Desc: NCU05797 [Neurospora crassa OR74A] gi|28921516|gb|EAA30821.1| NCU05797 [Neurospora crassa OR74A]
  misc_feature (1)..(355): NCBI GI: 261355770 Blast Desc: WD repeat-containing protein [Verticillium albo-atrum VaMs.102]
  misc_feature (1)..(355): NCBI GI: 171677452 Blast Desc: protein product [Podospora anserina] gi|170936794|emb|CAP61452.1| protein product [Podospora anserina]
  misc_feature (1)..(355): NCBI GI: 39945422 Blast Desc: MGG_04693 [Magnaporthe grisea 70-15] gi|145011276|gb|EDJ95932.1| MGG_04693 [Magnaporthe grisea 70-15]
  misc_feature (1)..(355): NCBI GI: 154305580 Blast Desc: BC1G_08559 [Botryotinia fuckeliana B05.10] gi|150853346|gb|EDN28538.1| BC1G_08559 [Botryotinia fuckeliana B05.10]
  misc_feature (1)..(355): NCBI GI: 156065917 Blast Desc: SS1G_00969 [Sclerotinia sclerotiorum 1980] gi|154691828|gb|EDN91566.1| SS1G_00969 [Sclerotinia sclerotiorum 1980]
  misc_feature (3)..(339): NCBI GI: 116201043 Blast Desc: conserved [Chaetomium globosum CBS 148.51] gi|88176924|gb|EAQ84392.1| conserved [Chaetomium globosum CBS 148.51]
  misc_feature (1)..(339): NCBI GI: 46111533 Blast Desc: FG02648.1 [Gibberella zeae PH-1]
  misc_feature (1)..(354): NCBI GI: 212546029 Blast Desc: U5 snRNP complex subunit, [Penicillium marneffei ATCC 18224] gi|210064688|gb|EEA18783.1| U5 snRNP complex subunit, [Penicillium marneffei ATCC 18224]
  misc_feature (59)..(309): SWISSPROT Homolog: EC 2.7.11.1 Non-specific serine/threonine protein kinase
  misc_feature: Useful for introducing or modulating the production of volatile compounds
MSAEKRPAGDDAGAGQLIVKRQKPGTSTALSRRDGPPGSNALVQSVVRTSNLEAPVMELGGHSGEIFSARFDPTGRFVASGSMDRNILLWNSSGACDNYGMLTGHKGAILDLQWSRDSEILYSASADMHLASWDLTSGARIRRYVGHEEIINTLDISKRGEELLISGSDDGSIGVWDPRSKNAVDHIETDFPITAVAVSEAGNEIYSGGIDNDIKVWDIRKKAVVYSMLGHNDTVTSLRVSPDSQSLLSYSHDSTAKTWDIRPFAPTERHIRTFDGAQMGIEKNLIRASWDKDGKKIAVGAGDGTTVVWSSDNGKLLYKLPGHKGTVNCAEFTPNDEPILLSASSDRRILLGELR

SEQ ID NO: 21497 - DNA, 2057 bp, Muscodor strobelii
  misc_feature: SGI EST ID NO. CUFF.50510.1
  misc_feature: Variant of the nucleotide sequence at SEQ ID NO 21495
agcttggggaagatccctgcactgccataattttcgtgacgatcggcccacgcctcgtcgagtctcagtcgaccagcaaacgggaaagaagcccttgcgcaggcggtctcgacaacgcaattgtttctttctggtagcccacaatcccacaatcaggtacgcaatactgcagcgcgagacacggagtactcaccataaccacatccgacgaatcagcattccgcctgccccttgcgctttcctcagacctgtcgtcggcatctgcgattcaccaagttcgcagtttcgcagtcagcaagcgtggcatcatgtcggcggagaagagaccggctggcgacgacgcgggcgccggccaactgatcgtcaagcgacagaagccaggcaccagcaccgccctctcgcggcgcgatggtcctccgggaagcaatgccctcgtccaatccgtcgtgaggacgagcaacctcgaggcgcccgtgatggagctgggcggccactcgggcgagatcttctcggccagattcgaccccaccggcaggttcgtcgcgtccgggtccatggacaggaacatacgtgagccatctgcgtcctgccccgtgcttgaagactaacgaggcgcagtgttgtggaactcgtccggcgcgtgcgacaactacggcatgttgaccggccacaagggcgccatcctcgacctgcagtggtcccgcgactccgagatcctctactccgcctccgccgacatgcacctggccagctgggacctgacctcgggcgcccgcatacgacgctacgtcggccacgaagagatcatcaacaccttggacatcagcaagcgaggcgaggagctgctcatcagcggcagcgacgacggctccatcggcgtctgggacccccgctccaagaatgccgtcgaccacatcgagaccgacttccccataaccgccgtcgccgtctccgaggccggcaacgagatctactccggcggcatcgacaacgacatcaaggtctgggacatacgcaagaaggccgtcgtctattccatgctcggccacaacgacaccgtcaccagtctgcgtgtttcgcccgactcccagtcgctcctctcctactcccacgactcgaccgcgaagacctgggacatccgccccttcgccccgacagaacgccacatccggacctttgatggcgcgcagatgggcatcgagaagaacctcatccgcgccagctgggacaaggacggcaagaagattgccgtcggtgcaggtgacgggactaccgtcgtgtggtcaagcgacaacggcaagcttctgtacaagctccctggacacaagggcaccgtcaactgcgccgaattcactcccaatgatgagcccattctgttatccgcatcttctgaccgtcgcatactgcttggtgagctgcggtgagagactttacattactccgccgacacaatataagaggaccgaggaatcagacacacagccctttgaaggaggcgcattatcatagctatcaaacaccggaccaaggtaatttgatcatacctacggctgaaattcgtgttggacatggccagggcaatcaatagcctgcctttgaactacaacactcaaggggatacactacagtcgaaaagcagccccgacgaagacttggggacctgggaggaggcatacgaatgcgcttcagctgccgcgcagtatcacggtagttggcgagtacacgaaggcttcatgggtttgtctgcgacgcgctcggctttttcgaagaaaacggcttgaatgcgtccttgggatagtcaatgattgaaaattgatacccagcgaagctcgccaagaaggcgagaccatctataatgtctgtcatgttggataagacgaattgaatcaactttaagccctattatactatgaatggtgttgatgattcccaagaatagaccgcagtcgaagctatagtctagagttatgggtcctccactggcggatcacagagcctctgttcgctgagtgccgggaagtaatatcagacaaaataataaagacctcaagtacgcg

SEQ ID NO: 21498 - DNA, 723 bp, Muscodor strobelii
  misc_feature: SGI cDNA ID NO. 567279
  misc_feature: Encodes the peptide sequence at SEQ ID NO 21499
atggtcgagagcaccagaatggagattcagatcagtcgcgttcgcggcgaagacggcggcggcatagacagaaagaaccgccgtctaaacttgtcactatctcttaccaaaaacataaacacaaacgagttcagcatcttactcatcttactcatcctactcacgacaatattcttctgccatgggttggtgcgtctttgtatgcttctcgtgcgaccgaaacaccgtcgagatgacgcgggcgtgattggcgaaagatttgccaacaccgggtatgccgttccgcagcagcctatccgtgtcgttcttgcgagagacgaggaagcagctggtgttgagagcgaggcaacgaaatttgaaccgccagcttatggattgtggcgagagagtgtgcgcgttgatccaaatcgtatatactggcaacgggcagcagaggtctccccgctttcgtctccagacgcaagtgatacggaagaggatgggcgcccccgaacagcccgtcgtccaccttcatacgtctcggaagacggtgttgattatgtggtcgatgcgcgtcctaggtctattgcgccacctccatcgtccatttactcgcagacggatggattgagaacgccggaaattgcatatacctctaatgagcccttgcctccacatcccgccgagcttgaatctgcgagacggatgggcggaggaagacttggggactggtctatggtataa

SEQ ID NO: 21499 - protein, 240 aa, Muscodor strobelii
  misc_feature: SGI Peptide ID NO. 567279
  misc_feature (31)..(222): NCBI GI: 145602927 Blast Desc: MGG_04692 [Magnaporthe grisea 70-15] gi|145011277|gb|EDJ95933.1| MGG_04692 [Magnaporthe grisea 70-15]
  misc_feature (18)..(237): NCBI GI: 116201045 Blast Desc: CHGG_08407 [Chaetomium globosum CBS 148.51] gi|88176925|gb|EAQ84393.1| CHGG_08407 [Chaetomium globosum CBS 148.51]
  misc_feature (31)..(229): NCBI GI: 256725846 Blast Desc: NECHADRAFT_42842 [Nectria haematococca mpVI 77-13-4]
  misc_feature (31)..(203): NCBI GI: 171677450 Blast Desc: protein product [Podospora anserina] gi|170936793|emb|CAP61451.1| protein product [Podospora anserina]
  misc_feature (31)..(228): NCBI GI: 46111531 Blast Desc: FG02647.1 [Gibberella zeae PH-1]
  misc_feature (31)..(191): NCBI GI: 85095316 Blast Desc: NCU05798 [Neurospora crassa OR74A] gi|28921517|gb|EAA30822.1| [Neurospora crassa OR74A]
  misc_feature (56)..(188): NCBI GI: 156065915 Blast Desc: SS1G_00968 [Sclerotinia sclerotiorum 1980] gi|154691827|gb|EDN91565.1| SS1G_00968 [Sclerotinia sclerotiorum 1980]
  misc_feature (91)..(189): NCBI GI: 154305582 Blast Desc: BC1G_08560 [Botryotinia fuckeliana B05.10] gi|150853347|gb|EDN28539.1| BC1G_08560 [Botryotinia fuckeliana B05.10]
  misc_feature (31)..(193): NCBI GI: 258576809 Blast Desc: [Uncinocarpus reesii 1704] gi|237902852|gb|EEP77253.1| [Uncinocarpus reesii 1704]
  misc_feature (91)..(189): NCBI GI: 154305584 Blast Desc: BC1G_08561 [Botryotinia fuckeliana B05.10] gi|150853348|gb|EDN28540.1| BC1G_08561 [Botryotinia fuckeliana B05.10]
MVESTRMEIQISRVRGEDGGGIDRKNRRLNLSLSLTKNINTNEFSILLILLILLTTIFFCHGLVRLCMLLVRPKHRRDDAGVIGERFANTGYAVPQQPIRVVLARDEEAAGVESEATKFEPPAYGLWRESVRVDPNRIYWQRAAEVSPLSSPDASDTEEDGRPRTARRPPSYVSEDGVDYVVDARPRSIAPPPSSIYSQTDGLRTPEIAYTSNEPLPPHPAELESARRMGGGRLGDWSMV

SEQ ID NO: 21500 - DNA, 2812 bp, Muscodor strobelii
  misc_feature: SGI EST ID NO. CUFF.50484.0
  misc_feature: Variant of the nucleotide sequence at SEQ ID NO 21498
agggcattcactgccacccatcaggtttcggctgcatcatcattggctaacaggggcatgtgttcctgcgttgggaaccattttgcccctgaaccgagcagctcacccagttagtgctcgtccgctctagacgtgccgagcgtgccttgtgctccgtcttgctgcgtcgatgattattatcgtgcgccatgacccggcatttgctcaaaaacatgggaaatgcagcctgttggccagtcctgcgcgagggtggcacaccaagtgaaatcctacttcgtccatccctatcagacgaagcgggagctattggatctgtgcgtacataccaactattcggcagcttaggggttctcaggggtccgagtcttggatccgatggccttattcatgttatcgccttgtctcgccccaaacgctcgtgacgtttgtactcttgatcatggtgccacatttctctaacaaacggactcgcttgtatacctcgactgcgttcccattcccgaactgaatgttgtttactcttgttggtttatctttcgctgaatgaagcgtacaggtcttgcactcgttcagatgaccatatgctattgaaggactattgacgtggtttggttcttgccactcgctccgtcacctcgtcttatactctggaagtattgacatcgacccctcgatccaaacccgattgaacggcaattgtttcaacctcccgccttactggccagtcgtttttcagcacaggcggacttgcattcgagtcgatacagattcttcacttttgtcttcgctttgtttttacagtgtcattctgcagctttccgtctacggttacgaactaggtcccgagccgaatccattcgttgacaatctacatctcggaatcttgtaaacaataccattttttacaacgcgtcaggacgccctgtttatcaccaatcagtctgcggctgccacatcttgttttttacattcgataccatctgttattctcatcctgcttgtcgagtgtcgctgtcaaccccactccaagactgcctcattatagtcatataccattgatgacctttgacctacaaagcatgatcggaccccaaaactcattctgattttttgactggtgtcaatttttttgttgtcatcaactccaatcatggacttcttaagaaacagtatccttcggagaggacagcagcctcaagagagtcaaacacctgatctcgaacaacaagcagagacatttgagcaacgaccgcatcatgagtcgaggctattcgaagagactcgaaccaatcttctcaatcccttcacaggcaggccaacgcggggacgacgatcgagtgatgatgaggtcatcgacgatgtagagaatgagataaaagaatcgcgtttcaatttagggcttcgggggtcacccgcgacccgatttcgtatgccaagtctatcgacaatgcgaacgagaaattctgtgaacccattatcgcctgtggacgttcaaggtgaagatccgttgccacgatcccgtcctcaatcccagcgattccccgtcatagctcaccctccagctgtccgaatgagtgcagagggtacagaacggtctcttggacggacgagattcaacggaaccgatcccgcggaggtgtatttagctgagctggccgaaactggaaggcggcgtcaacatagacacagacatcaacatggtcgagagcaccagaatggagattcagatcagtcgcgttcgcggcgaagacggcggcggcatagacagaaagaaccgccgtctaagtttctgttctgcttcccttgggtgaagtcgagacaagtccgagcacacattttacgctgctttgtgtcgggtctggtattaatacttatgctaacaatttacttgtcactatctcttaccaaaaacataaacacaaacgagttcagcatcttactcatcttactcatcctactcacgacaatattcttctgccatgggttggtgcgtctttgtatgcttctcgtgcgaccgaaacaccgtcgagatgacgcgggcgtgattggcgaaagatttgccaacaccgggtatgccgttccgcagcagcctatccgtgtcgttcttgcgagagacgaggaagcagctggtgttgagagcgaggcaacgaaatttgaaccgccagcttatggattgtggcgagagagtgtgcgcgttgatccaaatcgtatatactggcaacgggcagcagaggtctccccgctttcgtctccagacgcaagtgatacggaagaggatgggcgcccccgaacagcccgtcgtccaccttcatacgtctcggaagacggtgttgattatgtggtcgatgcgcgtcctaggtctattgcgccacctccatcgtccatttactcgcagacggatggattgagaacgccggaaattgcatatacctctaatgagcccttgcctccacatcccgccgagcttgaatctgcgagacggatgggcggaggaagacttggggactggtctatggtataagaagaaaccaaagagggcgtaaatgctcatgattgcgaacgcaatgttaggtgaagttgggggacagcagcagtgggtgatgtaaattgcaggcggaagtggcacggagagcatgagcgtacacatccacagtcggcaccaaaattaacggcgacataatcagcaacagctggaatcttagcattggcgttggggaacttacactgagatacatattatttgaagatgaataacgatacaaacggcaatatcagaaagacatagcgttcactaacttgggcccagtgtttg

SEQ ID NO: 21501 - DNA, 657 bp, Muscodor strobelii
  misc_feature: SGI cDNA ID NO. 567280
  misc_feature: Encodes the peptide sequence at SEQ ID NO 21502
atgtcttctctttctcgtagagcatgctacaagtgtggcaacgttggccactatgctgaggtttgctcctccgctgagcgcctttgctacaactgcaagcagccaggccatgaatctaatcaatgtcctcttcctcgtaccactgaggccaagcaatgctaccactgccaaggtctgggacatgttcaggctgactgcccaacactccgtctgagcggcgcgggtgccggcaatggtcgatgctacaactgcggccagcctggccacttggctcgcgcctgccctaatcctgctggtgcagccatgggccgtggtgctcccatgggtcgtggcggcttcggttacgctggccgtggtggttttgctggtgggcctcgtcctgctacttgctacaagtgcggcggtcccaaccactttgcccgtgactgtcaggctcaggctatgaagtgctacgcttgcggaaagcttggtcatatctcccgagactgcaccgctcctaacggtggccctttgaataccgcaggcaagacttgctatcagtgcggcgaggctggtcacatctctcgagactgcccccagaagaactccgctcccggtgctgaaatcccagtcgatgctgagattccggctccggcctctatccctcctgtcgcctaa

SEQ ID NO: 21502 - protein, 218 aa, Muscodor strobelii
  misc_feature: SGI Peptide ID NO. 567280
  misc_feature (79)..(96): Pfam Id: PF00098 Pfam Desc: Zinc knuckle
  misc_feature (176)..(193): Pfam Id: PF00098 Pfam Desc: Zinc knuckle
  misc_feature (148)..(165): Pfam Id: PF00098 Pfam Desc: Zinc knuckle
  misc_feature (128)..(145): Pfam Id: PF00098 Pfam Desc: Zinc knuckle
  misc_feature (27)..(44): Pfam Id: PF00098 Pfam Desc: Zinc knuckle
  misc_feature (51)..(68): Pfam Id: PF00098 Pfam Desc: Zinc knuckle
  misc_feature (7)..(24): Pfam Id: PF00098 Pfam Desc: Zinc knuckle
  misc_feature (1)..(218): NCBI GI: 46111529 Blast Desc: FG02646.1 [Gibberella zeae PH-1]
  misc_feature (1)..(211): NCBI GI: 145602929 Blast Desc: conserved [Magnaporthe grisea 70-15] gi|145011278|gb|EDJ95934.1| conserved [Magnaporthe grisea 70-15]
  misc_feature (1)..(218): NCBI GI: 116201047 Blast Desc: CHGG_08408 [Chaetomium globosum CBS 148.51] gi|88176926|gb|EAQ84394.1| CHGG_08408 [Chaetomium globosum CBS 148.51]
  misc_feature (3)..(205): NCBI GI: 261199101 Blast Desc: zinc knuckle domain-containing protein [Ajellomyces dermatitidis SLH14081] gi|239595104|gb|EEQ77685.1| zinc knuckle domain-containing protein [Ajellomyces dermatitidis SLH14081]
  misc_feature (4)..(198): NCBI GI: 121709158 Blast Desc: zinc knuckle domain protein [Aspergillus clavatus NRRL 1] gi|119400475|gb|EAW10900.1| zinc knuckle domain protein [Aspergillus clavatus NRRL 1]
  misc_feature (3)..(205): NCBI GI: 239609786 Blast Desc: zinc knuckle domain-containing protein [Ajellomyces dermatitidis ER-3]
  misc_feature (4)..(192): NCBI GI: 119177704 Blast Desc: CIMG_07760 [Coccidioides immitis RS] gi|240107592|gb|EER25771.1| zinc knuckle containing protein [Coccidioides posadasii C735 delta SOWgp]
  misc_feature (1)..(205): NCBI GI: 85095325 Blast Desc: NCU05800 [Neurospora crassa OR74A] gi|28921519|gb|EAA30824.1| conserved [Neurospora crassa OR74A]
  misc_feature (4)..(197): NCBI GI: 238498920 Blast Desc: zinc knuckle nucleic acid binding protein, [Aspergillus flavus NRRL3357] gi|220693969|gb|EED50314.1| zinc knuckle nucleic acid binding protein, [Aspergillus flavus
  misc_feature (4)..(198): NCBI GI: 242824530 Blast Desc: zinc knuckle nucleic acid binding protein, [Talaromyces stipitatus ATCC 10500] gi|218713198|gb|EED12623.1| zinc knuckle nucleic acid binding protein, [Talaromyces ATCC
MSSLSRRACYKCGNVGHYAEVCSSAERLCYNCKQPGHESNQCPLPRTTEAKQCYHCQGLGHVQADCPTLRLSGAGAGNGRCYNCGQPGHLARACPNPAGAAMGRGAPMGRGGFGYAGRGGFAGGPRPATCYKCGGPNHFARDCQAQAMKCYACGKLGHISRDCTAPNGGPLNTAGKTCYQCGEAGHISRDCPQKNSAPGAEIPVDAEIPAPASIPPVA

SEQ ID NO: 21503 - DNA, 2689 bp, Muscodor strobelii
  misc_feature: SGI EST ID NO. CUFF.50562.1
  misc_feature: Variant of the nucleotide sequence at SEQ ID NO 21501
gcgacgtcgtggcacaatctagggaggtattctccaatatgtcaagcactcatactaaagatgtttgtacgcgaggaaaggtatataccatgcaaatatcgaattcaaaagttgacgatgtaagcgcctggccaggatagatctgccatctggcctttggctttcctcattttggcatcgtcgccgttgcgggtcgttgtcttatgtcgatgcccaggcaggccaggcccaggcttgccgacgccaggtgtccaggacagagaaggacgatacatgcctttcgttgtcattctgtggttcatcagactttgtcaaggcgtcgacagatgtaccaacggctgtcttgtcaagcgagcgaacagcttctccattttggcagtgatacagatccatccaatccccctcgttgatgaccccctccatcccatcgctggacccatactccctacgtcggtccctactcgtttctcgctcggccccttctgcctctatactgggatagggctaggctaggcgtcggagtgtgtggtcactactcacatccctccctccagtgtccactccaccctcactctagacggacgtaggtcatgtccccagtcacactctgtgcaagtaaaggcaaggtcttttgccctcggccctaatctccgtgtttccctctctttccttttcccccttcatcacgctttcgcatcacattcaaatcgatacctttgaggtcgccgtgcttgggagaagaagacgagagtcgcttggaagctgaagaagtgaaggttgtcgttggactaggaagttaagagaagttagagggttgagcatactcacacttttttcgccatgtcttctctttctcgtagagcatgctacaagtgtggcaacgttggccactatgctgaggtttgctcctccgctgagcgcctttgctacaactgcaagcagccaggccatgaatctaatcaatgtcctcttcctcgtaccactgaggccaagcaatgctaccactgccaaggtctgggacatgttcaggctgactgcccaacactccgtctgagcggcgcgggtgccggcaatggtcgatgctacaactgcggccagcctggccacttggctcgcgcctgccctaatcctgctggtgcagccatgggccgtggtgctcccatgggtcgtggcggcttcggttacgctggccgtggtggttttgctggtgggcctcgtcctgctacttgctacaagtgcggcggtcccaaccactttgcccgtgactgtcaggctcaggctatgaagtgctacgcttgcggaaagcttggtcatatctcccgagactgcaccgctcctaacggtggccctttgaataccgcaggcaagacttgctatcagtgcggcgaggctggtcacatctctcgagactgcccccagaagaactccgctcccggtgctgaaatcccagtcgatgctgagattccggctccggcctctatccctcctgtcgcctaaacgtagtcatagaatgaggtagggcgacatgaagtatcagctatgcgcttagctctacttcaagttagggagggtttcatttttcgaaattagtggtaagcctgtttgaaacatgctgccacggattcgaacaacaggcagttcaaatacccagattgactgcatatctcattgcgtctttggaccgatctcaacgagcatttacctgcttcccatttcattggcatttcaccacatcatcaattataaaccccatttcacactattcatgtacaccaggatgttaggttacaatctcccctggtctcctcatgtttgaaattttattgccttatttcatcatacgactcacggcgcacatgaccaactacggctagcaactcctgttacgcacacaaacgaatgacctatcttcagggcagacttaaacctcggcgaggtgcccatcaacttcttgggatgaggcaagatttcatcctcttttgtaccactatcaattgcctcatcagcaaagggtttgtgcgtcagggtaaattcgagcatagacaaaatagtgaaaacggcgggggcgtgtgcctgatctcattcgctatgctctgagaaaagagaaaaagagaagaaagatatttggggaacagtacactcaactacgaggggaaataccatgatttacacgaaacttttgagataccattcatcaggcacctttcatcactttttgcggagcggcaaaaagtcaggcgacacaggcaaggttggaggcaagaacacgaagtaaatcgatctgactcggactggaaaaaaggtgagggggttcatcagagtggagtgtcgagattggaaaaaagaaaggtaggcaagggctttcatggtggagtttgaagcacgcagagagggaaggtagtcttgttgaatagcaacgtcgtgtcgagcaagtcagtcagttagtttggaacggaaagagcatagaaacaatccgcatgttcttatgtctactatatgattgtttctatactttggatgacagcattggataccggaaccgctatctgtcgggctgttaatgaaagaactacaggtccataccttaggtacctgttattcggtgggatcgctagtgactaataagcgaatggagccgcctcgtggccccatcgcaggaatatattcacacatagaacgccttcctcca

SEQ ID NO: 21504 - DNA, 1308 bp, Muscodor strobelii
  misc_feature: SGI cDNA ID NO. 567281
  misc_feature: Encodes the peptide sequence at SEQ ID NO 21505
atggccagctcgccgtcagccaggcaggcccctggtggcttcatcccaccacctttcacgtctctgccttctcccgcgccgagcaccgcctcgagtcgtacggccgcgctccttccgcatccgcggtcgaagcccctggccccgggctcaaagaaagaggactatgctagagactatgtttctcgtcgcctcctacatatctctcgccgctttgtcaagaagcatggcatacccgatcctgccgatgaggtgactggctacgagtccatggacgagtgttgccgtgatttagaagaggttgtcgacgtgctgtggtattcgggaactcctagccttcaggtcccttatttgcttaacgtcgcactcgccttcaacgactaccttccatcctttactccctcgcctcgaccgacttttgcactcctccgaaaactggatcactgttttgtcagcttgcttgtaggtcacgatatcaagacacaagcacctctacccgggttcgcttcgaatgtaggcagcggtggctttcgacagaggttcacaaagacggacatggtgcgctgtaagagcctcgctgacgaaacccgcatgatagtcgccatggtaatgagcggcgaggccgatgtggtggactacgcggacgatgatgacaacaacgctaacgacgctcggaagcggccaacgtgtgtcaagcccctggccgttctggactatattgactcaccttcacatcgccaaccgcagagcgagactattaaggtcgaggaagtaaatattgatgacgatacggtcgacggaatcgagacggagcagatgcatggtcctttgaagcgcaaagcagacgacatatctcacgatctggacctcgacagcaacgtcaaggtcgaagatgacgccgactctaatgtcgatctcgatgagatcgcggcgttagaagaaccatcagccccggatccaaaggtgaacggtccgcaactgtgtggcaaccaatttcattgggccctggatgaggacgatgattcagacgacgatgagcggctgaacacaacgatatccacaggacccgatgctcgtagttcgggcaaggcaccatcgtctcctcctcttctcgtgggttccggtgaagaggatgctggcatcgagaacgacgaggagaatagggaagaggagcttgacagagacgaagacgaggatgaagacgaagacgaagacgaagatgaagagttggtcatgaacgtaggcaaggtttatgaaaagactcttactcagctcggtcttgaccttggcacgtctattgtcgacgattga

SEQ ID NO: 21505 - protein, 435 aa, Muscodor strobelii
  misc_feature: SGI Peptide ID NO. 567281
  misc_feature (12)..(215): NCBI GI: 145602913 Blast Desc: MGG_13774 [Magnaporthe grisea 70-15] gi|145011268|gb|EDJ95924.1| MGG_13774 [Magnaporthe grisea 70-15]
  misc_feature (12)..(206): NCBI GI: 85093691 Blast Desc: NCU05771 [Neurospora crassa OR74A] gi|28921197|gb|EAA30510.1| [Neurospora crassa OR74A]
  misc_feature (10)..(203): NCBI GI: 46111541 Blast Desc: FG02652.1 [Gibberella zeae PH-1]
  misc_feature (38)..(208): NCBI GI: 156065875 Blast Desc: SS1G_00948 [Sclerotinia sclerotiorum 1980] gi|154691807|gb|EDN91545.1| SS1G_00948 [Sclerotinia sclerotiorum 1980]
  misc_feature (38)..(204): NCBI GI: 154301723 Blast Desc: BC1G_10013 [Botryotinia fuckeliana B05.10] gi|150855675|gb|EDN30867.1| BC1G_10013 [Botryotinia fuckeliana B05.10]
  misc_feature (10)..(204): NCBI GI: 256725843 Blast Desc: NECHADRAFT_44088 [Nectria haematococca mpVI 77-13-4]
  misc_feature (12)..(200): NCBI GI: 115385344 Blast Desc: conserved [Aspergillus terreus NIH2624] gi|114196911|gb|EAU38611.1| conserved [Aspergillus terreus NIH2624]
  misc_feature (21)..(223): NCBI GI: 121709149 Blast Desc: conserved [Aspergillus clavatus NRRL 1] gi|119400472|gb|EAW10897.1| conserved [Aspergillus clavatus NRRL 1]
  misc_feature (11)..(200): NCBI GI: 238498924 Blast Desc: conserved [Aspergillus flavus NRRL3357] gi|220693971|gb|EED50316.1| conserved [Aspergillus flavus NRRL3357]
  misc_feature (12)..(200): NCBI GI: 239609782 Blast Desc: conserved [Ajellomyces dermatitidis ER-3]
MASSPSARQAPGGFIPPPFTSLPSPAPSTASSRTAALLPHPRSKPLAPGSKKEDYARDYVSRRLLHISRRFVKKHGIPDPADEVTGYESMDECCRDLEEVVDVLWYSGTPSLQVPYLLNVALAFNDYLPSFTPSPRPTFALLRKLDHCFVSLLVGHDIKTQAPLPGFASNVGSGGFRQRFTKTDMVRCKSLADETRMIVAMVMSGEADVVDYADDDDNNANDARKRPTCVKPLAVLDYIDSPSHRQPQSETIKVEEVNIDDDTVDGIETEQMHGPLKRKADDISHDLDLDSNVKVEDDADSNVDLDEIAALEEPSAPDPKVNGPQLCGNQFHWALDEDDDSDDDERLNTTISTGPDARSSGKAPSSPPLLVGSGEEDAGIENDEENREEELDRDEDEDEDEDEDEDEELVMNVGKVYEKTLTQLGLDLGTSIVDD

SEQ ID NO: 21506 - DNA, 4010 bp, Muscodor strobelii
  misc_feature: SGI EST ID NO. CUFF.50507.0
  misc_feature: Variant of the nucleotide sequence at SEQ ID NO 21504
cggatgctcacctttctcccgctttattatcatgagaccatcgccttgacggatgaatcccttctcgggaattttggtgtaaaagccataaagttaccgtagattaagacacaaagcggcgtggaaggcagaattatcttgatccacggcatttccacacatggccagctcgccgtcagccaggcaggcccctggtggcttcatcccaccacctttcacgtctctgccttctcccgcgccgagcaccgcctcgagtcgtacggccgcgctccttccgcatccgcggtcgaagcccctggccccgggctcaaagaaagaggactatgctagagactatgtttctcgtcgcctcctacatatctctcgccgctttgtcaagaagcatggcatacccgatcctgccgatgaggtgactggctacgagtccatggacgagtgttgccgtgatttagaagaggttgtcgacgtgctgtggtattcgggaactcctagccttcaggtcccttatttgcttaacgtcgcactcgccttcaacgactaccttccatcctttactccctcgcctcgaccgacttttgcactcctccgaaaactggatcactgttttgtcagcttgcttgtaggtcacgatatcaagacacaagcacctctacccgggttcgcttcgaatgtaggcagcggtggctttcgacagaggttcacaaagacggacatggtgcgctgtaagagcctcgctgacgaaacccgcatgatagtcgccatggtaatgagcggcgaggccgatgtggtggactacgcggacgatgatgacaacaacgctaacgacgctcggaagcggccaacgtgtgtcaagcccctggccgttctggactatattgactcaccttcacatcgccaaccgcagagcgagactattaaggtcgaggaagtaaatattgatgacgatacggtcgacggaatcgagacggagcagatgcatggtcctttgaagcgcaaagcagacgacatatctcacgatctggacctcgacagcaacgtcaaggtcgaagatgacgccgactctaatgtcgatctcgatgagatcgcggcgttagaagaaccatcagccccggatccaaaggtgaacggtccgcaactgtgtggcaaccaatttcattgggccctggatgaggacgatgattcagacgacgatgagcggctgaacacaacgatatccacaggacccgatgctcgtagttcgggcaaggcaccatcgtctcctcctcttctcgtgggttccggtgaagaggatgctggcatcgagaacgacgaggagaatagggaagaggagcttgacagagacgaagacgaggatgaagacgaagacgaagacgaagatgaagagttggtcatgaacgtaggcaaggtttatgaaaagactcttactcagctcggtcttgaccttggcacgtctattgtcgacgattgatcacagtttcgtggatttggtcagatgccatcaacttctagcgcccaggacatcaaacttgtgctttaggcacacatcagttcgtctcatcaacgagacccctgttccctttacagtaacgactgaggaattgaccaatgagtggccattctactaaatcgccatctccgaaaactggtccggtgcatttgttttaccatgctgatggtgtggctattcatgaatgaatgcgaaatggactatgtggtcgccgtggagccttttggacaagatcagaggtcgtgatatttcacgacctctggaaaatgccaaagttcggtacctccttactccctagataagtgaagcacgtccaatatcgtatttgcgcacgctcgcccgaaggttacgagagtgttgcgaggacgtctcccctggaaccaccgagtgatctttagctggttgaccaaacgtggacgagagccatatttgccgacaagtgatataacattaacagacattcaagcggcaagggactcataggtgctccccggtacccattgccatagtgaagtgaggtctggcgatcccttgactccagtgtcggatctccgggactaggagcagagcaggtactgttggtcggtgacagcactgtctattggccgtcccgacatcagaatcctgctcttttagatggaccgcgcgaactggctgcttataagaaggtctactagattgcatcgtcctcttatggttgcaggtcggaacaagagcggcttcacacgaaaggttgctcgagacgtatctatcaggtaaaacgagctgttcttagagcactgcctagttcaaacaaacgttggccctggaacagtttgatacactagcaatagcgaagaataaccaagtactacacacatcaacacagtgatcagtttgagtgctgcgccaatgatgtgattcgaaaaatgggcaagaacgcctccgcatacagcacgcgattcacatctcggctgcgacaatcagagtaatagtcaacggcatggggtcaaaccataagacacgccccaaagacatggccgcacttgagagtaggatcacaagcgtcgatggatttcagagaagagtcgcaacgataggtacagtaatataaagtgttagatggaccatctgatcctcgtcctcacgtcacattgagtctgaatatatgtgcccctccaatgcggccgaatgcaacggatttcaatgctactgcttgaggccagtgaagatcacctccacgccaatgtacgtagtaatacacgcaacaactaccgcattcacagtcacgtacttcaaccgggagaggccaaaagaaattactcactttttaagcagagagtatctctccagctggtgatgttggagtgaatggagctaattagtgagaatagagctgcgacaacccctccccagcatttggcgagatatccgtatatgtagacgacagcggctcggagcgggcatagctagagcaggggatacatagcagggttaattagcacgcccggcagggttggcagcgctgggaaggattgcaggagatctgggatggctgcgagaatggggattcggatggtgggcatcaggctggctggacgggctggactgggcggaaactggatgactcgggcgtgttacaggatgcattccaggcttgaccccgccgggtgcatgacagcagcccccggcgagctccacccgaagaagcgccccgggagaagtaggagagctagtagcaaccttgataactggccaaatcgacgctggaaggcaatcacgacatcagtcagtcacgactcgcgactcgcagcttcttcgtcgagcgatgggctcttgtgtgatcacccacttccatctcaagctctctctcatttcctcggtgcgtatggagacattgacgaggtagtgtgtagctgtgcattcacatctgagggcacgggacgtcggtgcaatatcgtttcaggcacaatcgacgtcgtcattccagcggagccggacatggtgctaaggtatcataagctagatcggagtatctgctgtacttaggtatgcacagtcgctgctagcggcttatcgacgaatactacctaccacgcctatcacgcctatcacgtccatcacgctaggttggtccagcttcggcctcagcagcagcagcagcagcggcggtagtgaccgtagcagtaaccttggtacctcactcactagaccctgtctacccgacccccaacattgaagctccaagctgtacgacttgactccagtcacgcaacacatcgcgacctctgcggactgcacagctgaggtatacctacatacatgcactctggtgctggcggaggtgttgttgttgctggttgtcaaccctgagagttcttgatcccccattcccagtcgccggaccccccgcccgacccgagacgagacgagacgagacgagacgagacgacggccgacggcagacgggcagtgatcgggttgcaacctcgccgtccccacgggcgacgactgtgatcgccgc

SEQ ID NO: 21507 - DNA, 1257 bp, Muscodor strobelii
  misc_feature: SGI cDNA ID NO. 567282
  misc_feature: Reduced expression when VOC is produced
  misc_feature: Encodes the peptide sequence at SEQ ID NO 21508
cgcgctaactacggcagccacgggagccatggcaaccacggccacggccaggcccgacacaagccgctcgacctggccgggccctcggccgaggagatcaagcagaacccctactacgacgccagcctcggggcgccgacggtcaagccgcgccaggcccgccagctcgtcttcaaccagaagggcaagtacatccaccaggccaacgccctgcgccgccaggccgccctcgaggccctcaagaagaagatcgccctgcagtcccgcaaggccggcatcgacgacgacatcgacgtcgagcgcagcttcctcgtcgacgcccccccggacatcgagtggtgggacgaggcgctggtcgtcgcgcccgactacgacgacatcgacgcccccggcgccctcaagatcgactccgacgacaccatcgtcaccagctacgtccagcaccccgtcgccatcgagcccccgcaggaccagcaccgacccgcccccaagcccatgttcctgacctcggacgagcaggccaagctgcgccgccagcgccgcatggccgacctgaaggaggagcaggccaaggtccgactggggctcgtgcccgcgccgccccccaaggtcaagaagggcaacctcatgcgcgtcctcggcgaggaggccgtcaaagaccccaccgccgtcgaggcccgcgtcaacaaggagatcgccgaccgccacagcgcccacctgcagaccaacgaggaccgcaagctcaccaaggaccagcgccacgacaagctcgccaggaaccaggcccaagacgtcgccaagggcgtccacatgctcgtcttcaaggtcaactccctcgccaacggccagcaccgcttcaagatctggaagaacgccgaccagcacggcctcaagggcctcgtcgtcatgcaccccaagcagagcctcgtcgtcgtcgagggcggcgagcacagcgtcaaccactacaagaagctcatgctcaaccgcatcgactgggccgagaacgcgccctcgcgggaccgcgcccccgaccccgaccgcgacaacctgcacgactggctgcgcgccgaggacgacaagggcgacctcaaggacctcgccctcaacaagtgccacctgctgttcgagggcgaggtcaagacgcagaccttcaacaagttcaggaccaccatctgcgagaccgatgccgaggccaggcaggcgctgagcagggggaagctcgacagtttctggaacatggccaagtcgactacgtag

SEQ ID NO: 21508 - protein, 418 aa, Muscodor strobelii
  misc_feature: SGI Peptide ID NO. 567282
  misc_feature (35)..(416): Pfam Id: PF08572 Pfam Desc: pre-mRNA processing factor 3 (PRP3)
  misc_feature (21)..(416): NCBI GI: 156047831 Blast Desc: SS1G_09605 [Sclerotinia sclerotiorum 1980] gi|154694000|gb|EDN93738.1| SS1G_09605 [Sclerotinia sclerotiorum 1980]
  misc_feature (26)..(416): NCBI GI: 256729200 Blast Desc: [Nectria haematococca mpVI 77-13-4]
  misc_feature (17)..(416): NCBI GI: 119186663 Blast Desc: CIMG_03379 [Coccidioides immitis RS]
  misc_feature (17)..(416): NCBI GI: 240108484 Blast Desc: CPC735_008310 [Coccidioides posadasii C735 delta SOWgp]
  misc_feature (23)..(416): NCBI GI: 261200869 Blast Desc: U4/U6 small nuclear ribonucleoprotein [Ajellomyces dermatitidis SLH14081] gi|239593907|gb|EEQ76488.1| U4/U6 small nuclear ribonucleoprotein [Ajellomyces dermatitidis SLH14081]
  misc_feature (23)..(416): NCBI GI: 239607219 Blast Desc: U4/U6 small nuclear ribonucleoprotein [Ajellomyces dermatitidis ER-3]
  misc_feature (32)..(416): NCBI GI: 46116900 Blast Desc: FG04292.1 [Gibberella zeae PH-1]
  misc_feature (16)..(417): NCBI GI: 67516891 Blast Desc: AN0727.2 [Aspergillus nidulans FGSC A4] gi|40746213|gb|EAA65369.1| AN0727.2 [Aspergillus nidulans FGSC A4] gi|259488994|tpe|CBF88900.1| TPA: U4/U6 small nuclear FGSC
  misc_feature (23)..(416): NCBI GI: 225560309 Blast Desc: U4/U6 small nuclear ribonucleoprotein Prp3 [Ajellomyces capsulatus G186AR]
  misc_feature (28)..(417): NCBI GI: 85077306 Blast Desc: NCU01637 [Neurospora crassa OR74A] gi|18307452|emb|CAD21512.1| related to U4/U6 small nuclear ribonucleoprotein hPrp3 [Neurospora crassa] NCU01637 [Neurospora
  misc_feature: Useful for introducing or modulating the production of volatile compounds
RANYGSHGSHGNHGHGQARHKPLDLAGPSAEEIKQNPYYDASLGAPTVKPRQARQLVFNQKGKYIHQANALRRQAALEALKKKIALQSRKAGIDDDIDVERSFLVDAPPDIEWWDEALVVAPDYDDIDAPGALKIDSDDTIVTSYVQHPVAIEPPQDQHRPAPKPMFLTSDEQAKLRRQRRMADLKEEQAKVRLGLVPAPPPKVKKGNLMRVLGEEAVKDPTAVEARVNKEIADRHSAHLQTNEDRKLTKDQRHDKLARNQAQDVAKGVHMLVFKVNSLANGQHRFKIWKNADQHGLKGLVVMHPKQSLVVVEGGEHSVNHYKKLMLNRIDWAENAPSRDRAPDPDRDNLHDWLRAEDDKGDLKDLALNKCHLLFEGEVKTQTFNKFRTTICETDAEARQALSRGKLDSFWNMAKSTT

SEQ ID NO: 21509 - DNA, 4364 bp, Muscodor strobelii
  misc_feature: SGI EST ID NO. CUFF.50571.0
  misc_feature: Variant of the nucleotide sequence at SEQ ID NO 21507
cacgggagccatggcaaccacggccacggccaggcccgacacaagccgctcgacctggccgggccctcggccgaggagatcaagcagaacccctactacgacgccagcctcggggcgccgacggtcaagccgcgccaggcccgccagctcgtcttcaaccagaagggcaagtacatccaccaggccaacgccctgcgccgccaggccgccctcgaggccctcaagaagaagatcgccctgcagtcccgcaaggccggcatcgacgacgacatcgacgtcgagcgcagcttcctcgtcgacgcccccccggacatcgagtggtgggacgaggcgctggtcgtcgcgcccgactacgacgacatcgacgcccccggcgccctcaagatcgactccgacgacaccatcgtcaccagctacgtccagcaccccgtcgccatcgagcccccgcaggaccagcaccgacccgcccccaagcccatgttcctgacctcggacgagcaggccaagctgcgccgccagcgccgcatggccgacctgaaggaggagcaggccaaggtccgactggggctcgtgcccgcgccgccccccaaggtcaagaagggcaacctcatgcgcgtcctcggcgaggaggccgtcaaagaccccaccgccgtcgaggcccgcgtcaacaaggagatcgccgaccgccacagcgcccacctgcagaccaacgaggaccgcaagctcaccaaggaccagcgccacgacaagctcgccaggaaccaggcccaagacgtcgccaagggcgtccacatgctcgtcttcaaggtcaactccctcgccaacggccagcaccgcttcaagatctggaagaacgccgaccagcacggcctcaagggcctcgtcgtcatgcaccccaagcagagcctcgtcgtcgtcgagggcggcgagcacagcgtcaaccactacaagaagctcatgctcaaccgcatcgactgggccgagaacgcgccctcgcgggaccgcgcccccgaccccgaccgcgacaacctgcacgactggctgcgcgccgaggacgacaagggcgacctcaaggacctcgccctcaacaagtgccacctgctgttcgagggcgaggtcaagacgcagaccttcaacaagttcaggaccaccatctgcgagaccgatgccgaggccaggcaggcgctgagcagggggaagctcgacagtttctggaacatggccaagtcgactacgtagagtctgcacatctatccctggaatgcatacatgtagataagaggcctgaatatgataccctgaagactgaatagaggcttctttccatgaaaaccccctttttgcctacccacttgctgtgacctataggaccttatgtgactatggggcgagaatgaacggctcgacgtctgttgctaatctgtttagtgcctgtctatcattctcagacctgccgtatttcacgcacatgtccacgtcccaatgagctcgcacaatctaatgaccacaatggagatcagctcatccgtcgagctccatcatgccctcgtcgagatcgtcgtcatccaggtcgtagtcgtggtccgccgcctgttgtgcctgcgccctcctcagcgcctccaccagctcgacgtccctgttggcctgcctctctcggatttcctcctcctcgactttcttctggtgagccttgagatcctcccagctccacatgctgatgccgtcctggtccttgctcttgaacgggcgtgccatgtcccgcaggaatctcttcgccgtgatgatggccatgtccgtgctcaagttgccatccacctccagcatcgcctggttgatccacttcgggagctgcgtcctcttcttctggaatcgccggtccgccagcaccatgatcccgtagtcgtctttgccgcgcaacacgcggcccaggcactgcgcggcgtgccgcatggcgtcgaaggacaagaagtcgttctctcggatccggtacgcctctcgcagaaactcgagccgagccttgaggatgcgcgattccgtgtactgaaacggcacgccgatacacagcaccgtccgtccgtactggtgatcgaaatcgataccctccgacaccttgccacgcgcgacacagagcagcacggcccctcgcccgttacaacacgccgttcggtacgtctccagcgcgagcgacgtctcctgtgcgtcgggcgtctcgaccaggatcagcttgtacttccacacctcgtccaagatgcccataccctgccacatgctgatgatggattccatgtagaggtacgacgggaagaagacgaccatgccgtcgggcgtgatccgcgcgaactcggtcaagaggttgccgtagttgcgcacgacgctcggctcgttccggacctggaagctcgtcgagaccggcgcctggtcgctgccacgcgtcacaatcatcggcaagaagctgcgtctcgccagcgtcatcgcgtacgactcttgcaccaccgtgttgaagccgagcatcttggggtagatctccagcggcgagatcgtaccggacgtgatgatgacggagctgaaccggtcgaatacgggcttgatggcgatggccgcgtccaagcacgtgaagtgcagcacgggattaggcacctcggccgtgtcggattcgaaaggctctagtataagtagaaagcccttctcgtaggtggcgaccagcgtggcgaaggtggccacttcttgaagaggctggtagtcctcgatattggtgagctccagtgtcctcaccaacgaggtgagccgctcagcgcagaaccgtagaggcttcttctcgatgaacgtgtgttctctgaggtgagataagaaggaaggcggcgtctccgatatcacctggcgtactttcatccgtgtcttgagatactctatgaaccttttcaggaaagccacaaagtgttctgccctccgtatatttccaggcaccgcctccttcagcaggtcgtccggtagcgctgggttagacatgaaggcatcctcttgacgggcctcgtcagcatctcgtagaccctcgaccagtttctggtactcgttctctagttgttctttatctgtctccttcatctcggtgatcttgcgttctaaattcaccgcgccccgagtggccttgcgaagggaatcctcggtgatatcggtactgagagattcgatgcacacgttgtcgatgttgtgggcttcgtcaaatactacgatgcagtccttcgagagctccttggaaacgcgctctgcaatcttggggtctaacagatagtggtaggagtagatgatgacattgcaatattgcatctagtcgaagaatcagtaagcagagatgtgcgtgttcaagcgtactagactcaccatgcgtcttgaagtgaaatagggacattgcttgtgctgttccccgtaccgcaacaagccgtcaagagtccagacgccgttggggatgagattatgcggctccagaaggtcgagattgtcgtgatagacgcacacgtcgacattctctcctttctctttcttctccttgacgaaacctgcggtcaagctccgacatctggcatcgacaacggcgccgctcttctccctttttacggaagggtgcagacacaagttcttccgactagtcagcccaagacctcgaaagtcttcgacctggccaagctcatcggcgcggaatttcattagtgctttaagctcggcgagagctttctcaatttcagacatggtacgcgagcagtagatgagcttgcgatgttcggggtaatgctgctggtaggccacgatgagagagagaagggagacggtcttgcccgtacccgagggcatctccagaacacagtgaccacctgcatccagggtcctcttgaggtcgcacatataggcatattgttcggggtatatccgggggtacggaaagagcaccgggagctcgtcgatgaagaacttcatcctgttacaagtctacggcaaggcggatgtcaaggtttcaaacgggagacgacaacctcgattgaaccccgcaccaagccgaggtgtgggaaatgtgcgagaaggctctcttatcttttgagaatgcacccacaagggtaagtgctcgcgatgtcaaaaggcagggcaagttcatgtgtacaagtacgggtcaagacggtgtgtatgagacggtgtgtatgatgggaccacgttcagctggcttcaacattcttcatgattccttagcacggacattcatccttatgtgcactctcggggcatctctacttctctcagtaaatccagacggagacagttgaaatgatggtgcaaagaaaacggtgaagcagaaatcgctatgtggtgacgatcgg

SEQ ID NO: 21510 - DNA, 2394 bp, Muscodor strobelii
  misc_feature: SGI cDNA ID NO. 567283
  misc_feature: Encodes the peptide sequence at SEQ ID NO 21511
atgaagttcttcatcgacgagctcccggtgctctttccgtacccccggatataccccgaacaatatgcctatatgtgcgacctcaagaggaccctggatgcaggtggtcactgtgttctggagatgccctcgggtacgggcaagaccgtctcccttctctctctcatcgtggcctaccagcagcattaccccgaacatcgcaagctcatctactgctcgcgtaccatgtctgaaattgagaaagctctcgccgagcttaaagcactaatgaaattccgcgccgatgagcttggccaggtcgaagactttcgaggtcttgggctgactagtcggaagaacttgtgtctgcacccttccgtaaaaagggagaagagcggcgccgttgtcgatgccagatgtcggagcttgaccgcaggtttcgtcaaggagaagaaagagaaaggagagaatgtcgacgtgtgcgtctatcacgacaatctcgaccttctggagccgcataatctcatccccaacggcgtctggactcttgacggcttgttgcggtacggggaacagcacaagcaatgtccctatttcacttcaagacgcatgatgcaatattgcaatgtcatcatctactcctaccactatctgttagaccccaagattgcagagcgcgtttccaaggagctctcgaaggactgcatcgtagtatttgacgaagcccacaacatcgacaacgtgtgcatcgaatctctcagtaccgatatcaccgaggattcccttcgcaaggccactcggggcgcggtgaatttagaacgcaagatcaccgagatgaaggagacagataaagaacaactagagaacgagtaccagaaactggtcgagggtctacgagatgctgacgaggcccgtcaagaggatgccttcatgtctaacccagcgctaccggacgacctgctgaaggaggcggtgcctggaaatatacggagggcagaacactttgtggctttcctgaaaaggttcatagagtatctcaagacacggatgaaagtacgccaggtgatatcggagacgccgccttccttcttatctcacctcagagaacacacgttcatcgagaagaagcctctacggttctgcgctgagcggctcacctcgttggtgaggacactggagctcaccaatatcgaggactaccagcctcttcaagaagtggccaccttcgccacgctggtcgccacctacgagaagggctttctacttatactagagcctttcgaatccgacacggccgaggtgcctaatcccgtgctgcacttcacgtgcttggacgcggccatcgccatcaagcccgtattcgaccggttcagctccgtcatcatcacgtccggtacgatctcgccgctggagatctaccccaagatgctcggcttcaacacggtggtgcaagagtcgtacgcgatgacgctggcgagacgcagcttcttgccgatgattgtgacgcgtggcagcgaccaggcgccggtctcgacgagcttccaggtccggaacgagccgagcgtcgtgcgcaactacggcaacctcttgaccgagttcgcgcggatcacgcccgacggcatggtcgtcttcttcccgtcgtacctctacatggaatccatcatcagcatgtggcagggtatgggcatcttggacgaggtgtggaagtacaagctgatcctggtcgagacgcccgacgcacaggagacgtcgctcgcgctggagacgtaccgaacggcgtgttgtaacgggcgaggggccgtgctgctctgtgtcgcgcgtggcaaggtgtcggagggtatcgatttcgatcaccagtacggacggacggtgctgtgtatcggcgtgccgtttcagtacacggaatcgcgcatcctcaaggctcggctcgagtttctgcgagaggcgtaccggatccgagagaacgacttcttgtccttcgacgccatgcggcacgccgcgcagtgcctgggccgcgtgttgcgcggcaaagacgactacgggatcatggtgctggcggaccggcgattccagaagaagaggacgcagctcccgaagtggatcaaccaggcgatgctggaggtggatggcaacttgagcacggacatggccatcatcacggcgaagagattcctgcgggacatggcacgcccgttcaagagcaaggaccaggacggcatcagcatgtggagctgggaggatctcaaggctcaccagaagaaagtcgaggaggaggaaatccgagagaggcaggccaacagggacgtcgagctggtggaggcgctgaggagggcgcaggcacaacaggcggcggaccacgactacgacctggatgacgacgatctcgacgagggcatgatggagctcgacggatga

SEQ ID NO: 21511 - protein, 797 aa, Muscodor strobelii
  misc_feature: SGI Peptide ID NO. 567283
  misc_feature (71)..(255): Pfam Id: PF06733 Pfam Desc: DEAD_2
  misc_feature (256)..(412): Pfam Id: PF06777 Pfam Desc: Domain of function (DUF1227)
  misc_feature (1)..(797): NCBI GI: 16416010 Blast Desc: excision repair protein rhp3 [Neurospora crassa]
  misc_feature (30)..(797): NCBI GI: 46116906 Blast Desc: FG04295.1 [Gibberella zeae PH-1]
  misc_feature (1)..(797): NCBI GI: 164428066 Blast Desc: DNA repair helicase RAD3 [Neurospora crassa OR74A] gi|157071997|gb|EAA27300.2| DNA repair helicase RAD3 [Neurospora crassa OR74A]
  misc_feature (1)..(757): NCBI GI: 115492105 Blast Desc: DNA repair helicase RAD3 [Aspergillus terreus NIH2624] gi|114197540|gb|EAU39240.1| DNA repair helicase RAD3 [Aspergillus terreus NIH2624]
  misc_feature (30)..(797): NCBI GI: 256729405 Blast Desc: [Nectria haematococca mpVI 77-13-4]
  misc_feature (1)..(797): NCBI GI: 259488995 Blast Desc: TPA: 5' to 3' DNA helicase (Eurofung) [Aspergillus nidulans FGSC A4]
  misc_feature (1)..(797): NCBI GI: 226284441 Blast Desc: DNA repair helicase RAD3 [Paracoccidioides brasiliensis Pb01]
  misc_feature (1)..(797): NCBI GI: 145240349 Blast Desc: An08g07060 [Aspergillus niger] gi|134077338|emb|CAK39953.1| protein product [Aspergillus niger]
  misc_feature (1)..(758): NCBI GI: 119495148 Blast Desc: TFIIH complex helicase Rad3, [Neosartorya fischeri NRRL 181] gi|119412527|gb|EAW22468.1| TFIIH complex helicase Rad3, [Neosartorya fischeri NRRL 181]
  misc_feature (1)..(758): NCBI GI: 238489069 Blast Desc: TFIIH complex helicase Rad3, [Aspergillus flavus NRRL3357] gi|220698160|gb|EED54500.1| TFIIH complex helicase Rad3, [Aspergillus flavus NRRL3357]
MKFFIDELPVLFPYPRIYPEQYAYMCDLKRTLDAGGHCVLEMPSGTGKTVSLLSLIVAYQQHYPEHRKLIYCSRTMSEIEKALAELKALMKFRADELGQVEDFRGLGLTSRKNLCLHPSVKREKSGAVVDARCRSLTAGFVKEKKEKGENVDVCVYHDNLDLLEPHNLIPNGVWTLDGLLRYGEQHKQCPYFTSRRMMQYCNVIIYSYHYLLDPKIAERVSKELSKDCIVVFDEAHNIDNVCIESLSTDITEDSLRKATRGAVNLERKITEMKETDKEQLENEYQKLVEGLRDADEARQEDAFMSNPALPDDLLKEAVPGNIRRAEHFVAFLKRFIEYLKTRMKVRQVISETPPSFLSHLREHTFIEKKPLRFCAERLTSLVRTLELTNIEDYQPLQEVATFATLVATYEKGFLLILEPFESDTAEVPNPVLHFTCLDAAIAIKPVFDRFSSVIITSGTISPLEIYPKMLGFNTVVQESYAMTLARRSFLPMIVTRGSDQAPVSTSFQVRNEPSVVRNYGNLLTEFARITPDGMVVFFPSYLYMESIISMWQGMGILDEVWKYKLILVETPDAQETSLALETYRTACCNGRGAVLLCVARGKVSEGIDFDHQYGRTVLCIGVPFQYTESRILKARLEFLREAYRIRENDFLSFDAMRHAAQCLGRVLRGKDDYGIMVLADRRFQKKRTQLPKWINQAMLEVDGNLSTDMAIITAKRFLRDMARPFKSKDQDGISMWSWEDLKAHQKKVEEEEIRERQANRDVELVEALRRAQAQQAADHDYDLDDDDLDEGMMELDG

SEQ ID NO: 21512 - DNA, 4385 bp, Muscodor strobelii
  misc_feature: SGI EST ID NO. CUFF.50572.1
  misc_feature: Variant of the nucleotide sequence at SEQ ID NO 21510
ccgatcgtcaccacatagcgatttctgcttcaccgttttctttgcaccatcatttcaactgtctccgtctggatttactgagagaagtagagatgccccgagagtgcacataaggatgaatgtccgtgctaaggaatcatgaagaatgttgaagccagctgaacgtggtcccatcatacacaccgtctcatacacaccgtcttgacccgtacttgtacacatgaacttgccctgccttttgacatcgcgagcacttacccttgtgggtgcattctcaaaagataagagagccttctcgcacatttcccacacctcggcttggtgcggggttcaatcgaggttgtcgtctcccgtttgaaaccttgacatccgccttgccgtagacttgtaacaggatgaagttcttcatcgacgagctcccggtgctctttccgtacccccggatataccccgaacaatatgcctatatgtgcgacctcaagaggaccctggatgcaggtggtcactgtgttctggagatgccctcgggtacgggcaagaccgtctcccttctctctctcatcgtggcctaccagcagcattaccccgaacatcgcaagctcatctactgctcgcgtaccatgtctgaaattgagaaagctctcgccgagcttaaagcactaatgaaattccgcgccgatgagcttggccaggtcgaagactttcgaggtcttgggctgactagtcggaagaacttgtgtctgcacccttccgtaaaaagggagaagagcggcgccgttgtcgatgccagatgtcggagcttgaccgcaggtttcgtcaaggagaagaaagagaaaggagagaatgtcgacgtgtgcgtctatcacgacaatctcgaccttctggagccgcataatctcatccccaacggcgtctggactcttgacggcttgttgcggtacggggaacagcacaagcaatgtccctatttcacttcaagacgcatgatgcaatattgcaatgtcatcatctactcctaccactatctgttagaccccaagattgcagagcgcgtttccaaggagctctcgaaggactgcatcgtagtatttgacgaagcccacaacatcgacaacgtgtgcatcgaatctctcagtaccgatatcaccgaggattcccttcgcaaggccactcggggcgcggtgaatttagaacgcaagatcaccgagatgaaggagacagataaagaacaactagagaacgagtaccagaaactggtcgagggtctacgagatgctgacgaggcccgtcaagaggatgccttcatgtctaacccagcgctaccggacgacctgctgaaggaggcggtgcctggaaatatacggagggcagaacactttgtggctttcctgaaaaggttcatagagtatctcaagacacggatgaaagtacgccaggtgatatcggagacgccgccttccttcttatctcacctcagagaacacacgttcatcgagaagaagcctctacggttctgcgctgagcggctcacctcgttggtgaggacactggagctcaccaatatcgaggactaccagcctcttcaagaagtggccaccttcgccacgctggtcgccacctacgagaagggctttctacttatactagagcctttcgaatccgacacggccgaggtgcctaatcccgtgctgcacttcacgtgcttggacgcggccatcgccatcaagcccgtattcgaccggttcagctccgtcatcatcacgtccggtacgatctcgccgctggagatctaccccaagatgctcggcttcaacacggtggtgcaagagtcgtacgcgatgacgctggcgagacgcagcttcttgccgatgattgtgacgcgtggcagcgaccaggcgccggtctcgacgagcttccaggtccggaacgagccgagcgtcgtgcgcaactacggcaacctcttgaccgagttcgcgcggatcacgcccgacggcatggtcgtcttcttcccgtcgtacctctacatggaatccatcatcagcatgtggcagggtatgggcatcttggacgaggtgtggaagtacaagctgatcctggtcgagacgcccgacgcacaggagacgtcgctcgcgctggagacgtaccgaacggcgtgttgtaacgggcgaggggccgtgctgctctgtgtcgcgcgtggcaaggtgtcggagggtatcgatttcgatcaccagtacggacggacggtgctgtgtatcggcgtgccgtttcagtacacggaatcgcgcatcctcaaggctcggctcgagtttctgcgagaggcgtaccggatccgagagaacgacttcttgtccttcgacgccatgcggcacgccgcgcagtgcctgggccgcgtgttgcgcggcaaagacgactacgggatcatggtgctggcggaccggcgattccagaagaagaggacgcagctcccgaagtggatcaaccaggcgatgctggaggtggatggcaacttgagcacggacatggccatcatcacggcgaagagattcctgcgggacatggcacgcccgttcaagagcaaggaccaggacggcatcagcatgtggagctgggaggatctcaaggctcaccagaagaaagtcgaggaggaggaaatccgagagaggcaggccaacagggacgtcgagctggtggaggcgctgaggagggcgcaggcacaacaggcggcggaccacgactacgacctggatgacgacgatctcgacgagggcatgatggagctcgacggatgagctgatctccattgtggtcattagattgtgcgagctcattgggacgtggacatgtgcgtgaaatacggcaggtctgagaatgatagacaggcactaaacagattagcaacagacgtcgagccgttcattctcgccccatagtcacataaggtcctataggtcacagcaagtgggtaggcaaaaagggggttttcatggaaagaagcctctattcagtcttcagggtatcatattcaggcctcttatctacatgtatgcattccagggatagatgtgcagactctacgtagtcgacttggccatgttccagaaactgtcgagcttccccctgctcagcgcctgcctggcctcggcatcggtctcgcagatggtggtcctgaacttgttgaaggtctgcgtcttgacctcgccctcgaacagcaggtggcacttgttgagggcgaggtccttgaggtcgcccttgtcgtcctcggcgcgcagccagtcgtgcaggttgtcgcggtcggggtcgggggcgcggtcccgcgagggcgcgttctcggcccagtcgatgcggttgagcatgagcttcttgtagtggttgacgctgtgctcgccgccctcgacgacgacgaggctctgcttggggtgcatgacgacgaggcccttgaggccgtgctggtcggcgttcttccagatcttgaagcggtgctggccgttggcgagggagttgaccttgaagacgagcatgtggacgcccttggcgacgtcttgggcctggttcctggcgagcttgtcgtggcgctggtccttggtgagcttgcggtcctcgttggtctgcaggtgggcgctgtggcggtcggcgatctccttgttgacgcgggcctcgacggcggtggggtctttgacggcctcctcgccgaggacgcgcatgaggttgcccttcttgaccttggggggcggcgcgggcacgagccccactgttgttgggcggacgagtcagcaagtggcagtaaggagggatggacagagaagaaaaggggaatagaacgtacgtcggaccttggcctgctcctccttcaggtcggccatgcggcgctggcggcgcagcttggcctgctcgtccgaggtcaggaacatgggcttgggggcgggtcggtgctggtcctgcgggggctcgatggcgacggggtgctggacgtagctggtgacgatggtgtcgtcggagtcgatcttgagggcgccgggggcgtcgatgtcgtcgtagtcgggcgcgacgaccagcgcctcgtcccaccactcgatgtccgggggggcgtcgacgaggaagctgcgctcgacgtcgatgtcgtcgtcgatgccggccttgcgggactgcagggcgatcttcttcttgagggcctcgagggcggcctggcggcgcagggcgttggcctggtggatgtacttgcccttctggttgaagacgagctggcgggcctggcgcggcttgaccgtcggcgccccgaggctggcgtcgtagtaggggttctgcttgatctcctcggccgagggcccggccaggtcgagcggcttgtgtcgggcctggccgtggccgtggttgccatggctcccgtg

SEQ ID NO: 21513 - DNA, 1221 bp, Muscodor strobelii
  misc_feature: SGI cDNA ID NO. 567284
  misc_feature: Encodes the peptide sequence at SEQ ID NO 21514
atggccctttcaccaccgtcactcatcagatcgccggcctcttcccggaactccagaagccctggtctagattacccttcacccgatctcgctgattgctactacaagattggtccagtatacgagccggcctgtggtgtcgcatcatcgactatggagcctagccactcactcccccatcacgatgcgacaacttccgccgaatgggtagaaaatacactgatacattctgttccgcctaccgggggaccgggcatgttatcttctgactacggcccgtatgtcagctatgactcggtaatgcatgcgccgtacagccacgatatgtactcaacgcacatggcccacgcacacactctcacaaatactccttctcatctcgcctccgtaccgtctcgctccccagatccattatcctcaagacactccgtctcttaccagagcgtatcgcccatcccgcgagtaaaaatggagcacgaatataccagcggcgcagatcaatcacagtatccatcgccgaggtccggccatgctatgctgcttgaatcaagcagttacggatctcaagcgggtagcacgggctacttatccgatgccgcatctggatcatgggcaaagtcctcagattaccaaaccatggaatcagatccatactattcaggggctggcggcagcggcggttctttgtcgacggaccgacgcccatcagcagcacggctgcctcgggcaccgaaacgacagccacgtaaactcacatcgaaagaggaggccaatttccaatgcgaagtcgaggggtgcgggaaacttttcagcaggagttataactacaaggcacatatggagacccacgacaaaaagcgagagtatccttttccatgtaccgtggacgactgtaccaagaaatttgtgagaaaaacagacctgcaaagacatcatcagagcgtccatgcgaaagaaaagaatcataaatgcgattattgcggccgtctgttcgctaggaaagataccctgaggaggcacatggaagacggctgctccaagagatttgacataggcaccctggacctgcgcggcgagggttacgacgccatgaggcctttagctggcacatctggccatccgatgagctcaagcacgcagttgccaccgatgacgatcccacgtggcatgggtcacggcgatgagcatacgacaaacatgcatcattacgcgaagagatag

SEQ ID NO: 21514 - protein, 406 aa, Muscodor strobelii
  misc_feature: SGI Peptide ID NO. 567284
  misc_feature (259)..(283): Pfam Id: PF00096 Pfam Desc: Zinc finger, C2H2 type
  misc_feature (291)..(316): Pfam Id: PF00096 Pfam Desc: Zinc finger, C2H2 type
  misc_feature (322)..(345): Pfam Id: PF00096 Pfam Desc: Zinc finger, C2H2 type
  misc_feature (5)..(393): NCBI GI: 116204817 Blast Desc: CHGG_10292 [Chaetomium globosum CBS 148.51] gi|88176420|gb|EAQ83888.1| CHGG_10292 [Chaetomium globosum CBS 148.51]
  misc_feature (1)..(387): NCBI GI: 85075543 Blast Desc: NCU01629 [Neurospora crassa OR74A] gi|16416008|emb|CAD01120.1| related to epithelial zinc-finger ezf protein [Neurospora crassa] gi|28916794|gb|EAA26548.1| crassa
  misc_feature (1)..(387): NCBI GI: 171690220 Blast Desc: protein product [Podospora anserina] gi|170945058|emb|CAP71169.1| protein product [Podospora anserina]
  misc_feature (5)..(387): NCBI GI: 39942106 Blast Desc: MGG_03133 [Magnaporthe grisea 70-15] gi|145015892|gb|EDK00382.1| MGG_03133 [Magnaporthe grisea 70-15]
  misc_feature (1)..(400): NCBI GI: 261354886 Blast Desc: conserved [Verticillium albo-atrum VaMs.102]
  misc_feature (1)..(402): NCBI GI: 154296489 Blast Desc: BC1G_12819 [Botryotinia fuckeliana B05.10] gi|150843342|gb|EDN18535.1| BC1G_12819 [Botryotinia fuckeliana B05.10]
  misc_feature (1)..(402): NCBI GI: 156047797 Blast Desc: SS1G_09588 [Sclerotinia sclerotiorum 1980] gi|154693983|gb|EDN93721.1| SS1G_09588 [Sclerotinia sclerotiorum 1980]
  misc_feature (87)..(364): NCBI GI: 256729202 Blast Desc: NECHADRAFT_101360 [Nectria haematococca mpVI 77-13-4]
  misc_feature (84)..(364): NCBI GI: 46116902 Blast Desc: FG04293.1 [Gibberella zeae PH-1]
  misc_feature (245)..(348): NCBI GI: 261193361 Blast Desc: conserved [Ajellomyces dermatitidis SLH14081] gi|239588691|gb|EEQ71334.1| conserved [Ajellomyces dermatitidis SLH14081]
MALSPPSLIRSPASSRNSRSPGLDYPSPDLADCYYKIGPVYEPACGVASSTMEPSHSLPHHDATTSAEWVENTLIHSVPPTGGPGMLSSDYGPYVSYDSVMHAPYSHDMYSTHMAHAHTLTNTPSHLASVPSRSPDPLSSRHSVSYQSVSPIPRVKMEHEYTSGADQSQYPSPRSGHAMLLESSSYGSQAGSTGYLSDAASGSWAKSSDYQTMESDPYYSGAGGSGGSLSTDRRPSAARLPRAPKRQPRKLTSKEEANFQCEVEGCGKLFSRSYNYKAHMETHDKKREYPFPCTVDDCTKKFVRKTDLQRHHQSVHAKEKNHKCDYCGRLFARKDTLRRHMEDGCSKRFDIGTLDLRGEGYDAMRPLAGTSGHPMSSSTQLPPMTIPRGMGHGDEHTTNMHHYAKR

SEQ ID NO: 21515 - DNA, 2101 bp, Muscodor strobelii
  misc_feature: SGI EST ID NO. CUFF.50525.0
  misc_feature: Variant of the nucleotide sequence at SEQ ID NO 21513
tggatttgcaagtatgtagagcgcatatacaggtctacttcatagatttttatcctcctacgcaggcagtagtactcttgaggtttgccccctgtattaaaacgttggccagatcggaatccgtatatctacctgttcgcccacccctcacgttttacaagtgacttgattgttttggtacatatcgtacacagacccctatcccatatgttgcgtatggattgccatcctatgacattttgctctatctgacataagtgctgcgcgttatcacaagctgtctctgtgcctcacagtcttggttcctataacaaccacttccgcctagctatggtgacaagtcttctctttcatcatggccctttcaccaccgtcactcatcagatcgccggcctcttcccggaactccagaagccctggtctagattacccttcacccgatctcgctgattgctactacaagattggtccagtatacgagccggcctgtggtgtcgcatcatcgactatggagcctagccactcactcccccatcacgatgcgacaacttccgccgaatgggtagaaaatacactgatacattctgttccgcctaccgggggaccgggcatgttatcttctgactacggcccgtatgtcagctatgactcggtaatgcatgcgccgtacagccacgatatgtactcaacgcacatggcccacgcacacactctcacaaatactccttctcatctcgcctccgtaccgtctcgctccccagatccattatcctcaagacactccgtctcttaccagagcgtatcgcccatcccgcgagtaaaaatggagcacgaatataccagcggcgcagatcaatcacagtatccatcgccgaggtccggccatgctatgctgcttgaatcaagcagttacggatctcaagcgggtagcacgggctacttatccgatgccgcatctggatcatgggcaaagtcctcagattaccaaaccatggaatcagatccatactattcaggggctggcggcagcggcggttctttgtcgacggaccgacgcccatcagcagcacggctgcctcgggcaccgaaacgacagccacgtaaactcacatcgaaagaggaggccaatttccaatgcgaagtcgaggggtgcgggaaacttttcagcaggagttataactacaaggcacatatggagacccacgacaaaaagcgagagtatccttttccatgtaccgtggacgactgtaccaagaaatttgtgagaaaaacagacctgcaaagacatcatcagagcgtccatgcgaaagaaaagaatcataaatgcgattattgcggccgtctgttcgctaggaaagataccctgaggaggcacatggaagacggctgctccaagagatttgacataggcaccctggacctgcgcggcgagggttacgacgccatgaggcctttagctggcacatctggccatccgatgagctcaagcacgcagttgccaccgatgacgatcccacgtggcatgggtcacggcgatgagcatacgacaaacatgcatcattacgcgaagagatagagtggattatacgacccgtgttatgatatggttatacgacatacgatttgaaattcatggctttcccttgtcaaaccggtgcatatttagggacaggacgggacgggaaagactatttgcatagcaacttttccgcctcttgtttatcctcggcgtgacaggaaaggacccgggcactagaagacaacattgtacactagccttatgtaaaaaccccccaacgatgggcatggcgacacgacggcgttcaaagttctatgcatctcgattgaggttttagagtcgagataaatggaagaggccgaataggcaaaggccacagactaagaatagcaagactcgaggcccaatccgcgagccgaaggccgcttaccctgaccaggttagagtaacaggccccagaccccgccagggctgatgaagatttgatatactcaattttgcagttagacaaaatgctccatgatgagtgtctaattactaaaaatgacgaatgagagacgagcattgcaatctgtatgccct

SEQ ID NO: 21516 - DNA, 1134 bp, Muscodor strobelii
  misc_feature: SGI cDNA ID NO. 567285
  misc_feature: Encodes the peptide sequence at SEQ ID NO 21517
atgccttctccctcccctgaccggtttgtacctctccatgcattagctccagatcgctatcgagctaacaagccaccgcaccaactgtcgtcatccgagcgactgctgcgtaccgaccgggccggcaccgacgcgttttgcttcacacgcgagcgggctgtccccatctctgcacgccgactctcccgatccgactgcattgaccgcggacacggcaccgtcttagcattgggccaggtcgaccggctgcccagtcatggcgctgtatggtccgtgggaggcactgctccttctggcagtgccgtcgatgggggccgtggccggcttgtgagttcgggcagcaatgctcgtctatttacctcctcgttccccagtctccgacccaaatccgaggaggaccaggaaaaacatgaagaccgtctcgccttagcacttgacatagaccgcgtgcagcgtgtgttggacttcagttaccctcgaacattcccacggcgtagaagagcgatgaagcgaccagccttggagtcagcaaagactgtgtggacgggaacggaatggatcaatgactacccttgcgtctccagtgagtctcagacgttcaaggatcatcgactcacctactcacgcgaggcagaggactgtatcgaagagcgcatcctgcccaacgctccttttaaagtgctagacgcccccggtctacgtgatgatttctactgctctattatggcctattccaattcttgcggcacgctcgccgtcggattgggcaacctcttgtatggctggtccgaatcaggcggggtgtctctattgcacgatggacgcgatagttccaagaacggcgcgtggctcacttccatggcattttcatctgagaggggcgataggagcattttggcctttggtcggtccagtggtactttgacgctcatgtcgttgtcagaaggttcagtgcctcgatttaatatgatacatgaagctcctgtagcgtgtctctcttggcgtcctgtcactgcgcgtcgaccgtcgttgaaccctcaaaatcctagtgttatggtcgacgcggaagaccttctggtgggcgacgaattgggagatattcattattattctgtcgaatggccgaagccctag

SEQ ID NO: 21517 - protein, 377 aa, Muscodor strobelii
  misc_feature: SGI Peptide ID NO. 567285
  misc_feature (6)..(375): NCBI GI: 16416039 Blast Desc: related to fzr protein [Neurospora crassa]
  misc_feature (87)..(375): NCBI GI: 154316540 Blast Desc: BC1G_04201 [Botryotinia fuckeliana B05.10] gi|150846001|gb|EDN21194.1| BC1G_04201 [Botryotinia fuckeliana B05.10]
  misc_feature (6)..(377): NCBI GI: 171688806 Blast Desc: protein product [Podospora anserina] gi|170944365|emb|CAP70475.1| protein product [Podospora anserina]
  misc_feature (5)..(312): NCBI GI: 156043321 Blast Desc: SS1G_10664 [Sclerotinia sclerotiorum 1980] gi|154695051|gb|EDN94789.1| SS1G_10664 [Sclerotinia sclerotiorum 1980]
  misc_feature (6)..(375): NCBI GI: 145258210 Blast Desc: An04g06100 [Aspergillus niger] gi|134074578|emb|CAK38871.1| protein product [Aspergillus niger]
  misc_feature (3)..(375): NCBI GI: 67523051 Blast Desc: AN1982.2 [Aspergillus nidulans FGSC A4] gi|40744727|gb|EAA63883.1| AN1982.2 [Aspergillus nidulans FGSC A4] gi|259487343|tpe|CBF85943.1| TPA: cell cycle regulatory FGSC
  misc_feature (218)..(375): NCBI GI: 164428028 Blast Desc: NCU01572 [Neurospora crassa OR74A] gi|157071980|gb|EAA26973.2| conserved [Neurospora crassa OR74A]
  misc_feature (5)..(375): NCBI GI: 239607964 Blast Desc: WD domain-containing protein [Ajellomyces dermatitidis ER-3]
  misc_feature (5)..(375): NCBI GI: 261199930 Blast Desc: cell cycle regulatory protein [Ajellomyces dermatitidis SLH14081] gi|239594574|gb|EEQ77155.1| cell cycle regulatory protein [Ajellomyces dermatitidis SLH14081]
  misc_feature (5)..(375): NCBI GI: 169771553 Blast Desc: [Aspergillus oryzae RIB40] gi|83768105|dbj|BAE58244.1| protein product [Aspergillus oryzae]
MPSPSPDRFVPLHALAPDRYRANKPPHQLSSSERLLRTDRAGTDAFCFTRERAVPISARRLSRSDCIDRGHGTVLALGQVDRLPSHGAVWSVGGTAPSGSAVDGGRGRLVSSGSNARLFTSSFPSLRPKSEEDQEKHEDRLALALDIDRVQRVLDFSYPRTFPRRRRAMKRPALESAKTVWTGTEWINDYPCVSSESQTFKDHRLTYSREAEDCIEERILPNAPFKVLDAPGLRDDFYCSIMAYSNSCGTLAVGLGNLLYGWSESGGVSLLHDGRDSSKNGAWLTSMAFSSERGDRSILAFGRSSGTLTLMSLSEGSVPRFNMIHEAPVACLSWRPVTARRPSLNPQNPSVMVDAEDLLVGDELGDIHYYSVEWPKP

SEQ ID NO: 21518 - DNA, 3004 bp, Muscodor strobelii
  misc_feature: SGI EST ID NO. CUFF.50550.2
  misc_feature: Variant of the nucleotide sequence at SEQ ID NO 21516
ggaggagattgtcataactgtcactgaagttgagctggacgtgttgacaccgatgatcgcagacagtcggcaagcttccaggcatcatccgatactgcagcaagatactaattaatgcgacgttggtaaccgtcggtgtggtccacggatgatggcaggtccaacgatcacgttcgggtcattaccttcgagccataagataaaagcgaacccgtttgtgactcgtcacttaacttttgtttgcgtcttgcgatgcctctccttcagccaacatttgtcgacgacgcacagcactgcttctggtcagcaaacgctctgctgtatcatgattggtcacaattaggactatgatcctgcacctggccgcagaaagtttgcctctaagtaaggtagacctcttgcaaaagcaagaaaagggggagcccatagaataacgaggtttttttttttttttgggagccatactaaggtatgttgtggttgttgccctggccttggttccacgattggtccgtttctcgcgctttccacatgcgtccgtcgtagtgtccagaacaaagtatggagcatagtctcgtcagcggtgcgctttccagactacttgcccttgtcttcacttcccttcttcctaactatgtacgtcgttggtcgaggcaggcatgaagagagcgttgtcgactggtgttgatgaaggatgaaggagcccgcatttcatactctcctccagtgtatccccatttcaccgccctagtctcctatcatctctcttcttctctccctctactgtcaaggagtaggtttaggagacagtagtaggctggtatgaaataattggaatagtctcatttcattcttttgcttcaccccattaccagaatgccttctccctcccctgaccggtttgtacctctccatgcattagctccagatcgctatcgagctaacaagccaccgcaccaactgtcgtcatccgagcgactgctgcgtaccgaccgggccggcaccgacgcgttttgcttcacacgcgagcgggctgtccccatctctgcacgccgactctcccgatccgactgcattgaccgcggacacggcaccgtcttagcattgggccaggtcgaccggctgcccagtcatggcgctgtatggtccgtgggaggcactgctccttctggcagtgccgtcgatgggggccgtggccggcttgtgagttcgggcagcaatgctcgtctatttacctcctcgttccccagtctccgacccaaatccgaggaggaccaggaaaaacatgaagaccgtctcgccttagcacttgacatagaccgcgtgcagcgtgtgttggacttcagttaccctcgaacattcccacggcgtagaagagcgatgaagcgaccagccttggagtcagcaaagactgtgtggacgggaacggaatggatcaatgactacccttgcgtctccaaggactgtatcgaagagcgcatcctgcccaacgctccttttaaagtgctagacgcccccggtctacgtgatgatttctactgctctattatggcctattccaattcttgcggcacgctcgccgtcggattgggcaacctcttgtatggctggtccgaatcaggcggggtgtctctattgcacgatggacgcgatagttccaagaacggcgcgtggctcacttccatggcattttcatctgagaggggcgataggagcattttggcctttggtcggtccagtggtactttgacgctcatgtcgttgtcagaaggttcagtgcctcgatttaatatgatacatgaagctcctgtagcgtgtctctcttggcgtcctgtcactgcgcgtcgaccgtcgttgaaccctcaaaatcctagtgttatggtcgacgcggaagaccttctggtgggcgacgaattgggagatattcattattattctgtcgaatggccgaagccctaggaagttgctcgccataactggagaggggaattgaccaagcttgtacgcatcaaggtccatgcgcaacagatttgtggtctcgcctggtcaccgacgggatcccactttgctacgggtggcaatgacaacctttgctgtctcttccaggtcactaaaattcttaaggaagagagaaacggatcaaaggtattcgatgctatctcatccatttcaaccgcaaaccttagtccttcccccacggcgtcgccatgtactaccatcctcagtagtcccggttcagtgtcagacatctacgattggcctcgtctgcgactgaccattccacgaaatacagacagattcttgccacttggatctgagaaacatcaatggcgtcacgcggcagcagtaaaggccattgctttctgtccttggcgtgaaggactcatagcaacaggcggtggctcgaacgacaaatgcattcatttctatcacaccacatcaggggctacactagcaacgatctcggttgcggcccaggtgacatcgctcatctggagcaagacacgtcgtgagatcgcggcaacgtttaggtacgcgcagccggatcacccatatcggatcgccgtattcagctggccggactgccgacaggtcgctgccataccatgggaaggcgagcatcgagcgctatatgccattgcgtatccaggtggtccgtctgatacgtaccggacgagggagcggcgcaagagtcgtacagctgaggaaggttgcatcgtcgtagccagcagcgacgagagtgtaaagttccacgaagtttggcttgcaggacgcaaagccacagcgctggggagcggcgtcctagctggtagtgacatattggaaatggaagagggtattgataaagagggggatgtcattcgctgagcgtcttgggtttccaattgcctctgttctccaagcgtaggcttacttctgcatcaacaatgcatacatttgcagtattgtagtgttatcagtcagcttctctagactcgtcaagaatgctcacattcattcgttc

SEQ ID NO: 21519 - DNA, 1053 bp, Muscodor strobelii
  misc_feature: SGI cDNA ID NO. 567286
  misc_feature: Elevated expression when VOC is produced
  misc_feature: Encodes the peptide sequence at SEQ ID NO 21520
atgctcgaaataaggtgcataggcaatccacatgaaattggtgtgaagcatggagcaatggcgaaggagaagatatctggatccatcgaattttacagcaaactgttccaggaaacatgttcattgacatggtctgaagtgacgcaagaggcttcgaaatacgtagcccctctcgatcacgttgcaccgagatacatggaggagatcaagggcatcgccgagggtgccggtcttccgttcttagacatactggctttgaatatccggaccgaaatcatgttcggacttttctctgagccttccagggacattgcggagtctccgagcgacggatgcacgagtctagcttggctgactccatcaaataaatcgtttctaggccagaattgggattggatgactgaacagagcccgaatctcgtagtctgccacatctcgcaacccgaaactatgatgccgccattctctatggtgacagaagctggaataatcgggaagattggtctcaacgccgagggggtcggatgttgcttgaatgctatcaagtattgcggagtagatgcttcccgattgcccatacattttgcgctacgtaaggtcctggaatcgccaacacgggccgatgcggttcaagctatcaagaccgccggtgttgcgggcagcggccatattctcattggtgatccgaccggatcaacgggactcgaatgcacaagtcaatgggttaaggaggttatgatggacgagaaaaatcgaatatttcatacgaatcatctacttcttgacgacggaccgccgtggctggccgattcatcagcacgactaacacgagtcggcgaactcacaagtctgatatctgacccgaagctcgactctatcgctagcgtcttagctgacacggaagggtctccatgttcaataaatagaaaacaagaaggcctgtcaaaagctgagacgctcttcacaatcattatggatcttacagccaagtcggcacatgtaacttttggtcgacctacggaagctagacaggtattgtcattgacattttga

SEQ ID NO: 21520 - protein, 350 aa, Muscodor strobelii
  misc_feature: SGI Peptide ID NO. 567286
  misc_feature (117)..(350): Pfam Id: PF03417 Pfam Desc: Acyl-coenzyme A:6-aminopenicillanic acid acyl-transferase
  misc_feature (1)..(348): NCBI GI: 46111143 Blast Desc: FG02453.1 [Gibberella zeae PH-1]
  misc_feature (1)..(340): NCBI GI: 256726055 Blast Desc: NECHADRAFT_81569 [Nectria haematococca mpVI 77-13-4]
  misc_feature (1)..(350): NCBI GI: 256722675 Blast Desc: NECHADRAFT_87207 [Nectria haematococca mpVI 77-13-4]
  misc_feature (1)..(348): NCBI GI: 240110239 Blast Desc: Acyl-coenzyme A:6-aminopenicillanic-acid-acyltransferase 40 kDa form, [Coccidioides posadasii C735 delta SOWgp]
  misc_feature (1)..(341): NCBI GI: 119180015 Blast Desc: CIMG_08678 [Coccidioides immitis RS]
  misc_feature (1)..(348): NCBI GI: 154272127 Blast Desc: [Ajellomyces capsulatus NAm1] gi|150408903|gb|EDN04359.1| [Ajellomyces capsulatus NAm1]
  misc_feature (3)..(342): NCBI GI: 259480368 Blast Desc: TPA: acyl-CoA:6-aminopenicillanic-acid-acyltransferase, (AFU_orthologue; AFUA_3G12620) [Aspergillus nidulans FGSC A4]
  misc_feature (1)..(341): NCBI GI: 261192468 Blast Desc: acyl-CoA:6-aminopenicillanic-acid-acyltransferase [Ajellomyces dermatitidis SLH14081] gi|239589516|gb|EEQ72159.1| acyl-CoA:6-aminopenicillanic-acid-acyltransferase [Ajellomyces
  misc_feature (1)..(341): NCBI GI: 239615233 Blast Desc: acyl-CoA:6-aminopenicillanic-acid-acyltransferase [Ajellomyces dermatitidis ER-3]
  misc_feature (12)..(350): NCBI GI: 242798535 Blast Desc: acyl-CoA:6-aminopenicillanic-acid-acyltransferase, [Talaromyces stipitatus ATCC 10500] gi|218716535|gb|EED15956.1| acyl-CoA:6-aminopenicillanic-acid-acyltransferase, [Talaromyces
  misc_feature (1)..(350): SWISSPROT Homolog: EC 2.3.1.164 Isopenicillin-N N-acyltransferase
  misc_feature: Useful for introducing or modulating the production of volatile compounds
MLEIRCIGNPHEIGVKHGAMAKEKISGSIEFYSKLFQETCSLTWSEVTQEASKYVAPLDHVAPRYMEEIKGIAEGAGLPFLDILALNIRTEIMFGLFSEPSRDIAESPSDGCTSLAWLTPSNKSFLGQNWDWMTEQSPNLVVCHISQPETMMPPFSMVTEAGIIGKIGLNAEGVGCCLNAIKYCGVDASRLPIHFALRKVLESPTRADAVQAIKTAGVAGSGHILIGDPTGSTGLECTSQWVKEVMMDEKNRIFHTNHLLLDDGPPWLADSSARLTRVGELTSLISDPKLDSIASVLADTEGSPCSINRKQEGLSKAETLFTIIMDLTAKSAHVTFGRPTEARQVLSLTF

SEQ ID NO: 21521 - DNA, 8039 bp, Muscodor strobelii
  misc_feature: SGI EST ID NO. CUFF.50826.1
  misc_feature: Variant of the nucleotide sequence at SEQ ID NO 21519
cctgaggtagttattttctgccttgatccacagaattgagctgtagctttgaatgcagctcattatttttaaccggaaattttccatcccgcccgtgttcttattccaataccgaacctttcattgctttcatcgtcgaatttagtcgtatcttgataatacctccactcttcacgaaggaaggaattggagaagaaggagcaaatcccgagaagaattctgtgacctcggacagcaacagagaccttactatcgttaggaagaaattcacttattgaacaacaaaatcctgcatcggccagagtgagcaagacacatcatctcatcgctgtcaaactccgtaacgtgcgggcagaccgtctcgccaaaaacccgtttcagttccgtcgttgcctgattccgggttgccccgcagctagctacctgctaggtgggcgccaagtgctgggaatccatacggcccccaccgcgtccccaccacccagagcgatcagcgcgttcagcggcctctcagaagggccagatagggtgagaggttaggtacatgtacctaacagccagcacgtctacctgtaagcaagataccttagtagccctctcctccctacctaggtacctaaggcgcagctgtggccgggcagcatccacggaagatccacaaggccagtgccctgtcgacacacgggctgtccctacaagtacagcagcactccaggctctcgtccgtctcgcggggtcgccctgtctctgctctctttcttccatttctgcaagtgtgatttatgcccattttgttcgagtgagacctcgttgtcggagagcaactgacctcagcgcaagtcccgactgcgccttggtgtgtgtgtcttaggcatcggaaagtacacatccacgccaactcgcgttaccttctacagcccgggccagtgcgtccagcgcagtccagcgcagtccagccctgcggctaacggatcgacacttgagcatataagcatccccctctggccacacctcctgccgaccgtcggagtcgctgctcgaggcacacacactctctcacgcgctgcacactgcacactgcacaccactcactactcaccactcaccactcacacccatacccacacgcacccataaaaacacccgactcgtcccaccacactttttttcccacgtcaacacacctcgcctgacacgcgcctgtcgcacaccacccgccgccgcgagccttggacaccgccgccggcgcacgggatctgcccagctacatatctcggacacacgcccacatccacgtccacatcgacatcctgcgtgcctccgtcccgtcctcgacacagcacctcgcctggccgcccatgacacgctccagcctgcgtgtttctgacgacccacgcagacacgcccacgcccacgctgtacattccgtctcgccccattctcgatctcacgccgcgcactcgcacacttccaacacatccaacacgtcgccccgacggacgaactcgcagaagaaccctctgcaccggtcctcgacagcgtcctcgcagacccacggtccctcgccgctcaagatggtgaccacgacgacgccgtcgcatccccacgcggacgagacgcagtactactacctgcccggcgtcgacgtctccgaggaggagctgcagtgccacggctggaccgagcccatcgtcatcgacgacgacgacctcatgttcggcggcaagagcctcagcacctggtacgaggaggagagggagtcccagtcgctcggctacccgctcgaggaggagcaccgcggccgccagcgcgagcgccagcactacgagccgccgcattcgcacggcgaccacgaccatgaccacgacgaactcgacgagcaccagcaccagcaccgccatcaccaacaccgccactcgcaccagcatagcaatcaccaccaccaccaccatcatcatcactcgagtaagaagacgtcgggcaccactgatcagaagaggcgttaagacctagtcccgaaccacccgtttttctctcgtctacctgcatcacgagccggctgtggatcagcccatttctttatcgagatacccaacatgtttctttgccgcattggcttcgcggtggtctgcggtgcattttcctatatccggcgctcttttcccctgcacagcggcatccgagggtgacatctcggcatcttcattcatcggtatcgtacgaattcacgactgccggtgacggtttctctttgccactcggcaacacccctctataccatatagatcacgacgatagacttggaatcagcatcatgctcatcacgcgagccggaggagggcttctctacttcgccccatctcctccagggacatgcggtcgctactctgcattgggacaggcgttaccttgcttcatttgcatcctcggggtatggaatcagcgtcttcgggatctaagacccttgtggccttattggtcggttcatggcgtcgtgacttgtgtctctcttgatcgttgtacgagccatcgccgaacctcgttgcagttcagcagcccttcttgcccgatgggcctgagcgcagctatcctgctctcttgccggatacctagttagctaccttcttagcccgggaagaattcaaatcagttaaagtcaatcatcaagacgggcctgtgtttgtgtgtgatatgtgtttctgaatcatcatgtatgactatgctctacaatcataatctaacccaagagaccgcctcatgaatgaagtcactcaaactaagttatataacttgtagcctctggccattagtcactcagagaggtgcactttgactccagacacgcgaacgagtccgaagatagctatatccttgagaaattagatatttattaccaagttatcgccgtcggccatcgttggtcagccaccgcacagtctcgagagtcaagcagcaagctcgcaaaaagtcatgatcgagacacaatgcacaacaagaaaggtttcgggtatcgtcaagtatagatattaatacaaccgccgcgcggaaacgcatggaaagatcagcaaaccgtacccgctcgagagaccattgccccaaacaccaagaaaggccaaccgacgagtttgtaccaaagtgtatacctccaaccccaaatagaaataaaatatgttcacacaagacttcgcaaacatgtcctctactgtttcgccacgacatctgcgatgatctgcttgcactcctcaggctccgtgaacacgtgccatgcgtcacgcggcaccccctcaaacgccttctcgaaccgctccggctcgttcttctcctcgataccgatagctgagatgtcttcgactttgcggatcaggacgaccttgacccagccggggtattttctatactaagtacggggtggcaagcgtcagcatcatactcgtcttgacatcgcttttccccacttggagcttatggctgtgcggggggcgttaagggcgacttacaatctcaccgtaagcttcggggtcggtctgcgtcgaatcacccacgcagatcatctttcgcttgggaagccacgagtgtatgtcgtccatccgtccgactttgtagtcctccgtgtgcaccgtgagggtagtcagaagcccccctacgctcatccagctcgaatcacgcaacatgatggtcccgtgcgggtagtggttctggcggaagtcacggaggaacgggtagaggttgtatggcgaggcagacaggtagaaccatgatgaagtattctcaatgagagaatggacgtatttgtacagctcaggcatccccggacagggttccgggcgctcagtaaatgtcgtccgtaagatgccgataggatcgctggtctgcgtgactttgatcgtatcgtcgatatctatttcatatgagcaagagggcaattagtgagagtgatggcttcgcttctcacctgatataacgccccatccttccggttcggcatgaaatgttctcatttccagcagtccattcgcccccttcggtacttgggcaaaggtcggcgtcaagagtttaccggctggaggcgcaggcagccgcttggtctcggtcccaactccgttgtttcctgtgggtgcgaaccgcagatgcaagtttccattgtgaaacgctctgacctccgtcccaggtttgatgtcctgtatgaacggtagaagtcgcgcttcgatcgtgttgaactcggcgtcttgctctcctagcccgatctggttggccacggcgctgacggcgtcgaccacggtgcaagaggggtgttgcgaaaacaccgcggtgacatactccgcctcccaatgtcccgtctgttcattccgataggctgtattgtcgagtagccagaccgtatcttgtgccgtcaccggtcgcgttaacgggttctttttgcccaggtaggagaggatgccataaaacttgtccttgactgtcaacgtagtagtgacttttggcaacttgcccgaataatccggaagctcctgctcggtttccgcgaaccgccgttcttttcgagtgcgttgctgcatgtcgaacgcgagatttttctttgcaatgttcgacgccatcttgaatgctacgcgccctcgcaggcgacgggttttgtatgacgaccgagaagtattttgccacggcagaaggctgtgaggcgtgactgtcccgcgtggcctcagcaccgaaagcataggataacggacggcaccacgaggcagacactttagcttggctatgtatatctactagtactcagacattatattggaaggacaggtgtgtgacaccacgaccaggcagagaaacaatgtcacttagagggtatacatggtggaatgtgacggggcacgtatcgctcttaaggaggacccgatggtgtgtactcgtgcaggcgtaagtagtactatcgtgctctgggcgccggggtcagctgggagctctgcctccctggaaggcggtggcaggaccaacagctgcggccatgggagcgtgtccgcaatgagggcagatggtatggtgtgactggtgcatgtaagagatagccgttttcagctcgtcagcccagacatgaacggcattcctacattcccaaagcgttggtagttcctacagatgttacggctgccggtgttgtaatgcatgcgcttccgagaatagtcctgaaaatgggtctgtcctgtcaagtacgacttgacctcgctgctctccatactgatataaatcgcagagctgaccaccttgtctatttcgacgagaaatagtcgactgtcatacacttagcacatttacaaggagctgttaagcgaatgaagttgtaactgtcgtgcgtatcatgtacatgctctgtgctctcgagcggtagcatctgtaaggtacaacttaaatggagcgacaggggatgacgtgtgtgccgcaattccgactgacgacatcaataatgcagcttggacaatgccccatacttctgcaatgtcgcccagtattaatacagcggtatattattagatgttccctggggccaccttgccgaagatcagttatcgcattcgcccaaccagagccagctagccttcactgctactgagaagtacagatgcatgtgttctgatcgagcagcaaatgaaatccatactcacaaatgacaccgtcaaattggaacgaaaacgtaatgttgagttttacatgagctcggttgaagatttgcagaggtatgcaggtaagatagaccgattgcaacatgaaatctggtttcctctttttggtgcattactcatcgctaagtactggtatgcggggaagcttgctgagcatcccctcgcgcgacgcccacgtgaatgaaatagatcggcttgagaacttgtcgtagacgagcttaatagtgtttcagaaactgaagctactcgattttttttgtcagcagtcagtatgctcgaaataaggtgcataggcaatccacatgaaattggtgtgaagcatggagcaatggcgaaggagaagatatctggatccatcgaattttacagcaaactgttccaggaaacatgttcattgacatggtctgaagtgacgcaagaggcttcgaaatacgtagcccctctcgatcacgttgcaccgagatacatggaggagatcaagggcatcgccgagggtgccggtcttccgttcttagacatactggctttgaatatccggaccgaaatcatgttcggacttttctctgagccttccagggacattgcggagtctccgagcgacggatgcacgagtctagcttggctgactccatcaaataaatcgtttctaggccagaattgggattggatgactgaacagagcccgaatctcgtagtctgccacatctcgcaacccgaaactatgatgccgccattctctatggtgacagaagctggaataatcgggaagattggtctcaacgccgagggggtcggatgttgcttgaatgctatcaagtattgcggagtagatgcttcccgattgcccatacattttgcgctacgtaaggtcctggaatcgccaacacgggccgatgcggttcaagctatcaagaccgccggtgttgcgggcagcggccatattctcattggtgatccgaccggatcaacgggactcgaatgcacaagtcaatgggttaaggaggttatgatggacgagaaaaatcgaatatttcatacgaatcatctacttcttgacgacggaccgccgtggctggccgattcatcagcacgactaacacgagtcggcgaactcacaagtctgatatctgacccgaagctcgactctatcgctagcgtcttagctgacacggaagggtctccatgttcaataaatagaaaacaagaaggcctgtcaaaagctgagacgctcttcacaatcattatggatcttacagccaagtcggcacatgtaacttttggtcgacctacggaagctagacaggtattgtcattgacattttgacactctgaacaacaacgcaacatatcatttaacaagcgagcatccagattattccatatttacagatcgtgggttcatattacagtgtgttgatgtctggttttgttaagtcgcgccgttaggccgatttctgttcactttcacgcttctcgatccaaccgacgtccaccccgtacctacgcattgggagttagtgatgagtccttttagccaattttttgctacacgctctcccaccatccaaggctgaatagccatccttcgaatataccgcttcgctttagttcggactctgtctgccattctgcgcccattggtacgagtttccgggtgctaacttcgccatcggcgaatagggctgctctaccggcgatagtgctggggttgtgcggaacgaccttgtcgattcctctaagtaaaacgcggctgacaatggcacaaattatcatcactgcaagtagtatctgcagcacaattttgggtgccgcttcctgcttcaagcgcagccgattaggaacatcgacttgggctgaaacgtgttgtcccaaagccctatcaacaggaacgtcgcgtgtagtaacttcgctacttatgtttgccgaccttaagttatccgatatcgcctggggcatataaatcttgtataatctatttgttgcgtcaatgagattctgagtattgttcacgccaatgtaggactcaataggcgacgaagcattgaccgtgccaagaaagcgcacaaagttatcaagactatcggcctcgactatgccgcctttcggagcaggaaatgagatgttaccagtgccggacgcaagagtcaggagtaattcgttgagagcgaattcaaatacgtgacccgtgtgatatggaagtacgttcgttaagtattgcgcagtactttcgttagtaacaggcggtgtatctggtgatatgacaccaagtgatgggagagttaatgtgacgttggcttcgaccgtttcgagatattgtttacacatgactatagcagaaaattaattctcaaatactgtggctcg

SEQ ID NO: 21522 - DNA, 1242 bp, Muscodor strobelii
  misc_feature: SGI cDNA ID NO. 567287
  misc_feature: Encodes the peptide sequence at SEQ ID NO 21523
atggcgtcgaacattgcaaagaaaaatctcgcgttcgacatgcagcaacgcactcgaaaagaacggcggttcgcggaaaccgagcaggagcttccggattattcgggcaagttgccaaaagtcactactacgttgacagtcaaggacaagttttatggcatcctctcctacctgggcaaaaagaacccgttaacgcgaccggtgacggcacaagatacggtctggctactcgacaatacagcctatcggaatgaacagacgggacattgggaggcggagtatgtcaccgcggtgttttcgcaacacccctcttgcaccgtggtcgacgccgtcagcgccgtggccaaccagatcgggctaggagagcaagacgccgagttcaacacgatcgaagcgcgacttctaccgttcatacaggacatcaaacctgggacggaggtcagagcgtttcacaatggaaacttgcatctgcggttcgcacccacaggaaacaacggagttgggaccgagaccaagcggctgcctgcgcctccagccggtaaactcttgacgccgacctttgcccaagtaccgaagggggcgaatggactgctggaaatgagaacatttcatgccgaaccggaaggatggggcgttatatcagatatcgacgatacgatcaaagtcacgcagaccagcgatcctatcggcatcttacggacgacatttactgagcgcccggaaccctgtccggggatgcctgagctgtacaaatacgtccattctctcattgagaatacttcatcatggttctacctgtctgcctcgccatacaacctctacccgttcctccgtgacttccgccagaaccactacccgcacgggaccatcatgttgcgtgattcgagctggatgagcgtaggggggcttctgactaccctcacggtgcacacggaggactacaaagtcggacggatggacgacatacactcgtggcttcccaagcgaaagatgatctgcgtgggtgattcgacgcagaccgaccccgaagcttacggtgagatttatagaaaataccccggctgggtcaaggtcgtcctgatccgcaaagtcgaagacatctcagctatcggtatcgaggagaagaacgagccggagcggttcgagaaggcgtttgagggggtgccgcgtgacgcatggcacgtgttcacggagcctgaggagtgcaagcagatcatcgcagatgtcgtggcgaaacagtag

SEQ ID NO: 21523 - protein, 413 aa, Muscodor strobelii
  misc_feature: SGI Peptide ID NO. 567287
  misc_feature (13)..(411): NCBI GI: 145615366 Blast Desc: MGG_05536 [Magnaporthe grisea 70-15] gi|145022209|gb|EDK06229.1| MGG_05536 [Magnaporthe grisea 70-15]
  misc_feature (3)..(413): NCBI GI: 256729175 Blast Desc: [Nectria haematococca mpVI 77-13-4]
  misc_feature (14)..(390): NCBI GI: 116200552 Blast Desc: CHGG_10821 [Chaetomium globosum CBS 148.51] gi|88175535|gb|EAQ83003.1| CHGG_10821 [Chaetomium globosum CBS 148.51]
  misc_feature (14)..(410): NCBI GI: 156033340 Blast Desc: SS1G_13390 [Sclerotinia sclerotiorum 1980] gi|154698793|gb|EDN98531.1| SS1G_13390 [Sclerotinia sclerotiorum 1980]
  misc_feature (8)..(413): NCBI GI: 46138477 Blast Desc: FG10753.1 [Gibberella zeae PH-1]
  misc_feature (14)..(410): NCBI GI: 154310789 Blast Desc: BC1G_06373 [Botryotinia fuckeliana B05.10] gi|150851172|gb|EDN26365.1| BC1G_06373 [Botryotinia fuckeliana B05.10]
  misc_feature (11)..(392): NCBI GI: 171691645 Blast Desc: protein product [Podospora anserina] gi|170945771|emb|CAP72571.1| protein product [Podospora anserina]
  misc_feature (14)..(402): NCBI GI: 28950064 Blast Desc: conserved [Neurospora crassa]
  misc_feature (1)..(402): NCBI GI: 189208768 Blast Desc: conserved [Pyrenophora tritici-repentis Pt-1C-BFP] gi|187976810|gb|EDU43436.1| conserved [Pyrenophora tritici-repentis Pt-1C-BFP]
  misc_feature (18)..(401): NCBI GI: 169598164 Blast Desc: SNOG_01880 [Phaeosphaeria nodorum SN15] gi|160704344|gb|EAT90092.2| SNOG_01880 [Phaeosphaeria nodorum SN15]
MASNIAKKNLAFDMQQRTRKERRFAETEQELPDYSGKLPKVTTTLTVKDKFYGILSYLGKKNPLTRPVTAQDTVWLLDNTAYRNEQTGHWEAEYVTAVFSQHPSCTVVDAVSAVANQIGLGEQDAEFNTIEARLLPFIQDIKPGTEVRAFHNGNLHLRFAPTGNNGVGTETKRLPAPPAGKLLTPTFAQVPKGANGLLEMRTFHAEPEGWGVISDIDDTIKVTQTSDPIGILRTTFTERPEPCPGMPELYKYVHSLIENTSSWFYLSASPYNLYPFLRDFRQNHYPHGTIMLRDSSWMSVGGLLTTLTVHTEDYKVGRMDDIHSWLPKRKMICVGDSTQTDPEAYGEIYRKYPGWVKVVLIRKVEDISAIGIEEKNEPERFEKAFEGVPRDAWHVFTEPEECKQIIADVVAKQ

SEQ ID NO: 21524 - DNA, 5677 bp, Muscodor strobelii
  misc_feature: SGI EST ID NO. CUFF.50825.3
  misc_feature: Variant of the nucleotide sequence at SEQ ID NO 21522
cgcgcgaggggatgctcagcaagcttccccgcataccagtacttagcgatgagtaatgcaccaaaaagaggaaaccagatttcatgttgcaatcggtctatcttacctgcatacctctgcaaatcttcaaccgagctcatgtaaaactcaacattacgttttcgttccaatttgacggtgtcatttgtgagtatggatttcatttgctgctcgatcagaacacatgcatctgtacttctcagtagcagtgaaggctagctggctctggttgggcgaatgcgataactgatcttcggcaaggtggccccagggaacatctaataatataccgctgtattaatactgggcgacattgcagaagtatggggcattgtccaagctgcattattgatgtcgtcagtcggaattgcggcacacacgtcatcccctgtcgctccatttaagttgtaccttacagatgctaccgctcgagagcacagagcatgtacatgatacgcacgacagttacaacttcattcgcttaacagctccttgtaaatgtgctaagtgtatgacagtcgactatttctcgtcgaaatagacaaggtggtcagctctgcgatttatatcagtatggagagcagcgaggtcaagtcgtacttgacaggacagacccattttcaggactattctcggaagcgcatgcattacaacaccggcagccgtaacatctgtaggaactaccaacgctttgggaatgtaggaatgccgttcatgtctgggctgacgagctgaaaacggctatctcttacatgcaccagtcacaccataccatctgccctcattgcggacacgctcccatggccgcagctgttggtcctgccaccgccttccagggaggcagagctcccagctgaccccggcgcccagagcacgatagtactacttacgcctgcacgagtacacaccatcgggtcctccttaagagcgatacgtgccccgtcacattccaccatgtataccctctaagtgacattgtttctctgcctggtcgtggtgtcacacacctgtccttccaatataatgtctgagtactagtagatatacatagccaagctaaagtgtctgcctcgtggtgccgtccgttatcctatgctttcggtgctgaggccacgcgggacagtcacgcctcacagccttctgccgtggcaaaatacttctcggtcgtcatacaaaacccgtcgcctgcgagggcgcgtagcattcaagatggcgtcgaacattgcaaagaaaaatctcgcgttcgacatgcagcaacgcactcgaaaagaacggcggttcgcggaaaccgagcaggagcttccggattattcgggcaagttgccaaaagtcactactacgttgacagtcaaggacaagttttatggcatcctctcctacctgggcaaaaagaacccgttaacgcgaccggtgacggcacaagatacggtctggctactcgacaatacagcctatcggaatgaacagacgggacattgggaggcggagtatgtcaccgcggtgttttcgcaacacccctcttgcaccgtggtcgacgccgtcagcgccgtggccaaccagatcgggctaggagagcaagacgccgagttcaacacgatcgaagcgcgacttctaccgttcatacaggacatcaaacctgggacggaggtcagagcgtttcacaatggaaacttgcatctgcggttcgcacccacaggaaacaacggagttgggaccgagaccaagcggctgcctgcgcctccagccggtaaactcttgacgccgacctttgcccaagtaccgaagggggcgaatggactgctggaaatgagaacatttcatgccgaaccggaaggatggggcgttatatcagatatcgacgatacgatcaaagtcacgcagaccagcgatcctatcggcatcttacggacgacatttactgagcgcccggaaccctgtccggggatgcctgagctgtacaaatacgtccattctctcattgagaatacttcatcatggttctacctgtctgcctcgccatacaacctctacccgttcctccgtgacttccgccagaaccactacccgcacgggaccatcatgttgcgtgattcgagctggatgagcgtaggggggcttctgactaccctcacggtgcacacggaggactacaaagtcggacggatggacgacatacactcgtggcttcccaagcgaaagatgatctgcgtgggtgattcgacgcagaccgaccccgaagcttacggtgagatttatagaaaataccccggctgggtcaaggtcgtcctgatccgcaaagtcgaagacatctcagctatcggtatcgaggagaagaacgagccggagcggttcgagaaggcgtttgagggggtgccgcgtgacgcatggcacgtgttcacggagcctgaggagtgcaagcagatcatcgcagatgtcgtggcgaaacagtagaggacatgtttgcgaagtcttgtgtgaacatattttatttctatttggggttggaggtatacactttggtacaaactcgtcggttggcctttcttggtgtttggggcaatggtctctcgagcgggtacggtttgctgatctttccatgcgtttccgcgcggcggttgtattaatatctatacttgacgatacccgaaacctttcttgttgtgcattgtgtctcgatcatgactttttgcgagcttgctgcttgactctcgagactgtgcggtggctgaccaacgatggccgacggcgataacttggtaataaatatctaatttctcaaggatatagctatcttcggactcgttcgcgtgtctggagtcaaagtgcacctctctgagtgactaatggccagaggctacaagttatataacttagtttgagtgacttcattcatgaggcggtctcttgggttagattatgattgtagagcatagtcatacatgatgattcagaaacacatatcacacacaaacacaggcccgtcttgatgattgactttaactgatttgaattcttcccgggctaagaaggtagctaactaggtatccggcaagagagcaggatagctgcgctcaggcccatcgggcaagaagggctgctgaactgcaacgaggttcggcgatggctcgtacaacgatcaagagagacacaagtcacgacgccatgaaccgaccaataaggccacaagggtcttagatcccgaagacgctgattccataccccgaggatgcaaatgaagcaaggtaacgcctgtcccaatgcagagtagcgaccgcatgtccctggaggagatggggcgaagtagagaagccctcctccggctcgcgtgatgagcatgatgctgattccaagtctatcgtcgtgatctatatggtatagaggggtgttgccgagtggcaaagagaaaccgtcaccggcagtcgtgaattcgtacgataccgatgaatgaagatgccgagatgtcaccctcggatgccgctgtgcaggggaaaagagcgccggatataggaaaatgcaccgcagaccaccgcgaagccaatgcggcaaagaaacatgttgggtatctcgataaagaaatgggctgatccacagccggctcgtgatgcaggtagacgagagaaaaacgggtggttcgggactaggtcttaacgcctcttctgatcagtggtgcccgacgtcttcttactcgagtgatgatgatggtggtggtggtggtgattgctatgctggtgcgagtggcggtgttggtgatggcggtgctggtgctggtgctcgtcgagttcgtcgtggtcatggtcgtggtcgccgtgcgaatgcggcggctcgtagtgctggcgctcgcgctggcggccgcggtgctcctcctcgagcgggtagccgagcgactgggactccctctcctcctcgtaccaggtgctgaggctcttgccgccgaacatgaggtcgtcgtcgtcgatgacgatgggctcggtccagccgtggcactgcagctcctcctcggagacgtcgacgccgggcaggtagtagtactgcgtctcgtccgcgtggggatgcgacggcgtcgtcgtggtcaccatcttgagcggcgagggaccgtgggtctgcgaggacgctgtcgaggaccggtgcagagggttcttctgcgagttcgtccgtcggggcgacgtgttggatgtgttggaagtgtgcgagtgcgcggcgtgagatcgagaatggggcgagacggaatgtacagcgtgggcgtgggcgtgtctgcgtgggtcgtcagaaacacgcaggctggagcgtgtcatgggcggccaggcgaggtgctgtgtcgaggacgggacggaggcacgcaggatgtcgatgtggacgtggatgtgggcgtgtgtccgagatatgtagctgggcagatcccgtgcgccggcggcggtgtccaaggctcgcggcggcgggtggtgtgcgacaggcgcgtgtcaggcgaggtgtgttgacgtgggaaaaaaagtgtggtgggacgagtcgggtgtttttatgggtgcgtgtgggtatgggtgtgagtggtgagtggtgagtagtgagtggtgtgcagtgtgcagtgtgcagcgcgtgagagagtgtgtgtgcctcgagcagcgactccgacggtcggcaggaggtgtggccagagggggatgcttatatgctcaagtgtcgatccgttagccgcagggctggactgcgctggactgcgctggacgcactggcccgggctgtagaaggtaacgcgagttggcgtggatgtgtactttccgatgcctaagacacacacaccaaggcgcagtcgggacttgcgctgaggtcagttgctctccgacaacgaggtctcactcgaacaaaatgggcataaatcacacttgcagaaatggaagaaagagagcagagacagggcgaccccgcgagacggacgagagcctggagtgctgctgtacttgtagggacagcccgtgtgtcgacagggcactggccttgtggatcttccgtggatgctgcccggccacagctgcgccttaggtacctaggtagggaggagagggctactaaggtatcttgcttacaggtagacgtgctggctgttaggtacatgtacctaacctctcaccctatctggcccttctgagaggccgctgaacgcgctgatcgctctgggtggtggggacgcggtgggggccgtatggattcccagcacttggcgcccacctagcaggtagctagctgcggggcaacccggaatcaggcaacgacggaactgaaacgggtttttggcgagacggtctgcccgcacgttacggagtttgacagcgatgagatgatgtgtcttgctcactctggccgatgcaggattttgttgttcaataagtgaatttcttcctaacgatagtaaggtctctgttgctgtccgaggtcacagaattcttctcgggatttgctccttcttctccaattccttccttcgtgaagagtggaggtattatcaagatacgactaaattcgacgatgaaagcaatgaaaggttcggtattggaataagaacacgggcgggatggaaaatttccggttaaaaataatgagctgcattcaaagctacagctcaattctgtggatcaaggcagaaaat

SEQ ID NO: 21525 - DNA, 648 bp, Muscodor strobelii
  misc_feature: SGI cDNA ID NO. 567288
  misc_feature: Reduced expression when VOC is produced
  misc_feature: Encodes the peptide sequence at SEQ ID NO 21526
atgacacgctccagcctgcgtgtttctgacgacccacgcagacacgcccacgcccacgctgtacattccgtctcgccccattctcgatctcacgccgcgcactcgcacacttccaacacatccaacacgtcgccccgacggacgaactcgcagaagaaccctctgcaccggtcctcgacagcgtcctcgcagacccacggtccctcgccgctcaagatggtgaccacgacgacgccgtcgcatccccacgcggacgagacgcagtactactacctgcccggcgtcgacgtctccgaggaggagctgcagtgccacggctggaccgagcccatcgtcatcgacgacgacgacctcatgttcggcggcaagagcctcagcacctggtacgaggaggagagggagtcccagtcgctcggctacccgctcgaggaggagcaccgcggccgccagcgcgagcgccagcactacgagccgccgcattcgcacggcgaccacgaccatgaccacgacgaactcgacgagcaccagcaccagcaccgccatcaccaacaccgccactcgcaccagcatagcaatcaccaccaccaccaccatcatcatcactcgagtaagaagacgtcgggcaccactgatcagaagaggcgttaa

SEQ ID NO: 21526 - protein, 215 aa, Muscodor strobelii
  misc_feature: SGI Peptide ID NO. 567288
  misc_feature (92)..(153): NCBI GI: 171679060 Blast Desc: protein product [Podospora anserina] gi|170937601|emb|CAP62260.1| protein product [Podospora anserina]
  misc_feature (58)..(153): NCBI GI: 116205898 Blast Desc: CHGG_02242 [Chaetomium globosum CBS 148.51] gi|88182839|gb|EAQ90307.1| CHGG_02242 [Chaetomium globosum CBS 148.51]
  misc_feature (89)..(159): NCBI GI: 145608498 Blast Desc: [Magnaporthe grisea 70-15] gi|145015967|gb|EDK00457.1| [Magnaporthe grisea 70-15]
  misc_feature (83)..(139): NCBI GI: 46137947 Blast Desc: FG10488.1 [Gibberella zeae PH-1]
  misc_feature (85)..(139): NCBI GI: 256734932 Blast Desc: NECHADRAFT_99035 [Nectria haematococca mpVI 77-13-4]
  misc_feature (92)..(152): NCBI GI: 164422552 Blast Desc: NCU09986 [Neurospora crassa OR74A] gi|157069714|gb|EAA29059.2| NCU09986 [Neurospora crassa OR74A]
  misc_feature: Useful for introducing or modulating the production of volatile compounds
MTRSSLRVSDDPRRHAHAHAVHSVSPHSRSHAAHSHTSNTSNTSPRRTNSQKNPLHRSSTASSQTHGPSPLKMVTTTTPSHPHADETQYYYLPGVDVSEEELQCHGWTEPIVIDDDDLMFGGKSLSTWYEEERESQSLGYPLEEEHRGRQRERQHYEPPHSHGDHDHDHDELDEHQHQHRHHQHRHSHQHSNHHHHHHHHHSSKKTSGTTDQKRR

SEQ ID NO: 21527 - DNA, 8039 bp, Muscodor strobelii; identical to SEQ ID NO: 21521
  misc_feature: SGI EST ID NO. CUFF.50826.1
  misc_feature: Variant of the nucleotide sequence at SEQ ID NO 21525

SEQ ID NO: 21528 - DNA, 9615 bp, Muscodor strobelii
  misc_feature: SGI cDNA ID NO. 567289
  misc_feature: Encodes the peptide sequence at SEQ ID NO 21529
atgctggagggcctggtagccgggttgctcaaccgcttcctgggcatgtatgtcaagaacttcgaccccacacagctcaaggtcggcatatggtccggcgacgtcaagctccgtgatctggagctccgcaaggaggccctcgaccagctgaagctgcccatcaacgtcgtcgagggccacctcggccagctgaccctcgtcattccctggtccaacctgcgcggcgcccccgtcaaggtcttcatcgaggatgtcttcctgctggcgtcgccgaaagaagaagccgcctacgatgccgaagaggaggaccggaggaagcagcgcctgaagatggagaagctcgactcggccgagatgatcaaggagcgctcccaggagggcctcagccacgaggagcagaagaagagccagagcttcacagagagcctagtcactaagattgtcgacaatctgcaggtcaccgtcaagaatatccacgtgagatacgaggactccatctccgccccgggccaccccttcgccctcggcgtcaccctcgaggagttcagcgccgtcagcaccgacggcgagtggaagcccacattcatccagaacacctccaagacaacccacaaactggccaccctcgccgccttggccgtgtactggaacacggactccaagttgttcggttcgggccgtgaagtggcaagcgaggacgagtcgcttccgcatgatgacatgatacacaaattcaagggcatgatcggccacagtgagagcgaagcgatacccgaccaccagttcatcttgaaacccgtgagcggccaagccaagatcgagctagacaagtccggcgacacccacacaccgaaattcaaagcgaacctattgtttgacgagattggcatcgttctcgatgatacccagtatcgcgacgccttgatgatggtggacctattccactatttcatccgccatcaagagtacaagcgcttgcagcccaaaggcgtgtctcccaaggaagatcctcgagcctggctcaaattcgccggggatgccgtgctcagcaagatacacgaacgcaaccgacgatggacttgggactacttccgcgagcgacgcgacgaccgccttcgctacattgaaatcttcaagaagaagaaagcgaaccagcagctgtctgccgaggagacggaggatctggataagctagagatgaaatctgggtatgaagacctgcgcttctggcgatctttggcccgtaaccagctccggaaagaaaatgccgaggccctcaaaaaggcgccgcccaagccggcccagcagcagcaaggctggctctcttgggcctggggctccaagccagcagaaccgaccgacgcttcggagaatacccagatcactgaagagcagcggcaagagttgtacgaagccattgattgggacgagaaggccgctcttgcggacgcagtggactccccacgcgatgcggtgaagctgcaagtagatgcctctctctcgacgggtagcttcactctccgacaaagcccacatggcactaagtctgacctcctaagcctgcatttcgacgttttcaaagccaaggctatgaagcgcactgattcgctccttgctgatgttagcttgggtggacttcgcgtgaatgacggcactacacctgatagcttatttaaggagattgtgagggtcaaggacgcgccagacatgcgcaagcagaagcgtctatcgattgcagagcttgagaccgcggccaaggagagttttttcgatttccaactcgagcaaaaccctctcgatggccaaggcgacttcgctatcacggccaagctgaagccgctcgaaatcgtctggaaccctaatgttgtagttggtgttgtcgacttctttaagccgccagaccggcacatggaatccataacagctctgatggagaccgcgggtgccactgtggagggcttgagacagcagacacgagcagggctggagtttgctctcgaggagcacaagaccatcaatgccaagctggatctgcaagcaccgttgatcatcattccccattctatcaagaccaaggactcaacatgcctcattctcgatgccggtcatataagtctcaacagcgagctagtcgataaagggactttgaaacaaatacaagataagcagcagcagaagtactcggacgatgacttcaaacagctcgagtcactcatgtatgatcgtttcattgtcaagctaacctcgactcaagtcttgataggcccttctatcgaagaaacgaagtcccaattggtccaaaaagacccgaagcgcatgttccatgttgtggacaaaatcaatgtcgactttgtcgtggccctttctattctgcccaaagctccaaacttgaccaaggtgaaagtctcaggccatatgcctgttctgcaagctactgtatccgacacgaaatacaaaagcttaatgaagctcatcgacgtcgccatccctaagatcggtggtgacgaagccccgcaggcagtaaagccgcagcaaaagcctaagcggcctcgattacttagctcggcatcgagccgctcgtggaggggacatgggcgcaaacgctcttcaaatctcttcctaacccaagagaccgctattattttagacgatgagtcggatgatgataacgatgagtttgaagacgcggcagacggcaattcgaaccagcaactcagagtccagcaacgaaatttcgaattcaagtttgctgttgacaagcttcaaggctctctgtataggagtgatccagatggggagagccctgacacgcttctggtcgaactagttgccgaagactttgctctagatttatgcatccggccgtttgacctagcagccaacgtctctctgggttcagtgacggtggacgactttgtcgacaaccctcctgctgatttcaagtccatcgtctcttcgggagatgtggaagaccgccagcaacaaagagagcttgtccgcgttaagttcactagggtgaaaccggagtctcccgagttcatgccggtctacgaagggatcgagacaaatgtgaatgtggctgtttcgactatcaacttgattgtgacgagaaagactcttctcacgcttctagatttcatcttgatcactttcgctaataacggtaatgcaagtgctcctccgtcaaagagtatcagcgattccgaagatcgtgatactacaattgagattgtcgagccggagccaagtccggagcagacagaaggtggctcaatacgcgtcaagattgacctaaagagtatccgtttgattctcaataacgatggcatccgtcttgccaccttatcatttaatcatgccgacgtaggggtcttcctgctcggcaggacaatgagagtcgcagccaaacttggcaatttgagcctcgtagacgacgtcaattctggtgcagcagaagactcaagtattcgtcagctggtcacaattcaaggccatgacctcgccgatttccgctatgagacgtttgacgcgaacaacaaaaaggcatacccgggatatgattcatccattttcctgcgagctgggtcaatcaagattcacttcctcgaggaaccgttcagaaagatcattgagtttctcgtcaagtttggaaagatgcaggcaatctacaatgctgcgcgccaagctgctgccaatcaagcacaacagcttcagcagagcactagcaggttcaagttcgatgtaattgtcaacacgcccatcatcgtcttcccacgccctctatcgcctgaacgaccaaagagagacctcatcactgcctatttaggagagatatatgcccagaataagtttgtgcccttggatgactccgaggatgcagagatcgcgatgaagctatctgcaggtatcagaaacatccggctgacgtcgtcatttcactacgctgacgataagtctgaagagcttgagatgattgatcacgtagatcttggcttcaatctgacttatgcggaacaccaagagggttggaaacgtcctgacatggaaatcgaaggtagcatgaccgacgtcaatttacggctgacccaataccaattaaaatatctgttggcaatatctcaatctgttcctgctgcatttgctacagatgtagacgctagtgaagaggaggcagagcgagatgttgatgaaggtactctgcgccgagcaaagacgatgtcctctacgatgagcaatgccgatgacaaagttatcgatctctctcccgaattgggttctcgggaggacacctggaccaagctagacatggtattcaccatacacaaagtcggacttgagctcatcaatgcatacgaagacaagcctgtaggtaacatcgacacggctagtctatcgaaattctctctggatgacagcaaactgaagctgaggatgttggccgacagctctctggaagccgaatttgtgattcattcatttactatccacgacagtcgtacgcgggagggaaacagattcaagaggattatgacatcttcaaacaaaaacgtacagcaattcatggccagtatatcgatatctggaggtaaagagcgaagtatgataggagtcgttgctattgacagtccgagaatcatctttgctctggactatctgttcgcaatccaaaagtttatcactacagggctagagaccgaccagtctccccaagaaattatggatagcccttcggagacacccgatgtgtcagatgcagagtctatgcaagtccagttcacaagtaagaccgatgcgagctcagacgcccctgcgctaccgcctaggagaattacagcggcagagccggcaaagatggacgtgtcatttcgtgttaatattgtcgatgctcaggtcatcttgatagccaacccccagagctccggttctgaggccatcgtcttgggcaccaagcaagtgctcttgtcgcagcaacatgcactgactttccaggtttcgcaggtcggcatgttcttgtgccgcatggataagtttgatgagtccagattgcgtgttctagacgacttctctatccagctttccgtggacaattcgcgatcggatcagaccaatatccacgtcgatattgaaccattgattcttcgattgtctcttcgggatattctcctggtgctacagatcgtaggcaaagcgtctgagctgtctggagaagaagatgccgaggatcgtcaaagtgcatccgacaagaaaacacaagaacttcgaaacgacggtttaagggcacgctccgctagcggcaaggggcaatccaccgtcggccgtaagtcgaaacccacgaaaggtgccggtaccatgaccacagcgtctcggaaaggaaaagagctattgcatcagcctcatgatgtcaaaaaggccccacgacgtcatgaagagctgactgctaacatcgaaggcatccgggtggtactcattggtgacgtccatgaattacccattttagatctgagcatcaagaacacgatggcatcagcagcggactggtccagtgacctaaaagccgagactgcgatagacatgtatatcaatgtttataacttcgcgaaatctgcatgggagccgctattagagccatggcaggtcggcgttggtgttgctcgagaacagaagaccggtcttttttctgttgacctcacatcaaggaagacatttgatgttacaattaccacggcaactatcgcattggcgtcaaagtcgttcgatttcctcactcaagatgaggatattctaagcaaaccacgaggcgtggaagctccgtataagatccgaaactacacaggattcgacgttatcgtccaggctaagacccttagcaatagtgagaacatctctcttaagctggaagatggtgaagaggctccatggagttttgagcactgggagaagatgcgcgagaacatcatgtctgaaagtaccactacgaacagtgtatccgtgcagattgaaggaagtgggtttgacacggtcaaaaatattcgtctcaaccgcgagggcgagttcctctacagtctgcgaccgaagaccgatgatacactgcaccgacttctcgttgaggtgaaccttggcgctgacaatatcaaatatgtcacgctgcggtcgccactcgtcgtcgaaaatgaaacgcagatacccgtagaactgggcgtgtatgacgctcaagaagggcatcttctcaaaatcgaaaagatcgcgcccggagagtcacggcctgcgcctgttgctgctgcttttgttcagtccttgttggttcgacctgactcgggattcggttactcgtggtcctctgatcacttgtggtggaaggatttgttgaaaagaccaacacgaactttggtgtgcaaaggcgaaaatggtgatcctttctacttccaactcaatgccagttatgatcggaaccacttcttgactgggaaatacccatacatgaagctgaagctatcacctcctattgttctagagaatctactaccttacgacttcaaatatcggatctatgacaggaacactaaaagggattggaacaacttccttaggaagggcggtgttagccccgtacatgtcgtggagctctcacacctcctgctcctgagtgtggacatgcaagacacggtcttcaaagccagtgaatttgctatcataaaccctggacaccaagaagacttcagaaaagagaataaactcatctgcaaagatgaggatggcctgcctctatatcttaaactccactacttcaagattccagatggtggcggtgctttccgggttaccgtgtacagcccatatgtaatcctcaaccaaactgggcttgacgctactatacgtggcaaacaattcctccaacaagcaaagagggcggctggccaagcatcgagcgcaggctctgctgatcaacagcgaccaaaggcgcagccattgatgttttcttttggcaacgacgatcagcgcaaccgagcgcttctaaagtttgatgattccgagtggagtaaaccgcaaagtttcgacgccattggaagcactacagatatggcacttcaatccacgacgaaacaatcagagcttcacgttggcattactgttgaatccggtgaaggcaaatataagctcacgaaggtcgtcacgcttgcgccacggttcgtcgtgaagaataagaccggggagccaatcaatatcagagaaccaagatcgtccaacatcatgacactggaatcaggagctctacagcctctctattggctgcaaagatcgcaaacaaaacagatggcgctctgttaccctgggatggataatcaatggtcatctcctatcaatatctccgatcttggtacgatgcatatcaagattgccaaagctgggcagcgacaacgtcttattcgtgttgagattctgatggagaatgccactattttcctacatctcagcatggagaagaaggcgtggccattctcaatgcgtaacgaaagcgatgcggaattcacattctatcaagcgaatccgaacgtggacgaagatggagcagaagaccgttctggttggcggcccataagatatcgcctacctcctcgcagcatcatgccatatgcttgggatttcccagcagccaaattcagagaagttgtgatcagtgctttcggtaaagagcgtcacgtcaagcttgctgaaataggcaatcaagtccccatgaagtttgtcgatgcctctggtgctcccaagatcatcgatatcaatgtcgctgccgatggccctacacagacgttaatactatccaacttcaaaccgagtaagagtctatacaggcaaagaacgcagaccggagccagcagctccagtacaagtggctttgaagtcaagaaacaagacacagcttcgactttccaggctgaattcaagctctctggtgttgggatatctttaatcaatcaccaactcaaggaattggcttatatcacattcagagacatcaatcttcgctacaacgagtcggcgctgtatcagacgatcagtacctctatcaaatggatccagatcgacaaccaactatacggcggtctgttccccatgatcctgtaccctagtgtagtaccgaagcaggcccaagagaccgaactacacccttcattacacgccatggtgacaagagtcaaagatgatagctacggtgtgctatacgtcaaatatgccacattattactacagcaaatgactgtagatctcgatgaagacttcatctatgcagttctagacttctccaaggttccaggggcgtcttggtctgagtctcacgaaggaaaactgtgtgaagaggacgttgatattcccgaaccgaaacaggaacagtcgggacaggacatttatttcgaagtgctcaacatccagcccatgcagctcgacttgtcatttatgcgtacagaacgcgtcaacatcgaggacaagacctcttcccgtaaccctatcatgttcttcgtcaatgttatgacaatggctatcggaaacgtcaacgatgcccccatccgtctgaacgcactccttttagagaacgctcgtgtgtcaattccagtcctcacgcagaacatatcaaatcactacagccaagaagtcctatatcaagtccacaagatcatcggaagtgcggatttccttggtaatccagtggggctattcaacagtattagcagcggcatcacagacgtcttctacgaaccataccaaggtcttattatgtcagacaagccagaagatctcggcataggtatcgccaagggcgccgcgagcttcgtcaaaaagtccgtgtatgggttttcagattccttctccaaggtgacaggcagctttggaaaaggcttggcagcagccactctggacaagcagtttcaagaccgccgtcgcatcacacgtgctcgtaaccgccccaagcatgctctatttggtgtcaccgctggtgccaattccttcttcacttctgttgcctctggcatcggcggtgttgcccgcaagcctctcgagggtgccgaacaggaaggtgccgttgggtttttgaagggggtcggtaagggcttcatcggattagccacgaagcctgctgtaggcgtgtttgacctcgcctcaaatgtatccgaaggtatccggaataccacgacggttttcgatggttcagagctggatcgagtccgcattgctcgattcgtccccgcggatggcatcgtacgaccttacaaccagcgcgaagcactgggacagttttggctcaagcaggtggacaacggaaaatatttcaatgaggagtacattgctcatcttgagcttccacgagaagatatggtggtcatggtcacatacagccgcattctgcttattcggagtaagcggctgactacggagtgggacgtaccgctgaaagacgtgcaaaccatcgccaaagaacggacgggactcagcattatcctacgtggaggtacaaatggtccctttgtgcctgtcggcgaagaaagtgggcggactttcttataccgcatggtagccatcgcagctgaggagtacaatcgccgcttcaggggtttggaatag

SEQ ID NO: 21529 - protein, 3204 aa, Muscodor strobelii
  misc_feature: SGI Peptide ID NO. 567289
  misc_feature (2255)..(2566): Pfam Id: PF06650 Pfam Desc: Domain of function (DUF1162)
  misc_feature (1)..(3204): NCBI GI: 116205910 Blast Desc: CHGG_02248 [Chaetomium globosum CBS 148.51] gi|88182845|gb|EAQ90313.1| CHGG_02248 [Chaetomium globosum CBS 148.51]
  misc_feature (1)..(3204): NCBI GI: 171679046 Blast Desc: protein product [Podospora anserina] gi|170937594|emb|CAP62253.1| protein product [Podospora anserina]
  misc_feature (1)..(3204): NCBI GI: 85095471 Blast Desc: NCU05837 [Neurospora crassa OR74A] gi|28921556|gb|EAA30861.1| NCU05837 [Neurospora crassa OR74A]
  misc_feature (1)..(3204): NCBI GI: 256735654 Blast Desc: [Nectria haematococca mpVI 77-13-4]
  misc_feature (1)..(3204): NCBI GI: 46138031 Blast Desc: FG10530.1 [Gibberella zeae PH-1]
  misc_feature (1)..(3204): NCBI GI: 145608552 Blast Desc: MGG_06537 [Magnaporthe grisea 70-15] gi|145016021|gb|EDK00511.1| MGG_06537 [Magnaporthe grisea 70-15]
  misc_feature (1)..(3204): NCBI GI: 261360432 Blast Desc: vacuolar protein sorting-associated protein 13a [Verticillium albo-atrum VaMs.102]
  misc_feature (1)..(3204): NCBI GI: 156053764 Blast Desc: SS1G_05729 [Sclerotinia sclerotiorum 1980] gi|154703510|gb|EDO03249.1| SS1G_05729 [Sclerotinia sclerotiorum 1980]
  misc_feature (1)..(3200): NCBI GI: 121708063 Blast Desc: vacuolar protein sorting-associated protein vps13 [Aspergillus clavatus NRRL 1] gi|119400166|gb|EAW10592.1| vacuolar protein sorting-associated protein vps13 [Aspergillus 1]
  misc_feature (1)..(3200): NCBI GI: 169622214 Blast Desc: SNOG_14324 [Phaeosphaeria nodorum SN15] gi|160704724|gb|EAT78195.2| SNOG_14324 [Phaeosphaeria nodorum SN15]
MLEGLVAGLLNRFLGMYVKNFDPTQLKVGIWSGDVKLRDLELRKEALDQLKLPINVVEGHLGQLTLVIPWSNLRGAPVKVFIEDVFLLASPKEEAAYDAEEEDRRKQRLKMEKLDSAEMIKERSQEGLSHEEQKKSQSFTESLVTKIVDNLQVTVKNIHVRYEDSISAPGHPFALGVTLEEFSAVSTDGEWKPTFIQNTSKTTHKLATLAALAVYWNTDSKLFGSGREVASEDESLPHDDMIHKFKGMIGHSESEAIPDHQFILKPVSGQAKIELDKSGDTHTPKFKANLLFDEIGIVLDDTQYRDALMMVDLFHYFIRHQEYKRLQPKGVSPKEDPRAWLKFAGDAVLSKIHERNRRWTWDYFRERRDDRLRYIEIFKKKKANQQLSAEETEDLDKLEMKSGYEDLRFWRSLARNQLRKENAEALKKAPPKPAQQQQGWLSWAWGSKPAEPTDASENTQITEEQRQELYEAIDWDEKAALADAVDSPRDAVKLQVDASLSTGSFTLRQSPHGTKSDLLSLHFDVFKAKAMKRTDSLLADVSLGGLRVNDGTTPDSLFKEIVRVKDAPDMRKQKRLSIAELETAAKESFFDFQLEQNPLDGQGDFAITAKLKPLEIVWNPNVVVGVVDFFKPPDRHMESITALMETAGATVEGLRQQTRAGLEFALEEHKTINAKLDLQAPLIIIPHSIKTKDSTCLILDAGHISLNSELVDKGTLKQIQDKQQQKYSDDDFKQLESLMYDRFIVKLTSTQVLIGPSIEETKSQLVQKDPKRMFHVVDKINVDFVVALSILPKAPNLTKVKVSGHMPVLQATVSDTKYKSLMKLIDVAIPKIGGDEAPQAVKPQQKPKRPRLLSSASSRSWRGHGRKRSSNLFLTQETAIILDDESDDDNDEFEDAADGNSNQQLRVQQRNFEFKFAVDKLQGSLYRSDPDGESPDTLLVELVAEDFALDLCIRPFDLAANVSLGSVTVDDFVDNPPADFKSIVSSGDVEDRQQQRELVRVKFTRVKPESPEFMPVYEGIETNVNVAVSTINLIVTRKTLLTLLDFILITFANNGNASAPPSKSISDSEDRDTTIEIVEPEPSPEQTEGGSIRVKIDLKSIRLILNNDGIRLATLSFNHADVGVFLLGRTMRVAAKLGNLSLVDDVNSGAAEDSSIRQLVTIQGHDLADFRYETFDANNKKAYPGYDSSIFLRAGSIKIHFLEEPFRKIIEFLVKFGKMQAIYNAARQAAANQAQQLQQSTSRFKFDVIVNTPIIVFPRPLSPERPKRDLITAYLGEIYAQNKFVPLDDSEDAEIAMKLSAGIRNIRLTSSFHYADDKSEELEMIDHVDLGFNLTYAEHQEGWKRPDMEIEGSMTDVNLRLTQYQLKYLLAISQSVPAAFATDVDASEEEAERDVDEGTLRRAKTMSSTMSNADDKVIDLSPELGSREDTWTKLDMVFTIHKVGLELINAYEDKPVGNIDTASLSKFSLDDSKLKLRMLADSSLEAEFVIHSFTIHDSRTREGNRFKRIMTSSNKNVQQFMASISISGGKERSMIGVVAIDSPRIIFALDYLFAIQKFITTGLETDQSPQEIMDSPSETPDVSDAESMQVQFTSKTDASSDAPALPPRRITAAEPAKMDVSFRVNIVDAQVILIANPQSSGSEAIVLGTKQVLLSQQHALTFQVSQVGMFLCRMDKFDESRLRVLDDFSIQLSVDNSRSDQTNIHVDIEPLILRLSLRDILLVLQIVGKASELSGEEDAEDRQSASDKKTQELRNDGLRARSASGKGQSTVGRKSKPTKGAGTMTTASRKGKELLHQPHDVKKAPRRHEELTANIEGIRVVLIGDVHELPILDLSIKNTMASAADWSSDLKAETAIDMYINVYNFAKSAWEPLLEPWQVGVGVAREQKTGLFSVDLTSRKTFDVTITTATIALASKSFDFLTQDEDILSKPRGVEAPYKIRNYTGFDVIVQAKTLSNSENISLKLEDGEEAPWSFEHWEKMRENIMSESTTTNSVSVQIEGSGFDTVKNIRLNREGEFLYSLRPKTDDTLHRLLVEVNLGADNIKYVTLRSPLVVENETQIPVELGVYDAQEGHLLKIEKIAPGESRPAPVAAAFVQSLLVRPDSGFGYSWSSDHLWWKDLLKRPTRTLVCKGENGDPFYFQLNASYDRNHFLTGKYPYMKLKLSPPIVLENLLPYDFKYRIYDRNTKRDWNNFLRKGGVSPVHVVELSHLLLLSVDMQDTVFKASEFAIINPGHQEDFRKENKLICKDEDGLPLYLKLHYFKIPDGGGAFRVTVYSPYVILNQTGLDATIRGKQFLQQAKRAAGQASSAGSADQQRPKAQPLMFSFGNDDQRNRALLKFDDSEWSKPQSFDAIGSTTDMALQSTTKQSELHVGITVESGEGKYKLTKVVTLAPRFVVKNKTGEPINIREPRSSNIMTLESGALQPLYWLQRSQTKQMALCYPGMDNQWSSPINISDLGTMHIKIAKAGQRQRLIRVEILMENATIFLHLSMEKKAWPFSMRNESDAEFTFYQANPNVDEDGAEDRSGWRPIRYRLPPRSIMPYAWDFPAAKFREVVISAFGKERHVKLAEIGNQVPMKFVDASGAPKIIDINVAADGPTQTLILSNFKPSKSLYRQRTQTGASSSSTSGFEVKKQDTASTFQAEFKLSGVGISLINHQLKELAYITFRDINLRYNESALYQTISTSIKWIQIDNQLYGGLFPMILYPSVVPKQAQETELHPSLHAMVTRVKDDSYGVLYVKYATLLLQQMTVDLDEDFIYAVLDFSKVPGASWSESHEGKLCEEDVDIPEPKQEQSGQDIYFEVLNIQPMQLDLSFMRTERVNIEDKTSSRNPIMFFVNVMTMAIGNVNDAPIRLNALLLENARVSIPVLTQNISNHYSQEVLYQVHKIIGSADFLGNPVGLFNSISSGITDVFYEPYQGLIMSDKPEDLGIGIAKGAASFVKKSVYGFSDSFSKVTGSFGKGLAAATLDKQFQDRRRITRARNRPKHALFGVTAGANSFFTSVASGIGGVARKPLEGAEQEGAVGFLKGVGKGFIGLATKPAVGVFDLASNVSEGIRNTTTVFDGSELDRVRIARFVPADGIVRPYNQREALGQFWLKQVDNGKYFNEEYIAHLELPREDMVVMVTYSRILLIRSKRLTTEWDVPLKDVQTIAKERTGLSIILRGGTNGPFVPVGEESGRTFLYRMVAIAAEEYNRRFRGLE

SEQ ID NO: 21530 - DNA, 11908 bp, Muscodor strobelii
  misc_feature: SGI EST ID NO. CUFF.50643.2
  misc_feature: Variant of the nucleotide sequence at SEQ ID NO 21528
gtcgtgcacaacacctcacctacaattccaaccttgcggggatcaatgcgtcgcgtgcgcttgtcgttttcatcttttatctcgcaccacaacaacacacgatacctaaggtacggtagctgctaggtagcaccaggttcgctagctttcgtgcctcgcccgttctcatcacccactcttgcatgaacgacgatacaataatatccgtgcatcctatctgctccctacgctgtgaacacaccacactcgcccctgtgacacccaccttggtctcttgatgcctatttcacatctccatcaggtagttcaaccatttcttacacccatgcacagcggatagattgctcgacactgccgtacggcctcctgcatcgcgtacgtacgttctgggtacgaacattgaagctttcatccatgtacctgttctgtcacctcgcctgtctcttgtccaaacttgtctgcttgaataccccatctaacaaccatgcgccccccatagacatagcgttgacgataccactctcctcacccctcccgatccactgctgcagtcctattcgtccttgggcatcggccgtccaacatcgaactcgcccaccccccgcctcgcctgaccattccatggtgttttggcttcgctgcagcgaaactatcagctgggcccccgccgtagtcacacgctggccgagctctccccgttcgcagatgaggcgacccgacatccccccataactcgcagcacactcccggcccgggtcacggccccaacgcctgcaagatgctggagggcctggtagccgggttgctcaaccgcttcctgggcatgtatgtcaagaacttcgaccccacacagctcaaggtcggcatatggtccggcgacgtcaagctccgtgatctggagctccgcaaggaggccctcgaccagctgaagctgcccatcaacgtcgtcgagggccacctcggccagctgaccctcgtcattccctggtccaacctgcgcggcgcccccgtcaaggtcttcatcgaggatgtcttcctgctggcgtcgccgaaagaagaagccgcctacgatgccgaagaggaggaccggaggaagcagcgcctgaagatggagaagctcgactcggccgagatgatcaaggagcgctcccaggagggcctcagccacgaggagcagaagaagagccagagcttcacagagagcctagtcactaagattgtcgacaatctgcaggtcaccgtcaagaatatccacgtgagatacgaggactccatctccgccccgggccaccccttcgccctcggcgtcaccctcgaggagttcagcgccgtcagcaccgacggcgagtggaagcccacattcatccagaacacctccaagacaacccacaaactggccaccctcgccgccttggccgtgtactggaacacggactccaagttgttcggttcgggccgtgaagtggcaagcgaggacgagtcgcttccgcatgatgacatgatacacaaattcaagggcatgatcggccacagtgagagcgaagcgatacccgaccaccagttcatcttgaaacccgtgagcggccaagccaagatcgagctagacaagtccggcgacacccacacaccgaaattcaaagcgaacctattgtttgacgagattggcatcgttctcgatgatacccagtatcgcgacgccttgatgatggtggacctattccactatttcatccgccatcaagagtacaagcgcttgcagcccaaaggcgtgtctcccaaggaagatcctcgagcctggctcaaattcgccggggatgccgtgctcagcaagatacacgaacgcaaccgacgatggacttgggactacttccgcgagcgacgcgacgaccgccttcgctacattgaaatcttcaagaagaagaaagcgaaccagcagctgtctgccgaggagacggaggatctggataagctagagatgaaatctgggtatgaagacctgcgcttctggcgatctttggcccgtaaccagctccggaaagaaaatgccgaggccctcaaaaaggcgccgcccaagccggcccagcagcagcaaggctggctctcttgggcctggggctccaagccagcagaaccgaccgacgcttcggagaatacccagatcactgaagagcagcggcaagagttgtacgaagccattgattgggacgagaaggccgctcttgcggacgcagtggactccccacgcgatgcggtgaagctgcaagtagatgcctctctctcgacgggtagcttcactctccgacaaagcccacatggcactaagtctgacctcctaagcctgcatttcgacgttttcaaagccaaggctatgaagcgcactgattcgctccttgctgatgttagcttgggtggacttcgcgtgaatgacggcactacacctgatagcttatttaaggagattgtgagggtcaaggacgcgccagacatgcgcaagcagaagcgtctatcgattgcagagcttgagaccgcggccaaggagagttttttcgatttccaactcgagcaaaaccctctcgatggccaaggcgacttcgctatcacggccaagctgaagccgctcgaaatcgtctggaaccctaatgttgtagttggtgttgtcgacttctttaagccgccagaccggcacatggaatccataacagctctgatggagaccgcgggtgccactgtggagggcttgagacagcagacacgagcagggctggagtttgctctcgaggagcacaagaccatcaatgccaagctggatctgcaagcaccgttgatcatcattccccattctatcaagaccaaggactcaacatgcctcattctcgatgccggtcatataagtctcaacagcgagctagtcgataaagggactttgaaacaaatacaagataagcagcagcagaagtactcggacgatgacttcaaacagctcgagtcactcatgtatgatcgtttcattgtcaagctaacctcgactcaagtcttgataggcccttctatcgaagaaacgaagtcccaattggtccaaaaagacccgaagcgcatgttccatgttgtggacaaaatcaatgtcgactttgtcgtggccctttctattctgcccaaagctccaaacttgaccaaggtgaaagtctcaggccatatgcctgttctgcaagctactgtatccgacacgaaatacaaaagcttaatgaagctcatcgacgtcgccatccctaagatcggtggtgacgaagccccgcaggcagtaaagccgcagcaaaagcctaagcggcctcgattacttagctcggcatcgagccgctcgtggaggggacatgggcgcaaacgctcttcaaatctcttcctaacccaagagaccgctattattttagacgatgagtcggatgatgataacgatgagtttgaagacgcggcagacggcaattcgaaccagcaactcagagtccagcaacgaaatttcgaattcaagtttgctgttgacaagcttcaaggctctctgtataggagtgatccagatggggagagccctgacacgcttctggtcgaactagttgccgaagactttgctctagatttatgcatccggccgtttgacctagcagccaacgtctctctgggttcagtgacggtggacgactttgtcgacaaccctcctgctgatttcaagtccatcgtctcttcgggagatgtggaagaccgccagcaacaaagagagcttgtccgcgttaagttcactagggtgaaaccggagtctcccgagttcatgccggtctacgaagggatcgagacaaatgtgaatgtggctgtttcgactatcaacttgattgtgacgagaaagactcttctcacgcttctagatttcatcttgatcactttcgctaataacggtaatgcaagtgctcctccgtcaaagagtatcagcgattccgaagatcgtgatactacaattgagattgtcgagccggagccaagtccggagcagacagaaggtggctcaatacgcgtcaagattgacctaaagagtatccgtttgattctcaataacgatggcatccgtcttgccaccttatcatttaatcatgccgacgtaggggtcttcctgctcggcaggacaatgagagtcgcagccaaacttggcaatttgagcctcgtagacgacgtcaattctggtgcagcagaagactcaagtattcgtcagctggtcacaattcaaggccatgacctcgccgatttccgctatgagacgtttgacgcgaacaacaaaaaggcatacccgggatatgattcatccattttcctgcgagctgggtcaatcaagattcacttcctcgaggaaccgttcagaaagatcattgagtttctcgtcaagtttggaaagatgcaggcaatctacaatgctgcgcgccaagctgctgccaatcaagcacaacagcttcagcagagcactagcaggttcaagttcgatgtaattgtcaacacgcccatcatcgtcttcccacgccctctatcgcctgaacgaccaaagagagacctcatcactgcctatttaggagagatatatgcccagaataagtttgtgcccttggatgactccgaggatgcagagatcgcgatgaagctatctgcaggtatcagaaacatccggctgacgtcgtcatttcactacgctgacgataagtctgaagagcttgagatgattgatcacgtagatcttggcttcaatctgacttatgcggaacaccaagagggttggaaacgtcctgacatggaaatcgaaggtagcatgaccgacgtcaatttacggctgacccaataccaattaaaatatctgttggcaatatctcaatctgttcctgctgcatttgctacagatgtagacgctagtgaagaggaggcagagcgagatgttgatgaaggtactctgcgccgagcaaagacgatgtcctctacgatgagcaatgccgatgacaaagttatcgatctctctcccgaattgggttctcgggaggacacctggaccaagctagacatggtattcaccatacacaaagtcggacttgagctcatcaatgcatacgaagacaagcctgtaggtaacatcgacacggctagtctatcgaaattctctctggatgacagcaaactgaagctgaggatgttggccgacagctctctggaagccgaatttgtgattcattcatttactatccacgacagtcgtacgcgggagggaaacagattcaagaggattatgacatcttcaaacaaaaacgtacagcaattcatggccagtatatcgatatctggaggtaaagagcgaagtatgataggagtcgttgctattgacagtccgagaatcatctttgctctggactatctgttcgcaatccaaaagtttatcactacagggctagagaccgaccagtctccccaagaaattatggatagcccttcggagacacccgatgtgtcagatgcagagtctatgcaagtccagttcacaagtaagaccgatgcgagctcagacgcccctgcgctaccgcctaggagaattacagcggcagagccggcaaagatggacgtgtcatttcgtgttaatattgtcgatgctcaggtcatcttgatagccaacccccagagctccggttctgaggccatcgtcttgggcaccaagcaagtgctcttgtcgcagcaacatgcactgactttccaggtttcgcaggtcggcatgttcttgtgccgcatggataagtttgatgagtccagattgcgtgttctagacgacttctctatccagctttccgtggacaattcgcgatcggatcagaccaatatccacgtcgatattgaaccattgattcttcgattgtctcttcgggatattctcctggtgctacagatcgtaggcaaagcgtctgagctgtctggagaagaagatgccgaggatcgtcaaagtgcatccgacaagaaaacacaagaacttcgaaacgacggtttaagggcacgctccgctagcggcaaggggcaatccaccgtcggccgtaagtcgaaacccacgaaaggtgccggtaccatgaccacagcgtctcggaaaggaaaagagctattgcatcagcctcatgatgtcaaaaaggccccacgacgtcatgaagagctgactgctaacatcgaaggcatccgggtggtactcattggtgacgtccatgaattacccattttagatctgagcatcaagaacacgatggcatcagcagcggactggtccagtgacctaaaagccgagactgcgatagacatgtatatcaatgtttataacttcgcgaaatctgcatgggagccgctattagagccatggcaggtcggcgttggtgttgctcgagaacagaagaccggtcttttttctgttgacctcacatcaaggaagacatttgatgttacaattaccacggcaactatcgcattggcgtcaaagtcgttcgatttcctcactcaagatgaggatattctaagcaaaccacgaggcgtggaagctccgtataagatccgaaactacacaggattcgacgttatcgtccaggctaagacccttagcaatagtgagaacatctctcttaagctggaagatggtgaagaggctccatggagttttgagcactgggagaagatgcgcgagaacatcatgtctgaaagtaccactacgaacagtgtatccgtgcagattgaaggaagtgggtttgacacggtcaaaaatattcgtctcaaccgcgagggcgagttcctctacagtctgcgaccgaagaccgatgatacactgcaccgacttctcgttgaggtgaaccttggcgctgacaatatcaaatatgtcacgctgcggtcgccactcgtcgtcgaaaatgaaacgcagatacccgtagaactgggcgtgtatgacgctcaagaagggcatcttctcaaaatcgaaaagatcgcgcccggagagtcacggcctgcgcctgttgctgctgcttttgttcagtccttgttggttcgacctgactcgggattcggttactcgtggtcctctgatcacttgtggtggaaggatttgttgaaaagaccaacacgaactttggtgtgcaaaggcgaaaatggtgatcctttctacttccaactcaatgccagttatgatcggaaccacttcttgactgggaaatacccatacatgaagctgaagctatcacctcctattgttctagagaatctactaccttacgacttcaaatatcggatctatgacaggaacactaaaagggattggaacaacttccttaggaagggcggtgttagccccgtacatgtcgtggagctctcacacctcctgctcctgagtgtggacatgcaagacacggtcttcaaagccagtgaatttgctatcataaaccctggacaccaagaagacttcagaaaagagaataaactcatctgcaaagatgaggatggcctgcctctatatcttaaactccactacttcaagattccagatggtggcggtgctttccgggttaccgtgtacagcccatatgtaatcctcaaccaaactgggcttgacgctactatacgtggcaaacaattcctccaacaagcaaagagggcggctggccaagcatcgagcgcaggctctgctgatcaacagcgaccaaaggcgcagccattgatgttttcttttggcaacgacgatcagcgcaaccgagcgcttctaaagtttgatgattccgagtggagtaaaccgcaaagtttcgacgccattggaagcactacagatatggcacttcaatccacgacgaaacaatcagagcttcacgttggcattactgttgaatccggtgaaggcaaatataagctcacgaaggtcgtcacgcttgcgccacggttcgtcgtgaagaataagaccggggagccaatcaatatcagagaaccaagatcgtccaacatcatgacactggaatcaggagctctacagcctctctattggctgcaaagatcgcaaacaaaacagatggcgctctgttaccctgggatggataatcaatggtcatctcctatcaatatctccgatcttggtacgatgcatatcaagattgccaaagctgggcagcgacaacgtcttattcgtgttgagattctgatggagaatgccactattttcctacatctcagcatggagaagaaggcgtggccattctcaatgcgtaacgaaagcgatgcggaattcacattctatcaagcgaatccgaacgtggacgaagatggagcagaagaccgttctggttggcggcccataagatatcgcctacctcctcgcagcatcatgccatatgcttgggatttcccagcagccaaattcagagaagttgtgatcagtgctttcggtaaagagcgtcacgtcaagcttgctgaaataggcaatcaagtccccatgaagtttgtcgatgcctctggtgctcccaagatcatcgatatcaatgtcgctgccgatggccctacacagacgttaatactatccaacttcaaaccgagtaagagtctatacaggcaaagaacgcagaccggagccagcagctccagtacaagtggctttgaagtcaagaaacaagacacagcttcgactttccaggctgaattcaagctctctggtgttgggatatctttaatcaatcaccaactcaaggaattggcttatatcacattcagagacatcaatcttcgctacaacgagtcggcgctgtatcagacgatcagtacctctatcaaatggatccagatcgacaaccaactatacggcggtctgttccccatgatcctgtaccctagtgtagtaccgaagcaggcccaagagaccgaactacacccttcattacacgccatggtgacaagagtcaaagatgatagctacggtgtgctatacgtcaaatatgccacattattactacagcaaatgactgtagatctcgatgaagacttcatctatgcagttctagacttctccaaggttccaggggcgtcttggtctgagtctcacgaaggaaaactgtgtgaagaggacgttgatattcccgaaccgaaacaggaacagtcgggacaggacatttatttcgaagtgctcaacatccagcccatgcagctcgacttgtcatttatgcgtacagaacgcgtcaacatcgaggacaagacctcttcccgtaaccctatcatgttcttcgtcaatgttatgacaatggctatcggaaacgtcaacgatgcccccatccgtctgaacgcactccttttagagaacgctcgtgtgtcaattccagtcctcacgcagaacatatcaaatcactacagccaagaagtcctatatcaagtccacaagatcatcggaagtgcggatttccttggtaatccagtggggctattcaacagtattagcagcggcatcacagacgtcttctacgaaccataccaaggtcttattatgtcagacaagccagaagatctcggcataggtatcgccaagggcgccgcgagcttcgtcaaaaagtccgtgtatgggttttcagattccttctccaaggtgacaggcagctttggaaaaggcttggcagcagccactctggacaagcagtttcaagaccgccgtcgcatcacacgtgctcgtaaccgccccaagcatgctctatttggtgtcaccgctggtgccaattccttcttcacttctgttgcctctggcatcggcggtgttgcccgcaagcctctcgagggtgccgaacaggaaggtgccgttgggtttttgaagggggtcggtaagggcttcatcggattagccacgaagcctgctgtaggcgtgtttgacctcgcctcaaatgtatccgaaggtatccggaataccacgacggttttcgatggttcagagctggatcgagtccgcattgctcgattcgtccccgcggatggcatcgtacgaccttacaaccagcgcgaagcactgggacagttttggctcaagcaggtggacaacggaaaatatttcaatgaggagtacattgctcatcttgagcttccacgagaagatatggtggtcatggtcacatacagccgcattctgcttattcggagtaagcggctgactacggagtgggacgtaccgctgaaagacgtgcaaaccatcgccaaagaacggacgggactcagcattatcctacgtggaggtacaaatggtccctttgtgcctgtcggcgaagaaagtgggcggactttcttataccgcatggtagccatcgcagctgaggagtacaatcgccgcttcaggggtttggaataggagcagaccaagtctagacgcagttcccgaaggttgagcaggcgagcgagacaaagtcgcggaggttgaagaagagcaacgaaatccgagtacaagtaacgtgtactgattagacgtgggacgagacttcatgatcacgaaagagcacaccaaagaagcatgcactgcagagtagattgggggttgggggatttggcttgttcttgtatccagatttcgtcgtcttgaaaacgacttattgggtttcatactttattctatcacatttggttcaattcactatggattcgctagtctagtgggtgccgacaacgtattcattttcccaagagctctgtgctagtatctcgattaattttctcacaacagcaagtagccgtaccttatacatatctctgatagcgtctcacccttactctctccccttttaaaaattataagcaagataccacgtgcctatcaatatggcatttgcacatgctaaaccactgctttaggagccggattagcgatgagacgaggtcaattgcgagcgttgaaccaggctcggtcactgttgcgacatgacagcagcaggagatccaccaaacttagagcggcggccgcatacgagcgagctgatggggcacagttctggggcaaggtaaaggatgacatcattgatgctgatgatggtctttttaatcgcctccggaacggtcatgatgataatcattaagcacacagacttaccttgctcttaccgtagccactcatttacaggtacattacgtcgtttggccgcttttgtacatcttggcattgatgggcgggacgacggtattcggcactcgaagtctttcgttacatctttgctgctattcatgtccatgatgtcggggggtatggcaaggtacccagtcgccgctgagcgaactatgatgacaagaggtcaaccgtgctgtgaaaccctgcattgaacattgaattgtcctgtaggtgaagtacgtcgtcgagcggcgtgtcaacggctcggtgcgacggcaagcaagttgtagatcccttgtcgtgacgtcaggtcccactatgacgacatatggctgtggaattaactgggcgggaggcgtaaagtggaaagcgatacgcgccaaaagcaaagcaaaattttgtttggagaatgccactcgtggactttagaccgactttgatcggaagcaagaatcatgggtctgaggcggctctcattatatgactcgacttcgataaattttcggttccggggttgggggaatgtggtgttgaaatttagttagcccaggccatgctatgttcggtatatggatgcggtctaggagagctacatatccctcacagaagaattagaacaaatagaaacaagtgaactgaacgaatgagtaatcggcgcatgacgattaataaaatcatatagtacgagtgaataatctcacgagatcaatatctccctaatcatatcagatcacgacgtcttatgtcagcaatagtcgcgatggtgtg

SEQ ID NO: 21531 - DNA, 1257 bp, Muscodor strobelii
  misc_feature: SGI cDNA ID NO. 567290
  misc_feature: Reduced expression when VOC is produced
  misc_feature: Encodes the peptide sequence at SEQ ID NO 21532
atgagagctattgctacgtcaaggcatgccatacactcatctcgacaccttcccatcgcagccgcaaccctacgtcccggtgcctcgtctaccactgcgaagtttgcggcaccatcagtgtctctgataacacatagaaaccaagtggccgccaagtccacgctccaaaagggcataaacccggaggaggacaaaaaggccgccgagcacatcatccagccgaatcccgacgtgtcgaccgagtccagcgtccgccacttgtacgagcccagcaagaaggatgccgcaaaacccgtgggcgagggaatcaaggatgacttgaaaacagtccaggagacctttgcgctctccaacgtgcccaaggaatcctactggctcggcctagctggcactctaccttacctgggcacctctctttccaccgtctacctgtcctgggttctcaacacccaatggccgtcctcctctgcctttctcaacaacatcatgatcaaccaggacgcggcgaggcagctcctttccaccctcgagccgctgcagctaggctatggcgccatcatcatcagtttcctgggtgctattcactggggactcgagtacgccgagaagactcccgacctcgcacgcacaaggttccgctatggaatgggtgtcatggcctccgtggtcgcttggcccaccctcctcatgcccgttgagttcgctctgacgggtcaattcgctgccttcgtcgccttgtactttgccgatgcgcgcgcgacggtccgcggctgggctccgtcctggtacagcgtgtaccgtttcgcgctaacagccgtcgtgggcgctgctattgtcctgagcttaatcggccgcgccaaggtcggcgacgcacagccccggctcaccggcctaagcgataagttccaccaacagtaccgaggcgagcaagattacaccaagaagtgggaagacctcgagaacaaggacagagaaaagatgaagaaggagaaagaggaggccgagaaaaagaagaaggaagaagagaagaaggcaaaagaaaacgagaagaagtccaagaagtcccacgacaagggagacaagggagacaaggctggagaggatgagaacaagtccaaagatgaagatcagaaggaagacgacaagtcaaaagactctggcgagaaggataaggctgatgatcagaaggagggtgataagaagggtgataagaagggcgatgaaaagaaggatgacaagacgggcgacgacaagtga

SEQ ID NO: 21532 - protein, 418 aa, Muscodor strobelii
  misc_feature: SGI Peptide ID NO. 567290
  misc_feature (4)..(400): NCBI GI: 85095476 Blast Desc: NCU05838 [Neurospora crassa OR74A] gi|28921557|gb|EAA30862.1| [Neurospora crassa OR74A]
  misc_feature (57)..(416): NCBI GI: 256734951 Blast Desc: NECHADRAFT_99046 [Nectria haematococca mpVI 77-13-4]
  misc_feature (13)..(417): NCBI GI: 46138029 Blast Desc: FG10529.1 [Gibberella zeae PH-1]
  misc_feature (58)..(290): NCBI GI: 145608554 Blast Desc: MGG_12800 [Magnaporthe grisea 70-15] gi|145016022|gb|EDK00512.1| MGG_12800 [Magnaporthe grisea 70-15]
  misc_feature (46)..(411): NCBI GI: 171679048 Blast Desc: protein product [Podospora anserina] gi|170937595|emb|CAP62254.1| protein product [Podospora anserina]
  misc_feature (59)..(339): NCBI GI: 154303307 Blast Desc: BC1G_09402 [Botryotinia fuckeliana B05.10] gi|115292180|emb|CAL46260.1| mitochondrial inner membrane protein 1 [Botryotinia fuckeliana] gi|150854965|gb|EDN30157.1| BC1G_09402
  misc_feature (1)..(337): NCBI GI: 156053766 Blast Desc: SS1G_05730 [Sclerotinia sclerotiorum 1980] gi|154703511|gb|EDO03250.1| SS1G_05730 [Sclerotinia sclerotiorum 1980]
  misc_feature (102)..(338): NCBI GI: 261191741 Blast Desc: conserved [Ajellomyces dermatitidis SLH14081] gi|239589594|gb|EEQ72237.1| conserved [Ajellomyces dermatitidis SLH14081] gi|239608663|gb|EEQ85650.1| conserved [Ajellomyces
  misc_feature (46)..(361): NCBI GI: 189193311 Blast Desc: conserved [Pyrenophora tritici-repentis Pt-1C-BFP] gi|187978558|gb|EDU45184.1| conserved [Pyrenophora tritici-repentis Pt-1C-BFP]
  misc_feature (102)..(343): NCBI GI: 240276301 Blast Desc: conserved [Ajellomyces capsulatus H143]
  misc_feature: Useful for introducing or modulating the production of volatile compounds
MRAIATSRHAIHSSRHLPIAAATLRPGASSTTAKFAAPSVSLITHRNQVAAKSTLQKGINPEEDKKAAEHIIQPNPDVSTESSVRHLYEPSKKDAAKPVGEGIKDDLKTVQETFALSNVPKESYWLGLAGTLPYLGTSLSTVYLSWVLNTQWPSSSAFLNNIMINQDAARQLLSTLEPLQLGYGAIIISFLGAIHWGLEYAEKTPDLARTRFRYGMGVMASVVAWPTLLMPVEFALTGQFAAFVALYFADARATVRGWAPSWYSVYRFALTAVVGAAIVLSLIGRAKVGDAQPRLTGLSDKFHQQYRGEQDYTKKWEDLENKDREKMKKEKEEAEKKKKEEEKKAKENEKKSKKSHDKGDKGDKAGEDENKSKDEDQKEDDKSKDSGEKDKADDQKEGDKKGDKKGDEKKDDKTGDDK

SEQ ID NO: 21533 - DNA, 1317 bp, Muscodor strobelii
  misc_feature: SGI cDNA ID NO. 567291
  misc_feature: Encodes the peptide sequence at SEQ ID NO 21534
atggagccatacagactgagcgcatgccaagccaaagccgcaatacactccggttcactgacggtagagcaatatgcccactcgctcctctctcgaatagctgaccgtgataccgctgtcgaggcatgggttcacctcgactcagaatatgtcctcgaacaagctagacatctagaccagataccattgcatgagcgagggccactgcatggtgttgctattgctgtcaaggatatcatatacaccaaggatatgccaacccaacatggctctacgatatacgaaaacgatgcgccaaagcttgatgcggcgtctatcatagtattgcgaaaagctggcgcactaatacttggaaagactgtgacaacagaattcgcatcaacaacaggtggccccaaaacacataatccgcataatcccgagagaacaccaggcggttcctcatctggatcaggggcagccgtaggagacttccaagcaccaatagccttagggtcgcaaacaggtggcagcgtcatcagacccgcatctttcaacggcacatatgctctcaagccaacatggaattctgtcagtcgcgaaggacagaagttttactcactaatccttgacacattcgggtgctttgcacggacagtcgaagatctagagcttattgccgatgtttttgagctgcaggacgatcagtcacccgacactgagttcagtgtaaaaggagcaaagttcgccgtagtaaagagccccgtttggtcgcaagctggagacggtacaaagaccgcactagaaaacggtgcccagctcttgagaaaccatggagcgatcgtcgaagacgttgaactacctgctgagtttgacaaaatgcccgaatggcatcgtatcatactcgatagtgagggacgagtgacattcttacctgagtatagacttgcgaaaaacaagctctcgaaattcctccaaggtcacgttgagaacgtgaacaagttgtcccgagctgcgcagctggaagcatttgatggcattgcgacactacgacccaagatagatcagatagcgaaaagctatgccgccattctcacgccaagtgtcgtcgacgaggcaccgttgggtctcgggagtactggaagtgcgacttttaactcgatgtggactgctctgcatacgcccgttgttaatattccaggattcgaaggagcaaacggaatgccaatcggactgtcattggtagccccgaggtaccatgatagatacttacttacggtctctaaggcggtcggacagatttttgaagccaaaggtggctggaaacgcaatttatga

SEQ ID NO: 21534 - protein, 438 aa, Muscodor strobelii
  misc_feature: SGI Peptide ID NO. 567291
  misc_feature (24)..(418): Pfam Id: PF01425 Pfam Desc: Amidase
  misc_feature (24)..(282): Pfam Id: PF01425 Pfam Desc: Amidase
  misc_feature (4)..(438): NCBI GI: 189189018 Blast Desc: glutamyl-tRNA(Gln) amidotransferase subunit A [Pyrenophora tritici-repentis Pt-1C-BFP] gi|187972454|gb|EDU39953.1| glutamyl-tRNA(Gln) amidotransferase A
  misc_feature (1)..(438): NCBI GI: 259488162 Blast Desc: TPA: amidase family protein (AFU_orthologue; AFUA_6G14410) [Aspergillus nidulans FGSC A4]
  misc_feature (2)..(438): NCBI GI: 169599577 Blast Desc: SNOG_02612 [Phaeosphaeria nodorum SN15] gi|111068223|gb|EAT89343.1| SNOG_02612 [Phaeosphaeria nodorum SN15]
  misc_feature (1)..(438): NCBI GI: 115491621 Blast Desc: conserved [Aspergillus terreus NIH2624] gi|114197298|gb|EAU38998.1| conserved [Aspergillus terreus NIH2624]
  misc_feature (1)..(438): NCBI GI: 39976499 Blast Desc: MGG_05827 [Magnaporthe grisea 70-15] gi|145011931|gb|EDJ96587.1| MGG_05827 [Magnaporthe grisea 70-15]
  misc_feature (1)..(438): NCBI GI: 46116788 Blast Desc: FG04236.1 [Gibberella zeae PH-1]
  misc_feature (2)..(434): NCBI GI: 46116192 Blast Desc: FG03938.1 [Gibberella zeae PH-1]
  misc_feature (1)..(434): NCBI GI: 256723694 Blast Desc: NECHADRAFT_52025 [Nectria haematococca mpVI 77-13-4]
  misc_feature (2)..(438): NCBI GI: 256725579 Blast Desc: NECHADRAFT_81431 [Nectria haematococca mpVI 77-13-4]
  misc_feature (1)..(438): NCBI GI: 67904678 Blast Desc: AN9326.2 [Aspergillus nidulans FGSC A4] gi|40747237|gb|EAA66393.1| AN9326.2 [Aspergillus nidulans FGSC A4]
  misc_feature (5)..(295): SWISSPROT Homolog: EC 3.5.1.4 Amidase
MEPYRLSACQAKAAIHSGSLTVEQYAHSLLSRIADRDTAVEAWVHLDSEYVLEQARHLDQIPLHERGPLHGVAIAVKDIIYTKDMPTQHGSTIYENDAPKLDAASIIVLRKAGALILGKTVTTEFASTTGGPKTHNPHNPERTPGGSSSGSGAAVGDFQAPIALGSQTGGSVIRPASFNGTYALKPTWNSVSREGQKFYSLILDTFGCFARTVEDLELIADVFELQDDQSPDTEFSVKGAKFAVVKSPVWSQAGDGTKTALENGAQLLRNHGAIVEDVELPAEFDKMPEWHRIILDSEGRVTFLPEYRLAKNKLSKFLQGHVENVNKLSRAAQLEAFDGIATLRPKIDQIAKSYAAILTPSVVDEAPLGLGSTGSATFNSMWTALHTPVVNIPGFEGANGMPIGLSLVAPRYHDRYLLTVSKAVGQIFEAKGGWKRNL

SEQ ID NO: 21535 - DNA, 1110 bp, Muscodor strobelii
  misc_feature: SGI EST ID NO. CUFF.50615.0
  misc_feature: Variant of the nucleotide sequence at SEQ ID NO 21533
tgacaacagaattcgcatcaacaacaggtggccccaaaacacataatccgcataatcccgagagaacaccaggcggttcctcatctggatcaggggcagccgtaggagacttccaagcaccaatagccttagggtcgcaaacaggtggcagcgtcatcagacccgcatctttcaacggcacatatgctctcaagccaacatggaattctgtcagtcgcgaaggacagaagttttactcactaatccttgacacattcgggtgctttgcacggacagtcgaagatctagagcttattgccgatgtttttgagctgcaggacgatcagtcacccgacactgagttcagtgtaaaaggagcaaagttcgccgtagtaaagagccccgtttggtcgcaagctggagacggtacaaagaccgcactagaaaacggtgcccagctcttgagaaaccatggagcgatcgtcgaagacgttgaactacctgctgagtttgacaaaatgcccgaatggcatcgtatcatactcgatagtgagggacgagtgacattcttacctgagtatagacttgcgaaaaacaagctctcgaaattcctccaaggtcacgttgagaacgtgaacaagttgtcccgagctgcgcagctggaagcatttgatggcattgcgacactacgacccaagatagatcagatagcgaaaagctatgccgccattctcacgccaagtgtcgtcgacgaggcaccgttgggtctcgggagtactggaagtgcgacttttaactcgatgtggactgctctgcatacgcccgttgttaatattccaggattcgaaggagcaaacggaatgccaatcggactgtcattggtagccccgaggtaccatgatagatacttacttacggtctctaaggcggtcggacagatttttgaagccaaaggtggctggaaacgcaatttatgaggttttccctatagttttgacttagataatgtgtctttaaagtaacgattttcttttatcctctgcatgtaggtttggcaacgaatgtgagagcagatcaagaattgtcatcacgttagatctctagccagaataagaatcgcacacatctgcg

SEQ ID NO: 21536 - DNA, 2199 bp, Muscodor strobelii
  misc_feature: SGI cDNA ID NO. 567292
  misc_feature: Reduced expression when VOC is produced
  misc_feature: Encodes the peptide sequence at SEQ ID NO 21537
atggcggataacgtctcatctgaaaacgttggccctgccattattgcaggcaacggcgatcagccttcatcaggcgttcatgggcgcgacgaattgacggaaaacaatgagccttcgtctaagagacagaaaaccagccacgatggggtcgagtcgcagtctgaaccgattgctgtcgaaaatacccggagagagggcgtggcacccatcaaagcagagtatctcatctcacatgaagtccaggacaacgctgacgatgatgccgctgaagccggcactggacccaacgaagagtctgccaagcatttagacactcggggtggccacaagaaacagaagcagaaagaccagcgaaaaggcggccagaaccattcgcgtacttttggtttcttcgaggactcgctgcgcctttgcaacagccgagtgctgagcaatgaattttctcctaagacgtgcaaatttgagggccgatgtaacatgtgtcatgatctccgcaagtatctcgagaagggtcgtcgtccagacgtggagactcttgacggaaagtgccctatttttgagaagtacggccgttgtccgtcgggttggaaatgtcgttttgtcaagagtcattcgaaggagatcgagcacaaggacggccgcaaagaattggtgcttctccaggagggtgactctaaggaagccgatgaggaccaggatacgcggcctggtgttgtcaacattattcctctcgacgcgaagtgggacctttcacgcaagaagatacgtctcgagaagtcggaagagtacgtcaaatggctcgaccatgacaaccagatcacacacaaaatctacaaccgaaaggcgaccgcagatggagaacccgaagaccctggtgtactacaagagcttcgcgcacaattcaaggagcctccttttaagtcatcagagaagcggaagatctactttggacgagagactccagtcctagcacctctcacaactcagggcaacatgccattccgaaggctgtgtggcgagcttggagctcagatcacatattctgaaatggcaatgggaattcctctggtacagggccaaaagggagagtgggctcttatgaagacccacgagagcgaactagcatctcctcgttacacacccggcgctagtgaagtggttcaaggctatgataactcaaaggatttgaaatggggagcccagatctccggcaatcaggcatgggtcgttatgaaggccacggaggccctgactcggttcatccccaacatccgagtcgtcgatctcaattgcggatgccccattgacttagttttccagacaggagctggatctggtctcctcgatacgcccaacaagttggagaagatggttcgcggcatgaatgccgtatccggagaagtccccatcacgacgaagctacgtatgggtgtcagtgacaaacgacctgtggcgcagcggctcatcgagcgactttgcttcggtaatcctgattcccgcgaccgactaggtgcacctggcgctgcagctattacgttgcatggccgaagtagacagcagcgatacacgaggaaggccaactgggaatatattgccgagtgcgccgcgcttatcaaatcgtacaaagagaagagggatgagctcaccgatacagctatggaggcggatcctagcacaaaggcgaatacgctcaacgacaaggtttacttcataggcaatggcgattgctactcgcacgtcgactactttgaccatattgataatgccaaggtagactcggttatgattgcgcgtggagctatgattaaaccgtggatttttgaggagatcgagaaggggcagtaccttgacaagacaccatcgcagcgccttgagtatgttgagaagtttgtacgctacggactggaggcttggggtagtgatgaggttgggcttggctatactcgacgattcttgcttgagtggctgagtttcacgcaccggtacattcctatcggtcttcttgagcacctccctcccagcctccaggatcgcccgccgaggtacagatgccgtgacgatatggagactctacttgccagtggcaactataaagactggatcagaatcagtgagatgttcttaggtcctgctcatccaaacttcaaatttgagccgaagcacaagtccaacagttacgagatcgatgccgagggctag

SEQ ID NO: 21537 - protein, 732 aa, Muscodor strobelii
  misc_feature: SGI Peptide ID NO. 567292
  misc_feature (322)..(676): Pfam Id: PF01207 Pfam Desc: Dihydrouridine synthase (Dus)
  misc_feature (427)..(533): Pfam Id: PF01207 Pfam Desc: Dihydrouridine synthase (Dus)
  misc_feature (322)..(373): Pfam Id: PF01207 Pfam Desc: Dihydrouridine synthase (Dus)
  misc_feature (570)..(633): Pfam Id: PF01207 Pfam Desc: Dihydrouridine synthase (Dus)
  misc_feature (1)..(732): NCBI GI: 46107564 Blast Desc: FG00665.1 [Gibberella zeae PH-1]
  misc_feature (33)..(732): NCBI GI: 154321557 Blast Desc: BC1G_01653 [Botryotinia fuckeliana B05.10] gi|187471047|sp|A6RMI1.1|DUS3_BOTFB RecName: Full=tRNA-dihydrouridine synthase 3 gi|150852191|gb|EDN27383.1|
  misc_feature (33)..(732): NCBI GI: 85116240 Blast Desc: NCU02619 [Neurospora crassa OR74A] gi|74629110|sp|Q7SG01.1|DUS3_NEUCR RecName: Full=tRNA-dihydrouridine synthase 3 gi|28926822|gb|EAA35786.1|
  misc_feature (7)..(732): NCBI GI: 256734743 Blast Desc: [Nectria haematococca mpVI 77-13-4]
  misc_feature (35)..(732): NCBI GI: 156054034 Blast Desc: SS1G_05865 [Sclerotinia sclerotiorum 1980] gi|187471050|sp|A7EKL8.1|DUS3_SCLS1 RecName: Full=tRNA-dihydrouridine synthase 3 gi|154703645|gb|EDO03384.1|
  misc_feature (33)..(732): NCBI GI: 39950340 Blast Desc: MGG_01205 [Magnaporthe grisea 70-15] gi|187471055|sp|A4RLF4.1|DUS3_MAGGR RecName: Full=tRNA-dihydrouridine synthase 3 gi|145020996|gb|EDK05125.1|
  misc_feature (63)..(732): NCBI GI: 240274641 Blast Desc: tRNA dihydrouridine synthase 3-like protein [Ajellomyces capsulatus H143]
  misc_feature (35)..(703): NCBI GI: 171695442 Blast Desc: protein product [Podospora anserina] gi|170947963|emb|CAP60127.1| protein product [Podospora anserina]
  misc_feature (63)..(730): NCBI GI: 258563178 Blast Desc: potential tRNA dihydrouridine synthase [Uncinocarpus reesii 1704] gi|237907841|gb|EEP82242.1| potential tRNA dihydrouridine synthase [Uncinocarpus reesii 1704]
  misc_feature (63)..(732): NCBI GI: 225561539 Blast Desc: tRNA-dihydrouridine synthase 3-like protein [Ajellomyces capsulatus G186AR]
  misc_feature: Useful for introducing or modulating the production of volatile compounds
MADNVSSENVGPAIIAGNGDQPSSGVHGRDELTENNEPSSKRQKTSHDGVESQSEPIAVENTRREGVAPIKAEYLISHEVQDNADDDAAEAGTGPNEESAKHLDTRGGHKKQKQKDQRKGGQNHSRTFGFFEDSLRLCNSRVLSNEFSPKTCKFEGRCNMCHDLRKYLEKGRRPDVETLDGKCPIFEKYGRCPSGWKCRFVKSHSKEIEHKDGRKELVLLQEGDSKEADEDQDTRPGVVNIIPLDAKWDLSRKKIRLEKSEEYVKWLDHDNQITHKIYNRKATADGEPEDPGVLQELRAQFKEPPFKSSEKRKIYFGRETPVLAPLTTQGNMPFRRLCGELGAQITYSEMAMGIPLVQGQKGEWALMKTHESELASPRYTPGASEVVQGYDNSKDLKWGAQISGNQAWVVMKATEALTRFIPNIRVVDLNCGCPIDLVFQTGAGSGLLDTPNKLEKMVRGMNAVSGEVPITTKLRMGVSDKRPVAQRLIERLCFGNPDSRDRLGAPGAAAITLHGRSRQQRYTRKANWEYIAECAALIKSYKEKRDELTDTAMEADPSTKANTLNDKVYFIGNGDCYSHVDYFDHIDNAKVDSVMIARGAMIKPWIFEEIEKGQYLDKTPSQRLEYVEKFVRYGLEAWGSDEVGLGYTRRFLLEWLSFTHRYIPIGLLEHLPPSLQDRPPRYRCRDDMETLLASGNYKDWIRISEMFLGPAHPNFKFEPKHKSNSYEIDAEG

SEQ ID NO: 21538 - DNA, 4692 bp, Muscodor strobelii
  misc_feature: SGI EST ID NO. CUFF.50743.5
  misc_feature: Variant of the nucleotide sequence at SEQ ID NO 21536
aaaagaacgatatgacgatgttgcgcccccaatacactctaatcagatttcaaattgccatgttgtgtcgccagcaagcgaaacgatttaggacagtgtgcatggtcagcgctaccaggtagcaaaaagtgacttgctacactgcctaatcgggtaagtagctctagatgccgtggggttcattggagcgggacgaagtacctttctcactgaagaatacagattaatggacccgattcatgcaactgcttgtggtcttcaaaaatctttcattgaagatcgaaaacacccaacttcccacttagaattcgtgcacgaattcgccacgtgcgctgattctccaaaaaatggcggataacgtctcatctgaaaacgttggccctgccattattgcaggcaacggcgatcagccttcatcaggcgttcatgggcgcgacgaattgacggaaaacaatgagccttcgtctaagagacagaaaaccagccacgatggggtcgagtcgcagtctgaaccgattgctgtcgaaaatacccggagagagggcgtggcacccatcaaagcagagtatctcatctcacatgaagtccaggacaacgctgacgatgatgccgctgaagccggcactggacccaacgaagagtctgccaagcatttagacactcggggtggccacaagaaacagaagcagaaagaccagcgaaaaggcggccagaaccattcgcgtacttttggtttcttcgaggactcgctgcgcctttgcaacagccgagtgctgagcaatgaattttctcctaagacgtgcaaatttgagggccgatgtaacatgtgtcatgatctccgcaagtatctcgagaagggtcgtcgtccagacgtggagactcttgacggaaagtgccctatttttgagaagtacggccgttgtccgtcgggttggaaatgtcgttttgtcaagagtcattcgaaggagatcgagcacaaggacggccgcaaagaattggtgcttctccaggagggtgactctaaggaagccgatgaggaccaggatacgcggcctggtgttgtcaacattattcctctcgacgcgaagtgggacctttcacgcaagaagatacgtctcgagaagtcggaagagtacgtcaaatggctcgaccatgacaaccagatcacacacaaaatctacaaccgaaaggcgaccgcagatggagaacccgaagaccctggtgtactacaagagcttcgcgcacaattcaaggagcctccttttaagtcatcagagaagcggaagatctactttggacgagagactccagtcctagcacctctcacaactcagggcaacatgccattccgaaggctgtgtggcgagcttggagctcagatcacatattctgaaatggcaatgggaattcctctggtacagggccaaaagggagagtgggctcttatgaagacccacgagagcgaactagcatctcctcgttacacacccggcgctagtgaagtggttcaaggctatgataactcaaaggatttgaaatggggagcccagatctccggcaatcaggcatgggtcgttatgaaggccacggaggccctgactcggttcatccccaacatccgagtcgtcgatctcaattgcggatgccccattgacttagttttccagacaggagctggatctggtctcctcgatacgcccaacaagttggagaagatggttcgcggcatgaatgccgtatccggagaagtccccatcacgacgaagctacgtatgggtgtcagtgacaaacgacctgtggcgcagcggctcatcgagcgactttgcttcggtaatcctgattcccgcgaccgactaggtgcacctggcgctgcagctattacgttgcatggccgaagtagacagcagcgatacacgaggaaggccaactgggaatatattgccgagtgcgccgcgcttatcaaatcgtacaaagagaagagggatgagctcaccgatacagctatggaggcggatcctagcacaaaggcgaatacgctcaacgacaaggtttacttcataggcaatggcgattgctactcgcacgtcgactactttgaccatattgataatgccaaggtagactcggttatgattgcgcgtggagctatgattaaaccgtggatttttgaggagatcgagaaggggcagtaccttgacaagacaccatcgcagcgccttgagtatgttgagaagtttgtacgctacggactggaggcttggggtagtgatgaggttgggcttggctatactcgacgattcttgcttgagtggctgagtttcacgcaccggtacattcctatcggtcttcttgagcacctccctcccagcctccaggatcgcccgccgaggtacagatgccgtgacgatatggagactctacttgccagtggcaactataaagactggatcagaatcagtgagatgttcttaggtcctgctcatccaaacttcaaatttgagccgaagcacaagtccaacagttacgagatcgatgccgagggctagacccagcgtgaggaaataaagatacgggccatttgtgaaagacttagattcgctcgctgtatatagctgcaaggatgcgctgatgttcctgagggtctgtgactgcattgcatggatatgagcatatgagtgagatgtggcatcaattcttctaccagggactcgacaacagtcaccggagggcatgggctatgagtgctgcctattgcagatagcacctgccgtgggatagatggccaattgctatgttatcgaaatatccacgttctcctctctcactccagattgcctacaaataagtaccatgccgtcagtctgaaaattggaacggataaggagcttcagccaagtgtatccgggctcatccgaaagggcctgttctggcgacgtcaccaatacccaaaaagctaaggcagggtggggtcagagacaggtacatggcactgtgatgaacgtttcgagacgatctcgatgatcgcaggaccaaaagagcgaaatgaatttcagtatggtatttctaaaatgcatcgtatgggtaaaagcctattaattgacaatactattcctgcccggtcaatttgagaggaagcatgggcggcatagaagagggaggaatgtttggtccgaggtagaggatgacgtagtccaatgagctctggcgggacagcaagccaaggtcaaggtcctgggcagcccccactagcgccgctgcccgctctgtcgcgcagcttcagcttggtccatatcgtcactcaggacaccttcccacaaccccggtctctgtcatattctgtcatccaggcaccgctctttataaccacccaggctgctggcaccaagacttgtcctctttgtcccccttcgccgacatcaacctcccatccaatcccgcgtcacatcgtctttgctttgaacgacatctggactgtcacatccgcagctgcaacctgagacacacacgcccgagccgcacatctttgttgtcgacacgacctacccatagccgcatccccgtcaccccgtcgccatgacgctctactacaccctcgtcttcctgctcctcgtagcagagatgacgctgttcatgctgctcgtcattccgatgcctttcactgttaagcgcaagatgttcaccttcctctccgagaaccccatcatcgccaagattcaatatggcttgaaaatcacgttcattttcatcttgattctgttcctcgatagcgtcaaccgcgtctatcgtgtgcaggtggaattggccaacgctacagacaccagcaagggcgccgctgctgtcatgggccacgaacggctcgaagttcaagctcgcaagttctacagtcagcgcaacatgtacctttgcggtttcaccctgttcctctccctcatcctgaaccgaacctacatcatgattctcgatgtcttgcgtctcgaggagaagctcaagcagtacgagggtaccgacaagaagaccaaggagagtgagaagctcgccgttgctggcaagcctggtgagatcgcccgcctcaacaaggagattgagcgccgcgaccgcgacatcgaggcgctgaagaagcaggctgaggccttgtcacgagagtacaatgacctctgcgagaaatatggcgagacccagccccctgctggcactagaaagcagaagtaggaagatgctgatgaggccgaattgatgcgggctgggcatgcgttcaagaggttcacgccgaaaaagaaagaagtatgagtatagtgccgattcgttgccatgaaaaagcaacgagcttgttgataagatggcttattgagttttcgtcaatttcatttcggaagaagaaaaaggacggtttgcatttttctcggcaagggcacgggtatagcatgcatggcaggtgtatcatgcgagcaggcgtttcttacggtgtcgattagccattccgattaattgatcattgtcatgaagacgtgtttttattattgcttgttgggagtgatatgctagttgttgatgaatagcgaataaatcagtaatgggtttacaacctaaggcaatatcgggcgttttatcatagcatatgtccttacctaagaacacgtagtttggcgagtgcgcttctgggaatccttgcacctggccatatgttaaagccaa

SEQ ID NO: 21539 - DNA, 636 bp, Muscodor strobelii
  misc_feature: SGI cDNA ID NO. 567293
  misc_feature: Reduced expression when VOC is produced
  misc_feature: Encodes the peptide sequence at SEQ ID NO 21540
atgacgctctactacaccctcgtcttcctgctcctcgtagcagagatgacgctgttcatgctgctcgtcattccgatgcctttcactgttaagcgcaagatgttcaccttcctctccgagaaccccatcatcgccaagattcaatatggcttgaaaatcacgttcattttcatcttgattctgttcctcgatagcgtcaaccgcgtctatcgtgtgcaggtggaattggccaacgctacagacaccagcaagggcgccgctgctgtcatgggccacgaacggctcgaagttcaagctcgcaagttctacagtcagcgcaacatgtacctttgcggtttcaccctgttcctctccctcatcctgaaccgaacctacatcatgattctcgatgtcttgcgtctcgaggagaagctcaagcagtacgagggtaccgacaagaagaccaaggagagtgagaagctcgccgttgctggcaagcctggtgagatcgcccgcctcaacaaggagattgagcgccgcgaccgcgacatcgaggcgctgaagaagcaggctgaggccttgtcacgagagtacaatgacctctgcgagaaatatggcgagacccagccccctgctggcactagaaagcagaagtag

SEQ ID NO: 21540 - protein, 211 aa, Muscodor strobelii
  misc_feature: SGI Peptide ID NO. 567293
  misc_feature (1)..(192): Pfam Id: PF05529 Pfam Desc: B-cell receptor-associated protein 31-like
  misc_feature (1)..(137): Pfam Id: PF05529 Pfam Desc: B-cell receptor-associated protein 31-like
  misc_feature (162)..(192): Pfam Id: PF05529 Pfam Desc: B-cell receptor-associated protein 31-like
  misc_feature (1)..(211): NCBI GI: 85116155 Blast Desc: NCU02599 [Neurospora crassa OR74A] gi|28926802|gb|EAA35766.1| conserved [Neurospora crassa OR74A]
  misc_feature (1)..(211): NCBI GI: 116182136 Blast Desc: CHGG_01696 [Chaetomium globosum CBS 148.51] gi|88185993|gb|EAQ93461.1| CHGG_01696 [Chaetomium globosum CBS 148.51]
  misc_feature (1)..(210): NCBI GI: 171695044 Blast Desc: protein product [Podospora anserina] gi|170947764|emb|CAP59927.1| protein product [Podospora anserina]
  misc_feature (1)..(199): NCBI GI: 261355219 Blast Desc: endoplasmic reticulum transmembrane protein [Verticillium albo-atrum VaMs.102]
  misc_feature (1)..(209): NCBI GI: 46108032 Blast Desc: FG00898.1 [Gibberella zeae PH-1]
  misc_feature (16)..(209): NCBI GI: 256734714 Blast Desc: NECHADRAFT_102388 [Nectria haematococca mpVI 77-13-4]
  misc_feature (13)..(198): NCBI GI: 145613998 Blast Desc: MGG_01208 [Magnaporthe grisea 70-15] gi|145020993|gb|EDK05122.1| MGG_01208 [Magnaporthe grisea 70-15]
  misc_feature (1)..(211): NCBI GI: 240108569 Blast Desc: B-cell receptor-associated protein 31-like containing protein [Coccidioides posadasii C735 delta SOWgp]
  misc_feature (1)..(197): NCBI GI: 226295294 Blast Desc: conserved [Paracoccidioides brasiliensis Pb18]
  misc_feature (1)..(211): NCBI GI: 226278828 Blast Desc: conserved [Paracoccidioides brasiliensis Pb01]
  misc_feature: Useful for introducing or modulating the production of volatile compounds
MTLYYTLVFLLLVAEMTLFMLLVIPMPFTVKRKMFTFLSENPIIAKIQYGLKITFIFILILFLDSVNRVYRVQVELANATDTSKGAAAVMGHERLEVQARKFYSQRNMYLCGFTLFLSLILNRTYIMILDVLRLEEKLKQYEGTDKKTKESEKLAVAGKPGEIARLNKEIERRDRDIEALKKQAEALSREYNDLCEKYGETQPPAGTRKQK

SEQ ID NO: 21541 - DNA, 4692 bp, Muscodor strobelii; identical to SEQ ID NO: 21538
  misc_feature: SGI EST ID NO. CUFF.50743.5
  misc_feature: Variant of the nucleotide sequence at SEQ ID NO 21539

SEQ ID NO: 21542 - DNA, 642 bp, Muscodor strobelii
  misc_feature: SGI cDNA ID NO. 567294
  misc_feature: Encodes the peptide sequence at SEQ ID NO 21543
atgaatctgctgacaatctacgaccaggtcttcctgctcctcgtagcagagatgacgctgttcatgctgctcgtcattccgatgcctttcactgttaagcgcaagatgttcaccttcctctccgagaaccccatcatcgccaagattcaatatggcttgaaaatcacgttcattttcatcttgattctgttcctcgatagcgtcaaccgcgtctatcgtgtgcaggtggaattggccaacgctacagacaccagcaagggcgccgctgctgtcatgggccacgaacggctcgaagttcaagctcgcaagttctacagtcagcgcaacatgtacctttgcggtttcaccctgttcctctccctcatcctgaaccgaacctacatcatgattctcgatgtcttgcgtctcgaggagaagctcaagcagtacgagggtaccgacaagaagaccaaggagagtgagaagctcgccgttgctggcaagcctggtgagatcgcccgcctcaacaaggagattgagcgccgcgaccgcgacatcgaggcgctgaagaagcaggctgaggccttgtcacgagagtacaatgacctctgcgagaaatatggcgagacccagccccctgctggcactagaaagcagaagtag

SEQ ID NO: 21543 - protein, 213 aa, Muscodor strobelii
  misc_feature: SGI Peptide ID NO. 567294
  misc_feature (1)..(194): Pfam Id: PF05529 Pfam Desc: B-cell receptor-associated protein 31-like
  misc_feature (10)..(139): Pfam Id: PF05529 Pfam Desc: B-cell receptor-associated protein 31-like
  misc_feature (164)..(194): Pfam Id: PF05529 Pfam Desc: B-cell receptor-associated protein 31-like
  misc_feature (7)..(213): NCBI GI: 85116155 Blast Desc: NCU02599 [Neurospora crassa OR74A] gi|28926802|gb|EAA35766.1| conserved [Neurospora crassa OR74A]
  misc_feature (7)..(213): NCBI GI: 116182136 Blast Desc: CHGG_01696 [Chaetomium globosum CBS 148.51] gi|88185993|gb|EAQ93461.1| CHGG_01696 [Chaetomium globosum CBS 148.51]
  misc_feature (7)..(212): NCBI GI: 171695044 Blast Desc: protein product [Podospora anserina] gi|170947764|emb|CAP59927.1| protein product [Podospora anserina]
  misc_feature (7)..(201): NCBI GI: 261355219 Blast Desc: endoplasmic reticulum transmembrane protein [Verticillium albo-atrum VaMs.102]
  misc_feature (7)..(211): NCBI GI: 46108032 Blast Desc: FG00898.1 [Gibberella zeae PH-1]
  misc_feature (18)..(211): NCBI GI: 256734714 Blast Desc: NECHADRAFT_102388 [Nectria haematococca mpVI 77-13-4]
  misc_feature (15)..(200): NCBI GI: 145613998 Blast Desc: MGG_01208 [Magnaporthe grisea 70-15] gi|145020993|gb|EDK05122.1| MGG_01208 [Magnaporthe grisea 70-15]
  misc_feature (7)..(199): NCBI GI: 226295294 Blast Desc: conserved [Paracoccidioides brasiliensis Pb18]
  misc_feature (7)..(213): NCBI GI: 240108569 Blast Desc: B-cell receptor-associated protein 31-like containing protein [Coccidioides posadasii C735 delta SOWgp]
  misc_feature (7)..(213): NCBI GI: 226278828 Blast Desc: conserved [Paracoccidioides brasiliensis Pb01]
MNLLTIYDQVFLLLVAEMTLFMLLVIPMPFTVKRKMFTFLSENPIIAKIQYGLKITFIFILILFLDSVNRVYRVQVELANATDTSKGAAAVMGHERLEVQARKFYSQRNMYLCGFTLFLSLILNRTYIMILDVLRLEEKLKQYEGTDKKTKESEKLAVAGKPGEIARLNKEIERRDRDIEALKKQAEALSREYNDLCEKYGETQPPAGTRKQK

SEQ ID NO: 21544 - DNA, 4692 bp, Muscodor strobelii; identical to SEQ ID NO: 21538
  misc_feature: SGI EST ID NO. CUFF.50743.5
  misc_feature: Variant of the nucleotide sequence at SEQ ID NO 21542

SEQ ID NO: 21545 - DNA, 990 bp, Muscodor strobelii
  misc_feature: SGI cDNA ID NO. 567295
  misc_feature: Elevated expression when VOC is produced
  misc_feature: Encodes the peptide sequence at SEQ ID NO 21546
atgtttggtttcgttctaaaggaccgtacatatgacctcctagacgtgagcaacataggcaatgtccggtttgttgaaaaggcaatcgatcggctggtcatgcgacccgaatcgagcaaggccaccatcaaagctattgtcgagacttacgttgatggcgatcaatcgagccacttcacggcagactttataaggggcaagggagaaggtcagatcttcttgcttcatggccccccagggactggaaagactctaaccgctgagtctgttgcggaatgtactaaaagaccattactcagcattacggctgctgatttgggtcatgaagcgacaagattggagaagaatctgctgaaattccttgacgatgcaaaatattgggacgcaattgttctactcgacgaagcagatgtttatcttgaacgtcgtgcatccaacgatattcaacgtaacagtattgtgtcggtttttctacgcgcaatggattatttccagggcattctgttcttgactaccaaccgagttgggcacttcgacgaagcaatcatgtctcgcattcacttagctattgggtatgagccccttgacgaaaaggcacgagagcaaatatgggagaacctctttcgcaaactcaaagatgaccacaaaaacggggggccagagatccgctacgagtatgaagcaaaggaatatgttaagaagaacgaagaagttaaaaagctccggtggaatggtcgcgaaatccgcaacgctttccaaactgctgtggccctcgctgtccacgaggccaagagcgccgcccagaaagatcactccgatgaaactgctataccagaagtcagagaaagccatctcgctcaggtcgtcaaaatgtcgacagctttcaaggagtatatcactagcacgcatgaaggcatggaagacgcggacttggctttcaagctcggaaaccgagatgatacagtgcgatatagcggtaaaggcatatga

SEQ ID NO: 21546 - protein, 329 aa, Muscodor strobelii
  misc_feature: SGI Peptide ID NO. 567295
  misc_feature (72)..(261): Pfam Id: PF00004 Pfam Desc: ATPase family associated with various cellular activities (AAA)
  misc_feature (72)..(215): Pfam Id: PF00004 Pfam Desc: ATPase family associated with various cellular activities (AAA)
  misc_feature (1)..(320): NCBI GI: 189192951 Blast Desc: conserved [Pyrenophora tritici-repentis Pt-1C-BFP] gi|187978378|gb|EDU45004.1| conserved [Pyrenophora tritici-repentis Pt-1C-BFP]
  misc_feature (1)..(301): NCBI GI: 154301437 Blast Desc: BC1G_10388 [Botryotinia fuckeliana B05.10] gi|150856128|gb|EDN31320.1| BC1G_10388 [Botryotinia fuckeliana B05.10]
  misc_feature (1)..(329): NCBI GI: 145244845 Blast Desc: An11g07150 [Aspergillus niger] gi|134079383|emb|CAK40765.1| protein product [Aspergillus niger]
  misc_feature (1)..(302): NCBI GI: 156033037 Blast Desc: SS1G_13594 [Sclerotinia sclerotiorum 1980] gi|154698997|gb|EDN98735.1| SS1G_13594 [Sclerotinia sclerotiorum 1980]
  misc_feature (3)..(318): NCBI GI: 46111087 Blast Desc: FG02425.1 [Gibberella zeae PH-1]
  misc_feature (1)..(309): NCBI GI: 46107594 Blast Desc: FG00680.1 [Gibberella zeae PH-1]
  misc_feature (36)..(251): NCBI GI: 171683059 Blast Desc: protein product [Podospora anserina] gi|170941489|emb|CAP67140.1| protein product [Podospora anserina]
  misc_feature (3)..(321): NCBI GI: 145604080 Blast Desc: MGG_14098 [Magnaporthe grisea 70-15] gi|145012164|gb|EDJ96820.1| MGG_14098 [Magnaporthe grisea 70-15]
  misc_feature (43)..(308): NCBI GI: 85094287 Blast Desc: NCU05863 [Neurospora crassa OR74A] gi|28921310|gb|EAA30618.1| [Neurospora crassa OR74A]
  misc_feature (56)..(301): NCBI GI: 212528958 Blast Desc: conserved [Penicillium marneffei ATCC 18224] gi|210074034|gb|EEA28121.1| conserved [Penicillium marneffei ATCC 18224]
  misc_feature: Useful for introducing or modulating the production of volatile compounds
MFGFVLKDRTYDLLDVSNIGNVRFVEKAIDRLVMRPESSKATIKAIVETYVDGDQSSHFTADFIRGKGEGQIFLLHGPPGTGKTLTAESVAECTKRPLLSITAADLGHEATRLEKNLLKFLDDAKYWDAIVLLDEADVYLERRASNDIQRNSIVSVFLRAMDYFQGILFLTTNRVGHFDEAIMSRIHLAIGYEPLDEKAREQIWENLFRKLKDDHKNGGPEIRYEYEAKEYVKKNEEVKKLRWNGREIRNAFQTAVALAVHEAKSAAQKDHSDETAIPEVRESHLAQVVKMSTAFKEYITSTHEGMEDADLAFKLGNRDDTVRYSGKGI

SEQ ID NO: 21547 - DNA, 3688 bp, Muscodor strobelii
  misc_feature: SGI EST ID NO. CUFF.50579.0
  misc_feature: Variant of the nucleotide sequence at SEQ ID NO 21545
tctggagtgacatctcaggccacgaaatcgcgagcaacccacctgattattgggctgcttcatattgcacaagctacagtatatagatacccatagcgaaaggggtcttcgtcaacaataggaacttccactaaagcggatgacatcttgacatctcaggatatccggacgcgtctaggaaactagagatcttcgtaatgagtgaggctagtgtctctgtccctatgacacactcagagtccaacaaagaagtgcgaggggaagccgagcatgacgaacatacggtgactaacggaaacatcccgcgaaatcccagagatacgctcacgcctattgatacaactgaagagactgtgcaagcggatgctctcaattccgccagagctggtgccaagccgagcgatgaagatgatagtggcttgatcgaggaagtatcttcgctgccagatggaacacgatccatagggaagtggttcataacaatagaacacgatgacggaaaactcttcagggtaccctggcacatgtgccaaacgcaggaggatattcacgaggttataaaaattacgtttcgagacaaagatgcggccagaacagagattgagcatggaaaatacaagagctatggctttggcgacgttgagattcttcgcgaatggtggaatatgttggttcaaccagggtggaaaatcctcgtccgcacagattccgaagtcgcttcccacgataagaagcccaaaaaagacagaagtgatgatgaatctgataatgaagaatcggattccgtccatgatgaccaagaagggaaagcgaccgagaccgcatacacagcaaagatcgcccacacgatcgctttttactacgaagaaaagtactctgaaaggaagcgatttctatgtgactgccccgctaacgattcgatgataataaagatccctgataccaagcttcgtgaaactccgattctcgaagagagaacgccggttatagtcccagaggcaaagagccgcaaatatgagcgcaaagtcccgaagaaaaaccctagattgagcgtcagagacaagattggcaatacagtcctacacattcactcgccatatctcctcaacacgttattatcaattatcaaatactcggctacggagccatccagtgatggtgtagacaagttagagactaatcagttctcacatccctacaagaatctcttctaccataagcaggagctattggacttcatcaatggtagttccggcctacgacaaatccattcagagagttacaatgcggaatgtgatcggcatatcaagtttctacttgagtaccttgagaatgagcccgctgtacagctgaagtctctagaagctatgtgggctaagacactacctaccacaaattttgctggtctttggttgttgttcaaaccagggaccgacgtctatgtggaggagtacggccaactgaacgcatatgttgttgacgtagtgtctggaggtgttattcctgatgggcaatggtccaactttacggcctatcaagtttcggtttggaacttgatatacgacggaaatacgatcacgcggaaaagcaaaaccattgacattccgatattcgatcacgagaaggatattttatctctaccgttattccccacgagattcaaagatgaccaagatagtggaatgcgaaggcttcagcttatcgaacgtggcaaaaagtttttccaatttacaaagggacccgcatttgtagaattcacaggcaatggcctaagggcagaatggaaaaagtatcaccgagcccgagtgataatcgaccatgtcagtcaaccatggaaacggccagaattccaatctatgtcggcctggaacttcagcccccctgggaaggattccgataagcattggaggtacaaagtgattggggaaaagccacccgagtctctaggacaaagagcaagagctccacgctgtgaatgtgcagagtgcagaaatagtgatatgacgacgaaaaaatacattctaccaacatttgcaaattacgacaacatcaacccgactatcgttggtgagctatcggatcatcagtacctgctttgtacgtcacacatgtttggtttcgttctaaaggaccgtacatatgacctcctagacgtgagcaacataggcaatgtccggtttgttgaaaaggcaatcgatcggctggtcatgcgacccgaatcgagcaaggccaccatcaaagctattgtcgagacttacgttgatggcgatcaatcgagccacttcacggcagactttataaggggcaagggagaaggtcagatcttcttgcttcatggccccccagggactggaaagactctaaccgctgagtctgttgcggaatgtactaaaagaccattactcagcattacggctgctgatttgggtcatgaagcgacaagattggagaagaatctgctgaaattccttgacgatgcaaaatattgggacgcaattgttctactcgacgaagcagatgtttatcttgaacgtcgtgcatccaacgatattcaacgtaacagtattgtgtcggtttttctacgcgcaatggattatttccagggcattctgttcttgactaccaaccgagttgggcacttcgacgaagcaatcatgtctcgcattcacttagctattgggtatgagccccttgacgaaaaggcacgagagcaaatatgggagaacctctttcgcaaactcaaagatgaccacaaaaacggggggccagagatccgctacgagtatgaagcaaaggaatatgttaagaagaacgaagaagttaaaaagctccggtggaatggtcgcgaaatccgcaacgctttccaaactgctgtggccctcgctgtccacgaggccaagagcgccgcccagaaagatcactccgatgaaactgctataccagaagtcagagaaagccatctcgctcaggtcgtcaaaatgtcgacagctttcaaggagtatatcactagcacgcatgaaggcatggaagacgcggacttggctttcaagctcggaaaccgagatgatacagtgcgatatagcggtaaaggcatatgagagtactacttgagcatgtcgtacgatcggccaagtccgctaactgcggttcatgttcatgaaccccggagggcgcctgaaggttttgcattgttttctcagcctgttgatcaagtttagcatagggcgcgatgagatgacgagatgatacgagcaaagctcattatgatcttgcgcattatgatctacctagtagtgaagattgaactgtagatgaagttgatcatgaagatactgcgtaccagaatacctaagaagtgagaataagaaaatacaaactcaatgaatggctggagaggacatttcaactgcagtaaaaagctcagtacacataattcggttgaaattcgagtatagccaggtataggcccttcaagccttcctctctcacactatgatgccaagtatgatctccttaattagcggttcatccaaggaactcctccccactctgtcgcagcatctgcaacaccggttgtatagtgactcttgctttgttctctatgttcctcaccgatgacttgcaagtttctccctgttcgctcactatcgctgacctcgcagaattcttccctgcatttcgaacttcc

SEQ ID NO: 21548 - DNA, 2874 bp, Muscodor strobelii
  misc_feature: SGI cDNA ID NO. 567296
  misc_feature: Elevated expression when VOC is produced
  misc_feature: Encodes the peptide sequence at SEQ ID NO 21549
atgacacactcagagtccaacaaagaagtgcgaggggaagccgagcatgacgaacatacggtgactaacggaaacatcccgcgaaatcccagagatacgctcacgcctattgatacaactgaagagactgtgcaagcggatgctctcaattccgccagagctggtgccaagccgagcgatgaagatgatagtggcttgatcgaggaagtatcttcgctgccagatggaacacgatccatagggaagtggttcataacaatagaacacgatgacggaaaactcttcagggtaccctggcacatgtgccaaacgcaggaggatattcacgaggttataaaaattacgtttcgagacaaagatgcggccagaacagagattgagcatggaaaatacaagagctatggctttggcgacgttgagattcttcgcgaatggtggaatatgttggttcaaccagggtggaaaatcctcgtccgcacagattccgaagtcgcttcccacgataagaagcccaaaaaagacagaagtgatgatgaatctgataatgaagaatcggattccgtccatgatgaccaagaagggaaagcgaccgagaccgcatacacagcaaagatcgcccacacgatcgctttttactacgaagaaaagtactctgaaaggaagcgatttctatgtgactgccccgctaacgattcgatgataataaagatccctgataccaagcttcgtgaaactccgattctcgaagagagaacgccggttatagtcccagaggcaaagagccgcaaatatgagcgcaaagtcccgaagaaaaaccctagattgagcgtcagagacaagattggcaatacagtcctacacattcactcgccatatctcctcaacacgttattatcaattatcaaatactcggctacggagccatccagtgatggtgtagacaagttagagactaatcagttctcacatccctacaagaatctcttctaccataagcaggagctattggacttcatcaatggtagttccggcctacgacaaatccattcagagagttacaatgcggaatgtgatcggcatatcaagtttctacttgagtaccttgagaatgagcccgctgtacagctgaagtctctagaagctatgtgggctaagacactacctaccacaaattttgctggtctttggttgttgttcaaaccagggaccgacgtctatgtggaggagtacggccaactgaacgcatatgttgttgacgtagtgtctggaggtgttattcctgatgggcaatggtccaactttacggcctatcaagtttcggtttggaacttgatatacgacggaaatacgatcacgcggaaaagcaaaaccattgacattccgatattcgatcacgagaaggatattttatctctaccgttattccccacgagattcaaagatgaccaagatagtggaatgcgaaggcttcagcttatcgaacgtggcaaaaagtttttccaatttacaaagggacccgcatttgtagaattcacaggcaatggcctaagggcagaatggaaaaagtatcaccgagcccgagtgataatcgaccatgtcagtcaaccatggaaacggccagaattccaatctatgtcggcctggaacttcagcccccctgggaaggattccgataagcattggaggtacaaagtgattggggaaaagccacccgagtctctaggacaaagagcaagagctccacgctgtgaatgtgcagagtgcagaaatagtgatatgacgacgaaaaaatacattctaccaacatttgcaaattacgacaacatcaacccgactatcgttggtgagctatcggatcatcagtacctgctttgtacgtcacacatgtttggtttcgttctaaaggaccgtacatatgacctcctagacgtgagcaacataggcaatgtccggtttgttgaaaaggcaatcgatcggctggtcatgcgacccgaatcgagcaaggccaccatcaaagctattgtcgagacttacgttgatggcgatcaatcgagccacttcacggcagactttataaggggcaagggagaaggtcagatcttcttgcttcatggccccccagggactggaaagactctaaccgctgagtctgttgcggaatgtactaaaagaccattactcagcattacggctgctgatttgggtcatgaagcgacaagattggagaagaatctgctgaaattccttgacgatgcaaaatattgggacgcaattgttctactcgacgaagcagatgtttatcttgaacgtcgtgcatccaacgatattcaacgtaacagtattgtgtcggtttttctacgcgcaatggattatttccagggcattctgttcttgactaccaaccgagttgggcacttcgacgaagcaatcatgtctcgcattcacttagctattgggtatgagccccttgacgaaaaggcacgagagcaaatatgggagaacctctttcgcaaactcaaagatgaccacaaaaacggggggccagagatccgctacgagtatgaagcaaaggaatatgttaagaagaacgaagaagttaaaaagctccggtggaatggtcgcgaaatccgcaacgctttccaaactgctgtggccctcgctgtccacgaggccaagagcgccgcccagaaagatcactccgatgaaactgctataccagaagtcagagaaagccatctcgctcaggtcgtcaaaatgtcgacagctttcaaggagtatatcactagcacgcatgaaggcatggaagacgcggacttggctttcaagctcggaaaccgagatgatacagtgcgatatagcggtaaaggcatatga

SEQ ID NO: 21549 - protein, 957 aa, Muscodor strobelii
  misc_feature: SGI Peptide ID NO. 567296
  misc_feature (700)..(889): Pfam Id: PF00004 Pfam Desc: ATPase family associated with various cellular activities (AAA)
  misc_feature (700)..(843): Pfam Id: PF00004 Pfam Desc: ATPase family associated with various cellular activities (AAA)
  misc_feature (82)..(948): NCBI GI: 189192951 Blast Desc: conserved [Pyrenophora tritici-repentis Pt-1C-BFP] gi|187978378|gb|EDU45004.1| conserved [Pyrenophora tritici-repentis Pt-1C-BFP]
  misc_feature (272)..(957): NCBI GI: 145244845 Blast Desc: An11g07150 [Aspergillus niger] gi|134079383|emb|CAK40765.1| protein product [Aspergillus niger]
  misc_feature (286)..(930): NCBI GI: 156033037 Blast Desc: SS1G_13594 [Sclerotinia sclerotiorum 1980] gi|154698997|gb|EDN98735.1| SS1G_13594 [Sclerotinia sclerotiorum 1980]
  misc_feature (395)..(930): NCBI GI: 154301437 Blast Desc: BC1G_10388 [Botryotinia fuckeliana B05.10] gi|150856128|gb|EDN31320.1| BC1G_10388 [Botryotinia fuckeliana B05.10]
  misc_feature (276)..(946): NCBI GI: 46111087 Blast Desc: FG02425.1 [Gibberella zeae PH-1]
  misc_feature (280)..(937): NCBI GI: 46107594 Blast Desc: FG00680.1 [Gibberella zeae PH-1]
  misc_feature (270)..(935): NCBI GI: 169617698 Blast Desc: SNOG_12031 [Phaeosphaeria nodorum SN15] gi|160703459|gb|EAT80443.2| SNOG_12031 [Phaeosphaeria nodorum SN15]
  misc_feature (284)..(926): NCBI GI: 256733807 Blast Desc: NECHADRAFT_77327 [Nectria haematococca mpVI 77-13-4]
  misc_feature (359)..(891): NCBI GI: 67541096 Blast Desc: AN6718.2 [Aspergillus nidulans FGSC A4] gi|40739346|gb|EAA58536.1| AN6718.2 [Aspergillus nidulans FGSC A4]
  misc_feature (360)..(890): NCBI GI: 242810197 Blast Desc: AAA family ATPase, [Talaromyces stipitatus ATCC 10500] gi|218716156|gb|EED15578.1| AAA family ATPase, [Talaromyces stipitatus ATCC 10500]
  misc_feature: Useful for introducing or modulating the production of volatile compounds
MTHSESNKEVRGEAEHDEHTVTNGNIPRNPRDTLTPIDTTEETVQADALNSARAGAKPSDEDDSGLIEEVSSLPDGTRSIGKWFITIEHDDGKLFRVPWHMCQTQEDIHEVIKITFRDKDAARTEIEHGKYKSYGFGDVEILREWWNMLVQPGWKILVRTDSEVASHDKKPKKDRSDDESDNEESDSVHDDQEGKATETAYTAKIAHTIAFYYEEKYSERKRFLCDCPANDSMIIKIPDTKLRETPILEERTPVIVPEAKSRKYERKVPKKNPRLSVRDKIGNTVLHIHSPYLLNTLLSIIKYSATEPSSDGVDKLETNQFSHPYKNLFYHKQELLDFINGSSGLRQIHSESYNAECDRHIKFLLEYLENEPAVQLKSLEAMWAKTLPTTNFAGLWLLFKPGTDVYVEEYGQLNAYVVDVVSGGVIPDGQWSNFTAYQVSVWNLIYDGNTITRKSKTIDIPIFDHEKDILSLPLFPTRFKDDQDSGMRRLQLIERGKKFFQFTKGPAFVEFTGNGLRAEWKKYHRARVIIDHVSQPWKRPEFQSMSAWNFSPPGKDSDKHWRYKVIGEKPPESLGQRARAPRCECAECRNSDMTTKKYILPTFANYDNINPTIVGELSDHQYLLCTSHMFGFVLKDRTYDLLDVSNIGNVRFVEKAIDRLVMRPESSKATIKAIVETYVDGDQSSHFTADFIRGKGEGQIFLLHGPPGTGKTLTAESVAECTKRPLLSITAADLGHEATRLEKNLLKFLDDAKYWDAIVLLDEADVYLERRASNDIQRNSIVSVFLRAMDYFQGILFLTTNRVGHFDEAIMSRIHLAIGYEPLDEKAREQIWENLFRKLKDDHKNGGPEIRYEYEAKEYVKKNEEVKKLRWNGREIRNAFQTAVALAVHEAKSAAQKDHSDETAIPEVRESHLAQVVKMSTAFKEYITSTHEGMEDADLAFKLGNRDDTVRYSGKGI

SEQ ID NO: 21550 - DNA, 3688 bp, Muscodor strobelii; identical to SEQ ID NO: 21547
  misc_feature: SGI EST ID NO. CUFF.50579.0
  misc_feature: Variant of the nucleotide sequence at SEQ ID NO 21548

SEQ ID NO: 21551 - DNA, 1725 bp, Muscodor strobelii
  misc_feature: SGI cDNA ID NO. 567297
  misc_feature: Encodes the peptide sequence at SEQ ID NO 21552
atgacacactcagagtccaacaaagaagtgcgaggggaagccgagcatgacgaacatacggtgactaacggaaacatcccgcgaaatcccagagatacgctcacgcctattgatacaactgaagagactgtgcaagcggatgctctcaattccgccagagctggtgccaagccgagcgatgaagatgatagtggcttgatcgaggaagtatcttcgctgccagatggaacacgatccatagggaagtggttcataacaatagaacacgatgacggaaaactcttcagggtaccctggcacatgtgccaaacgcaggaggatattcacgaggttataaaaattacgtttcgagacaaagatgcggccagaacagagattgagcatggaaaatacaagagctatggctttggcgacgttgagattcttcgcgaatggtggaatatgttggttcaaccagggtggaaaatcctcgtccgcacagattccgaagtcgcttcccacgataagaagcccaaaaaagacagaagtgatgatgaatctgataatgaagaatcggattccgtccatgatgaccaagaagggaaagcgaccgagaccgcatacacagcaaagatcgcccacacgatcgctttttactacgaagaaaagtactctgaaaggaagcgatttctatgtgactgccccgctaacgattcgatgataataaagatccctgataccaagcttcgtgaaactccgattctcgaagagagaacgccggttatagtcccagaggcaaagagccgcaaatatgagcgcaaagtcccgaagaaaaaccctagattgagcgtcagagacaagattggcaatacagtcctacacattcactcgccatatctcctcaacacgttattatcaattatcaaatactcggctacggagccatccagtgatggtgtagacaagttagagactaatcagttctcacatccctacaagaatctcttctaccataagcaggagctattggacttcatcaatggtagttccggcctacgacaaatccattcagagagttacaatgcggaatgtgatcggcatatcaagtttctacttgagtaccttgagaatgagcccgctgtacagctgaagtctctagaagctatgtgggctaagacactacctaccacaaattttgctggtctttggttgttgttcaaaccagggaccgacgtctatgtggaggagtacggccaactgaacgcatatgttgttgacgtagtgtctggaggtgttattcctgatgggcaatggtccaactttacggcctatcaagtttcggtttggaacttgatatacgacggaaatacgatcacgcggaaaagcaaaaccattgacattccgatattcgatcacgagaaggatattttatctctaccgttattccccacgagattcaaagatgaccaagatagtggaatgcgaaggcttcagcttatcgaacgtggcaaaaagtttttccaatttacaaagggacccgcatttgtagaattcacaggcaatggcctaagggcagaatggaaaaaggtcaaagccctgactagcttggatcgttactatactaactgtaccatagtatcaccgagcccgagtgataatcgaccatgtcagtcaaccatggaaacggccagaattccaatctatgtcggcctggaacttcagcccccctgggaaggattccgataa

SEQ ID NO: 21552 - protein, 574 aa, Muscodor strobelii
  misc_feature: SGI Peptide ID NO. 567297
  misc_feature (82)..(524): NCBI GI: 189192951 Blast Desc: conserved [Pyrenophora tritici-repentis Pt-1C-BFP] gi|187978378|gb|EDU45004.1| conserved [Pyrenophora tritici-repentis Pt-1C-BFP]
  misc_feature (351)..(505): NCBI GI: 171683057 Blast Desc: protein product [Podospora anserina] gi|170941488|emb|CAP67139.1| protein product [Podospora anserina]
  misc_feature (276)..(505): NCBI GI: 171678733 Blast Desc: protein product [Podospora anserina] gi|170937436|emb|CAP62094.1| protein product [Podospora anserina]
  misc_feature (272)..(505): NCBI GI: 145244845 Blast Desc: An11g07150 [Aspergillus niger] gi|134079383|emb|CAK40765.1| protein product [Aspergillus niger]
  misc_feature (276)..(548): NCBI GI: 46111087 Blast Desc: FG02425.1 [Gibberella zeae PH-1]
  misc_feature (286)..(521): NCBI GI: 156033037 Blast Desc: SS1G_13594 [Sclerotinia sclerotiorum 1980] gi|154698997|gb|EDN98735.1| SS1G_13594 [Sclerotinia sclerotiorum 1980]
  misc_feature (390)..(510): NCBI GI: 171681319 Blast Desc: protein product [Podospora anserina] gi|170940618|emb|CAP65846.1| protein product [Podospora anserina]
  misc_feature (270)..(504): NCBI GI: 169617698 Blast Desc: SNOG_12031 [Phaeosphaeria nodorum SN15] gi|160703459|gb|EAT80443.2| SNOG_12031 [Phaeosphaeria nodorum SN15]
  misc_feature (244)..(507): NCBI GI: 212528958 Blast Desc: conserved [Penicillium marneffei ATCC 18224] gi|210074034|gb|EEA28121.1| conserved [Penicillium marneffei ATCC 18224]
  misc_feature (280)..(513): NCBI GI: 46107594 Blast Desc: FG00680.1 [Gibberella zeae PH-1]
MTHSESNKEVRGEAEHDEHTVTNGNIPRNPRDTLTPIDTTEETVQADALNSARAGAKPSDEDDSGLIEEVSSLPDGTRSIGKWFITIEHDDGKLFRVPWHMCQTQEDIHEVIKITFRDKDAARTEIEHGKYKSYGFGDVEILREWWNMLVQPGWKILVRTDSEVASHDKKPKKDRSDDESDNEESDSVHDDQEGKATETAYTAKIAHTIAFYYEEKYSERKRFLCDCPANDSMIIKIPDTKLRETPILEERTPVIVPEAKSRKYERKVPKKNPRLSVRDKIGNTVLHIHSPYLLNTLLSIIKYSATEPSSDGVDKLETNQFSHPYKNLFYHKQELLDFINGSSGLRQIHSESYNAECDRHIKFLLEYLENEPAVQLKSLEAMWAKTLPTTNFAGLWLLFKPGTDVYVEEYGQLNAYVVDVVSGGVIPDGQWSNFTAYQVSVWNLIYDGNTITRKSKTIDIPIFDHEKDILSLPLFPTRFKDDQDSGMRRLQLIERGKKFFQFTKGPAFVEFTGNGLRAEWKKVKALTSLDRYYTNCTIVSPSPSDNRPCQSTMETARIPIYVGLELQPPWEGFR

SEQ ID NO: 21553 - DNA, 3688 bp, Muscodor strobelii; identical to SEQ ID NO: 21547
  misc_feature: SGI EST ID NO. CUFF.50579.0
  misc_feature: Variant of the nucleotide sequence at SEQ ID NO 21551

SEQ ID NO: 21554 - DNA, 1731 bp, Muscodor strobelii
  misc_feature: SGI cDNA ID NO. 567298
  misc_feature: Elevated expression when VOC is produced
  misc_feature: Encodes the peptide sequence at SEQ ID NO 21555
atgatggccgggtcgggccccatgtccgattccatggagtctaggagatttgagggcagagtcatcatccggcgcttcacagaccagatgccgggcaacaatgaactggagttgtcgaccaaagcagcccagacgcaaatagacgaagaggaagagttagagagaagaaggcaaatgagattgctctacgccgacccactggatgaagctgcatcttctcccaagtcagctaagacgaaggcttttgaagtgctcaatggcgcagagaatctagacgacatcaaaaagtctgtggaggatatggataagaagtggaaagagagtcatggaccagtatacaatgccttcaaaaagctttgtggtactctagacaaccacaagagcctcctcgctatattcccatcacagaacatctatacgtcggtactgacatcgagtctatcttgcttaattaagacagctaaaaatcacggcgatattgctgaaactctcgctaaatctatcgcgatcatctcggataaggttgctacatgctctgacctcgtcaagattatcaagacgcgcaagctgaggcaaaggcttgctaatatctacggtcgcatgttccagttctacggcgacgctatcaaatggtacttacagtcaaggctgtctagagtgctttctagcttcaacgagaacctgaagaaggagtgtaccgatgcgacaaacgacctcgaggattgtgtcagagagctgtatcgcgaggcctccgtcagtagtttcgctatgatggcaacaatgagttgcgatcaagcaaggatcatagatgagctgaggcgccaacggcggtattatgagcaaatcgacagttcagccgggcgtcggatgcttcttctcatggaagccggttggatgagtatgattacaaatggagttatgtcggcacctaatgctgctcatcttgcagtcaaaccggcacccgacaccgaaaagctgcgtcctcctggtgttacacgctctgaggcccgtatcctcagtgatataatcaaagcgttcattactggtgacgaaggtcccggcctcttgacagctggtggaagcttctgggtcgcagaagacattgttcttcctaaactaagggcatggatgctcgaggatacgaaaccaagtacgctctggatatccagccctcacgggccagatgggacgacaagcgcgagggctgcggcgctagcggttgtggcgtcggcataccaggcagagacaccactcatctcgcatttttgccgaaggccgcggcgtgacgaaatgcgggcaaagatgagcattgaagaaattgggttgataggactaatatatagtctgattcaccagctacttcagtttggtgaagatgaggatgacctgtccatcagcacggaaagtctcgcgactctcagtggaagctctgagtcatggagcacatgtttagacgttctgcgagacttactagatcgtacgcctatgtttttgtattgcgtcgttgatgggctcaatgatctggagttgagtaacggttcagagtggtgtcgacagttcctagatgtactctttgaacggcaacgtaaggagggagcggtcttcaacatactctttactacagcaggtcagtcgaggatcttgccgagttttgtccagttaaatgataggcaaattgcaacgaagcgcgcaagagaggtgtcgagatttgggaagacaattgatctataa

SEQ ID NO: 21555 - protein, 576 aa, Muscodor strobelii
  misc_feature: SGI Peptide ID NO. 567298
  misc_feature (93)..(509): NCBI GI: 212528960 Blast Desc: PMAA_029400 [Penicillium marneffei ATCC 18224] gi|210074035|gb|EEA28122.1| PMAA_029400 [Penicillium marneffei ATCC 18224]
  misc_feature (92)..(548): NCBI GI: 121715322 Blast Desc: conserved [Aspergillus clavatus NRRL 1] gi|119403427|gb|EAW13844.1| conserved [Aspergillus clavatus NRRL 1]
  misc_feature (90)..(228): NCBI GI: 145604078 Blast Desc: MGG_14097 [Magnaporthe grisea 70-15] gi|145012163|gb|EDJ96819.1| MGG_14097 [Magnaporthe grisea 70-15]
  misc_feature (22)..(564): NCBI GI: 145244847 Blast Desc: An11g07160 [Aspergillus niger] gi|134079384|emb|CAK40766.1| protein product [Aspergillus niger]
  misc_feature (89)..(569): NCBI GI: 67539760 Blast Desc: AN6050.2 [Aspergillus nidulans FGSC A4] gi|40738835|gb|EAA58025.1| AN6050.2 [Aspergillus nidulans FGSC A4] gi|259479765|tpe|CBF70286.1| TPA: conserved [Aspergillus FGSC
  misc_feature (93)..(542): NCBI GI: 71001230 Blast Desc: conserved [Aspergillus fumigatus Af293] gi|66852934|gb|EAL93258.1| conserved [Aspergillus fumigatus Af293] gi|159129378|gb|EDP54492.1| conserved [Aspergillus A1163]
  misc_feature (89)..(515): NCBI GI: 242795208 Blast Desc: conserved [Talaromyces stipitatus ATCC 10500] gi|218719122|gb|EED18542.1| conserved [Talaromyces stipitatus ATCC 10500]
  misc_feature (332)..(573): NCBI GI: 238493471 Blast Desc: conserved [Aspergillus flavus NRRL3357] gi|220696466|gb|EED52808.1| conserved [Aspergillus flavus NRRL3357]
  misc_feature (332)..(573): NCBI GI: 169783640 Blast Desc: [Aspergillus oryzae RIB40] gi|83775026|dbj|BAE65149.1| protein product [Aspergillus oryzae]
  misc_feature (332)..(542): NCBI GI: 119480853 Blast Desc: NFIA_085110 [Neosartorya fischeri NRRL 181] gi|119408609|gb|EAW18558.1| conserved [Neosartorya fischeri NRRL 181]
  misc_feature: Useful for introducing or modulating the production of volatile compounds
MMAGSGPMSDSMESRRFEGRVIIRRFTDQMPGNNELELSTKAAQTQIDEEEELERRRQMRLLYADPLDEAASSPKSAKTKAFEVLNGAENLDDIKKSVEDMDKKWKESHGPVYNAFKKLCGTLDNHKSLLAIFPSQNIYTSVLTSSLSCLIKTAKNHGDIAETLAKSIAIISDKVATCSDLVKIIKTRKLRQRLANIYGRMFQFYGDAIKWYLQSRLSRVLSSFNENLKKECTDATNDLEDCVRELYREASVSSFAMMATMSCDQARIIDELRRQRRYYEQIDSSAGRRMLLLMEAGWMSMITNGVMSAPNAAHLAVKPAPDTEKLRPPGVTRSEARILSDIIKAFITGDEGPGLLTAGGSFWVAEDIVLPKLRAWMLEDTKPSTLWISSPHGPDGTTSARAAALAVVASAYQAETPLISHFCRRPRRDEMRAKMSIEEIGLIGLIYSLIHQLLQFGEDEDDLSISTESLATLSGSSESWSTCLDVLRDLLDRTPMFLYCVVDGLNDLELSNGSEWCRQFLDVLFERQRKEGAVFNILFTTAGQSRILPSFVQLNDRQIATKRAREVSRFGKTIDL

SEQ ID NO: 21556 - DNA, 3097 bp, Muscodor strobelii
  misc_feature: SGI EST ID NO. CUFF.50581.0
  misc_feature: Variant of the nucleotide sequence at SEQ ID NO 21554
aaatgcacaatcgaatgcatgttggtccaccagtccggcgtagcatcatccagagtccacaaacctgagaatctatgcattctctcctctactattggttatgggctcgcctgaaagtgcataatatgtcgcacaatgcgtggctgagccaaatccgtgctacaacctgcatcatccccagcgcatatttcatctaggccatggaaggcacacgtcggtggagaggcgcttagtagatgggggccaaatccaattcggcctgctagacaatatgcgaggtgcaaaagtgagcgggatagcgtgcatgcctgcttaggagcctcgaattgtagcaaacgattgtctgttgcaagccgaaggcaaggaaacattatctgccaatctacagtgtctaatcgcttagagcatcaagcttgcggtatgatggccgggtcgggccccatgtccgattccatggagtctaggagatttgagggcagagtcatcatccggcgcttcacagaccagatgccgggcaacaatgaactggagttgtcgaccaaagcagcccagacgcaaatagacgaagaggaagagttagagagaagaaggcaaatgagattgctctacgccgacccactggatgaagctgcatcactacatgactttgacgtcgcgaacatagcccgcgaagcgctgcaaaaagtaatagacgagttctacggcgtcgcggtcgcaagaccttcaaagttgcatatttttggcagttctcccaagtcagctaagacgaaggcttttgaagtgctcaatggcgcagagaatctagacgacatcaaaaagtctgtggaggatatggataagaagtggaaagagagtcatggaccagtatacaatgccttcaaaaagctttgtggtactctagacaaccacaagagcctcctcgctatattcccatcacagaacatctatacgtcggtactgacatcgagtctatcttgcttaattaagacagctaaaaatcacggcgatattgctgaaactctcgctaaatctatcgcgatcatctcggataaggttgctacatgctctgacctcgtcaagattatcaagacgcgcaagctgaggcaaaggcttgctaatatctacggtcgcatgttccagttctacggcgacgctatcaaatggtacttacagtcaaggctgtctagagtgctttctagcttcaacgagaacctgaagaaggagtgtaccgatgcgacaaacgacctcgaggattgtgtcagagagctgtatcgcgaggcctccgtcagtagtttcgctatgatggcaacaatgagttgcgatcaagcaaggatcatagatgagctgaggcgccaacggcggtattatgagcaaatcgacagttcagccgggcgtcggatgcttcttctcatggaagccggttggatgagtatgattacaaatggagttatgtcggcacctaatgctgctcatcttgcagtcaaaccggcacccgacaccgaaaagctgcgtcctcctggtgttacacgctctgaggcccgtatcctcagtgatataatcaaagcgttcattactggtgacgaaggtcccggcctcttgacagctggtggaagcttctgggtcgcagaagacattgttcttcctaaactaagggcatggatgctcgaggatacgaaaccaagtacgctctggatatccagccctcacgggccagatgggacgacaagcgcgagggctgcggcgctagcggttgtggcgtcggcataccaggcagagacaccactcatctcgcatttttgccgaaggccgcggcgtgacgaaatgcgggcaaagatgagcattgaagaaattgggttgataggactaatatatagtctgattcaccagctacttcagtttggtgaagatgaggatgacctgtccatcagcacggaaagtctcgcgactctcagtggaagctctgagtcatggagcacatgtttagacgttctgcgagacttactagatcgtacgcctatgtttttgtattgcgtcgttgatgggctcaatgatctggagttgagtaacggttcagagtggtgtcgacagttcctagatgtactctttgaacggcaacgtaaggagggagcggtcttcaacatactctttactacagcaggtcagtcgaggatcttgccgagttttgtccagttaaatgataggcaaattgcaacgaagcgcgcaagagaggtgtcgagatttgggaagacaattgatctataagtggtgaaacacaatgcggacagctctgattgatacatactttttcatatggacgattaacacctgaataaactgactatctcataccttccacttgcacaacgcctgataacaagccgagtatctcgcataaacgatgatcatttggctttgattcatctgggatgttaggataagaaggggtcgtattggatgcgtttcgatcagagcttagtatctaatatcaaatgtagtatgatactttcctccaaagagtctcggccataagtatagcatgatgagaacccctgtgagccatgtcagttcatcattgcagagattacgtcactctctgagcatatcaggtaattgcaagcgtctttgtcgccttcaatcttttatatgttgcttgaagacctaataaacgaataaatactccgcagtgtttcctggcctctcatatgatcatgagcactgtctcgtaatgtcgatcttagcgtaagttcataaggactgctcgaacggcatatcagtgcatgtgcatctcacaccaccttcaacggcgatgcgctagatcatgtaacatgcattacctgcagaaacatgatcatgctgttagggttgtgcattagggaaattgatggaggcagcagcagtagtttggcacaggagatggtcgcactggcctcagaccacaaaggcttttagaacactcactccccatggcgatctgagcgaagttagtatgaaagtgtagcagtatgataccgtgctatttctatttggatgcatcataaagagagcatagggtaaatttcacctgaatattcttccacgcatcaatccgatgagactg

SEQ ID NO: 21557 - DNA, 1332 bp, Muscodor strobelii
  misc_feature: SGI cDNA ID NO. 567299
  misc_feature: Encodes the peptide sequence at SEQ ID NO 21558
atgtcgcggcctctcagatctgtcgtacctctcctggtagccgcctcgggccttttcagcaatgttgttgaaggcaaagcagtcttcgcgcactatctcattggtggcattagtcccttcacagatcatgctaagcaagacatcgaccaagcctttgcagcgggcttcgatgccttcgccttaaaccaattagaccctacagcagactgggccatcaacgccacgacgcagcttttcgactatgccgattcacggggtgattttaaactatttttcagcttcgatcttggtgcacacaacaacttcgacgatcatgtaaatctatacaaccagttcaaagctcgatcatcctattactattatggagacccaagtcggcccatggtatcttcattcagtggcggatcccttggagcgtctacatgggagaatttcaagaatacatacaatgtgtatctcatccctaatgtcgagtcagatggaaactattacagcgctcctcagacatttttcaacgactggaatgctgccattgatggtgtgtttagctgggaaacgaattggccgggatcacaggagacacctacaaatgtctcttcctctcaagatgaatctgtgaaatccgctgctgacgctgtctcgaaatcgtacatcatgggcctgtcaacgcttcaattcaagagctgctgtggtggtgattggtaccgcgtgggcgagacgaatttgccagagcgcatgaaccaaattctccagcttgctcccgagttcaccgaagtgatcacatggaatgatgcaggtgaaagccattacatcagcaattgctgggccgagactttaaatgaggaggaattcgcgtatggcaactcaactgaaaacccgcatgacggatggcagcctttgatatcgtccttcatagccgccttcaaggctggcgcatctgacacgagcgctatggtaccgccaagtggctctccattcgtaggtgctatgtggtaccgcagcattttgaaatcttgcgctagcaacggcggtagcgcacctccaggcgctggggctgcgattgatgctgtgaactatgctgtcgtgctgcctgagggcagtgaaggctacaagatccgcgtaactagcggtgatcaagttctcaggactgatgaagtctcagctggcttaagttacaattccatcgctggtatggtagtgggttcgcagctgctggagctactcgatggaagcggaaatgtagtggcaagtgctaatagtaagaaagtagttacagatcagccgaccaacgggttctgcaacttcaactattatgtcgatggcctacaataa

SEQ ID NO: 21558 - protein, 443 aa, Muscodor strobelii
  misc_feature: SGI Peptide ID NO. 567299
  misc_feature (8)..(442): NCBI GI: 242806453 Blast Desc: glucan endo-1,3-alpha-glucosidase agn1 precursor, [Talaromyces stipitatus ATCC 10500] gi|218715371|gb|EED14793.1| glucan endo-1,3-alpha-glucosidase agn1 precursor, [Talaromyces
  misc_feature (25)..(442): NCBI GI: 212533813 Blast Desc: glucan endo-1,3-alpha-glucosidase agn1 precursor, [Penicillium marneffei ATCC 18224] gi|210072427|gb|EEA26516.1| glucan endo-1,3-alpha-glucosidase agn1 precursor, [Penicillium
  misc_feature (26)..(442): NCBI GI: 212538547 Blast Desc: glucan endo-1,3-alpha-glucosidase agn1 precursor, [Penicillium marneffei ATCC 18224] gi|210069171|gb|EEA23262.1| glucan endo-1,3-alpha-glucosidase agn1 precursor, [Penicillium
  misc_feature (10)..(439): NCBI GI: 212537265 Blast Desc: glucan endo-1,3-alpha-glucosidase agn1 precursor, [Penicillium marneffei ATCC 18224] gi|210068530|gb|EEA22621.1| glucan endo-1,3-alpha-glucosidase agn1 precursor, [Penicillium
  misc_feature (28)..(439): NCBI GI: 242809788 Blast Desc: glucan endo-1,3-alpha-glucosidase agn1 precursor, [Talaromyces stipitatus ATCC 10500] gi|218716070|gb|EED15492.1| glucan endo-1,3-alpha-glucosidase agn1 precursor, [Talaromyces
  misc_feature (25)..(442): NCBI GI: 154295573 Blast Desc: BC1G_13057 [Botryotinia fuckeliana B05.10] gi|150843937|gb|EDN19130.1| BC1G_13057 [Botryotinia fuckeliana B05.10]
  misc_feature (11)..(436): NCBI GI: 256721518 Blast Desc: [Nectria haematococca mpVI 77-13-4]
  misc_feature (5)..(436): NCBI GI: 256721025 Blast Desc: NECHADRAFT_106231 [Nectria haematococca mpVI 77-13-4]
  misc_feature (56)..(442): NCBI GI: 169609256 Blast Desc: SNOG_07716 [Phaeosphaeria nodorum SN15] gi|160701812|gb|EAT85182.2| SNOG_07716 [Phaeosphaeria nodorum SN15]
  misc_feature (89)..(442): NCBI GI: 156053872 Blast Desc: SS1G_05784 [Sclerotinia sclerotiorum 1980] gi|154703564|gb|EDO03303.1| SS1G_05784 [Sclerotinia sclerotiorum 1980]
  misc_feature (26)..(339): SWISSPROT Homolog: EC 3.2.1.59 Glucan endo-1,3-alpha-glucosidase
MSRPLRSVVPLLVAASGLFSNVVEGKAVFAHYLIGGISPFTDHAKQDIDQAFAAGFDAFALNQLDPTADWAINATTQLFDYADSRGDFKLFFSFDLGAHNNFDDHVNLYNQFKARSSYYYYGDPSRPMVSSFSGGSLGASTWENFKNTYNVYLIPNVESDGNYYSAPQTFFNDWNAAIDGVFSWETNWPGSQETPTNVSSSQDESVKSAADAVSKSYIMGLSTLQFKSCCGGDWYRVGETNLPERMNQILQLAPEFTEVITWNDAGESHYISNCWAETLNEEEFAYGNSTENPHDGWQPLISSFIAAFKAGASDTSAMVPPSGSPFVGAMWYRSILKSCASNGGSAPPGAGAAIDAVNYAVVLPEGSEGYKIRVTSGDQVLRTDEVSAGLSYNSIAGMVVGSQLLELLDGSGNVVASANSKKVVTDQPTNGFCNFNYYVDGLQ

SEQ ID NO: 21559 - DNA, 2399 bp, Muscodor strobelii
  misc_feature: SGI EST ID NO. CUFF.50590.0
  misc_feature: Variant of the nucleotide sequence at SEQ ID NO 21557
gacaatattagcggacatcgtgtcatccggcagccataaattcgatatgtgcacggttctttctatgaacagaaaatatcaattgtatggattgtagtaatcgtcttgtctctaatttgtatggtcctgatatcagatgcaccacggtcgatttcaaggcttctgttgttctcttgcaccggatgcatgcattcgaggtagagtgcaattgctgaaggactctagtcgagtagtcttgagagatgggcggcgtgggcggcatttccaaaggaccgatgccgacgtcgctgattttctctcctgtcgtacgtgcaggatacaagtgccgcctgattttctgtgactaccgaggagcccttcatttgggtggcaaccctgccgacctgcataggtggtgcatccgttcgcaccgattgctgaagagcttcccttttgatatctctcatcagcattccctcacgctgctgagctgaataacgagccacgaactggaatagggaaaagatgtggccatattcgggcaatacaacgttcctccatacccgccccgcattgtggattatagtcaggcctcgtttggcagacactaatgatgaaactctggtcctgaatcctacatgacgactattcagcaagccaagaggaattgaaatggcgcagccttgtggtcatatatcaagatgggcatcgcccattaagaagacgtctcgaactaagcaatacggtttgatacaagacttctcgtccctatcaaatccaacaagagtcaaatacagtagtcttcgaggccacaatgtcgcggcctctcagatctgtcgtacctctcctggtagccgcctcgggccttttcagcaatgttgttgaaggcaaagcagtcttcgcgcactatctcattggtggcattagtcccttcacagatcatgctaagcaagacatcgaccaagcctttgcagcgggcttcgatgccttcgccttaaaccaattagaccctacagcagactgggccatcaacgccacgacgcagcttttcgactatgccgattcacggggtgattttaaactatttttcagcttcgatcttggtgcacacaacaacttcgacgatcatgtaaatctatacaaccagttcaaagctcgatcatcctattactattatggagacccaagtcggcccatggtatcttcattcagtggcggatcccttggagcgtctacatgggagaatttcaagaatacatacaatgtgtatctcatccctaatgtcgagtcagatggaaactattacagcgctcctcagacatttttcaacgactggaatgctgccattgatggtgtgtttagctgggaaacgaattggccgggatcacaggagacacctacaaatgtctcttcctctcaagatgaatctgtgaaatccgctgctgacgctgtctcgaaatcgtacatcatgggcctgtcaacgcttcaattcaagagctgctgtggtggtgattggtaccgcgtgggcgagacgaatttgccagagcgcatgaaccaaattctccagcttgctcccgagttcaccgaagtgatcacatggaatgatgcaggtgaaagccattacatcagcaattgctgggccgagactttaaatgaggaggaattcgcgtatggcaactcaactgaaaacccgcatgacggatggcagcctttgatatcgtccttcatagccgccttcaaggctggcgcatctgacacgagcgctatggtaccgccaagtggctctccattcgtaggtgctatgtggtaccgcagcattttgaaatcttgcgctagcaacggcggtagcgcacctccaggcgctggggctgcgattgatgctgtgaactatgctgtcgtgctgcctgagggcagtgaaggctacaagatccgcgtaactagcggtgatcaagttctcaggactgatgaagtctcagctggcttaagttacaattccatcgctggtatggtagtgggttcgcagctgctggagctactcgatggaagcggaaatgtagtggcaagtgctaatagtaagaaagtagttacagatcagccgaccaacgggttctgcaacttcaactattatgtcgatggcctacaataaagctattgtcaagacattagaggttctgcaaggcgtatctaaatccgcagctcggcccagggtgcttccagtcagaagcacgttgcaacgtataagtttgacttttgaggtagttgatagatgagggtgtttgaaagcttgcctcaactaaataagagattagataccctttcttatgagatcgcgtccatttggcgcatgcagtggacagatggtaactataggaataagacagagagatgtgctaatagagcttatgcgcattcgattgctg

SEQ ID NO: 21560 - DNA, 1320 bp, Muscodor strobelii
  misc_feature: SGI cDNA ID NO. 567300
  misc_feature: Encodes the peptide sequence at SEQ ID NO 21561
atgtcgcggcctctcagatctgtcgtacctctcctggtagccgcctcgggccttttcagcaatgttgttgaaggcaaagcagtcttcgcgcactatctcgtgagtcacggagatcatgctaagcaagacatcgaccaagcctttgcagcgggcttcgatgccttcgccttaaaccaattagaccctacagcagactgggccatcaacgccacgacgcagcttttcgactatgccgattcacggggtgattttaaactatttttcagcttcgatcttggtgcacacaacaacttcgacgatcatgtaaatctatacaaccagttcaaagctcgatcatcctattactattatggagacccaagtcggcccatggtatcttcattcagtggcggatcccttggagcgtctacatgggagaatttcaagaatacatacaatgtgtatctcatccctaatgtcgagtcagatggaaactattacagcgctcctcagacatttttcaacgactggaatgctgccattgatggtgtgtttagctgggaaacgaattggccgggatcacaggagacacctacaaatgtctcttcctctcaagatgaatctgtgaaatccgctgctgacgctgtctcgaaatcgtacatcatgggcctgtcaacgcttcaattcaagagctgctgtggtggtgattggtaccgcgtgggcgagacgaatttgccagagcgcatgaaccaaattctccagcttgctcccgagttcaccgaagtgatcacatggaatgatgcaggtgaaagccattacatcagcaattgctgggccgagactttaaatgaggaggaattcgcgtatggcaactcaactgaaaacccgcatgacggatggcagcctttgatatcgtccttcatagccgccttcaaggctggcgcatctgacacgagcgctatggtaccgccaagtggctctccattcgtaggtgctatgtggtaccgcagcattttgaaatcttgcgctagcaacggcggtagcgcacctccaggcgctggggctgcgattgatgctgtgaactatgctgtcgtgctgcctgagggcagtgaaggctacaagatccgcgtaactagcggtgatcaagttctcaggactgatgaagtctcagctggcttaagttacaattccatcgctggtatggtagtgggttcgcagctgctggagctactcgatggaagcggaaatgtagtggcaagtgctaatagtaagaaagtagttacagatcagccgaccaacgggttctgcaacttcaactattatgtcgatggcctacaataa

SEQ ID NO: 21561 - protein, 439 aa, Muscodor strobelii
  misc_feature: SGI Peptide ID NO. 567300
  misc_feature (8)..(438): NCBI GI: 242806453 Blast Desc: glucan endo-1,3-alpha-glucosidase agn1 precursor, [Talaromyces stipitatus ATCC 10500] gi|218715371|gb|EED14793.1| glucan endo-1,3-alpha-glucosidase agn1 precursor, [Talaromyces
  misc_feature (25)..(438): NCBI GI: 212533813 Blast Desc: glucan endo-1,3-alpha-glucosidase agn1 precursor, [Penicillium marneffei ATCC 18224] gi|210072427|gb|EEA26516.1| glucan endo-1,3-alpha-glucosidase agn1 precursor, [Penicillium
  misc_feature (26)..(438): NCBI GI: 212538547 Blast Desc: glucan endo-1,3-alpha-glucosidase agn1 precursor, [Penicillium marneffei ATCC 18224] gi|210069171|gb|EEA23262.1| glucan endo-1,3-alpha-glucosidase agn1 precursor, [Penicillium
  misc_feature (10)..(435): NCBI GI: 212537265 Blast Desc: glucan endo-1,3-alpha-glucosidase agn1 precursor, [Penicillium marneffei ATCC 18224] gi|210068530|gb|EEA22621.1| glucan endo-1,3-alpha-glucosidase agn1 precursor, [Penicillium
  misc_feature (25)..(438): NCBI GI: 154295573 Blast Desc: BC1G_13057 [Botryotinia fuckeliana B05.10] gi|150843937|gb|EDN19130.1| BC1G_13057 [Botryotinia fuckeliana B05.10]
  misc_feature (28)..(435): NCBI GI: 242809788 Blast Desc: glucan endo-1,3-alpha-glucosidase agn1 precursor, [Talaromyces stipitatus ATCC 10500] gi|218716070|gb|EED15492.1| glucan endo-1,3-alpha-glucosidase agn1 precursor, [Talaromyces
  misc_feature (11)..(432): NCBI GI: 256721518 Blast Desc: [Nectria haematococca mpVI 77-13-4]
  misc_feature (5)..(432): NCBI GI: 256721025 Blast Desc: NECHADRAFT_106231 [Nectria haematococca mpVI 77-13-4]
  misc_feature (52)..(438): NCBI GI: 169609256 Blast Desc: SNOG_07716 [Phaeosphaeria nodorum SN15] gi|160701812|gb|EAT85182.2| SNOG_07716 [Phaeosphaeria nodorum SN15]
  misc_feature (85)..(438): NCBI GI: 156053872 Blast Desc: SS1G_05784 [Sclerotinia sclerotiorum 1980] gi|154703564|gb|EDO03303.1| SS1G_05784 [Sclerotinia sclerotiorum 1980]
  misc_feature (26)..(335): SWISSPROT Homolog: EC 3.2.1.59 Glucan endo-1,3-alpha-glucosidase
MSRPLRSVVPLLVAASGLFSNVVEGKAVFAHYLVSHGDHAKQDIDQAFAAGFDAFALNQLDPTADWAINATTQLFDYADSRGDFKLFFSFDLGAHNNFDDHVNLYNQFKARSSYYYYGDPSRPMVSSFSGGSLGASTWENFKNTYNVYLIPNVESDGNYYSAPQTFFNDWNAAIDGVFSWETNWPGSQETPTNVSSSQDESVKSAADAVSKSYIMGLSTLQFKSCCGGDWYRVGETNLPERMNQILQLAPEFTEVITWNDAGESHYISNCWAETLNEEEFAYGNSTENPHDGWQPLISSFIAAFKAGASDTSAMVPPSGSPFVGAMWYRSILKSCASNGGSAPPGAGAAIDAVNYAVVLPEGSEGYKIRVTSGDQVLRTDEVSAGLSYNSIAGMVVGSQLLELLDGSGNVVASANSKKVVTDQPTNGFCNFNYYVDGLQ

SEQ ID NO: 21562 - DNA, 2399 bp, Muscodor strobelii; identical to SEQ ID NO: 21559
  misc_feature: SGI EST ID NO. CUFF.50590.0
  misc_feature: Variant of the nucleotide sequence at SEQ ID NO 21560

SEQ ID NO: 21563 - DNA, 912 bp, Muscodor strobelii
  misc_feature: SGI cDNA ID NO. 567301
  misc_feature: Encodes the peptide sequence at SEQ ID NO 21564
atggcgccatctaagaatatccggaacgtcgccctcgtgggagcaactggcactatcggagcccctattctgactgctctgctcgcagtcggacacaacgtgactgtcctcactcgtccgactacgaaagcaacatttccctcgacagtcacaattcataaaggtgactatcacgacgaggcttttgcttttgaggccctccaaggacaggacgctctcatcctcgcgctgagctataatgcatacgacgcgcaaattccactcatcaaagctgccgctaaagctggtgtatcctacatcgtgccctgcgaattcggctctgatccgacacatccaaagttgaatgctgaaatcagtatcatgtccatgaaggcgccttttcgtaaattgatcgaagatctgggcgtaagcagctggattggagttgtgaacaacccatgggttgaatttagtatccgcttgggcttatacggaatcgatctgaagtctaagacggtgcggttttttgacgagggcacgacaaaggcaaattttgcgacactcacgcgcgttggagagtcgcttgccgtactcttcgctttgccagaagcagaattagcgaaatacaaaaacgagtgggttttctttagctcgttctatgcgagccagcgggatttccttgaaagcgcaatgcgcgctacggagacgaccgaaaaggattggacgatttcgagtgttccgtcggatgaaattatcgcagaatctaagaagcagcagggcgagtttgctggtgccatggccttattcgctgttgttttcaaggacggatacggtggcgactataactcgaaagtcatcgactaccaggccctgggattggagcctgaagatcttgatactgttatgaagaagttagtgcaagagatccagtag

SEQ ID NO: 21564 - protein, 303 aa, Muscodor strobelii
  misc_feature: SGI Peptide ID NO. 567301
  misc_feature (10)..(235): Pfam Id: PF05368 Pfam Desc: NmrA-like family
  misc_feature (10)..(114): Pfam Id: PF05368 Pfam Desc: NmrA-like family
  misc_feature (27)..(299): NCBI GI: 238501010 Blast Desc: conserved [Aspergillus flavus NRRL3357] gi|220691976|gb|EED48323.1| conserved [Aspergillus flavus NRRL3357]
  misc_feature (4)..(302): NCBI GI: 169616135 Blast Desc: SNOG_11241 [Phaeosphaeria nodorum SN15] gi|111060620|gb|EAT81740.1| SNOG_11241 [Phaeosphaeria nodorum SN15]
  misc_feature (1)..(302): NCBI GI: 39968005 Blast Desc: MGG_02095 [Magnaporthe grisea 70-15] gi|145012976|gb|EDJ97617.1| MGG_02095 [Magnaporthe grisea 70-15]
  misc_feature (8)..(303): NCBI GI: 256730505 Blast Desc: NECHADRAFT_89639 [Nectria haematococca mpVI 77-13-4]
  misc_feature (8)..(272): NCBI GI: 256722841 Blast Desc: NECHADRAFT_97483 [Nectria haematococca mpVI 77-13-4]
  misc_feature (7)..(292): NCBI GI: 242808671 Blast Desc: conserved [Talaromyces stipitatus ATCC 10500] gi|218715840|gb|EED15262.1| conserved [Talaromyces stipitatus ATCC 10500]
  misc_feature (4)..(296): NCBI GI: 119497459 Blast Desc: oxidoreductase CipA, [Neosartorya fischeri NRRL 181] gi|119413650|gb|EAW23591.1| oxidoreductase CipA, [Neosartorya fischeri NRRL 181]
  misc_feature (1)..(300): NCBI GI: 212531267 Blast Desc: conserved [Penicillium marneffei ATCC 18224] gi|210071154|gb|EEA25243.1| conserved [Penicillium marneffei ATCC 18224]
  misc_feature (4)..(303): NCBI GI: 159130395 Blast Desc: oxidoreductase CipA-like, [Aspergillus fumigatus A1163]
  misc_feature (4)..(303): NCBI GI: 70990128 Blast Desc: oxidoreductase CipA-like [Aspergillus fumigatus Af293] gi|66847545|gb|EAL87875.1| oxidoreductase CipA-like, [Aspergillus fumigatus Af293]
MAPSKNIRNVALVGATGTIGAPILTALLAVGHNVTVLTRPTTKATFPSTVTIHKGDYHDEAFAFEALQGQDALILALSYNAYDAQIPLIKAAAKAGVSYIVPCEFGSDPTHPKLNAEISIMSMKAPFRKLIEDLGVSSWIGVVNNPWVEFSIRLGLYGIDLKSKTVRFFDEGTTKANFATLTRVGESLAVLFALPEAELAKYKNEWVFFSSFYASQRDFLESAMRATETTEKDWTISSVPSDEIIAESKKQQGEFAGAMALFAVVFKDGYGGDYNSKVIDYQALGLEPEDLDTVMKKLVQEIQ

SEQ ID NO: 21565 - DNA, 372 bp, Muscodor strobelii
  misc_feature: SGI EST ID NO. CUFF.50596.0
  misc_feature: Variant of the nucleotide sequence at SEQ ID NO 21563
gctcgacttcattatttcatccatacaatatttactttgtttctttggagaaacatggcgccatctaagaatatccggaacgtcgccctcgtgggagcaactggcactatcggagcccctattctgactgctctgctcgcagtcggacacaacgtgactgtcctcactcgtccgactacgaaagcaacatttccctcgacagtcacaattcataaaggtgactatcacgacgaggcttttgcttttgaggccctccaaggacaggacgctctcatcctcgcgctgagctataatgcatacgacgcgcaaattccactcatcaaagctgccgctaaagctggtgtatcctacatcgtgccctgcgaattcggc

SEQ ID NO: 21566 - DNA, 2109 bp, Muscodor strobelii
  misc_feature: SGI cDNA ID NO. 567302
  misc_feature: Encodes the peptide sequence at SEQ ID NO 21567
atgtcgtcgcttggctcaagttacctagctgctcaagccatgtcatttggtttagatgacgatactgcttcacccatgtcgttcggcacagatgatgaagctacttcaggcatgtcggtcggctcagatgcggaagtttcaggcccgaagaagtgtgagatcggtcacgttgatcggaagtacgactcttcgggtcgcccgcgctttgagccgaccaaagaggaggccaatgtcgccaaggacgctcactcgtggcgacgttttgcttacaccttcgtccacaattacaggccggatggtaagatgaggtcaacgtccctctatgtcaactcgcaacctattcgccagcttctaagagacgtgattggtgacttttcagctgatccaattgatgtcgccgacgtacaaatcgccgagccgttccattcgctgttttactaccgagacgaggtagagagcgtcggaattgtgcgcttccaggacgacgataccatcaaggcgcaactacaactgctcctcgactggatcaaaggtcgttttgagcaggaaattcatgcttggaaggcttgtatctcgggcgtgaatcagagcatgcagtatgatcatctctggacccttttccctccccataccatcatctatcgcgagttcttggatcagccacgagcctacaagctccacatgcacgcttataacaaagcgcattcgatgttgccagccatgttttgctgccaaactacgtttctggactttgatggtgatttgctccgtgagcgaaaccagtcgttcacaattgaccagtacccgggaaaaaggccaattcaggacctccctttcatgcctttggatctccattccaacgccacacagattcgctcacaactgctggtccgaggacgaaagtttgagatcttcgttgggcaacattacgaagaatacaatggagtggccatgaagcagaaggataagggggaatatgttcggatccacgttcaaggtagagttatgatcgacaacaaaacggcgcagcgattggaccccaacaatatcactcgctttctcaatcgttcatactctcgcgcctcatacggtctcgctgatgagatggctggagagcacaacattgacccttctaccggtcttcccacgaagttttccaaacctttacctgcaaaagaggcggttactggcaagttgtcggacgatcaagcaatcctaatgaatgcgaccgttcgtggcttctcttttactcgacgtctttttctcgagttctttgtcgataatttcatgccaatcaaatggaacgacaaatgcttcgaccagctcgtgctcgatgatggcactaagaaaatagtgaaggcgcttgtatccatgcgcacccgtgaccgcgactcgatggacgacataatcaaaggcaaaggaaaaggccttgtatttgttctccacgggccgcctggagttggcaagacactcactgcggaatgcgtcgccgaatacatgaagcgcccactttacatggtctcgacaggagagctcggtacctgtgggagtgaattggatctcaagttggccagcatcatggagttggcttctacatggaacgctgtgctactcattgatgaagccgatatctacctggagagccgagagctgcgtgatattcaccggaattctcttgtcagcattttccttcgacagcttgagtattacagcggagtcctgtttctcaccacgaacagagtcaagacttttgacgatgcattcaagtcaagaatcgatgtcccaattcgctataatgagctcggacttgcttcccgccagaagatctggcagaatctctgcggaaaagtcccaggcaactttatggtcaatcagaaagacttccagaagcttgccagacaaccccttaatggtcgccagatcaagaatgcaatcaaagttgccgagggcatcgccgccagtgaagaaatgcctctcagctgtgaacaccttgaagctgctgttgagaagattgtagattttgagaaagagatggacaatgcccaggagatcgattacgatgctcctggtgagagcaagagagcggacgagagaaacatgtattactga

SEQ ID NO: 21567 - protein, 702 aa, Muscodor strobelii
  misc_feature: SGI Peptide ID NO. 567302
  misc_feature (478)..(654): Pfam Id: PF00004 Pfam Desc: ATPase family associated with various cellular activities (AAA)
  misc_feature (51)..(701): NCBI GI: 85115272 Blast Desc: NCU08641 [Neurospora crassa OR74A] gi|28926644|gb|EAA35613.1| [Neurospora crassa OR74A]
  misc_feature (20)..(701): NCBI GI: 116182798 Blast Desc: CHGG_02027 [Chaetomium globosum CBS 148.51] gi|88186324|gb|EAQ93792.1| CHGG_02027 [Chaetomium globosum CBS 148.51]
  misc_feature (48)..(678): NCBI GI: 39940826 Blast Desc: MGG_11021 [Magnaporthe grisea 70-15] gi|145010948|gb|EDJ95604.1| MGG_11021 [Magnaporthe grisea 70-15]
  misc_feature (81)..(678): NCBI GI: 145237308 Blast Desc: An07g02150 [Aspergillus niger] gi|134075769|emb|CAK39306.1| protein product [Aspergillus niger]
  misc_feature (81)..(678): NCBI GI: 258565107 Blast Desc: conserved [Uncinocarpus reesii 1704] gi|237906999|gb|EEP81400.1| conserved [Uncinocarpus reesii 1704]
  misc_feature (81)..(678): NCBI GI: 67541096 Blast Desc: AN6718.2 [Aspergillus nidulans FGSC A4] gi|40739346|gb|EAA58536.1| AN6718.2 [Aspergillus nidulans FGSC A4]
  misc_feature (81)..(678): NCBI GI: 259480306 Blast Desc: TPA: AAA family ATPase, (AFU_orthologue; AFUA_7G05752) [Aspergillus nidulans FGSC A4]
  misc_feature (82)..(678): NCBI GI: 119482988 Blast Desc: NFIA_026990 [Neosartorya fischeri NRRL 181] gi|119409677|gb|EAW19625.1| NFIA_026990 [Neosartorya fischeri NRRL 181]
  misc_feature (81)..(701): NCBI GI: 226286876 Blast Desc: conserved [Paracoccidioides brasiliensis Pb18]
  misc_feature (81)..(701): NCBI GI: 226280165 Blast Desc: conserved [Paracoccidioides brasiliensis Pb01]
MSSLGSSYLAAQAMSFGLDDDTASPMSFGTDDEATSGMSVGSDAEVSGPKKCEIGHVDRKYDSSGRPRFEPTKEEANVAKDAHSWRRFAYTFVHNYRPDGKMRSTSLYVNSQPIRQLLRDVIGDFSADPIDVADVQIAEPFHSLFYYRDEVESVGIVRFQDDDTIKAQLQLLLDWIKGRFEQEIHAWKACISGVNQSMQYDHLWTLFPPHTIIYREFLDQPRAYKLHMHAYNKAHSMLPAMFCCQTTFLDFDGDLLRERNQSFTIDQYPGKRPIQDLPFMPLDLHSNATQIRSQLLVRGRKFEIFVGQHYEEYNGVAMKQKDKGEYVRIHVQGRVMIDNKTAQRLDPNNITRFLNRSYSRASYGLADEMAGEHNIDPSTGLPTKFSKPLPAKEAVTGKLSDDQAILMNATVRGFSFTRRLFLEFFVDNFMPIKWNDKCFDQLVLDDGTKKIVKALVSMRTRDRDSMDDIIKGKGKGLVFVLHGPPGVGKTLTAECVAEYMKRPLYMVSTGELGTCGSELDLKLASIMELASTWNAVLLIDEADIYLESRELRDIHRNSLVSIFLRQLEYYSGVLFLTTNRVKTFDDAFKSRIDVPIRYNELGLASRQKIWQNLCGKVPGNFMVNQKDFQKLARQPLNGRQIKNAIKVAEGIAASEEMPLSCEHLEAAVEKIVDFEKEMDNAQEIDYDAPGESKRADERNMYY

SEQ ID NO: 21568 - DNA, 328 bp, Muscodor strobelii
  misc_feature: SGI EST ID NO. CUFF.50605.0
  misc_feature: Variant of the nucleotide sequence at SEQ ID NO 21566
ggacgacataatcaaaggcaaaggaaaaggccttgtatttgttctccacgggccgcctggagttggcaagacactcactgcggaatgcgtcgccgaatacatgaagcgcccactttacatggtctcgacaggagagctcggtacctgtgggagtgaattggatctcaagttggccagcatcatggagttggcttctacatggaacgctgtgctactcattgatgaagccgatatctacctggagagccgagagctgcgtgatattcaccggaattctcttgtcagcattttccttcgacagcttgagtattacagcggagtcctgttt

SEQ ID NO: 21569 - DNA, 393 bp, Muscodor strobelii
  misc_feature: SGI cDNA ID NO. 567303
  misc_feature: Encodes the peptide sequence at SEQ ID NO 21570
atgcaggccttcagcttcacaactgttctgtccctcatgggactcaccatggcccaacagtaccaaatcagtctcatcgaatcatctaatgcctgtagcggtgacgactacggaaagtacttactatacgcctctgacaccgctggctcgacttcctcctgtcagacactcggccagtatcccctcgctgacggggtcgaagactgctactactacgacactggttccgatgagctgtcaacggggctgtctgtaatctcttttcggacgcggaatgtggcggtactgccgtcaatatcttcgatggatgctctacacctggcggcacgttccagagcttcatttgcagctggggagtttgatctcttcaagggtggccccgcgatcgggtaa

SEQ ID NO: 21570 - protein, 130 aa, Muscodor strobelii
  misc_feature: SGI Peptide ID NO. 567303
MQAFSFTTVLSLMGLTMAQQYQISLIESSNACSGDDYGKYLLYASDTAGSTSSCQTLGQYPLADGVEDCYYYDTGSDELSTGLSVISFRTRNVAVLPSISSMDALHLAARSRASFAAGEFDLFKGGPAIG

SEQ ID NO: 21571 - DNA, 453 bp, Muscodor strobelii
  misc_feature: SGI cDNA ID NO. 567304
  misc_feature: Encodes the peptide sequence at SEQ ID NO 21572
atgcatatgctcaccgtcttcaccaccctcctggcccttctggggttcaccctcgccgacgtcaacttcatccagctcagttcgggcgacgcctgcagcagcgactacggtacagctttcctctacggctccgatctagccgacggagacaactcagactgtcaaaacgtcggctctgacgccctcgccaacggtatcgtctactgcggatttttcgacgctcacgattcggctcgcgaccagggttgcaaccagggcactccgttcgaggcccggagtgtctcgctcatcaactctgcctgcaacttgttcaccgggagcgactgcacgggagacgttatcaatgtctatgataaggatggatatacctgctcgagcttgcagcagtatgtgcagagcttcatctgcaattgggatatctctgatgatatcgagtctacgatcgaccagtag

SEQ ID NO: 21572 - protein, 150 aa, Muscodor strobelii
  misc_feature: SGI Peptide ID NO. 567304
MHMLTVFTTLLALLGFTLADVNFIQLSSGDACSSDYGTAFLYGSDLADGDNSDCQNVGSDALANGIVYCGFFDAHDSARDQGCNQGTPFEARSVSLINSACNLFTGSDCTGDVINVYDKDGYTCSSLQQYVQSFICNWDISDDIESTIDQ

SEQ ID NO: 21573 - DNA, 1500 bp, Muscodor strobelii
  misc_feature: SGI cDNA ID NO. 567305
  misc_feature: Encodes the peptide sequence at SEQ ID NO 21574
atgtccgcaggctcatctccggcgacgtcgcctccagcagcagtgtcgtcgcattcctccctcgccgcgaaccccaactacgccgcgctgcctcccctgatcacgacgccccccgtccgccgcaccacgaacccccgcccgatgtcgcacgcttccaagaaccgcctgtcccagtactcgacaggctccgtcccgtcgcgatcccgcccgccctcccatctcttccccatcttccactccagccttgcctacaccatcgtccgggacttcgcctacccagcccgggaatcctatgcactatggcccgccgccagagccctcgcgaccgtgggctgggatcacggtaacgaaggtggttttggcaagggaggagggttagagcctattcactttggcgacgggcctccttatagtgaggatgaggatcttcatagcccggtcgtgagctcgcgacacagaaagcacaagtcgacatcggcaacaattggcaagtcaaggggctcgagggaaggtcaggatccttcgctgcttagtgctacaagctatgacacagacaggtcatattacgttggtacgagtggagatggcagcgagcgatactatatcagccagggcggggaggccaatggacctgggggtgaggttgtcacgtacccgccaaaccaggcgcgacactcagcctcggcataccgacctgtgaatcaacagccccgacactatgccgataacgatgccggataccgatccgaatcggacgacagtgttacgtcatcgcctgggttcaatgcgtatgacgaatcgagatattcacgagattaccaattcactatcacctcgccagacgaggaaatgcacggcaaagccgtcgcactatttgactttcaaagagaaaatgaaaatgagcttcccctagtggagggtcagattatatgggtatcatacaggcacggccaaggctggctcgttgccgaggacccgaaaacgcaagagagcggactcgttcctgaggaatacgttcgtctcctcagggacatcgaaggggggatgacgagtcttgtaggccaagttgcggatggttcgggaacgcccaacgaagcgggcacgccaacacaagccgagcacagtgtcagtgccattcagcccggacatacaccctctggaagcacatccaatggttatcaccagccgatagtgtccaccttttcgacttcgagtaaagatctggatccatatccgcagcacctgttaggccagcacggccagccccctccgcaagtcgttcattaccatggtcagcgaggcggcagccaagccaatactccaaccgtacaaaacacgtttgacaccgcgctcgggcgacgtggaagctctgatgtcaaaagcagcgagtccattccagctaaaccgcagactctagagactttgccagatgcgagaatgaaatcacctgaagcagaggccgattcagacgaagacgaacaggctatcccgcaacggtga

SEQ ID NO: 21574 - protein, 499 aa, Muscodor strobelii
  misc_feature: SGI Peptide ID NO. 567305
  misc_feature (286)..(342): Pfam Id: PF00018 Pfam Desc: SH3 domain
  misc_feature (287)..(342): Pfam Id: PF07653 Pfam Desc: Variant SH3 domain
  misc_feature (1)..(482): NCBI GI: 171687775 Blast Desc: protein product [Podospora anserina] gi|170943849|emb|CAP69501.1| protein product [Podospora anserina]
  misc_feature (1)..(487): NCBI GI: 85115992 Blast Desc: NCU03113 [Neurospora crassa OR74A] gi|28926771|gb|EAA35736.1| conserved [Neurospora crassa OR74A]
  misc_feature (29)..(477): NCBI GI: 256735403 Blast Desc: NECHADRAFT_75211 [Nectria haematococca mpVI 77-13-4]
  misc_feature (77)..(482): NCBI GI: 261355252 Blast Desc: NAP1-binding protein [Verticillium albo-atrum VaMs.102]
  misc_feature (119)..(494): NCBI GI: 145615914 Blast Desc: MGG_03705 [Magnaporthe grisea 70-15] gi|145009699|gb|EDJ94355.1| MGG_03705 [Magnaporthe grisea 70-15]
  misc_feature (108)..(458): NCBI GI: 46108094 Blast Desc: FG00929.1 [Gibberella zeae PH-1]
  misc_feature (120)..(463): NCBI GI: 154321291 Blast Desc: BC1G_01520 [Botryotinia fuckeliana B05.10] gi|150852058|gb|EDN27250.1| BC1G_01520 [Botryotinia fuckeliana B05.10]
  misc_feature (120)..(461): NCBI GI: 156054336 Blast Desc: SS1G_06016 [Sclerotinia sclerotiorum 1980] gi|154703796|gb|EDO03535.1| SS1G_06016 [Sclerotinia sclerotiorum 1980]
  misc_feature (126)..(375): NCBI GI: 116180450 Blast Desc: CHGG_00853 [Chaetomium globosum CBS 148.51] gi|88185150|gb|EAQ92618.1| CHGG_00853 [Chaetomium globosum CBS 148.51]
  misc_feature (8)..(455): NCBI GI: 240111442 Blast Desc: SH3 domain containing protein [Coccidioides posadasii C735 delta SOWgp]
MSAGSSPATSPPAAVSSHSSLAANPNYAALPPLITTPPVRRTTNPRPMSHASKNRLSQYSTGSVPSRSRPPSHLFPIFHSSLAYTIVRDFAYPARESYALWPAARALATVGWDHGNEGGFGKGGGLEPIHFGDGPPYSEDEDLHSPVVSSRHRKHKSTSATIGKSRGSREGQDPSLLSATSYDTDRSYYVGTSGDGSERYYISQGGEANGPGGEVVTYPPNQARHSASAYRPVNQQPRHYADNDAGYRSESDDSVTSSPGFNAYDESRYSRDYQFTITSPDEEMHGKAVALFDFQRENENELPLVEGQIIWVSYRHGQGWLVAEDPKTQESGLVPEEYVRLLRDIEGGMTSLVGQVADGSGTPNEAGTPTQAEHSVSAIQPGHTPSGSTSNGYHQPIVSTFSTSSKDLDPYPQHLLGQHGQPPPQVVHYHGQRGGSQANTPTVQNTFDTALGRRGSSDVKSSESIPAKPQTLETLPDARMKSPEAEADSDEDEQAIPQR

SEQ ID NO: 21575 - DNA, 771 bp, Muscodor strobelii
  misc_feature: SGI cDNA ID NO. 567306
  misc_feature: Reduced expression when VOC is produced
  misc_feature: Encodes the peptide sequence at SEQ ID NO 21576
atggaggccgtgacgaatggcgcagctcctgcccccgtggcaaacggcgagcgcgaagatccaggaggctacaagcttaagttctgcaccgtatgcgctagtaatcagaacagatctatggaagctcatcttcgtctatcgcaagcccactacccggtcatctccttcggcaccggctccctcgtccgcctcccgggaccaaccatcacccaacccaacgtctaccctttcaacaaagtatcttacgacaccatatacaaagaactcgacggcaaagaccgcagattatacacagccaatggtgtcctcaacatgataggccgaaacaggaacgtcaaatggggcccagagcgctggcaggactggcagattggcatcccccgcgtagagcaggtcaaggaccgcggtcacgagggcaccgaaggaggcattgtggacgtcgtcttcacctgcgaggagagatgctgggacgcagtcatcgacgacctacttaatcgtggctcgcctctgaaccgtcctgtccacgttatcaacgtcgatattaaggataatcacgaagaagcctctatcggtgggaagggtatcctcgatcttgccgactcgctcaatgcggccgccaaggaagagagggatgctgttggtgctgtcaattttgacatggctagcgccgcgggacgagcatcgtttgacgagcgtgttcccgagatcattggggagtggcaagaacggtggccccatctgcctgctacttggacattggcttggttctga

SEQ ID NO: 21576 - protein, 256 aa, Muscodor strobelii
  misc_feature: SGI Peptide ID NO. 567306
  misc_feature (24)..(256): Pfam Id: PF04722 Pfam Desc: Ssu72-like protein
  misc_feature (25)..(121): Pfam Id: PF04722 Pfam Desc: Ssu72-like protein
  misc_feature (140)..(256): Pfam Id: PF04722 Pfam Desc: Ssu72-like protein
  misc_feature (4)..(256): NCBI GI: 46108096 Blast Desc: FG00930.1 [Gibberella zeae PH-1] gi|126352772|sp|Q4IPC8.1|SSU72_GIBZE RecName: Full=RNA polymerase II subunit A C-terminal domain phosphatase SSU72; Short=CTD of 2
  misc_feature (1)..(256): NCBI GI: 256734698 Blast Desc: [Nectria haematococca mpVI 77-13-4]
  misc_feature (1)..(256): NCBI GI: 154321293 Blast Desc: BC1G_01521 [Botryotinia fuckeliana B05.10] gi|150852059|gb|EDN27251.1| BC1G_01521 [Botryotinia fuckeliana B05.10]
  misc_feature (6)..(256): NCBI GI: 116180454 Blast Desc: CHGG_00855 [Chaetomium globosum CBS 148.51] gi|126352771|sp|Q2HFZ9.1|SSU72_CHAGB RecName: Full=RNA polymerase II subunit A C-terminal domain phosphatase SSU72; Short=CTD of 2
  misc_feature (5)..(256): NCBI GI: 39943248 Blast Desc: conserved [Magnaporthe grisea 70-15] gi|58257467|gb|AAW69355.1| SSU72 protein-like protein [Magnaporthe grisea] gi|145009700|gb|EDJ94356.1| conserved grisea
  misc_feature (15)..(256): NCBI GI: 85115996 Blast Desc: protein SSU72 [Neurospora crassa OR74A] gi|74618547|sp|Q7SFY0.1|SSU72_NEUCR RecName: Full=RNA polymerase II subunit A C-terminal domain phosphatase ssu-72; Short=CTD of 2
  misc_feature (4)..(256): NCBI GI: 261355253 Blast Desc: RNA polymerase II subunit A C-terminal domain phosphatase SSU72 [Verticillium albo-atrum VaMs.102]
  misc_feature (3)..(256): NCBI GI: 156054334 Blast Desc: SS1G_06015 [Sclerotinia sclerotiorum 1980] gi|154703795|gb|EDO03534.1| SS1G_06015 [Sclerotinia sclerotiorum 1980]
  misc_feature (16)..(256): NCBI GI: 171687777 Blast Desc: protein product [Podospora anserina] gi|170943850|emb|CAP69502.1| protein product [Podospora anserina]
  misc_feature (2)..(256): NCBI GI: 121710386 Blast Desc: transcription/RNA-processing factor Ssu72 [Aspergillus clavatus NRRL 1] gi|119400959|gb|EAW11383.1| transcription/RNA-processing factor Ssu72 [Aspergillus clavatus
  misc_feature (4)..(256): SWISSPROT Homolog: EC 3.1.3.16 Phosphoprotein phosphatase
  misc_feature: Useful for introducing or modulating the production of volatile compounds
MEAVTNGAAPAPVANGEREDPGGYKLKFCTVCASNQNRSMEAHLRLSQAHYPVISFGTGSLVRLPGPTITQPNVYPFNKVSYDTIYKELDGKDRRLYTANGVLNMIGRNRNVKWGPERWQDWQIGIPRVEQVKDRGHEGTEGGIVDVVFTCEERCWDAVIDDLLNRGSPLNRPVHVINVDIKDNHEEASIGGKGILDLADSLNAAAKEERDAVGAVNFDMASAAGRASFDERVPEIIGEWQERWPHLPATWTLAWF

SEQ ID NO: 21577 - DNA, 1313 bp, Muscodor strobelii
  misc_feature: SGI EST ID NO. CUFF.50633.1
  misc_feature: Variant of the nucleotide sequence at SEQ ID NO 21575
ctcactaccaccgtcgaagcagagctgtcttggatcgacttggtccaaacaccagcaccgctaccacaattaactcttctcccttcttccaagtcgactagacctctatttctcaactcaccttgactggcgatgtgatctgccaccgcgacgacggcctgttttgccaggatcctgcacattacatcatcatccgtccaaccatttcctgtccctgcgtagaaactgcatagtgaaggaggagatcactagaatagatatcgcgcaaaatcatctttgcggcattggtgaagcctggggaacctgaacttgggagcgcacaaagacaaagacgagtcacttgacgtcgtcaagatggaggccgtgacgaatggcgcagctcctgcccccgtggcaaacggcgagcgcgaagatccaggaggctacaagcttaagttctgcaccgtatgcgctagtaatcagaacagatctatggaagctcatcttcgtctatcgcaagcccactacccggtcatctccttcggcaccggctccctcgtccgcctcccgggaccaaccatcacccaacccaacgtctaccctttcaacaaagtatcttacgacaccatatacaaagaactcgacggcaaagaccgcagattatacacagccaatggtgtcctcaacatgataggccgaaacaggaacgtcaaatggggcccagagcgctggcaggactggcagattggcatcccccgcgtagagcaggtcaaggaccgcggtcacgagggcaccgaaggaggcattgtggacgtcgtcttcacctgcgaggagagatgctgggacgcagtcatcgacgacctacttaatcgtggctcgcctctgaaccgtcctgtccacgttatcaacgtcgatattaaggataatcacgaagaagcctctatcggtgggaagggtatcctcgatcttgccgactcgctcaatgcggccgccaaggaagagagggatgctgttggtgctgtcaattttgacatggctagcgccgcgggacgagcatcgtttgacgagcgtgttcccgagatcattggggagtggcaagaacggtggccccatctgcctgctacttggacattggcttggttctgattgggttttgcttcacgtcgttatggatttgtacatttatgataccaggaatggggatacctgttccatgctaggggacggagttcggaaagggcttggttgtttcatgttcgcctgattttagagctaccttacagctagagaggagcagcagttgttcatagcaataaagaatactactacaagat

SEQ ID NO: 21578 - DNA, 2355 bp, Muscodor strobelii
  misc_feature: SGI cDNA ID NO. 567307
  misc_feature: Reduced expression when VOC is produced
  misc_feature: Encodes the peptide sequence at SEQ ID NO 21579
atgaacacacgcaatgcgccgctttcacctgtctccataggcggtagcgactggcccggcgtctccaaatatcccgccgacggcccttatcccaactcacgcggcctggcctcgcctcccaactccggcggctccagcggcatgatgaatggcaacggctttcctggcgggcccaggagcattggcggcccctcccctccgccctccgtcggccgctccagcacgtacgcgcgcagcgagagtggccgcagcatacgcgacgagaacaccgatggcatcttgggcgaccactacttctctctgaagcgatatctcgcctcgacatcgagggacggcaccgcccagccgccgcccaacaaggcccgcgacaagcttctgcgcctgtcttcagtccagttcctcgagctctccaccgatgtcttcgacgagttgatgcgaagacagatcagacggccaccgccgggcgcccctcgtgaagcacaaccgccaccattcttacagcccgagaagaacttccatcccaagcgaaaccaggcgcgccagaagctatcaacgctcggctcacccagattcagagatctcgctaccgatgtcttctgcgaactggagaggcgcattcctcatgtcatcaatggcgagcctcctcgaaggagtcagctgccacccagtaggactgggacacctgtcaacggtatggggatgccgagagggcctggcatgcggaggccgtcggatgcgagctccattcgctctgctggccctcccagatatcctcctagtgactttccccctccgccttcgcctggtctgcctcctaatgggcaatttgaccgcccacccctcaagcaatttcaaagcaacacgatcatacccaataagagtaccatggtcgaagaggatgatgatggtgcgagccccatgggctctgacaacggcgagcccgatgcactcggaatacgtggccgcgatagcaaaatggcagggccaaacgcaacaagtgaaccggacaagaaagtcatcgatgattatcagagacaagtacaagagctacgtgaaaagttggacagcatgggaaatgatttgaaaaagaaagacgaagaaatgagtaatttaatagataaagaccgaaaacgaaccgttgcttcagacacggagaagagagaatgggataacatgcgcgcaagcctggaagacaaactggctgacgctgacgaactgagcaactcgatgcgaaatgagctaaaccgtctaagagacgaccattcggccgagacacagcaactgcaagcccaaatcgaggacgcgaggcagagtagtcgcggcgcttccgactccgagatgatgagagaaaatgaagagcttcgtttggctttgcaggaacagcaagaggtcacagaagatgctcgacgggaggcgagacagttccttgaggagatgagagccctttctcaacaacatttgccatcatgggagaagcaagccgagctggagaaacaagtccagcagctagaacaagaggtccatgactggaggaaccggtatgctcgcacaaagacccagctccggaatatgcgggcatcttcgattggcctcacaatcgagcaggacgccggcaaatatctaaaagaaaagggattcacagaggcaaacggcttagtcaaggacgtccatgtcaccaaattccagatttccattgatgagctcctgaagtccgctcgcacagacgagccaggtaaggtcatcgaatatatgaaatctgtgatcgtcaatgtccggcgcattaccagagacatagaggattcccgaccagttgatgaagatgtcagtcgtcaacaacagaagctcaggactcgcgtgtccgctactgccaacaatctcattaccgcttcgaagaacttcgcttcagcagctggtctttccccggtctcattgcttgacgctgctgcatcgcatcttgttgcttccttagtagaattactacgcactgtcaaaatccgcgccaccccagccgcagaactcgaggacgacgatgacggctccatcactcctgtcgactcaactggcttcttctccaaccgcactaccactactcagccagatgattatccaaaggcagacttatcggtaaattccgcacaatttaagggtcttcgcgctggagtaagagatagtgccggttcttctgcgtacagtccgtacaattcacctagaggatcgtaccattctagctcaatgtcccgttccaacggccagccaaacggaaacatcaacatcgcatacaacggctcgaacaaaggtcttccacccgctccaaatgggcacagcatgcaagaaacaggattacaaggcctgtag

SEQ ID NO: 21579 - protein, 784 aa, Muscodor strobelii
  misc_feature: SGI Peptide ID NO. 567307
  misc_feature (1)..(763): NCBI GI: 171687779 Blast Desc: protein product [Podospora anserina] gi|170943851|emb|CAP69503.1| protein product [Podospora anserina]
  misc_feature (1)..(743): NCBI GI: 85116000 Blast Desc: NCU03115 [Neurospora crassa OR74A] gi|28926773|gb|EAA35738.1| conserved [Neurospora crassa OR74A]
  misc_feature (1)..(691): NCBI GI: 116180456 Blast Desc: CHGG_00856 [Chaetomium globosum CBS 148.51] gi|88185153|gb|EAQ92621.1| CHGG_00856 [Chaetomium globosum CBS 148.51]
  misc_feature (4)..(773): NCBI GI: 256734700 Blast Desc: NECHADRAFT_65796 [Nectria haematococca mpVI 77-13-4]
  misc_feature (3)..(739): NCBI GI: 39943246 Blast Desc: MGG_03703 [Magnaporthe grisea 70-15] gi|145009701|gb|EDJ94357.1| MGG_03703 [Magnaporthe grisea 70-15]
  misc_feature (4)..(756): NCBI GI: 46108100 Blast Desc: FG00932.1 [Gibberella zeae PH-1]
  misc_feature (32)..(771): NCBI GI: 261355255 Blast Desc: SpaA [Verticillium albo-atrum VaMs.102]
  misc_feature (36)..(753): NCBI GI: 156054332 Blast Desc: SS1G_06014 [Sclerotinia sclerotiorum 1980] gi|154703794|gb|EDO03533.1| SS1G_06014 [Sclerotinia sclerotiorum 1980]
  misc_feature (49)..(699): NCBI GI: 154321295 Blast Desc: BC1G_01522 [Botryotinia fuckeliana B05.10] gi|150852060|gb|EDN27252.1| BC1G_01522 [Botryotinia fuckeliana B05.10]
  misc_feature (8)..(691): NCBI GI: 145238514 Blast Desc: An07g08290 [Aspergillus niger] gi|134076393|emb|CAK48211.1| protein product [Aspergillus niger] gi|145284390|gb|ABP51961.1| SpaA [Aspergillus niger]
  misc_feature: Useful for introducing or modulating the production of volatile compounds
MNTRNAPLSPVSIGGSDWPGVSKYPADGPYPNSRGLASPPNSGGSSGMMNGNGFPGGPRSIGGPSPPPSVGRSSTYARSESGRSIRDENTDGILGDHYFSLKRYLASTSRDGTAQPPPNKARDKLLRLSSVQFLELSTDVFDELMRRQIRRPPPGAPREAQPPPFLQPEKNFHPKRNQARQKLSTLGSPRFRDLATDVFCELERRIPHVINGEPPRRSQLPPSRTGTPVNGMGMPRGPGMRRPSDASSIRSAGPPRYPPSDFPPPPSPGLPPNGQFDRPPLKQFQSNTIIPNKSTMVEEDDDGASPMGSDNGEPDALGIRGRDSKMAGPNATSEPDKKVIDDYQRQVQELREKLDSMGNDLKKKDEEMSNLIDKDRKRTVASDTEKREWDNMRASLEDKLADADELSNSMRNELNRLRDDHSAETQQLQAQIEDARQSSRGASDSEMMRENEELRLALQEQQEVTEDARREARQFLEEMRALSQQHLPSWEKQAELEKQVQQLEQEVHDWRNRYARTKTQLRNMRASSIGLTIEQDAGKYLKEKGFTEANGLVKDVHVTKFQISIDELLKSARTDEPGKVIEYMKSVIVNVRRITRDIEDSRPVDEDVSRQQQKLRTRVSATANNLITASKNFASAAGLSPVSLLDAAASHLVASLVELLRTVKIRATPAAELEDDDDGSITPVDSTGFFSNRTTTTQPDDYPKADLSVNSAQFKGLRAGVRDSAGSSAYSPYNSPRGSYHSSSMSRSNGQPNGNINIAYNGSNKGLPPAPNGHSMQETGLQGL

SEQ ID NO: 21580 - DNA, 4231 bp, Muscodor strobelii
  misc_feature: SGI EST ID NO. CUFF.50708.0
  misc_feature: Variant of the nucleotide sequence at SEQ ID NO 21578
cgacacttgatggtagctttgtattttcctgtcttcctttttgccgcaactcatcgctcgccgtatgaaactcgcatactccgaccgctgagacttggtttagaccagtagaaacaccatctcttggatacctcactcaggcgtttccatatactaaggcggttcataccgaccccgacagcagctgccctccccgacatcctttctctcagactgcactacagacatttgtgttctgcttgtcttagacgatattgtgcttccgatacgccgaatacacaccctaattcataattcactgaacacagcagcggaatcattaacactccccatcgctccccatcgattggagagcgccccgccagaaccgccttgtaccacgtttgcgcaggtaccgagacgcgagctctcttgaactgagttggaccggttccagatacgaaatcacgaacgcagccttaccactacgcaagttaatctcaagtaacagttcctacatagcaaccaacgccgccgtgtgggacgttgcagcgtgcaggacgagcaggactggcccgacggcacgcgaccccttttcttgcgtggcgcataatcctcctcgcatcgtctcgttgcagctttctttgttctgagcggacgaatgcccgagctcccccgcaactgcacccgccctccaacgcacaccgcaacctgaccatgaacacacgcaatgcgccgctttcacctgtctccataggcggtagcgactggcccggcgtctccaaatatcccgccgacggcccttatcccaactcacgcggcctggcctcgcctcccaactccggcggctccagcggcatgatgaatggcaacggctttcctggcgggcccaggagcattggcggcccctcccctccgccctccgtcggccgctccagcacgtacgcgcgcagcgagagtggccgcagcatacgcgacgagaacaccgatggcatcttgggcgaccactacttctctctgaagcgatatctcgcctcgacatcgagggacggcaccgcccagccgccgcccaacaaggcccgcgacaagcttctgcgcctgtcttcagtccagttcctcgagctctccaccgatgtcttcgacgagttgatgcgaagacagatcagacggccaccgccgggcgcccctcgtgaagcacaaccgccaccattcttacagcccgagaagaacttccatcccaagcgaaaccaggcgcgccagaagctatcaacgctcggctcacccagattcagagatctcgctaccgatgtcttctgcgaactggagaggcgcattcctcatgtcatcaatggcgagcctcctcgaaggagtcagctgccacccagtaggactgggacacctgtcaacggtatggggatgccgagagggcctggcatgcggaggccgtcggatgcgagctccattcgctctgctggccctcccagatatcctcctagtgactttccccctccgccttcgcctggtctgcctcctaatgggcaatttgaccgcccacccctcaagcaatttcaaagcaacacgatcatacccaataagagtaccatggtcgaagaggatgatgatggtgcgagccccatgggctctgacaacggcgagcccgatgcactcggaatacgtggccgcgatagcaaaatggcagggccaaacgcaacaagtgaaccggacaagaaagtcatcgatgattatcagagacaagtacaagagctacgtgaaaagttggacagcatgggaaatgatttgaaaaagaaagacgaagaaatgagtaatttaatagataaagaccgaaaacgaaccgttgcttcagacacggagaagagagaatgggataacatgcgcgcaagcctggaagacaaactggctgacgctgacgaactgagcaactcgatgcgaaatgagctaaaccgtctaagagacgaccattcggccgagacacagcaactgcaagcccaaatcgaggacgcgaggcagagtagtcgcggcgcttccgactccgagatgatgagagaaaatgaagagcttcgtttggctttgcaggaacagcaagaggtcacagaagatgctcgacgggaggcgagacagttccttgaggagatgagagccctttctcaacaacatttgccatcatgggagaagcaagccgagctggagaaacaagtccagcagctagaacaagaggtccatgactggaggaaccggtatgctcgcacaaagacccagctccggaatatgcgggcatcttcgattggcctcacaatcgagcaggacgccggcaaatatctaaaagaaaagggattcacagaggcaaacggcttagtcaaggacgtccatgtcaccaaattccagatttccattgatgagctcctgaagtccgctcgcacagacgagccaggtaaggtcatcgaatatatgaaatctgtgatcgtcaatgtccggcgcattaccagagacatagaggattcccgaccagttgatgaagatgtcagtcgtcaacaacagaagctcaggactcgcgtgtccgctactgccaacaatctcattaccgcttcgaagaacttcgcttcagcagctggtctttccccggtctcattgcttgacgctgctgcatcgcatcttgttgcttccttagtagaattactacgcactgtcaaaatccgcgccaccccagccgcagaactcgaggacgacgatgacggctccatcactcctgtcgactcaactggcttcttctccaaccgcactaccactactcagccagatgattatccaaaggcagacttatcggtaaattccgcacaatttaagggtcttcgcgctggagtaagagatagtgccggttcttctgcgtacagtccgtacaattcacctagaggatcgtaccattctagctcaatgtcccgttccaacggccagccaaacggaaacatcaacatcgcatacaacggctcgaacaaaggtcttccacccgctccaaatgggcacagcatgcaagaaacaggattacaaggcctgtaggaccgccttgggaatcaaacagatctcatggttgatcatatttcaagcctcgtggatgccatccgtggcgatgctcctatccaacagatcaacgacaagatcaccgctattgctgaggtcgtaggaaatgtggtggctgaaacagaacgcagcgggcgcgataatgagatgcttgagaagctttcgttttaccgccagcaattcttggaggctggtgaatacggcaaggaactggccgggcgtggccttggtgagcatgaccgcgactggcggatgtggactcaaagacttccacccattgctttcaaaatcgttcacgataccaaggagcttatggagcgtgtcgaccgcatggcatcagccccaaatgggcgcgactactcttagaaggaggagcagaaacccacccgtattacgccgtcctcgtattttcatgattttaaattccgaaacttctccaggattcgatgagataccccccattgcttttgttaacgagcaaacccatacatctatttatctactttgcctaggcttctccgactaacttctctaattcgcgcataagatgtatgcgagagaacaaccactattgcttatacataactgttcatagctttgggcgcatggctttgcatcatcgtgccgtcgttgcttcttgagcgcgctgcgtcttatgtcttactccaaggctcagagagacctcacaaccttgagctgtgtattttgagaggtaactcgttgggaggcattcgagaggcttctatgcatgtatatgcgcgtacgattgacgaggtacgagaacctcagtatatagacatgcggtggagttggtattgggggatttggtagcattgttacaaatgaagagtttaccaaccaacttcctgttagtgtttccctaccaagctatgcgtgactcgcgtgacggctgtgaaagttgagagcgcagcacgttataggtccatgcaaggaagcacttcggccgtattgtatggtccgactacaactaaagaatgactatctccccacaatacgaccgaggatctgtagaacattgcacggaaaggatataatatagtcttacgtaaagaaaatggaacatatgaagcaagatagcatcagtggtttagtggtaaaatccatcgttgccatcgatgggccccgcgttcgattcgcg

SEQ ID NO: 21581 - DNA, 360 bp, Muscodor strobelii
  misc_feature: SGI cDNA ID NO. 567308
  misc_feature: Encodes the peptide sequence at SEQ ID NO 21582
atggttgatcatatttcaagcctcgtggatgccatccgtggcgatgctcctatccaacagatcaacgacaagatcaccgctattgctgaggtcgtaggaaatgtggtggctgaaacagaacgcagcgggcgcgataatgagatgcttgagaagctttcgttttaccgccagcaattcttggaggctggtgaatacggcaaggaactggccgggcgtggccttggtgagcatgaccgcgactggcggatgtggactcaaagacttccacccattgctttcaaaatcgttcacgataccaaggagcttatggagcgtgtcgaccgcatggcatcagccccaaatgggcgcgactactcttag

SEQ ID NO: 21582 - protein, 119 aa, Muscodor strobelii
  misc_feature: SGI Peptide ID NO. 567308
  misc_feature (1)..(109): NCBI GI: 171687779 Blast Desc: protein product [Podospora anserina] gi|170943851|emb|CAP69503.1| protein product [Podospora anserina]
  misc_feature (1)..(117): NCBI GI: 39943246 Blast Desc: MGG_03703 [Magnaporthe grisea 70-15] gi|145009701|gb|EDJ94357.1| MGG_03703 [Magnaporthe grisea 70-15]
  misc_feature (5)..(119): NCBI GI: 256734700 Blast Desc: NECHADRAFT_65796 [Nectria haematococca mpVI 77-13-4]
  misc_feature (1)..(112): NCBI GI: 85116000 Blast Desc: NCU03115 [Neurospora crassa OR74A] gi|28926773|gb|EAA35738.1| conserved [Neurospora crassa OR74A]
  misc_feature (1)..(107): NCBI GI: 154321295 Blast Desc: BC1G_01522 [Botryotinia fuckeliana B05.10] gi|150852060|gb|EDN27252.1| BC1G_01522 [Botryotinia fuckeliana B05.10]
  misc_feature (1)..(107): NCBI GI: 156054332 Blast Desc: SS1G_06014 [Sclerotinia sclerotiorum 1980] gi|154703794|gb|EDO03533.1| SS1G_06014 [Sclerotinia sclerotiorum 1980]
  misc_feature (5)..(109): NCBI GI: 116180456 Blast Desc: CHGG_00856 [Chaetomium globosum CBS 148.51] gi|88185153|gb|EAQ92621.1| CHGG_00856 [Chaetomium globosum CBS 148.51]
  misc_feature (1)..(119): NCBI GI: 46108100 Blast Desc: FG00932.1 [Gibberella zeae PH-1]
  misc_feature (1)..(109): NCBI GI: 212543507 Blast Desc: cell polarity protein, [Penicillium marneffei ATCC 18224] gi|210066815|gb|EEA20908.1| cell polarity protein, [Penicillium marneffei ATCC 18224]
  misc_feature (1)..(109): NCBI GI: 238843192 Blast Desc: SpaA [Microsporum canis CBS 113480]
MVDHISSLVDAIRGDAPIQQINDKITAIAEVVGNVVAETERSGRDNEMLEKLSFYRQQFLEAGEYGKELAGRGLGEHDRDWRMWTQRLPPIAFKIVHDTKELMERVDRMASAPNGRDYS

SEQ ID NO: 21583 - DNA, 4231 bp, Muscodor strobelii; identical to SEQ ID NO: 21580
  misc_feature: SGI EST ID NO. CUFF.50708.0
  misc_feature: Variant of the nucleotide sequence at SEQ ID NO 21581

SEQ ID NO: 21584 - DNA, 1341 bp, Muscodor strobelii
  misc_feature: SGI cDNA ID NO. 567309
  misc_feature: Encodes the peptide sequence at SEQ ID NO 21585
atgcgtttgacggttgcatcttcgttgctcgtcggcctttgcctcgacattgtcgtcgcgaagccaacacatgcgctacgttccgcaacaacctaccaagaatttggcacgcttccaccgaaggcttcgaaatccatccgaacatactccgcatacatacccgacgaactcctagcaagtacacaagcgcagctgaactcatcgaatatcgtctccccaacatatgacaacacacgctcgggacaaggcataactcgagactggttgattaaagctcgagatcattggttgcatggctttgattggcggaagcatgaagcggatctgaacgcctttccgaactatatgacgacgattaatgactcgattggtgctatagatatgcactttgtcgctctgttttcgaagaaagaggatgcgatcccgcttttgtttctgcatggttggcctggcatgtcttccctttgccgcatattaattatgattttcctaattagtgcttcaggttccgtgttcgagtttgtacctgtgctgagactcgttgctgcgaaatacacgcccgagaccttgcctttccatgttatcgtaccatcgctgccagggtatggtttctcatctggaccaaccctcggccacgatattttaggcccagacgccgtgcgtatcatcaatcaagttatgctcgatctcggatttgatgcatatatcgcacaaggtggggatataggatcaggcttgattaactatatgtctgtgtacacgcccgagctgaaggcctttgctctcaaccatctcgcaaccatcggatatgggaaccctattcccacaaacttttcagatctcacccctgatgaagtgcaacatgctcacctagccctcgacttcgcggttaacggcactagctatttcaacgaacaaggtcaacgaagcgcaactctatctgcagcacttgaagctagtcctgtagcttggttagcatgggtcggcgagaagctgctcgaatggccggatcctcgcacagcgttggacatggacaccgtcatcctcctggcgagtttctactggtacacaaactcggtgccacgtgcaatttggttttaccggtgggtggcaggaaatcttcaagtcattcctggcgcatcgacagagaaaccccttggatattcatatttcccgcatgagatcctggggtttctgcccgtttctcaaaactatctgtttcccaagatggtacgatatcagcatgatctgggtggccactttcctggtctggaacagccggctgtcctattggctgatatggaagatttcgtctcgaagcagaaggcattgttctcgtaa

SEQ ID NO: 21585 - protein, 446 aa, Muscodor strobelii
  misc_feature: SGI Peptide ID NO. 567309
  misc_feature (192)..(436): Pfam Id: PF00561 Pfam Desc: alpha/beta hydrolase fold
  misc_feature (47)..(178): Pfam Id: PF06441 Pfam Desc: Epoxide hydrolase N terminus
  misc_feature (192)..(262): Pfam Id: PF00561 Pfam Desc: alpha/beta hydrolase fold
  misc_feature (53)..(151): Pfam Id: PF06441 Pfam Desc: Epoxide hydrolase N terminus
  misc_feature (35)..(440): NCBI GI: 256722348 Blast Desc: NECHADRAFT_44291 [Nectria haematococca mpVI 77-13-4]
  misc_feature (35)..(438): NCBI GI: 74040388 Blast Desc: epoxide hydrolase [Mycosphaerella pini]
  misc_feature (35)..(440): NCBI GI: 145252034 Blast Desc: epoxide hydrolase [Aspergillus niger] gi|94471802|gb|ABF21120.1| epoxide hydrolase [Aspergillus niger] gi|134083073|emb|CAL00441.1| epoxide hydrolase hyl1-Aspergillus
  misc_feature (35)..(439): NCBI GI: 239606792 Blast Desc: epoxide hydrolase hyl1 [Ajellomyces dermatitidis ER-3]
  misc_feature (35)..(440): NCBI GI: 119492149 Blast Desc: epoxide hydrolase, [Neosartorya fischeri NRRL 181] gi|119411705|gb|EAW21648.1| epoxide hydrolase, [Neosartorya fischeri NRRL 181]
  misc_feature (35)..(440): NCBI GI: 93103251 Blast Desc: epoxide hydrolase [Aspergillus niger]
  misc_feature (35)..(440): NCBI GI: 146323372 Blast Desc: epoxide hydrolase [Aspergillus fumigatus Af293] gi|129558323|gb|EAL92682.2| epoxide hydrolase, [Aspergillus fumigatus Af293] gi|159127729|gb|EDP52844.1| epoxide hydrolase,
  misc_feature (34)..(413): NCBI GI: 119501413 Blast Desc: epoxide hydrolase family protein [Neosartorya fischeri NRRL 181] gi|119415629|gb|EAW25566.1| epoxide hydrolase family protein [Neosartorya fischeri NRRL 181]
  misc_feature (20)..(442): NCBI GI: 171679216 Blast Desc: protein product [Podospora anserina] gi|170937680|emb|CAP62337.1| protein product [Podospora anserina]
  misc_feature (30)..(439): NCBI GI: 189208684 Blast Desc: epoxide hydrolase 1 [Pyrenophora tritici-repentis Pt-1C-BFP] gi|187976768|gb|EDU43394.1| epoxide hydrolase 1 [Pyrenophora tritici-repentis Pt-1C-BFP]
  misc_feature (41)..(439): SWISSPROT Homolog: EC 3.3.2.9 Microsomal epoxide hydrolase
MRLTVASSLLVGLCLDIVVAKPTHALRSATTYQEFGTLPPKASKSIRTYSAYIPDELLASTQAQLNSSNIVSPTYDNTRSGQGITRDWLIKARDHWLHGFDWRKHEADLNAFPNYMTTINDSIGAIDMHFVALFSKKEDAIPLLFLHGWPGMSSLCRILIMIFLISASGSVFEFVPVLRLVAAKYTPETLPFHVIVPSLPGYGFSSGPTLGHDILGPDAVRIINQVMLDLGFDAYIAQGGDIGSGLINYMSVYTPELKAFALNHLATIGYGNPIPTNFSDLTPDEVQHAHLALDFAVNGTSYFNEQGQRSATLSAALEASPVAWLAWVGEKLLEWPDPRTALDMDTVILLASFYWYTNSVPRAIWFYRWVAGNLQVIPGASTEKPLGYSYFPHEILGFLPVSQNYLFPKMVRYQHDLGGHFPGLEQPAVLLADMEDFVSKQKALFS

SEQ ID NO: 21586 - DNA, 1200 bp, Muscodor strobelii
  misc_feature: SGI EST ID NO. CUFF.50654.1
  misc_feature: Variant of the nucleotide sequence at SEQ ID NO 21584
tgtgctgagactcgttgctgcgaaatacacgcccgagaccttgcctttccatgttatcgtaccatcgctgccagggtatggtttctcatctggaccaaccctcggccacgatattttaggcccagacgccgtgcgtatcatcaatcaagttatgctcgatctcggatttgatgcatatatcgcacaaggtggggatataggatcaggcttgattaactatatgtctgtgtacacgcccgagctgaaggcctttgctctcaaccatctcgcaaccatcggatatgggaaccctattcccacaaacttttcagatctcacccctgatgaagtgcaacatgctcacctagccctcgacttcgcggttaacggcactagctatttcaacgaacaaggtcaacgaagcgcaactctatctgcagcacttgaagctagtcctgtagcttggttagcatgggtcggcgagaagctgctcgaatggccggatcctcgcacagcgttggacatggacaccgtcatcctcctggcgagtttctactggtacacaaactcggtgccacgtgcaatttggttttaccggtgggtggcaggaaatcttcaagtcattcctggcgcatcgacagagaaaccccttggatattcatatttcccgcatgagatcctggggtttctgcccgtttctcaaaactatctgtttcccaagatggtacgatatcagcatgatctgggtggccactttcctggtctggaacagccggctgtcctattggctgatatggaagatttcgtctcgaagcagaaggcattgttctcgtaatattcttcgtttcttcgtgatgcggcgacttcaagaaatcgagaagggaccaatgcctctgaaagcacaatttgtgctcgatgtgtgttattcttgaaaccgtgccgacacggatttgtatgagttctcagccatagtttgctttcgcgtcctgaaactgaggcgtgttccaactgtgaggtaacagtgttcctaattaaagggtgacttatcacaatgcaatcatgtgcaagtaagaaacatatatcacgagtccgatagcgcaccagacgactgaaatgctgctttgctcagccgcatcgagaccgggggcagcttgcttggactttatcacaacgcagtgatccttatgtctcggtgagcgatcgctccaatgaggcacccta

SEQ ID NO: 21587 - DNA, 3033 bp, Muscodor strobelii
  misc_feature: SGI cDNA ID NO. 567310
  misc_feature: Elevated expression when VOC is produced
  misc_feature: Encodes the peptide sequence at SEQ ID NO 21588
atggcggcgaagacttactcaactgagcgccctcagggcaaggaacacttcgtcctctatcccaagggattcatcgttcttcgtatcgttcaactcgtgcttggaattatcgttctaggcttgactgcgtactctctagcagtgtttcctattaccggtgccgctctcggtatcttcacagctatcgttaccttaataagcagcatatatgttctcgtcgcgcacttcggtcctcctagggcgtataactactgggcaatccttggactggatatctttttagttcttttctggttgatatcattcgccgttctcgcatcacaagccgccgcagtcctcagcgtggcagcatattatgatggcgattcctacttcaatgactatgttaccattggctatacctttggtggcatcgtcgccgctgccgcgggtattggcgctcttctctgggtcttctatattgtaaccctcgttctacacagcattggccttcatcgtcaccgaaaggctggtctccatgctatgcctgggaaagccgccaccacccccgaggctggcgtcgcagctggtgtcccggccggcggcgagaaagttgagatgcagccgcagcagccccaacaagctcagcagccccagacctattatgcaaatcaagcagtttcgcctcagcagaattatgtctctccgcaacagggctatgctgctcctgagcagcagggttaccctccacagcagcaacagcagcagacttcttattatccgcaatcgtctccatctccttcgccaattgccggtggtgctcccgtcagcacctcggctgtctcgttgccgacaaattttcccaagagcatcaggcatgagcgacatagccgagaaaaaaacaggaagcccagccctccaaagcatccttattctgtccttgagtcacttaaatattacactgggtccgacgaagagctgatatggggaccgttttacaagcgattccgggatgctcgtatcaagaatccgaaatggaaggacttcagtttacatagtctttggagcacaattccggctactgcccagtctaggccagggataatcgagagagcatggaatcgtattattggcgttgatggcgctccgaacgtcgcgagaccaccagaaatcacacaagaggatctgagaaaggttacaacgaagccaaggagacgcagacatcgccgtcacgacgacgacgacgacgatgaagagaccaaagaaatggaggaacaagataagaaagataagcacatatttgtcgattcttgggagtcatacactggacttcatcttgacaatagcccagccaagattgattttaccgaatggtttggacgatggaaacatccagctgactacgacgatgatttctacaacttgctatatgggacgctttttggcaaaattatagatttggtggaccggttttttaataatcatgtgcacctcgaggattatttagatacgaaaggcgaacactccgtatgggatgtcccaatgactgaacaattcgtgcaatatacccgcgtggtcgcacatgaagatgctggttatgtcaaatggcacgatattctcagcgacccccaacaccgcaaatggttatgtgtcggcattatcgcgcagatcatcgagaggaagatcttcaaccacgtcttgtttggagccacaaagaaattcgagatggatttgaatgagcatgatttgcactggcttatgtcggaaggtttcacgcgcaagcatggtcgtatccacatcgtgcgcgaagcaatcaaccatggtgatggtcttgtacccgaggccttttgggactcagtagatgaccttgccggccattctttcatcattttcaagcctctgttcatgatgatgtgcctagccactgggaaaactccagaagaggaaggacccaaactgttacaagaactccacacgatcatggcgcttgcaggatatttccacatttgcatggccatctcgcccgacgtatttcacattctctcagccacgcctggtgcgcgcttcgattggggagaagagcaagcggtggacacgaaactctacgaaaagtcgagagatttctacgaagatcataacgagcgcttcaggctacttggaaaggctcacgtcgaacagaacaaagctttcatcactgctgcaaaaccatatgtgaaagcacacgaactcagccaaatcgagcacatgcctaaagatgaacaagcattccgtgtagcgcagcatcatcgtctccgaggtggcaaggtgatgtacgctgtcttccccaagttgacgcggtatagagctatgaatctcggcgagttcgcggatatggataagcctgccacatcagaactgatgcaacagaagcaagagggcatgagcgttgttttgattttcaggtgcatggtcgtctactatcagggtctcatgtaccctcaagactatgatgaggatggcgccccgcttgaacatcacctccatcatcttgagatgcaacgtagcactgcttttggtttgggcccctacgttcgccgctattggaacggcgacggaactgtcaaccgttgcattcgctggcctttgtggtctgaacactacgacctgttctggcccttttggctcatctttaccgtattctccctggcgcttgccaagcataatggggttgatgtgctctctcagttggtttacgatctcatctacgctgccgtctttgtcctcgcacgtcttcttggctaccattggtttgatgggcgaagaagcttctttaaggtgatgttcactggcctatacatttcagggataatggtcctcttgaagtggacgttttcgcaacaagactcgtactcgaaaatcattggtgatgcactcggctatgttgagggccaccttcgcctctttacctacaactttgcggacaccgctcaagacttccgagtcttcggccctcatcgagcctggggaaggctcatcaagctgttctccgttcactggccctttgctcgggagtga

SEQ ID NO: 21588 - protein, 1010 aa, Muscodor strobelii
  misc_feature: SGI Peptide ID NO. 567310
  misc_feature (10)..(177): NCBI GI: 171687781 Blast Desc: protein product [Podospora anserina] gi|170943852|emb|CAP69504.1| protein product [Podospora anserina]
  misc_feature (27)..(221): NCBI GI: 156051270 Blast Desc: SS1G_07042 [Sclerotinia sclerotiorum 1980] gi|154704820|gb|EDO04559.1| SS1G_07042 [Sclerotinia sclerotiorum 1980]
  misc_feature (34)..(280): NCBI GI: 261355256 Blast Desc: [Verticillium albo-atrum VaMs.102]
  misc_feature (457)..(852): NCBI GI: 154320734 Blast Desc: BC1G_01839 [Botryotinia fuckeliana B05.10] gi|150853528|gb|EDN28720.1| BC1G_01839 [Botryotinia fuckeliana B05.10]
  misc_feature (457)..(785): NCBI GI: 156040441 Blast Desc: SS1G_12237 [Sclerotinia sclerotiorum 1980] gi|154696293|gb|EDN96031.1| SS1G_12237 [Sclerotinia sclerotiorum 1980]
  misc_feature (1)..(176): NCBI GI: 85115975 Blast Desc: NCU03109 [Neurospora crassa OR74A] gi|28926767|gb|EAA35732.1| [Neurospora crassa OR74A]
  misc_feature (14)..(180): NCBI GI: 154316077 Blast Desc: BC1G_03623 [Botryotinia fuckeliana B05.10] gi|150846410|gb|EDN21603.1| BC1G_03623 [Botryotinia fuckeliana B05.10]
  misc_feature (460)..(836): NCBI GI: 46105314 Blast Desc: FG00285.1 [Gibberella zeae PH-1]
  misc_feature (460)..(707): NCBI GI: 85113908 Blast Desc: NCU02077 [Neurospora crassa OR74A] gi|28926392|gb|EAA35368.1| [Neurospora crassa OR74A]
  misc_feature (45)..(178): NCBI GI: 116180458 Blast Desc: CHGG_00857 [Chaetomium globosum CBS 148.51] gi|88185154|gb|EAQ92622.1| CHGG_00857 [Chaetomium globosum CBS 148.51]
  misc_feature: Useful for introducing or modulating the production of volatile compounds
MAAKTYSTERPQGKEHFVLYPKGFIVLRIVQLVLGIIVLGLTAYSLAVFPITGAALGIFTAIVTLISSIYVLVAHFGPPRAYNYWAILGLDIFLVLFWLISFAVLASQAAAVLSVAAYYDGDSYFNDYVTIGYTFGGIVAAAAGIGALLWVFYIVTLVLHSIGLHRHRKAGLHAMPGKAATTPEAGVAAGVPAGGEKVEMQPQQPQQAQQPQTYYANQAVSPQQNYVSPQQGYAAPEQQGYPPQQQQQQTSYYPQSSPSPSPIAGGAPVSTSAVSLPTNFPKSIRHERHSREKNRKPSPPKHPYSVLESLKYYTGSDEELIWGPFYKRFRDARIKNPKWKDFSLHSLWSTIPATAQSRPGIIERAWNRIIGVDGAPNVARPPEITQEDLRKVTTKPRRRRHRRHDDDDDDEETKEMEEQDKKDKHIFVDSWESYTGLHLDNSPAKIDFTEWFGRWKHPADYDDDFYNLLYGTLFGKIIDLVDRFFNNHVHLEDYLDTKGEHSVWDVPMTEQFVQYTRVVAHEDAGYVKWHDILSDPQHRKWLCVGIIAQIIERKIFNHVLFGATKKFEMDLNEHDLHWLMSEGFTRKHGRIHIVREAINHGDGLVPEAFWDSVDDLAGHSFIIFKPLFMMMCLATGKTPEEEGPKLLQELHTIMALAGYFHICMAISPDVFHILSATPGARFDWGEEQAVDTKLYEKSRDFYEDHNERFRLLGKAHVEQNKAFITAAKPYVKAHELSQIEHMPKDEQAFRVAQHHRLRGGKVMYAVFPKLTRYRAMNLGEFADMDKPATSELMQQKQEGMSVVLIFRCMVVYYQGLMYPQDYDEDGAPLEHHLHHLEMQRSTAFGLGPYVRRYWNGDGTVNRCIRWPLWSEHYDLFWPFWLIFTVFSLALAKHNGVDVLSQLVYDLIYAAVFVLARLLGYHWFDGRRSFFKVMFTGLYISGIMVLLKWTFSQQDSYSKIIGDALGYVEGHLRLFTYNFADTAQDFRVFGPHRAWGRLIKLFSVHWPFARE

SEQ ID NO: 21589 - DNA, 1256 bp, Muscodor strobelii
  misc_feature: SGI EST ID NO. CUFF.50663.0
  misc_feature: Variant of the nucleotide sequence at SEQ ID NO 21587
tctgcatattcatattgaacccaagatctcgggggcaatcctctctgcttttctccatctcttttgtatcttgatttattagaatcttcttctcatctgaaatcaagtttgccctttcgccgtttgctacataggtcagatctcgaatatggcggcgaagacttactcaactgagcgccctcagggcaaggaacacttcgtcctctatcccaagggattcatcgttcttcgtatcgttcaactcgtgcttggaattatcgttctaggcttgactgcgtactctctagcagtgtttcctattaccggtgccgctctcggtatcttcacagctatcgttaccttaataagcagcatatatgttctcgtcgcgcacttcggtcctcctagggcgtataactactgggcaatccttggactggatatctttttagttcttttctggttgatatcattcgccgttctcgcatcacaagccgccgcagtcctcagcgtggcagcatattatgatggcgattcctacttcaatgactatgttaccattggctatacctttggtggcatcgtcgccgctgccgcgggtattggcgctcttctctgggtcttctatattgtaaccctcgttctacacagcattggccttcatcgtcaccgaaaggctggtctccatgctatgcctgggaaagccgccaccacccccgaggctggcgtcgcagctggtgtcccggccggcggcgagaaagttgagatgcagccgcagcagccccaacaagctcagcagccccagacctattatgcaaatcaagcagtttcgcctcagcagaattatgtctctccgcaacagggctatgctgctcctgagcagcagggttaccctccacagcagcaacagcagcagacttcttattatccgcaatcgtctccatctccttcgccaattgtgagccaaccgacaggtagctcttatatgggctatcaacaaactcagccacaacatggtgatcaacaaccccaggaattatttaatactcaccctacaacggtccatgaggcacctaacaatcaacattaacgccgttgtagaagaaagctatgtggaagttgatcttgaatcatctagagctcgcacactgtctctcatgtgcgagctgaggtcttgccctgagatgtacaaagggagaaaacggggtgtaacaacaggcaaccatactagatacccaaatttaatataatatttctcgtcctacaccccatccttg

SEQ ID NO: 21590 - DNA, 1056 bp, Muscodor strobelii
  misc_feature: SGI cDNA ID NO. 567311
  misc_feature: Encodes the peptide sequence at SEQ ID NO 21591
atgtctcacaacatcttaatcaccggtgcctcaggttatcttggaggtagcttgcttgcacgatggaaagacgcagacctgcctgcttacaacaaactgtttacccttgtacgcactgatagtcaagcagaggctgttaagaagtatggcgccgagcctcttaccttcaatgcttttgacgaagtcgcaattcgagcggctgtgatcgagaatgacatcactattgtgtattggatgattcttgcagaggaaactgaagtgatgcagtattatataagggcgttggctgaagtgaagaagaagtccggtcttgaggtgcatttcttgcagacttcaggtgccaaggccttctcgagccatgctggtgctccagtcgataaaccccttcttgacaccgacccaaatctgtatgaccttcaaaaagagcaggctcggactgcaccacatgcgtggatgcgacttgctgcaactgtcaacaacacagttatcgaaaaggccgagaagcttggcgtgcggacctacatctttgtgccatgtatcgtctacggcaaaggtgaggggtttggtaatctgacttcaattcagactgttgcaatagtgcgtgcggcactagcaatgaaacgtgtctatcgcaccgatgctgatcggcctgtgtcatggccggtgtgtcatttaagcgacaatacagcaatgtatttgcagcttatgcgcaggatcttgtctgatgcaaaccctagctttggcgaaaatggatactatctagctgcatcagggagcattgcctgggacgacctctatgaggccatggcgagagcgctgttaaatcgcggggtcattacgactgagtcagtggccatggctgatgatcaggtcctcgagaccatggccaaagttctgggatgcccggctgagttagtaccagtaatgatcggaggaaattgctcatttacagcggagcgtggggccaaggagctcgactggcgaccagtttataagcctgagcatattctcgaggcagccgatgaagaagtcgagcttgtgcttaagaatatttag

SEQ ID NO: 21591 - protein, 351 aa, Muscodor strobelii
  misc_feature: SGI Peptide ID NO. 567311
  misc_feature (7)..(45): Pfam Id: PF07993 Pfam Desc: Male sterility protein
  misc_feature (1)..(351): NCBI GI: 145250903 Blast Desc: An15g04300 [Aspergillus niger] gi|134082490|emb|CAK97297.1| protein product [Aspergillus niger]
  misc_feature (1)..(351): NCBI GI: 238502221 Blast Desc: conserved [Aspergillus flavus NRRL3357] gi|220691154|gb|EED47502.1| conserved [Aspergillus flavus NRRL3357]
  misc_feature (1)..(351): NCBI GI: 169623506 Blast Desc: SNOG_14995 [Phaeosphaeria nodorum SN15] gi|111056418|gb|EAT77538.1| SNOG_14995 [Phaeosphaeria nodorum SN15]
  misc_feature (3)..(351): NCBI GI: 145247692 Blast Desc: An12g10490 [Aspergillus niger] gi|134080837|emb|CAK41396.1| protein product [Aspergillus niger]
  misc_feature (1)..(348): NCBI GI: 119487610 Blast Desc: NFIA_030730 [Neosartorya fischeri NRRL 181] gi|119410694|gb|EAW20640.1| conserved [Neosartorya fischeri NRRL 181]
  misc_feature (1)..(351): NCBI GI: 256728158 Blast Desc: NECHADRAFT_97774 [Nectria haematococca mpVI 77-13-4]
  misc_feature (1)..(350): NCBI GI: 242800157 Blast Desc: conserved [Talaromyces stipitatus ATCC 10500] gi|218716874|gb|EED16295.1| conserved [Talaromyces stipitatus ATCC 10500]
  misc_feature (1)..(350): NCBI GI: 145240573 Blast Desc: An08g08190 [Aspergillus niger] gi|134077456|emb|CAK40021.1| protein product [Aspergillus niger]
  misc_feature (2)..(351): NCBI GI: 67904330 Blast Desc: AN9152.2 [Aspergillus nidulans FGSC A4] gi|40742795|gb|EAA61985.1| AN9152.2 [Aspergillus nidulans FGSC A4] gi|259485428|tpe|CBF82442.1| TPA: conserved [Aspergillus FGSC
  misc_feature (1)..(350): NCBI GI: 212540926 Blast Desc: NAD dependent epimerase/dehydratase family protein [Penicillium marneffei ATCC 18224] gi|210067917|gb|EEA22009.1| NAD dependent epimerase/dehydratase family protein [Penicillium
MSHNILITGASGYLGGSLLARWKDADLPAYNKLFTLVRTDSQAEAVKKYGAEPLTFNAFDEVAIRAAVIENDITIVYWMILAEETEVMQYYIRALAEVKKKSGLEVHFLQTSGAKAFSSHAGAPVDKPLLDTDPNLYDLQKEQARTAPHAWMRLAATVNNTVIEKAEKLGVRTYIFVPCIVYGKGEGFGNLTSIQTVAIVRAALAMKRVYRTDADRPVSWPVCHLSDNTAMYLQLMRRILSDANPSFGENGYYLAASGSIAWDDLYEAMARALLNRGVITTESVAMADDQVLETMAKVLGCPAELVPVMIGGNCSFTAERGAKELDWRPVYKPEHILEAADEEVELVLKNI

SEQ ID NO: 21592 - DNA, 1318 bp, Muscodor strobelii
  misc_feature: SGI EST ID NO. CUFF.50679.0
  misc_feature: Variant of the nucleotide sequence at SEQ ID NO 21590
aggcagtagccaattactgtgttccatcattctcgaataggaatatcctcgtacttaaatccccacatagagactagagtaaccagcgcaatcgcgacatcaacaccatcatgtctcacaacatcttaatcaccggtgcctcaggttatcttggaggtagcttgcttgcacgatggaaagacgcagacctgcctgcttacaacaaactgtttacccttgtacgcactgatagtcaagcagaggctgttaagaagtatggcgccgagcctcttaccttcaatgcttttgacgaagtcgcaattcgagcggctgtgatcgagaatgacatcactattgtgtattggatgattcttgcagaggaaactgaagtgatgcagtattatataagggcgttggctgaagtgaagaagaagtccggtcttgaggtgcatttcttgcagacttcaggtgccaaggccttctcgagccatgctggtgctccagtcgataaaccccttcttgacaccgacccaaatctgtatgaccttcaaaaagagcaggctcggactgcaccacatgcgtggatgcgacttgctgcaactgtcaacaacacagttatcgaaaaggccgagaagcttggcgtgcggacctacatctttgtgccatgtatcgtctacggcaaaggtgaggggtttggtaatctgacttcaattcagactgttgcaatagtgcgtgcggcactagcaatgaaacgtgtctatcgcaccgatgctgatcggccttcatggccggtgtgtcatttaagcgacaatacagcaatgtatttgcagcttatgcgcaggatcttgtctgatgcaaaccctagctttggcgaaaatggatactatctagctgcatcagggagcattgcctgggacgacctctatgaggccatggcgagagcgctgttaaatcgcggggtcattacgactgagtcagtggccatggctgatgatcaggtcctcgagaccatggccaaagttctgggatgcccggctgagttagtaccagtaatgatcggaggaaattgctcatttacagcggagcgtggggccaaggagctcgactggcgaccagtttataagcctgagcatattctcgaggcagccgatgaagaagtcgagcttgtgcttaagaatatttagaactgacttcaaatctgtaaacatgcaaaagatagcacgacgttacatcagctatcgtgaaacaagagctaccagtgtagatctcctgcttaatggcagttctcatcaactgtttaggaaaacggtgttttgccttcgtatacatcatgttcagg

SEQ ID NO: 21593 - DNA, 939 bp, Muscodor strobelii
  misc_feature: SGI cDNA ID NO. 567312
  misc_feature: Encodes the peptide sequence at SEQ ID NO 21594
atgatgacagccacattccacacgcccaacaagaagctcacttggctcattacgggctgctcctctgggttcggtttatcacttgctcgaatagtccaagcaggtggacataccttgatagccacctcccgcaatccatcgcgaacgcctgaaatcgtctctgaggtagaaagcaaaggcggcagatggcttgagttggatgcaaatgatctcagcagcggatcgttcatcgacggtcttgagaagtccggtattcaaattgatgtgcttatcaacaacgccggtttctgtatccactctccaatagaaactgctaccgaagatgagatacgggcacaaatggagaccatgtatttcggaccacttcgattgatcaaagcggtcatacctcatatgcgcaagaggcagtttggcatcattgccaatttcagctccggcgcagctcttgaaggagctccaactatgggcgtctatgccggtgcaaaagcagggattgacggtaggtttctcctgggaaaaggcttaaatctttggctaatgaacaataatacaggcatggctaaaatcctagcgaaagaagtagcagcgttcaacattcgtgttctgactatagttcttgggacttttaatactagcttcggtagcaacgcgatttttggaaagagcccacttcctaacgattacaaaggctctatgacagagaagatgctagagtacctttcatcgggaaaggtgccgatcaatggggataaagacaaagccatgaaggctgtctatgacctggtagtaggagaaggatttggcgctggaaaggaagctgaacgattgctcccattgggaacagatatgacgatgagggtcaagacaagccgcgactatttacaacacagtcttgatgttttcggtacggtcactgatagtgttgcgattgacaaatga

SEQ ID NO: 21594 - protein, 312 aa, Muscodor strobelii
  misc_feature: SGI Peptide ID NO. 567312
  misc_feature (13)..(177): Pfam Id: PF00106 Pfam Desc: short chain dehydrogenase
  misc_feature (14)..(181): Pfam Id: PF08659 Pfam Desc: KR domain
  misc_feature (13)..(167): Pfam Id: PF00106 Pfam Desc: short chain dehydrogenase
  misc_feature (2)..(312): NCBI GI: 67904280 Blast Desc: AN9127.2 [Aspergillus nidulans FGSC A4] gi|40742770|gb|EAA61960.1| AN9127.2 [Aspergillus nidulans FGSC A4] gi|259485457|tpe|CBF82495.1| TPA: short-chain oxidoreductase,
  misc_feature (11)..(312): NCBI GI: 121716176 Blast Desc: short-chain oxidoreductase, [Aspergillus clavatus NRRL 1] gi|119403854|gb|EAW14271.1| short-chain oxidoreductase, [Aspergillus clavatus NRRL 1]
  misc_feature (10)..(312): NCBI GI: 169607250 Blast Desc: SNOG_06683 [Phaeosphaeria nodorum SN15] gi|160707186|gb|EAT86514.2| SNOG_06683 [Phaeosphaeria nodorum SN15]
  misc_feature (10)..(312): NCBI GI: 119495140 Blast Desc: short-chain oxidoreductase, [Neosartorya fischeri NRRL 181] gi|119412523|gb|EAW22464.1| short-chain oxidoreductase, [Neosartorya fischeri NRRL 181]
  misc_feature (9)..(312): NCBI GI: 44889986 Blast Desc: short-chain oxidoreductase, [Aspergillus fumigatus]
  misc_feature (9)..(312): NCBI GI: 159131519 Blast Desc: short-chain oxidoreductase, [Aspergillus fumigatus A1163]
  misc_feature (9)..(312): NCBI GI: 70996020 Blast Desc: short-chain oxidoreductase [Aspergillus fumigatus Af293] gi|66850400|gb|EAL90727.1| short-chain oxidoreductase, [Aspergillus fumigatus Af293]
  misc_feature (12)..(312): NCBI GI: 169768288 Blast Desc: [Aspergillus oryzae RIB40] gi|83766472|dbj|BAE56612.1| protein product [Aspergillus oryzae]
  misc_feature (38)..(312): NCBI GI: 238497572 Blast Desc: short-chain oxidoreductase, [Aspergillus flavus NRRL3357] gi|220693295|gb|EED49640.1| short-chain oxidoreductase, [Aspergillus flavus NRRL3357]
  misc_feature (5)..(312): NCBI GI: 255934828 Blast Desc: Pc12g16430 [Penicillium chrysogenum Wisconsin 54-1255] gi|211583060|emb|CAP81270.1| Pc12g16430 [Penicillium chrysogenum Wisconsin 54-1255]
  misc_feature (14)..(213): SWISSPROT Homolog: EC 1.1.1.100 3-oxoacyl-[acyl-carrier-protein] reductase
MMTATFHTPNKKLTWLITGCSSGFGLSLARIVQAGGHTLIATSRNPSRTPEIVSEVESKGGRWLELDANDLSSGSFIDGLEKSGIQIDVLINNAGFCIHSPIETATEDEIRAQMETMYFGPLRLIKAVIPHMRKRQFGIIANFSSGAALEGAPTMGVYAGAKAGIDGRFLLGKGLNLWLMNNNTGMAKILAKEVAAFNIRVLTIVLGTFNTSFGSNAIFGKSPLPNDYKGSMTEKMLEYLSSGKVPINGDKDKAMKAVYDLVVGEGFGAGKEAERLLPLGTDMTMRVKTSRDYLQHSLDVFGTVTDSVAIDK

SEQ ID NO: 21595 - DNA, 426 bp, Muscodor strobelii
  misc_feature: SGI EST ID NO. CUFF.50684.0
  misc_feature: Variant of the nucleotide sequence at SEQ ID NO 21593
atgaaggctgtctatgacctggtagtaggagaaggatttggcgctggaaaggaagctgaacgattgctcccattgggaacagatatgacgatgagggtcaagacaagccgcgactatttacaacacagtcttgatgttttcggtacggtcactgatagtgttgcgattgacaaatgagggccgctactgatgaggctttatatctattttcatgaaagctcgataactctagcaatgctatccatattagcaaattgatgcacgaatcacttgctacacgtcgctgcgtcatcagtcacgggaatgaagtgtttggacgcgatcttgtcggtttaataatgtacaaactcaattccaagaggaaatccgtatatgattactcatctacctcggcctatgtcggtcagactatgcacaatagccaag

SEQ ID NO: 21596 - DNA, 1458 bp, Muscodor strobelii
  misc_feature: SGI cDNA ID NO. 567313
  misc_feature: Encodes the peptide sequence at SEQ ID NO 21597
atggcgcagtacgactcataccagacgtctctgacggtgcgctattgcagcccggcaatgtcgaaactgttcagccaacgctctcgtcactccacctggcgcaaactgtggctcatgctcgcccagagtgagaaggagcttggaatcgagactatcactgctgatgcattgaaagaaatggaggccaaccttacggtcacagatgaagactttgagactgctcgcgttgaagagaagaagcgcagacatgatgtcatggcccatgtccatgccttcggtgtcgttgccccttctgctgctggcattattcactacggagccacaagctgcttcgtcaccgacaacacagagctcatcctcatgcgggaagctctagaccttctgctatccagagtggccaaggtgttacacaacttaagacaattcgcaatgaaatggcaagccgagcctactctcagctggacacatctccaagctgcccagcttcagtctgtaggaaagagagcgtcacaatgggctcaagatcttctatttgatcttgaaagcatcgagcacgtccgggaaaccctcaagtttcgaggcgcacagggaactaccggaactcaggcttcattcttagagatcttcaacggcgactctaagaaatgcgatgagcttaatgcgctgctctgcgagaaagcagggtttcccagttgctaccctgtttcgtcacagacgtatacacgtaaggtcgacctcatggtagcaaatgccgtagctggacttggagctacagcgcaaaaaatatgtactgatatccgtctactcgcgaattggaaggagatcgaggagccctttgagtctacgcagattgggtcttcagcaatggcatacaagcgtaatccaatgcgctcagaacgtatctgctctctttcaagagagctcgtatccaagcctattaactttgcaaacacttactccaaccaatggatggaaagaactctggacgacagtgcaatccgccgtattgacatccctgagatgttcctcctcgccgatgcgattctccttggcctggataacgtgaccgacggactagttgtgtaccctcagcgcattcgaagtcgcgtccaggaggagcttccattcatgatcacagagagtataattatgaagctagtcgccaagggcgagtcaagacaagaagcacacgagcaaattcgcgtcctctcacaccaagccggttacgccgtcaagcacgagggtaaatcaaacgatcttatctcgcggataaagagcacagaatacttcaagcctgtctggggtgagattgatgacatgctgcgacccgaactctacatcggccgcagtgcagagatcgtcgagagattttgcggagagaacggcatcgtggcggagaagctcaagcgctacgaaagctccatcggtaaactgggtacggctgagctttcggtgtaa

SEQ ID NO: 21597 - protein, 485 aa, Muscodor strobelii
  misc_feature: SGI Peptide ID NO. 567313
  misc_feature (13)..(310): Pfam Id: PF00206 Pfam Desc: Lyase
  misc_feature (4)..(485): NCBI GI: 169606650 Blast Desc: SNOG_06372 [Phaeosphaeria nodorum SN15] gi|111065083|gb|EAT86203.1| SNOG_06372 [Phaeosphaeria nodorum SN15]
  misc_feature (3)..(485): NCBI GI: 256726084 Blast Desc: NECHADRAFT_43521 [Nectria haematococca mpVI 77-13-4]
  misc_feature (2)..(485): NCBI GI: 189191150 Blast Desc: adenylosuccinate lyase [Pyrenophora tritici-repentis Pt-1C-BFP] gi|187973520|gb|EDU41019.1| adenylosuccinate lyase [Pyrenophora tritici-repentis Pt-1C-BFP]
  misc_feature (1)..(485): NCBI GI: 46134091 Blast Desc: FG09185.1 [Gibberella zeae PH-1]
  misc_feature (1)..(485): NCBI GI: 145615982 Blast Desc: MGG_03645 [Magnaporthe grisea 70-15] gi|145009767|gb|EDJ94423.1| MGG_03645 [Magnaporthe grisea 70-15]
  misc_feature (1)..(485): NCBI GI: 238842614 Blast Desc: adenylosuccinate lyase [Microsporum canis CBS 113480]
  misc_feature (1)..(485): NCBI GI: 261359473 Blast Desc: adenylosuccinate lyase [Verticillium albo-atrum VaMs.102]
  misc_feature (1)..(485): NCBI GI: 156060605 Blast Desc: SS1G_02442 [Sclerotinia sclerotiorum 1980] gi|154699849|gb|EDN99587.1| SS1G_02442 [Sclerotinia sclerotiorum 1980]
  misc_feature (1)..(485): NCBI GI: 154314084 Blast Desc: BC1G_04985 [Botryotinia fuckeliana B05.10] gi|150849131|gb|EDN24324.1| BC1G_04985 [Botryotinia fuckeliana B05.10]
  misc_feature (1)..(485): NCBI GI: 164425269 Blast Desc: adenylosuccinate lyase [Neurospora crassa OR74A] gi|157070859|gb|EAA33763.2| adenylosuccinate lyase [Neurospora crassa OR74A]
  misc_feature (1)..(461): SWISSPROT Homolog: EC 4.3.2.2 Adenylosuccinate lyase
MAQYDSYQTSLTVRYCSPAMSKLFSQRSRHSTWRKLWLMLAQSEKELGIETITADALKEMEANLTVTDEDFETARVEEKKRRHDVMAHVHAFGVVAPSAAGIIHYGATSCFVTDNTELILMREALDLLLSRVAKVLHNLRQFAMKWQAEPTLSWTHLQAAQLQSVGKRASQWAQDLLFDLESIEHVRETLKFRGAQGTTGTQASFLEIFNGDSKKCDELNALLCEKAGFPSCYPVSSQTYTRKVDLMVANAVAGLGATAQKICTDIRLLANWKEIEEPFESTQIGSSAMAYKRNPMRSERICSLSRELVSKPINFANTYSNQWMERTLDDSAIRRIDIPEMFLLADAILLGLDNVTDGLVVYPQRIRSRVQEELPFMITESIIMKLVAKGESRQEAHEQIRVLSHQAGYAVKHEGKSNDLISRIKSTEYFKPVWGEIDDMLRPELYIGRSAEIVERFCGENGIVAEKLKRYESSIGKLGTAELSV

SEQ ID NO: 21598 - DNA, 888 bp, Muscodor strobelii
  misc_feature: SGI EST ID NO. CUFF.50690.0
  misc_feature: Variant of the nucleotide sequence at SEQ ID NO 21596
agcaatcaatccatgcagcgcgaactagatttacgtggggtactatttatttttggtgggagatatttttcctatatctaggggacctcagtccacaggtatgaagctgtgacaaagaaacaatttggcaacatcagggaaagttccaattacaacaagatggcgcagtacgactcataccagacgtctctgacggtgcgctattgcagcccggcaatgtcgaaactgttcagccaacgctctcgtcactccacctggcgcaaactgtggctcatgctcgcccagagtgagaaggagcttggaatcgagactatcactgctgatgcattgaaagaaatggaggccaaccttacggtcacagatgaagactttgagactgctcgcgttgaagagaagaagcgcagacatgatgtcatggcccatgtccatgccttcggtgtcgttgccccttctgctgctggcattattcactacggagccacaagctgcttcgtcaccgacaacacagagctcatcctcatgcgggaagctctagaccttctgctatccagagtggccaaggtgttacacaacttaagacaattcgcaatgaaatggcaagccgagcctactctcagctggacacatctccaagctgcccagcttcagtctgtaggaaagagagcgtcacaatgggctcaagatcttctatttgatcttgaaagcatcgagcacgtccgggaaaccctcaagtttcgaggcgcacagggaactaccggaactcaggcttcattcttagagatcttcaacggcgactctaagaaatgcgatgagcttaatgcgctgctctgcgagaaagcagggtttcccagttgctaccctgtttcgtcacagacgtatacacgtaag

SEQ ID NO: 21599 - DNA, 1653 bp, Muscodor strobelii
  misc_feature: SGI cDNA ID NO. 567314
  misc_feature: Encodes the peptide sequence at SEQ ID NO 21600
atgagtgctcacggttcccccgaggcacccaagatcgcgaatccggatgaaggtctgtcacagccgctggaagatggacgcgctcctgagcacgacctggagggtctcacgctgtacgagaagaaatgcgtccttgtgaatcgagagatcgaccgcatgggtatggggaggtaccaatggtatatatggtgcctgtgtggattcggatacatgattgatcttctctgggcccaagcttttggtctcgtactcagtcctgttcagcaagagttcggatttggtgatgggcagtcgggaaatatctctgcgagtttcagcgctgggttaacggccggtgcattcgtctggggtttcctatcggattggattggcaggcgctgggcattcaacttgacctgtttgttctcatcggtgttcggattagcattgggcgcctcatccaattacaatacgttgcttgttctgacggcgtttgttggatttggcgttggtgggaacgtccccattgatactaccattacgctagagttcatccctcagaataaacgcttcctactcgccctgctttcggtattccaacccatcggcgtcgtaatttgcagcgcaatcgcgtttggcttcatcccataccgatcgtgctcaccgaatttctccgaaccgaatcccctcccatcatgtttcgatcctgatctagcgcctggcgcagattgttgttctcgagcatccaatatgggatggcgctacttcttgttcactctcggcggcatcactctattcgtcttcttcctccgctttgccgtgttcaacttccacgagagcccgaagttcctcatctacaaaggccgggatgacgaagccatcaaggttttgcagcacattgcggacaaaaacatgaaaccttgcaatttgacgctcgcagatttcgaaagacttaccaccgaggaggcttccgttggcaccacgtcgactacgagcggtgtgaagaaacttgcaaaagaaaaggtagcaacgacgtttgatgtcgagagatatcgcatgttgtttagcggatggaatatgacgagactcacgcttttggtttggttgacgtatatctttgatttctggggattcacggtcgccggcacatatctcccgcgcatcctcgcattgaagaatgggtctgcttcgcagtccttagaattcacttacgcctcttacatctatacatatatccccggtatctttggtgtgcttctcggctcagtgatgtaccgcattccttctttcggacgaaaatggactatgactctggcgtcgggactcatgggcgcatctattttcttgttcgccaccgtggataccgtcgccaagagactcgggctcttcactttagagtactttttccagagcatgttcaacgctgtgctgtatggatggactcccgaggcatttcctgcgcctgtaaggggtactgcttgtggtgttgcaagcttctggggtagactatttggcattgtcagtcctcttattgcgcagaagctctacggcgagggagaaggcgggcatgtcaattccgtgttatatcttgcgggtggcgtcacgcttggatgtgttatcactacagcattgttacctgataaactaatggagacaaaagacgagaggtcatag

SEQ ID NO: 21600 - protein, 550 aa, Muscodor strobelii
  misc_feature: SGI Peptide ID NO. 567314
  misc_feature (66)..(502): Pfam Id: PF07690 Pfam Desc: Major Facilitator Superfamily
  misc_feature (59)..(547): Pfam Id: PF00083 Pfam Desc: Sugar (and other) transporter
  misc_feature (66)..(208): Pfam Id: PF07690 Pfam Desc: Major Facilitator Superfamily
  misc_feature (245)..(502): Pfam Id: PF07690 Pfam Desc: Major Facilitator Superfamily
  misc_feature (97)..(165): Pfam Id: PF00083 Pfam Desc: Sugar (and other) transporter
  misc_feature (8)..(550): NCBI GI: 46133841 Blast Desc: FG09060.1 [Gibberella zeae PH-1]
  misc_feature (21)..(550): NCBI GI: 256727786 Blast Desc: [Nectria haematococca mpVI 77-13-4]
  misc_feature (2)..(543): NCBI GI: 169610964 Blast Desc: SNOG_08591 [Phaeosphaeria nodorum SN15] gi|160702189|gb|EAT83759.2| SNOG_08591 [Phaeosphaeria nodorum SN15]
  misc_feature (2)..(543): NCBI GI: 189205841 Blast Desc: membrane transporter [Pyrenophora tritici-repentis Pt-1C-BFP] gi|187975348|gb|EDU41974.1| membrane transporter [Pyrenophora tritici-repentis Pt-1C-BFP]
  misc_feature (8)..(543): NCBI GI: 39973027 Blast Desc: MGG_07808 [Magnaporthe grisea 70-15] gi|145012584|gb|EDJ97238.1| MGG_07808 [Magnaporthe grisea 70-15]
  misc_feature (37)..(539): NCBI GI: 71022627 Blast Desc: UM05396.1 [Ustilago maydis 521] gi|30962094|emb|CAD91458.1| conserved [Ustilago maydis] gi|46101412|gb|EAK86645.1| conserved [Ustilago maydis 521]
  misc_feature (261)..(549): NCBI GI: 261358952 Blast Desc: conserved [Verticillium albo-atrum VaMs.102]
  misc_feature (36)..(537): NCBI GI: 169617177 Blast Desc: SNOG_11765 [Phaeosphaeria nodorum SN15] gi|111059689|gb|EAT80809.1| SNOG_11765 [Phaeosphaeria nodorum SN15]
  misc_feature (5)..(550): NCBI GI: 242786755 Blast Desc: sugar transporter, [Talaromyces stipitatus ATCC 10500] gi|218721014|gb|EED20433.1| sugar transporter, [Talaromyces stipitatus ATCC 10500]
  misc_feature (5)..(550): NCBI GI: 212543461 Blast Desc: sugar transporter, [Penicillium marneffei ATCC 18224] gi|210066792|gb|EEA20885.1| sugar transporter, [Penicillium marneffei ATCC 18224]
MSAHGSPEAPKIANPDEGLSQPLEDGRAPEHDLEGLTLYEKKCVLVNREIDRMGMGRYQWYIWCLCGFGYMIDLLWAQAFGLVLSPVQQEFGFGDGQSGNISASFSAGLTAGAFVWGFLSDWIGRRWAFNLTCLFSSVFGLALGASSNYNTLLVLTAFVGFGVGGNVPIDTTITLEFIPQNKRFLLALLSVFQPIGVVICSAIAFGFIPYRSCSPNFSEPNPLPSCFDPDLAPGADCCSRASNMGWRYFLFTLGGITLFVFFLRFAVFNFHESPKFLIYKGRDDEAIKVLQHIADKNMKPCNLTLADFERLTTEEASVGTTSTTSGVKKLAKEKVATTFDVERYRMLFSGWNMTRLTLLVWLTYIFDFWGFTVAGTYLPRILALKNGSASQSLEFTYASYIYTYIPGIFGVLLGSVMYRIPSFGRKWTMTLASGLMGASIFLFATVDTVAKRLGLFTLEYFFQSMFNAVLYGWTPEAFPAPVRGTACGVASFWGRLFGIVSPLIAQKLYGEGEGGHVNSVLYLAGGVTLGCVITTALLPDKLMETKDERS

SEQ ID NO: 21601 - DNA, 1569 bp, Muscodor strobelii
  misc_feature: SGI EST ID NO. CUFF.50700.0
  misc_feature: Variant of the nucleotide sequence at SEQ ID NO 21599
gcgcgaagtgctagtcgacaatgcggtaggtcgcaaactagctgcgggtcactgacatctacgactgcacatttcgactatacaaatggggattttgcgtgaaattcgatgttcgtgcatgcaaattcgatactgggtatttggctagactatgtccgtcgagtactcctatataaccccccgggcttcgtccgatcctgcatatcatcgtccctcgccagaatctgaagactccaataccgattccgattccgacagcgatagcgttgacgagtccgctgtaccattgcttgagatgagtgctcacggttcccccgaggcacccaagatcgcgaatccggatgaaggtctgtcacagccgctggaagatggacgcgctcctgagcacgacctggagggtctcacgctgtacgagaagaaatgcgtccttgtgaatcgagagatcgaccgcatgggtatggggaggtaccaatggtatatatggtgcctgtgtggattcggatacatgattgatcttctctgggcccaagcttttggtctcgtactcagtcctgttcagcaagagttcggatttggtgatgggcagtcgggaaatatctctgcgagtttcagcgctgggttaacggccggtgcattcgtctggggtttcctatcggattggattggtatgttgggattgttgaagaacatcaggcgtagcgaagctgactggtaccgtaggcaggcgctgggcattcaacttgacctgtttgttctcatcggtgttcggattagcattgggcgcctcatccaattacaatacgttgcttgttctgacggcgtttgttggatttggcgttggtgggaacgtccccattgatactaccattacgctagagttcatccctcagaataaacgcttcctactcgccctgctttcggtattccaacccatcggcgtcgtaatttgcagcgcaatcgcgtttggcttcatcccataccgatcgtgctcaccgaatttctccgaaccgaatcccctcccatcatgtttcgatcctgatctagcgcctggcgcagattgttgttctcgagcatccaatatgggatggcgctacttcttgttcactctcggcggcatcactctattcgtcttcttcctccgctttgccgtgttcaacttccacgagagcccgaagttcctcatctacaaaggccgggatgacgaagccatcaaggttttgcagcacattgcggacaaaaacatgaaaccttgcaatttgacgctcgcagatttcgaaagacttaccaccgaggaggcttccgttggcaccacgtcgactacgagcggtgtgaagaaacttgcaaaagaaaaggtagcaacgacgtttgatgtcgagagatatcgcatgttgtttagcggatggaatatgacgagactcacgcttttggtttggttgacgtatatctttgatttctggggattcacggtcgccggtgagcttcccttgcgtccctctcaaataaaaggggtcaagcctttctaacatttcctacacaggcacatatctcccgcgcatcctcgcattgaag

SEQ ID NO: 21602 - DNA, 1311 bp, Muscodor strobelii
  misc_feature: SGI cDNA ID NO. 567315
  misc_feature: Encodes the peptide sequence at SEQ ID NO 21603
atggcacaatatcttaaagattgtctggaatgctgctttcccacgaagagaaagacacgaccggccagccctgactatcgcgttggtcgctacaatgcccagctccgccggaacctaggtctaccagagcgcgacattgagcttcctcctagaattcaacaatatgcaccgagccagcaaatgcaaatgatcgcgatccgcgactcatcaccaggtcgttcaaaaccccagcctcgtctacccatgaccgtaaatacgggcgatgcacccaatttcaccttgacatacatgtatagcgccgaactccaagagctcttcacactcatgcacgaagtcctcgagcacatcccctacgcaatctgtgggctcggagcgctaatcgaccaatatcaattcagccgccggcacgcaaagcaaatctccatcatctgtccttcacacagcaaaatcaacgtcatgaactgggcacagacaaaaggctgtgtatcctttggaaactccatcgggtttaagatgtccagtgggatcatccgacgggtaaggataaagtacaccgataaggacttttcttcgcttcaactttcaaaatccatgatcagctctgcaaaggttctaagcaagactagtaccttggatcatatcgctgcaggttggttggacagctatcagaaaaaagatgagaaggcactaaagactatttctactgatatcttctattgtcttgactacgttgttaagacaaggtcgaggcttgatgaggagtacttgcatacatttctaggctcttcgttctttttgccatttactgaggctaatcccgaggtgagagtcgagatggcgcgtgcgggcatagatatcgccggcgtccttgcgagattgcgaaacaatgcttcgttgagggagcataacgagatgttgaggcagtttggtcttgaaggggatattgctacggaacgacctggggcctttgaaaatgtaagggatttgtcgaattctaagtctgtctatacgttgcgagatcgcaactcaaagactgaatcgaatctctggataccggatgtccctgatgttcctgctggggtaagtgcactccaatctgaagcttttgataagaaggggaaggggaaagctaaagaagctcaactatctgatctcaagatctcgaaaccgttactaactagaaaatggaatagtctgagagggattgatgtcccgaaacggaacgataacggacgaagtttgacaaagagcaatagtacgaataccaagcccggcacgaggtttgtggtggatggccagcattggatttag

SEQ ID NO: 21603 - protein, 436 aa, Muscodor strobelii
  misc_feature: SGI Peptide ID NO. 567315
  misc_feature (91)..(286): NCBI GI: 46107798 Blast Desc: FG00782.1 [Gibberella zeae PH-1]
  misc_feature (92)..(344): NCBI GI: 261358757 Blast Desc: conserved [Verticillium albo-atrum VaMs.102]
  misc_feature (102)..(286): NCBI GI: 256734792 Blast Desc: NECHADRAFT_75408 [Nectria haematococca mpVI 77-13-4]
  misc_feature (107)..(253): NCBI GI: 145603735 Blast Desc: MGG_05859 [Magnaporthe grisea 70-15] gi|145011900|gb|EDJ96556.1| MGG_05859 [Magnaporthe grisea 70-15]
MAQYLKDCLECCFPTKRKTRPASPDYRVGRYNAQLRRNLGLPERDIELPPRIQQYAPSQQMQMIAIRDSSPGRSKPQPRLPMTVNTGDAPNFTLTYMYSAELQELFTLMHEVLEHIPYAICGLGALIDQYQFSRRHAKQISIICPSHSKINVMNWAQTKGCVSFGNSIGFKMSSGIIRRVRIKYTDKDFSSLQLSKSMISSAKVLSKTSTLDHIAAGWLDSYQKKDEKALKTISTDIFYCLDYVVKTRSRLDEEYLHTFLGSSFFLPFTEANPEVRVEMARAGIDIAGVLARLRNNASLREHNEMLRQFGLEGDIATERPGAFENVRDLSNSKSVYTLRDRNSKTESNLWIPDVPDVPAGVSALQSEAFDKKGKGKAKEAQLSDLKISKPLLTRKWNSLRGIDVPKRNDNGRSLTKSNSTNTKPGTRFVVDGQHWI

SEQ ID NO: 21604 - DNA, 811 bp, Muscodor strobelii
  misc_feature: SGI EST ID NO. CUFF.50703.0
  misc_feature: Variant of the nucleotide sequence at SEQ ID NO 21602
tatcgctgcaggttggttggacagctatcagaaaaaagatgagaaggcactaaagactatttctactgatatcttctattgtcttgactacgttgttaagacaaggtcgaggcttgatgaggagtacttgcatacatttctaggctcttcgttctttttgccatttactgaggctaatcccgaggtgagagtcgagatggcgcgtgcgggcatagatatcgccggcgtccttgcgagattgcgaaacaatgcttcgttgagggagcataacgagatgttgaggcagtttggtcttgaaggggatattgctacggaacgacctggggcctttgaaaatgtaagggatttgtcgaattctaagtctgtctatacgttgcgagatcgcaactcaaagactgaatcgaatctctggataccggatgtccctgatgttcctgctgggtctgagagggattgatgtcccgaaacggaacgataacggacgaagtttgacaaagagcaatagtacgaataccaagcccggcacgaggtttgtggtggatggccagcattggatttagagaatgacatatgtggttattcggggataaggttggtgttctgagtgtaagtctttacgtcttctctactgttattttgatttcggttttgtatataacgatcacaattttgtatatgtcatgtttttcgatcatgtctcaagactgttcctcagtgtaggtcgtttccgttgctcatatgtacctaagtcttcagcttcactcttggtgcattagttgaaatgggcttgaagagctgccctaaatctctt

SEQ ID NO: 21605 - DNA, 1005 bp, Muscodor strobelii
  misc_feature: SGI cDNA ID NO. 567316
  misc_feature: Encodes the peptide sequence at SEQ ID NO 21606
atggatcggctgaaccgcatgctcgccggcggcggcatgggtggtctgggagctgccactggctccgataacaccaacctcatcgataattccgagaccgtctacatttcctctctcgccctcctcaagatgttacggcatggtcgcgctggtgtgcctatggaagtcatgggtctgatgctgggcgagtttgtcgacgacttcacagtccgtgtcgtcgacgtctttgccatgccccagagcggtaccggtgtcagtgtcgaggccgtcgaccccgtgttccagcagaagatgatggacatgttgacccagaccggaaggcccgagtccgtcgtcggctggtaccactcccatcccggtttcggctgttggctgtcctcggtcgatatcaacacccagcagtccttcgagcagttgaccccccgcgccgtcgccgtcgtcgtcgatcccatacagtccgtcaagggcaaggtcgtcatcgatgccttccgcctcatcaacccacagtccctcatgctgggccaggagcctagacagagcacgtctaacctgggtcacctcaacaagccttccatccaggccctcatccacggcctcaaccgccactactactctatcggcatcaactaccggaagacggcgctggaggagaacatgttgatgaacctgcacaagcatgtctggaccgaggctttggagatggaggacttccgcgccgaaggcgagcacaacaaagacaggttccagaagctggtcggcctggccgagggctacgagaagagagtcaaggaggagaccgagttgactaaggagcagctcaagactcgctacgtcggcaagctcgaccccaagaagcatttggaggatgttgggcagcagttgatcgaggacaacatcgtgtctgtatcacgacagatgatcgacaaggaggctacgatgccgaagaaggatgctgcggcgaacggtgcgaatggagatcacatggacgaggacgaggagctatga

SEQ ID NO: 21606 - protein, 334 aa, Muscodor strobelii
  misc_feature: SGI Peptide ID NO. 567316
  misc_feature (29)..(142): Pfam Id: PF01398 Pfam Desc: Mov34/MPN/PAD-1 family
  misc_feature (1)..(334): NCBI GI: 156053948 Blast Desc: 26S proteasome regulatory subunit [Sclerotinia sclerotiorum 1980] gi|154703602|gb|EDO03341.1| 26S proteasome regulatory subunit [Sclerotinia sclerotiorum 1980]
  misc_feature (1)..(334): NCBI GI: 261358756 Blast Desc: 26S proteasome regulatory subunit rpn11 [Verticillium albo-atrum VaMs.102]
  misc_feature (18)..(334): NCBI GI: 46107796 Blast Desc: FG00781.1 [Gibberella zeae PH-1]
  misc_feature (18)..(325): NCBI GI: 256734791 Blast Desc: [Nectria haematococca mpVI 77-13-4]
  misc_feature (1)..(333): NCBI GI: 164428631 Blast Desc: 26S proteasome regulatory subunit [Neurospora crassa OR74A] gi|157072222|gb|EAA35130.2| 26S proteasome regulatory subunit [Neurospora crassa OR74A]
  misc_feature (1)..(332): NCBI GI: 169595538 Blast Desc: SNOG_00509 [Phaeosphaeria nodorum SN15] gi|111070884|gb|EAT92004.1| SNOG_00509 [Phaeosphaeria nodorum SN15]
  misc_feature (1)..(334): NCBI GI: 70989251 Blast Desc: proteasome regulatory particle subunit (RpnK) [Aspergillus fumigatus Af293] gi|66847106|gb|EAL87437.1| proteasome regulatory particle subunit (RpnK), [Aspergillus
  misc_feature (1)..(334): NCBI GI: 261199195 Blast Desc: proteasome regulatory particle subunit [Ajellomyces dermatitidis SLH14081] gi|239595151|gb|EEQ77732.1| proteasome regulatory particle subunit [Ajellomyces dermatitidis SLH14081]
  misc_feature (1)..(334): NCBI GI: 119498293 Blast Desc: proteasome regulatory particle subunit (RpnK), [Neosartorya fischeri NRRL 181] gi|119414068|gb|EAW24007.1| proteasome regulatory particle subunit (RpnK), [Neosartorya NRRL
  misc_feature (1)..(334): NCBI GI: 225562714 Blast Desc: 26S proteasome regulatory subunit [Ajellomyces capsulatus G186AR]
  misc_feature (24)..(300): SWISSPROT Homolog: EC 3.1.2.15 Ubiquitin thiolesterase
MDRLNRMLAGGGMGGLGAATGSDNTNLIDNSETVYISSLALLKMLRHGRAGVPMEVMGLMLGEFVDDFTVRVVDVFAMPQSGTGVSVEAVDPVFQQKMMDMLTQTGRPESVVGWYHSHPGFGCWLSSVDINTQQSFEQLTPRAVAVVVDPIQSVKGKVVIDAFRLINPQSLMLGQEPRQSTSNLGHLNKPSIQALIHGLNRHYYSIGINYRKTALEENMLMNLHKHVWTEALEMEDFRAEGEHNKDRFQKLVGLAEGYEKRVKEETELTKEQLKTRYVGKLDPKKHLEDVGQQLIEDNIVSVSRQMIDKEATMPKKDAAANGANGDHMDEDEEL

SEQ ID NO: 21607 - DNA, 1913 bp, Muscodor strobelii
  misc_feature: SGI EST ID NO. CUFF.50768.0
  misc_feature: Variant of the nucleotide sequence at SEQ ID NO 21605
gagcactgtcgttttagcgggcgtttaggtaagcttgagagctcactgggagccacgcactgggcgaggcagaggcaggcagacccgggtttcgtcacggccacttcctaagctaagctcgccctctatcaacgcctcatacggtcatacctctctactgcatcctttttcgaccacatttcgacctgcagctccgacaaacaacccgcccactctcaatctacactctcccgcttcatacgacctttgcgcctctgctcgcgccgtccgttggtgttgatacatcccaccatctcccagtctctccaccgatcccgcccacatatccgccaccatggatcggctgaaccgcatgctcgccggcggcggcatgggtggtctgggagctgccactggctccgtacgtacatatatgaatctcttgctcgttgcaaatgccatgcaccctcggaggactagctaaagctgactggcgccgcccgtcgcacaggataacaccaacctcatcgataattccgagaccgtctacatttcctctctcgccctcctcaagatgttacggcatggtcgcgctggtgtgcctatggaagtcatgggtctgatgctgggcgagtttgtcgacgacttcacagtccgtgtcgtcgacgtctttgccatgccccagagcggtaccggtgtcagtgtcgaggccgtcgaccccgtgttccagcagaagatgatggacatgttgacccagaccggaaggcccgagtccgtcgtcggctggtaccactcccatcccggtttcggctgttggctgtcctcggtcgatatcaacacccagcagtccttcgagcagttgaccccccgcgccgtcgccgtcgtcgtcgatcccatacagtccgtcaagggcaaggtcgtcatcgatgccttccgcctcatcaacccacagtccctcatgctgggccaggagcctagacagagcacgtctaacctgggtcacctcaacaagccttccatccaggccctcatccacggcctcaaccgccactactactctatcggcatcaactaccggaagacggcgctggaggagaacatgttgatgaacctgcacaagcatgtctggaccgaggctttggagatggaggacttccgcgccgaaggcgagcacaacaaagacaggttccagaagctggtcggcctggccgagggctacgagaagagagtcaaggaggagaccgagttgactaaggagcagctcaagactcgctacgtcggcaagctcgaccccaagaagcatttggaggatgttgggcagcagttgatcgaggacaacatcgtgtctgtatcacgacagatgatcgacaaggaggctacgatgccgaagaaggatgctgcggcgaacggtgcgaatggagatcacatggacgaggacgaggagctatgattaggacctgcgttaggggcattacatcatgagaaatggcatgaccgtgtatcataggcgttgggcggactagcggcaatggtctagaggcattacgagcggctgctctcggagaagcacgtcgcagcttcatgtgcgcagcagtgcatcttcggccttccaacaggaaaggaagagaaaaatcaatgccaacccattgatgcaaaatcgccatctagaacagctacagcgttccaaatttgccttcattctttgtttcgttcccatgtgcctaagcagagcccaggaccgccctttgactcacgctcgttggcaacactcaaacaaacacattgtgctgtactggtcataaggtcgtaatgggcgaacatagtagcatcccccaagactttctttaatcaccgacaaagacatagcacgacaaggatcttgcctgacgagaacaaggccactgtttattcaaattcaagtacatggtctcggg

SEQ ID NO: 21608 - DNA, 2079 bp, Muscodor strobelii
  misc_feature: SGI cDNA ID NO. 567317
  misc_feature: Encodes the peptide sequence at SEQ ID NO 21609
atggatatcctcaagatattgtctcgcggcgcaaagaagaatgccagtcagcccttcgatctcaagcccgccgcgccaaaagttcagaacccccagctatttcatgataagacactcaagcgcaagcgaaatgaagaagaagacgatcaattcgggagaggtgtcagtactggtgacgagccatcattagatttctttgcgcccaaagaaataaagcctgtcaccaagtccgcggtcgtgcaacaaaaacccaaggatgagcccaagccatcacttctagatgacgaccaggttcgccggatcctgcgatctcatcgtttgaagtttacgctgctctcctatcacgatgacgacaagtccaggatcaccaagtccaaaaagaagaagaagaaagattccgtcaaagccaaagctaaggatgcgaagaaggtcttatttccccagcctctggagtctttctctcagctacggacgtcttggaagctatcgccgcggctcgaggagaatctggctaaacggggttatcggatacccacagaggtgcagcttggctgtctgcctctcctgattgaacccaagaccgctatcgcaccatccgctgccgtcgagctgggcatagagacagaaaatggaatccatctggtggccgtcgcaccgacagggagcggcaagactctggcgttcctcatacctgccatcaatgacatcttacgacgaagggctgaagtaacaaaggatcgtgtgctagagatcatcatcatggctccaacgagagaacttgcagagcagatcaccaacgaagggcgcaagctcactaaagacactggggtcaagatcgttatgatgaggagagggatgaggatcgcagccgaaacgaaggaggacgacgagagtgaagaagagggcggagacccagagagcgaaaacaaaagcgatgaatcggccgatgatgaagacggtgaagaaacaacagccacaactgtcacgaaagccgatatcttggttacgacaccactcatgctacggaattttctcaaaacccatacattgtcgactgttagatcactcatattagacgaagcggatgtgctcctcgaggatcgattcaaagaccaaacttttgggatttgtcacgcttgcaccagccccgcactacggctcaggtgtttttctgccactatgggggccaacatcgaagaattcataatgtccatgacggaaaagctgaacgcacgagcaccaggcggcgcgccaacaccgttagtgcgtctagttgtcggtttgaaggatacggccgttccaagtatcagtcacaagctcttatactgcgccaccgagcagggaaaactgtttgccctgcgtcaaatcctccacccgcagccaaccaacaccgccgtgccatctatgaatcttcccattctcgtatttatgcagaccattgaacgtgctaccgcattacacgatgagctcaagtacgactttcccatcgaagctggtggctcgtcacgtgtcgctacgcttcattcttcgttatcggatgccgcccgctctgagattgtgagacgattccggtgcggtgagatatgggcgctcatcaccactgatctgctcatgagaggtctggacatgggtgtgtctggtgttgtcaactacgatgttccgacatcggcggccgcatacgtacatcgggtagggcgaacaggtcgagctggagagacgggtatcgcgtgtactctgtataccaatgacgatatcgcctatctcaagagtatcgccaacgttattaccatgagtgagaagcaggctggaaagacaggagatgagggtgtgccgaagtggcttctcgagtcgctgcccaaagtcagcaaagacgacaagcagaagctgaagaagagaggcgtagagtcacgacgtgccaatgctgcggccaagatttcgacacaaactgcgtgggatcggcgaagggagaataataggagagatgctattgctagtagtaagaagaggaagcttgagcgacctaatcacgatacccaggatgatgatgaagacgaggagtggggtgggctagatgattga

SEQ ID NO: 21609 - protein, 692 aa, Muscodor strobelii
  misc_feature: SGI Peptide ID NO. 567317
  misc_feature (179)..(401): Pfam Id: PF00270 Pfam Desc: DEAD/DEAH box helicase
  misc_feature (496)..(571): Pfam Id: PF00271 Pfam Desc: Helicase conserved C-terminal domain
  misc_feature (1)..(692): NCBI GI: 223973339 Blast Desc: [Zea mays]
  misc_feature (1)..(692): NCBI GI: 46107990 Blast Desc: FG00877.1 [Gibberella zeae PH-1] gi|91207748|sp|Q4IPI1.1|ROK1_GIBZE RecName: Full=ATP-dependent RNA helicase ROK1
  misc_feature (1)..(672): NCBI GI: 256734725 Blast Desc: [Nectria haematococca mpVI 77-13-4]
  misc_feature (1)..(691): NCBI GI: 85114733 Blast Desc: NCU00919 [Neurospora crassa OR74A] gi|74629077|sp|Q7SFC8.1|ROK1_NEUCR RecName: Full=ATP-dependent RNA helicase rok-1 gi|28926538|gb|EAA35509.1| conserved crassa to
  misc_feature (1)..(671): NCBI GI: 39945082 Blast Desc: MGG_04523 [Magnaporthe grisea 70-15] gi|152060504|sp|A4RMV8.1|ROK1_MAGGR RecName: Full=ATP-dependent RNA helicase ROK1 gi|145021500|gb|EDK05629.1| MGG_04523 grisea
  misc_feature (1)..(692): NCBI GI: 171694872 Blast Desc: protein product [Podospora anserina] gi|170947678|emb|CAP59840.1| protein product [Podospora anserina]
  misc_feature (1)..(692): NCBI GI: 156040647 Blast Desc: SS1G_12340 [Sclerotinia sclerotiorum 1980] gi|154696396|gb|EDN96134.1| SS1G_12340 [Sclerotinia sclerotiorum 1980]
  misc_feature (23)..(692): NCBI GI: 143459043 Blast Desc: SS1G_12340 [Sclerotinia sclerotiorum 1980] gi|154696396|gb|EDN96134.1| SS1G_12340 [Sclerotinia sclerotiorum 1980]
  misc_feature (1)..(692): NCBI GI: 240108722 Blast Desc: ATP-dependent RNA helicase ROK1, [Coccidioides posadasii C735 delta SOWgp]
  misc_feature (1)..(692): NCBI GI: 143459016 Blast Desc: ATP-dependent RNA helicase ROK1, [Coccidioides posadasii C735 delta SOWgp]
MDILKILSRGAKKNASQPFDLKPAAPKVQNPQLFHDKTLKRKRNEEEDDQFGRGVSTGDEPSLDFFAPKEIKPVTKSAVVQQKPKDEPKPSLLDDDQVRRILRSHRLKFTLLSYHDDDKSRITKSKKKKKKDSVKAKAKDAKKVLFPQPLESFSQLRTSWKLSPRLEENLAKRGYRIPTEVQLGCLPLLIEPKTAIAPSAAVELGIETENGIHLVAVAPTGSGKTLAFLIPAINDILRRRAEVTKDRVLEIIIMAPTRELAEQITNEGRKLTKDTGVKIVMMRRGMRIAAETKEDDESEEEGGDPESENKSDESADDEDGEETTATTVTKADILVTTPLMLRNFLKTHTLSTVRSLILDEADVLLEDRFKDQTFGICHACTSPALRLRCFSATMGANIEEFIMSMTEKLNARAPGGAPTPLVRLVVGLKDTAVPSISHKLLYCATEQGKLFALRQILHPQPTNTAVPSMNLPILVFMQTIERATALHDELKYDFPIEAGGSSRVATLHSSLSDAARSEIVRRFRCGEIWALITTDLLMRGLDMGVSGVVNYDVPTSAAAYVHRVGRTGRAGETGIACTLYTNDDIAYLKSIANVITMSEKQAGKTGDEGVPKWLLESLPKVSKDDKQKLKKRGVESRRANAAAKISTQTAWDRRRENNRRDAIASSKKRKLERPNHDTQDDDEDEEWGGLDD

SEQ ID NO: 21610 - DNA, 2187 bp, Muscodor strobelii
  misc_feature: SGI EST ID NO. CUFF.50711.0
  misc_feature: Variant of the nucleotide sequence at SEQ ID NO 21608
tgaactgtgagacattgtatcggaggaggctactagctgggaaacccttctagccaatctcccgctacgacaatatcacaatggatatcctcaagatattgtctcgcggcgcaaagaagaatgccagtcagcccttcgatctcaagcccgccgcgccaaaagttcagaacccccagctatttcatgataagacactcaagcgcaagcgaaatgaagaagaagacgatcaattcgggagaggtgtcagtactggtgacgagccatcattagatttctttgcgcccaaagaaataaagcctgtcaccaagtccgcggtcgtgcaacaaaaacccaaggatgagcccaagccatcacttctagatgacgaccaggttcgccggatcctgcgatctcatcgtttgaagtttacgctgctctcctatcacgatgacgacaagtccaggatcaccaagtccaaaaagaagaagaagaaagattccgtcaaagccaaagctaaggatgcgaagaaggtcttatttccccagcctctggagtctttctctcagctacggacgtcttggaagctatcgccgcggctcgaggagaatctggctaaacggggttatcggatacccacagaggtgcagcttggctgtctgcctctcctgattgaacccaagaccgctatcgcaccatccgctgccgtcgagctgggcatagagacagaaaatggaatccatctggtggccgtcgcaccgacagggagcggcaagactctggcgttcctcatacctgccatcaatgacatcttacgacgaagggctgaagtaacaaaggatcgtgtgctagagatcatcatcatggctccaacgagagaacttgcagagcagatcaccaacgaagggcgcaagctcactaaagacactggggtcaagatcgttatgatgaggagagggatgaggatcgcagccgaaacgaaggaggacgacgagagtgaagaagagggcggagacccagagagcgaaaacaaaagcgatgaatcggccgatgatgaagacggtgaagaaacaacagccacaactgtcacgaaagccgatatcttggttacgacaccactcatgctacggaattttctcaaaacccatacattgtcgactgttagatcactcatattagacgaagcggatgtgctcctcgaggatcgattcaaagaccaaacttttgggatttgtcacgcttgcaccagccccgcactacggctcaggtgtttttctgccactatgggggccaacatcgaagaattcataatgtccatgacggaaaagctgaacgcacgagcaccaggcggcgcgccaacaccgttagtgcgtctagttgtcggtttgaaggatacggccgttccaagtatcagtcacaagctcttatactgcgccaccgagcagggaaaactgtttgccctgcgtcaaatcctccacccgcagccaaccaacaccgccgtgccatctatgaatcttcccattctcgtatttatgcagaccattgaacgtgctaccgcattacacgatgagctcaagtacgactttcccatcgaagctggtggctcgtcacgtgtcgctacgcttcattcttcgttatcggatgccgcccgctctgagattgtgagacgattccggtgcggtgagatatgggcgctcatcaccactgatctgctcatgagaggtctggacatgggtgtgtctggtgttgtcaactacgatgttccgacatcggcggccgcatacgtacatcgggtagggcgaacaggtcgagctggagagacgggtatcgcgtgtactctgtataccaatgacgatatcgcctatctcaagagtatcgccaacgttattaccatgagtgagaagcaggctggaaagacaggagatgagggtgtgccgaagtggcttctcgagtcgctgcccaaagtcagcaaagacgacaagcagaagctgaagaagagaggcgtagagtcacgacgtgccaatgctgcggccaagatttcgacacaaactgcgtgggatcggcgaagggagaataataggagagatgctattgctagtagtaagaagaggaagcttgagcgacctaatcacgatacccaggatgatgatgaagacgaggagtggggtgggctagatgattgagtatgtccagtagatagcaagatgaaac

SEQ ID NO: 21611 - DNA, 1356 bp, Muscodor strobelii
  misc_feature: SGI cDNA ID NO. 567318
  misc_feature: Elevated expression when VOC is produced
  misc_feature: Encodes the peptide sequence at SEQ ID NO 21612
atgatggatcctggtactgctttaggggttgtgtcgctgggccttgaaatcacaaagagcttgcttaaatattacgaacgttggaaagattacaaggatgatgtgcgacagacgtacgaggatctcgcgagcctcgaaaagaccctgaagctactagcagatagagttgagtctatttggagcaaaactaagacaaaagaccttccgactcaagtcaccgaatgtttgacagtctgccaagagagagggattcaacgcctccggcacatgcttcaaaggtttcccacagatgagcctaagactatgatccagaaagctcgtgtttttgccctacgctccagatatcctcttctcgcaggcaccctagcaaagctcaggaccactctcaaggatatgtcgagccaacttaatcttgcggttgaggtattgctgcttgattatagcgcagagacatttaaaacagtcactcagatcaaggaccgtttcggagatgtcgatagctcagtcggcgaaatccagaagtctatgctcagtacaaatcaacagaccaaattcattgccgacggagttcaagctctattggaaaagcaggacgttgagcgaactagaaagattctccaatggttgaatgctgctgaccagtctgtcaaccatgctgaggcacgcagtctgcatgagattggcactggaacttggtttttagagagccaggaatacgagcattggatttcaggtcgatacccacacctttggcttcacggcaaaccaggatgttccaagacaatattagcatctacgattatcaatgatgtttacaatcgggtgtctgatcgctcagtatccatcctctacttttacttctctttcgctgattcaagaaaacagagctattcaagtcttttgtcgtcttgggtcactgtactgagtcgaactgctggtatccatgaaaagatctcgcaagcttacgaccatgacgaacagcccagctgtgagatgcttgaagatgtgttaagagatttgctcatggagaaaaaaacttatattatagtagacgccttggatgagtgccctgagcccacgaataagcgggaagaagttatgcttgggcttaaacgcatagctgagagaagtgctgggactagctttctcataactagccgcaacgaagcagatatatcagagtttatgcataagtggccaacgaaggtgttcgcaatcaaagagaagagcgtcaacgcggatatcgatctatttgttcagaatacccttgctcatgacgaaaagctaatgaagctgacggaagagagcaaaagagagatcaattacgtactccgagagaattcggacggaatgtag

SEQ ID NO: 21612 - protein, 451 aa, Muscodor strobelii
  misc_feature: SGI Peptide ID NO. 567318
  misc_feature (1)..(451): NCBI GI: 115383788 Blast Desc: conserved [Aspergillus terreus NIH2624] gi|114196133|gb|EAU37833.1| conserved [Aspergillus terreus NIH2624]
  misc_feature (1)..(451): NCBI GI: 116206266 Blast Desc: CHGG_02426 [Chaetomium globosum CBS 148.51] gi|88183023|gb|EAQ90491.1| CHGG_02426 [Chaetomium globosum CBS 148.51]
  misc_feature (203)..(451): NCBI GI: 119467286 Blast Desc: Ankyrin repeat protein [Neosartorya fischeri NRRL 181] gi|119405601|gb|EAW15552.1| Ankyrin repeat protein [Neosartorya fischeri NRRL 181]
  misc_feature (1)..(451): NCBI GI: 256724570 Blast Desc: [Nectria haematococca mpVI 77-13-4]
  misc_feature (1)..(429): NCBI GI: 255944261 Blast Desc: Pc20g03470 [Penicillium chrysogenum Wisconsin 54-1255] gi|211587633|emb|CAP85676.1| Pc20g03470 [Penicillium chrysogenum Wisconsin 54-1255]
  misc_feature (160)..(451): NCBI GI: 212532817 Blast Desc: multiple ankyrin repeats single kh domain protein, [Penicillium marneffei ATCC 18224] gi|210071929|gb|EEA26018.1| multiple ankyrin repeats single kh domain protein, [Penicillium
  misc_feature (203)..(451): NCBI GI: 119473749 Blast Desc: Ankyrin repeat protein [Neosartorya fischeri NRRL 181] gi|119406903|gb|EAW16853.1| Ankyrin repeat protein [Neosartorya fischeri NRRL 181]
  misc_feature (9)..(451): NCBI GI: 154316680 Blast Desc: BC1G_04271 [Botryotinia fuckeliana B05.10] gi|150846071|gb|EDN21264.1| BC1G_04271 [Botryotinia fuckeliana B05.10]
  misc_feature (200)..(451): NCBI GI: 169596849 Blast Desc: SNOG_01194 [Phaeosphaeria nodorum SN15] gi|111069723|gb|EAT90843.1| SNOG_01194 [Phaeosphaeria nodorum SN15]
  misc_feature (1)..(451): NCBI GI: 67526171 Blast Desc: AN3543.2 [Aspergillus nidulans FGSC A4] gi|40739678|gb|EAA58868.1| AN3543.2 [Aspergillus nidulans FGSC A4] gi|259481936|tpe|CBF75924.1| TPA: conserved [Aspergillus FGSC
  misc_feature: Useful for introducing or modulating the production of volatile compounds
MMDPGTALGVVSLGLEITKSLLKYYERWKDYKDDVRQTYEDLASLEKTLKLLADRVESIWSKTKTKDLPTQVTECLTVCQERGIQRLRHMLQRFPTDEPKTMIQKARVFALRSRYPLLAGTLAKLRTTLKDMSSQLNLAVEVLLLDYSAETFKTVTQIKDRFGDVDSSVGEIQKSMLSTNQQTKFIADGVQALLEKQDVERTRKILQWLNAADQSVNHAEARSLHEIGTGTWFLESQEYEHWISGRYPHLWLHGKPGCSKTILASTIINDVYNRVSDRSVSILYFYFSFADSRKQSYSSLLSSWVTVLSRTAGIHEKISQAYDHDEQPSCEMLEDVLRDLLMEKKTYIIVDALDECPEPTNKREEVMLGLKRIAERSAGTSFLITSRNEADISEFMHKWPTKVFAIKEKSVNADIDLFVQNTLAHDEKLMKLTEESKREINYVLRENSDGM

SEQ ID NO: 21613 - DNA, 3475 bp, Muscodor strobelii
  misc_feature: SGI EST ID NO. CUFF.50715.0
  misc_feature: Variant of the nucleotide sequence at SEQ ID NO 21611
ctttattctgtccgcttattgaaattcaacatttgaaacggggttggtatcatctcgcgactgtattatatgcgcatctgagcttgccggtcccaacctctgacccattgtttgatctcactactgcgttctgagcaaccacgctctagcgtctgtcgaagattgcgaccacgtttgatcagttttccatggtctcattgaaatctattcaccgctatacaagacttccattcatttgccagggctctccataattcgagcgaggcttgattcctcattcgaacgcctaacccagcctctatgctttgaacaggcctgaaaatttcacaacacgtgtatcgttatcttggccttactatcaaccatctcgcatacacacaagcctctgatagccaagcgatatctatgatggatcctggtactgctttaggggttgtgtcgctgggccttgaaatcacaaagagcttgcttaaatattacgaacgttggaaagattacaaggatgatgtgcgacagacgtacgaggatctcgcgagcctcgaaaagaccctgaagctactagcagatagagttgagtctatttggagcaaaactaagacaaaagaccttccgactcaagtcaccgaatgtttgacagtctgccaagagagagggattcaacgcctccggcacatgcttcaaaggtttcccacagatgagcctaagactatgatccagaaagctcgtgtttttgccctacgctccagatatcctcttctcgcaggcaccctagcaaagctcaggaccactctcaaggatatgtcgagccaacttaatcttgcggttgaggtattgctgcttgattatagcgcagagacatttaaaacagtcactcagatcaaggaccgtttcggagatgtcgatagctcagtcggcgaaatccagaagtctatgctcagtacaaatcaacagaccaaattcattgccgacggagttcaagctctattggaaaagcaggacgttgagcgaactagaaagattctccaatggttgaatgctgctgaccagtctgtcaaccatgctgaggcacgcagtctgcatgagattggcactggaacttggtttttagagagccaggaatacgagcattggatttcaggtcgatacccacacctttggcttcacggcaaaccaggatgttccaagacaatattagcatctacgattatcaatgatgtttacaatcgggtgtctgatcgctcagtatccatcctctacttttacttctctttcgctgattcaagaaaacagagctattcaagtcttttgtcgtcttgggtcactgtactgagtcgaactgctggtatccatgaaaagatctcgcaagcttacgaccatgacgaacagcccagctgtgagatgcttgaagatgtgttaagagatttgctcatggagaaaaaaacttatattatagtagacgccttggatgagtgccctgagcccacgaataagcgggaagaagttatgcttgggcttaaacgcatagctgagagaagtgctgggactagctttctcataactagccgcaacgaagcagatatatcagagtttatgcataagtggccaacgaaggtgttcgcaatcaaagagaagagcgtcaacgcggatatcgatctatttgttcagaatacccttgctcatgacgaaaagctaatgaagctgacggaagagagcaaaagagagatcaattacgtactccgagagaattcggacggaatgttccgatgggccgcactgcaactcgaatcgatccgcagcctaaagatctatcgtccaaagtacatctcagccgtcttacataacatcccaaagactctcgacgaaacgtacgaaagaatgctccgcgcaatcgatgagatatatctcgacgagatacgggtcgtattagaatggcttgtttttagcgagcggccgcttacactagcccagctagctgaagcgtgtagtatcagcctcactcatgcaaatgagccctacatggaagaaaccagcgagaatactctttcaggacttctaagtgttctgggaccattggttctggttgaacatattgggcgacgtcgggctaagaaatatcattggtctggcgttgggcagccgaagtttcgtcctggatgctatatgcgaacgatcaaattggctcatttctctgtgcgggaatatcttgtgtctgatcgactgaggatgtctccggtttctcgatttgcaatcgacgatggtgctcattatactttggctcaaagctgctgtgcctacctgatctatgttataaatcacgaagaagcgattcgcacttggtttgaaagagaggagtcagaatggggcacttatagtgtgcgttattatattcaaattttgctggacgactacaaacactcttatcctttgctaccatacgctgccagccgatggatgaatcatcaagcaagagcggaaaactcgaccatcgtacgaaaagatgatatcgatctccaccttaaatttttgcaagacaaaaagatacgagcgttatggcttcgtttgcttggcacttcttgttctcgctctacgttcaggtatattagatggcatactagccggctacatgatgacacgaaccttatctattggtcatctcttctcggtcttcagcggacgacatctagactatgtgatagtgcatctctctcggacgttaacaacattgcaggtgttctcggcactgcattgcgggctgccatacatacagaatactcggaaatacttgttgagaggctattgagagccggcgcagatgtgcattattcgtctaagtgccacaacggaacagcgcttgagctggccgtccgatacggcaagaagaatgtcgtcaaaactcttattcaagcaggtgcgaatgttaatgctctcagtgagaacgagagaactccactatggttcgcctcagcccttggggcagaagatattgccatgatgctgctcgataatggtgcgattgtacgtccgaatgatcttctatgcgctagctcgaatgggcataaacatgtagttcaaattctgcttgagagaggcggcgaccccaacatatgtgaggaccaacacggacaaacacccctacatgtatcatcgtacgaaggccacgccgacgttgtcaaattgcttatcgaaagtggcgcagacccatcagtgaggaacagaagtggatttacaccgttcaatgaagcaacaaaaggtggccacatggacgtagcagaactgcttgttgcaaagggagcggacttctcagcaagagacagtggtgaatccgcctcatagcacgaagatagttgatctctagacttgcgtcgcgtataggcacatggacaatagtcaaaatactcatccatatgaccacgcgtcgtcttgtcttcgtacacttctcaggaaatcactaggagtcatagtcaatagaaattca

SEQ ID NO: 21614 - DNA, 1308 bp, Muscodor strobelii
  misc_feature: SGI cDNA ID NO. 567319
  misc_feature: Encodes the peptide sequence at SEQ ID NO 21615
atgaggccaaccaagatactgcttttctttcctgtactatcattcgcattgaaggcatcaatatggaatgatgtagaaatatcgctatggcgtttcaaagagcaagtcttcgactttgtcaacaacccctttcgcaaatcccgagtcccacagtttgttctcgatgcacagcacccgtggatcgtcgaaaacaggcgcgcactcgagaggcttccagacgcgaaagcatttctctgctcagtcccaaacgattcaacaatcggtggcgggctagagataccgcaagacctcttccattatttagagattgacaataaccgttatgaaatcgaccgaccaggttggccaaatgctcttgagagaagccaagaaatgctagattgccccgcagcattggaacaagtcaggactttcaagacaaacatctatgtttgtgatggcgagtggcaacccttatggaagaaggctcttgagccgtcggagcctcctcaacaactcctcgatgtgttcggcgacattctgggcaatatgacgagtctcgaaacattaaaatggaatattcgaacttcggatgtgcattacttcgaagaagcctttaaagagcgtggaatcgtattaccttcaattactagattggaacctggggccatgagtcactttttagtgtctctatgtccgaatcttcagatactggaaactggttcgagttggagttaccatgactatccgtatgacctgaagccaaggcctcataacttattactacaagcagctgggactgctatgaacctgaccagatttgccatggaacttcatcatagcggttggacgcatgatctcgtcaatgaactcgtagagactctgccaggcattgaaagcctaggactctacggagcaatcgatccccattcaatgcatagtggatctatgacaccgaacaacatgcttcgtgaccgactccaagcacttcgagatcttactaatctcacacatcttgacctgccaccgtcatttgctctaggcgtagggtttgatggtggtgcatggtgtggtaacgcgtacgacggatatgacggctggctatacgaacgcgacgtcacacgacagagtgctgaagctgtggatagagctgcggcaattgtcatcgagaatttacctcggttacaaagtttctcgattggcagtcgtcaagcgaatctgacgcgtcatgagaatgggacgatacaggctagtttcccttggactggacgcatggataagtgggttgaggaagttgtgccgccacgagatcggtatgatgagctgtaa

SEQ ID NO: 21615 - protein, 435 aa, Muscodor strobelii
  misc_feature: SGI Peptide ID NO. 567319
MRPTKILLFFPVLSFALKASIWNDVEISLWRFKEQVFDFVNNPFRKSRVPQFVLDAQHPWIVENRRALERLPDAKAFLCSVPNDSTIGGGLEIPQDLFHYLEIDNNRYEIDRPGWPNALERSQEMLDCPAALEQVRTFKTNIYVCDGEWQPLWKKALEPSEPPQQLLDVFGDILGNMTSLETLKWNIRTSDVHYFEEAFKERGIVLPSITRLEPGAMSHFLVSLCPNLQILETGSSWSYHDYPYDLKPRPHNLLLQAAGTAMNLTRFAMELHHSGWTHDLVNELVETLPGIESLGLYGAIDPHSMHSGSMTPNNMLRDRLQALRDLTNLTHLDLPPSFALGVGFDGGAWCGNAYDGYDGWLYERDVTRQSAEAVDRAAAIVIENLPRLQSFSIGSRQANLTRHENGTIQASFPWTGRMDKWVEEVVPPRDRYDEL

SEQ ID NO: 21616 - DNA, 2736 bp, Muscodor strobelii
  misc_feature: SGI EST ID NO. CUFF.50718.1
  misc_feature: Variant of the nucleotide sequence at SEQ ID NO 21614
cgttgatgcatttaatcttgcgaccaagacgaagccagcaggccggcatgaaagtggtgcatcgatacttgcatatttctatgtcaggccccgcgctgcccattgtaacgcggcacttgaaagccacatagcacggagaccactcttgccaacaaattgtatgtcccttgcttgcatggtctaggtaattgaatttttttgactcatagggagatactgttggataaacatcaaacggaactaccggccttctcttactgaataatgacttggcccgcaatccggtgctagcatgctaatccttacagttggcatcttctaggcttgcggcacagcgaggatgcgaggcaacaacatctaggatcggcttcactgttgaacctaacgaccgtacgaaaacgtgtcatgaagatgttgaagtcttcatataaccatctaagacacataacagtacggaatttgaagctgtactcgtattattgcatctcttaggtgaatgacgcacaactcgatatagacgctgcaatcccccgagatgaggccaaccaagatactgcttttctttcctgtactatcattcgcattgaaggcatcaatatggaatgatgtagaaatatcgctatggcgtttcaaagagcaagtcttcgactttgtcaacaacccctttcgcaaatcccgagtcccacagtttgttctcgatgcacagcacccgtggatcgtcgaaaacaggcgcgcactcgagaggcttccagacgcgaaagcatttctctgctcagtcccaaacgattcaacaatcggtggcgggctagagataccgcaagacctcttccattatttagagattgacaataaccgttatgaaatcgaccgaccaggttggccaaatgctcttgagagaagccaagaaatgctagattgccccgcagcattggaacaagtcaggactttcaagacaaacatctatgtttgtgatggcgagtggcaacccttatggaagaaggctcttgagccgtcggagcctcctcaacaactcctcgatgtgttcggcgacattctgggcaatatgacgagtctcgaaacattaaaatggaatattcgaacttcggatgtgcattacttcgaagaagcctttaaagagcgtggaatcgtattaccttcaattactagattggaacctggggccatgagtcactttttagtgtctctatgtccgaatcttcagatactggaaactggttcgagttggagttaccatgactatccgtatgacctgaagccaaggcctcataacttattactacaagcagctgggactgctatgaacctgaccagatttgccatggaacttcatcatagcggttggacgcatgatctcgtcaatgaactcgtagagactctgccaggcattgaaagcctaggactctacggagcaatcgatccccattcaatgcatagtggatctatgacaccgaacaacatgcttcgtgaccgactccaagcacttcgagatcttactaatctcacacatcttgacctgccaccgtcatttgctctaggcgtagggtttgatggtggtgcatggtgtggtaacgcgtacgacggatatgacggctggctatacgaacgcgacgtcacacgacagagtgctgaagctgtggatagagctgcggcaattgtcatcgagaatttacctcggttacaaagtttctcgattggcagtcgtcaagcgaatctgacgcgtcatgagaatgggacgatacaggctagtttcccttggactggacgcatggataagtgggttgaggaagttgtgccgccacgagatcggtatgatgagctgtaagatctagaagacaagagtcgtttgtctctgaatctatcatctcgccgatccaatttcaatcatgtcagagagttatgcatccgcatgtcgactgataatcattgtgctcttgactaatgctacgatgccttttttgggcttgagtgacgtgggataaaacagaggcgtcaaacaacttccatgctctacggccatgtttgttcgacacttccttctttctgggtcgaggcaacaagtttggtatgtgatattccatgttaggaagtaatgacaataccactgcatatcttgaggtataaatggaccatcatagggacggacttcctctagtcgcgtcgcgctgcatgcgcaaggctggcactcatatcaagatactattgcgtttgaaacgccgtcagtttttcagttcgaacaactaatgatgcgacaatactttggatcgtttgagcttactcgactaaaatgagacaattgcttgccggtttctctcatggaagtcgatttctagtactgagctacttgcctaaggagtcggatgggactgaacaatgtgtatttagttggaaatatagtttctatcggcgaggcgtcgttccatcgatatacagagtcgcaaaatgtaggtgaccaccgagcagataattgtacggtgaaagaacagagtcaaggaaatcacgatcgagaacaacaacaacagaggacacggctgtaaagtcacactttttgcaaccttagcctaacatgtccccacgtcatcgttgctttcaactctacctcatgcatgcactgtagcctttctacaagtgttggtataaacctttcgactttactccgcaatcagtgaatactgcgcctctgaaaatgggtcatttcgcgtacgacctctctctgag

SEQ ID NO: 21617 - DNA, 741 bp, Muscodor strobelii
  misc_feature: SGI cDNA ID NO. 567320
  misc_feature: Encodes the peptide sequence at SEQ ID NO 21618
atgaataccaatggcaaggataataaggcggatcgaggtccggttgctgtatatctaatcccgtgggatcctgactcacaggatcacatcaatcggatgaaattgcaacgcatagcttgcggatggaaagtcgaggaagtcgaaagctggccccaaaagcaaaggaacggtgtcgctggtttgcactgggttgttttacatccggatcatcccaaaacaccagatcggttagaggcgcacttcgcggcatacccgagcgaaaccgaggctcttctcgatacttgcaagacaatcttgggtcgaccacataaacctgacccattgatcccctttttccatcctattggacacatttcgcttgattccgagacctacgaaggatctaagcttgagactagcttatccgatggtatcctctcactcgtgaacttcttcatatcagagccattgcagaactttggactcggcggcgcagcgatggactattgcgaaaagatggcaaaagagttattcagtgccaaggccattacactgtcgacaatttcaaaggaggaatgcagacccgatagccctcgacgtatcgccatgaaacgaccaatacccaagattacgaatcaagactggtacgcccgccgtggctatgtaatttttgcggagaaaacccctggttgggttgatgtagacgagcatggtaaaaaatggcctgttagaagtatctgcatgcgtaagaatctagtttga

SEQ ID NO: 21618 - protein, 246 aa, Muscodor strobelii
  misc_feature: SGI Peptide ID NO. 567320
  misc_feature (17)..(246): NCBI GI: 46129282 Blast Desc: FG08826.1 [Gibberella zeae PH-1]
  misc_feature (17)..(243): NCBI GI: 156033029 Blast Desc: SS1G_13590 [Sclerotinia sclerotiorum 1980] gi|154698993|gb|EDN98731.1| SS1G_13590 [Sclerotinia sclerotiorum 1980]
  misc_feature (17)..(243): NCBI GI: 154301453 Blast Desc: BC1G_10396 [Botryotinia fuckeliana B05.10] gi|150856136|gb|EDN31328.1| BC1G_10396 [Botryotinia fuckeliana B05.10]
  misc_feature (5)..(245): NCBI GI: 154321501 Blast Desc: BC1G_01625 [Botryotinia fuckeliana B05.10] gi|150852163|gb|EDN27355.1| BC1G_01625 [Botryotinia fuckeliana B05.10]
  misc_feature (17)..(220): NCBI GI: 256733674 Blast Desc: NECHADRAFT_78022 [Nectria haematococca mpVI 77-13-4]
  misc_feature (17)..(246): NCBI GI: 238485282 Blast Desc: conserved [Aspergillus flavus NRRL3357] gi|220698758|gb|EED55097.1| conserved [Aspergillus flavus NRRL3357]
  misc_feature (13)..(246): NCBI GI: 255942189 Blast Desc: Pc18g00160 [Penicillium chrysogenum Wisconsin 54-1255] gi|211586596|emb|CAP94240.1| Pc18g00160 [Penicillium chrysogenum Wisconsin 54-1255]
  misc_feature (17)..(246): NCBI GI: 261352252 Blast Desc: conserved [Verticillium albo-atrum VaMs.102]
  misc_feature (16)..(245): NCBI GI: 261361235 Blast Desc: [Verticillium albo-atrum VaMs.102]
  misc_feature (19)..(183): NCBI GI: 156053986 Blast Desc: SS1G_05841 [Sclerotinia sclerotiorum 1980] gi|154703621|gb|EDO03360.1| SS1G_05841 [Sclerotinia sclerotiorum 1980]
MNTNGKDNKADRGPVAVYLIPWDPDSQDHINRMKLQRIACGWKVEEVESWPQKQRNGVAGLHWVVLHPDHPKTPDRLEAHFAAYPSETEALLDTCKTILGRPHKPDPLIPFFHPIGHISLDSETYEGSKLETSLSDGILSLVNFFISEPLQNFGLGGAAMDYCEKMAKELFSAKAITLSTISKEECRPDSPRRIAMKRPIPKITNQDWYARRGYVIFAEKTPGWVDVDEHGKKWPVRSICMRKNLV

SEQ ID NO: 21619 - DNA, 1826 bp, Muscodor strobelii
  misc_feature: SGI EST ID NO. CUFF.50721.0
  misc_feature: Variant of the nucleotide sequence at SEQ ID NO 21617
ctaaaacggcctggtgtgactcatcactatcaccagaatacttcaaggatttcggattgagaacacatatctctatttcgtcttgaaactcattgactacactcaatcaattacttcaagtcagagaaacgtgtctacatttccgcaagtactggacacttctttccctcgtctagtcacaccagcgatgaataccaatggcaaggataataaggcggatcgaggtccggttgctgtatatctaatcccgtgggatcctgactcacaggatcacatcaatcggatgaaattgcaacgcatagcttgcggatggaaagtcgaggaagtcgaaagctggccccaaaagcaaaggaacggtgtcgctggtttgcactgggttgttttacatccggatcatcccaaaacaccagatcggttagaggcgcacttcgcggcatacccgagcgaaaccgaggctcttctcgatacttgcaagacaatcttgggtcgaccacataaacctgacccattgatcccctttttccatcctattggacacatttcgcttgattccgagacctacgaaggatctaagcttgagactagcttatccgatggtatcctctcactcgtgaacttcttcatatcagagccattgcagaactttggactcggcggcgcagcgatggactattgcgaaaagatggcaaaagagttattcagtgccaaggccattacactgtcgacaatttcaaaggaggaatgcagacccgatagccctcgacgtatcgccatgaaacgaccaatacccaagattacgaatcaagactggtacgcccgccgtggctatgtaatttttgcggagaaaacccctggttgggttgatgtagacgagcatggtaaaaaatggcctgttagaagtatctgcatgcgtaagaatctagtttgatgtgctactcggaggcttgccgtcagaacagagacgtgttcaaacaagtgagttcttgtattatttcaagacgctcactacccagaatgcctatcacgtgcatctatcagagacggatataaatgatggggtcgagcagaaactatgtcacaaatcgaagagcagaacgtccgccaagatgcaaggggaggacgcagcgggaacaagcgatagaaccattcctactgggtgtatgtatacacttgcctctaggtagcaccaaacctcgttatattgaagcgggagtctttaagccctatttcctgcggagtgccctgcaaattccatgctcgatgaagtgcaatactgtgatttttcgtttcggtacgcatctatatctgcgtaaatgttcaattcggctgccaaccaaatgggtatctaagaaatctctactaatcgctagcttgtgaatataaaacgaatcattaccggatctagacattaaatgttcttttttcacatggatccatcaatcgtggttctcatactcgtgaatgtgtctcttccggtatttgaaaactcgagtccttcgagtcacctcctttggcgttaactgtcatcaagacatgcgtatcgccatctccaatatcccaaggatccttactcttgcggttgctcggccatgttttcctcggcgtattggcgtgagggtaaccgctcggagtagacgttttcttgccggtggataggaactgcttcatgaacggcatgctctggaagaccttagggagggcggggattccgatcacgagatagccgaaggtctgctcagctatcgcccagagattgatcgtaacgacgtagtacaagacatcgcctgtcctatacgctgctgcgacgtagacaacacgtgctacgg

SEQ ID NO: 21620 - DNA, 1047 bp, Muscodor strobelii
  misc_feature: SGI cDNA ID NO. 567321
  misc_feature: Encodes the peptide sequence at SEQ ID NO 21621
atggtttcggcaaaggatatggaagctgctccagctggggatattgggaatcatgtgcttccagaggtgatcattatcctcaccggcgtcatagcactggtagcggttggcgttcggctggtcgcgagatatgtcatgcaaagactgggcataccggacatccttcttgttatatcactggctttctacggagcgcatcattacaatgcataccaggcggctatttatcctggattgggagttcatcaatggcaatacaacgcagaacttgctgctgcgtcgaaatacaacttcaaaaacggaagtgtgttcttcggcgtccaaatcgtgttcctcaaaatcgccgttctccttgactggcgacgcatctttgcacctgcgggtggcggtcgaaactacctatggtggatcttacaagtcctgatatgggcaaatgctgtgttttatttcatcggaaccatcatcgaagcgcttcaatgcccgccaacacaaaaggactgccccataaacgcctctcactacaatctagcctcgggaattattaacgtcatatcggatttgacaattctaatcgcacctcattgggtaatctggagtctgaagttatcaacggcacggaaaataggcgtgtcgattttattcgtaattggtatacttgccactgctagcgccgtagcacgtgttgtctacgtcgcagcagcgtataggacaggcgatgtcttgtactacgtcgttacgatcaatctctgggcgatagctgagcagaccttcggctatctcgtgatcggaatccccgccctccctaaggtcttccagagcatgccgttcatgaagcagttcctatccaccggcaagaaaacgtctactccgagcggttaccctcacgccaatacgccgaggaaaacatggccgagcaaccgcaagagtaaggatccttgggatattggagatggcgatacgcatgtcttgatgacagttaacgccaaaggaggtgactcgaaggactcgagttttcaaataccggaagagacacattcacgagtatga

SEQ ID NO: 21621 - protein, 348 aa, Muscodor strobelii
  misc_feature: SGI Peptide ID NO. 567321
  misc_feature (16)..(348): NCBI GI: 212534224 Blast Desc: conserved [Penicillium marneffei ATCC 18224] gi|210069667|gb|EEA23757.1| conserved [Penicillium marneffei ATCC 18224]
  misc_feature (9)..(291): NCBI GI: 46118221 Blast Desc: FG04693.1 [Gibberella zeae PH-1]
  misc_feature (63)..(312): NCBI GI: 145248463 Blast Desc: An13g03450 [Aspergillus niger] gi|134081233|emb|CAK41741.1| protein product [Aspergillus niger]
  misc_feature (24)..(291): NCBI GI: 169781106 Blast Desc: [Aspergillus oryzae RIB40] gi|83773758|dbj|BAE63883.1| protein product [Aspergillus oryzae]
  misc_feature (24)..(291): NCBI GI: 238500906 Blast Desc: conserved [Aspergillus flavus NRRL3357] gi|220691924|gb|EED48271.1| conserved [Aspergillus flavus NRRL3357]
  misc_feature (11)..(271): NCBI GI: 256727941 Blast Desc: NECHADRAFT_26479 [Nectria haematococca mpVI 77-13-4]
  misc_feature (2)..(343): NCBI GI: 256731204 Blast Desc: NECHADRAFT_85215 [Nectria haematococca mpVI 77-13-4]
  misc_feature (9)..(343): NCBI GI: 145607555 Blast Desc: MGG_04339 [Magnaporthe grisea 70-15] gi|145015080|gb|EDJ99648.1| MGG_04339 [Magnaporthe grisea 70-15]
  misc_feature (77)..(293): NCBI GI: 238505010 Blast Desc: conserved [Aspergillus flavus NRRL3357] gi|220689848|gb|EED46198.1| conserved [Aspergillus flavus NRRL3357]
  misc_feature (14)..(337): NCBI GI: 16945439 Blast Desc: related to integral membrane protein PTH11 [Neurospora crassa]
MVSAKDMEAAPAGDIGNHVLPEVIIILTGVIALVAVGVRLVARYVMQRLGIPDILLVISLAFYGAHHYNAYQAAIYPGLGVHQWQYNAELAAASKYNFKNGSVFFGVQIVFLKIAVLLDWRRIFAPAGGGRNYLWWILQVLIWANAVFYFIGTIIEALQCPPTQKDCPINASHYNLASGIINVISDLTILIAPHWVIWSLKLSTARKIGVSILFVIGILATASAVARVVYVAAAYRTGDVLYYVVTINLWAIAEQTFGYLVIGIPALPKVFQSMPFMKQFLSTGKKTSTPSGYPHANTPRKTWPSNRKSKDPWDIGDGDTHVLMTVNAKGGDSKDSSFQIPEETHSRV

SEQ ID NO: 21622 - DNA, 2299 bp, Muscodor strobelii
  misc_feature: SGI EST ID NO. CUFF.50722.1
  misc_feature: Variant of the nucleotide sequence at SEQ ID NO 21620
tggaaagtgacgatgatttccccaaagaggctctagcgacttgaataccccagcaattgcggtcttgccgtccataactaaatcgcaattgtggaatggtcgccgttcaacccccgttgacgtgcagcggaactgcaggtgaaggattgcgctaacgttgatggctgccgggggtgccccagacagcaagtagaaacctagcagagcttattactgtcgctgtagaactcgcatcgaatattggctcgtttcttcctttatcgtgattatacaattcttaattgcatgccgcttgcctactcctaggcaagattcgttttctcatccggcagttgtacgaagatggtggcggcggaaatgtaatcgagagctccttggtctacgagtacaccacccgcataacgacgcagcctcgcgatggtttcggcaaaggatatggaagctgctccagctggggatattgggaatcatgtgcttccagaggtgatcattatcctcaccggcgtcatagcactggtagcggttggcgttcggctggtcgcgagatatgtcatgcaaagactgggcataccggacatccttcttgttatatcactggctttctacggagcgcatcattacaatgcataccaggcggctatttatcctggattgggagttcatcaatggcaatacaacgcagaacttgctgctgcgtcgaaatacaacttcaaaaacggaagtgtgttcttcggcgtccaaatcgtgttcctcaaaatcgccgttctccttgactggcgacgcatctttgcacctgcgggtggcggtcgaaactacctatggtggatcttacaagtcctgatatgggcaaatgctgtgttttatttcatcggaaccatcatcgaagcgcttcaatgcccgccaacacaaaaggactgccccataaacgcctctcactacaatctagcctcgggaattattaacgtcatatcggatttgacaattctaatcgcacctcattgggtaatctggagtctgaagttatcaacggcacggaaaataggcgtgtcgattttattcgtaattggtatacttgccactgctagcgccgtagcacgtgttgtctacgtcgcagcagcgtataggacaggcgatgtcttgtactacgtcgttacgatcaatctctgggcgatagctgagcagaccttcggctatctcgtgatcggaatccccgccctccctaaggtcttccagagcatgccgttcatgaagcagttcctatccaccggcaagaaaacgtctactccgagcggttaccctcacgccaatacgccgaggaaaacatggccgagcaaccgcaagagtaaggatccttgggatattggagatggcgatacgcatgtcttgatgacagttaacgccaaaggaggtgactcgaaggactcgagttttcaaataccggaagagacacattcacgagtatgagaaccacgattgatggatccatgtgaaaaaagaacatttaatgtctagatccggtaatgattcgttttatattcacaagctagcgattagtagagatttcttagatacccatttggttggcagccgaattgaacatttacgcagatatagatgcgtaccgaaacgaaaaatcacagtattgcacttcatcgagcatggaatttgcagggcactccgcaggaaatagggcttaaagactcccgcttcaatataacgaggtttggtgctacctagaggcaagtgtatacatacacccagtaggaatggttctatcgcttgttcccgctgcgtcctccccttgcatcttggcggacgttctgctcttcgatttgtgacatagtttctgctcgaccccatcatttatatccgtctctgatagatgcacgtgataggcattctgggtagtgagcgtcttgaaataatacaagaactcacttgtttgaacacgtctctgttctgacggcaagcctccgagtagcacatcaaactagattcttacgcatgcagatacttctaacaggccattttttaccatgctcgtctacatcaacccaaccaggggttttctccgcaaaaattacatagccacggcgggcgtaccagtcttgattcgtaatcttgtatttcattgtcagtaactcgattcatatatctgtattagaaaactgtatcagttaggtaccttgggtattggtcgtttcatggcgatacgtcgagggctatcgggtctgcattcctcctttgaaattgtcgacagtgtaatggccttggcactgaataactcttttgccatcct

SEQ ID NO: 21623 - DNA, 1134 bp, Muscodor strobelii
  misc_feature: SGI cDNA ID NO. 567322
  misc_feature: Encodes the peptide sequence at SEQ ID NO 21624
atgttgttttcaaagtattttctgtcattggcggcactaggtgggcttgtatccggtcaggtcccgacctattcgcaagatgatatcaactctgggaaggctctgatagcgatgggcaagttggcttacgacaatgttttgaagcgacttgatagctcaacggggaactgcacgagagacaatgttcacgttcgcaaagaatggagaaatatcccaggccctgaaaggacagcgttccagaaagctgttcaatgccttatgactgagcacgaaaatgtctatcccaatgttactgggcccaagtccatgttcgacagcttcggagtcctccactacaagctgacgccatacgtccacaactcggcatatttcttgctatttcaccgcatttacatctggacgtacgagcaaaagctgcgcgacctctgcggctataccggttccttcccgtactgggaatggggactcgacgccggtggtgtcgagaaatcgcctctcttcgatggctccgaaacctcaatggggtccaacggcgccaaagtgactactccaagcggcggcggattcggcatgccggtgggctcaggaggtggatgtgtgaccgacggacctttcaagaactatactgtgaactttggaccgaacaccgctgccaaccctttggcaccgaacccaagatgtctgaagagagatctgaatacggccctctgcgcgaattacgcctcgcttaagaacacgactgagacgattctgcaggctaatacggtggaggcgttccaggcgaatgtccagggtgattttagataccctgctgcgcagaaatggggctttgccgtgcatggtggaggccactttactattgctggtgacccgggcggtgacttctacttctcgcctctcgagcccgttttctacctgcaccacggacaaattgaccgcatgtacttcatttggcagaatcttgactgggcaaacagacagacaatggcgggcacaatcacgatgatgaaccaaccaccgagccgtaatgggacccttgatgacccgttggatatcagtccggtcggcggtgcttataagttccgagacttcttagataccgctgctggaccattctgctttgtctatgagtga

SEQ ID NO: 21624 - protein, 377 aa, Muscodor strobelii
  misc_feature: SGI Peptide ID NO. 567322
  misc_feature (36)..(368): Pfam Id: PF00264 Pfam Desc: Common central domain of tyrosinase
  misc_feature (292)..(321): Pfam Id: PF00264 Pfam Desc: Common central domain of tyrosinase
  misc_feature (1)..(377): NCBI GI: 116196908 Blast Desc: CHGG_05052 [Chaetomium globosum CBS 148.51] gi|88180965|gb|EAQ88433.1| CHGG_05052 [Chaetomium globosum CBS 148.51]
  misc_feature (4)..(376): NCBI GI: 116203771 Blast Desc: CHGG_09769 [Chaetomium globosum CBS 148.51] gi|88175897|gb|EAQ83365.1| CHGG_09769 [Chaetomium globosum CBS 148.51]
  misc_feature (16)..(377): NCBI GI: 164425742 Blast Desc: NCU10865 [Neurospora crassa OR74A] gi|157071044|gb|EDO65172.1| [Neurospora crassa OR74A]
  misc_feature (35)..(376): NCBI GI: 212532653 Blast Desc: tyrosinase, [Penicillium marneffei ATCC 18224] gi|210071847|gb|EEA25936.1| tyrosinase, [Penicillium marneffei ATCC 18224]
  misc_feature (22)..(376): NCBI GI: 119185216 Blast Desc: CIMG_07314 [Coccidioides immitis RS]
  misc_feature (55)..(376): NCBI GI: 255949976 Blast Desc: Pc22g18500 [Penicillium chrysogenum Wisconsin 54-1255] gi|211592772|emb|CAP99138.1| Pc22g18500 [Penicillium chrysogenum Wisconsin 54-1255]
  misc_feature (16)..(376): NCBI GI: 225683024 Blast Desc: conserved [Paracoccidioides brasiliensis Pb03]
  misc_feature (44)..(376): NCBI GI: 169768876 Blast Desc: [Aspergillus oryzae RIB40] gi|238498220|ref|XP_002380345.1| tyrosinase, [Aspergillus flavus NRRL3357] gi|83766766|dbj|BAE56906.1| protein product oryzae]
  misc_feature (20)..(376): NCBI GI: 258564688 Blast Desc: conserved [Uncinocarpus reesii 1704] gi|237908596|gb|EEP82997.1| conserved [Uncinocarpus reesii 1704]
  misc_feature (45)..(376): NCBI GI: 242798114 Blast Desc: tyrosinase, [Talaromyces stipitatus ATCC 10500] gi|218716448|gb|EED15869.1| tyrosinase, [Talaromyces stipitatus ATCC 10500]
MLFSKYFLSLAALGGLVSGQVPTYSQDDINSGKALIAMGKLAYDNVLKRLDSSTGNCTRDNVHVRKEWRNIPGPERTAFQKAVQCLMTEHENVYPNVTGPKSMFDSFGVLHYKLTPYVHNSAYFLLFHRIYIWTYEQKLRDLCGYTGSFPYWEWGLDAGGVEKSPLFDGSETSMGSNGAKVTTPSGGGFGMPVGSGGGCVTDGPFKNYTVNFGPNTAANPLAPNPRCLKRDLNTALCANYASLKNTTETILQANTVEAFQANVQGDFRYPAAQKWGFAVHGGGHFTIAGDPGGDFYFSPLEPVFYLHHGQIDRMYFIWQNLDWANRQTMAGTITMMNQPPSRNGTLDDPLDISPVGGAYKFRDFLDTAAGPFCFVYE

SEQ ID NO: 21625 - DNA, 1821 bp, Muscodor strobelii
  misc_feature: SGI cDNA ID NO. 567323
  misc_feature: Encodes the peptide sequence at SEQ ID NO 21626
atgtcgccgcttgcgacccgacctgcccgagctgggcttcgcagcctgtccaagcacgcctcctacagacaatgcccatcatgtcttgctcgcagcgcaccgacgcgcgcatacgccaccgagaaggggcccgacaaggcggagtccatggggcccagcttcaagggccagatgatggagagcatcacctcgcgtattgctcgagagagagccgagcgcgagaggtttgccaaggagagagtcgaatccgccaactcgaggcggtgggctaccactttcggtctggtcttcgccgccggattctcctatttcctcggcaccaagagccctcgcgaccccaatccagcttcgaccctccccctcgatgccacccggccgttgaaacacaataacgacaagaagaacctcgaagccgcttgggctgattttgccgccattgtgggcgccgagaatgtcagcaccctcgaggacgatctgcacacacattccaactccgactggtcaagctaccgcaacgacgcctcccagaagccctttatggtcgtctaccccggctccaccgaagatgtcagtagaatcatgaagatatgtcacctgcgacggatacctgttgtcggctattccggaggcaccagcttagagggtcactacacccccacccgtggcggcatctgcgtcgacttcaggaggatggacaaggtcatcgcactacacaaggacgacatggacgtcgtggtacagcccgccgttggatgggaaggactgaacgagttcttggccagggacgacctcttcttccctccggatccgggccccggtgcgcagatcggtggaatgatcgggacgggctgcagtggtacaaacgcctatcgatacggtaccatgcgggaatgggtcctttctctgacagtagtcctcgccgacggaactgtcatcaagacgagacaacggcctaggaagagctcggcagggtacgacttgaccaagctgttcatcggaagtgaaggaacacttggtcttgtcacggaagccactctcaagctcacatcgaagcccgccaatacgagtgtcgcagtttgcagcttcgggacaatccgacaggccgctgactgtgtctccaaggttgttggtcagggtatacccgttgctgcgattgagatcttagacgatgagcagatgaagtgcatcaatgccgctggcatgacggccaagacctggacagaagccccgacaatattcttcaaattctccggtaccgcacagggtgtaaaagagcagattaacatcgtgaagaacttggccaagcagaccggcagtgtcggatttgaattcgccaagtctcaagaagaacaagccgagctctggagtgcacgtaaggaggcactgtggagcactatggcattagcgaaaccaggtgacaaggtctggacgggagatgttgctgtaccgatgagcagactgccacagctcatcgaagagacgaaagatgatatgaagaagagtggcatgtacggcaccatcgtcggtcatgtcggcgacggcaacttccacatcatcctactctcaaacgagaaacagcgctacgacgcagagaaactagtgcaccgcatggtcaagagagcagtcgagctcgagggcacagtaaccggagagcatggtgtcggcttggtcaagagggattacctcccccatgagttgggtgagactacggtcgacttgatgaggcagatcaagaacgctcttgatcctctctacctgttgaactgcgataaagtcgtcagagtcgagccaccaaagcccggcgagattcctaagtggtga

SEQ ID NO: 21626 - protein, 606 aa, Muscodor strobelii
  misc_feature: SGI Peptide ID NO. 567323
  misc_feature (351)..(592): Pfam Id: PF02913 Pfam Desc: FAD linked oxidases, C-terminal domain
  misc_feature (178)..(315): Pfam Id: PF01565 Pfam Desc: FAD binding domain
  misc_feature (1)..(606): NCBI GI: 46107646 Blast Desc: FG00706.1 [Gibberella zeae PH-1]
  misc_feature (1)..(606): NCBI GI: 85111194 Blast Desc: D-lactate dehydrogenase, mitochondrial precursor [Neurospora crassa OR74A] gi|28925559|gb|EAA34585.1| D-lactate dehydrogenase, mitochondrial precursor [Neurospora crassa OR74A]
  misc_feature (51)..(606): NCBI GI: 171694896 Blast Desc: protein product [Podospora anserina] gi|170947690|emb|CAP59852.1| protein product [Podospora anserina]
  misc_feature (1)..(606): NCBI GI: 256734758 Blast Desc: [Nectria haematococca mpVI 77-13-4]
  misc_feature (28)..(606): NCBI GI: 156040583 Blast Desc: SS1G_12308 [Sclerotinia sclerotiorum 1980] gi|154696364|gb|EDN96102.1| SS1G_12308 [Sclerotinia sclerotiorum 1980]
  misc_feature (4)..(576): NCBI GI: 261358692 Blast Desc: D-lactate dehydrogenase [Verticillium albo-atrum VaMs.102]
  misc_feature (10)..(606): NCBI GI: 212546125 Blast Desc: D-lactate dehydrogenase (cytochrome) [Penicillium marneffei ATCC 18224] gi|210064736|gb|EEA18831.1| D-lactate dehydrogenase (cytochrome) [Penicillium marneffei ATCC 18224]
  misc_feature (52)..(606): NCBI GI: 242824314 Blast Desc: D-lactate dehydrogenase (cytochrome) [Talaromyces stipitatus ATCC 10500] gi|218713154|gb|EED12579.1| D-lactate dehydrogenase (cytochrome) [Talaromyces stipitatus ATCC 10500]
  misc_feature (5)..(606): NCBI GI: 225562544 Blast Desc: D-lactate dehydrogenase [Ajellomyces capsulatus G186AR]
  misc_feature (53)..(606): NCBI GI: 121709058 Blast Desc: D-lactate dehydrogenase (cytochrome) [Aspergillus clavatus NRRL 1] gi|119400442|gb|EAW10867.1| D-lactate dehydrogenase (cytochrome) [Aspergillus clavatus NRRL 1]
  misc_feature (94)..(597): SWISSPROT Homolog: EC 1.1.2.4 D-lactate dehydrogenase (cytochrome)
MSPLATRPARAGLRSLSKHASYRQCPSCLARSAPTRAYATEKGPDKAESMGPSFKGQMMESITSRIARERAERERFAKERVESANSRRWATTFGLVFAAGFSYFLGTKSPRDPNPASTLPLDATRPLKHNNDKKNLEAAWADFAAIVGAENVSTLEDDLHTHSNSDWSSYRNDASQKPFMVVYPGSTEDVSRIMKICHLRRIPVVGYSGGTSLEGHYTPTRGGICVDFRRMDKVIALHKDDMDVVVQPAVGWEGLNEFLARDDLFFPPDPGPGAQIGGMIGTGCSGTNAYRYGTMREWVLSLTVVLADGTVIKTRQRPRKSSAGYDLTKLFIGSEGTLGLVTEATLKLTSKPANTSVAVCSFGTIRQAADCVSKVVGQGIPVAAIEILDDEQMKCINAAGMTAKTWTEAPTIFFKFSGTAQGVKEQINIVKNLAKQTGSVGFEFAKSQEEQAELWSARKEALWSTMALAKPGDKVWTGDVAVPMSRLPQLIEETKDDMKKSGMYGTIVGHVGDGNFHIILLSNEKQRYDAEKLVHRMVKRAVELEGTVTGEHGVGLVKRDYLPHELGETTVDLMRQIKNALDPLYLLNCDKVVRVEPPKPGEIPKW

SEQ ID NO: 21627 - DNA, 3079 bp, Muscodor strobelii
  misc_feature: SGI EST ID NO. CUFF.50869.0
  misc_feature: Variant of the nucleotide sequence at SEQ ID NO 21625
cgggcattttcgattggagtcaagcacgagtgaaccagctacgccagtgtgattccgcttccacggggccgtccgatgccaacatgagagacgctatataagtacacaatcggccgcaaccccctttccccctcctccccaagatgtcgccgcttgcgacccgacctgcccgagctgggcttcgcagcctgtccaagcacgcctcctacagacaatgcccatcatgtcttgctcgcagcgcaccgacgcgcgcatacgccaccgagaaggggcccgacaaggcggagtccatggggcccagcttcaagggccagatgatggagagcatcacctcgcgtattgctcgagagagagccgagcgcgagaggtttgccaaggagagagtcgaatccgccaactcgaggcggtgggctaccactttcggtatgtcatgtctgtcagctcggatatcacaacgctattcacttcccatatagttggtagctgacatggcgcggcacatgctaggtctggtcttcgccgccggattctcctatttcctcggcaccaagagccctcgcgaccccaatccagcttcgaccctccccctcgatgccacccggccgttgaaacacaataacgacaagaagaacctcgaagccgcttgggctgattttgccgccattgtgggcgccgagaatgtcagcaccctcgaggacgatctgcacacacattccaactccgactggtcaagctaccgcaacgacgcctcccagaagccctttatggtcgtctaccccggctccaccgaagatgtcagtagaatcatgaagatatgtcacctgcgacggatacctgttgtcggctattccggaggcaccagcttagagggtcactacacccccacccgtggcggcatctgcgtcgacttcaggaggatggacaaggtcatcgcactacacaaggacgacatggacgtcgtggtacagcccgccgttggatgggaaggactgaacgagttcttggccagggacgacctcttcttccctccggatccgggccccggtgcgcagatcggtggaatgatcgggacgggctgcagtggtacaaacgcctatcgatacggtaccatgcgggaatgggtcctttctctgacagtagtcctcgccgacggaactgtcatcaagacgagacaacggcctaggaagagctcggcagggtacgacttgaccaagctgttcatcggaagtgaaggaacacttggtcttgtcacggaagccactctcaagctcacatcgaagcccgccaatacgagtgtcgcagtttgcagcttcgggacaatccgacaggccgctgactgtgtctccaaggttgttggtcagggtatacccgttgctgcgattgagatcttagacgatgagcagatgaagtgcatcaatgccgctggcatgacggccaagacctggacagaagccccgacaatattcttcaaattctccggtaccgcacagggtgtaaaagagcagattaacatcgtgaagaacttggccaagcagaccggcagtgtcggatttgaattcgccaagtctcaagaagaacaagccgagctctggagtgcacgtaaggaggcactgtggagcactatggcattagcgaaaccaggtgacaaggtctggacgggagatgttgctgtaccgatgagcagactgccacagctcatcgaagagacgaaagatgatatgaagaagagtggcatgtacggcaccatcgtcggtcatgtcggcgacggcaacttccacatcatcctactctcaaacgagaaacagcgctacgacgcagagaaactagtgcaccgcatggtcaagagagcagtcgagctcgagggcacagtaaccggagagcatggtgtcggcttggtcaagagggattacctcccccatgagttgggtgagactacggtcgacttgatgaggcagatcaagaacgctcttgatcctctctacctgttgaactgcgataaagtcgtcagagtcgagccaccaaagcccggcgagattcctaagtggtgatcgcattctggcttcatgtatatcatcgcgacttgctctcacaaatctcactctgtatattgttcgcatatctttgaccactggtcatgagcgtggaggaagcctgcatcctgactagtcacgctactttgtatcatagcatgagataagttcagcatgagaatcggctcgaattcaagcctgtaatcaaatcgtgttttcggaccaggtcggcataaagagagaaggcagataggtccccatgttgcatcactcgtatcacgattcgacattacaattcgctgatgatgtcaaatgacgacaatctatttcgaatgataagcttctacatatcctatcactcatagacaaagcagaatggtccagcagcggtatctaagaagtctcggaacttataagcaccgccgaccggactgatatccaacgggtcatcaagggtcccattacggctcggtggttggttcatcatcgtgattgtgcccgccattgtctagttgtcgttagcccaagccgcatttataaagagatatagggtgtaaggggaatacgtacctgtctgtttgcccagtcaagattctgccaaatgaagtacatgcggtcaatttgtccgtggtgcaggtagaaaacgggctcgagaggcgagaagtagaagtcaccgcccgggtcaccagcttcacgatatcggtcaatttctcaacattaatgtaacggatcctgattctcaccaatagtaaagtggcctccaccatgcacggcaaagccccatttctgcgcagcagggtatctaaaatcaccctggacattcgcctggaacgcctccaccgtattagcctgcagaatcgtctcagtcgtgttcttaagcgaggcgtaattcgcgcagagggccgtattcagatctctcttcagacatcttgggttcggtgccaaagggttggcagcggtgttcggtccaaagttcacagtatagttcttgaaaggtccgtcggtcacacatccacctcctgagcccaccggcatgccgaatccgccgc

SEQ ID NO: 21628 - DNA, 570 bp, Muscodor strobelii
  misc_feature: SGI cDNA ID NO. 567324
  misc_feature: Encodes the peptide sequence at SEQ ID NO 21629
atgcatacttccaccacaggcctagccgcgttggcgtttgctggcttagtcaatagccatgccaggatgataactccacagcctcgagtgacgggaccaaagcaggtagagcgctgcggtgcggtagtgacagcagtcttgcagaaagatcttgccggccccatcgagaacgcagtgaacgcggccgatgcaaactacaaatgcaacgcatatctgtgccgcgggtaccagtacgaagataatacgagcaatgtcatggctctaaaggccggcgatgtcataccgtgccacattgatcttgttgcgggtcatcaccctgggtggtccaatgtctctgtcgttgatctagcggcgaacaagatcattggcaacgaactgatttactgggcaaactggcccgacgcgacctcgggaccaccaaggaatgatacttccttcaacgtgacgattccggacggccttggatcttcatgtaacgcgggtggtaaatgtgcgatccaatggtactggtggtcagacagcaacgaccagacttatgagagctgcctcgacttttacatcaagtcgtag

SEQ ID NO: 21629 - protein, 189 aa, Muscodor strobelii
  misc_feature: SGI Peptide ID NO. 567324
  misc_feature (9)..(187): NCBI GI: 116179272 Blast Desc: CHGG_00264 [Chaetomium globosum CBS 148.51] gi|88184561|gb|EAQ92029.1| CHGG_00264 [Chaetomium globosum CBS 148.51]
  misc_feature (1)..(187): NCBI GI: 67516993 Blast Desc: AN0778.2 [Aspergillus nidulans FGSC A4] gi|40746264|gb|EAA65420.1| AN0778.2 [Aspergillus nidulans FGSC A4] gi|259488942|tpe|CBF88802.1| TPA: chitin binding protein, A4]
  misc_feature (1)..(187): NCBI GI: 70996116 Blast Desc: chitin binding protein [Aspergillus fumigatus Af293] gi|44890040|emb|CAF32158.1| secreted cellulose-binding protein [Aspergillus fumigatus] gi|66850448|gb|EAL90775.1| chitin binding
  misc_feature (1)..(187): NCBI GI: 255941668 Blast Desc: Pc16g13040 [Penicillium chrysogenum Wisconsin 54-1255] gi|211586226|emb|CAP93974.1| Pc16g13040 [Penicillium chrysogenum Wisconsin 54-1255]
  misc_feature (1)..(187): NCBI GI: 115492203 Blast Desc: ATEG_00643 [Aspergillus terreus NIH2624] gi|114197589|gb|EAU39289.1| ATEG_00643 [Aspergillus terreus NIH2624]
  misc_feature (11)..(187): NCBI GI: 145230774 Blast Desc: An01g12440 [Aspergillus niger] gi|134055772|emb|CAK37296.1| protein product [Aspergillus niger]
  misc_feature (11)..(187): NCBI GI: 119495038 Blast Desc: chitin binding protein, [Neosartorya fischeri NRRL 181] gi|119412476|gb|EAW22417.1| chitin binding protein, [Neosartorya fischeri NRRL 181]
  misc_feature (1)..(187): NCBI GI: 121701105 Blast Desc: chitin binding protein, [Aspergillus clavatus NRRL 1] gi|119396960|gb|EAW07391.1| chitin binding protein, [Aspergillus clavatus NRRL 1]
  misc_feature (11)..(187): NCBI GI: 238492845 Blast Desc: chitin binding protein, [Aspergillus flavus NRRL3357] gi|220696153|gb|EED52495.1| chitin binding protein, [Aspergillus flavus NRRL3357]
  misc_feature (11)..(187): NCBI GI: 169783100 Blast Desc: [Aspergillus oryzae RIB40] gi|83774756|dbj|BAE64879.1| protein product [Aspergillus oryzae]
MHTSTTGLAALAFAGLVNSHARMITPQPRVTGPKQVERCGAVVTAVLQKDLAGPIENAVNAADANYKCNAYLCRGYQYEDNTSNVMALKAGDVIPCHIDLVAGHHPGWSNVSVVDLAANKIIGNELIYWANWPDATSGPPRNDTSFNVTIPDGLGSSCNAGGKCAIQWYWWSDSNDQTYESCLDFYIKS

SEQ ID NO: 21630 - DNA, 6241 bp, Muscodor strobelii
  misc_feature: SGI EST ID NO. CUFF.50792.1
  misc_feature: Variant of the nucleotide sequence at SEQ ID NO 21628
tgcgtggcgagctctttgcggtttcacccctcgaagatggatctgtctgcatatgggatgtcaaaggtgcgacaaaaaggaaaggtgcaatacttgcaaggtcaagcccaggtcttctctacacagaaaaaagacgccgtagcggcgttcctcgacggacaatagatagtggaatcgtcgaatgtgtgagcgtcgacaacgaaagacaagtggctttttttgctatggaagatgaacttgttgagttagatcttcagtcgttgggcattgtgtcaaggatgccgttcgaatggatgatcatgactctctccgaggcgcatggcacggtgccattgacggtggggacactgaagggcctccatctgttcgactatcgagccgggtatcagcagcatgatgcgggaaagcaatcagcccatactgttctggagcctcatggtccagacttctcaaaaatcttcgacgattctcggcctcttcctccgtacactgccctggcacagcctgggccacagagtatcctgcatctctccagtccctggaatccagaccagctttctgatgacatattcgtcgcggggaggttcccgagcatccttcactatgatagacgtatgttcccatcgatcaaagggaccatgcactctggtgctcagccgtgtagcctgacatctctgccgtatccgttctccggcgtcgacgtagaccttcgacgaagattgcaattgtcaaaagagcaagtcgagagatccaagagtgttcctggtggaagaactatcattgcatgtgggggctacaaaactaaaggttcattggagatctacggcttgtcttcagagacagatcaggatggctcaacacgagtttcctacgactgtgttaccaagaatcgcgtatccgcttctcagtctaagcttctctccgttatcacccatggcactcggatcgtcttttcagacggacaaggctacttgagatggatggaaagagatggcttcagtgaagtacgccgacacaagattgggaaatctgaaagaattacacaacgttctattttcgggaccatgcctggttcggatgatatcgctagaaaaattctctccacgcgagtgaaggggaacgacaacgagagaaccgatgatgatatcatattctgcacgggtgaagcactcggcttagtcagtttctcttctgaaccgattttctctgctgaagatttcgtcaaggattcatacacgcaagaggaggttttagaagaacaaaaagcgcaaagataccgcgatgaaatgagacgagtattggctcgcgacgctaatgcaatatggcatacgcaaaacctcggtcataacggcatatgaaaagcgactgcagtgtttctttgctcagggtagtattaaatgagccgtatggagcgtgttgagtgttccgtatgcgtgagacgattagaatacatacactagcccaggactaacaagtaactagaatgacagaatctcttactagctggagtaactgtatgagctcagcagttatgctactggaatagcagtggacagaagcggacgtgatgaccgtccgaactaacacatagagctcgaatagaagacatctgcacataatctcgctcgccccaacgtaattatgcggtgcccatgattgtcgttcagagctgaggatggagaccgttcagcaatacgcagcctgagctattgattgcaaatcgacgcatgattttcagtgagacagaacaattgagatccacaaggccgggttttgaaaggatggaagtgaagagatctcggaaaacgttggaaaaatgggcgcctcacaattggtgtaaggtgaggcggccaatcgtgggtcgtgggtctgggtcgaggcacttctcagccaatggcagtggtggatcctggcaagtctgggtttcggtgctgatgcataccgccatataccctgcaacattgctgagcctgtcatacaactgcccttctcgttcacaatttctactactcttgacaatctgaaccaatcgttgcatatgaggttctcgaagcatagcatggcatgaagatgcgaagggctcgagcacagcaattgatgtggataaatcgccttctctattctcggccactgcttcgtatcgagaggccgtcgatgagagcctattgcggagtctgcggtttgcccacattgcgtaagattgtcgccttgggatcttgtctacaggccaaccttgctgcaaagaatgtcagacgacttgcctaagatgtattattctttcggagcacgatgatccatatgttcagcacgaatcaggcactcagatggaccatgctatgtataggacaatgctagaatgcagaagagaccaggtatcacaaaatccgtgttggactagacgagtctccagtatcaccggcgcgtaccagacagagtcttcgccacacgcgagcagctgctcgacgtcaatgccgacactgcaatgtgacgaccacttgcccttgtaggtaggaatcattcacttgaaaaggatgcctcgtcttgatggcctcgctggcataggccacgacgtatcatccgtcactggtctccatgcttgtgcatataccagcactcacatactgcagctactgcatcccgttttgccacgcgcaatagatgcaacgccacgccatggcactgacaaagaattgacaatcctccaacgatcttcttcacgattttcctgctctctatctgatatgttttcttctataattccttctttctcttgatttgctgtatacaacttttctcaccaacgcacatgccgccagtggtcttagcgatcatccgtggcaacagttcccagctgctccactagcgtgcgtggctcctcacattcacttcttaccgctctccgtgacgaacatgtgccttgaacatttttgcatccctcgaccattgctgtagccgcagatcccaggatccgttgtctgggacggcctggtcttctgcgtctatccttgaaagtggattgatgtcttaaatctttggccctaacccagcatcttagatgggatccatcccttttgatacccaccctcctgttgcagtaccacgtcccgagacatcctgaagtgaggctaacgtcaagttcaccgctgccattaccgacgagtcccgcaactactctaagtgattgagatcacgcgaccggggaaccctggagtacactcagttttatcttttggtgcaaccaattggactggcggtaaaggggcaaaaatcctacactattcatgtcaaccgctatatgcgtagaggagatcctcattttacgggacacgacttgtactacagcggtgtaatctatcgatcatacatacccgcttcgttctacttctcccgattcctttctacaacattatcattggattcattgcggaagtgtcatcgagcatgtatgatggccggctggttcgagggaggagccgagatgtcacgctcattgagcgactcggcagttccctcgggccaagattatgacggccatcctgaatttggcattagaaaacgacacttttaccatgccgaccgcgtcgatatcctcgacggctatcgtcaagattaccggtggaagagaccccgacacgatctttattccgagtatacgattccacggtccgccagaagtcaaactcctgccttttttattatcaaggaaaacaacggacagtcgcagcgtagtagtacggcaccattagaagatggctgcccaccgacggccgacacgcgaattatgttttctgaggcgcaggctgacttccgggcgcgcgacggctgtaccggcattgaccgaaggcaagagtccaaggtagacaatcaccgtcatgatgcggctgccaatgaagtagcaagctatatgagcgattctcggagaaggaagagactatctcagcacgagaggatactgaaaggtcttatcagtcctaaaagcaagggcctaggttctgccgaatttgaaatcgatgacgaagcgctacaaaacattttctacacggcgaacgaaatattctttgggggagccttgaaaggaagggtcgtttgggtctggaaagaacttcaaagcaatctcatagggactactgcctggagagaagctcctgatggtattggcgttcagaccctaatcgtcttgtctgcacgggtccttcggaacgaaaaatacaataggcgcctgcttatagcaaccttcatccacgagcttatccactgctacctgtttgtctcatgtggatatcaacccgataattgcggggggcatacgagcgggttcaagcgcattgcggcactcatcaacgcatgggtgggagaagataacctccttcagctgcacaagatggaagctgaactcgaagacttcgagcacaagagcccgaacgtactggcgcgggatcacgtctcgggcggctgccaagtgcagcgtctgagtgacgggacgattgggtatatcattttgcaaccggaattacgtttatcggaccgaaccccaagctaaggataggggtcggttcactgcctgtatccccaaggatacaacccaacgtttaagaaaggaagggatgcgaattgccgttcgttttgatgtatcattttcttgagtctcactatactgcatggcgatggcgttctactttgatggtataccatagatctcttgtcatctgtcgctagcatgcattcttttgttagctcctttctgttacatattatataagaaaccccgaaccgacttgcactcactcgattcggccctaatgagacgagaggatgtgagcaatcgagaatggctgcgacgaggattacgatgaggttacctcgtgataagctgtatggcagacgagtcgtcaaccacgcattttaggaagtatggcaatgctacttcctgttgcaaaagtttttccggaaatatgtacgaagcgggatcaactgctcttcaatgtagctatagggatgtagttgcacatagttgctgttcttgacgagcgatgtagttacctactactgtcgaggatactatttattggcgcagcgaacatggcaatgaatacgctatcacccacgaagagtcggaatgactctgaacttgaggtcttggcttttcatatacaacggacagtctgtgtggtgcagacggagcaacaggtattggtggattaactgcatcaccaaatcagaaattaccctgttggggttcttcagccttccagacttggagcaccacctctacctcctattcaactcatataaaggtgacgggaatgctttttgatttcaaaatgactaattttccgcaatctgttttcttccaagcctttttggcaagtgtctgattagatcagtatctcgaaaatgcatacttccaccacaggcctagccgcgttggcgtttgctggcttagtcaatagccatgccaggatgataactccacagcctcgagtggtacgagtccaacactctagaataacattggggagattactgacaatgatacatagacgggaccaaagcaggtagagcgctgcggtgcggtagtgacagcagtcttgcagaaaggtatgcccgctcgaccaggtactcgagaacataacactaagtgatcagatcttgccggccccatcgagaacgcagtgaacgcggccgatgcaaactacaaatgcaacgcatatctgtgccgcgggtaccagtacgaagataatacgagcaatgtcatggctctaaaggccggcgatgtcataccgtgccacattgatcttgttgcgggtcatcaccctgggtggtccgtaagtaaagtcttgaccgactatctgcaagggctacatgtgctgacattctggtggcgaagaatgtctctgtcgttgatctagcggcgaacaagatcattggcaacgaactgatttactgggcaaactggcccgacgcgacctcgggaccaccaaggaatgatacttccttcaacgtgacgattccggacggccttggatcttcatgtaacgcgggtggtaaatgtgcgatccaatggtactggtggtcagacagcaacgaccagacttatgagagctgcctcgacttttacatcaagtcgtagataattgtggctccgatggaattaccgacgagatgaaccaggagacagatagcatatttgatctagtcttaaatggtagagaagcattatgagacggacttggtattggaa

SEQ ID NO: 21631 - DNA, 1062 bp, Muscodor strobelii
  misc_feature: SGI cDNA ID NO. 567325
  misc_feature: Reduced expression when VOC is produced
  misc_feature: Encodes the peptide sequence at SEQ ID NO 21632
atgtcacgctcattgagcgactcggcagttccctcgggccaagattatgacggccatcctgaatttggcattagaaaacgacacttttaccatgccgaccgcgtcgatatcctcgacggctatcgtcaagattaccggtggaagagaccccgacacgatctttattccgagtatacgattccacggtccgccagaagtcaaactcctgccttttttattatcaaggaaaacaacggacagtcgcagcgtagtagtacggcaccattagaagatggctgcccaccgacggccgacacgcgaattatgttttctgaggcgcaggctgacttccgggcgcgcgacggctgtaccggcattgaccgaaggcaagagtccaaggtagacaatcaccgtcatgatgcggctgccaatgaagtagcaagctatatgagcgattctcggagaaggaagagactatctcagcacgagaggatactgaaaggtcttatcagtcctaaaagcaagggcctaggttctgccgaatttgaaatcgatgacgaagcgctacaaaacattttctacacggcgaacgaaatattctttgggggagccttgaaaggaagggtcgtttgggtctggaaagaacttcaaagcaatctcatagggactactgcctggagagaagctcctgatggtattggcgttcagaccctaatcgtcttgtctgcacgggtccttcggaacgaaaaatacaataggcgcctgcttatagcaaccttcatccacgagcttatccactgctacctgtttgtctcatgtggatatcaacccgataattgcggggggcatacgagcgggttcaagcgcattgcggcactcatcaacgcatgggtgggagaagataacctccttcagctgcacaagatggaagctgaactcgaagacttcgagcacaagagcccgaacgtactggcgcgggatcacgtctcgggcggctgccaagtgcagcgtctgagtgacgggacgattgggtatatcattttgcaaccggaattacgtttatcggaccgaaccccaagctaa

SEQ ID NO: 21632 - protein, 353 aa, Muscodor strobelii
  misc_feature: SGI Peptide ID NO. 567325
  misc_feature (133)..(312): NCBI GI: 261355144 Blast Desc: conserved [Verticillium albo-atrum VaMs.102]
  misc_feature (133)..(323): NCBI GI: 85117408 Blast Desc: NCU08347 [Neurospora crassa OR74A] gi|28927056|gb|EAA36014.1| NCU08347 [Neurospora crassa OR74A]
  misc_feature (134)..(309): NCBI GI: 171695256 Blast Desc: protein product [Podospora anserina] gi|170947870|emb|CAP60034.1| protein product [Podospora anserina]
  misc_feature (157)..(321): NCBI GI: 256735405 Blast Desc: [Nectria haematococca mpVI 77-13-4]
  misc_feature (135)..(316): NCBI GI: 145615860 Blast Desc: MGG_13465 [Magnaporthe grisea 70-15] gi|145009653|gb|EDJ94309.1| MGG_13465 [Magnaporthe grisea 70-15]
  misc_feature (177)..(310): NCBI GI: 154320598 Blast Desc: BC1G_01771 [Botryotinia fuckeliana B05.10] gi|150853460|gb|EDN28652.1| BC1G_01771 [Botryotinia fuckeliana B05.10]
  misc_feature (173)..(250): NCBI GI: 116182308 Blast Desc: CHGG_01782 [Chaetomium globosum CBS 148.51] gi|88186079|gb|EAQ93547.1| CHGG_01782 [Chaetomium globosum CBS 148.51]
  misc_feature: Useful for introducing or modulating the production of volatile compounds
MSRSLSDSAVPSGQDYDGHPEFGIRKRHFYHADRVDILDGYRQDYRWKRPRHDLYSEYTIPRSARSQTPAFFIIKENNGQSQRSSTAPLEDGCPPTADTRIMFSEAQADFRARDGCTGIDRRQESKVDNHRHDAAANEVASYMSDSRRRKRLSQHERILKGLISPKSKGLGSAEFEIDDEALQNIFYTANEIFFGGALKGRVVWVWKELQSNLIGTTAWREAPDGIGVQTLIVLSARVLRNEKYNRRLLIATFIHELIHCYLFVSCGYQPDNCGGHTSGFKRIAALINAWVGEDNLLQLHKMEAELEDFEHKSPNVLARDHVSGGCQVQRLSDGTIGYIILQPELRLSDRTPS

SEQ ID NO: 21633 - DNA, 6241 bp, Muscodor strobelii; identical to SEQ ID NO: 21630
  misc_feature: SGI EST ID NO. CUFF.50792.1
  misc_feature: Variant of the nucleotide sequence at SEQ ID NO 21631

SEQ ID NO: 21634 - DNA, 1908 bp, Muscodor strobelii
  misc_feature: SGI cDNA ID NO. 567326
  misc_feature: Encodes the peptide sequence at SEQ ID NO 21635
atggcttttcagacggcaagcttcgttactcttccagacgagattatactggatattctacggtggtcatttgtgctgatcgtaagcttcctactagtgctggaagctcgtgatatcgcaaatcttcagctcacctctcgtcaactctttaaggtatgccgagacaatacgttttggcgtagccgttgcctgattagagccaatctgcacgaacaaatatcacttcacaggcagggacccgactggtttgacgaggaaggcatcgcgctgactagcccgcccggtgaccttcacaatccgaatgagctgcactcggaggccatcgaaaacataagtctgctttcttccaagaagaggaaaaaggagtatcagcgaatagtcgccaattgggaccctacatttcccggtgaatccatttcttggtaccaagaatacatacatcgaaatgcaaaggcgtctacgaattggtttgaaaaacctcgtgttgcggaaagctcctatggagaaaccattgacgtacgaggtgttgcactgtacgcaccctccagggtgcgtggcgagctctttgcggtttcacccctcgaagatggatctgtctgcatatgggatgtcaaaggtgcgacaaaaaggaaaggtgcaatacttgcaaggtcaagcccaggtcttctctacacagaaaaaagacgccgtagcggcgttcctcgacggacaatagatagtggaatcgtcgaatgtgtgagcgtcgacaacgaaagacaagtggctttttttgctatggaagatgaacttgttgagttagatcttcagtcgttgggcattgtgtcaaggatgccgttcgaatggatgatcatgactctctccgaggcgcatggcacggtgccattgacggtggggacactgaagggcctccatctgttcgactatcgagccgggtatcagcagcatgatgcgggaaagcaatcagcccatactgttctggagcctcatggtccagacttctcaaaaatcttcgacgattctcggcctcttcctccgtacactgccctggcacagcctgggccacagagtatcctgcatctctccagtccctggaatccagaccagctttctgatgacatattcgtcgcggggaggttcccgagcatccttcactatgatagacgtatgttcccatcgatcaaagggaccatgcactctggtgctcagccgtgtagcctgacatctctgccgtatccgttctccggcgtcgacgtagaccttcgacgaagattgcaattgtcaaaagagcaagtcgagagatccaagagtgttcctggtggaagaactatcattgcatgtgggggctacaaaactaaaggttcattggagatctacggcttgtcttcagagacagatcaggatggctcaacacgagtttcctacgactgtgttaccaagaatcgcgtatccgcttctcagtctaagcttctctccgttatcacccatggcactcggatcgtcttttcagacggacaaggctacttgagatggatggaaagagatggcttcagtgaagtacgccgacacaagattgggaaatctgaaagaattacacaacgttctattttcgggaccatgcctggttcggatgatatcgctagaaaaattctctccacgcgagtgaaggggaacgacaacgagagaaccgatgatgatatcatattctgcacgggtgaagcactcggcttagtcagtttctcttctgaaccgattttctctgctgaagatttcgtcaaggattcatacacgcaagaggaggttttagaagaacaaaaagcgcaaagataccgcgatgaaatgagacgagtattggctcgcgacgctaatgcaatatggcatacgcaaaacctcggtcataacggcatatga

SEQ ID NO: 21635 - protein, 635 aa, Muscodor strobelii
  misc_feature: SGI Peptide ID NO. 567326
  misc_feature (11)..(631): NCBI GI: 261358633 Blast Desc: F-box domain-containing protein [Verticillium albo-atrum VaMs.102]
  misc_feature (6)..(631): NCBI GI: 171695248 Blast Desc: protein product [Podospora anserina] gi|170947866|emb|CAP60030.1| protein product [Podospora anserina]
  misc_feature (11)..(631): NCBI GI: 116182310 Blast Desc: CHGG_01783 [Chaetomium globosum CBS 148.51] gi|88186080|gb|EAQ93548.1| CHGG_01783 [Chaetomium globosum CBS 148.51]
  misc_feature (11)..(631): NCBI GI: 256735406 Blast Desc: NECHADRAFT_90306 [Nectria haematococca mpVI 77-13-4]
  misc_feature (4)..(631): NCBI GI: 85117412 Blast Desc: NCU08348 [Neurospora crassa OR74A] gi|28927057|gb|EAA36015.1| conserved [Neurospora crassa OR74A]
  misc_feature (11)..(631): NCBI GI: 46108082 Blast Desc: FG00923.1 [Gibberella zeae PH-1]
  misc_feature (34)..(631): NCBI GI: 145615872 Blast Desc: MGG_03738 [Magnaporthe grisea 70-15] gi|145009662|gb|EDJ94318.1| MGG_03738 [Magnaporthe grisea 70-15]
  misc_feature (11)..(624): NCBI GI: 156040327 Blast Desc: SS1G_12180 [Sclerotinia sclerotiorum 1980] gi|154696236|gb|EDN95974.1| SS1G_12180 [Sclerotinia sclerotiorum 1980]
  misc_feature (117)..(624): NCBI GI: 154320596 Blast Desc: BC1G_01770 [Botryotinia fuckeliana B05.10] gi|150853459|gb|EDN28651.1| BC1G_01770 [Botryotinia fuckeliana B05.10]
  misc_feature (11)..(624): NCBI GI: 169622045 Blast Desc: SNOG_14236 [Phaeosphaeria nodorum SN15] gi|160704682|gb|EAT78473.2| SNOG_14236 [Phaeosphaeria nodorum SN15]
MAFQTASFVTLPDEIILDILRWSFVLIVSFLLVLEARDIANLQLTSRQLFKVCRDNTFWRSRCLIRANLHEQISLHRQGPDWFDEEGIALTSPPGDLHNPNELHSEAIENISLLSSKKRKKEYQRIVANWDPTFPGESISWYQEYIHRNAKASTNWFEKPRVAESSYGETIDVRGVALYAPSRVRGELFAVSPLEDGSVCIWDVKGATKRKGAILARSSPGLLYTEKRRRSGVPRRTIDSGIVECVSVDNERQVAFFAMEDELVELDLQSLGIVSRMPFEWMIMTLSEAHGTVPLTVGTLKGLHLFDYRAGYQQHDAGKQSAHTVLEPHGPDFSKIFDDSRPLPPYTALAQPGPQSILHLSSPWNPDQLSDDIFVAGRFPSILHYDRRMFPSIKGTMHSGAQPCSLTSLPYPFSGVDVDLRRRLQLSKEQVERSKSVPGGRTIIACGGYKTKGSLEIYGLSSETDQDGSTRVSYDCVTKNRVSASQSKLLSVITHGTRIVFSDGQGYLRWMERDGFSEVRRHKIGKSERITQRSIFGTMPGSDDIARKILSTRVKGNDNERTDDDIIFCTGEALGLVSFSSEPIFSAEDFVKDSYTQEEVLEEQKAQRYRDEMRRVLARDANAIWHTQNLGHNGI

SEQ ID NO: 21636 - DNA, 6241 bp, Muscodor strobelii; identical to SEQ ID NO: 21630
  misc_feature: SGI EST ID NO. CUFF.50792.1
  misc_feature: Variant of the nucleotide sequence at SEQ ID NO 21634

SEQ ID NO: 21637 - DNA, 2232 bp, Muscodor strobelii
  misc_feature: SGI cDNA ID NO. 567327
  misc_feature: Encodes the peptide sequence at SEQ ID NO 21638
atgccggagctgactttccctgtagacatacaactgcacacatctcctgcaggcgcgatgaaggacagtgccgcctgtaagtccgagttgtcagctccgaaggataggttttacaacgaccttgacgaagctcaccgcagaattacctcaggcaaagggcttaggagccccagaaacagcggcaccttttccctcgtctccttgccaacggctgctcacctcatcgcaactggtgctgtgaatgcacatctacaggcccaagatgaccttgccctgccttcatcggctttcgcgactcgagcatctttggtacctcgcgcacgtcgtgcttcgataggttcacctgatgacctccaatctgcaccggtcatgcaagaaccacttggcaaccatgtttcgcttaaccagcagattgatgacaccatctatcagtttaacgaacaggacgccgatactagcagtaatacgattgaaagaattgtcgatgaatatagcgacaacgaggctcgcaatgccttgcagagagcgaacacggcctctccatcgctctctcacagtatggactcaagtgatgtctccagtgttacgaattctcagcacttgctcgacccagagggccagattttggagattgaagaagctagatatgtcgttgcaccattgcccctcaatcttccatccgcacaagtcacgaacaatgcgattcgacgctgttcaggggtgagagataacacgaatggagaccgtcgcgggctcttcggaactggcgatgaccacatcagccgagcaagaaattccgaccaagtcccagattcatccagcaatgatcgagacctggatcccgacaatagtgcccagtatcaaagatttctagaccctgataacgtccgcagaatcagtcagaccttaactggcagcgagagtatgctcctcgagcccagaaactcgacatacatgaatcccaactcccctccctctgtgcctgggggtcgcgatcgatcgcaccgatcaaccatctcgagtactcacattcctaggaacatcgagattgtggtcggtagtgattctgggcacagagagcaggatgccgattgggagactgagcctgctagcgagccaggattctctgggtcttacctcgcgaccacgccagctttcaatggatttaggactacgggcgactcaatagcaaatgtatcagacgagccggacgagcaggaagattctcatgagcatgccccatttgactcgcaagagaatcttgtcgacaatcctcaggtcatggaccccgacatgatattccagcgtcgacgatctggaaattggcatgtccatagagcatcgagttatcagatttcttctcgaggtcgccgacagatcccaggccgtagacagccaaaccctcctcccaacaccggcttcaacagaaaccaagagggaccgtctcgattcgatttttctgactcagcgtccacccttcctacacctgaatcaagcagactagccactcgtggaagtctgggcgtccgcggaaacccgccttaccctgagcgtaacattaatcgacgcagtcgcggcggagccagcggaagaccaaacttccctctttacgccgcagatgcggagcgatatagggatcatggcggtgcatcaggccagagtggccgacagagaggtcaagttcaggggagagattctgcagccccagcaatcggctcgttcacttttgaacttcttccacttgctcgcggtcaagagacacgaattcgccgaatgctcccagatgcaggcccagccactcctcttccgcctctacctcacaccccgtcacctaatgttcgcgttcacgatcggctgtctacggaattctcgcctagcgagtatggaacttctgggaatctgccgaacaatgttgacccagttccgctcgcaatgcctgagccgagcattattgaagcacaccctcacctctctactaaggctctcaataatcgtcgtcgtctcttttgggccttcgttattctctcgatcatcccctttttcgccgcccttgtgctattaaacggcacccaaggccttatccactggtgcaccgatggcaaatgtcgccgtcttagtgaaaaacagaagaaggtgctcaagtgggtgtttgcgattgaggtcatcctttacaccggcgtcgttgccggccttcctatctactttgtcatgaaagcaaagatgcctaactaa

SEQ ID NO: 21638 - protein, 743 aa, Muscodor strobelii
  misc_feature: SGI Peptide ID NO. 567327
  misc_feature (638)..(737): NCBI GI: 46108080 Blast Desc: FG00922.1 [Gibberella zeae PH-1]
MPELTFPVDIQLHTSPAGAMKDSAACKSELSAPKDRFYNDLDEAHRRITSGKGLRSPRNSGTFSLVSLPTAAHLIATGAVNAHLQAQDDLALPSSAFATRASLVPRARRASIGSPDDLQSAPVMQEPLGNHVSLNQQIDDTIYQFNEQDADTSSNTIERIVDEYSDNEARNALQRANTASPSLSHSMDSSDVSSVTNSQHLLDPEGQILEIEEARYVVAPLPLNLPSAQVTNNAIRRCSGVRDNTNGDRRGLFGTGDDHISRARNSDQVPDSSSNDRDLDPDNSAQYQRFLDPDNVRRISQTLTGSESMLLEPRNSTYMNPNSPPSVPGGRDRSHRSTISSTHIPRNIEIVVGSDSGHREQDADWETEPASEPGFSGSYLATTPAFNGFRTTGDSIANVSDEPDEQEDSHEHAPFDSQENLVDNPQVMDPDMIFQRRRSGNWHVHRASSYQISSRGRRQIPGRRQPNPPPNTGFNRNQEGPSRFDFSDSASTLPTPESSRLATRGSLGVRGNPPYPERNINRRSRGGASGRPNFPLYAADAERYRDHGGASGQSGRQRGQVQGRDSAAPAIGSFTFELLPLARGQETRIRRMLPDAGPATPLPPLPHTPSPNVRVHDRLSTEFSPSEYGTSGNLPNNVDPVPLAMPEPSIIEAHPHLSTKALNNRRRLFWAFVILSIIPFFAALVLLNGTQGLIHWCTDGKCRRLSEKQKKVLKWVFAIEVILYTGVVAGLPIYFVMKAKMPN

SEQ ID NO: 21639 - DNA, 4737 bp, Muscodor strobelii
  misc_feature: SGI cDNA ID NO. 567328
  misc_feature: Encodes the peptide sequence at SEQ ID NO 21640
atgtcagacggcacggtcctactcgtatcggcggccgtcggcttgggggctgctgctgtcctctctgtacccgccgtatttgcttttgctcgacagattcgcagcagagaccctaagtccgacggatatgaggatgaggatggcgtcagcaccgaagaggccgttaaagactttagcacgaagttgccaaaggcattaatcgtaatattttccattctaggactttgcatttctatttcacttgccgttctttccacactcagtcctaaaggtcttggtgatgggctatttctcgagaactggctagtcgtgccagcctgggcacttctggccttgcaagcagtatccatcgcagccagtcgcaaatcgatagatgcatatgatttgggcgtatactctatgctctcttgcgtagtcatcgctgcagtcctggtcgtacaagataacaaagtagcagtacatgttctgaagcacgaaaagcatgtgttcgcacttcgaattgctgagatcgtcgtcgttgtgtgcttaggtgtttccagcctgacaattccccgccgtcctgatgtcttctatcaaggcgagctggtagacaggcagcgcactgtttcagcttggagcagattcaactggagctggccatctgagattctagggcttgcaacaaagaagaagaacctcgatctgaacgacctcccgcggcctaatcactacgtgcgagccaaagacacaattgccgactggatgagccgagacttcaaacattccctctggctttctattatcttggcccacagaggcgcattcatactgcaatggattcttgctttgatctcggcagttttgaactttgctccacaatgggttgtgttacaattacttcatctgctcgagcgacgggatagttccgagtcggtcggctacgaaggctgggtttgggctatattgctaatggtatccattgtagcccaatcttgggtggaaactcacatcttctggctctcgtgggccgaaatctgtatccccgttcgtactcagctttcagcccttatcttccaaaagtcgatgagacgaaaggatgtgaaagaagctggcaagaaacactctgctgaagttgaatctacagaacccgccgtagccggtcccgtgggacagtcgaccagccgcgatgtacccgataccacagaggaaggagacgaagctgaaaaacttcagaaaagcaaacagggaactgtcaacttgatcggtgtcgatgccaagcgtgtcgcagaatttgccatgttcaactggtacttcccaggctcgctattcaagatgatcgtgtcccttgctttccttcttgacctgctcggttggcaagcgctcattgctgggttctctacgatgttggccgtgacacccgtgaacatatatttctcgaagaaatattccgatgcgcaagataggttgatgaaggtccgtgacgagaagttagaggtggtctcggaagcacttcaaggtattcgccagattaagttctctgccctagaaccacaatgggaaaacaaaattggttcagttcgagaaagagagctagcatgcgtctggaatgccttcaaatttgacgtgatgttgatggcctgctggattacaagtccgatcttactggccgccgtttcgctcgccgtatacgctacagtccacaataccctcacgccttcagtcgcatttgtgagtctcagtgtcttcaaagcattggaggttactctgtcggtggtccccgaacttactactgatcttctcgatgcctgggtatcggttaagcgaatcaacaaataccttcaaggagcagaagtttcgaagatcacgaaagatgccgacgagatctcgtttgacaatacttctatcgcctggccatccgaaattgtcgaaggcgaagacactcctgagcgattcgttctgcataacatcactgtcaatttcccgaagggtgaactctccgtcatctctggaaagactggcagcggcaagtccctgatgcttgctgcggttcttggcgaggttgaagtactatctggttcaattgcccggcctcgagttccttcgcttcatgaacgtcatgatagcaaagctaacaaagacaactggattatccctggtgccattgcctatgttgctcaaattccttggatcgagaatgcgaccgtcaaggagaacatcttatttggtcttccatatgacgaatcccgttacaggaagaccgtcgaagtctgcgccctgtcaaaagatcttcaaatgttcactgatggtgaggagaccgagattggtgccaatggcatcaatctcagtggcgggcaaaaatggcgtattactcttgcacgagctatctactctcgagccggtatcctggtactcgacgatatcttcagcgccgttgatgcccacgtcggccgacacatcttcgagaaatgccttaacggcgagctaggaagtggacgcacccgcgtccttgttacccaccatgttgcgctttgcgaaccgaagaccaaatatctggtagaactcggagagggtcgtgttctcaatgctgggcttgtgtcagaattagaagagacgggtaccctagagctaattaagagtcatgagcaaggagaagcagaaatacgggaagacgaagagaccactgcagtcaactctgagcagacgtcccagactggcggcgacgttatcggagaacctcttgccaaagttccctcaaaggttcaaacgccacgcaaattcgtcgaggacgaaaagaaagaggagggcgcaatcaaagtgaaggtgtacaagacgtatctcaagtacagcggctcgtggccattttggtctggagctgtcctccttttcctcgtcgtccaagttctgaccgtaggccgatcgtggtggcttcgcgtgtggacgggatcttatgaagaatccgagatgcacgtcacaacgcaaacaaaacctttcagctacccctatgctcttcaacagaccagccttagccatatcatgaaaccgctgtatgtggcacccgagcatggaatcaactactacctaagcatctacgttgtcctgtcggttgtagcatcgctgcttggtactatgcggtggtactacacctttagaggctccctgcgcgcatcgcgagagttgtttgctcgtatcaactttgttgttcttcgagctccactgcgatggctggacacagtgccagttgggcgcattctaaatcgcttcaccgctgacttccactccgtggacacacatttggcctacaccgttgcattctcagctaattctttcttgaatcttttcggggtcatcgtcgctgcccttttcgtgtcgccgatcatcatcgttctcgctttcgttcttctagggatatgcctcatatatgcatacaggtatcttcacggtgctcgatcagtcaagagaatggaatccatcaccaagtcacctgtattcgaacagttcgggtccactttgacgggtgtgttaactatcagagcattcaacaagtcagacacgtacgttgaacgcatggaccgcaaacttgatgactggggtaccacaacctggcatttgtggttattcaaccgctggatgggttggcgcatgtctgttgtcggcagtttcttcgcctcctttgtcgctttcgtcatcctcctttctcccgacatgagctcagctcttgctggtttcgccctctcattcgccctggagttctcgaactacgtcatgtggacacttcgccactacgccaacgccgagctcgagatgaatgccgcggagcgcatcgttgaatacacggagctcccgactgaagacctcaatggtgtcagtccacccgctgcctggcctactgaaggccgcgtcgaagtcaacgatcttgtagtcagctacgccgatgatctgccacccgttctcaagggtctcaacttctccatcaaccgcaacgaaagagtgggagttatcggaaggacaggagcaggcaagtcctcgttgacattagccctattccggttcatcgaggcccggtctggcagtatctacattgacggacttgacatctccaaaatcaagcttcatgacctgcgcagccgactagccatcattccacaagaccccgtcctcttcagtggcaccgtccgctccaatttagatcctttcgataaccacactgacgccgagctgtttgactgtctcgcacgtgtccacctcatttcagagaatgatacttcgccaagtacacccatccctgacaatagtagcgataacaacaagaagaacaagaatatcttccgcgatcttgcaagcaccatctcagaaggaggcctgaatctctcgcaaggccaacgccaattgctttgtctagcgcgtgccatcgtatcgcgacccaaagtcatggttctcgacgaagcaacatcagctgtggatatggcaactgacgcactgattcagcgctccatccgcgaggaatttggcgacagcacactcgttgttattgcccaccgactatccacgattgccgatttcgacaggattctggtactgagcgatggaattgtggcagaatacggtacaccgagagagctctgggaagctggtgaagagaacgatggggagaacgaaaagggtatctttagggcaatgtgcgaacaaagcggcgaaagggaactattacgaaagattgtttatggggacgcaagcaccacggctgtgaagagccattga

SEQ ID NO: 21640 - protein, 1578 aa, Muscodor strobelii
  misc_feature: SGI Peptide ID NO. 567328
  misc_feature (952)..(1251): Pfam Id: PF00664 Pfam Desc: ABC transporter transmembrane region
  misc_feature (1320)..(1522): Pfam Id: PF00005 Pfam Desc: ABC transporter
  misc_feature (656)..(850): Pfam Id: PF00005 Pfam Desc: ABC transporter
  misc_feature (1013)..(1251): Pfam Id: PF00664 Pfam Desc: ABC transporter transmembrane region
  misc_feature (438)..(582): Pfam Id: PF00664 Pfam Desc: ABC transporter transmembrane region
  misc_feature (656)..(834): Pfam Id: PF00005 Pfam Desc: ABC transporter
  misc_feature (14)..(1569): NCBI GI: 116182314 Blast Desc: CHGG_01785 [Chaetomium globosum CBS 148.51] gi|88186082|gb|EAQ93550.1| CHGG_01785 [Chaetomium globosum CBS 148.51]
  misc_feature (11)..(1568): NCBI GI: 85117452 Blast Desc: NCU08358 [Neurospora crassa OR74A] gi|28927067|gb|EAA36025.1| conserved [Neurospora crassa OR74A]
  misc_feature (1)..(1572): NCBI GI: 171695368 Blast Desc: protein product [Podospora anserina] gi|170947926|emb|CAP60090.1| protein product [Podospora anserina]
  misc_feature (3)..(1572): NCBI GI: 39943312 Blast Desc: MGG_03736 [Magnaporthe grisea 70-15] gi|145009665|gb|EDJ94321.1| MGG_03736 [Magnaporthe grisea 70-15]
  misc_feature (26)..(1568): NCBI GI: 212529656 Blast Desc: ABC bile acid transporter, [Penicillium marneffei ATCC 18224] gi|210074383|gb|EEA28470.1| ABC bile acid transporter, [Penicillium marneffei ATCC 18224]
  misc_feature (20)..(1568): NCBI GI: 242762511 Blast Desc: ABC bile acid transporter, [Talaromyces stipitatus ATCC 10500] gi|218723588|gb|EED23005.1| ABC bile acid transporter, [Talaromyces stipitatus ATCC 10500]
  misc_feature (21)..(1569): NCBI GI: 154321708 Blast Desc: BC1G_01001 [Botryotinia fuckeliana B05.10] gi|150850248|gb|EDN25441.1| BC1G_01001 [Botryotinia fuckeliana B05.10]
  misc_feature (8)..(1566): NCBI GI: 156045958 Blast Desc: SS1G_09255 [Sclerotinia sclerotiorum 1980] gi|154693651|gb|EDN93389.1| SS1G_09255 [Sclerotinia sclerotiorum 1980]
  misc_feature (12)..(1568): NCBI GI: 256734745 Blast Desc: NECHADRAFT_65842 [Nectria haematococca mpVI 77-13-4]
  misc_feature (8)..(1568): NCBI GI: 46107572 Blast Desc: FG00669.1 [Gibberella zeae PH-1]
  misc_feature (412)..(1557): SWISSPROT Homolog: EC 3.6.3.44 Xenobiotic-transporting ATPase
MSDGTVLLVSAAVGLGAAAVLSVPAVFAFARQIRSRDPKSDGYEDEDGVSTEEAVKDFSTKLPKALIVIFSILGLCISISLAVLSTLSPKGLGDGLFLENWLVVPAWALLALQAVSIAASRKSIDAYDLGVYSMLSCVVIAAVLVVQDNKVAVHVLKHEKHVFALRIAEIVVVVCLGVSSLTIPRRPDVFYQGELVDRQRTVSAWSRFNWSWPSEILGLATKKKNLDLNDLPRPNHYVRAKDTIADWMSRDFKHSLWLSIILAHRGAFILQWILALISAVLNFAPQWVVLQLLHLLERRDSSESVGYEGWVWAILLMVSIVAQSWVETHIFWLSWAEICIPVRTQLSALIFQKSMRRKDVKEAGKKHSAEVESTEPAVAGPVGQSTSRDVPDTTEEGDEAEKLQKSKQGTVNLIGVDAKRVAEFAMFNWYFPGSLFKMIVSLAFLLDLLGWQALIAGFSTMLAVTPVNIYFSKKYSDAQDRLMKVRDEKLEVVSEALQGIRQIKFSALEPQWENKIGSVRERELACVWNAFKFDVMLMACWITSPILLAAVSLAVYATVHNTLTPSVAFVSLSVFKALEVTLSVVPELTTDLLDAWVSVKRINKYLQGAEVSKITKDADEISFDNTSIAWPSEIVEGEDTPERFVLHNITVNFPKGELSVISGKTGSGKSLMLAAVLGEVEVLSGSIARPRVPSLHERHDSKANKDNWIIPGAIAYVAQIPWIENATVKENILFGLPYDESRYRKTVEVCALSKDLQMFTDGEETEIGANGINLSGGQKWRITLARAIYSRAGILVLDDIFSAVDAHVGRHIFEKCLNGELGSGRTRVLVTHHVALCEPKTKYLVELGEGRVLNAGLVSELEETGTLELIKSHEQGEAEIREDEETTAVNSEQTSQTGGDVIGEPLAKVPSKVQTPRKFVEDEKKEEGAIKVKVYKTYLKYSGSWPFWSGAVLLFLVVQVLTVGRSWWLRVWTGSYEESEMHVTTQTKPFSYPYALQQTSLSHIMKPLYVAPEHGINYYLSIYVVLSVVASLLGTMRWYYTFRGSLRASRELFARINFVVLRAPLRWLDTVPVGRILNRFTADFHSVDTHLAYTVAFSANSFLNLFGVIVAALFVSPIIIVLAFVLLGICLIYAYRYLHGARSVKRMESITKSPVFEQFGSTLTGVLTIRAFNKSDTYVERMDRKLDDWGTTTWHLWLFNRWMGWRMSVVGSFFASFVAFVILLSPDMSSALAGFALSFALEFSNYVMWTLRHYANAELEMNAAERIVEYTELPTEDLNGVSPPAAWPTEGRVEVNDLVVSYADDLPPVLKGLNFSINRNERVGVIGRTGAGKSSLTLALFRFIEARSGSIYIDGLDISKIKLHDLRSRLAIIPQDPVLFSGTVRSNLDPFDNHTDAELFDCLARVHLISENDTSPSTPIPDNSSDNNKKNKNIFRDLASTISEGGLNLSQGQRQLLCLARAIVSRPKVMVLDEATSAVDMATDALIQRSIREEFGDSTLVVIAHRLSTIADFDRILVLSDGIVAEYGTPRELWEAGEENDGENEKGIFRAMCEQSGERELLRKIVYGDASTTAVKSH

SEQ ID NO: 21641 - DNA, 6146 bp, Muscodor strobelii
  misc_feature: SGI EST ID NO. CUFF.50762.0
  misc_feature: Variant of the nucleotide sequence at SEQ ID NO 21639
tttctaaattcgacgtcgtcgtcccagtgatgtgatgacattctcaacattctactcatataaacttctgaaggccgattgagtcaccgtggatttcttaacatcaactgaccttctcaactgagcctaggactcttatagctaccaccacatggtgcatgcgcatcccgcttaatctgcacaccagcacgccaggatccgattgtgtttctcggaggcagttctcggagatcactttcgattgtattgtcaatcagtttgactcactgagaatcctacactaggagaattcccacctctcgtacgaaccccgctcattaaaccttgcagctattcgagaagggtaacgcggtgcgtccacccttttacgttcctcccgcgtagtgctgtgcatcagttgaggctggtatccggacagatctatacagtacatacttcccgggctgccataccatacctacgtcccgacaaattggaatcccgccgagaagctacaagggcgtctattgttgggagtatcaaacgggcatcggctagagactagaggcaggaccctcgagcgaactatcccttttcatgacaagactaggattgataaggacagcaactaggtcttgactctgcactaacactcactcccgccgccaagaggtggtcggcatcatgagtcaatcggtgacggcaagccattagttacgtgcatcccgtactcgtacagtgaattggacgttgcccgtgcatgttaccgtctgtgcagtctgtaaactattcgccgttgcagactacctctctcagtcacctcaacatcccatcttcccgccttcgttcgtcaaagtggtatcgtagtcactgattgataatcggtgtccgctgttgtggcgcggtagctcttcaatggcccactattgaagaaaaaaccgatccgacctttttccaaaggtctaaatacctagatatttctgtgagcggctttcccagagaatatcctaagacactgcctcagagccgccggcaggactacgtagtgcgacgcttcccttgcgcgcggccgaacgcgctcatcagaaatcgtcctgcgccctgaaggaattcgctcgtcatgtcagacggcacggtcctactcgtatcggcggccgtcggcttgggggctgctgctgtcctctctgtacccgccgtatttgcttttgctcgacagattcgcagcagagaccctaagtccgacggatatgaggatgaggatggcgtcagcaccgaagaggccgttaaagactttagcacgaagttgccaaaggcattaatcgtaatattttccattctaggactttgcatttctatttcacttgccgttctttccacactcagtcctaaaggtcttggtgatgggctatttctcgagaactggctagtcgtgccagcctgggcacttctggccttgcaagcagtatccatcgcagccagtcgcaaatcgatagatgcatatgatttgggcgtatactctatgctctcttgcgtagtcatcgctgcagtcctggtcgtacaagataacaaagtagcagtacatgttctgaagcacgaaaagcatgtgttcgcacttcgaattgctgagatcgtcgtcgttgtgtgcttaggtgtttccagcctgacaattccccgccgtcctgatgtcttctatcaaggcgagctggtagacaggcagcgcactgtttcagcttggagcagattcaactggagctggccatctgagattctagggcttgcaacaaagaagaagaacctcgatctgaacgacctcccgcggcctaatcactacgtgcgagccaaagacacaattgccgactggatgagccgagacttcaaacattccctctggctttctattatcttggcccacagaggcgcattcatactgcaatggattcttgctttgatctcggcagttttgaactttgctccacaatgggttgtgttacaattacttcatctgctcgagcgacgggatagttccgagtcggtcggctacgaaggctgggtttgggctatattgctaatggtatccattgtagcccaatcttgggtggaaactcacatcttctggctctcgtgggccgaaatctgtatccccgttcgtactcagctttcagcccttatcttccaaaagtcgatgagacgaaaggatgtgaaagaagctggcaagaaacactctgctgaagttgaatctacagaacccgccgtagccggtcccgtgggacagtcgaccagccgcgatgtacccgataccacagaggaaggagacgaagctgaaaaacttcagaaaagcaaacagggaactgtcaacttgatcggtgtcgatgccaagcgtgtcgcagaatttgccatgttcaactggtacttcccaggctcgctattcaagatgatcgtgtcccttgctttccttcttgacctgctcggttggcaagcgctcattgctgggttctctacgatgttggccgtgacacccgtgaacatatatttctcgaagaaatattccgatgcgcaagataggttgatgaaggtccgtgacgagaagttagaggtggtctcggaagcacttcaaggtattcgccagattaagttctctgccctagaaccacaatgggaaaacaaaattggttcagttcgagaaagagagctagcatgcgtctggaatgccttcaaatttgacgtgatgttgatggcctgctggattacaagtccgatcttactggccgccgtttcgctcgccgtatacgctacagtccacaataccctcacgccttcagtcgcatttgtgagtctcagtgtcttcaaagcattggaggttactctgtcggtggtccccgaacttactactgatcttctcgatgcctgggtatcggttaagcgaatcaacaaataccttcaaggagcagaagtttcgaagatcacgaaagatgccgacgagatctcgtttgacaatacttctatcgcctggccatccgaaattgtcgaaggcgaagacactcctgagcgattcgttctgcataacatcactgtcaatttcccgaagggtgaactctccgtcatctctggaaagactggcagcggcaagtccctgatgcttgctgcggttcttggcgaggttgaagtactatctggttcaattgcccggcctcgagttccttcgcttcatgaacgtcatgatagcaaagctaacaaagacaactggattatccctggtgccattgcctatgttgctcaaattccttggatcgagaatgcgaccgtcaaggagaacatcttatttggtcttccatatgacgaatcccgttacaggaagaccgtcgaagtctgcgccctgtcaaaagatcttcaaatgttcactgatggtgaggagaccgagattggtgccaatggcatcaatctcagtggcgggcaaaaatggcgtattactcttgcacgagctatctactctcgagccggtatcctggtactcgacgatatcttcagcgccgttgatgcccacgtcggccgacacatcttcgagaaatgccttaacggcgagctaggaagtggacgcacccgcgtccttgttacccaccatgttgcgctttgcgaaccgaagaccaaatatctggtagaactcggagagggtcgtgttctcaatgctgggcttgtgtcagaattagaagagacgggtaccctagagctaattaagagtcatgagcaaggagaagcagaaatacgggaagacgaagagaccactgcagtcaactctgagcagacgtcccagactggcggcgacgttatcggagaacctcttgccaaagttccctcaaaggttcaaacgccacgcaaattcgtcgaggacgaaaagaaagaggagggcgcaatcaaagtgaaggtgtacaagacgtatctcaagtacagcggctcgtggccattttggtctggagctgtcctccttttcctcgtcgtccaagttctgaccgtaggccgatcgtggtggcttcgcgtgtggacgggatcttatgaagaatccgagatgcacgtcacaacgcaaacaaaacctttcagctacccctatgctcttcaacagaccagccttagccatatcatgaaaccgctgtatgtggcacccgagcatggaatcaactactacctaagcatctacgttgtcctgtcggttgtagcatcgctgcttggtactatgcggtggtactacacctttagaggctccctgcgcgcatcgcgagagttgtttgctcgtatcaactttgttgttcttcgagctccactgcgatggctggacacagtgccagttgggcgcattctaaatcgcttcaccgctgacttccactccgtggacacacatttggcctacaccgttgcattctcagctaattctttcttgaatcttttcggggtcatcgtcgctgcccttttcgtgtcgccgatcatcatcgttctcgctttcgttcttctagggatatgcctcatatatgcatacaggtatcttcacggtgctcgatcagtcaagagaatggaatccatcaccaagtcacctgtattcgaacagttcgggtccactttgacgggtgtgttaactatcagagcattcaacaagtcagacacgtacgttgaacgcatggaccgcaaacttgatgactggggtaccacaacctggcatttgtggttattcaaccgctggatgggttggcgcatgtctgttgtcggcagtttcttcgcctcctttgtcgctttcgtcatcctcctttctcccgacatgagctcagctcttgctggtttcgccctctcattcgccctggagttctcgaactacgtcatgtggacacttcgccactacgccaacgccgagctcgagatgaatgccgcggagcgcatcgttgaatacacggagctcccgactgaagacctcaatggtgtcagtccacccgctgcctggcctactgaaggccgcgtcgaagtcaacgatcttgtagtcagctacgccgatgatctgccacccgttctcaagggtctcaacttctccatcaaccgcaacgaaagagtgggagttatcggaaggacaggagcaggcaagtcctcgttgacattagccctattccggttcatcgaggcccggtctggcagtatctacattgacggacttgacatctccaaaatcaagcttcatgacctgcgcagccgactagccatcattccacaagaccccgtcctcttcagtggcaccgtccgctccaatttagatcctttcgataaccacactgacgccgagctgtttgactgtctcgcacgtgtccacctcatttcagagaatgatacttcgccaagtacacccatccctgacaatagtagcgataacaacaagaagaacaagaatatcttccgcgatcttgcaagcaccatctcagaaggaggcctgaatctctcgcaaggccaacgccaattgctttgtctagcgcgtgccatcgtatcgcgacccaaagtcatggttctcgacgaagcaacatcagctgtggatatggcaactgacgcactgattcagcgctccatccgcgaggaatttggcgacagcacactcgttgttattgcccaccgactatccacgattgccgatttcgacaggattctggtactgagcgatggaattgtggcagaatacggtacaccgagagagctctgggaagctggtgaagagaacgatggggagaacgaaaagggtatctttagggcaatgtgcgaacaaagcggcgaaagggaactattacgaaagattgtttatggggacgcaagcaccacggctgtgaagagccattgatagactgactagttgtctggggcgtttctggtatggcaattgcatttcttttcaagcatggatgcatcgaagaaagaaagaaggaaagacttcataatgaagacgagaggatccaagaaggcaaggcgaactgcattacgattacatttgctccgcggaaaagtgtgtttgtacatagagaaaaggttctgcgaatgggaaatcgagtattccaactcttattatggatttttcatgcctacatcgtctacctgttcaatactgcaatgcctcacaaatctattcgtgatgctcgccatgagtctattac

SEQ ID NO: 21642 - DNA, 2154 bp, Muscodor strobelii
  misc_feature: SGI cDNA ID NO. 567329
  misc_feature: Reduced expression when VOC is produced
  misc_feature: Encodes the peptide sequence at SEQ ID NO 21643
atgaagtcgacgccgctgatcatcaattggcacgagaagaatgccccgatctactctgcccacttcgagccgcacggcaagggccgcctagccacgggtgccggagacaacagcgtgcgcatatggagggtcgagggcgagggcgaggaccgccgggtcgagtacctgtccacgctcaacaagcacacccaggccgtcaacgtcgtccgctgggcccccaagggcgagacgctggcctcggccggcgacgacggcaatgtcgtcctgtgggtgccctccgacacgcaccacgcaacgacgttcggcagcgagggcatcgaggacaaagagacctggcgcaccaaacacctcttccgccccaccaactcggagatatacgacctagcctggtcgccagatgccacctacttcatcgtcggcagcatggacaacgtcgcccgcatatacaacgcgagctcaggcatgctggtccggcagatcgccgagcacagtcactacgtccagggcgtggcctgggatcctctgaacgagtacatcgccacgcagtcgtccgatcggtcggtccacatctactcgctcaagacaaaagacggccagtacaccctgacgagccacggcaccgagacgcccaagattgccagccacgacaagatgaacctgcccgcgcgaagactgccctccaacagcccagcaccgtccgacatgaccagcaactaccgcgcccagctctccaccgccgccgacaccccctccgcctcgatcggctctcccgtgccctcagccccgggcacaccacactccgtccctctgcccatgaaccctcccagcgtcgtcagccacagcagacgatcctcgttctcctcccgaagatctgtctcgccagctccttcgctgccactcccagcagtcatgcccatggcagccgaggcttcccccaagcccaaccacaatagctcctttggcatgaaaaatgcccacctctacgccaacgagaccttgacgtctttcttcagacgcctcactttcactcccgacggcagcctgctcctcacccctgcgggccagttccagatgcagcatcaggctgatggccaaaagcccagcttcgaagtcataaataccgtctacatatacacgcgcggtggcatcaacaagccgcccatcgcccatctgcctggccacaagaagccctcggttgccatcaaatgctctcccatcctctacacactccgaacgacaccccccgtgacgaagcacatcaccatggacacctcagccgaagaccctatccccgccctccctgagcccatatccaagccctcgcccgccgtcatggatccgcctccaccgccaacgtcggccgtgaccgagccagagaaaccagcgacgccatctggcaagtcgctcaacatcgagaccaacgcttccagtgcgggcccgaagcccacatttgctctcccgtaccgaatggtatatgccgtagcaacacaagatgcagtcttgctctacgacacgcagcagaccacgcccatatgtgttgttagcaacctacatctggccacattcactgacttgacttggtcgagcgatggatctactctcttgatttcctcatcagacggcttctgttctaccctttccttcacgccaggcgagctgggtcaagagtacaagggggatttggtaagcgccaaatcctcactgccagcctcggccacgggcacttcatccaatcagcccacgcctgtcccgactcctacctctgtctttgcgccaccttctcctttcctggggcatcaacatcgaaactcggcctcgtcactgacggctccgtcaccacctccaacgacatcatttgtcggcgcgcgaccggcgtctcccaccagatcgaactcgacgtcatcggtggctacccaagcttcggtgatgaataatccccccctcattggtgggagcgtccccagcatcaccgccgccaactcgggaaaagtgaccggtgtgcctatgaccacgccacccgagacgcccggaagcagtggtaatatcgctgctggcgtcaagagggacgcaaccgagaacgaaaatgacgaacagccaaagaagcgcagaatcgcgcctacactcgtctctgagccgccggcaccaaagaattga

SEQ ID NO: 21643 - protein, 717 aa, Muscodor strobelii
  misc_feature: SGI Peptide ID NO. 567329
  misc_feature (53)..(91): Pfam Id: PF00400 Pfam Desc: WD domain, G-beta repeat
  misc_feature (112)..(150): Pfam Id: PF00400 Pfam Desc: WD domain, G-beta repeat
  misc_feature (154)..(192): Pfam Id: PF00400 Pfam Desc: WD domain, G-beta repeat
  misc_feature (4)..(43): Pfam Id: PF00400 Pfam Desc: WD domain, G-beta repeat
  misc_feature (1)..(709): NCBI GI: 256735451 Blast Desc: NECHADRAFT_98945 [Nectria haematococca mpVI 77-13-4]
  misc_feature (1)..(717): NCBI GI: 116182316 Blast Desc: CHGG_01786 [Chaetomium globosum CBS 148.51] gi|88186083|gb|EAQ93551.1| CHGG_01786 [Chaetomium globosum CBS 148.51]
  misc_feature (1)..(709): NCBI GI: 171695366 Blast Desc: protein product [Podospora anserina] gi|170947925|emb|CAP60089.1| protein product [Podospora anserina]
  misc_feature (1)..(717): NCBI GI: 46107568 Blast Desc: FG00667.1 [Gibberella zeae PH-1]
  misc_feature (1)..(708): NCBI GI: 164424885 Blast Desc: NCU08357 [Neurospora crassa OR74A] gi|157070704|gb|EAA36024.2| conserved [Neurospora crassa OR74A]
  misc_feature (1)..(711): NCBI GI: 261355260 Blast Desc: chromatin assembly factor 1 subunit B [Verticillium albo-atrum VaMs.102]
  misc_feature (1)..(710): NCBI GI: 156045954 Blast Desc: SS1G_09253 [Sclerotinia sclerotiorum 1980] gi|154693649|gb|EDN93387.1| SS1G_09253 [Sclerotinia sclerotiorum 1980]
  misc_feature (1)..(710): NCBI GI: 119480017 Blast Desc: chromatin assembly factor 1 subunit B, [Neosartorya fischeri NRRL 181] gi|119408191|gb|EAW18140.1| chromatin assembly factor 1 subunit B, [Neosartorya fischeri NRRL 181]
  misc_feature (29)..(709): NCBI GI: 154321710 Blast Desc: BC1G_01002 [Botryotinia fuckeliana B05.10] gi|150850249|gb|EDN25442.1| BC1G_01002 [Botryotinia fuckeliana B05.10]
  misc_feature (1)..(710): NCBI GI: 255943381 Blast Desc: Pc18g06320 [Penicillium chrysogenum Wisconsin 54-1255] gi|211587192|emb|CAP94856.1| Pc18g06320 [Penicillium chrysogenum Wisconsin 54-1255]
  misc_feature: Useful for introducing or modulating the production of volatile compounds
MKSTPLIINWHEKNAPIYSAHFEPHGKGRLATGAGDNSVRIWRVEGEGEDRRVEYLSTLNKHTQAVNVVRWAPKGETLASAGDDGNVVLWVPSDTHHATTFGSEGIEDKETWRTKHLFRPTNSEIYDLAWSPDATYFIVGSMDNVARIYNASSGMLVRQIAEHSHYVQGVAWDPLNEYIATQSSDRSVHIYSLKTKDGQYTLTSHGTETPKIASHDKMNLPARRLPSNSPAPSDMTSNYRAQLSTAADTPSASIGSPVPSAPGTPHSVPLPMNPPSVVSHSRRSSFSSRRSVSPAPSLPLPAVMPMAAEASPKPNHNSSFGMKNAHLYANETLTSFFRRLTFTPDGSLLLTPAGQFQMQHQADGQKPSFEVINTVYIYTRGGINKPPIAHLPGHKKPSVAIKCSPILYTLRTTPPVTKHITMDTSAEDPIPALPEPISKPSPAVMDPPPPPTSAVTEPEKPATPSGKSLNIETNASSAGPKPTFALPYRMVYAVATQDAVLLYDTQQTTPICVVSNLHLATFTDLTWSSDGSTLLISSSDGFCSTLSFTPGELGQEYKGDLVSAKSSLPASATGTSSNQPTPVPTPTSVFAPPSPFLGHQHRNSASSLTAPSPPPTTSFVGARPASPTRSNSTSSVATQASVMNNPPLIGGSVPSITAANSGKVTGVPMTTPPETPGSSGNIAAGVKRDATENENDEQPKKRRIAPTLVSEPPAPKN

SEQ ID NO: 21644 - DNA, 4210 bp, Muscodor strobelii
  misc_feature: SGI EST ID NO. CUFF.50815.2
  misc_feature: Variant of the nucleotide sequence at SEQ ID NO 21642
cggggagcttcgtcgattgatgcctgcatccacgcatgtcgactgcgtctatggatgtcagcatagtcctgtaggctttcggcaggaattagcagtcaccagtgactctaggtatgtgaggtcgggagacaccatggatggtccgtttgccctcggcgcatgattgttatgtatatagaattagatcagactccctgaccaacagcccgcaaaagctgaaagtctaataccactttacgtccccgctgccataatactttgaagctgcagttcaagttgcaacttaattgaaaacgtcggaggtcggtgcgactcgacggacttgtccccaactttgtgcctctcgcaattaaagcttgtgcctggctcgagtcccgcccccagccgcgacaaagtgcaaacgccaagttaccttgcttaggtacgccacaagctcgcaactcgggccatcgccaacgacttccatctcccattgtgcatgtgtgtaccgtcaatctacagtctatttccgcccattgtggcctcagagcctgcattcaacagccaggcacaacatccaccactcgcccacatctcgacagccctgttttttgacgacaaaaggccccctccagtcatcgaccgccgccagcgtcgtaccaccttttctctcttctctgacagcctgcagcaccacctgtctgctggacgacttgttcctggtttctctagccttgttcttgattcattgagcccgtgcttcctcgacatcctctccgacatcctctccgacatcctctccgacctcccctccgacatccgtctgtctcgacacgggcacgctcttggtcgcagaagctgcgtgctcgtcctctacttaacacctacctacacaacgacttgccgtagctcctagctcaccccagctcgcctaatatctaatctatgtctcccgagacgcggccaagatgaagtcgacgccgctgatcatcaattggcacgagaagaatgccccgatctactctgcccacttcgagccgcacggcaagggccgcctagccacgggtgccggagacaacagcgtgcgcatatggagggtcgagggcgagggcgaggaccgccgggtcgagtacctgtccacgctcaacaagcacacccaggccgtcaacgtcgtccgctgggcccccaagggcgagacgctggcctcggccggcgacgacggcaatgtcgtcctgtgggtgccctccgacacgcaccacgcaacgacgttcggcagcgagggcatcgaggacaaagagacctggcgcaccaaacacctcttccgccccaccaactcggagatatacgacctagcctggtcgccagatgccacctacttcatcgtcggcagcatggacaacgtcgcccgcatatacaacgcgagctcaggcatgctggtccggcagatcgccgagcacagtcactacgtccagggcgtggcctgggatcctctgaacgagtacatcgccacgcagtcgtccgatcggtcggtccacatctactcgctcaagacaaaagacggccagtacaccctgacgagccacggcaccgagacgcccaagattgccagccacgacaagatgaacctgcccgcgcgaagactgccctccaacagcccagcaccgtccgacatgaccagcaactaccgcgcccagctctccaccgccgccgacaccccctccgcctcgatcggctctcccgtgccctcagccccgggcacaccacactccgtccctctgcccatgaaccctcccagcgtcgtcagccacagcagacgatcctcgttctcctcccgaagatctgtctcgccagctccttcgctgccactcccagcagtcatgcccatggcagccgaggcttcccccaagcccaaccacaatagctcctttggcatgaaaaatgcccacctctacgccaacgagaccttgacgtctttcttcagacgcctcactttcactcccgacggcagcctgctcctcacccctgcgggccagttccagatgcagcatcaggctgatggccaaaagcccagcttcgaagtcataaataccgtctacatatacacgcgcggtggcatcaacaagccgcccatcgcccatctgcctggccacaagaagccctcggttgccatcaaatgctctcccatcctctacacactccgaacgacaccccccgtgacgaagcacatcaccatggacacctcagccgaagaccctatccccgccctccctgagcccatatccaagccctcgcccgccgtcatggatccgcctccaccgccaacgtcggccgtgaccgagccagagaaaccagcgacgccatctggcaagtcgctcaacatcgagaccaacgcttccagtgcgggcccgaagcccacatttgctctcccgtaccgaatggtatatgccgtagcaacacaagatgcagtcttgctctacgacacgcagcagaccacgcccatatgtgttgttagcaacctacatctggccacattcactgacttgacttggtcgagcgatggatctactctcttgatttcctcatcagacggcttctgttctaccctttccttcacgccaggcgagctgggtcaagagtacaagggggatttggtaagcgccaaatcctcactgccagcctcggccacgggcacttcatccaatcagcccacgcctgtcccgactcctacctctgtctttgcgccaccttctcctttcctggggcatcaacatcgaaactcggcctcgtcactgacggctccgtcaccacctccaacgacatcatttgtcggcgcgcgaccggcgtctcccaccagatcgaactcgacgtcatcggtggctacccaagcttcggtgatgaataatccccccctcattggtgggagcgtccccagcatcaccgccgccaactcgggaaaagtgaccggtgtgcctatgaccacgccacccgagacgcccggaagcagtggtaatatcgctgctggcgtcaagagggacgcaaccgagaacgaaaatgacgaacagccaaagaagcgcagaatcgcgcctacactcgtctctgagccgccggcaccaaagaattgacgaaggaccttttcggtctacatcataacacgataggtaatcggccgaagtgggcatcaggagtccaggcaatggaccaggaggagagattcaagaggacttgagtcctctggtcaggatacatgaactggtcagtatccttgtatcgtgctggctgtattcggtatcgctcgctagccaatggtgatttttttcaagtgggtttgctactgtatgtttacgcgaatagctggcagggcgagcatttggagttattaggaaaataccaaggcgattttacaaggggcaactagcactttctgtcttctcactgttggttctgctgaataagtgatactttggtgcttgattggctaatttactacttcggtaatctctagagacgatggataaaaggtacaaggctatcgacatgcgttccgtacgccttgcttcctacctcgtgacatgatgtggcgatcgagccgagggaatcgttgtgaaagaaactaagtccatttgggtttctcagttgctaaatgctcggcagctcaagtggagggcagagagatacgagcatcatctctggacgagaatgagcgcagtgaaaatctctaagggatagagttcgtgaaatggctggttatgccacatttagactagaatctgggtctgatgctggaaatcaggtgagcaggcggtgtaggatagaggtctcgtgatctatttcctggcttgacatggcgttgttgtggttagttacgattacatctagataggtacacgtctgaatggatttatgtggtttgatttgttaatttgacaacgctggttgtcaatagtcacctgcaggttgatattgactccaatgggtaatatgttatgatagattcggtgaaagttccaactcccctaccgaataccctagtccaccatcccgatgcggaacgggtacctcccgcaggggatggatgcttgttagctgtacgtaagaattggaactttcaaaaacagaaaatgcaggcctcatgtatatctcctgggattgatgaaagtggtgaaatgagatgttcgagagtgcatctcgtacgcatgatttgttggtggtgaacaatgggttgagaaattcg

SEQ ID NO: 21645 - DNA, 1950 bp, Muscodor strobelii
  misc_feature: SGI cDNA ID NO. 567330
  misc_feature: Reduced expression when VOC is produced
  misc_feature: Encodes the peptide sequence at SEQ ID NO 21646
atgcgcgttacgcgggcgtcgctacctctactgtcgttaatctcggccgtactggctgctccggatagcaatgttggtggtcttgatgctatcacagcgctagagattctgcgccgggctgcgccaaacagtccctcgggcgactatgcgcccgctaccgtcgattgtccttcagacaagcccaccgttcgaggcgctggctctctgtccaagaacgagaccgactggctgcaaaagcgccgcccaaacacggtacaacccatgattgacttcttggatcgcgccaacataagtggtttcgatgctggcgcgtgggtgcaatccaactccaagaactactcagttgttccgaatattggtatcgcctgctctggtggaggatatcgtgctcttatgaatggcgctgggtttatagcggctgccgatgatcgcacagatggcaccaagaacactggcggaatcggtggactattgcaggcttccacatatcttgccggtctctccggaggcggctggctcgtaggatccatctttgccaacaacttttcaaccgtcactcagcttcgcgacgggttcacagacactgcggtatggcagttctcaaactccatcttcgaggggccgaagagccatggtgtcgacattctcaatacagtggattactggaccgatgtttacgacgctgtgagcaataaggacgaggctggttatgaagtgacactcaccgattactggggacgagctctgtcttatcaactgatcaatgctgacgccggcgggccggcttacactttctcgtctattgccgacacggacagctttacgtccgccgatacccccatgcctattctagtcgcggatgagcgctcgcccggcacagttgttgtgtcgctaaatgcgacagtctacgagttcaatccgtgggaattcggctcgtgggatccaacggtctacggatttatacccacggaatacgtagggtcgaacttcagtaatggtgaaatctcggacaatggaaaatgcgtgcgagggtttgatcaatacggctacgttatgggcacgagtagttcgctattcaaccagttcttgttgaccaacatttccacgtacaatgtgcccgacgttatcaccgatgctcttcaaagtgtgctggaatctctcgacgacaccgaggaggacatcgcgaagtgggagccgaatccgttctacaagtacaacgcggacaccaaccccagtgcggacgacacactcctcacgcttgtggatggtggcactgatttgcaaaacatcccgcttcatcctctcatccagcccaatcgcgccgtcgacgtcatctttgccgtcgactcttccgccgacactgtcttcaactaccctaatggcacggcactgcgcgcgacttacgatcgcaccatgggagatatctctaacggcacgcaatttcccaaggtgcccgatgctaatacttttatcaacctaaagttgaaccaacagcctacattcttcggctgcaatacctcggaattcaagaacggctctaacatcccgccgctgatcgtctacatgcctcttgcaccgtacactgcctacagcaacgcatcgaccttcgacccatcgtacaccgactcagagcgcaatgcgttcattgaaaatggattgaacgttgcaaccatgggcaacggcaccgtggaatccaattggcccgcatgcgcggcgtgcgcggtgctgtataggagcttggagcgcgaggaccacgtcattccagacacgtgccaggaatgtttcaagaaacactgctggaatggggagacggatacaacggataacggggtatacgagcctcagtctatcctgacgctcgcgacatatgacagctctgggtctattgttagactgggctgtttagcttgggctttggctggcgttgtgggcttggctttggcgctataa

SEQ ID NO: 21646 - protein, 649 aa, Muscodor strobelii
  misc_feature: SGI Peptide ID NO. 567330
  misc_feature (119)..(605): Pfam Id: PF01735 Pfam Desc: Lysophospholipase catalytic domain
  misc_feature (9)..(629): NCBI GI: 164427268 Blast Desc: NCU03141 [Neurospora crassa OR74A] gi|67477337|sp|O42790.2|PLB_NEUCR RecName: Full=Lysophospholipase; AltName: Full=Phospholipase B; Flags:
  misc_feature (11)..(619): NCBI GI: 46116066 Blast Desc: FG03875.1 [Gibberella zeae PH-1]
  misc_feature (32)..(629): NCBI GI: 2895862 Blast Desc: lysophospholipase [Neurospora crassa]
  misc_feature (32)..(629): NCBI GI: 2895860 Blast Desc: lysophospholipase [Neurospora crassa]
  misc_feature (28)..(649): NCBI GI: 256731920 Blast Desc: NECHADRAFT_61439 [Nectria haematococca mpVI 77-13-4]
  misc_feature (1)..(645): NCBI GI: 169773469 Blast Desc: [Aspergillus oryzae RIB40] gi|83769064|dbj|BAE59201.1| protein product [Aspergillus oryzae]
  misc_feature (12)..(607): NCBI GI: 156057597 Blast Desc: SS1G_04530 [Sclerotinia sclerotiorum 1980] gi|154702315|gb|EDO02054.1| SS1G_04530 [Sclerotinia sclerotiorum 1980]
  misc_feature (10)..(649): NCBI GI: 261204131 Blast Desc: lysophospholipase [Ajellomyces dermatitidis SLH14081] gi|239587064|gb|EEQ69707.1| lysophospholipase [Ajellomyces dermatitidis SLH14081]
  misc_feature (29)..(647): NCBI GI: 240281747 Blast Desc: lysophospholipase Plb1 [Ajellomyces capsulatus H143]
  misc_feature (29)..(618): NCBI GI: 225554228 Blast Desc: lysophospholipase Plb1 [Ajellomyces capsulatus G186AR]
  misc_feature (9)..(629): SWISSPROT Homolog: EC 3.1.1.5 Lysophospholipase
  misc_feature: Useful for introducing or modulating the production of volatile compounds
MRVTRASLPLLSLISAVLAAPDSNVGGLDAITALEILRRAAPNSPSGDYAPATVDCPSDKPTVRGAGSLSKNETDWLQKRRPNTVQPMIDFLDRANISGFDAGAWVQSNSKNYSVVPNIGIACSGGGYRALMNGAGFIAAADDRTDGTKNTGGIGGLLQASTYLAGLSGGGWLVGSIFANNFSTVTQLRDGFTDTAVWQFSNSIFEGPKSHGVDILNTVDYWTDVYDAVSNKDEAGYEVTLTDYWGRALSYQLINADAGGPAYTFSSIADTDSFTSADTPMPILVADERSPGTVVVSLNATVYEFNPWEFGSWDPTVYGFIPTEYVGSNFSNGEISDNGKCVRGFDQYGYVMGTSSSLFNQFLLTNISTYNVPDVITDALQSVLESLDDTEEDIAKWEPNPFYKYNADTNPSADDTLLTLVDGGTDLQNIPLHPLIQPNRAVDVIFAVDSSADTVFNYPNGTALRATYDRTMGDISNGTQFPKVPDANTFINLKLNQQPTFFGCNTSEFKNGSNIPPLIVYMPLAPYTAYSNASTFDPSYTDSERNAFIENGLNVATMGNGTVESNWPACAACAVLYRSLEREDHVIPDTCQECFKKHCWNGETDTTDNGVYEPQSILTLATYDSSGSIVRLGCLAWALAGVVGLALAL

SEQ ID NO: 21647 - DNA, 1752 bp, Muscodor strobelii
  misc_feature: SGI cDNA ID NO. 567331
  misc_feature: Encodes the peptide sequence at SEQ ID NO 21648
atgcatcccgctcccagcctggccgaatcgttccccaaaagcaccaaaccggacgatagacctcagcatgtctcttttcagcaactcgaccagaatcctcagcagcctcgcctggcccccgctgcccaacttggaccacccgtagccatgaaaggagatagtcttttggatcattctgtcagtcagtcttcgccgcccatgaggaaagacacgggttccagcacatcgaccaatctttccgacgcgacggccgtcacggccacttcgactgacactgctgctacagcttatagtgtcgaatcgtcacagtccattttttcggtcaaggatgggtccgagatatctagcaaccgccgggccagtcgccgacggaccgggcctctttcggcagcacaacgggagaaggctgccctgatccgcaagttgggtgcctgtcccgactgtcgtaggcgtcgagtcgcatgccatccgaaccatcataacatgtcttgggaagaagcagtacagaagtataggtcatctagtccggtgcaagaacttgctgctctggctggacgtcccatcagtcccgctccgagccagatcaggcttcctccactgccaaagccgcaagagatggacattgattcgtcatccgtcgctgctcaacagcatgtggcgccagttcgaactcctcttaatgacactaggatcaacagaacaccacttccttcaggaccaaggctggataggcacatgtcgatgccccctccacttgcagcggcaccgctgccgccgccgtcgtacacaacgataccacatctgggctacgtgaaaccgaacctcgataatgcagctagtagaatactctcttcgccccaaagaacgcggtataagaacgtttatgcacttttaatccattggcaagacgaaccggatgctgggtcggtagaggagctcgccgaggtgttccgaaaatcttacgactacgaaacagaaattatcaggattccttcgattggatcggacagctatagtagcccgggcagatggctttccaaagtgttaagcgatttcttcgaaaaaagtgacaccagggagacattgaaaattctgtattacaatggattcagcttcttggatagcaacaaggagatggtcctgtcaagttctcgaaatcgcgaaaaagctggcacaatacgatggagtacaatccagcctttcttggaagacgcaagttctgacacactagtattgatggattctgcctattatccaacatcgagaatggttcgtcagaaaggagtccttgaggtggtagcggcatctgcctcagaaaattacttcaactatctcgaaaggtgcatcttcacgaagataataatcgaccaactccgtactcgacctcttcagcgctcttgggcaacgctttccgctgtcgagttgcattccaagctgctttctatttttccgaagctcgttctcgaaagacatctcgaaaaggggtcatttccagagtaccctactcccctacatacacagacgtcgggcaacacccggcttccctctattacgttatcaccacaaccagttactttgtccaaaccactgtcgaatccagaaggtgttgttaatctgacgctctctatccggctgactgacgaatcactcagccgagagcactgggctgataattggacagaatggttccgaatgatgccagacggcatcaaagacgcgaaagtcgaaggaccgttcaacacgttcagatga

SEQ ID NO: 21648 - protein, 583 aa, Muscodor strobelii
  misc_feature: SGI Peptide ID NO. 567331
  misc_feature (63)..(583): NCBI GI: 261358640 Blast Desc: conserved [Verticillium albo-atrum VaMs.102]
  misc_feature (162)..(579): NCBI GI: 145613826 Blast Desc: MGG_01337 [Magnaporthe grisea 70-15] gi|145020843|gb|EDK04972.1| MGG_01337 [Magnaporthe grisea 70-15]
  misc_feature (62)..(581): NCBI GI: 171687765 Blast Desc: protein product [Podospora anserina] gi|170943844|emb|CAP69496.1| protein product [Podospora anserina]
  misc_feature (162)..(583): NCBI GI: 256730853 Blast Desc: [Nectria haematococca mpVI 77-13-4]
  misc_feature (162)..(583): NCBI GI: 46109062 Blast Desc: FG01413.1 [Gibberella zeae PH-1]
  misc_feature (1)..(416): NCBI GI: 116180512 Blast Desc: CHGG_00884 [Chaetomium globosum CBS 148.51] gi|88185181|gb|EAQ92649.1| CHGG_00884 [Chaetomium globosum CBS 148.51]
  misc_feature (34)..(571): NCBI GI: 85111967 Blast Desc: NCU03142 [Neurospora crassa OR74A] gi|28925962|gb|EAA34955.1| [Neurospora crassa OR74A] gi|38567263|emb|CAE76553.1| [Neurospora crassa]
  misc_feature (275)..(582): NCBI GI: 154295188 Blast Desc: BC1G_13537 [Botryotinia fuckeliana B05.10] gi|150844220|gb|EDN19413.1| BC1G_13537 [Botryotinia fuckeliana B05.10]
  misc_feature (265)..(581): NCBI GI: 171686520 Blast Desc: protein product [Podospora anserina] gi|170943221|emb|CAP68874.1| protein product [Podospora anserina]
  misc_feature (265)..(519): NCBI GI: 116208088 Blast Desc: CHGG_03337 [Chaetomium globosum CBS 148.51] gi|88183934|gb|EAQ91402.1| CHGG_03337 [Chaetomium globosum CBS 148.51]
MHPAPSLAESFPKSTKPDDRPQHVSFQQLDQNPQQPRLAPAAQLGPPVAMKGDSLLDHSVSQSSPPMRKDTGSSTSTNLSDATAVTATSTDTAATAYSVESSQSIFSVKDGSEISSNRRASRRRTGPLSAAQREKAALIRKLGACPDCRRRRVACHPNHHNMSWEEAVQKYRSSSPVQELAALAGRPISPAPSQIRLPPLPKPQEMDIDSSSVAAQQHVAPVRTPLNDTRINRTPLPSGPRLDRHMSMPPPLAAAPLPPPSYTTIPHLGYVKPNLDNAASRILSSPQRTRYKNVYALLIHWQDEPDAGSVEELAEVFRKSYDYETEIIRIPSIGSDSYSSPGRWLSKVLSDFFEKSDTRETLKILYYNGFSFLDSNKEMVLSSSRNREKAGTIRWSTIQPFLEDASSDTLVLMDSAYYPTSRMVRQKGVLEVVAASASENYFNYLERCIFTKIIIDQLRTRPLQRSWATLSAVELHSKLLSIFPKLVLERHLEKGSFPEYPTPLHTQTSGNTRLPSITLSPQPVTLSKPLSNPEGVVNLTLSIRLTDESLSREHWADNWTEWFRMMPDGIKDAKVEGPFNTFR

SEQ ID NO: 21649 - DNA, 5149 bp, Muscodor strobelii
  misc_feature: SGI EST ID NO. CUFF.50819.0
  misc_feature: Variant of the nucleotide sequence at SEQ ID NO 21647
tagcaaccgccgggccagtcgccgacggaccgggcctctttcggcagcacaacgggagaaggctgccctgatccgcaagttgggtgcctgtcccgactgtcgtaggcgtcgagtcgcatgccatccgaaccatcataacatgtcttgggaagaagcagtacagaagtataggtcatctagtccggtgcaagaacttgctgctctggctggacgtcccatcagtcccgctccgagccagatcaggcttcctccactgccaaagccgcaagagatggacattgattcgtcatccgtcgctgctcaacagcatgtggcgccagttcgaactcctcttaatgacactaggatcaacagaacaccacttccttcaggaccaaggctggataggcacatgtcgatgccccctccacttgcagcggcaccgctgccgccgccgtcgtacacaacgataccacatctgggctacgtgaaaccgaacctcgataatgcagctagtagaatactctcttcgccccaaagaacgcggtataagaacgtttatgcacttttaatccattggcaagacgaaccggatgctgggtcggtagaggagctcgccgaggtgttccgaaaatcttacgactacgaaacagaaattatcaggattccttcgattggatcggacagctatagtagcccgggcagatggctttccaaagtgttaagcgatttcttcgaaaaaagtgacaccagggagacattgaaaattctgtattacaatggattcagcttcttggatagcaacaaggagatggtcctgtcaagttctcgaaatcgcgaaaaagctggcacaatacgatggagtacaatccagcctttcttggaagacgcaagttctgacacactagtattgatggattctgcctattatccaacatcgagaatggttcgtcagaaaggagtccttgaggtggtagcggcatctgcctcagaaaattacttcaactatctcgaaaggtgcatcttcacgaagataataatcgaccaactccgtactcgacctcttcagcgctcttgggcaacgctttccgctgtcgagttgcattccaagctgctttctatttttccgaagctcgttctcgaaagacatctcgaaaaggggtcatttccagagtaccctactcccctacatacacagacgtcgggcaacacccggcttccctctattacgttatcaccacaaccagttactttgtccaaaccactgtcgaatccagaaggtgttgttaatctgacgctctctatccggctgactgacgaatcactcagccgagagcactgggctgataattggacagaatggttccgaatgatgccagacggcatcaaagacgcgaaagtcgaaggaccgttcaacacgttcagatgaacatgacttgcgaccgaatgtgtcgtatcttcactaatattctctttgtcgggctccagctccttatggcacttaatcgatatatacataccggggggctacttgggaaaacacggagatatgacattgcatttctagtctgttcatgatatccatattgctttagaacgtcgttacgactctatatacctgcttctctacctttcaaggcctccccactaaaacctggactcgtagatatctagtttagtactatattatcctcccgacaatctagctcaagctactaacctggaggcgtcaaagggctaagacactgaatccacgaccgtttcagtggccgcgccgttaaactgccatatcgagcgacccgacgcatgctttcgatagtcttcgtcctgcacaattcttgacacagaattattgccataatacatttgcaggacataacagacctcgcaaagtcctgccctacgaccatgcaacgatatccgcgctgactcagccacctcccgacccgagattcgaacatgcagagatcaggctacacctattgaccgaaggcgaccggtcggtgtcggctggtaccctaatctgacattctgaccacgccgcgccgctgcccgacagtctggggtagcagccagctagctcacacctcaaaaaccgggttcgacaccaagctacgcgcttcgcaaccgcgggctgcgtggcttaccttggcgacaccgcattccttgtcctaatcccggacgtgcatggtgtaggtcagattcgagccaaggtcactggtcagaccttgagatcaggatctcatctctattcagactgcgggtatgcatgattgcccaaggacctccttgcttgatttgttagtacttgtgtcttcgctggaagaccatttgacctctcgttcgagatccggtttacccccacgtttcgccggtgcaatgctgtacgacagcccaattaaaaaaaaaagcaaaaagcaaggtgaggctttgcgactcttgatcccgaaaactcgggtatagacggctatagcactggacgagagcactctcgaaagatttttcaggcaccaacgggagggaaatatgacctatcagatacggcatcagccatttggacttcgtaaatttttttgattatgttactcaactatgttgaatttggacaagcgtaacctagaacgaagtacgcagaacccgagtcccaatgtttcccacgcaactggatgcaaaagattccaatacaaagatatacaatagcatactcataacgtcattatagcgccaaagccaagcccacaacgccagccaaagcccaagctaaacagcccagtctaacaatagacccagagctgtcatatgtcgcgagcgtcaggatagactgaggctcgtataccccgttatccgttgtatccgtctccccattccagcagtgtttcttgaaacattcctggcacgtgtctggaatgacgtggtcctcgcgctccaagctcctatacagcaccgcgcacgccgcgcatgcgggccaattggattccacggtgccgttgcccatggttgcaacgttcaatccattttcaatgaacgcattgcgctctgagtcggtgtacgatgggtcgaaggtcgatgcgttgctgtaggcagtgtacggtgcaagaggcatgtagacgatcagcggcgggatgttagagccgttcttgaattccgaggtattgcagccgaagaatgtaggctgttggttcaactttaggttgataaaagtattagcatcgggcaccttgggaaattgcgtgccgttagagatatctcccatggtgcgatcgtaagtcgcgcgcagtgccgtgccattagggtagttgaagacagtgtcggcggaagagtcgacggcaaagatgacgtcgacggcgcgattgggctggatgagaggatgaagcgggatgttttgcaaatcagtgccaccatccacaagcgtgaggagtgtgtcgtccgcactggggttggtgtccgcgttgtacttgtagaacggattcggctcccacttcgcgatgtcctcctcggtgtcgtcgagagattccagcacactttgaagagcatcggtgataacgtcgggcacattgtacgtggaaatgttggtcaacaagaactggttgaatagcgaactactcgtgcccataacgtagccgtattgatcaaaccctcgcacgcattttccattgtccgagatttcaccattactgaagttcgaccctacgtattccgtgggtataaatccgtagaccgttggatcccacgagccgaattcccacggattgaactcgtagactgtcgcatttagcgacacaacaactgtgccgggcgagcgctcatccgcgactagaataggcatgggggtatcggcggacgtaaagctgtccgtgtcggcaatagacgagaaagtgtaagccggcccgccggcgtcagcattgatcagttgataagacagagctcgtccccagtaatcggtgagtgtcacttcataaccagcctcgtccttattgctcacagcgtcgtaaacatcggtccagtaatccactgtattgagaatgtcgacaccatggctcttcggcccctcgaagatggagtttgagaactgccataccgcagtgtctgtgaacccgtcgcgaagctgagtgacggttgaaaagttgttggcaaagatggatcctacgagccagccgcctccggagagaccggcaagatatgtggaagcctgcaatagtccaccgattccgccagtgttcttggtgccatctgtgcgatcatcggcagccgctataaacccagcgccattcataagagcacgatatcctccaccagagcaggcgataccaatattcggaacaactgagtagttcttggagttggattgcacccacgcgccagcatcgaaaccacttatgttggcgcgatccaagaagtcaatcatgggttgtaccgtgtttgggcggcgcttttgcagccagtcggtctcgttcttggacagagagccagcgcctcgaacggtgggcttgtctgaaggacaatcgacggtagcgggcgcatagtcgcccgagggactgtttggcgcagcccggcgcagaatctctagcgctgtgatagcatcaagaccaccaacattgctatccggagcagccagtacggccgagattaacgacagtagaggtagcgacgcccgcgtaacgcgcatcgtggttcgtgacgactcggatgaatcggaaagcaaaaagatgctatgcaggtacgacccggtaagggatccgcttaaagtaaaagactacaaccccgaaataagaagggaaaataagatgtaatagttaaacagaggaacatgcacatataaggcaagaaacaaaaacgtcacacgagcagcgagatatgaatcagactaacaaatctctcattaagtaaaacggatctcgaaatggagccctaaaaacaagtgccaacaacgcccagacaaggcgggctaggagtccgagcattgcacgccaagatgtcaggattcatgattctgcgcgactacatgtctaggactttttgggaactcgcattgtatgcaagaatactgcgtataatccgcagaggcgtatcgtagcactaaccttgcaggatgtttgttacgtcacagtgctccctccgccagtctgccaagaggcgttggttggcgttgtatggcacaatggcgagcggc

SEQ ID NO: 21650 - DNA, 882 bp, Muscodor strobelii
  misc_feature: SGI cDNA ID NO. 567332
  misc_feature: Encodes the peptide sequence at SEQ ID NO 21651
atgtcaagcacaactgcgatcacagtcgcggacggtgagggcaacaccgtcccggttcgctgctcccacactgcccaagactctcgtcctggaccaagtgaaaccaaagagcacctcaatgaaagtctcaatgaccgaatgaaagcactatgtgttaccgaactggaagctcgtatcgaaaaagagcaggaaagtatctccgcgcttgaacggatcctgatcagaaattccaagctattcctacgacgattcatgcaccacctgcgtgccgaccgcaagaaacagtcgcctgacttggaacaatatcacaagtcatttcttgccgagaacgggcagaatcttggatctactatgtggaattcgtacttcgagctcggcctgtatctacatgaacatggattctgcagcctcgagccaacgaatgcagggacctggcgtatcacttacattcgattcccgacactccaagagatcaatgatatagagcctgctatcgatgagtacgatctcgatgtcattggatctagaatcgtgaacctcagttgtgccgatagcgaagagacacaaactccagctgcagacgatggtggttccaacccaaatacaggcagcacgaatcagaataccaatgacgataatgagagcgtccgcagtgttactagtgggcatactgcgagcacctccggccatggcaacgctggctcggattccgaaggcgacgatagcgactctgataccagcaacaaagaaagcaacgacagtagcaattccagcgacagctccaccacttctgaagatagcgacaaggatgacagcgatggcgagaagaaagatgacgacgatggtttgggacatatgccacatgctgcaactgcggcatag

SEQ ID NO: 21651 - protein, 293 aa, Muscodor strobelii
  misc_feature: SGI Peptide ID NO. 567332
MSSTTAITVADGEGNTVPVRCSHTAQDSRPGPSETKEHLNESLNDRMKALCVTELEARIEKEQESISALERILIRNSKLFLRRFMHHLRADRKKQSPDLEQYHKSFLAENGQNLGSTMWNSYFELGLYLHEHGFCSLEPTNAGTWRITYIRFPTLQEINDIEPAIDEYDLDVIGSRIVNLSCADSEETQTPAADDGGSNPNTGSTNQNTNDDNESVRSVTSGHTASTSGHGNAGSDSEGDDSDSDTSNKESNDSSNSSDSSTTSEDSDKDDSDGEKKDDDDGLGHMPHAATAA

SEQ ID NO: 21652 - DNA, 1206 bp, Muscodor strobelii
  misc_feature: SGI EST ID NO. CUFF.50776.0
  misc_feature: Variant of the nucleotide sequence at SEQ ID NO 21650
cgggtgtttagctttaaaatcgttcgaagactgattcatataattacgctagtagcgatcaagaaattgttcgctgcttccttcgtatcttgggggtcatgttgttcagcggcactgtccatttcgtttccatcccggccgccacatatgacatcggatgttcttctatgaacaacaacccaagacacaggcatcccgtcgctatcatggtaccattgatataacatcgcttctgtaatacttaaagaacaatctgttacacttcatccagcaatcatgtcaagcacaactgcgatcacagtcgcggacggtgagggcaacaccgtcccggttcgctgctcccacactgcccaagactctcgtcctggaccaagtgaaaccaaagagcacctcaatgaaagtctcaatgaccgaatgaaagcactatgtgttaccgaactggaagctcgtatcgaaaaagagcaggaaagtatctccgcgcttgaacggatcctgatcagaaattccaagctattcctacgacgattcatgcaccacctgcgtgccgaccgcaagaaacagtcgcctgacttggaacaatatcacaagtcatttcttgccgagaacgggcagaatcttggatctactatgtggaattcgtacttcgagctcggcctgtatctacatgaacatggattctgcagcctcgagccaacgaatgcagggacctggcgtatcacttacattcgattcccgacactccaagagatcaatgatatagagcctgctatcgatgagtacgatctcgatgtcattggatctagaatcgtgaacctcagttgtgccgatagcgaagagacacaaactccagctgcagacgatggtggttccaacccaaatacaggcagcacgaatcagaataccaatgacgataatgagagcgtccgcagtgttactagtgggcatactgcgagcacctccggccatggcaacgctggctcggattccgaaggcgacgatagcgactctgataccagcaacaaagaaagcaacgacagtagcaattccagcgacagctccaccacttctgaagatagcgacaaggatgacagcgatggcgagaagaaagatgacgacgatggtttgggacatatgccacatgctgcaactgcggcatagaagcatgcgccgacagaggtctggtgcgctatcagacatcattatatg

SEQ ID NO: 21653 - DNA, 819 bp, Muscodor strobelii
  misc_feature: SGI cDNA ID NO. 567333
  misc_feature: Encodes the peptide sequence at SEQ ID NO 21654
atggattccataatcacaaacctctcacgcccagaaacgcagcgcagcatatacatagcctccggaaccacagcagctatcgcactcctcgcctacagcactcattgctatcaatcctggtacgcgctcggcgagggtgggatccggcgctccgtcggcggatggctcttcaacgtcagctcgcacctcatcgcgcgccgtgatacacgtgctgtacccgcgccatacgagactaagctctcggcagcagatgaggagaaatacggcaaagagacccgtatctcgttcttgaccgatggaaaattaccacagcgggacggtgatagaccgacggtcccgacgactgtagtgccgcaacggcagacgtccgctactgcaggtgcggacatggtccataggcagaatgctctcttaaaagctcttactagtgcgaacccaaaggtcttccgtatcgcgccttccggactcgagagtaaagatttcacagctctttggctcatcgatcctgctacggaagatgtagattctgcacgggtaaagtggttttcaagccttgcgcctggggagattgcgcatgttcatggggaggggagtgcacatctatatcttagtcttaccgatgcggcggaagttgtgaggaaggggtggggagaacgtcataagttatctggtgttagggatatcttgccttggtcttatgtcatggtttatgcgccgggggaggaggagtggaagacttggaaggagattgtatgcgcaagtgcgagagttgtggcgaggagtgctgggtttgagggggaggttgttgtccctgaatga

SEQ ID NO: 21654 - protein, 272 aa, Muscodor strobelii
  misc_feature: SGI Peptide ID NO. 567333
  misc_feature (10)..(264): NCBI GI: 46125977 Blast Desc: FG07366.1 [Gibberella zeae PH-1]
  misc_feature (23)..(262): NCBI GI: 242815938 Blast Desc: conserved [Talaromyces stipitatus ATCC 10500] gi|218715008|gb|EED14431.1| conserved [Talaromyces stipitatus ATCC 10500]
  misc_feature (23)..(262): NCBI GI: 242815942 Blast Desc: conserved [Talaromyces stipitatus ATCC 10500] gi|218715009|gb|EED14432.1| conserved [Talaromyces stipitatus ATCC 10500]
  misc_feature (37)..(256): NCBI GI: 163742819 Blast Desc: RG210_11895 [Phaeobacter gallaeciensis 2.10] gi|161383783|gb|EDQ08168.1| RG210_11895 [Phaeobacter gallaeciensis 2.10]
  misc_feature (13)..(258): NCBI GI: 256730932 Blast Desc: NECHADRAFT_84660 [Nectria haematococca mpVI 77-13-4]
  misc_feature (23)..(262): NCBI GI: 212545516 Blast Desc: conserved [Penicillium marneffei ATCC 18224] gi|210065881|gb|EEA19975.1| conserved [Penicillium marneffei ATCC 18224]
  misc_feature (4)..(258): NCBI GI: 67900798 Blast Desc: AN7386.2 [Aspergillus nidulans FGSC A4] gi|40742567|gb|EAA61757.1| AN7386.2 [Aspergillus nidulans FGSC A4] gi|259483253|tpe|CBF78486.1| TPA: conserved [Aspergillus FGSC
  misc_feature (15)..(263): NCBI GI: 121715644 Blast Desc: conserved [Aspergillus clavatus NRRL 1] gi|119403588|gb|EAW14005.1| conserved [Aspergillus clavatus NRRL 1]
  misc_feature (37)..(255): NCBI GI: 238498258 Blast Desc: conserved [Aspergillus flavus NRRL3357] gi|220693638|gb|EED49983.1| conserved [Aspergillus flavus NRRL3357]
  misc_feature (16)..(259): NCBI GI: 115384514 Blast Desc: [Aspergillus terreus NIH2624] gi|114196496|gb|EAU38196.1| [Aspergillus terreus NIH2624]
MDSIITNLSRPETQRSIYIASGTTAAIALLAYSTHCYQSWYALGEGGIRRSVGGWLFNVSSHLIARRDTRAVPAPYETKLSAADEEKYGKETRISFLTDGKLPQRDGDRPTVPTTVVPQRQTSATAGADMVHRQNALLKALTSANPKVFRIAPSGLESKDFTALWLIDPATEDVDSARVKWFSSLAPGEIAHVHGEGSAHLYLSLTDAAEVVRKGWGERHKLSGVRDILPWSYVMVYAPGEEEWKTWKEIVCASARVVARSAGFEGEVVVPE

SEQ ID NO: 21655 - DNA, 1599 bp, Muscodor strobelii
  misc_feature: SGI EST ID NO. CUFF.50779.0
  misc_feature: Variant of the nucleotide sequence at SEQ ID NO 21653
cgaaaatctccggctgtaagtgcataccagatgacatctcgtacaattgtttaaatcttgtttcccgccacttcgcggttccgagatgacgctcgagcttacatgtctacgggctgaaagtccgcttgacccttgtcccatttcgacgtctgacggtcggccgagcgctacggcgcagcgaactgcgattgtgatattgtatattgtgaagagaaatgaaacacatatatcgaccagtgattgtcaaacgctcgtctgagagctcgtctattagatcccagcatattggacaactcaggcgaaacatttctctgcgtcactgtacaagagtcgtcagcatagatatatcatcagcatcccctcaattcttacctcaacctccaaaaatcccactccgtctcccttttatgtactaagtaatacaacatggattccataatcacaaacctctcacgcccagaaacgcagcgcagcatatacatagcctccggaaccacagcagctatcgcactcctcgcctacagcactcattgctatcaatcctggtacgcgctcggcgagggtgggatccggcgctccgtcggcggatggctcttcaacgtcagctcgcacctcatcgcgcgccgtgatacacgtgctgtacccgcgccatacgagactaagctctcggcagcagatgaggagaaatacggcaaagagacccgtatctcgttcttgaccgatggaaaattaccacagcgggacggtgatagaccgacggtcccgacgactgtagtgccgcaacggcagacgtccgctactgcaggtgcggacatggtccataggcagaatgctctcttaaaagctcttactagtgcgaacccaaaggtcttccgtatcgcgccttccggactcgagagtaaagatttcacagctctttggctcatcgatcctgctacggaagatgtagattctgcacgggtaaagtggttttcaagccttgcgcctggggagattgcgcatgttcatggggaggggagtgcacatctatatcttagtcttaccgatgcggcggaagttgtgaggaaggggtggggagaacgtcataagttatctggtgttagggatatcttgccttggtcttatgtcatggtttatgcgccgggggaggaggagtggaagacttggaaggagattgtatgcgcaagtgcgagagttgtggcgaggagtgctgggtttgagggggaggttgttgtccctgaatgagtgtgatgctcttgcggtgttgagatactaaggacggtgttgtgtactttgttcagtgacaatgtgtctgcatgatatcgatacgtgtgggtagctgcatgaagagcgtaaaggcctggatttatcgttgcaactaaggggatggaagtatcgatctgtcattggagggttatgggttcctgacaatgaactcccttcactttgaactatacaaactccaaagatgttagctcgggtaaaaaaataatggtcttctgcttctagttgtaccaaaatcaaagtggctatttatttcatatcattacacattgttcattcgactaattcaacgaagtacaacttagcaagcaattc

SEQ ID NO: 21656 - DNA, 1332 bp, Muscodor strobelii
  misc_feature: SGI cDNA ID NO. 567334
  misc_feature: Elevated expression when VOC is produced
  misc_feature: Encodes the peptide sequence at SEQ ID NO 21657
atgagacctcataatgccgcggtcattacagcttctttgctgccctacacgggcttcgtcctcgctgcacctacggagaagcgaagtagtctcgacccctttgaaatctcgacactgggtggtatgacgttcaagatcggccaggtggccaattcaaaatatgcaggtcgtcacaaaggcagaggagccatggcggtagcaagaacatacaacaaatacggtctctccttaggggatgatctcacttccgtcattgaacagctcttggaggagcttggtctgctcggacagtcgagcgcttcgaacagcacaagtgccgtcggcaatggcgaggttgccgccacgccagcgatgttcgattcggagtacctatgtcctgttcaaatcgggacaccacctcaaactttgacgctggatttcgacacaggctcctcggacttgtgggtgttcagcagcgagaccccatccaaccaagtctcgggtcaagccatatacgatattgcacagagttcaacggcaaagcgaatggtcggcgagcagtggtccattagttatggcgacggcagcagctccggtggtaatgtgtatctggatactgtggcgattggagggatcacggtggagaatcaagcagtcgagtccgctactgacgtctcgaccgcctttacccaaagatcagatacggacggtcttgtcggcttggccttcagcactttgaacactgtgacgcctacgcaacagcctaccttctttgataatgctcttcaggatcttgctgctccgttattcactgcaaacctcaaggcgtcagaaccggggaactacaattttggcttcatcgatagcaccgaattcacggggcagatcacatttgttccagtcaacgcgagcacgggattctggcagttcacctcccaaggctacatagttggagactcgatacaaatgctcgctacacacgaagcgatagctgataccggaaccactttgctgcttgttcctgctagcattgccgctgcctactacgcacaggtcgaaggggccgtcaacgccgtgaacaccgctggcggatgggtgttcccctgcggagctactctaccgacgtacacagcggtaattggaccatataaggccgtcattcccggagacttcatgaactatgcgcctgttgacggagatacgttcgatacggcgacaacttgtttcggtggtattcaggaggttcccactgggtttccctttgcgatttatggggatgtgtttttgaagagtcaatttgttgtatttcatgggggtaatgagcaattgggattggctgctaagccgttatga

SEQ ID NO: 21657 - protein, 443 aa, Muscodor strobelii
  misc_feature: SGI Peptide ID NO. 567334
  misc_feature (122)..(441): Pfam Id: PF00026 Pfam Desc: Eukaryotic aspartyl protease
  misc_feature (291)..(312): Pfam Id: PF01183 Pfam Desc: Glycosyl hydrolases family 25
  misc_feature (9)..(442): NCBI GI: 85111602 Blast Desc: endothiapepsin precursor [Neurospora crassa OR74A] gi|28925773|gb|EAA34779.1| endothiapepsin precursor [Neurospora crassa OR74A]
  misc_feature (6)..(441): NCBI GI: 171687445 Blast Desc: protein product [Podospora anserina] gi|170943684|emb|CAP69336.1| protein product [Podospora anserina]
  misc_feature (44)..(443): NCBI GI: 1469396 Blast Desc: secreted aspartic proteinase precursor [Glomerella cingulata]
  misc_feature (30)..(443): NCBI GI: 116182964 Blast Desc: CHGG_02110 [Chaetomium globosum CBS 148.51] gi|88186407|gb|EAQ93875.1| CHGG_02110 [Chaetomium globosum CBS 148.51]
  misc_feature (44)..(443): NCBI GI: 46126795 Blast Desc: FG07775.1 [Gibberella zeae PH-1]
  misc_feature (39)..(442): NCBI GI: 116180756 Blast Desc: CHGG_01006 [Chaetomium globosum CBS 148.51] gi|88185303|gb|EAQ92771.1| CHGG_01006 [Chaetomium globosum CBS 148.51]
  misc_feature (44)..(443): NCBI GI: 18448713 Blast Desc: AF462062_1 aspartic protease [Fusarium venenatum]
  misc_feature (105)..(441): NCBI GI: 11345300 Blast Desc: AF295432_1 prepropenicillopepsin-JT3 [Penicillium janthinellum]
  misc_feature (39)..(443): NCBI GI: 85110723 Blast Desc: endothiapepsin precursor [Neurospora crassa OR74A] gi|28925285|gb|EAA34364.1| endothiapepsin precursor [Neurospora crassa OR74A] gi|38524232|emb|CAE75698.1| endothiapepsin crassa]
  misc_feature (3)..(441): NCBI GI: 416748 Blast Desc: CARP_CRYPA RecName: Full=Endothiapepsin; AltName: Full=Aspartate protease; Flags: Precursor gi|2629|emb|CAA44952.1| microbial aspartic proteinases; precursor endothiapepsin aspartic
  misc_feature (3)..(441): SWISSPROT Homolog: EC 3.4.23.22 Endothiapepsin
  misc_feature: Useful for introducing or modulating the production of volatile compounds
MRPHNAAVITASLLPYTGFVLAAPTEKRSSLDPFEISTLGGMTFKIGQVANSKYAGRHKGRGAMAVARTYNKYGLSLGDDLTSVIEQLLEELGLLGQSSASNSTSAVGNGEVAATPAMFDSEYLCPVQIGTPPQTLTLDFDTGSSDLWVFSSETPSNQVSGQAIYDIAQSSTAKRMVGEQWSISYGDGSSSGGNVYLDTVAIGGITVENQAVESATDVSTAFTQRSDTDGLVGLAFSTLNTVTPTQQPTFFDNALQDLAAPLFTANLKASEPGNYNFGFIDSTEFTGQITFVPVNASTGFWQFTSQGYIVGDSIQMLATHEAIADTGTTLLLVPASIAAAYYAQVEGAVNAVNTAGGWVFPCGATLPTYTAVIGPYKAVIPGDFMNYAPVDGDTFDTATTCFGGIQEVPTGFPFAIYGDVFLKSQFVVFHGGNEQLGLAAKPL

SEQ ID NO: 21658 - DNA, 2134 bp, Muscodor strobelii
  misc_feature: SGI EST ID NO. CUFF.50783.0
  misc_feature: Variant of the nucleotide sequence at SEQ ID NO 21656
caaacttcaaactacggcaaacagcttgcaaagctgacccctgtagctatctaactcaatgctgtcttggttggcggctcggctggcccgctggtgaccgttctgtctttacgcgtcgggatgcatatactcgagatctatcatgaaaccggatgctactcttcgagggaacatgtaaataccactgccacgccgtcgaccagccgccttctctcgcggttggtctcgttgccttctctatgtctatgcatttcatttctctttttgaccaatcaatcctcgtctctgtctctcgtttgcgacattcatcttgctggaccgtacttgccgagtagactgcgtgcttcgtactgatagagttaggctcgccgtcatatacgacactctctttccttctcttttcttttgccttccctccgggcttaggctttctctcgttgcttcataccttgcctcacagctcctatttgaaagtcgtaattgttttcctcaccatgagacctcataatgccgcggtcattacagcttctttgctgccctacacgggcttcgtcctcgctgcacctacggagaagcgaagtagtctcgacccctttgaaatctcgacactgggtggtatgacgttcaagatcggccaggtggccaattcaaaatatgcaggtcgtcacaaaggcagaggagccatggcggtagcaagaacatacaacaaatacggtctctccttaggggatgatctcacttccgtcattgaacagctcttggaggagcttggtctgctcggacagtcgagcgcttcgaacagcacaagtgccgtcggcaatggcgaggttgccgccacgccagcgatgttcgattcggagtacctatgtcctgttcaaatcgggacaccacctcaaactttgacgctggatttcgacacaggctcctcggacttgtgggtgttcagcagcgagaccccatccaaccaagtctcgggtcaagccatatacgatattgcacagagttcaacggcaaagcgaatggtcggcgagcagtggtccattagttatggcgacggcagcagctccggtggtaatgtgtatctggatactgtggcgattggagggatcacggtggagaatcaagcagtcgagtccgctactgacgtctcgaccgcctttacccaaagatcagatacggacggtcttgtcggcttggccttcagcactttgaacactgtgacgcctacgcaacagcctaccttctttgataatgctcttcaggatcttgctgctccgttattcactgcaaacctcaaggcgtcagaaccggggaactacaattttggcttcatcgatagcaccgaattcacggggcagatcacatttgttccagtcaacgcgagcacgggattctggcagttcacctcccaaggctacatagttggagactcgatacaaatgctcgctacacacgaagcgatagctgataccggaaccactttgctgcttgttcctgctagcattgccgctgcctactacgcacaggtcgaaggggccgtcaacgccgtgaacaccgctggcggatgggtgttcccctgcggagctactctaccgacgtacacagcggtaattggaccatataaggccgtcattcccggagacttcatgaactatgcgcctgttgacggagatacgttcgatacggcgacaacttgtttcggtggtattcaggaggttcccactgggtttccctttgcgatttatggggatgtgtttttgaagagtcaatttgttgtatttcatgggggtaatgagcaattgggattggctgctaagccgttatgagggggtgatgatatccaagacagcgtatagatggatcttaagagtggtttacgtgataccaatgatgtcatggatgggtggcatctgatcatttgaatgtaaaggtattggtgccataacttgaggcgaagggcgatcactttgataatgtttgagagacagccgattctagatgcatgtcagtgcatggcgttgtgggcgtcgtttgtcatccaagatctctttaggcatctggtgctatttatgcttctcactgctctgattacgctttccaaacaaaacagatcgaaaattatgctacatgtcgg

SEQ ID NO: 21659 - DNA, 4002 bp, Muscodor strobelii
  misc_feature: SGI cDNA ID NO. 567335
  misc_feature: Reduced expression when VOC is produced
  misc_feature: Encodes the peptide sequence at SEQ ID NO 21660
atggccatgcctggtttcaaactctttcggggctactatgtctgcccgcagttctgcgcaacttccaagcctcagctgcgggacgacatgtttcggtggatgaccgaccctatctctttccaaccactcaagccacagcccctggttcgagatggccccttcttctgctccccgacattcatcggagagtcctggcccgagttgcgggagagagtgctaaactggctgaaacaggatgctctcagctacctcgaccaagtcaaggtgcagttctccgaccagcctgatgtctacaacaagttcttggacatcatgaaggatttcaagagccaaaccatcgacacgcctggggtcatcaaccgcgtttcggagctcttttcgggccatcccaccctgatccagggattcaacaccttcttgcctcccggctatagaatcgagtgcgggcacggcaacgaccccaacacgatccgcgtcacgacgcccatgggcaccacggtacagtccatcacctctcgagccaaccaggcagagggcgcccatggccagtctggtgccaacgctttcctgcgaaacagctggcaaccgtcccagccgcacaacagcatcgagtcgcccgaggcagccttcagtgtgcccgccaccaacgggcccggcatttttggctcgggacaacgagatggccctcctttcgatgctcccggcggaagcggtggccagcaacgtgcggcgacccaggcgcagaacaataccacgccaaatgggccttcgacgcggaacgcgataaccccgaccccggggatgcctcccagcggccccaatagtggtggcaaccagcaggccaacatggagaagcgcggccctgtcgagttcaaccatgcgattagctacgtaaataaaataaagaatcgcttccaggatcgaccggagatctacaaacaattcctcgagattctccagacttatcagcgcgaacagaagcccattcaagacgtctacggccaggtcacgagtctcttcaacactgcgcccgacctcctggaggacttcaagcaattccttcccgagtccgctgcctccaacaagaacagcgcacgcgccgacgaggtactcgccatgggactggcgcagacgacaccacagcctgggcatgtcgcgagagacaaccagaagatgcctcctgtcggcaatttcgcaccgcctcccagcgccagtaaggacagcaagaagcggccccgcaacgagaagcaaccgcagcctcctcccatcgctatgggggacagcccggccctcggatctcgctcgatccctggcgtcgctgctacaagcaagcggcccaagctaaaccacaaggcactcgcgaccgatgtgcccgccattgagcctaccctgacacccgtgctccctgagcccttgccgcccacatcctcggccaacgccaccgccgacgagatttcattcttcgacagagtgaagaagtatatttctaacagagccgtcatgaccgagtttctcaagttgtgcaacatgtactcgcaaagcctcatcgacaccaatgacctggtacataaggcgagccagttcatcggtggaaacccggagcttatggagttcttcaagaagtttgtgggctacgagggcccatctgcagacgacatgattgaaaaccgtcctcggccgtcgactggaaaggtgtcgctgagtaactgtcgcggtgttggtcccagttaccggttgcttccgcgtagggagaagctgaagccgtgtggcggcagggacgagatgtgcaatgccgtgctcaacgacgagtgggcttcgcaccctacctgggcctctgaagactccggttttgtcgcgcaccgcaagaatgcgttcgaagaaggcctgcatcgtatcgaggaagagcgacacgactatgacttcaatatcgaagccaacaccaagtgcattcaactcctcgagcccatcgcacagcagatgctgaacttaaccccgcaagagcgagagaacttctcgatgccaccggggctgggaggttccagtacatccatatacaagcgcgtcctcaagaaaatctacggtccggagaaaggcgcagaggttgtcaatgacatgttctcagacccttttgcggtcgtgccgatagtgctcgcacggctcaagcagaaagacgaagagtggcggttcacgcagcgagagtgggaaaaggtctggcaagcacagacggagatcatgcatctcaagagcctcgatcacatgggtatacaagtgaagcagaacgacaagcgaaatctgtccgctaagcaccttgttgacgtgatcaagaccaagcacgaggagcaacgacgtctgcgcaatgtcaaagatcaggtctcacggcatcagtttgcctacgacctgagcgacgaggacgttctactctatctcatgcgtttcatggtcttgtatgggatgaacaacggacaacacaacgctgcggaaaaggaccgcatcgtcgagtttttcgagacattcatccctagtttctttgagttacccgaggataaagttcaagctctcctcaatgacatcgaccgggagtctggcgaagaggacgccgaagagcaactgcctgctgagctgaccaatggtcgctcgcgccgtaatggcaagaagtctgatctcctccgcggtgtcctggatcctgggcgcaacactagcaagccacgtgcacagaaagaagacagcgcggcgtcaggtagtaaagagacaacccctgatgtaggctctgccaacgaggaagaaatgaatgacgcaccggaggacccccttccctcggatatgtctaatgaacgctggcttcctacactccctcgcgctacagttgtcaccggggacagcagcctcttggacgccgatggtgagctgaaagccgacggcttcttcccccgaccatggtacaatttcttctgcaatcagactatctacgtatttttcaccgtgttccagacgctttacaagcgcctgaaggaggtcaaggagagcaaagagagcgttcttaacgcgatcgcccgggccaagtgcaagaagccagcaaaagatctgggcattgcagtcaacgagattaactatttcgatgagaacgacgaagcctcattctggcctaagactgtggagttgatcgaggattatatcacaggggaaattgatgaaaatcggtatcaggaggtcctccggtactactacctccagaaaggatggacgctgtacacaattcttgacctgctcaagacgctttgtcggctgtctctggtctgcacgagcacagactcgaaggagaagacacccgacctcattcttcagttcctgaacagccgtcagcaggaggagacgagctatcagactgagattagtgcacgcaagttcgcagaaaagtgcatcaaggacggtgacatgttcgttgtctgctggttccccaacaaacgtgaggccacggctcgctggctacagaaggacgagacgaccttctacatggacgagatggagcttcgtgagagatggcaatactacatctcttcttatgtacgcgtcgagccgaccgagggcataagtagaactcggctccagaagacggttttggcgcgtaaccttccctctaatgatacggattcagacgatggcaacgcgcccaaagcactcaagttcaatgaggagctgattctgcggatctgcctcaactcgaacaaaattgtttgggaaaaagatacatcggagtacttcatctatcacttggattctgaggagggagaagagaaacgaaaggaacgcgcacaagcgatcacggaacacagagatcaactgttccgagagaagatggtgatgaacaatgcctggatgcggggattgagccaggatgacgtgcaaaaggtaaacgagcagttccagaaatggatgcacgagggtctaataccgacctcgaacgttcgtgggggcgacgacgaggagatgggaggagttgcctga

SEQ ID NO: 21660 - protein, 1333 aa, Muscodor strobelii
  misc_feature: SGI Peptide ID NO. 567335
  misc_feature (569)..(670): Pfam Id: PF08295 Pfam Desc: Histone deacetylase (HDAC) interacting
  misc_feature (95)..(141): Pfam Id: PF02671 Pfam Desc: Paired amphipathic helix repeat
  misc_feature (309)..(355): Pfam Id: PF02671 Pfam Desc: Paired amphipathic helix repeat
  misc_feature (498)..(544): Pfam Id: PF02671 Pfam Desc: Paired amphipathic helix repeat
  misc_feature (79)..(1327): NCBI GI: 256734847 Blast Desc: histone deacetylase complex protein [Nectria haematococca mpVI 77-13-4]
  misc_feature (79)..(1319): NCBI GI: 46134915 Blast Desc: FG09306.1 [Gibberella zeae PH-1]
  misc_feature (52)..(1310): NCBI GI: 116181514 Blast Desc: CHGG_01385 [Chaetomium globosum CBS 148.51] gi|88185682|gb|EAQ93150.1| CHGG_01385 [Chaetomium globosum CBS 148.51]
  misc_feature (76)..(1325): NCBI GI: 261355201 Blast Desc: transcriptional regulatory protein SIN3 [Verticillium albo-atrum VaMs.102]
  misc_feature (79)..(1324): NCBI GI: 145616018 Blast Desc: MGG_13498 [Magnaporthe grisea 70-15] gi|145009799|gb|EDJ94455.1| MGG_13498 [Magnaporthe grisea 70-15]
  misc_feature (66)..(1315): NCBI GI: 38567128 Blast Desc: related to transcription regulatory protein [Neurospora crassa]
  misc_feature (66)..(1315): NCBI GI: 164427863 Blast Desc: NCU02578 [Neurospora crassa OR74A] gi|157071913|gb|EAA36473.2| conserved [Neurospora crassa OR74A]
  misc_feature (84)..(1311): NCBI GI: 171687219 Blast Desc: protein product [Podospora anserina] gi|170943571|emb|CAP69223.1| protein product [Podospora anserina]
  misc_feature (53)..(1319): NCBI GI: 156054738 Blast Desc: SS1G_06217 [Sclerotinia sclerotiorum 1980] gi|154703997|gb|EDO03736.1| SS1G_06217 [Sclerotinia sclerotiorum 1980]
  misc_feature (79)..(1313): NCBI GI: 226291070 Blast Desc: transcriptional regulatory protein SIN3 [Paracoccidioides brasiliensis Pb18]
  misc_feature: Useful for introducing or modulating the production of volatile compounds
MAMPGFKLFRGYYVCPQFCATSKPQLRDDMFRWMTDPISFQPLKPQPLVRDGPFFCSPTFIGESWPELRERVLNWLKQDALSYLDQVKVQFSDQPDVYNKFLDIMKDFKSQTIDTPGVINRVSELFSGHPTLIQGFNTFLPPGYRIECGHGNDPNTIRVTTPMGTTVQSITSRANQAEGAHGQSGANAFLRNSWQPSQPHNSIESPEAAFSVPATNGPGIFGSGQRDGPPFDAPGGSGGQQRAATQAQNNTTPNGPSTRNAITPTPGMPPSGPNSGGNQQANMEKRGPVEFNHAISYVNKIKNRFQDRPEIYKQFLEILQTYQREQKPIQDVYGQVTSLFNTAPDLLEDFKQFLPESAASNKNSARADEVLAMGLAQTTPQPGHVARDNQKMPPVGNFAPPPSASKDSKKRPRNEKQPQPPPIAMGDSPALGSRSIPGVAATSKRPKLNHKALATDVPAIEPTLTPVLPEPLPPTSSANATADEISFFDRVKKYISNRAVMTEFLKLCNMYSQSLIDTNDLVHKASQFIGGNPELMEFFKKFVGYEGPSADDMIENRPRPSTGKVSLSNCRGVGPSYRLLPRREKLKPCGGRDEMCNAVLNDEWASHPTWASEDSGFVAHRKNAFEEGLHRIEEERHDYDFNIEANTKCIQLLEPIAQQMLNLTPQERENFSMPPGLGGSSTSIYKRVLKKIYGPEKGAEVVNDMFSDPFAVVPIVLARLKQKDEEWRFTQREWEKVWQAQTEIMHLKSLDHMGIQVKQNDKRNLSAKHLVDVIKTKHEEQRRLRNVKDQVSRHQFAYDLSDEDVLLYLMRFMVLYGMNNGQHNAAEKDRIVEFFETFIPSFFELPEDKVQALLNDIDRESGEEDAEEQLPAELTNGRSRRNGKKSDLLRGVLDPGRNTSKPRAQKEDSAASGSKETTPDVGSANEEEMNDAPEDPLPSDMSNERWLPTLPRATVVTGDSSLLDADGELKADGFFPRPWYNFFCNQTIYVFFTVFQTLYKRLKEVKESKESVLNAIARAKCKKPAKDLGIAVNEINYFDENDEASFWPKTVELIEDYITGEIDENRYQEVLRYYYLQKGWTLYTILDLLKTLCRLSLVCTSTDSKEKTPDLILQFLNSRQQEETSYQTEISARKFAEKCIKDGDMFVVCWFPNKREATARWLQKDETTFYMDEMELRERWQYYISSYVRVEPTEGISRTRLQKTVLARNLPSNDTDSDDGNAPKALKFNEELILRICLNSNKIVWEKDTSEYFIYHLDSEEGEEKRKERAQAITEHRDQLFREKMVMNNAWMRGLSQDDVQKVNEQFQKWMHEGLIPTSNVRGGDDEEMGGVA

SEQ ID NO: 21661 - DNA, 4316 bp, Muscodor strobelii
  misc_feature: SGI EST ID NO. CUFF.51038.2
  misc_feature: Variant of the nucleotide sequence at SEQ ID NO 21659
tgcgaatgctcctcccatgccgcagcctgccgggcccggtgctgccaacggcgccatgcaacagcagcaacagcagcagcagggccaacagcccatcctcaatgatgctctcagctacctcgaccaagtcaaggtgcagttctccgaccagcctgatgtctacaacaagttcttggacatcatgaaggatttcaagagccaaaccatcgacacgcctggggtcatcaaccgcgtttcggagctcttttcgggccatcccaccctgatccagggattcaacaccttcttgcctcccggctatagaatcgagtgcgggcacggcaacgaccccaacacgatccgcgtcacgacgcccatgggcaccacggtacagtccatcacctctcgagccaaccaggcagagggcgcccatggccagtctggtgccaacgctttcctgcgaaacagctggcaaccgtcccagccgcacaacagcatcgagtcgcccgaggcagccttcagtgtgcccgccaccaacgggcccggcatttttggctcgggacaacgagatggccctcctttcgatgctcccggcggaagcggtggccagcaacgtgcggcgacccaggcgcagaacaataccacgccaaatgggccttcgacgcggaacgcgataaccccgaccccggggatgcctcccagcggccccaatagtggtggcaaccagcaggccaacatggagaagcgcggccctgtcgagttcaaccatgcgattagctacgtaaataaaataaagaatcgcttccaggatcgaccggagatctacaaacaattcctcgagattctccagacttatcagcgcgaacagaagcccattcaagacgtctacggccaggtcacgagtctcttcaacactgcgcccgacctcctggaggacttcaagcaattccttcccgagtccgctgcctccaacaagaacagcgcacgcgccgacgaggtactcgccatgggactggcgcagacgacaccacagcctgggcatgtcgcgagagacaaccagaagatgcctcctgtcggcaatttcgcaccgcctcccagcgccagtaaggacagcaagaagcggccccgcaacgagaagcaaccgcagcctcctcccatcgctatgggggacagcccggccctcggatctcgctcgatccctggcgtcgctgctacaagcaagcggcccaagctaaaccacaaggcactcgcgaccgatgtgcccgccattgagcctaccctgacacccgtgctccctgagcccttgccgcccacatcctcggccaacgccaccgccgacgagatttcattcttcgacagagtgaagaagtatatttctaacagagccgtcatgaccgagtttctcaagttgtgcaacatgtactcgcaaagcctcatcgacaccaatgacctggtacataaggcgagccagttcatcggtggaaacccggagcttatggagttcttcaagaagtttgtgggctacgagggcccatctgcagacgacatgattgaaaaccgtcctcggccgtcgactggaaaggtgtcgctgagtaactgtcgcggtgttggtcccagttaccggttgcttccgcgtagggagaagctgaagccgtgtggcggcagggacgagatgtgcaatgccgtgctcaacgacgagtgggcttcgcaccctacctgggcctctgaagactccggttttgtcgcgcaccgcaagaatgcgttcgaagaaggcctgcatcgtatcgaggaagagcgacacgactatgacttcaatatcgaagccaacaccaagtgcattcaactcctcgagcccatcgcacagcagatgctgaacttaaccccgcaagagcgagagaacttctcgatgccaccggggctgggaggttccagtacatccatatacaagcgcgtcctcaagaaaatctacggtccggagaaaggcgcagaggttgtcaatgacatgttctcagacccttttgcggtcgtgccgatagtgctcgcacggctcaagcagaaagacgaagagtggcggttcacgcagcgagagtgggaaaaggtctggcaagcacagacggagatcatgcatctcaagagcctcgatcacatgggtatacaagtgaagcagaacgacaagcgaaatctgtccgctaagcaccttgttgacgtgatcaagaccaagcacgaggagcaacgacgtctgcgcaatgtcaaagatcaggtctcacggcatcagtttgcctacgacctgagcgacgaggacgttctactctatctcatgcgtttcatggtcttgtatgggatgaacaacggacaacacaacgctgcggaaaaggaccgcatcgtcgagtttttcgagacattcatccctagtttctttgagttacccgaggataaagttcaagctctcctcaatgacatcgaccgggagtctggcgaagaggacgccgaagagcaactgcctgctgagctgaccaatggtcgctcgcgccgtaatggcaagaagtctgatctcctccgcggtgtcctggatcctgggcgcaacactagcaagccacgtgcacagaaagaagacagcgcggcgtcaggtagtaaagagacaacccctgatgtaggctctgccaacgaggaagaaatgaatgacgcaccggaggacccccttccctcggatatgtctaatgaacgctggcttcctacactccctcgcgctacagttgtcaccggggacagcagcctcttggacgccgatggtgagctgaaagccgacggcttcttcccccgaccatggtacaatttcttctgcaatcagactatctacgtatttttcaccgtgttccagacgctttacaagcgcctgaaggaggtcaaggagagcaaagagagcgttcttaacgcgatcgcccgggccaagtgcaagaagccagcaaaagatctgggcattgcagtcaacgagattaactatttcgatgagaacgacgaagcctcattctggcctaagactgtggagttgatcgaggattatatcacaggggaaattgatgaaaatcggtatcaggaggtcctccggtactactacctccagaaaggatggacgctgtacacaattcttgacctgctcaagacgctttgtcggctgtctctggtctgcacgagcacagactcgaaggagaagacacccgacctcattcttcagttcctgaacagccgtcagcaggaggagacgagctatcagactgagattagtgcacgcaagttcgcagaaaagtgcatcaaggacggtgacatgttcgttgtctgctggttccccaacaaacgtgaggccacggctcgctggctacagaaggacgagacgaccttctacatggacgagatggagcttcgtgagagatggcaatactacatctcttcttatgtacgcgtcgagccgaccgagggcataagtagaactcggctccagaagacggttttggcgcgtaaccttccctctaatgatacggattcagacgatggcaacgcgcccaaagcactcaagttcaatgaggagctgattctgcggatctgcctcaactcgaacaaaattgtttgggaaaaagatacatcggagtacttcatctatcacttggattctgaggagggagaagagaaacgaaaggaacgcgcacaagcgatcacggaacacagagatcaactgttccgagagaagatggtgatgaacaatgcctggatgcggggattgagccaggatgacgtgcaaaaggtaaacgagcagttccagaaatggatgcacgagggtctaataccgacctcgaacgttcgtgggggcgacgacgaggagatgggaggagttgcctgagtgattcggcacagcgcatcgatcgtttctttggcggctcgcttcctccagataatctgcatcacttggccggcgtttggggcgttgtcaacttcgtttgacgagagggaaacaccggtctctgtccagaggccttgcatagcgatcttttactttctttcgcgtgttttcgctgctacaaacatacacgtaccaaaagcatgaggaaatggaattcatgaggggtgcgtagtggaggaatatgtacaaaaggatggcctctgtaccgtcgtggccgaaggatgccagggtttccgtcttgcaccattgtgccactttgtattagttactgtgatttgttacgactattactcaagcttatctatgcttaaacagtaggtagaaaaccaacagagtattatatgagacctttgatcccaccaatgaatcgtggcttgaaaacgac

SEQ ID NO: 21662 - DNA, 4071 bp, Muscodor strobelii
  misc_feature: SGI cDNA ID NO. 567336
  misc_feature: Encodes the peptide sequence at SEQ ID NO 21663
atgcaacagcagcaacagcagcagcagggccaacagcccatcctcaatccacgtgcaagtgccatcaccatggccatgcctggtttcaaactctttcggggctactatgtctgcccgcagttctgcgcaacttccaagcctcagctgcgggacgacatgtttcggtggatgaccgaccctatctctttccaaccactcaagccacagcccctggttcgagatggccccttcttctgctccccgacattcatcggagagtcctggcccgagttgcgggagagagtgctaaactggctgaaacaggatgctctcagctacctcgaccaagtcaaggtgcagttctccgaccagcctgatgtctacaacaagttcttggacatcatgaaggatttcaagagccaaaccatcgacacgcctggggtcatcaaccgcgtttcggagctcttttcgggccatcccaccctgatccagggattcaacaccttcttgcctcccggctatagaatcgagtgcgggcacggcaacgaccccaacacgatccgcgtcacgacgcccatgggcaccacggtacagtccatcacctctcgagccaaccaggcagagggcgcccatggccagtctggtgccaacgctttcctgcgaaacagctggcaaccgtcccagccgcacaacagcatcgagtcgcccgaggcagccttcagtgtgcccgccaccaacgggcccggcatttttggctcgggacaacgagatggccctcctttcgatgctcccggcggaagcggtggccagcaacgtgcggcgacccaggcgcagaacaataccacgccaaatgggccttcgacgcggaacgcgataaccccgaccccggggatgcctcccagcggccccaatagtggtggcaaccagcaggccaacatggagaagcgcggccctgtcgagttcaaccatgcgattagctacgtaaataaaataaagaatcgcttccaggatcgaccggagatctacaaacaattcctcgagattctccagacttatcagcgcgaacagaagcccattcaagacgtctacggccaggtcacgagtctcttcaacactgcgcccgacctcctggaggacttcaagcaattccttcccgagtccgctgcctccaacaagaacagcgcacgcgccgacgaggtactcgccatgggactggcgcagacgacaccacagcctgggcatgtcgcgagagacaaccagaagatgcctcctgtcggcaatttcgcaccgcctcccagcgccagtaaggacagcaagaagcggccccgcaacgagaagcaaccgcagcctcctcccatcgctatgggggacagcccggccctcggatctcgctcgatccctggcgtcgctgctacaagcaagcggcccaagctaaaccacaaggcactcgcgaccgatgtgcccgccattgagcctaccctgacacccgtgctccctgagcccttgccgcccacatcctcggccaacgccaccgccgacgagatttcattcttcgacagagtgaagaagtatatttctaacagagccgtcatgaccgagtttctcaagttgtgcaacatgtactcgcaaagcctcatcgacaccaatgacctggtacataaggcgagccagttcatcggtggaaacccggagcttatggagttcttcaagaagtttgtgggctacgagggcccatctgcagacgacatgattgaaaaccgtcctcggccgtcgactggaaaggtgtcgctgagtaactgtcgcggtgttggtcccagttaccggttgcttccgcgtagggagaagctgaagccgtgtggcggcagggacgagatgtgcaatgccgtgctcaacgacgagtgggcttcgcaccctacctgggcctctgaagactccggttttgtcgcgcaccgcaagaatgcgttcgaagaaggcctgcatcgtatcgaggaagagcgacacgactatgacttcaatatcgaagccaacaccaagtgcattcaactcctcgagcccatcgcacagcagatgctgaacttaaccccgcaagagcgagagaacttctcgatgccaccggggctgggaggttccagtacatccatatacaagcgcgtcctcaagaaaatctacggtccggagaaaggcgcagaggttgtcaatgacatgttctcagacccttttgcggtcgtgccgatagtgctcgcacggctcaagcagaaagacgaagagtggcggttcacgcagcgagagtgggaaaaggtctggcaagcacagacggagatcatgcatctcaagagcctcgatcacatgggtatacaagtgaagcagaacgacaagcgaaatctgtccgctaagcaccttgttgacgtgatcaagaccaagcacgaggagcaacgacgtctgcgcaatgtcaaagatcaggtctcacggcatcagtttgcctacgacctgagcgacgaggacgttctactctatctcatgcgtttcatggtcttgtatgggatgaacaacggacaacacaacgctgcggaaaaggaccgcatcgtcgagtttttcgagacattcatccctagtttctttgagttacccgaggataaagttcaagctctcctcaatgacatcgaccgggagtctggcgaagaggacgccgaagagcaactgcctgctgagctgaccaatggtcgctcgcgccgtaatggcaagaagtctgatctcctccgcggtgtcctggatcctgggcgcaacactagcaagccacgtgcacagaaagaagacagcgcggcgtcaggtagtaaagagacaacccctgatgtaggctctgccaacgaggaagaaatgaatgacgcaccggaggacccccttccctcggatatgtctaatgaacgctggcttcctacactccctcgcgctacagttgtcaccggggacagcagcctcttggacgccgatggtgagctgaaagccgacggcttcttcccccgaccatggtacaatttcttctgcaatcagactatctacgtatttttcaccgtgttccagacgctttacaagcgcctgaaggaggtcaaggagagcaaagagagcgttcttaacgcgatcgcccgggccaagtgcaagaagccagcaaaagatctgggcattgcagtcaacgagattaactatttcgatgagaacgacgaagcctcattctggcctaagactgtggagttgatcgaggattatatcacaggggaaattgatgaaaatcggtatcaggaggtcctccggtactactacctccagaaaggatggacgctgtacacaattcttgacctgctcaagacgctttgtcggctgtctctggtctgcacgagcacagactcgaaggagaagacacccgacctcattcttcagttcctgaacagccgtcagcaggaggagacgagctatcagactgagattagtgcacgcaagttcgcagaaaagtgcatcaaggacggtgacatgttcgttgtctgctggttccccaacaaacgtgaggccacggctcgctggctacagaaggacgagacgaccttctacatggacgagatggagcttcgtgagagatggcaatactacatctcttcttatgtacgcgtcgagccgaccgagggcataagtagaactcggctccagaagacggttttggcgcgtaaccttccctctaatgatacggattcagacgatggcaacgcgcccaaagcactcaagttcaatgaggagctgattctgcggatctgcctcaactcgaacaaaattgtttgggaaaaagatacatcggagtacttcatctatcacttggattctgaggagggagaagagaaacgaaaggaacgcgcacaagcgatcacggaacacagagatcaactgttccgagagaagatggtgatgaacaatgcctggatgcggggattgagccaggatgacgtgcaaaaggtaaacgagcagttccagaaatggatgcacgagggtctaataccgacctcgaacgttcgtgggggcgacgacgaggagatgggaggagttgcctga

SEQ ID NO: 21663 - protein, 1356 aa, Muscodor strobelii
  misc_feature: SGI Peptide ID NO. 567336
  misc_feature (592)..(693): Pfam Id: PF08295 Pfam Desc: Histone deacetylase (HDAC) interacting
  misc_feature (118)..(164): Pfam Id: PF02671 Pfam Desc: Paired amphipathic helix repeat
  misc_feature (332)..(378): Pfam Id: PF02671 Pfam Desc: Paired amphipathic helix repeat
  misc_feature (521)..(567): Pfam Id: PF02671 Pfam Desc: Paired amphipathic helix repeat
  misc_feature (102)..(1350): NCBI GI: 256734847 Blast Desc: histone deacetylase complex protein [Nectria haematococca mpVI 77-13-4]
  misc_feature (102)..(1342): NCBI GI: 46134915 Blast Desc: FG09306.1 [Gibberella zeae PH-1]
  misc_feature (75)..(1333): NCBI GI: 116181514 Blast Desc: CHGG_01385 [Chaetomium globosum CBS 148.51] gi|88185682|gb|EAQ93150.1| CHGG_01385 [Chaetomium globosum CBS 148.51]
  misc_feature (99)..(1348): NCBI GI: 261355201 Blast Desc: transcriptional regulatory protein SIN3 [Verticillium albo-atrum VaMs.102]
  misc_feature (102)..(1347): NCBI GI: 145616018 Blast Desc: MGG_13498 [Magnaporthe grisea 70-15] gi|145009799|gb|EDJ94455.1| MGG_13498 [Magnaporthe grisea 70-15]
  misc_feature (89)..(1338): NCBI GI: 38567128 Blast Desc: related to transcription regulatory protein [Neurospora crassa]
  misc_feature (89)..(1338): NCBI GI: 164427863 Blast Desc: NCU02578 [Neurospora crassa OR74A] gi|157071913|gb|EAA36473.2| conserved [Neurospora crassa OR74A]
  misc_feature (107)..(1334): NCBI GI: 171687219 Blast Desc: protein product [Podospora anserina] gi|170943571|emb|CAP69223.1| protein product [Podospora anserina]
  misc_feature (102)..(1342): NCBI GI: 156054738 Blast Desc: SS1G_06217 [Sclerotinia sclerotiorum 1980] gi|154703997|gb|EDO03736.1| SS1G_06217 [Sclerotinia sclerotiorum 1980]
  misc_feature (102)..(1336): NCBI GI: 226291070 Blast Desc: transcriptional regulatory protein SIN3 [Paracoccidioides brasiliensis Pb18]
MQQQQQQQQGQQPILNPRASAITMAMPGFKLFRGYYVCPQFCATSKPQLRDDMFRWMTDPISFQPLKPQPLVRDGPFFCSPTFIGESWPELRERVLNWLKQDALSYLDQVKVQFSDQPDVYNKFLDIMKDFKSQTIDTPGVINRVSELFSGHPTLIQGFNTFLPPGYRIECGHGNDPNTIRVTTPMGTTVQSITSRANQAEGAHGQSGANAFLRNSWQPSQPHNSIESPEAAFSVPATNGPGIFGSGQRDGPPFDAPGGSGGQQRAATQAQNNTTPNGPSTRNAITPTPGMPPSGPNSGGNQQANMEKRGPVEFNHAISYVNKIKNRFQDRPEIYKQFLEILQTYQREQKPIQDVYGQVTSLFNTAPDLLEDFKQFLPESAASNKNSARADEVLAMGLAQTTPQPGHVARDNQKMPPVGNFAPPPSASKDSKKRPRNEKQPQPPPIAMGDSPALGSRSIPGVAATSKRPKLNHKALATDVPAIEPTLTPVLPEPLPPTSSANATADEISFFDRVKKYISNRAVMTEFLKLCNMYSQSLIDTNDLVHKASQFIGGNPELMEFFKKFVGYEGPSADDMIENRPRPSTGKVSLSNCRGVGPSYRLLPRREKLKPCGGRDEMCNAVLNDEWASHPTWASEDSGFVAHRKNAFEEGLHRIEEERHDYDFNIEANTKCIQLLEPIAQQMLNLTPQERENFSMPPGLGGSSTSIYKRVLKKIYGPEKGAEVVNDMFSDPFAVVPIVLARLKQKDEEWRFTQREWEKVWQAQTEIMHLKSLDHMGIQVKQNDKRNLSAKHLVDVIKTKHEEQRRLRNVKDQVSRHQFAYDLSDEDVLLYLMRFMVLYGMNNGQHNAAEKDRIVEFFETFIPSFFELPEDKVQALLNDIDRESGEEDAEEQLPAELTNGRSRRNGKKSDLLRGVLDPGRNTSKPRAQKEDSAASGSKETTPDVGSANEEEMNDAPEDPLPSDMSNERWLPTLPRATVVTGDSSLLDADGELKADGFFPRPWYNFFCNQTIYVFFTVFQTLYKRLKEVKESKESVLNAIARAKCKKPAKDLGIAVNEINYFDENDEASFWPKTVELIEDYITGEIDENRYQEVLRYYYLQKGWTLYTILDLLKTLCRLSLVCTSTDSKEKTPDLILQFLNSRQQEETSYQTEISARKFAEKCIKDGDMFVVCWFPNKREATARWLQKDETTFYMDEMELRERWQYYISSYVRVEPTEGISRTRLQKTVLARNLPSNDTDSDDGNAPKALKFNEELILRICLNSNKIVWEKDTSEYFIYHLDSEEGEEKRKERAQAITEHRDQLFREKMVMNNAWMRGLSQDDVQKVNEQFQKWMHEGLIPTSNVRGGDDEEMGGVA

SEQ ID NO: 21664 - DNA, 4316 bp, Muscodor strobelii; identical to SEQ ID NO: 21661
  misc_feature: SGI EST ID NO. CUFF.51038.2
  misc_feature: Variant of the nucleotide sequence at SEQ ID NO 21662

SEQ ID NO: 21665 - DNA, 657 bp, Muscodor strobelii
  misc_feature: SGI cDNA ID NO. 567337
  misc_feature: Encodes the peptide sequence at SEQ ID NO 21666
atgcaagccgcacttgtcctcgctactgccgtgagcggtgccatcgctgccggcgagattttcacccagacttcacacagtggctcttctgggcccatcaagacccaggatatctccatcactctcaaccccccggtcaatctcccctggtgtactaccactgtcgtgactcacaccgtcaccttcaccaagaccgtcacaagatacaagggaagcaatagcactacattctccaccatcgttgctccccccaagtcggctgccaacaccactaccaccaccaccaaggaggctactaccacccatgtgcacggcagttatatcccatggtggccggtggttcacaaaaccaagacctcgacgaagtctccggctcagggaaacacgaccagcgattcgttctcgtgcctaggagttggtgtctgcccttcacaaacgagtaccactgaggtagaggagactacaagcactactgaaccggaggcatcatccgtcactgcggacttggtcttgccgacgtggtggccagtcaataccactaccagcgacgagttacctcttcccaccatgtcacctaagcccgacaactcaacctctactgtcgctgagagggccttcactctgcatggaactcggcctcgagcttctgacaactag

SEQ ID NO: 21666 - protein, 218 aa, Muscodor strobelii
  misc_feature: SGI Peptide ID NO. 567337
MQAALVLATAVSGAIAAGEIFTQTSHSGSSGPIKTQDISITLNPPVNLPWCTTTVVTHTVTFTKTVTRYKGSNSTTFSTIVAPPKSAANTTTTTTKEATTTHVHGSYIPWWPVVHKTKTSTKSPAQGNTTSDSFSCLGVGVCPSQTSTTEVEETTSTTEPEASSVTADLVLPTWWPVNTTTSDELPLPTMSPKPDNSTSTVAERAFTLHGTRPRASDN

SEQ ID NO: 21667 - DNA, 723 bp, Muscodor strobelii
  misc_feature: SGI EST ID NO. CUFF.50794.0
  misc_feature: Variant of the nucleotide sequence at SEQ ID NO 21665
cggcaaaatctaacattcgactttgatggtgaataaccttgagcagaaccaagatcaagtttttctagcgtgactgctctcgcacgaagccctattgaaataaaatatatatactggctacatttctcgtctggtctgcttttcccccatctcttctcttcttcttacaccacgccccgaatccttctgtgtatccaagacgacggtacggtcaaccacatcaaagtcgtcatcatgcaagccgcacttgtcctcgctactgccgtgagcggtgccatcgctgccggcgagattttcacccagacttcacacagtggctcttctgggcccatcaagacccaggatatctccatcactctcaaccccccggtcaatctcccctggtgtactaccactgtcgtgactcacaccgtcaccttcaccaagaccgtcacaagatacaagggaagcaatagcactacattctccaccatcgttgctccccccaagtcggctgccaacaccactaccaccaccaccaaggaggctactaccacccatgtgcacggcagttatatcccatggtggccggtggttcacaaaaccaagacctcgacgaagtctccggctcagggaaacacgaccagcgattcgttctcgtgcctaggagttggtgtctgcccttcacaaacgagtaccactgaggtagaggagactacaagcactactgaaccggaggcatca

SEQ ID NO: 21668 - DNA, 5733 bp, Muscodor strobelii
  misc_feature: SGI cDNA ID NO. 567338
  misc_feature: Encodes the peptide sequence at SEQ ID NO 21669
atgcctgcgttcgctgccatcaatctcgagcccgaggagaacctggacgaggaggtcgacacgtcgcgcgagctccacatcgacgaggccctcaagcgcttccagaccgccctcaagctccattcccagggcgtcgcccaccgcgaagaggccgccgccgagtacgatcagctgttcaagtcggacatcttcaagttccccgagagcgtcaccgacttcgaccgcgccgagcgacaggcccacggccgcgacctgcccaccaacctctccttccagcatgccctcgacctcgcccagtccgacatcgacggcatcgctgccagcttaccgcagaccctgtacctcgcctacaagaaccatggccagttcgtgctcgacggcatccgctacaaggccaaggccgagggtgtcccttctgctgccttgctcgacgatatctacgccctgcaacatgcgcagaaggccctcgaggagtttggtgctgctctggaccaggacccatccgatgctgaactttggaggagggctgcccgtgtcgccgctttcctgaggagctcgaggatcagccgatattgtctcgaggccgctatcgaactcgacgatgacccagccgtggatgaagtggacccgccctctctcgccgagggtctcgcaggagagcagttgaaggcacagctgcaagtcctttctgaccaggttgccctgagccatcctgccatgggccccttcgtcaagaaatctctaccccaggccctcaagaagtatctcgacccgctcccttttctgccggatcctaccacctccttagaatcgctgaagcctccaccggcacacgaggagaaaacaccatctgtcatacacgtaccgactcccacctggcaagatctgggcctggccatactagcacacgccagagctcatggattagcagctgatcggatcattattgacatgcccgagatcagcgaccagactgacgagatgcagttgttggtgggacgtccaaagccactagcagaagagacatcaccaacggtcgaagagacgccgacaatcgagtcgcccatagaaactcgcgcgggtgtggatagtatagcagagatcagacaggcagagcgaagcagctcacggaagagatcccagtccgtcgcggctctggtcgatgctgccgaagacgaggtggccggccgtgagagaagcaagcgcatccgccgccgcgagactgctgccgaggagtcagtcgactccaacacccttttgatggcccagttgcagccattccaggccgccgaccagaacctgttcaagatgacccggaacctggccgagaacttgggcatgaccgatcgtgacacgcttgatcgcctggctgaggtgatcgatgcttgtttcttggagacacgcacctcgaaactgacccgtccacccatggtcgacctgcgcaactctctggtcaagtttgcggaggataatgctaagatcctcttgactaagaaagccccttcgccaattggtctatcgtctttcctggagcattccaaacctggctcacagattcatactttgcggcctgccttcaacgaaaccagaggtctggccagtttcgtgaaaggggtcaatgaggactggacagaacttcgcgaaatcatatatcaatggatccagcacatgtgccgcagctataccgaaagcaaatggtcagaggccatgaagagggctgtcgtacaagtcatcagccatctcgacgaagacatctacaatcgcacgcaatatgaacttgcgtcgtcctctcatctgggtgccctacataattcatggaatgccagtgaccaactcgtacaaatgctattcgaactgcatttagatatctacgaacggattactaaccccaatagtgctgtggacgtcacgatccgtatcgaaacaaagacgagactggcgcgctggttctctctggccgcccagatgagccgcctgagaccagattctggagatacttcattatcgatgcggttcttgtggtctgctgtcttcaccgtcacgataacagaaggcgcagagcgggatcacatcctccagtgctggaagagtctgcgcgatcgcttgactgaagaagaaacgcccgtaaacatcatactacccaacaatgcggtgatgctggaggtctccgcgcaagccgccgagaccgagatatccaagctcactactatggatttcttcttgggacttttccagaccgacctcaaggagcccaccgctgtcatcgatagcttggagccagtactgaaccctgcatccgtagtcacggctgtcgagcaggtcgatgatgagcagcctcgcagcgccaccgctactccagacgaacaccctaagaaggccgcgacgaaaaaggtgcctatcttcgagaccgcgagtcctggccttcgtgacctatggaaattcttgcttggcactagcaccgagttgcgcctgttcctgtggacccgccttggtgatgcttacgaagtcatctcttacaagacgaaacagttctcgtgctggctaaaaagcatcgaactgattgtgaatgattttgagcgtgacccttatctgagtgcccctgacgagacgcgattacctttattcatcaagatgctgaagtttctcgacgacttacttatttccgcattgacggcagctctgaacgatcacagcgcatttgaaattgttgacaacgaccatatcaagtcgagcattgccgcgctggcaaagctgagctgcatactgcacgtgccctctatgtatgaagacgaggtgcgagtgggaatcctgcaacaggcctccaatgcagcaacttatcaatcattcttgcacaagcttcgtgagatgcaggtcagaaattggtctttgctttactgtctgctcagagctggcatggctcagaataagcccatctttaccaatgccgaaagtgatcgagtcgactatttgaatgctgtccaccaggttttaggactccgaaaattctgcaagtcgtccaacaagattttcattaagatgatgcgggtcgagctgatgaaagtccatcaactggttgacaactgggaagactacctgggccaagttctatacgatctctacggcctcaagattggagttgggcttttcgaggtacaggatcacggatgcccgccagaaaagctcgaacggaagaacacaatatctcttgtgccgaggatcgcggttctcgccaatcgtatgcccatgaaggatctcctgaagtcagacttgaagacaaccattgaacatatgcaacaggccattggacaaactaagtccaatcagcagctgatacagaacctgcgcatcttcaaccagaccatgtcaaggccgatacatccgcttcgtctatatgaagcattcaagggtaatatcgccatcgatgccgtcggtgtgcatactacagatagcaatttggccaagcatcggtggttctttcttcttggtatgattgcatttacgaaattcaagggagtagacctcaataggagacaaacaccaggcgctaccgacgaccttcgtatcggtgccacattcctccgccaacaacttcagttcacgcccgatcaatgggatgcctggttccgacttgccgaatgcttcgattacgagcttgatgaagcagtcctatggaccgccgataagatgaacaaggaacgggcagaactggtcaaataccagcgcaacgccatacactgctacacattagcactttcccactctaggacagcctttttcgacgacagtgaagaagcgacagatgctattcatgacctgtaccacaaatttggtatgcgtatgtatgcctccagccgcgagccattcgcaatggaacctttcatgcatacggaccataagcgcttcgtcataaaggacacaggtgctgataccaaagatattcactctcaaatgcaggactacaaggtatggaagtatgcttcagggttgtttaagaaagccatggaggtcaagcccaaggagtggaagaatgcctacatgtatgcaaagtgcatctggaaaatgtatcgcaagccaattcacgaactagaccacaaggatcggcagagtcgaccctcgatagaaacagtgatcaaggctctcgagcgatcagtgaaggtggtggccgcgttgccgaaacctagacacggccaagatcctatcctcgaacctcattacaagatcgtttctgtcgtccacaaactcgtcatgctcacggatcttcaaccccaagaaggcgccgacatcctggctcgtcaaccctacgcaatcgatggcaatgccgaagtaccggaccttgatgcctgggagggatatgtcatcgacacccttacgcagcttcgcgaaaaagataggtcaaactggcaacatcgcatcattatgcgacatgctcgaatcctatacaatgaggagtcggaggtgtttggatatgttaaagccatggccgcatttactgtactcaaggagtcgatgctgaccaagaccatggtcatgaacgtatggaaatgcgacgccgaacgacctggtcgacatcatgtgtacacggagctctacgtccgattcgtcgtgtcgcttcttgtggagctgaaggacagagccaattttgagctgatgctacgcagactccgtaagaaaggcgcagattactatcacttcagcgatctgtggcagacctcggtgttggcgtatctggggctgataagacgggcgttcgcggtgagacatgtcgaagaggatgaattcaagagcgtcacgcaggaagaattcgacatcgtcacgagcaagatcagtgattgggccgctaaccccgactcttcaaacccggcgctaagtgcactaaaggaactcagcgaggtcaagaagttgaacggaggactcatgaaagcgggtcctatcgacgacttgatcagcgactgctacacggcgctttatctccagctgggacatcagctctgtcccaatatcgaggagatactcttagaaagggaggcgcaacgacagcaagaaggggagaagaagggcgaaaaggataaacttctcaatcctttcagcgccatcctcaacccgcagagcaacgagaactcaggcaccgaaggtgttgccggggacgtcacgccggctaccaaccaggacggagctcctcgacctagaaaggcggggatccgccgtgctgacgtactgcgtaaggcggagcaggcggtgctcagggccatggagggcccggcgaaagcttcgtcgcgcggaaagtcggtctctagtgcggacaagacacctgctgctgatgaaggcggagacggagatggtgatggtgatcacgagggagatacggagatgagggaagcaggcgaaggggcggagagcgaggcggagagcgtcagaggcagtatacatgacgaggcggatgacgagagtgatcttagtgatgtgcctcccgaagatctgctggatgatgaggaagtcagccagtttatgtttccgaatctcatgaggaggaatacggctaaggatagtagtagtgggactgaggaggaagatgaagaggaagaaggggaagaaggggatgaggaagatgaggaggaggaagatggcgagggaaaagagcaggacgaggatgaggagatgcatgatgagattcatgcccatggggatcctgaggatgatgaagaggaagaagaagaggaggaggaggaagagtaa

SEQ ID NO: 21669 - protein, 1910 aa, Muscodor strobelii
  misc_feature: SGI Peptide ID NO. 567338
  misc_feature (1)..(1862): NCBI GI: 46116376 Blast Desc: FG04030.1 [Gibberella zeae PH-1] gi|118573330|sp|Q4IFH8.1|HIR3_GIBZE RecName: Full=Histone transcription regulator 3 homolog
  misc_feature (1)..(1842): NCBI GI: 164429378 Blast Desc: NCU04512 [Neurospora crassa OR74A] gi|157073457|gb|EAA27687.2| conserved [Neurospora crassa OR74A]
  misc_feature (2)..(1762): NCBI GI: 171691398 Blast Desc: protein product [Podospora anserina] gi|170945647|emb|CAP71760.1| protein product [Podospora anserina]
  misc_feature (1)..(1842): NCBI GI: 145611812 Blast Desc: MGG_00105 [Magnaporthe grisea 70-15] gi|145019055|gb|EDK03334.1| MGG_00105 [Magnaporthe grisea 70-15]
  misc_feature (1)..(1908): NCBI GI: 261352903 Blast Desc: conserved [Verticillium albo-atrum VaMs.102]
  misc_feature (1)..(1852): NCBI GI: 156061996 Blast Desc: SS1G_01112 [Sclerotinia sclerotiorum 1980] gi|154696450|gb|EDN96188.1| SS1G_01112 [Sclerotinia sclerotiorum 1980]
  misc_feature (1)..(1852): NCBI GI: 154295790 Blast Desc: BC1G_12898 [Botryotinia fuckeliana B05.10] gi|150843931|gb|EDN19124.1| BC1G_12898 [Botryotinia fuckeliana B05.10]
  misc_feature (1)..(1910): NCBI GI: 159127355 Blast Desc: transcriptional corepressor of histone genes (Hir3), [Aspergillus fumigatus A1163]
  misc_feature (1)..(1886): NCBI GI: 242784090 Blast Desc: transcriptional corepressor of histone genes (Hir3), [Talaromyces stipitatus ATCC 10500] gi|218720464|gb|EED19883.1| transcriptional corepressor of histone genes (Hir3), [Talaromyces
  misc_feature (1)..(1908): NCBI GI: 70999237 Blast Desc: transcriptional corepressor of histone genes (Hir3) [Aspergillus fumigatus Af293] gi|74674532|sp|Q4WYF1.1|HIR3_ASPFU RecName: Full=Histone transcription regulator 3 homolog of genes
MPAFAAINLEPEENLDEEVDTSRELHIDEALKRFQTALKLHSQGVAHREEAAAEYDQLFKSDIFKFPESVTDFDRAERQAHGRDLPTNLSFQHALDLAQSDIDGIAASLPQTLYLAYKNHGQFVLDGIRYKAKAEGVPSAALLDDIYALQHAQKALEEFGAALDQDPSDAELWRRAARVAAFLRSSRISRYCLEAAIELDDDPAVDEVDPPSLAEGLAGEQLKAQLQVLSDQVALSHPAMGPFVKKSLPQALKKYLDPLPFLPDPTTSLESLKPPPAHEEKTPSVIHVPTPTWQDLGLAILAHARAHGLAADRIIIDMPEISDQTDEMQLLVGRPKPLAEETSPTVEETPTIESPIETRAGVDSIAEIRQAERSSSRKRSQSVAALVDAAEDEVAGRERSKRIRRRETAAEESVDSNTLLMAQLQPFQAADQNLFKMTRNLAENLGMTDRDTLDRLAEVIDACFLETRTSKLTRPPMVDLRNSLVKFAEDNAKILLTKKAPSPIGLSSFLEHSKPGSQIHTLRPAFNETRGLASFVKGVNEDWTELREIIYQWIQHMCRSYTESKWSEAMKRAVVQVISHLDEDIYNRTQYELASSSHLGALHNSWNASDQLVQMLFELHLDIYERITNPNSAVDVTIRIETKTRLARWFSLAAQMSRLRPDSGDTSLSMRFLWSAVFTVTITEGAERDHILQCWKSLRDRLTEEETPVNIILPNNAVMLEVSAQAAETEISKLTTMDFFLGLFQTDLKEPTAVIDSLEPVLNPASVVTAVEQVDDEQPRSATATPDEHPKKAATKKVPIFETASPGLRDLWKFLLGTSTELRLFLWTRLGDAYEVISYKTKQFSCWLKSIELIVNDFERDPYLSAPDETRLPLFIKMLKFLDDLLISALTAALNDHSAFEIVDNDHIKSSIAALAKLSCILHVPSMYEDEVRVGILQQASNAATYQSFLHKLREMQVRNWSLLYCLLRAGMAQNKPIFTNAESDRVDYLNAVHQVLGLRKFCKSSNKIFIKMMRVELMKVHQLVDNWEDYLGQVLYDLYGLKIGVGLFEVQDHGCPPEKLERKNTISLVPRIAVLANRMPMKDLLKSDLKTTIEHMQQAIGQTKSNQQLIQNLRIFNQTMSRPIHPLRLYEAFKGNIAIDAVGVHTTDSNLAKHRWFFLLGMIAFTKFKGVDLNRRQTPGATDDLRIGATFLRQQLQFTPDQWDAWFRLAECFDYELDEAVLWTADKMNKERAELVKYQRNAIHCYTLALSHSRTAFFDDSEEATDAIHDLYHKFGMRMYASSREPFAMEPFMHTDHKRFVIKDTGADTKDIHSQMQDYKVWKYASGLFKKAMEVKPKEWKNAYMYAKCIWKMYRKPIHELDHKDRQSRPSIETVIKALERSVKVVAALPKPRHGQDPILEPHYKIVSVVHKLVMLTDLQPQEGADILARQPYAIDGNAEVPDLDAWEGYVIDTLTQLREKDRSNWQHRIIMRHARILYNEESEVFGYVKAMAAFTVLKESMLTKTMVMNVWKCDAERPGRHHVYTELYVRFVVSLLVELKDRANFELMLRRLRKKGADYYHFSDLWQTSVLAYLGLIRRAFAVRHVEEDEFKSVTQEEFDIVTSKISDWAANPDSSNPALSALKELSEVKKLNGGLMKAGPIDDLISDCYTALYLQLGHQLCPNIEEILLEREAQRQQEGEKKGEKDKLLNPFSAILNPQSNENSGTEGVAGDVTPATNQDGAPRPRKAGIRRADVLRKAEQAVLRAMEGPAKASSRGKSVSSADKTPAADEGGDGDGDGDHEGDTEMREAGEGAESEAESVRGSIHDEADDESDLSDVPPEDLLDDEEVSQFMFPNLMRRNTAKDSSSGTEEEDEEEEGEEGDEEDEEEEDGEGKEQDEDEEMHDEIHAHGDPEDDEEEEEEEEEEE

SEQ ID NO: 21670 - DNA, 6635 bp, Muscodor strobelii
  misc_feature: SGI EST ID NO. CUFF.50927.1
  misc_feature: Variant of the nucleotide sequence at SEQ ID NO 21668
agcatctgcatcaattaaaccctctggacgacccaagctgtcgcgtatcatcatcatcgccaacacgcgctaactgccgagctgccaccttcctgctctacatttgaggttgcatctttgcgcccggcaactatcgtacctacccgctgtttgcatggaacatactgctgcctattttacaaggtagctcttatgcaactctaggcttaatcctctgcagcgcatcagcaatcagcttccaaccaaaaccacttaattatgcgacaaacgacattgacaccttgaagtcgagaggctgaagcctgcatcctgacaagatgcctgcgttcgctgccatcaatctcgagcccgaggagaacctggacgaggaggtcgacacgtcgcgcgagctccacatcgacgaggccctcaagcgcttccagaccgccctcaagctccattcccagggcgtcgcccaccgcgaagaggccgccgccgagtacgatcagctgttcaagtcggacatcttcaagttccccgagagcgtcaccgacttcgaccgcgccgagcgacaggcccacggccgcgacctgcccaccaacctctccttccagcatgccctcgacctcgcccagtccgacatcgacggcatcgctgccagcttaccgcagaccctgtacctcgcctacaagaaccatggccagttcgtgctcgacggcatccgctacaaggccaaggccgagggtgtcccttctgctgccttgctcgacgatatctacgccctgcaacatgcgcagaaggccctcgaggagtttggtgctgctctggaccaggacccatccgatgctgaactttggaggagggctgcccgtgtcgccgctttcctgaggagctcgaggatcagccgatattgtctcgaggccgctatcgaactcgacgatgacccagccgtggatgaagtggacccgccctctctcgccgagggtctcgcaggagagcagttgaaggcacagctgcaagtcctttctgaccaggttgccctgagccatcctgccatgggccccttcgtcaagaaatctctaccccaggccctcaagaagtatctcgacccgctcccttttctgccggatcctaccacctccttagaatcgctgaagcctccaccggcacacgaggagaaaacaccatctgtcatacacgtaccgactcccacctggcaagatctgggcctggccatactagcacacgccagagctcatggattagcagctgatcggatcattattgacatgcccgagatcagcgaccagactgacgagatgcagttgttggtgggacgtccaaagccactagcagaagagacatcaccaacggtcgaagagacgccgacaatcgagtcgcccatagaaactcgcgcgggtgtggatagtatagcagagatcagacaggcagagcgaagcagctcacggaagagatcccagtccgtcgcggctctggtcgatgctgccgaagacgaggtggccggccgtgagagaagcaagcgcatccgccgccgcgagactgctgccgaggagtcagtcgactccaacacccttttgatggcccagttgcagccattccaggccgccgaccagaacctgttcaagatgacccggaacctggccgagaacttgggcatgaccgatcgtgacacgcttgatcgcctggctgaggtgatcgatgcttgtttcttggagacacgcacctcgaaactgacccgtccacccatggtcgacctgcgcaactctctggtcaagtttgcggaggataatgctaagatcctcttgactaagaaagccccttcgccaattggtctatcgtctttcctggagcattccaaacctggctcacagattcatactttgcggcctgccttcaacgaaaccagaggtctggccagtttcgtgaaaggggtcaatgaggactggacagaacttcgcgaaatcatatatcaatggatccagcacatgtgccgcagctataccgaaagcaaatggtcagaggccatgaagagggctgtcgtacaagtcatcagccatctcgacgaagacatctacaatcgcacgcaatatgaacttgcgtcgtcctctcatctgggtgccctacataattcatggaatgccagtgaccaactcgtacaaatgctattcgaactgcatttagatatctacgaacggattactaaccccaatagtgctgtggacgtcacgatccgtatcgaaacaaagacgagactggcgcgctggttctctctggccgcccagatgagccgcctgagaccagattctggagatacttcattatcgatgcggttcttgtggtctgctgtcttcaccgtcacgataacagaaggcgcagagcgggatcacatcctccagtgctggaagagtctgcgcgatcgcttgactgaagaagaaacgcccgtaaacatcatactacccaacaatgcggtgatgctggaggtctccgcgcaagccgccgagaccgagatatccaagctcactactatggatttcttcttgggacttttccagaccgacctcaaggagcccaccgctgtcatcgatagcttggagccagtactgaaccctgcatccgtagtcacggctgtcgagcaggtcgatgatgagcagcctcgcagcgccaccgctactccagacgaacaccctaagaaggccgcgacgaaaaaggtgcctatcttcgagaccgcgagtcctggccttcgtgacctatggaaattcttgcttggcactagcaccgagttgcgcctgttcctgtggacccgccttggtgatgcttacgaagtcatctcttacaagacgaaacagttctcgtgctggctaaaaagcatcgaactgattgtgaatgattttgagcgtgacccttatctgagtgcccctgacgagacgcgattacctttattcatcaagatgctgaagtttctcgacgacttacttatttccgcattgacggcagctctgaacgatcacagcgcatttgaaattgttgacaacgaccatatcaagtcgagcattgccgcgctggcaaagctgagctgcatactgcacgtgccctctatgtatgaagacgaggtgcgagtgggaatcctgcaacaggcctccaatgcagcaacttatcaatcattcttgcacaagcttcgtgagatgcaggtcagaaattggtctttgctttactgtctgctcagagctggcatggctcagaataagcccatctttaccaatgccgaaagtgatcgagtcgactatttgaatgctgtccaccaggttttaggactccgaaaattctgcaagtcgtccaacaagattttcattaagatgatgcgggtcgagctgatgaaagtccatcaactggttgacaactgggaagactacctgggccaagttctatacgatctctacggcctcaagattggagttgggcttttcgaggtacaggatcacggatgcccgccagaaaagctcgaacggaagaacacaatatctcttgtgccgaggatcgcggttctcgccaatcgtatgcccatgaaggatctcctgaagtcagacttgaagacaaccattgaacatatgcaacaggccattggacaaactaagtccaatcagcagctgatacagaacctgcgcatcttcaaccagaccatgtcaaggccgatacatccgcttcgtctatatgaagcattcaagggtaatatcgccatcgatgccgtcggtgtgcatactacagatagcaatttggccaagcatcggtggttctttcttcttggtatgattgcatttacgaaattcaagggagtagacctcaataggagacaaacaccaggcgctaccgacgaccttcgtatcggtgccacattcctccgccaacaacttcagttcacgcccgatcaatgggatgcctggttccgacttgccgaatgcttcgattacgagcttgatgaagcagtcctatggaccgccgataagatgaacaaggaacgggcagaactggtcaaataccagcgcaacgccatacactgctacacattagcactttcccactctaggacagcctttttcgacgacagtgaagaagcgacagatgctattcatgacctgtaccacaaatttggtatgcgtatgtatgcctccagccgcgagccattcgcaatggaacctttcatgcatacggaccataagcgcttcgtcataaaggacacaggtgctgataccaaagatattcactctcaaatgcaggactacaaggtatggaagtatgcttcagggttgtttaagaaagccatggaggtcaagcccaaggagtggaagaatgcctacatgtatgcaaagtgcatctggaaaatgtatcgcaagccaattcacgaactagaccacaaggatcggcagagtcgaccctcgatagaaacagtgatcaaggctctcgagcgatcagtgaaggtggtggccgcgttgccgaaacctagacacggccaagatcctatcctcgaacctcattacaagatcgtttctgtcgtccacaaactcgtcatgctcacggatcttcaaccccaagaaggcgccgacatcctggctcgtcaaccctacgcaatcgatggcaatgccgaagtaccggaccttgatgcctgggagggatatgtcatcgacacccttacgcagcttcgcgaaaaagataggtcaaactggcaacatcgcatcattatgcgacatgctcgaatcctatacaatgaggagtcggaggtgtttggatatgttaaagccatggccgcatttactgtactcaaggagtcgatgctgaccaagaccatggtcatgaacgtatggaaatgcgacgccgaacgacctggtcgacatcatgtgtacacggagctctacgtccgattcgtcgtgtcgcttcttgtggagctgaaggacagagccaattttgagctgatgctacgcagactccgtaagaaaggcgcagattactatcacttcagcgatctgtggcagacctcggtgttggcgtatctggggctgataagacgggcgttcgcggtgagacatgtcgaagaggatgaattcaagagcgtcacgcaggaagaattcgacatcgtcacgagcaagatcagtgattgggccgctaaccccgactcttcaaacccggcgctaagtgcactaaaggaactcagcgaggtcaagaagttgaacggaggactcatgaaagcgggtcctatcgacgacttgatcagcgactgctacacggcgctttatctccagctgggacatcagctctgtcccaatatcgaggagatactcttagaaagggaggcgcaacgacagcaagaaggggagaagaagggcgaaaaggataaacttctcaatcctttcagcgccatcctcaacccgcagagcaacgagaactcaggcaccgaaggtgttgccggggacgtcacgccggctaccaaccaggacggagctcctcgacctagaaaggcggggatccgccgtgctgacgtactgcgtaaggcggagcaggcggtgctcagggccatggagggcccggcgaaagcttcgtcgcgcggaaagtcggtctctagtgcggacaagacacctgctgctgatgaaggcggagacggagatggtgatggtgatcacgagggagatacggagatgagggaagcaggcgaaggggcggagagcgaggcggagagcgtcagaggcagtatacatgacgaggcggatgacgagagtgatcttagtgatgtgcctcccgaagatctgctggatgatgaggaagtcagccagtttatgtttccgaatctcatgaggaggaatacggctaaggatagtagtagtgggactgaggaggaagatgaagaggaagaaggggaagaaggggatgaggaagatgaggaggaggaagatggcgagggaaaagagcaggacgaggatgaggagatgcatgatgagattcatgcccatggggatcctgaggatgatgaagaggaagaagaagaggaggaggaggaagagtaatgaggagccatgatgcatctggggatgagcattgtgcttcgatgacttgggatactgggtatggctgtactatttgtatatatttcttcatcatcatgatcccggcattcgctcttgtaaccgcagattgatgctctgccgtatgagacagcaggggcgtcgggctgggttgggataacggcgttatctgggctagggaagcatggtcatgaatacctacctaccttagctgtgttgttttattttctttcgtgtttttgcctgaagagacataagagctttttgatcgtgatttattggtgcggacggggagcatatggagaggactgtatacggaagggaagtgcaataagatagtgtggtgaataagggggctgcctatgtgcaagtgacaggttgtaaggagtaatgatgtggtgtgcagtgaaatgaagtgaaatgagctgagaagaagagaattgaggaacgaacaaagaaaaacacgatgactggcatgactgacataactgtcctaattgacccgaacggcactcaacccagattcgtgcttgaaataactgatgttcataggggctagtgtttttg

SEQ ID NO: 21671 - DNA, 2094 bp, Muscodor strobelii
  misc_feature: SGI cDNA ID NO. 567339
  misc_feature: Reduced expression when VOC is produced
  misc_feature: Encodes the peptide sequence at SEQ ID NO 21672
atgcctgcgccagaggttcctgaaatcaacgaggaggtcatacacgagtcgattgatgcccgtaccgagaccctcgcggccctgcgcgagctcggcccgcccgacctcgtccacctgctcaagcagaacctgaggagctcgggcaagcagaacggcgtctaccaccatgtcacgggtgtcgacgcctcctcctcggcctccctcgccgcctacatcaacacgctgacctaccgcgagcgcggcacgacgcccacccacaagatcgtcgagggcatcttctgctgctacaacgccttctcccgcctcgacatgcgcgtccacgtcaccatccccggcacggtcgaggccttctgcgtcgacgagcgcggcgagaagcgcaaggccaccgacgacctctggctcgagacctacctgtgctccgtcctgcgcgcctactcctatgccgatgacggtagtggcgacaccatccgcaagatcatgggcgtgcgtcgcttcaaccccgtcaccaacaccgagaccgagcaccgcttcctctccgccgccgaggccctcttcttccgaggctggcaattgggctccgactcggtcgtacaggtccccaataacgtctccaaccacctgaccgccggcctcctcaaatacttccacaccaccggccgcttcgcatccggcatcaacctcttcgagaagctgcgcacacagaacgtcgaagtctcctctctcctcgccaaggtgctgttcatgggcaatgaagaagtgcaaggcgtacgcgttctataccaggccctgaaagactcgcccatggattacgtgatgctcgacacccaggccgagttcctcatgaagaaggcgcagaaggccgagacacctgctcagaaagaggagaggctgcagatggctttgggctgtgccgatcgcagtaccattgccgcacctagcgagttcggcacgtgggctcgcctagcccaggtttacgtcgcccaggaggactgggagaatgccctgacgatcctcaactcgtgtcccatgttcacctaccaagacaaagacgcacccatcatgcccgagcccaaagaagtctatctccccaccatgatcgaaacccgtctcgacgaaatcgatagcgagcccgagtctaggttctcagagcaggtagaccccagcttgttgaatctgcgcgccgccagctatcgaggtacctttaaactcgcctaccagattctcaccgagatgacagccaagattggttgggatcagctattgaagattcgcagctcggttttcgtcatggaggatgaatatcgaactgagaggaccgagaccgtcccgcccccgccggcgaagcggaaccccagcatcgacggactgcgcggcacaccagagccatctacgaatggcgatcacgagggtgaaggagaggaaggcgagaagaagaaagacatcgacactgagtctactgcacccactctgaccaatgggaacggtgaagacgcggttgagaagccaacgcatgccattgatcccggtgaagtcaagcaggatggtgatacgacggcgtctaccgacgaacatctctctcgtctaaacaacaagcgcctatgtgagagatggttagacagccttttcatggtgctttacgaagatctgcgtgtctacacaatatggaagacacagatggcccagtaccgcgcccagtcagtacaatacaaaaaatcggccgaggagtgggagattttaggtgcactcgccgaacgccttcagcaccacgaggaagcagtcgaggcgtaccgggcatgtctggccgcccggttcagccccaaggccctatcgggtatcctacgtgtcttcgaaaagcagaagaacacgagagacaccgtcgcagctctcatccgactggtgacgtggcagtataggtggtactcggaattctctcccgaactcctacataccatacgtgtgttgatcgaggaagagggtgccgtcaaggtccggtccatcattcaggcaactagtttaccccagaatgtcctcgatttgacgcaccactatgctgcgctatgtgcgacattccgcagcagtggcacggacggctag

SEQ ID NO: 21672 - protein, 697 aa, Muscodor strobelii
  misc_feature: SGI Peptide ID NO. 567339
  misc_feature (48)..(435): Pfam Id: PF09295 Pfam Desc: ChAPs (Chs5p-Arf1p-binding proteins)
  misc_feature (1)..(697): NCBI GI: 116195392 Blast Desc: conserved [Chaetomium globosum CBS 148.51] gi|88180207|gb|EAQ87675.1| conserved [Chaetomium globosum CBS 148.51]
  misc_feature (1)..(697): NCBI GI: 261352902 Blast Desc: bud site selection protein [Verticillium albo-atrum VaMs.102]
  misc_feature (1)..(697): NCBI GI: 85082478 Blast Desc: NCU04511 [Neurospora crassa OR74A] gi|28918003|gb|EAA27686.1| conserved [Neurospora crassa OR74A]
  misc_feature (1)..(697): NCBI GI: 256723083 Blast Desc: [Nectria haematococca mpVI 77-13-4]
  misc_feature (1)..(697): NCBI GI: 46116378 Blast Desc: FG04031.1 [Gibberella zeae PH-1]
  misc_feature (1)..(697): NCBI GI: 171691396 Blast Desc: protein product [Podospora anserina] gi|170945646|emb|CAP71759.1| protein product [Podospora anserina]
  misc_feature (1)..(697): NCBI GI: 156062002 Blast Desc: SS1G_01115 [Sclerotinia sclerotiorum 1980] gi|154696453|gb|EDN96191.1| SS1G_01115 [Sclerotinia sclerotiorum 1980]
  misc_feature (1)..(697): NCBI GI: 39975495 Blast Desc: MGG_00106 [Magnaporthe grisea 70-15] gi|145019054|gb|EDK03333.1| MGG_00106 [Magnaporthe grisea 70-15]
  misc_feature (1)..(697): NCBI GI: 119491122 Blast Desc: clathrin-coated vesiclec protein (Bud7), [Neosartorya fischeri NRRL 181] gi|119411343|gb|EAW21286.1| clathrin-coated vesiclec protein (Bud7), [Neosartorya fischeri NRRL 181]
  misc_feature (1)..(697): NCBI GI: 121706024 Blast Desc: clathrin-coated vesiclec protein (Bud7), [Aspergillus clavatus NRRL 1] gi|119399421|gb|EAW09849.1| clathrin-coated vesiclec protein (Bud7), [Aspergillus clavatus NRRL 1]
  misc_feature: Useful for introducing or modulating the production of volatile compounds
MPAPEVPEINEEVIHESIDARTETLAALRELGPPDLVHLLKQNLRSSGKQNGVYHHVTGVDASSSASLAAYINTLTYRERGTTPTHKIVEGIFCCYNAFSRLDMRVHVTIPGTVEAFCVDERGEKRKATDDLWLETYLCSVLRAYSYADDGSGDTIRKIMGVRRFNPVTNTETEHRFLSAAEALFFRGWQLGSDSVVQVPNNVSNHLTAGLLKYFHTTGRFASGINLFEKLRTQNVEVSSLLAKVLFMGNEEVQGVRVLYQALKDSPMDYVMLDTQAEFLMKKAQKAETPAQKEERLQMALGCADRSTIAAPSEFGTWARLAQVYVAQEDWENALTILNSCPMFTYQDKDAPIMPEPKEVYLPTMIETRLDEIDSEPESRFSEQVDPSLLNLRAASYRGTFKLAYQILTEMTAKIGWDQLLKIRSSVFVMEDEYRTERTETVPPPPAKRNPSIDGLRGTPEPSTNGDHEGEGEEGEKKKDIDTESTAPTLTNGNGEDAVEKPTHAIDPGEVKQDGDTTASTDEHLSRLNNKRLCERWLDSLFMVLYEDLRVYTIWKTQMAQYRAQSVQYKKSAEEWEILGALAERLQHHEEAVEAYRACLAARFSPKALSGILRVFEKQKNTRDTVAALIRLVTWQYRWYSEFSPELLHTIRVLIEEEGAVKVRSIIQATSLPQNVLDLTHHYAALCATFRSSGTDG

SEQ ID NO: 21673 - DNA, 2751 bp, Muscodor strobelii
  misc_feature: SGI EST ID NO. CUFF.50974.1
  misc_feature: Variant of the nucleotide sequence at SEQ ID NO 21671
gtcagtggtgtatggcaatcaataggtacctaagtctgccacttattgtttcgagggttccctgtgtcgcacctctgtcgtttaattgaagctgtgctcgacccgaaacaccagatttcttgccgcactgcatgaccaaggccgatccaagtatcgccgcccgctcttatctccaaccaccgtctattccaattgtatcttgcttgcattgtgtacgattcttgtttctaccattagccattgcccattctgtctggattgcgttccaatacactgcaccaccacggccagccaggcacccggcacacagagagggaatcctctcgtcgtaatccagcaagatgcctgcgccagaggttcctgaaatcaacgaggaggtcatacacgagtcgattgatgcccgtaccgagaccctcgcggccctgcgcgagctcggcccgcccgacctcgtccacctgctcaagcagaacctgaggagctcgggcaagcagaacggcgtctaccaccatgtcacgggtgtcgacgcctcctcctcggcctccctcgccgcctacatcaacacgctgacctaccgcgagcgcggcacgacgcccacccacaagatcgtcgagggcatcttctgctgctacaacgccttctcccgcctcgacatgcgcgtccacgtcaccatccccggcacggtcgaggccttctgcgtcgacgagcgcggcgagaagcgcaaggccaccgacgacctctggctcgagacctacctgtgctccgtcctgcgcgcctactcctatgccgatgacggtagtggcgacaccatccgcaagatcatgggcgtgcgtcgcttcaaccccgtcaccaacaccgagaccgagcaccgcttcctctccgccgccgaggccctcttcttccgaggctggcaattgggctccgactcggtcgtacaggtccccaataacgtctccaaccacctgaccgccggcctcctcaaatacttccacaccaccggccgcttcgcatccggcatcaacctcttcgagaagctgcgcacacagaacgtcgaagtctcctctctcctcgccaaggtgctgttcatgggcaatgaagaagtgcaaggcgtacgcgttctataccaggccctgaaagactcgcccatggattacgtgatgctcgacacccaggccgagttcctcatgaagaaggcgcagaaggccgagacacctgctcagaaagaggagaggctgcagatggctttgggctgtgccgatcgcagtaccattgccgcacctagcgagttcggcacgtgggctcgcctagcccaggtttacgtcgcccaggaggactgggagaatgccctgacgatcctcaactcgtgtcccatgttcacctaccaagacaaagacgcacccatcatgcccgagcccaaagaagtctatctccccaccatgatcgaaacccgtctcgacgaaatcgatagcgagcccgagtctaggttctcagagcaggtagaccccagcttgttgaatctgcgcgccgccagctatcgaggtacctttaaactcgcctaccagattctcaccgagatgacagccaagattggttgggatcagctattgaagattcgcagctcggttttcgtcatggaggatgaatatcgaactgagaggaccgagaccgtcccgcccccgccggcgaagcggaaccccagcatcgacggactgcgcggcacaccagagccatctacgaatggcgatcacgagggtgaaggagaggaaggcgagaagaagaaagacatcgacactgagtctactgcacccactctgaccaatgggaacggtgaagacgcggttgagaagccaacgcatgccattgatcccggtgaagtcaagcaggatggtgatacgacggcgtctaccgacgaacatctctctcgtctaaacaacaagcgcctatgtgagagatggttagacagccttttcatggtgctttacgaagatctgcgtgtctacacaatatggaagacacagatggcccagtaccgcgcccagtcagtacaatacaaaaaatcggccgaggagtgggagattttaggtgcactcgccgaacgccttcagcaccacgaggaagcagtcgaggcgtaccgggcatgtctggccgcccggttcagccccaaggccctatcgggtatcctacgtgtcttcgaaaagcagaagaacacgagagacaccgtcgcagctctcatccgactggtgacgtggcagtataggtggtactcggaattctctcccgaactcctacataccatacgtgtgttgatcgaggaagagggtgccgtcaaggtccggtccatcattcaggcaactagtttaccccagaatgtcctcgatttgacgcaccactatgctgcgctatgtgcgacattccgcagcagtggcacggacggctaggaggcgtctgctgctctcttgcggaatatgaaagtggcttgtcccagaacggtctatctcccggccgataggacaagcagcagagcgaaagcgaagctgactgagaccggccgtgagaagagggataaggagaatagagaagtcattggcgattagttgttcatgccaaggacctatgctgtagctatagtttaataggaggtcgaggacagtggtgagtagagaatatgatacccatttatctcttctcgtaattgtccgagtaaacatcagaataacgcgagcatatatacttgcctaaattgttacattgtgc

SEQ ID NO: 21674 - DNA, 1074 bp, Muscodor strobelii
  misc_feature: SGI cDNA ID NO. 567340
  misc_feature: Encodes the peptide sequence at SEQ ID NO 21675
atgagcggaagctctcacacggatgtcatgctcgcaggagcagcagcagcattcacagtagacctcctaatctacccgctcgacacgctcaaaacacgccagcaatcccaggatttcctgcaaaccttcacctcacccaacaagcgcacaaagctcccctccgcacagctattcaaaggcctgtaccaagggatcggtatagtagtcgtcgctacgttacccgctgcgggaactttctttaccgtttacgaagctagtaaatctttcctctccaaatacggaaatgatgggaaggatggaaatggtaagaaaggatggttgttgccacagccattggttcactcactggcgagcgcaacggcggaatgcgcgagttgtgtcgttttgacgcctgcggaggtcattaagcagaatgcgcagatgttgcggcgctccgaagggacgaatgggaataaggcgctggcgccgtcggcttcgacgagtctacaggctcttagggagttggggggacgacatgcgccgaggaagttgttgagtgggtatacggcgctggtcgcgaggaatctaccgtttactgcgttgcagttcccggtttttgagtggatcagggggaggatatgggagagaaggaagggagataagggggtaggtgtgagaggggatgggaaggagagaggattgctggagactggtgtcgtgacgggtgttagtgcgggtgctgcgggcagtctggctgcgctggttactacgcctatggatgttgttaagactaggatgatgctttctgcgggagactcgccatcctcttcttcttcccactcctctccccaaaatgacaaagtctcgcaaccgcgatcacaaacacaggcacggcgacgatcaggacggagacacagcgcgataacgataacgaaagacgtcatcaaggagcgtggggtaaagggtttattcagaggcgcggtgttgagaagtgtttggacggctgtgggaagtgggttgtatcttggtatgtatgaggtttcgaggctttggctctcgggtggcaaggaggaggatggagggttcttgaattag

SEQ ID NO: 21675 - protein, 357 aa, Muscodor strobelii
  misc_feature: SGI Peptide ID NO. 567340
  misc_feature (230)..(349): Pfam Id: PF00153 Pfam Desc: Mitochondrial carrier protein
  misc_feature (5)..(94): Pfam Id: PF00153 Pfam Desc: Mitochondrial carrier protein
  misc_feature (110)..(210): Pfam Id: PF00153 Pfam Desc: Mitochondrial carrier protein
  misc_feature (1)..(345): NCBI GI: 85107774 Blast Desc: NCU07927 [Neurospora crassa OR74A] gi|28924049|gb|EAA33207.1| conserved [Neurospora crassa OR74A]
  misc_feature (7)..(351): NCBI GI: 46122469 Blast Desc: FG05612.1 [Gibberella zeae PH-1]
  misc_feature (8)..(345): NCBI GI: 256729838 Blast Desc: [Nectria haematococca mpVI 77-13-4]
  misc_feature (12)..(354): NCBI GI: 156062146 Blast Desc: SS1G_01188 [Sclerotinia sclerotiorum 1980] gi|154696525|gb|EDN96263.1| SS1G_01188 [Sclerotinia sclerotiorum 1980]
  misc_feature (1)..(351): NCBI GI: 189189350 Blast Desc: conserved [Pyrenophora tritici-repentis Pt-1C-BFP] gi|187972620|gb|EDU40119.1| conserved [Pyrenophora tritici-repentis Pt-1C-BFP]
  misc_feature (4)..(351): NCBI GI: 242767756 Blast Desc: mitochondrial carrier protein, [Talaromyces stipitatus ATCC 10500] gi|218724627|gb|EED24044.1| mitochondrial carrier protein, [Talaromyces stipitatus ATCC 10500]
  misc_feature (4)..(354): NCBI GI: 169781786 Blast Desc: [Aspergillus oryzae RIB40] gi|83774098|dbj|BAE64223.1| protein product [Aspergillus oryzae]
  misc_feature (4)..(351): NCBI GI: 145239305 Blast Desc: An08g01800 [Aspergillus niger] gi|134076805|emb|CAK39860.1| protein product [Aspergillus niger]
  misc_feature (12)..(345): NCBI GI: 116196900 Blast Desc: CHGG_05048 [Chaetomium globosum CBS 148.51] gi|88180961|gb|EAQ88429.1| CHGG_05048 [Chaetomium globosum CBS 148.51]
  misc_feature (4)..(355): NCBI GI: 70995201 Blast Desc: mitochondrial carrier protein [Aspergillus fumigatus Af293] gi|66850000|gb|EAL90327.1| mitochondrial carrier protein, [Aspergillus fumigatus Af293] gi|159131121|gb|EDP56234.1| carrier
MSGSSHTDVMLAGAAAAFTVDLLIYPLDTLKTRQQSQDFLQTFTSPNKRTKLPSAQLFKGLYQGIGIVVVATLPAAGTFFTVYEASKSFLSKYGNDGKDGNGKKGWLLPQPLVHSLASATAECASCVVLTPAEVIKQNAQMLRRSEGTNGNKALAPSASTSLQALRELGGRHAPRKLLSGYTALVARNLPFTALQFPVFEWIRGRIWERRKGDKGVGVRGDGKERGLLETGVVTGVSAGAAGSLAALVTTPMDVVKTRMMLSAGDSPSSSSSHSSPQNDKVSQPRSQTQARRRSGRRHSAITITKDVIKERGVKGLFRGAVLRSVWTAVGSGLYLGMYEVSRLWLSGGKEEDGGFLN

SEQ ID NO: 21676 - DNA, 1259 bp, Muscodor strobelii
  misc_feature: SGI EST ID NO. CUFF.50832.0
  misc_feature: Variant of the nucleotide sequence at SEQ ID NO 21674
caaacctcatatcctcacattgggcgatctgggccgggaggggaagtttgaagcacaatgagcggaagctctcacacggatgtcatgctcgcaggagcagcagcagcattcacagtagacctcctaatctacccgctcgacacgctcaaaacacgccagcaatcccaggatttcctgcaaaccttcacctcacccaacaagcgcacaaagctcccctccgcacagctattcaaaggcctgtaccaagggatcggtatagtagtcgtcgctacgttacccgctgcgggaactttctttaccgtttacgaagctagtaaatctttcctctccaaatacggaaatgatgggaaggatggaaatggtaagaaaggatggttgttgccacagccattggttcactcactggcgagcgcaacggcggaatgcgcgagttgtgtcgttttgacgcctgcggaggtcattaagcagaatgcgcagatgttgcggcgctccgaagggacgaatgggaataaggcgctggcgccgtcggcttcgacgagtctacaggctcttagggagttggggggacgacatgcgccgaggaagttgttgagtgggtatacggcgctggtcgcgaggaatctaccgtttactgcgttgcagttcccggtttttgagtggatcagggggaggatatgggagagaaggaagggagataagggggtaggtgtgagaggggatgggaaggagagaggattgctggagactggtgtcgtgacgggtgttagtgcgggtgctgcgggcagtctggctgcgctggttactacgcctatggatgttgttaagactaggatgatgctttctgcgggagactcgccatcctcttcttcttcccactcctctccccaaaatgacaaagtctcgcaaccgcgatcacaaacacaggcacggcgacgatcaggacggagacacagcgcgataacgataacgaaagacgtcatcaaggagcgtggggtaaagggtttattcagaggcgcggtgttgagaagtgtttggacggctgtgggaagtgggttgtatcttggtatgtatgaggtttcgaggctttggctctcgggtggcaaggaggaggatggagggttcttgaattagcgaggcttgttagaatagataagtatgagaataaggatgtcaaatcaagattatgaagctctattgaatggaattataataacttcgccggacgaaagtttctccgcggagccagtctaatcgtcgtc

SEQ ID NO: 21677 - DNA, 1101 bp, Muscodor strobelii
  misc_feature: SGI cDNA ID NO. 567341
  misc_feature: Encodes the peptide sequence at SEQ ID NO 21678
atgaatttgcagctcgtacctctcctcttcattcagatcactagcgtcttatcacgagctatctacccatcatgcatcgaacgacagatcccaatcaccatctcacaaccgcggttcatcatcaacgcaacagtaaatgataactgggacgcagcttccctcaccctaaacctcacccgccgtgactcgggcatggcgacggatcccgtgccaatctccggcatgacgaccgagagtgttcagagtgagtttattgtcagcgcgacggtatgtgggtacggtggcccgacgttagtcttgacacatggtattatcgagtctaagtcgtattggagaccggcatttgaaggtggagagatgtattcttttgttgatgctgcgattgagaagggatattctgtgctcagctacgatcgtattggtgttgggagttcgtctagaataagcgccctaaacgacgcccaatttcccgtagaaatcgctgtattgaactcccttatcgcctacgctcgcaaagaaatgtccgcaacaagcatcggcctagtgggccatagctacggctcttatatctccgcagcgtccgcaagtcagacccccgtcgacgcacttatcctaacaggattcagcggcaacttctcatatttcggccccttcatcgcgggcgccgggctacgcgttgctcgccagcaaagcccagagcgttgggggccgcttgattccgggtatttgacgagttcggatctgtacgctgagacgtatgtttacttcgcggagccgtactttgagcatcgggttgcagagtgggcgtttgaggttggcagtgaaccgtttgctgtgggggagttgcccagtctgttggccactaaggttgagtttgagaatatcacggcgcctgtgttggtattgcaggggcagtttgatgttagtgcttgtggtgggaattgtgttggggtgctggagaagacggctggtcttttctcggggagtaggcatgttgaggctgttgatgatttgcctgctggacataatttgaatttgcataaagttgctccaaaggcgtttgagatgatgttcaagttcttcagggctcagggggtataa

SEQ ID NO: 21678 - protein, 366 aa, Muscodor strobelii
  misc_feature: SGI Peptide ID NO. 567341
  misc_feature (25)..(362): NCBI GI: 212540670 Blast Desc: conserved [Penicillium marneffei ATCC 18224] gi|210067789|gb|EEA21881.1| conserved [Penicillium marneffei ATCC 18224]
  misc_feature (99)..(366): NCBI GI: 121712070 Blast Desc: conserved [Aspergillus clavatus NRRL 1] gi|119401802|gb|EAW12224.1| conserved [Aspergillus clavatus NRRL 1]
  misc_feature (26)..(366): NCBI GI: 255930811 Blast Desc: Pc12g00590 [Penicillium chrysogenum Wisconsin 54-1255] gi|211581581|emb|CAP79686.1| Pc12g00590 [Penicillium chrysogenum Wisconsin 54-1255]
  misc_feature (71)..(366): NCBI GI: 115401136 Blast Desc: [Aspergillus terreus NIH2624] gi|114190097|gb|EAU31797.1| [Aspergillus terreus NIH2624]
  misc_feature (17)..(366): NCBI GI: 256723732 Blast Desc: NECHADRAFT_86700 [Nectria haematococca mpVI 77-13-4]
  misc_feature (24)..(365): NCBI GI: 154302613 Blast Desc: BC1G_09883 [Botryotinia fuckeliana B05.10] gi|150855372|gb|EDN30564.1| BC1G_09883 [Botryotinia fuckeliana B05.10]
  misc_feature (5)..(366): NCBI GI: 67538498 Blast Desc: AN5419.2 [Aspergillus nidulans FGSC A4] gi|40743389|gb|EAA62579.1| AN5419.2 [Aspergillus nidulans FGSC A4] gi|259485135|tpe|CBF81941.1| TPA: conserved [Aspergillus FGSC
  misc_feature (25)..(366): NCBI GI: 154320985 Blast Desc: BC1G_01367 [Botryotinia fuckeliana B05.10] gi|150851905|gb|EDN27097.1| BC1G_01367 [Botryotinia fuckeliana B05.10]
  misc_feature (77)..(366): NCBI GI: 145228501 Blast Desc: An01g01170 [Aspergillus niger] gi|134054648|emb|CAK43493.1| protein product [Aspergillus niger]
  misc_feature (25)..(361): NCBI GI: 256726441 Blast Desc: NECHADRAFT_79651 [Nectria haematococca mpVI 77-13-4]
MNLQLVPLLFIQITSVLSRAIYPSCIERQIPITISQPRFIINATVNDNWDAASLTLNLTRRDSGMATDPVPISGMTTESVQSEFIVSATVCGYGGPTLVLTHGIIESKSYWRPAFEGGEMYSFVDAAIEKGYSVLSYDRIGVGSSSRISALNDAQFPVEIAVLNSLIAYARKEMSATSIGLVGHSYGSYISAASASQTPVDALILTGFSGNFSYFGPFIAGAGLRVARQQSPERWGPLDSGYLTSSDLYAETYVYFAEPYFEHRVAEWAFEVGSEPFAVGELPSLLATKVEFENITAPVLVLQGQFDVSACGGNCVGVLEKTAGLFSGSRHVEAVDDLPAGHNLNLHKVAPKAFEMMFKFFRAQGV

SEQ ID NO: 21679 - DNA, 2823 bp, Muscodor strobelii
  misc_feature: SGI cDNA ID NO. 567342
  misc_feature: Encodes the peptide sequence at SEQ ID NO 21680
atgccagaggcacaggaacaacagccacaggctcaacctcagcctgaagaacctcgaccacatcccaagcccgaggtcgagttagtgtcgtctgagtctgtcccggtgtctgctgctgctgctgcgcctgcgcctgcgcctgagcccgaatctgagtctgtatctgggtctgtatctaagtctagctctggggactatttgggatccgttgcggaaaatctcgcctctgatatcccgaaatcacaaccctcccaacacccgcacttgctgttctcccagtcccagtcccagtcccaatccatatcccattcatccacagaggccccgtcacagctcccgtcacaagcagtgtcttcaggaccagcatcatacagagaggcacagtccggggctcccgcgccgaccgaaacaaataccaatgtctcccacccggaggagcgcacaccattctcttcggaccttcgctcacctgatgcagccagagagccagaaatagctgctacagcacgaccagagccgcagagtgggctagtacaagagaagggaccacaggaccagggacagctccaggacgcccagcaggattccgtattgcattctccaacgatagccacacctgtcgggattgtagaaccaacggcagccacaggcacagcggcggctcctacaacatctatcccccaggcccctacctctccgtcggcactcttgtcgtcagagaccacagtcgttacagatccgagcaagagtcgatcagcttctattcccgcagcgggatctaacgacagcaaccgtgtcccgacaacagcaactccaccgtcacaggcacaggacgggaccatagccgagacgtcaacctcagacgcggagatgtcgaactatccgggggggaatcatcggcaggcgatgcagtactcgcctcaacagggatatgccgcgggcgccatcaacagcacgcactatggctatgctaattcgcctccgcctacccacgatccgtaccgaacgagctcgcatgtggcgacgaataatgcgatggcgctcccaagcatgcggacattcgacgcgacacagcagcaacagcagcagcaccagatggcgacgagcatgccaatgccacaggtctcttcagtgccggtccagcaaacacagtctatgtactaccagcaaccgatgctaaacaatccgtatgcaatccagacagatgccatggctgcgcgatatgccatacctccgaatggaccaggtgcggtattggctggtggaggacggcataagaaggagatcaaacgtcgaactaagacaggctgcctgacatgtcgcagacgccgaatcaagtgcgacgagcaacaccccacctgcaaaaactgccagaagtcgaaacgcgactgtttgggatacgaccccgttttcaagaatcagcagcagcagcaacctcaggcgtcgcagcaagcacacaacagccaatcgcagcagactcagcagcagtcgctgcacgcagcaacgggccattcaggccacaattccgcaacctcaactcccagctctcccgctcctccaccgactactaccaactctgtaccccacaactcggcggcttcctacacgactgccccaccgagagctgctgcttccgcaatcacaaataacaccgcttataacccaggtcccgctcctcacggccacccaggtcccgtcgtaaagaccgaacctcaccatccgtaccagacgcttaattcaacgctggacatcacttcgagtatgtcgacctcccacttcccaccgaccaaagcggtcatgccccagatcgttgattacggagcccgagagtcaccacaccttaggggcggtgggtcctccctcggctctgctcacccatctccctcgaatccgttgcaatcccactttcaggatcgaacctcggcttactctggtacgacagcgcgcaagatgaaggtccctgaactagtcgccataggaggcgccacccttcctgttctcgacgctcccctcagccaggataaggctgctgaggtgttgagcctgtaccagcaggtctacgctccgggactagaacaattcttcgagaccgcctggtttgtcagcccagacgggccccgcgccgtggcatccaatatccgcgtccaggagattatggctgccttcctccaggctgtcaacagcacggcacaggatccggctggcatgtcgtatgcagcgaatttagagttctgcgtggtttgggaactggcggcactggtgtacacaccagaggacagagcagacacaccagttggtctgcccgctgttagcgacagttttgaagcgcgcaatcgagtcttcgtctttgagacgctcttggcaggggaattcatcgaccggaaccccttccgagaacctataggcattgaccacacaggagacaacaacacgcataaattctggtataaccttgccgaattcttgcgtatcaaggagaagcccagaatagacgagcagcccagcatagatctcacaccccagagggacacgatcctgactcggctccgggatctgctaggtggacgagagaatagggacgtgctttattcattggccgttatgcgcacatttacgcacaagttcccgccggactttgaacaatacctaccccaacgccttgatgaaattgatccgaagagcaggcttgcggtggcaagatcgttcatccagaaagagaccgaggttgggcagggaggcggcacaactaatgtggttcgacgattcgcggagcttgctgtgagggctttcatcacccctggcagcaatattgaccgacggtga

SEQ ID NO: 21680 - protein, 940 aa, Muscodor strobelii
  misc_feature: SGI Peptide ID NO. 567342
  misc_feature (435)..(474): Pfam Id: PF00172 Pfam Desc: Fungal Zn(2)-Cys(6) binuclear cluster domain
  misc_feature (211)..(940): NCBI GI: 46105525 Blast Desc: FG00378.1 [Gibberella zeae PH-1]
  misc_feature (643)..(940): NCBI GI: 39940174 Blast Desc: MGG_05153 [Magnaporthe grisea 70-15] gi|145010588|gb|EDJ95244.1| MGG_05153 [Magnaporthe grisea 70-15]
  misc_feature (407)..(930): NCBI GI: 121708147 Blast Desc: C6 finger domain protein, [Aspergillus clavatus NRRL 1] gi|119400191|gb|EAW10617.1| C6 finger domain protein, [Aspergillus clavatus NRRL 1]
  misc_feature (407)..(930): NCBI GI: 159125431 Blast Desc: C6 finger domain protein, [Aspergillus fumigatus A1163]
  misc_feature (407)..(930): NCBI GI: 70993596 Blast Desc: C6 finger domain protein [Aspergillus fumigatus Af293] gi|66849279|gb|EAL89607.1| C6 finger domain protein, [Aspergillus fumigatus Af293]
  misc_feature (407)..(930): NCBI GI: 119500180 Blast Desc: C6 finger domain protein, [Neosartorya fischeri NRRL 181] gi|119415012|gb|EAW24950.1| C6 finger domain protein, [Neosartorya fischeri NRRL 181]
  misc_feature (641)..(939): NCBI GI: 171677004 Blast Desc: protein product [Podospora anserina] gi|170936569|emb|CAP61229.1| protein product [Podospora anserina]
  misc_feature (678)..(934): NCBI GI: 154318317 Blast Desc: BC1G_03326 [Botryotinia fuckeliana B05.10] gi|150842849|gb|EDN18042.1| BC1G_03326 [Botryotinia fuckeliana B05.10]
  misc_feature (604)..(937): NCBI GI: 164423715 Blast Desc: NCU10459 [Neurospora crassa OR74A] gi|157070207|gb|EDO64985.1| [Neurospora crassa OR74A]
  misc_feature (653)..(934): NCBI GI: 156053109 Blast Desc: SS1G_06722 [Sclerotinia sclerotiorum 1980] gi|154704500|gb|EDO04239.1| SS1G_06722 [Sclerotinia sclerotiorum 1980]
MPEAQEQQPQAQPQPEEPRPHPKPEVELVSSESVPVSAAAAAPAPAPEPESESVSGSVSKSSSGDYLGSVAENLASDIPKSQPSQHPHLLFSQSQSQSQSISHSSTEAPSQLPSQAVSSGPASYREAQSGAPAPTETNTNVSHPEERTPFSSDLRSPDAAREPEIAATARPEPQSGLVQEKGPQDQGQLQDAQQDSVLHSPTIATPVGIVEPTAATGTAAAPTTSIPQAPTSPSALLSSETTVVTDPSKSRSASIPAAGSNDSNRVPTTATPPSQAQDGTIAETSTSDAEMSNYPGGNHRQAMQYSPQQGYAAGAINSTHYGYANSPPPTHDPYRTSSHVATNNAMALPSMRTFDATQQQQQQHQMATSMPMPQVSSVPVQQTQSMYYQQPMLNNPYAIQTDAMAARYAIPPNGPGAVLAGGGRHKKEIKRRTKTGCLTCRRRRIKCDEQHPTCKNCQKSKRDCLGYDPVFKNQQQQQPQASQQAHNSQSQQTQQQSLHAATGHSGHNSATSTPSSPAPPPTTTNSVPHNSAASYTTAPPRAAASAITNNTAYNPGPAPHGHPGPVVKTEPHHPYQTLNSTLDITSSMSTSHFPPTKAVMPQIVDYGARESPHLRGGGSSLGSAHPSPSNPLQSHFQDRTSAYSGTTARKMKVPELVAIGGATLPVLDAPLSQDKAAEVLSLYQQVYAPGLEQFFETAWFVSPDGPRAVASNIRVQEIMAAFLQAVNSTAQDPAGMSYAANLEFCVVWELAALVYTPEDRADTPVGLPAVSDSFEARNRVFVFETLLAGEFIDRNPFREPIGIDHTGDNNTHKFWYNLAEFLRIKEKPRIDEQPSIDLTPQRDTILTRLRDLLGGRENRDVLYSLAVMRTFTHKFPPDFEQYLPQRLDEIDPKSRLAVARSFIQKETEVGQGGGTTNVVRRFAELAVRAFITPGSNIDRR

SEQ ID NO: 21681 - DNA, 5013 bp, Muscodor strobelii
  misc_feature: SGI EST ID NO. CUFF.51290.1
  misc_feature: Variant of the nucleotide sequence at SEQ ID NO 21679
cgggaagcgaggcgagaagggaagagaaaatgggccgaaggggtaggtcaataccgatagagcatcctgacatgacagcgatgacagtaataacttgctcacggcaagacttacatagaaaagtgacaaggacacaatctctggtgtggtgaaatcgacagcgaggacgacagcagatccacctcagactctattttatgcatgcaacatgggacgaatattgaagaggttcgtcaatggtttgacctggtgtcaccacgttgggctacacaaccggaccgcaaaagcagcctcagctccaaattggctaggacatgaacgaccagccaaggcagcctggatattacaggttgtcacctatcctcgcgatccaactctaacagcaatgtggctgttattattcgatgagagaacgattgctaccttatgaccggcgggctgtagcgggcccaataccgttattgcaacgaccacagtcccgagcctatctatatttacactcagtcaaatacgctaatccggatctagcagtaagcgttaagcatgttggccgataaagtggagaacaggatgagaattggagggggtttttttacaacctggagggaattggagactttgactggccagaagtcgacaagtgagctggagagagaagccgccaaaacatgcatcgaaaaaatagagagggacggaaaaaaaaaagttggaagacgcaccgaagctaccaggaatctcggcccagggtcgcgtctcaacacatcgacggcctcattatcgcaccaccaccgacagacagacagacagcctttctctcgcatctgtatgcaagtgtgtgttcgctggtcgctggctgccaccgggcgcgtgtttacccccttgggattcaatcccctgcgatttctcccacgcagtcctgatcccccatcgctgattcactgacgccttctcactgacaccacccttcccccccatccaccgtccactcgcagatagaagatacatccatagatacatcctcctcgcgcacacccacacctacacgtgtgagtagctacacagtatcccgagtatacttcccttccctcttgagtccctcgcgcccacaccctgtcgtgccttgcccgtcttgccctgccctgtcgtagaggaggacgctgtcgttgtcgtcgaacttgggccaccggtctaggctccgttcctcgcgcccgggggtgtcgtgggcctgtccggttccagtccctggtctgctgcggctttggttccctttacgcaggagtcgcagcagcgacggcaccaccaccattctagacagtacctcgtcacgtacccaagcagacgagcggcggagattctgcatgcccctgtccagatcgtgcccccgtaacagtgcaggcagaacctgtatgtacgctggctgctaatctaaatgcaaatcaaaatgccagaggcacaggaacaacagccacaggctcaacctcagcctgaagaacctcgaccacatcccaagcccgaggtcgagttagtgtcgtctgagtctgtcccggtgtctgctgctgctgctgcgcctgcgcctgcgcctgagcccgaatctgagtctgtatctgggtctgtatctaagtctagctctggggactatttgggatccgttgcggaaaatctcgcctctgatatcccgaaatcacaaccctcccaacacccgcacttgctgttctcccagtcccagtcccagtcccaatccatatcccattcatccacagaggccccgtcacagctcccgtcacaagcagtgtcttcaggaccagcatcatacagagaggcacagtccggggctcccgcgccgaccgaaacaaataccaatgtctcccacccggaggagcgcacaccattctcttcggaccttcgctcacctgatgcagccagagagccagaaatagctgctacagcacgaccagagccgcagagtgggctagtacaagagaagggaccacaggaccagggacagctccaggacgcccagcaggattccgtattgcattctccaacgatagccacacctgtcgggattgtagaaccaacggcagccacaggcacagcggcggctcctacaacatctatcccccaggcccctacctctccgtcggcactcttgtcgtcagagaccacagtcgttacagatccgagcaagagtcgatcagcttctattcccgcagcgggatctaacgacagcaaccgtgtcccgacaacagcaactccaccgtcacaggcacaggacgggaccatagccgagacgtcaacctcagacgcggagatgtcgaactatccgggggggaatcatcggcaggcgatgcagtactcgcctcaacagggatatgccgcgggcgccatcaacagcacgcactatggctatgctaattcgcctccgcctacccacgatccgtaccgaacgagctcgcatgtggcgacgaataatgcgatggcgctcccaagcatgcggacattcgacgcgacacagcagcaacagcagcagcaccagatggcgacgagcatgccaatgccacaggtctcttcagtgccggtccagcaaacacagtctatgtactaccagcaaccgatgctaaacaatccgtatgcaatccagacagatgccatggctgcgcgatatgccatacctccgaatggaccaggtgcggtattggctggtggaggacggcataagaaggagatcaaacgtcgaactaagacaggctgcctgacatgtcgcagacgccgaatcaagtgcgacgagcaacaccccacctgcaaaaactgccagaagtcgaaacgcgactgtttgggatacgaccccgttttcaagaatcagcagcagcagcaacctcaggcgtcgcagcaagcacacaacagccaatcgcagcagactcagcagcagtcgctgcacgcagcaacgggccattcaggccacaattccgcaacctcaactcccagctctcccgctcctccaccgactactaccaactctgtaccccacaactcggcggcttcctacacgactgccccaccgagagctgctgcttccgcaatcacaaataacaccgcttataacccaggtcccgctcctcacggccacccaggtcccgtcgtaaagaccgaacctcaccatccgtaccagacgcttaattcaacgctggacatcacttcgagtatgtcgacctcccacttcccaccgaccaaagcggtcatgccccagatcgttgattacggagcccgagagtcaccacaccttaggggcggtgggtcctccctcggctctgctcacccatctccctcgaatccgttgcaatcccactttcaggatcgaacctcggcttactctggtacgacagcgcgcaagatgaaggtccctgaactagtcgccataggaggcgccacccttcctgttctcgacgctcccctcagccaggataaggctgctgaggtgttgagcctgtaccagcaggtctacgctccgggactagaacaattcttcgagaccgcctggtttgtcagcccagacgggccccgcgccgtggcatccaatatccgcgtccaggagattatggctgccttcctccaggctgtcaacagcacggcacaggatccggctggcatgtcgtatgcagcgaatttagagttctgcgtggtttgggaactggcggcactggtgtacacaccagaggacagagcagacacaccagttggtctgcccgctgttagcgacagttttgaagcgcgcaatcgagtcttcgtctttgagacgctcttggcaggggaattcatcgaccggaaccccttccgagaacctataggcattgaccacacaggagacaacaacacgcataaattctggtataaccttgccgaattcttgcgtatcaaggagaagcccagaatagacgagcagcccagcatagatctcacaccccagagggacacgatcctgactcggctccgggatctgctaggtggacgagagaatagggacgtgctttattcattggccgttatgcgcacatttacgcacaagttcccgccggactttgaacaatacctaccccaacgccttgatgaaattgatccgaagagcaggcttgcggtggcaagatcgttcatccagaaagagaccgaggttgggcagggaggcggcacaactaatgtggttcgacgattcgcggagcttgctgtgagggctttcatcacccctggcagcaatattgaccgacggtgaagaggaggggcaattacgtgtgatgagaggcgaggtgattcacactaccggtgcgccctattagtacacgagggcgcactaagtttttctacggcccatcaatcagcgacgaatagaattcgcgacatacgatacccaagaggaaacccgattcaacattgcacatatggcacacgggagatcaatagagcaagtctggaaagagactcggacaggaaaagaacgataaaaaggaatgggtaataaaagagagggatcttcttttgctagttgcattttctgcgtcggcgtttcgggtagggtgatgcaattgatgtataaaacccttggaaagggacggactaaaagtggcacgggagagcgacgggaaagcattgtgtttgactgattaatacgccttgataagaggctacgacacttgtacgagtacgaaattcgtcgggatgtggtaaggattgtctttggtgatgagacgaggaagattgtgaggggtgacatgaggcggattacatgagttggtaggtgacgatactgtcactattaatatcagatgcatcgcgcccctttcatgagtttgataaacaattcctgcttatcgtaatatttgcctcggatgacgtgaagtgatatgtgctgcatcgcctggtgaccataggtaattttctggttgatgttgcgtgtcaatttcctaggcttgattgacagacaatagtccatgagaacgcatgcatccccagcgaaacatgaaa

SEQ ID NO: 21682 - DNA, 651 bp, Muscodor strobelii
  misc_feature: SGI cDNA ID NO. 567343
  misc_feature: Encodes the peptide sequence at SEQ ID NO 21683
atgagtcaagaacagctccaaagcattacgatgggcatgttagccgacatgccggaagaaatcgtcgattcggtatttgacgacgtggacaatttttcggaaacatttgatccggccaaagctgtccaggtgggagacaaacttccagagtttcgcgtgattgatgcgaccggccgcgaggttaccagcgctgagctactcgcccacgggtcgcttctcatcaccttctatcggggtgaatggtgcccctactgtaatgccgccatcggcttcctccacacacatgctaaggatcttgagaagcgtctcgtcacccccattgccataacgccagagttgccggagcacacctcggccatgtcagagaaacatggccttacatttccgatctttaccgatccacgcaacgcgttggcaaaacagcttggcattgtctacgactattcagtcatgcgtgacgtacacctaaaatccggggtcgatctggctgtgcgcaataagcaagacagttgggaagtgccgattccagcctcactactggtcgatagggatgggatagtgaggaacctttcgattgatcctgactatcgaaacagattagatcctcagatagcgttgaaatgggctgatgaactgtctgctggcaattaa

SEQ ID NO: 21683 - protein, 216 aa, Muscodor strobelii
  misc_feature: SGI Peptide ID NO. 567343
  misc_feature (43)..(209): Pfam Id: PF08534 Pfam Desc: Redoxin
  misc_feature (44)..(190): Pfam Id: PF00578 Pfam Desc: AhpC/TSA family
  misc_feature (43)..(147): Pfam Id: PF08534 Pfam Desc: Redoxin
  misc_feature (4)..(212): NCBI GI: 256733700 Blast Desc: NECHADRAFT_78070 [Nectria haematococca mpVI 77-13-4]
  misc_feature (3)..(212): NCBI GI: 242797260 Blast Desc: bacterioferritin comigratory protein, [Talaromyces stipitatus ATCC 10500] gi|218719562|gb|EED18982.1| bacterioferritin comigratory protein, [Talaromyces stipitatus
  misc_feature (5)..(208): NCBI GI: 158337295 Blast Desc: redoxin domain-containing protein [Acaryochloris marina MBIC11017] gi|158307536|gb|ABW29153.1| redoxin domain protein, AhpC/TSA family [Acaryochloris marina MBIC11017]
  misc_feature (14)..(214): NCBI GI: 154317258 Blast Desc: BC1G_03531 [Botryotinia fuckeliana B05.10] gi|150844948|gb|EDN20141.1| BC1G_03531 [Botryotinia fuckeliana B05.10]
  misc_feature (39)..(202): NCBI GI: 163798058 Blast Desc: Redoxin [alpha proteobacterium BAL199] gi|159176654|gb|EDP61228.1| Redoxin [alpha proteobacterium BAL199]
  misc_feature (3)..(203): NCBI GI: 242279668 Blast Desc: alkyl hydroperoxide reductase/ Thiol specific antioxidant/ Mal allergen [Desulfovibrio salexigens DSM 2638] gi|242122562|gb|ACS80258.1| alkyl hydroperoxide reductase/ Thiol
  misc_feature (3)..(202): NCBI GI: 224370550 Blast Desc: peroxiredoxin family protein [Desulfobacterium autotrophicum HRM2] gi|223693267|gb|ACN16550.1| peroxiredoxin family protein [Desulfobacterium autotrophicum HRM2]
  misc_feature (4)..(204): NCBI GI: 241892207 Blast Desc: alkyl hydroperoxide reductase/ thiol specific antioxidant/ Mal allergen [Sphingobacterium spiritivorum ATCC 33861] gi|241868085|gb|EER71836.1| alkyl hydroperoxide reductase/
  misc_feature (17)..(202): NCBI GI: 254424561 Blast Desc: Redoxin superfamily [Synechococcus sp. PCC 7335] gi|196192050|gb|EDX87014.1| Redoxin superfamily [Synechococcus sp. PCC 7335]
  misc_feature (4)..(204): NCBI GI: 227540159 Blast Desc: alkyl hydroperoxide reductase/ thiol specific antioxidant/ Mal allergen [Sphingobacterium spiritivorum ATCC 33300] gi|227240020|gb|EEI90035.1| alkyl hydroperoxide reductase/
MSQEQLQSITMGMLADMPEEIVDSVFDDVDNFSETFDPAKAVQVGDKLPEFRVIDATGREVTSAELLAHGSLLITFYRGEWCPYCNAAIGFLHTHAKDLEKRLVTPIAITPELPEHTSAMSEKHGLTFPIFTDPRNALAKQLGIVYDYSVMRDVHLKSGVDLAVRNKQDSWEVPIPASLLVDRDGIVRNLSIDPDYRNRLDPQIALKWADELSAGN

SEQ ID NO: 21684 - DNA, 1240 bp, Muscodor strobelii
  misc_feature: SGI EST ID NO. CUFF.50874.0
  misc_feature: Variant of the nucleotide sequence at SEQ ID NO 21682
ttttatacgggacatacgccaagtgccgaccgaaggatcagctcccaccccctcattgcgtcagccgcatcagccctagctaccacctgtccttgcggtacgctaatatcacggcttcgcgattcgtacaacccttgtgatataatctagttagaagcgcgcgtccggccaccgttgagacttgtttgctaatttctggtacggcgattattggccttgcaatcttatcagaacacacaccccaacgacacgcagatcaagcttgacagaggtccaacgcctaagatcttcaaaatgagtcaagaacagctccaaagcattacgatgggcatgttagccgacatgccggaagaaatcgtcgattcggtatttgacgacgtggacaatttttcggaaacatttgatccggccaaagctgtccaggtgggagacaaacttccagagtttcgcgtgattgatgcgaccggccgcgaggttaccagcgctgagctactcgcccacgggtcgcttctcatcaccttctatcggggtgaatggtgcccctactgtaatgccgccatcggcttcctccacacacatgctaaggatcttgagaagcgtctcgtcacccccattgccataacgccagagttgccggagcacacctcggccatgtcagagaaacatggccttacatttccgatctttaccgatccacgcaacgcgttggcaaaacagcttggcattgtctacgactattcagtcatgcgtgacgtacacctaaaatccggggtcgatctggctgtgcgcaataagcaagacagttgggaagtgccgattccagcctcactactggtcgatagggatgggatagtgaggaacctttcgattgatcctgactatcgaaacagattagatcctcagatagcgttgaaatgggctgatgaactgtctgctggcaattaatttcacttgcctcgttgtgaaggagctatatgcgtcggccgttcttgggtcatccggtgcttttggacagggcagcacgaggctatctctttgcgtggctgtaactagcgagaaaggtaaaatgcgcgaggcaaaatcatcaagactctgtacacgaatatggtgtaaatttcaaataccttatacaaatgcaaaggctcctaataggtcggagtataatcgcggtgcctgaacaaatacagttcaagacgtagcacagtgatttcagaatgagcagcattatagtgagccgccg

SEQ ID NO: 21685 - DNA, 2481 bp, Muscodor strobelii
  misc_feature: SGI cDNA ID NO. 567344
  misc_feature: Encodes the peptide sequence at SEQ ID NO 21686
atgggtctcaagagatgggacgactttcgcgagcagcatccagagctgtgcgaaacatgggcctcgcgatgggaactcatccggccttatctaccacccgtcaacttcatcacactgcattatgcctacttcattgtcactgccataatcggggcactcatcttctggggctcctcggcccctcactatagcatcggctggtgggacagccttttcatggtcatgtccgcgctaactgcctcgggtctcaatacagtcaatgtcagccagctcaccaccttccagcaggttcagctgttgatattcatgatcgtgggcagccaggtcactgtttcatggataacaatagcgtatcgcaaacacatttttgagaagcgatttgaggacatagtggagatggagcgtgcaaagaggaaagctaacacttcaaaaactggcgctgttgtcggcatagcgggcgccatggtcgggatgcaggttatgtcgtcgtttggcaaaccgcagggccgaaaacaagggcaaaacagtagaccgtggtcttcgaagcgtaacgaggaacccgttgtccaagccgcaaccactcctgaggtaccgacgactctggaacccgagacacaggatagatctccaacgagaatattggaaggaggcgagcgagatgtgcctcaacagcagcacatcggattccttgaacccattcgcgaagacaggccccagtccgcgaccactggctattccatttatcagtcacactctaatcagactgccaataccgcgcgacggaggtcacagacggtagagtcgagaatatctgacactggcttcaatgtccagacattccttaaggagcagaagggcaacatcggacgtaacgggcagttcttcaacctgtcagaggaccagcgcgagtacctcggtggtgtagagtatcgatctctgaaattcctgtcgacatttgtcattgcttatttcgttctatggcagctcttcggcgccattgctcttggtgcctggatgtcagtctatgccgtcgacgagtcggctgtcaatgcccagaatccatggtgggcaggtatcttcctcgcaatctcagcctacaataatgccggcttcacgctcctcgatgcgggtttcatacccttccaggattcttactttgtactagttatcgtcactattctctcgcttgccggtcctgccgcgtttcccgcttttatgcgcttgttgatctggactatgtcgaaagcgtttcaattctttgcgcaagatacggaggactacccaatctggaaagaaggctttgatttcatcctcaaattcccacgtcgtgtatatactagcatgttcccctcgcgagacacctggctatttgtcgccacatttggagggtttgtactggccgattgggcgctaattctcgtgctcaccattggcaatccgaccatggaggctctcccagtaggacggcgtgtatttgatgctttgttcgaaggattctcaattccttctggaggctacgccatcgtcgccccttcagccatgtatttcgatgttcacgttctctggctcatcatggcaataagtgatctgacctgtcaactattagaatctagccctttcttctacacggccgcgtacccgcatatcatcaccatgcgtaagacaaacgtttacgaagagcgttctctgggcatctatgagggagatcagaccgagatcgagcaactccattcagaaacaagtagcctgtttgatgtcgacgccgatgccgggcgcgaggcagacgctaccttcccatacaatgacggcggaaaccccaaggggaaaaactgggactcagtctcacagacgccgtcggcaatatccggcaagcgcctctactccgcgggccgtcgtggtacggcctttgttggccgacagttgcagcgacgcatgactgcatttcaaggcgtcggcgtcgcacaagcagcggcactggacaggactggcggccctggcgccgattcaactataaagcctctccgtcgcgccgctaccatagactttgcgcggcctccatcaatgcactccctacggaaccacacgccggccgggccgccgagcctagtatcgcagcaagtgcgcgggcagctcagtcacgatgtgtggtggattgccctggctttattcctcatcacgctcatcgaaacgcgacactccctcggagatcccgtgacattcagcgtgttcagcatcctcttcgagatcgtctcgggctacacgactatcggcatcagtattggcctgccggaccaagcttacagccttacagggggcatgtacacgggtagtaaaatcatcatgatcctcgtcatgttgagaggacggcataggggcttgccagttgcgctggatcgcgctgtcagactgcccgcaaagcagttagctgagcttgaggatgaagatgctgagattaggagcatgtctgccctctcaccctaa

SEQ ID NO: 21686 - protein, 826 aa, Muscodor strobelii
  misc_feature: SGI Peptide ID NO. 567344
  misc_feature (304)..(804): Pfam Id: PF02386 Pfam Desc: Cation transport protein
  misc_feature (304)..(509): Pfam Id: PF02386 Pfam Desc: Cation transport protein
  misc_feature (707)..(804): Pfam Id: PF02386 Pfam Desc: Cation transport protein
  misc_feature (4)..(821): NCBI GI: 169621416 Blast Desc: SNOG_13917 [Phaeosphaeria nodorum SN15] gi|160704247|gb|EAT78542.2| SNOG_13917 [Phaeosphaeria nodorum SN15]
  misc_feature (4)..(826): NCBI GI: 116208778 Blast Desc: CHGG_03682 [Chaetomium globosum CBS 148.51] gi|88184279|gb|EAQ91747.1| CHGG_03682 [Chaetomium globosum CBS 148.51]
  misc_feature (75)..(819): NCBI GI: 39944654 Blast Desc: MGG_04338 [Magnaporthe grisea 70-15] gi|145015077|gb|EDJ99645.1| MGG_04338 [Magnaporthe grisea 70-15]
  misc_feature (5)..(819): NCBI GI: 256730632 Blast Desc: NECHADRAFT_74352 [Nectria haematococca mpVI 77-13-4]
  misc_feature (4)..(819): NCBI GI: 171680877 Blast Desc: protein product [Podospora anserina] gi|27764333|emb|CAD60613.1| protein product [Podospora anserina] gi|170940066|emb|CAP65293.1| protein product [Podospora anserina]
  misc_feature (6)..(824): NCBI GI: 46109050 Blast Desc: FG01407.1 [Gibberella zeae PH-1]
  misc_feature (22)..(819): NCBI GI: 116200588 Blast Desc: CHGG_10839 [Chaetomium globosum CBS 148.51] gi|88175553|gb|EAQ83021.1| CHGG_10839 [Chaetomium globosum CBS 148.51]
  misc_feature (27)..(645): NCBI GI: 256721024 Blast Desc: NECHADRAFT_94790 [Nectria haematococca mpVI 77-13-4]
  misc_feature (28)..(577): NCBI GI: 212544732 Blast Desc: conserved [Penicillium marneffei ATCC 18224] gi|210065489|gb|EEA19583.1| conserved [Penicillium marneffei ATCC 18224]
  misc_feature (27)..(507): NCBI GI: 85092714 Blast Desc: NCU02456 [Neurospora crassa OR74A] gi|28920946|gb|EAA30275.1| conserved [Neurospora crassa OR74A]
MGLKRWDDFREQHPELCETWASRWELIRPYLPPVNFITLHYAYFIVTAIIGALIFWGSSAPHYSIGWWDSLFMVMSALTASGLNTVNVSQLTTFQQVQLLIFMIVGSQVTVSWITIAYRKHIFEKRFEDIVEMERAKRKANTSKTGAVVGIAGAMVGMQVMSSFGKPQGRKQGQNSRPWSSKRNEEPVVQAATTPEVPTTLEPETQDRSPTRILEGGERDVPQQQHIGFLEPIREDRPQSATTGYSIYQSHSNQTANTARRRSQTVESRISDTGFNVQTFLKEQKGNIGRNGQFFNLSEDQREYLGGVEYRSLKFLSTFVIAYFVLWQLFGAIALGAWMSVYAVDESAVNAQNPWWAGIFLAISAYNNAGFTLLDAGFIPFQDSYFVLVIVTILSLAGPAAFPAFMRLLIWTMSKAFQFFAQDTEDYPIWKEGFDFILKFPRRVYTSMFPSRDTWLFVATFGGFVLADWALILVLTIGNPTMEALPVGRRVFDALFEGFSIPSGGYAIVAPSAMYFDVHVLWLIMAISDLTCQLLESSPFFYTAAYPHIITMRKTNVYEERSLGIYEGDQTEIEQLHSETSSLFDVDADAGREADATFPYNDGGNPKGKNWDSVSQTPSAISGKRLYSAGRRGTAFVGRQLQRRMTAFQGVGVAQAAALDRTGGPGADSTIKPLRRAATIDFARPPSMHSLRNHTPAGPPSLVSQQVRGQLSHDVWWIALALFLITLIETRHSLGDPVTFSVFSILFEIVSGYTTIGISIGLPDQAYSLTGGMYTGSKIIMILVMLRGRHRGLPVALDRAVRLPAKQLAELEDEDAEIRSMSALSP

SEQ ID NO: 21687 - DNA, 1932 bp, Muscodor strobelii
  misc_feature: SGI EST ID NO. CUFF.50880.0
  misc_feature: Variant of the nucleotide sequence at SEQ ID NO 21685
taggattctacgcgataggacacgctgcaccccgtgcaccatatgctcgacattcgtcgtcaatttcacttttggccgttgaatccatctcaattcattacctagctgcatctcactcgttgataagtgagtaagtcgccgccggacgcgcgcccaccctgattcagacatttcagccgtgccaaagcgaggcgcacatccctgtcctggctgctgaaccatcaattgagccagcttagctcccatcgcgacgggtcgatccgtcccatccataagttaggtaggcttgacggccgtggcggtcaagtacatgcccgacgtgcttcgcacccacaaccacgggaatgggtctcaagagatgggacgactttcgcgagcagcatccagagctgtgcgaaacatgggcctcgcgatgggaactcatccggccttatctaccacccgtcaacttcatcacactgcattatgcctacttcattgtcactgccataatcggggcactcatcttctggggctcctcggcccctcactatagcatcggctggtgggacagccttttcatggtcatgtccgcgctaactgcctcgggtctcaatacagtcaatgtcagccagctcaccaccttccagcaggttcagctgttgatattcatgatcgtgggcagccaggtcactgtttcatggataacaatagcgtatcgcaaacacatttttgagaagcgatttgaggacatagtggagatggagcgtgcaaagaggaaagctaacacttcaaaaactggcgctgttgtcggcatagcgggcgccatggtcgggatgcaggttatgtcgtcgtttggcaaaccgcagggccgaaaacaagggcaaaacagtagaccgtggtcttcgaagcgtaacgaggaacccgttgtccaagccgcaaccactcctgaggtaccgacgactctggaacccgagacacaggatagatctccaacgagaatattggaaggaggcgagcgagatgtgcctcaacagcagcacatcggattccttgaacccattcgcgaagacaggccccagtccgcgaccactggctattccatttatcagtcacactctaatcagactgccaataccgcgcgacggaggtcacagacggtagagtcgagaatatctgacactggcttcaatgtccagacattccttaaggagcagaagggcaacatcggacgtaacgggcagttcttcaacctgtcagaggaccagcgcgagtacctcggtggtgtagagtatcgatctctgaaattcctgtcgacatttgtcattgcttatttcgttctatggcagctcttcggcgccattgctcttggtgcctggatgtcagtctatgccgtcgacgagtcggctgtcaatgcccagaatccatggtgggcaggtatcttcctcgcaatctcagcctacaataatgccggcttcacgctcctcgatgcgggtttcatacccttccaggattcttactttgtactagttatcgtcactattctctcgcttgccggtcctgccgcgtttcccgcttttatgcgcttgttgatctggactatgtcgaaagcgtttcaattctttgcgcaagatacggaggactacccaatctggaaagaaggctttgatttcatcctcaaattcccacgtcgtgtatatactagcatgttcccctcgcgagacacctggctatttgtcgccacatttggagggtttgtactggccgattgggcgctaattctcgtgctcaccattggcaatccgaccatggaggctctcccagtaggacggcgtgtatttgatgctttgttcgaaggattctcaattccttctggaggctacgccatcgtcgccccttcagccatgtatttcgatgttcacgttctctggctcatcatggcaagtatagaaa

SEQ ID NO: 21688 - DNA, 1926 bp, Muscodor strobelii
  misc_feature: SGI cDNA ID NO. 567345
  misc_feature: Encodes the peptide sequence at SEQ ID NO 21689
atgtggtcgtttcccgcgtatcccgaggtgcccgcgtccgaagtcgagggcaaaacatacgactacatagtcgtaggaggcggaacagcaggatgcgttcttgcctcacgtctatcggaaaatccttccgtcacagtccttgttcttgaaaagggacatgtaaaagacaatctcctatcaggaataccattaataagtcagaatttctggcttggtaacccgctacaggttcaaagcttgagatataccgagccgatcccgaatgcaaacgggagaaagaatcgtatgtggactgtcgagggaattggaggagcttctcgtatcaatgccatgttagttacccgcggcattccggctgggtataatgaatgggtagaaaagtatggtcttagtgactggggatgggaacaggttgagccttactttcgaaaaagcgagaatgctcttgctcatgctggcaagacttatagaggccatgatggtcctatacagataacacagcctttaccgcctttcaagtggcgcgagtacaccaaaaaagccgcacgaaaccttggccttccggtcagagaagactgtaatgatccgagtggcccaactaggggtcttttccgcctggatatggccatcaatcaacgagctgtgagatcttccacataccatgcattcctacccaaagatatcgctattcagcgaaagcatcggctcacaatttgcaccggcgtcgtcgcatctcgcctcgacatcgaaaaggaagcggggcttgtgcggggagtctatttccgtcctgtcaagaagcgacagaacagtctggcaattactgatatgtacgtcagagccgggcgagaagtcataatatgctccggagcactctgttctcccgcccttctcatgctcagcgggatcggacctcgagaacagcttgcagcacagggtatcttagtcctgctcgatttgctagttggaaaagccctacaagatcatttcagtttcgcgatcatgatggaattgcccaagtccgagaccctgacactcctcgaatctatctggggaatatggcacatcctcctctggttctttctcggcaaaggcttatttgccgttagttcaacaccgcaatctatcttcatccagacatctgccgtcgacgaaaacagcatggccatcatagcagaagctaataatctgaatgctatggacgccaagaatataccagatgtcgagatcatgatccagcccgtcaacagcattgagcgagccgtcccagggcgttcactcctgagcttctacacaacgctcacgcaaccgttctcacatgggagcgtcgatctagctagcaaggatccattagctcacatgcgtatcaaccatcctttgcttcgagacgaaagagatctcccgatagtgaggaaagctgcacgcttcaccatgaagttcgcggaggaatttcaaaaatctggatacccgtttgactgccccctcgcctttgcaccaggtgtaaatcttgatgtacttagagagtgggagatgtccgctccagacgctcggcattcttctacccccttatcagaaaagcctgtaaaccccgtaccaccaaaggtggccgcagccgaagctcaaattaaagacaggacttggcaaacagtcacagatgaagaaatagacgactacgtaagacgtgtagcgatgggcagtttacacgtatcttgcacttgtccaatgtccacggacccagattctggggtgattgaccagaggctgcgcgttcataggctgaggaatttgagggttgcggatgctagtgtgtttccgagaattactagtgcgcacacgatggctccgactgttatggttgcggaacgatgtgcggattttgtgagggatgcttggagcacgagggagagtcggcgtgatgaggagatttag

SEQ ID NO: 21689 - protein, 641 aa, Muscodor strobelii
  misc_feature: SGI Peptide ID NO. 567345
  misc_feature (429)..(622): Pfam Id: PF05199 Pfam Desc: GMC oxidoreductase
  misc_feature (20)..(343): Pfam Id: PF00732 Pfam Desc: GMC oxidoreductase
  misc_feature (21)..(54): Pfam Id: PF01266 Pfam Desc: FAD dependent oxidoreductase
  misc_feature (21)..(55): Pfam Id: PF00890 Pfam Desc: FAD binding domain
  misc_feature (551)..(622): Pfam Id: PF05199 Pfam Desc: GMC oxidoreductase
  misc_feature (101)..(343): Pfam Id: PF00732 Pfam Desc: GMC oxidoreductase
  misc_feature (20)..(52): Pfam Id: PF00732 Pfam Desc: GMC oxidoreductase
  misc_feature (21)..(52): Pfam Id: PF07992 Pfam Desc: Pyridine nucleotide-disulphide oxidoreductase
  misc_feature (18)..(626): NCBI GI: 171682970 Blast Desc: protein product [Podospora anserina] gi|170941444|emb|CAP67095.1| protein product [Podospora anserina]
  misc_feature (1)..(626): NCBI GI: 255936525 Blast Desc: Pc13g08640 [Penicillium chrysogenum Wisconsin 54-1255] gi|211583909|emb|CAP91933.1| Pc13g08640 [Penicillium chrysogenum Wisconsin 54-1255]
  misc_feature (1)..(627): NCBI GI: 261361490 Blast Desc: choline dehydrogenase [Verticillium albo-atrum VaMs.102]
  misc_feature (1)..(419): NCBI GI: 164424507 Blast Desc: NCU07113 [Neurospora crassa OR74A] gi|157070544|gb|EAA31038.2| [Neurospora crassa OR74A]
  misc_feature (2)..(627): NCBI GI: 154318942 Blast Desc: BC1G_02860 [Botryotinia fuckeliana B05.10] gi|150857990|gb|EDN33182.1| BC1G_02860 [Botryotinia fuckeliana B05.10]
  misc_feature (24)..(632): NCBI GI: 242216939 Blast Desc: GMC oxidoreductase [Postia placenta Mad-698-R] gi|220726565|gb|EED80510.1| GMC oxidoreductase [Postia placenta Mad-698-R]
  misc_feature (2)..(634): NCBI GI: 156040231 Blast Desc: SS1G_12131 [Sclerotinia sclerotiorum 1980] gi|154696188|gb|EDN95926.1| SS1G_12131 [Sclerotinia sclerotiorum 1980]
  misc_feature (100)..(629): NCBI GI: 154305532 Blast Desc: BC1G_08535 [Botryotinia fuckeliana B05.10] gi|150853322|gb|EDN28514.1| BC1G_08535 [Botryotinia fuckeliana B05.10]
  misc_feature (1)..(599): NCBI GI: 242212350 Blast Desc: GMC oxidoreductase [Postia placenta Mad-698-R] gi|220728933|gb|EED82817.1| GMC oxidoreductase [Postia placenta Mad-698-R]
  misc_feature (2)..(316): NCBI GI: 145603600 Blast Desc: MGG_13253 [Magnaporthe grisea 70-15] gi|145011808|gb|EDJ96464.1| MGG_13253 [Magnaporthe grisea 70-15]
  misc_feature (18)..(627): SWISSPROT Homolog: EC 1.1.99.1 Choline dehydrogenase
MWSFPAYPEVPASEVEGKTYDYIVVGGGTAGCVLASRLSENPSVTVLVLEKGHVKDNLLSGIPLISQNFWLGNPLQVQSLRYTEPIPNANGRKNRMWTVEGIGGASRINAMLVTRGIPAGYNEWVEKYGLSDWGWEQVEPYFRKSENALAHAGKTYRGHDGPIQITQPLPPFKWREYTKKAARNLGLPVREDCNDPSGPTRGLFRLDMAINQRAVRSSTYHAFLPKDIAIQRKHRLTICTGVVASRLDIEKEAGLVRGVYFRPVKKRQNSLAITDMYVRAGREVIICSGALCSPALLMLSGIGPREQLAAQGILVLLDLLVGKALQDHFSFAIMMELPKSETLTLLESIWGIWHILLWFFLGKGLFAVSSTPQSIFIQTSAVDENSMAIIAEANNLNAMDAKNIPDVEIMIQPVNSIERAVPGRSLLSFYTTLTQPFSHGSVDLASKDPLAHMRINHPLLRDERDLPIVRKAARFTMKFAEEFQKSGYPFDCPLAFAPGVNLDVLREWEMSAPDARHSSTPLSEKPVNPVPPKVAAAEAQIKDRTWQTVTDEEIDDYVRRVAMGSLHVSCTCPMSTDPDSGVIDQRLRVHRLRNLRVADASVFPRITSAHTMAPTVMVAERCADFVRDAWSTRESRRDEEI

SEQ ID NO: 21690 - DNA, 1290 bp, Muscodor strobelii
  misc_feature: SGI cDNA ID NO. 567346
  misc_feature: Encodes the peptide sequence at SEQ ID NO 21691
atgtctgcccccgcctccaagttcaaggtcgccgacctctccctggctgctttcggccgcaaggagatcgagcttgccgagaatgagatgcccggcctgattgccatccgcaagaagtatgccgccgaccagcctctcgctggcgcccgcattgccggctgcctgcacatgaccatccagaccgctgtcctcatcgagaccttgactgctctcggcgccgaggttacctggacctcgtgcaacatcttctccacccaagaccacgccgctgctgccattgctgcctccggtcagctcgttgccttcaaggatggcaagaagctcaacctcatcctcgacgacggcggtgacttgaccgccctcgtccacaagaagtaccccgagcagctcaaggactgcttcggcgtgtccgaggagaccaccaccggtgtccaccacctctacaagatgttcaaggagaagaagctgctcgtcccctccatcaacgtcaacgactccgtcaccaagtccaagttcgacaacctgtacggctgccgcgagtctctgatcgacggtatcaagcgtgctaccgacgtcatgattgctggcaagatcgccgtcgtcgctggtttcggtgatgtcggcaagggctgcgccatggctctccagggcatgggtgcccgcgttctcgtcactgagatcgaccccatcaacgccctccaggctgccatggccggcttccaggtcactaccatggagaaggctgcttcccaggcccagatcttcgtaaccaccaccggctgccgtgacatcctcgtcggcaagcacttcgaggccatgcccaacgacgccattgtctgcaacattggccacttcgacatcgagatcgacgttgcctggttgaaggccaacgccgccagcgtccagaacatcaagccccaggtcgaccgcttcaccatgaagtcgggccgcaacatcatcctcctcgctgagggccgtctcgtcaacttgggatgcgccaccggccactcttccttcgtcatgtcctgctccttctccaaccaggtccttgcccagatcatgctgtacaaggccgaggacaaggctttcggcgagaagtacgtcgccttcgccaagaccgagaagctgcccgtcggcgtctacgtcctgcccaagatcctcgacgaggaggtcgccgagctccacctggcccatgtcaacgccgagctcaccagactcaccaacgtccaggccgagtacctcagcttgcctgctgagggtccctacaaggctgaccactaccgatactaa

SEQ ID NO: 21691 - protein, 429 aa, Muscodor strobelii
  misc_feature: SGI Peptide ID NO. 567346
  misc_feature (6)..(428): Pfam Id: PF05221 Pfam Desc: S-adenosyl-L-homocysteine hydrolase
  misc_feature (174)..(335): Pfam Id: PF00670 Pfam Desc: S-adenosyl-L-homocysteine hydrolase, NAD binding domain
  misc_feature (98)..(428): Pfam Id: PF05221 Pfam Desc: S-adenosyl-L-homocysteine hydrolase
  misc_feature (6)..(97): Pfam Id: PF05221 Pfam Desc: S-adenosyl-L-homocysteine hydrolase
  misc_feature (1)..(429): NCBI GI: 39940170 Blast Desc: adenosylhomocysteinase [Magnaporthe grisea 70-15] gi|145010585|gb|EDJ95241.1| adenosylhomocysteinase [Magnaporthe grisea 70-15]
  misc_feature (1)..(429): NCBI GI: 85107784 Blast Desc: adenosylhomocysteinase [Neurospora crassa OR74A] gi|28924052|gb|EAA33210.1| adenosylhomocysteinase [Neurospora crassa OR74A]
  misc_feature (1)..(429): NCBI GI: 154318147 Blast Desc: conserved [Botryotinia fuckeliana B05.10] gi|150842764|gb|EDN17957.1| conserved [Botryotinia fuckeliana B05.10]
  misc_feature (1)..(429): NCBI GI: 156062152 Blast Desc: adenosylhomocysteinase [Sclerotinia sclerotiorum 1980] gi|154696528|gb|EDN96266.1| adenosylhomocysteinase [Sclerotinia sclerotiorum 1980]
  misc_feature (1)..(429): NCBI GI: 256729835 Blast Desc: [Nectria haematococca mpVI 77-13-4]
  misc_feature (1)..(429): NCBI GI: 116196894 Blast Desc: adenosylhomocysteinase [Chaetomium globosum CBS 148.51] gi|88180958|gb|EAQ88426.1| adenosylhomocysteinase [Chaetomium globosum CBS 148.51]
  misc_feature (1)..(429): NCBI GI: 169781754 Blast Desc: [Aspergillus oryzae RIB40] gi|238498566|ref|XP_002380518.1| adenosylhomocysteinase [Aspergillus flavus NRRL3357] gi|83774082|dbj|BAE64207.1| protein
  misc_feature (6)..(429): NCBI GI: 171677008 Blast Desc: protein product [Podospora anserina] gi|170936571|emb|CAP61231.1| protein product [Podospora anserina]
  misc_feature (1)..(427): NCBI GI: 169608101 Blast Desc: SNOG_07117 [Phaeosphaeria nodorum SN15] gi|111064648|gb|EAT85768.1| SNOG_07117 [Phaeosphaeria nodorum SN15]
  misc_feature (1)..(429): NCBI GI: 242767885 Blast Desc: adenosylhomocysteinase [Talaromyces stipitatus ATCC 10500] gi|218724654|gb|EED24071.1| adenosylhomocysteinase [Talaromyces stipitatus ATCC 10500]
  misc_feature (2)..(429): SWISSPROT Homolog: EC 3.3.1.1 Adenosylhomocysteinase
MSAPASKFKVADLSLAAFGRKEIELAENEMPGLIAIRKKYAADQPLAGARIAGCLHMTIQTAVLIETLTALGAEVTWTSCNIFSTQDHAAAAIAASGQLVAFKDGKKLNLILDDGGDLTALVHKKYPEQLKDCFGVSEETTTGVHHLYKMFKEKKLLVPSINVNDSVTKSKFDNLYGCRESLIDGIKRATDVMIAGKIAVVAGFGDVGKGCAMALQGMGARVLVTEIDPINALQAAMAGFQVTTMEKAASQAQIFVTTTGCRDILVGKHFEAMPNDAIVCNIGHFDIEIDVAWLKANAASVQNIKPQVDRFTMKSGRNIILLAEGRLVNLGCATGHSSFVMSCSFSNQVLAQIMLYKAEDKAFGEKYVAFAKTEKLPVGVYVLPKILDEEVAELHLAHVNAELTRLTNVQAEYLSLPAEGPYKADHYRY

SEQ ID NO: 21692 - DNA, 2306 bp, Muscodor strobelii
  misc_feature: SGI EST ID NO. CUFF.51806.0
  misc_feature: Variant of the nucleotide sequence at SEQ ID NO 21690
atcagctatagtttttctgcccctctgcgatagatgttatcctatctcgcccctccattccccatgcttactactatcgctgccggccctcttaactgatcaattgtcccttcgagctgctcgagccttttctcttctttcttcctcattctcttctcaccacatccctttcctccctcacaaatcacacgatttaatcctacgagtaagtcaagtcactcttccagttgacaaattggaagttttgcgagaattctaagcagctagcaactgcctcgtgaattggaatattggaatacccctcatcaacatgttcggcagctacccgctcttaggttttctcatcccactttcttccacgttccttacttctcacattataaatccttccactgattgcgcaatcgtttcgacacaagtcaattgaaaactaacagtaatacctctcagaaatgtctgcccccgcctccaagttcaaggtcgccgacctctccctggctgctttcggccgcaaggagatcgagcttgccgagaatgagatgcccggcctgattgccatccgcaagaagtatgccgccgaccagcctctcgctggcgcccgcattgccggctgcctgcacatgaccatccagaccgctgtcctcatcgagaccttgactgctctcggcgccgaggttacctggacctcgtgcaacatcttctccacccaagaccacgccgctgctgccattgctgcctccggtgtccctgtcttcgcctggaagggcgagactgaggaggagtaccgagtggtgccttgagcagcagctcgttgccttcaaggatggcaagaagctcaacctcatcctcgacgacggcggtgacttgaccgccctcgtccacaagaagtaccccgagcagctcaaggactgcttcggcgtgtccgaggagaccaccaccggtgtccaccacctctacaagatgttcaaggagaagaagctgctcgtcccctccatcaacgtcaacgactccgtcaccaagtccaagttcgacaacctgtacggctgccgcgagtctctgatcgacggtatcaagcgtgctaccgacgtcatgattgctggcaagatcgccgtcgtcgctggtttcggtgatgtcggcaagggctgcgccatggctctccagggcatgggtgcccgcgttctcgtcactgagatcgaccccatcaacgccctccaggctgccatggccggcttccaggtcactaccatggagaaggctgcttcccaggcccagatcttcgtaaccaccaccggctgccgtgacatcctcgtcggcaagcacttcgaggccatgcccaacgacgccattgtctgcaacattggccacttcgacatcgagatcgacgttgcctggttgaaggccaacgccgccagcgtccagaacatcaagccccaggtcgaccgcttcaccatgaagtcgggccgcaacatcatcctcctcgctgagggccgtctcgtcaacttgggatgcgccaccggccactcttccttcgtcatgtcctgctccttctccaaccaggtccttgcccagatcatgctgtacaaggccgaggacaaggctttcggcgagaagtacgtcgccttcgccaagaccgagaagctgcccgtcggcgtctacgtcctgcccaagatcctcgacgaggaggtcgccgagctccacctggcccatgtcaacgccgagctcaccagactcaccaacgtccaggccgagtacctcagcttgcctgctgagggtccctacaaggctgaccactaccgatactaaatcacctgtacacctaatatttcgcacggcgcgacaatggatttggccagcgaaacaaaaccctaattttcctttgtccattcaacaagcatgagtatgaggcgcgcgtgggtttttttacacaaacatttggcggggatcttcaaaaaatgcgggccggggccggggataacgattttcaacaaaacggcgttggcttatgaaatatgcatgattcccctcatggcgtctgatttttgctacgaaatggcagcagcaacaacgttgctacaacaataaatagggtcgtgtacctatttgcgatccctggatggtacagggattcaagggcacaaggaatagacaggaatggtgtgtgttgatatatgattgatccgtcaaccggatctaaggagagatacgaggtcgataaatgcctagcagtggatgaatagaagctctgagctttgaagtaaacatccagtttctgtgtcgctatgattgtggtgagtgttgtgagttac

SEQ ID NO: 21693 - DNA, 1092 bp, Muscodor strobelii
  misc_feature: SGI cDNA ID NO. 567347
  misc_feature: Reduced expression when VOC is produced
  misc_feature: Encodes the peptide sequence at SEQ ID NO 21694
atggccgagcctgtcatccccaaagatgcgcccataaaggccgtccaggtcgaggcactggttgtcatgaagattgtcaagcactgcgccgccagcttcccgaccaccgccaccggatctgtcgtcggcatggacaacgagtcgacgctcgagatcaccagcgcctttcccttccccaccgccgatgtgtccagcgtcgaaggcagccaccagaacgacgcctcctccctcgccgccgccgccccccgcgccaaggccaacatcgcctaccaggcggacatgattagacatctcaaggaggtcaatgtcgacgccaacaacgtcggctggtacacgagcgccaccatgggcaacttcgtcaacctcagcttcatcgagaaccagtaccactaccagcgcgacaacgacaagaccgtcgccctcgtccacgacgtcagccgcagctcccagggcgccctcagcctgcgcgccttcaagctgtcccaaaacttcatggccgcctacaaggagggcaaattcaccaccgagagtcttcaaaagtccaagctgtctttccgcgacgtgctcgtcgaactccccatcaccctccacaactctcacctcctgacctccttcctccaccaactccccgccaagcccgtgtccgacgacgtggacatgcccgcctcgctcgccgatattcagaacaaccctgtccacatgcctctgcacccttccgtcgacaccctcgacctatccatagatcccttcctcgagaagacatgcgacctcttgcttgacagcatagagtcacactacaccgagctcaacaactaccagtactaccagaggcagctgggtcgcgaacaggcaaagatcaccgcctggcaaaccaagcgcaaggctgagaacgccgcccgtgccgccgccaagcaggcacccctgcccgaggacgagtggcaacggattttcaagctgccgcaggagcccagccggctggagggcatgctgaatgccaagcaggtcgagcagtatagcaagcaggtcgacggctttactgccaccgtcagcgcaaagatgtttgccgtccgcggcaacctgttgcccgaatga

SEQ ID NO: 21694 - protein, 363 aa, Muscodor strobelii
  misc_feature: SGI Peptide ID NO. 567347
  misc_feature (6)..(363): NCBI GI: 171677010 Blast Desc: protein product [Podospora anserina] gi|170936572|emb|CAP61232.1| protein product [Podospora anserina]
  misc_feature (7)..(363): NCBI GI: 256729836 Blast Desc: [Nectria haematococca mpVI 77-13-4]
  misc_feature (28)..(363): NCBI GI: 116196896 Blast Desc: conserved [Chaetomium globosum CBS 148.51] gi|121782623|sp|Q2GZK0.1|EIF3H_CHAGB RecName: Full=Eukaryotic translation initiation factor 3 subunit H; Short=eIF3h conserved
  misc_feature (7)..(363): NCBI GI: 46122473 Blast Desc: FG05614.1 [Gibberella zeae PH-1]
  misc_feature (1)..(363): NCBI GI: 85107781 Blast Desc: eukaryotic translation initiation factor 3 subunit 3 [Neurospora crassa OR74A] gi|74617016|sp|Q7S9Y9.1|EIF3H_NEUCR RecName: Full=Eukaryotic translation initiation factor 3 subunit
  misc_feature (8)..(363): NCBI GI: 156062150 Blast Desc: SS1G_01190 [Sclerotinia sclerotiorum 1980] gi|238686684|sp|A7E7B3.1|EIF3H_SCLS1 RecName: Full=Eukaryotic translation initiation factor 3 subunit H; Short=eIF3h SS1G_01190
  misc_feature (8)..(363): NCBI GI: 154318145 Blast Desc: BC1G_03240 [Botryotinia fuckeliana B05.10] gi|229463757|sp|A6RQZ9.1|EIF3H_BOTFB RecName: Full=Eukaryotic translation initiation factor 3 subunit H; Short=eIF3h BC1G_03240
  misc_feature (8)..(363): NCBI GI: 145602153 Blast Desc: MGG_05156 [Magnaporthe grisea 70-15] gi|224488042|sp|A4QT78.1|EIF3H_MAGGR RecName: Full=Eukaryotic translation initiation factor 3 subunit H; Short=eIF3h MGG_05156
  misc_feature (8)..(362): NCBI GI: 224488081 Blast Desc: MGG_05156 [Magnaporthe grisea 70-15] gi|224488042|sp|A4QT78.1|EIF3H_MAGGR RecName: Full=Eukaryotic translation initiation factor 3 subunit H; Short=eIF3h MGG_05156
  misc_feature (8)..(362): NCBI GI: 225559711 Blast Desc: eukaryotic translation initiation factor 3 subunit 3 [Ajellomyces capsulatus G186AR]
  misc_feature (1)..(178): SWISSPROT Homolog: EC 3.1.2.15 Ubiquitin thiolesterase
  misc_feature: Useful for introducing or modulating the production of volatile compounds
MAEPVIPKDAPIKAVQVEALVVMKIVKHCAASFPTTATGSVVGMDNESTLEITSAFPFPTADVSSVEGSHQNDASSLAAAAPRAKANIAYQADMIRHLKEVNVDANNVGWYTSATMGNFVNLSFIENQYHYQRDNDKTVALVHDVSRSSQGALSLRAFKLSQNFMAAYKEGKFTTESLQKSKLSFRDVLVELPITLHNSHLLTSFLHQLPAKPVSDDVDMPASLADIQNNPVHMPLHPSVDTLDLSIDPFLEKTCDLLLDSIESHYTELNNYQYYQRQLGREQAKITAWQTKRKAENAARAAAKQAPLPEDEWQRIFKLPQEPSRLEGMLNAKQVEQYSKQVDGFTATVSAKMFAVRGNLLPE

SEQ ID NO: 21695 - DNA, 2005 bp, Muscodor strobelii
  misc_feature: SGI EST ID NO. CUFF.51169.0
  misc_feature: Variant of the nucleotide sequence at SEQ ID NO 21693
caaatttctgccggcgttcaccaccttctccttgcattcacagcaacgcagactcccagcctgactccgcctagtcgcttttcgcacacaacttttgcaacgggcacgaaactccaaaatcttgcagcaaagctccacgcgtgcccatcgacaacttggtcatcctctccgccctgccaaaccacgagccaagaagagaaggcgcattatttccaatcatggccgagcctgtcatccccaaagatgcgcccataaaggccgtccaggtcgaggcactggttgtcatgaagattgtcaagcactgcgccgccagcttcccgaccaccgccaccggatctgtcgtcggcatggacaacgagtcgacgctcgagatcaccagcgcctttcccttccccaccgccgatgtgtccagcgtcgaaggcagccaccagaacgacgcctcctccctcgccgccgccgccccccgcgccaaggccaacatcgcctaccaggcggacatgattagacatctcaaggaggtcaatgtcgacgccaacaacgtcggctggtacacgagcgccaccatgggcaacttcgtcaacctcagcttcatcgagaaccagtaccactaccagcgcgacaacgacaagaccgtcgccctcgtccacgacgtcagccgcagctcccagggcgccctcagcctgcgcgccttcaagctgtcccaaaacttcatggccgcctacaaggagggcaaattcaccaccgagaggtacggtacacctgcttcatctacgtacaatatcgttgtgcgcagtgtatgtgtgtgtggcaataatctaacattacgccagtcttcaaaagtccaagctgtctttccgcgacgtgctcgtcgaactccccatcaccctccacaactctcacctcctgacctccttcctccaccaactccccgccaagcccgtgtccgacgacgtggacatgcccgcctcgctcgccgatattcagaacaaccctgtccacatgcctctgcacccttccgtcgacaccctcgacctatccatagatcccttcctcgagaagacatgcgacctcttgcttgacagcatagagtcacactacaccgagctcaacaactaccagtactaccagaggcagctgggtcgcgaacaggcaaagatcaccgcctggcaaaccaagcgcaaggctgagaacgccgcccgtgccgccgccaagcaggcacccctgcccgaggacgagtggcaacggattttcaagctgccgcaggagcccagccggctggagggcatgctgaatgccaagcaggtcgagcagtatagcaagcaggtcgacggctttactgccaccgtcagcgcaaagatgtttgccgtccgcggcaacctgttgcccgaatgagagagccactggaaaggagaagaacgggatgtttcggtagatatgcatatggcacggcgtttggcgactgggagtccctgtagttctatggcatagtactcacccaccagttggtgatacccactacattattattctttcgggctggcttgggtcatcggaactcggaagtaaaagggaggacatgaacatgtttgcattgataggctcgccaccagccttgttgctgagctgggaggataggccaagacaaaagcatcaccagagccagaaggactacggtttggttcgaatatgtcgtcccgactgacaatatcgtctcagggagccatcaacgcgatgtgtatcagcgtactatgtcgggtgaatgatcaacgagacctgatctgatctgactatagcccatatgtttatgcgaaatggggcatgtatgctcatagataagaaagtcgctatactcaaactcataactattccggtatgactcgaacaagtaagctgtaagactttcgaataaccaccagccttttcgtggggtccagccttgggatcgcatttcaaatcgtcataatcagcttgcctgccttggcggaatcgcttgagtactcaaatg

SEQ ID NO: 21696 - DNA, 435 bp, Muscodor strobelii
  misc_feature: SGI cDNA ID NO. 567348
  misc_feature: Encodes the peptide sequence at SEQ ID NO 21697
atgcccgcctcgctcgccgatattcagaacaaccctgtccacatgcctctgcacccttccgtcgacaccctcgacctatccatagatcccttcctcgagaagacatgcgacctcttgcttgacagcatagagtcacactacaccgagctcaacaactaccagtactaccagaggcagctgggtcgcgaacaggcaaagatcaccgcctggcaaaccaagcgcaaggctgagaacgccgcccgtgccgccgccaagcaggcacccctgcccgaggacgagtggcaacggattttcaagctgccgcaggagcccagccggctggagggcatgctgaatgccaagcaggtcgagcagtatagcaagcaggtcgacggctttactgccaccgtcagcgcaaagatgtttgccgtccgcggcaacctgttgcccgaatga

SEQ ID NO: 21697 - protein, 144 aa, Muscodor strobelii
  misc_feature: SGI Peptide ID NO. 567348
  misc_feature (1)..(144): NCBI GI: 116196896 Blast Desc: conserved [Chaetomium globosum CBS 148.51] gi|121782623|sp|Q2GZK0.1|EIF3H_CHAGB RecName: Full=Eukaryotic translation initiation factor 3 subunit H; Short=eIF3h conserved
  misc_feature (1)..(144): NCBI GI: 171677010 Blast Desc: protein product [Podospora anserina] gi|170936572|emb|CAP61232.1| protein product [Podospora anserina]
  misc_feature (1)..(144): NCBI GI: 85107781 Blast Desc: eukaryotic translation initiation factor 3 subunit 3 [Neurospora crassa OR74A] gi|74617016|sp|Q7S9Y9.1|EIF3H_NEUCR RecName: Full=Eukaryotic translation initiation factor 3 subunit
  misc_feature (2)..(144): NCBI GI: 256729836 Blast Desc: [Nectria haematococca mpVI 77-13-4]
  misc_feature (2)..(144): NCBI GI: 46122473 Blast Desc: FG05614.1 [Gibberella zeae PH-1]
  misc_feature (1)..(144): NCBI GI: 156062150 Blast Desc: SS1G_01190 [Sclerotinia sclerotiorum 1980] gi|238686684|sp|A7E7B3.1|EIF3H_SCLS1 RecName: Full=Eukaryotic translation initiation factor 3 subunit H; Short=eIF3h SS1G_01190
  misc_feature (1)..(144): NCBI GI: 154318145 Blast Desc: BC1G_03240 [Botryotinia fuckeliana B05.10] gi|229463757|sp|A6RQZ9.1|EIF3H_BOTFB RecName: Full=Eukaryotic translation initiation factor 3 subunit H; Short=eIF3h BC1G_03240
  misc_feature (1)..(144): NCBI GI: 145602153 Blast Desc: MGG_05156 [Magnaporthe grisea 70-15] gi|224488042|sp|A4QT78.1|EIF3H_MAGGR RecName: Full=Eukaryotic translation initiation factor 3 subunit H; Short=eIF3h MGG_05156
  misc_feature (1)..(143): NCBI GI: 189189496 Blast Desc: eukaryotic translation initiation factor 3 subunit 3 [Pyrenophora tritici-repentis Pt-1C-BFP] gi|187972693|gb|EDU40192.1| eukaryotic translation initiation 3 3
  misc_feature (1)..(143): NCBI GI: 224488081 Blast Desc: eukaryotic translation initiation factor 3 subunit 3 [Pyrenophora tritici-repentis Pt-1C-BFP] gi|187972693|gb|EDU40192.1| eukaryotic translation initiation 3 3
MPASLADIQNNPVHMPLHPSVDTLDLSIDPFLEKTCDLLLDSIESHYTELNNYQYYQRQLGREQAKITAWQTKRKAENAARAAAKQAPLPEDEWQRIFKLPQEPSRLEGMLNAKQVEQYSKQVDGFTATVSAKMFAVRGNLLPE

SEQ ID NO: 21698 - DNA, 2005 bp, Muscodor strobelii; identical to SEQ ID NO: 21695
  misc_feature: SGI EST ID NO. CUFF.51169.0
  misc_feature: Variant of the nucleotide sequence at SEQ ID NO 21696

SEQ ID NO: 21699 - DNA, 684 bp, Muscodor strobelii
  misc_feature: SGI cDNA ID NO. 567349
  misc_feature: Encodes the peptide sequence at SEQ ID NO 21700
atggctatccagcacgaagtctcgcaggtgcaagccccagagcttactattctgtcagaaaagtcgtcggtcgccatcttagcgcagcagatcagcaccccagaaagcgtgaatgatgacttgctaggcgacacccaacacttgttggccgtctcgccttacaccgagcgagcacatcttttggacttgcgaacccttgacgaggagaatgctatgttggcgcaggcgctagtccacatgcaatgcctgcgagcggattatgccacagcaccctatgctgacacctttaattggcaagagatcatagacagggtcaggcaattggcacatgagcggaaccaccactggagagccagctcgttctttgttgtggccttccgatctcagataccaccgactacggtgtatggcgacctgggtgcgctggacaaggcagcccacgccgaggcgaccgccagcggaggctttctcaaatattggttcggaagccctgataaggacggcaagaacctagccacctgcgtgtggagatcgcaggaggatgcgaagaagggaggcgttggacctgcacatcgacgagcggcgatgtctgcccgggatctttattcccattggaagattgacaggcataggcttatcatcggtgacaaggccgatagttggcagattgccgactgggcctga

SEQ ID NO: 21700 - protein, 227 aa, Muscodor strobelii
  misc_feature: SGI Peptide ID NO. 567349
  misc_feature (9)..(225): NCBI GI: 171677012 Blast Desc: protein product [Podospora anserina] gi|170936573|emb|CAP61233.1| protein product [Podospora anserina]
  misc_feature (7)..(226): NCBI GI: 116196898 Blast Desc: CHGG_05047 [Chaetomium globosum CBS 148.51] gi|88180960|gb|EAQ88428.1| CHGG_05047 [Chaetomium globosum CBS 148.51]
  misc_feature (20)..(226): NCBI GI: 85107778 Blast Desc: NCU07928 [Neurospora crassa OR74A] gi|28924050|gb|EAA33208.1| conserved [Neurospora crassa OR74A]
  misc_feature (36)..(227): NCBI GI: 154318143 Blast Desc: BC1G_03239 [Botryotinia fuckeliana B05.10] gi|150842762|gb|EDN17955.1| BC1G_03239 [Botryotinia fuckeliana B05.10]
  misc_feature (49)..(227): NCBI GI: 156062148 Blast Desc: SS1G_01189 [Sclerotinia sclerotiorum 1980] gi|154696526|gb|EDN96264.1| SS1G_01189 [Sclerotinia sclerotiorum 1980]
  misc_feature (37)..(226): NCBI GI: 256729837 Blast Desc: [Nectria haematococca mpVI 77-13-4]
  misc_feature (49)..(226): NCBI GI: 261352897 Blast Desc: conserved [Verticillium albo-atrum VaMs.102]
  misc_feature (42)..(226): NCBI GI: 46122471 Blast Desc: FG05613.1 [Gibberella zeae PH-1]
  misc_feature (49)..(226): NCBI GI: 225682802 Blast Desc: conserved [Paracoccidioides brasiliensis Pb03]
  misc_feature (49)..(225): NCBI GI: 261194777 Blast Desc: UPF0643 protein [Ajellomyces dermatitidis SLH14081] gi|239588331|gb|EEQ70974.1| UPF0643 protein [Ajellomyces dermatitidis SLH14081]
MAIQHEVSQVQAPELTILSEKSSVAILAQQISTPESVNDDLLGDTQHLLAVSPYTERAHLLDLRTLDEENAMLAQALVHMQCLRADYATAPYADTFNWQEIIDRVRQLAHERNHHWRASSFFVVAFRSQIPPTTVYGDLGALDKAAHAEATASGGFLKYWFGSPDKDGKNLATCVWRSQEDAKKGGVGPAHRRAAMSARDLYSHWKIDRHRLIIGDKADSWQIADWA

SEQ ID NO: 21701 - DNA, 894 bp, Muscodor strobelii
  misc_feature: SGI cDNA ID NO. 567350
  misc_feature: Encodes the peptide sequence at SEQ ID NO 21702
atgaatgaaatgtcacatttcatgtgtcgagtcaatatactcactgctgagttcaagctcactgtcgatagcgaaggacacgtcgtcgctgccgaaaggacgggagagtttcaacccgtagacccaaaatctcaagagggcgtatatctctaccgcagatcttccacagcgccagatgcagcatcgcttattgattattaccaatactcgctacaatcctttacgccatactggcgaaacgccacaatcccctatgactgggcttcatacctaatgcaaacaagccgggtcctgaataactcggccatcttcgatccaaacaagcccatacccgatttcaatgtcactataccattattcgagcgcatctacaaaacatcctttgccgcatttctacaacaaaatcccgatatcttcatgagtaatgacaacgcagcagctaccaccgcacaaggaacataccaaatcctcgaaacccgcatctttatgtcgcccgccgcattttacatctccgtcttgatcctgagtttgaacaccgtcacaatagtgctcgtctataccatggggacggcggtctacctcccgcgcatgccgacatcaatcgcctcaatactaggatacatctccgcgagcagggtatgcagcccgggatacgattaccacagcgacgcgacagataaatacaaagagcacaccttcagttttggtcggtatgtgggcacggatggaaagttacatattggcatagatgtcgacccatttgtcacgccaatcgacaaaaacacattacagggtcgtagctggggatttaaaccgagtgaggcgttgggaacgattcgaaagcgacttggtcatagcaaaggaaggggcgatgctgcatatgcgaagttgtga

SEQ ID NO: 21702 - protein, 297 aa, Muscodor strobelii
  misc_feature: SGI Peptide ID NO. 567350
  misc_feature (7)..(267): NCBI GI: 85100308 Blast Desc: NCU01382 [Neurospora crassa OR74A] gi|16944581|emb|CAC18275.2| [Neurospora crassa] gi|28922472|gb|EAA31703.1| [Neurospora crassa OR74A]
  misc_feature (3)..(266): NCBI GI: 46123417 Blast Desc: FG06086.1 [Gibberella zeae PH-1]
  misc_feature (3)..(291): NCBI GI: 261355577 Blast Desc: conserved [Verticillium albo-atrum VaMs.102]
  misc_feature (8)..(268): NCBI GI: 256731029 Blast Desc: NECHADRAFT_48925 [Nectria haematococca mpVI 77-13-4]
  misc_feature (7)..(276): NCBI GI: 189210064 Blast Desc: [Pyrenophora tritici-repentis Pt-1C-BFP] gi|187977457|gb|EDU44083.1| [Pyrenophora tritici-repentis Pt-1C-BFP]
  misc_feature (78)..(262): NCBI GI: 169616113 Blast Desc: SNOG_11230 [Phaeosphaeria nodorum SN15] gi|160703116|gb|EAT81729.2| SNOG_11230 [Phaeosphaeria nodorum SN15]
  misc_feature (164)..(256): NCBI GI: 18376185 Blast Desc: [Neurospora crassa]
  misc_feature (113)..(256): NCBI GI: 164426208 Blast Desc: NCU01044 [Neurospora crassa OR74A] gi|157071241|gb|EAA32420.2| conserved [Neurospora crassa OR74A]
  misc_feature (113)..(250): NCBI GI: 156044090 Blast Desc: SS1G_10148 [Sclerotinia sclerotiorum 1980] gi|154694537|gb|EDN94275.1| SS1G_10148 [Sclerotinia sclerotiorum 1980]
  misc_feature (85)..(253): NCBI GI: 255933329 Blast Desc: Pc12g13270 [Penicillium chrysogenum Wisconsin 54-1255] gi|211582754|emb|CAP80954.1| Pc12g13270 [Penicillium chrysogenum Wisconsin 54-1255]
MNEMSHFMCRVNILTAEFKLTVDSEGHVVAAERTGEFQPVDPKSQEGVYLYRRSSTAPDAASLIDYYQYSLQSFTPYWRNATIPYDWASYLMQTSRVLNNSAIFDPNKPIPDFNVTIPLFERIYKTSFAAFLQQNPDIFMSNDNAAATTAQGTYQILETRIFMSPAAFYISVLILSLNTVTIVLVYTMGTAVYLPRMPTSIASILGYISASRVCSPGYDYHSDATDKYKEHTFSFGRYVGTDGKLHIGIDVDPFVTPIDKNTLQGRSWGFKPSEALGTIRKRLGHSKGRGDAAYAKL

SEQ ID NO: 21703 - DNA, 735 bp, Muscodor strobelii
  misc_feature: SGI EST ID NO. CUFF.50950.0
  misc_feature: Variant of the nucleotide sequence at SEQ ID NO 21701
gggcttcatacctaatgcaaacaagccgggtcctgaataactcggccatcttcgatccaaacaagcccatacccgatttcaatgtcactataccattattcgagcgcatctacaaaacatcctttgccgcatttctacaacaaaatcccgatatcttcatgagtaatgacaacgcagcagctaccaccgcacaaggaacataccaaatcctcgaaacccgcatctttatgtcgcccgccgcattttacatctccgtcttgatcctgagtttgaacaccgtcacaatagtgctcgtctataccatggggacggcggtctacctcccgcgcatgccgacatcaatcgcctcaatactaggatacatctccgcgagcagggtatgcagcccgggatacgattaccacagcgacgcgacagataaatacaaagagcacaccttcagttttggtcggtatgtgggcacggatggaaagttacatattggcatagatgtcgacccatttgtcacgccaatcgacaaaaacacattacagggtcgtagctggggatttaaaccgagtgaggcgttgggaacgattcgaaagcgacttggtcatagcaaaggaaggggcgatgctgcatatgcgaagttgtgattgctttgaggtactctatgaagacgacagagggctgattgtgtaggcttctggaaaactagagacgtttattattttaaaattaaaacaggatgctttt

SEQ ID NO: 21704 - DNA, 1479 bp, Muscodor strobelii
  misc_feature: SGI cDNA ID NO. 567351
  misc_feature: Encodes the peptide sequence at SEQ ID NO 21705
atggcgaccaacgcgagtacgttgtcccagtacctagagcagctgccgggcaccactttcaagcgactgtatcagcagccctcgaccacgtttgccatcttccggcgcatgcttccagccctagccaagacgatcgtcatggccattctatacatgccctctccatttccaaacgctgacctcgagacatgggtcaagccctcggcgaaacgagagaaggaccaagccatctccatcctgcgctccctctacatcgtcgaacgcacggccgccgccagcatctccctcaccccgaacttccgcaacagcctgcgcctcgcactagaaggcggcggcgaccacaactccttcggagtgccctcgaggcagcctgtgcccgactcggttagcctacagttcctcgacgagtacgctcgcaagaagtgggacgacatattacactttgtcgtaaactcggttggcttctcgggcacctctgatcggtcttccaacggacccaagcaatcagtaaaagacctcatgatccggggtcatctggtcgagcgccgcggcggagccggtctgaacatcacccaggctggtttcactttcctgctgcaagaggccaacgcccaggtctggacgttgcttcttctctggctcgagtccgccgatgctgcttccgcccagggatccgacaccgagggattagacagtgtggatatgctgtgcttcttctttcttttggcttctctggagctaggccgagcctatgagacaaatgctctcacggaagcgcgtcggaacatgttgcccaatttggtggattttggactcgtctacataccgccggcaaacccgcgccagttcttcccgacaaggctcgccaccactctcacatcgagcgacaccacccttcgcagtgtcgccgccggcttctctgctgcgggtaatcccaactcgagcaacgccaacatcatggatgacccagcagccgacaagtccagcatcatcatggagacaaacttccgcatgtatgcctacgtctcctccccgctacaaattgccgtgttggcattattctgtgacctcaagttccgcttcaaaggtctagtctcaggaattctgacccgcgcatcgatccggcgggcggtcgatatgggcatcacatctgaccaaattatatcttacctcggaactcatgcccatgaacaaatgcaccgtcttgcggcctcgagccacaagcctctactcccgccggtagtcgttgatcagatcaggctctggcagttagacacagagcgtatgctagctacacccgggttcttgttcaaagactttgacgattataaggagtacatggaaatctgcaattttgctgatgatattggagttgttgcttggcgaaatgatagaaagggcatgttcttcgcgagcaaggtagatcagattaaagacttcatgaaaaccaggaagaaggcaaatgaggggaagacttga

SEQ ID NO: 21705 - protein, 492 aa, Muscodor strobelii
  misc_feature: SGI Peptide ID NO. 567351
  misc_feature (10)..(397): Pfam Id: PF03849 Pfam Desc: Transcription factor Tfb2
  misc_feature (8)..(488): NCBI GI: 116201905 Blast Desc: CHGG_08837 [Chaetomium globosum CBS 148.51] gi|88177355|gb|EAQ84823.1| CHGG_08837 [Chaetomium globosum CBS 148.51]
  misc_feature (2)..(488): NCBI GI: 46127843 Blast Desc: FG08299.1 [Gibberella zeae PH-1]
  misc_feature (7)..(485): NCBI GI: 39974913 Blast Desc: MGG_00397 [Magnaporthe grisea 70-15] gi|145018712|gb|EDK02991.1| MGG_00397 [Magnaporthe grisea 70-15]
  misc_feature (1)..(488): NCBI GI: 164425579 Blast Desc: NCU05523 [Neurospora crassa OR74A] gi|157070982|gb|EAA31249.2| conserved [Neurospora crassa OR74A]
  misc_feature (3)..(487): NCBI GI: 261360684 Blast Desc: RNA polymerase II transcription factor B subunit 2 [Verticillium albo-atrum VaMs.102]
  misc_feature (42)..(488): NCBI GI: 171681598 Blast Desc: protein product [Podospora anserina] gi|170940758|emb|CAP66407.1| protein product [Podospora anserina]
  misc_feature (52)..(485): NCBI GI: 156057729 Blast Desc: SS1G_04596 [Sclerotinia sclerotiorum 1980] gi|154702381|gb|EDO02120.1| SS1G_04596 [Sclerotinia sclerotiorum 1980]
  misc_feature (71)..(485): NCBI GI: 154308354 Blast Desc: BC1G_08237 [Botryotinia fuckeliana B05.10] gi|150852778|gb|EDN27970.1| BC1G_08237 [Botryotinia fuckeliana B05.10]
  misc_feature (1)..(484): NCBI GI: 212535854 Blast Desc: TFIIH and nucleotide excision repair factor 3 complexes subunit (Tfb2), [Penicillium marneffei ATCC 18224] gi|210070482|gb|EEA24572.1| TFIIH and nucleotide excision repair
  misc_feature (1)..(484): NCBI GI: 242794214 Blast Desc: TFIIH and nucleotide excision repair factor 3 complexes subunit (Tfb2), [Talaromyces stipitatus ATCC 10500] gi|218718913|gb|EED18333.1| TFIIH and nucleotide excision repair
MATNASTLSQYLEQLPGTTFKRLYQQPSTTFAIFRRMLPALAKTIVMAILYMPSPFPNADLETWVKPSAKREKDQAISILRSLYIVERTAAASISLTPNFRNSLRLALEGGGDHNSFGVPSRQPVPDSVSLQFLDEYARKKWDDILHFVVNSVGFSGTSDRSSNGPKQSVKDLMIRGHLVERRGGAGLNITQAGFTFLLQEANAQVWTLLLLWLESADAASAQGSDTEGLDSVDMLCFFFLLASLELGRAYETNALTEARRNMLPNLVDFGLVYIPPANPRQFFPTRLATTLTSSDTTLRSVAAGFSAAGNPNSSNANIMDDPAADKSSIIMETNFRMYAYVSSPLQIAVLALFCDLKFRFKGLVSGILTRASIRRAVDMGITSDQIISYLGTHAHEQMHRLAASSHKPLLPPVVVDQIRLWQLDTERMLATPGFLFKDFDDYKEYMEICNFADDIGVVAWRNDRKGMFFASKVDQIKDFMKTRKKANEGKT

SEQ ID NO: 21706 - DNA, 1903 bp, Muscodor strobelii
  misc_feature: SGI EST ID NO. CUFF.51080.1
  misc_feature: Variant of the nucleotide sequence at SEQ ID NO 21704
tgaacattcattccaaccccaacggcatcattcaacatcatcatcggactctgttcgcgctggttatcggcgacatctgctttacaacctcgcgaacaggacgaagcacttacaacgcatgatacagcaactactattgagcgttgatcttgctctttccacctgcgggtggctggccgcgacgcgaacaatgccctgaaactcgattctttctttggtccgcaacactctcttgtcgacggcctagtactatactagacagccagcgtcacgatggcgaccaacgcgagtacgttgtcccagtacctagagcagctgccgggcaccactttcaagcgactgtatcagcagccctcgaccacgtttgccatcttccggcgcatgcttccagccctagccaagacgatcgtcatggccattctatacatgccctctccatttccaaacgctgacctcgagacatgggtcaagccctcggcgaaacgagagaaggaccaagccatctccatcctgcgctccctctacatcgtcgaacgcacggccgccgccagcatctccctcaccccgaacttccgcaacagcctgcgcctcgcactagaaggcggcggcgaccacaactccttcggagtgccctcgaggcagcctgtgcccgactcggttagcctacagttcctcgacgagtacgctcgcaagaagtgggacgacatattacactttgtcgtaaactcggttggcttctcgggcacctctgatcggtcttccaacggacccaagcaatcagtaaaagacctcatgatccggggtcatctggtcgagcgccgcggcggagccggtctgaacatcacccaggctggtttcactttcctgctgcaagaggccaacgcccaggtctggacgttgcttcttctctggctcgagtccgccgatgctgcttccgcccagggatccgacaccgagggattagacagtgtggatatgctgtgcttcttctttcttttggcttctctggagctaggccgagcctatgagacaaatgctctcacggaagcgcgtcggaacatgttgcccaatttggtggattttggactcgtctacataccgccggcaaacccgcgccagttcttcccgacaaggctcgccaccactctcacatcgagcgacaccacccttcgcagtgtcgccgccggcttctctgctgcgggtaatcccaactcgagcaacgccaacatcatggatgacccagcagccgacaagtccagcatcatcatggagacaaacttccgcatgtatgcctacgtctcctccccgctacaaattgccgtgttggcattattctgtgacctcaagttccgcttcaaaggtctagtctcaggaattctgacccgcgcatcgatccggcgggcggtcgatatgggcatcacatctgaccaaattatatcttacctcggaactcatgcccatgaacaaatgcaccgtcttgcggcctcgagccacaagcctctactcccgccggtagtcgttgatcagatcaggctctggcagttagacacagagcgtatgctagctacacccgggttcttgttcaaagactttgacgattataaggagtacatggaaatctgcaattttgctgatgatattggagttgttgcttggcgaaatgatagaaagggcatgttcttcgcgagcaaggtagatcagattaaagacttcatgaaaaccaggaagaaggcaaatgaggggaagacttgatgagatagaggacggggaaagcaggcctcagtggcagtaacgtctcatgctgcgcaacattgctacttgtgcttctacatagagagatcacaaaccaggtagaatgaaatattttcaaattccattccgtctggatccatttgatacattt

SEQ ID NO: 21707 - DNA, 2067 bp, Muscodor strobelii
  misc_feature: SGI cDNA ID NO. 567352
  misc_feature: Encodes the peptide sequence at SEQ ID NO 21708
atggtggccgcaacggagctcccccacccctttgaccctctttcccagtctgagatcgaggcggctattgctcttgtcaagaaggcacacggagacctattcttcaatgtcgtgtcactgcatgagccgcgcaaggcggagatgaccaaatggcttgcagatcctacaactgcaactcgccctgccagagtggctgacgtcgttgtgattgcccctggtggtaaagtatatgatggattagtagacctcgctacgggaaacatttcgaaatgggagcttttagagggattacagcccattatcaccatggaagaactcatggcagtcgagcacgtctgccgcaaggaccctaaggttattgagcagtgtgtgctgagtggtgtacctgaagaagacatgcacaaggtgtattgcgacccttggaccattggctatgacgagcgacacggcaaccaagttcgtctgcagcaggcattgatgtactatcggccgaatctggatgattgccagtatcagtacccgctagacttctgcccgatctacgacgctgagaaggaagagattatcgatattgatatccccaaggttcgcagacccgtgagtaaggcatcggctatcaactatacccctccctatgtcgaggcaaatggcggttatcgaaaagctttgaagcctatcaacatttcccaacccgagggtgtagagttcaacatgacaggcagggaaattgagtggcagaattggaaatttcatatcggtttcaactaccgggagggtattgtgctcaacaacatcaccttcaatgacaagggcaatgttcggtctatattttaccgactgtcgctcgcagagatggttgtaccttacggaaaccccgagcacccccaccagcgcaagcatgctttcgatctcggcgaatacggcgctggctacatgactaacagtctatccctgggatgcgactgcaagggttcaatccactacctcgatgccgagttcccaactcgcgccggcggtatccgcacgatcaagaacgcgatctgcatccacgaggaagacgacggcattttgttcaagcacacggatttcagagatgattcgtcgatcattacgagggctaggaagctgattgtgcagcaaattttcaccgctgccaattacgaatacgctattcagtggattttccaccaagatggcacgatccagcctgagatcaagctcacgggaattctcaatacctatactatggagcctgacgaggacacccacggctggggcacccaggtctacccaggggtaaacgcacacaaccaccagcatctattctgcctgcgcattgacgccaatgtcgacggaccatccaacacagtattcatggcagacgtcgtgccctctgacgcgcccgtcgggtcacctgagaacttctacggcaatgccttttccgccaagcgcacgaaattcagcacagtcggcgagagccagacacactacaatggtgctacgagcaggacatgggatatctgcaacaccaataaggtccacccctactctggcaaaccatctagttacaagctagtcagtagagaggtgccaggcttgttacccaaagagggaggtctcgtgtggaagagagccggtttcgctagacatgctgtcaccgtcacaaaatactccgacgaccaactctggcccgcaggccgacacgtcccacaaacatcaggtgagccctcagtgggcctacccgaatgggtagcagatggcagcgagagtatcgacaataccgacgtcgtgctgtggcacacttttggcgtgacgcacatcccagcacccgaggacttcccagtcatgccccgagagcctatcactttactgctgaggccgagaaacttcttcaccaacaaccctgtgatggacgtgccaccgagtttctgctcgacacctagtcaggtactggctaaagagaaggcgattgtcgatgcggcggataaactgagtacacttgcttttgagggtagtgcttgctgtaagaatgggacgaatgggacgaacggcacgaatggtcattaa

SEQ ID NO: 21708 - protein, 688 aa, Muscodor strobelii
  misc_feature: SGI Peptide ID NO. 567352
  misc_feature (221)..(644): Pfam Id: PF01179 Pfam Desc: Copper amine oxidase, enzyme domain
  misc_feature (9)..(94): Pfam Id: PF02727 Pfam Desc: Copper amine oxidase, N2 domain
  misc_feature (99)..(201): Pfam Id: PF02728 Pfam Desc: Copper amine oxidase, N3 domain
  misc_feature (7)..(688): NCBI GI: 261360676 Blast Desc: peroxisomal copper amine oxidase [Verticillium albo-atrum VaMs.102]
  misc_feature (6)..(686): NCBI GI: 171681584 Blast Desc: protein product [Podospora anserina] gi|170940751|emb|CAP66400.1| protein product [Podospora anserina]
  misc_feature (5)..(678): NCBI GI: 85097614 Blast Desc: peroxisomal copper amine oxidase [Neurospora crassa OR74A] gi|28921972|gb|EAA31244.1| peroxisomal copper amine oxidase [Neurospora crassa OR74A]
  misc_feature (9)..(676): NCBI GI: 145604148 Blast Desc: MGG_10751 [Magnaporthe grisea 70-15] gi|145012208|gb|EDJ96864.1| MGG_10751 [Magnaporthe grisea 70-15]
  misc_feature (7)..(668): NCBI GI: 256725887 Blast Desc: NECHADRAFT_104867 [Nectria haematococca mpVI 77-13-4]
  misc_feature (3)..(675): NCBI GI: 156057719 Blast Desc: SS1G_04591 [Sclerotinia sclerotiorum 1980] gi|154702376|gb|EDO02115.1| SS1G_04591 [Sclerotinia sclerotiorum 1980]
  misc_feature (3)..(656): NCBI GI: 67901308 Blast Desc: AN7641.2 [Aspergillus nidulans FGSC A4] gi|40742637|gb|EAA61827.1| AN7641.2 [Aspergillus nidulans FGSC A4] gi|259483973|tpe|CBF79800.1| TPA: peroxisomal copper amine
  misc_feature (1)..(668): NCBI GI: 115433172 Blast Desc: peroxisomal copper amine oxidase [Aspergillus terreus NIH2624] gi|114189575|gb|EAU31275.1| peroxisomal copper amine oxidase [Aspergillus terreus NIH2624]
  misc_feature (3)..(656): NCBI GI: 70998352 Blast Desc: peroxisomal copper amine oxidase [Aspergillus fumigatus Af293] gi|66851534|gb|EAL91860.1| peroxisomal copper amine oxidase [Aspergillus fumigatus Af293] peroxisomal copper
  misc_feature (3)..(656): NCBI GI: 121712904 Blast Desc: peroxisomal copper amine oxidase [Aspergillus clavatus NRRL 1] gi|119402216|gb|EAW12637.1| peroxisomal copper amine oxidase [Aspergillus clavatus NRRL 1]
  misc_feature (2)..(676): SWISSPROT Homolog: EC 1.4.3.21 Primary-amine oxidase
MVAATELPHPFDPLSQSEIEAAIALVKKAHGDLFFNVVSLHEPRKAEMTKWLADPTTATRPARVADVVVIAPGGKVYDGLVDLATGNISKWELLEGLQPIITMEELMAVEHVCRKDPKVIEQCVLSGVPEEDMHKVYCDPWTIGYDERHGNQVRLQQALMYYRPNLDDCQYQYPLDFCPIYDAEKEEIIDIDIPKVRRPVSKASAINYTPPYVEANGGYRKALKPINISQPEGVEFNMTGREIEWQNWKFHIGFNYREGIVLNNITFNDKGNVRSIFYRLSLAEMVVPYGNPEHPHQRKHAFDLGEYGAGYMTNSLSLGCDCKGSIHYLDAEFPTRAGGIRTIKNAICIHEEDDGILFKHTDFRDDSSIITRARKLIVQQIFTAANYEYAIQWIFHQDGTIQPEIKLTGILNTYTMEPDEDTHGWGTQVYPGVNAHNHQHLFCLRIDANVDGPSNTVFMADVVPSDAPVGSPENFYGNAFSAKRTKFSTVGESQTHYNGATSRTWDICNTNKVHPYSGKPSSYKLVSREVPGLLPKEGGLVWKRAGFARHAVTVTKYSDDQLWPAGRHVPQTSGEPSVGLPEWVADGSESIDNTDVVLWHTFGVTHIPAPEDFPVMPREPITLLLRPRNFFTNNPVMDVPPSFCSTPSQVLAKEKAIVDAADKLSTLAFEGSACCKNGTNGTNGTNGH

SEQ ID NO: 21709 - DNA, 3168 bp, Muscodor strobelii
  misc_feature: SGI EST ID NO. CUFF.50980.0
  misc_feature: Variant of the nucleotide sequence at SEQ ID NO 21707
cgagtgtctagaccctatgggtttcaggctgccaggctctaatatcctatcgaccattacacaggttttactgtatctcgcttcacgcatttcgactgggcagattcacagcccatggtggtcacgctcccgttcgaacggccatgcatgttcgacgcccaaccttggcaccttcaccccatcactcactctgcgacccatgaacaaggaattggctgtgttgcgcagcatccgcggagatgtgtgcccgctgctgtgacttgcatcccattgatcctactacctggccctacatacctactaagctacgtccctatgcgttggataccacagttggtaacgtaatagggagcattgctctctgtcatgatataaacatagcagatatcaatgcgaatatcctaccctttgcaatatggcttcctggcctcggctctcattggctagcgactccgctaatctgatctaatcatgactatccatctctaagctctaaacccaaagatagcagaacagcaccgcgaccatgcacctattgcccgtttcgatccggtttcggtaagtctatgcgggttcatcaccccgcaacaccgccgttggtgtgctgccgggcggggcccttccatcggcgacgcacccctatcgcctcgaattcatgaggggaacacacatggccctgcccagctccagctcccttatcagcattgctgtcgcggatcatgccgctgattggcgatgtgcgacggtatgatacgttcttttccgcggctgcgtgtcggagagcacatttatctataagagcgtccggtgcattcagatgcttcgcgtcgatgtcaactttgaactctaatatataaatcttacaatcctacgccgtgtttctcttctggtggttgctcgttggtcttactcacaatcgtgaattttagaacgtagtatctgagcacaagctatcgccatggtggccgcaacggagctcccccacccctttgaccctctttcccagtctgagatcgaggcggctattgctcttgtcaagaaggcacacggagacctattcttcaatgtcgtgtcactgcatgagccgcgcaaggcggagatgaccaaatggcttgcagatcctacaactgcaactcgccctgccagagtggctgacgtcgttgtgattgcccctggtggtaaagtatatgatggattagtagacctcgctacgggaaacatttcgaaatgggagcttttagagggattacagcccattatcaccatggaagaactcatggcagtcgagcacgtctgccgcaaggaccctaaggttattgagcagtgtgtgctgagtggtgtacctgaagaagacatgcacaaggtgtattgcgacccttggaccattggctatgacgagcgacacggcaaccaagttcgtctgcagcaggcattgatgtactatcggccgaatctggatgattgccagtatcagtacccgctagacttctgcccgatctacgacgctgagaaggaagagattatcgatattgatatccccaaggttcgcagacccgtgagtaaggcatcggctatcaactatacccctccctatgtcgaggcaaatggcggttatcgaaaagctttgaagcctatcaacatttcccaacccgagggtgtagagttcaacatgacaggcagggaaattgagtggcagaattggaaatttcatatcggtttcaactaccgggagggtattgtgctcaacaacatcaccttcaatgacaagggcaatgttcggtctatattttaccgactgtcgctcgcagagatggttgtaccttacggaaaccccgagcacccccaccagcgcaagcatgctttcgatctcggcgaatacggcgctggctacatgactaacagtctatccctgggatgcgactgcaagggttcaatccactacctcgatgccgagttcccaactcgcgccggcggtatccgcacgatcaagaacgcgatctgcatccacgaggaagacgacggcattttgttcaagcacacggatttcagagatgattcgtcgatcattacgagggctaggaagctgattgtgcagcaaattttcaccgctgccaattacgaatacgctattcagtggattttccaccaagatggcacgatccagcctgagatcaagctcacgggaattctcaatacctatactatggagcctgacgaggacacccacggctggggcacccaggtctacccaggggtaaacgcacacaaccaccagcatctattctgcctgcgcattgacgccaatgtcgacggaccatccaacacagtattcatggcagacgtcgtgccctctgacgcgcccgtcgggtcacctgagaacttctacggcaatgccttttccgccaagcgcacgaaattcagcacagtcggcgagagccagacacactacaatggtgctacgagcaggacatgggatatctgcaacaccaataaggtccacccctactctggcaaaccatctagttacaagctagtcagtagagaggtgccaggcttgttacccaaagagggaggtctcgtgtggaagagagccggtttcgctagacatgctgtcaccgtcacaaaatactccgacgaccaactctggcccgcaggccgacacgtcccacaaacatcaggtgagccctcagtgggcctacccgaatgggtagcagatggcagcgagagtatcgacaataccgacgtcgtgctgtggcacacttttggcgtgacgcacatcccagcacccgaggacttcccagtcatgccccgagagcctatcactttactgctgaggccgagaaacttcttcaccaacaaccctgtgatggacgtgccaccgagtttctgctcgacacctagtcaggtactggctaaagagaaggcgattgtcgatgcggcggataaactgagtacacttgcttttgagggtagtgcttgctgtaagaatgggacgaatgggacgaacggcacgaatggtcattaaggggcgcggataggaaatgagaggatgttgtatgtttttatgtatcttgataaatcgtccaaagctctaaatcataccgagtctgttctaaatgcgctcactgtacctctcttcgtttgtcatcagaactaattcaaataaca

SEQ ID NO: 21710 - DNA, 1257 bp, Muscodor strobelii
  misc_feature: SGI cDNA ID NO. 567353
  misc_feature: Encodes the peptide sequence at SEQ ID NO 21711
atgttgtccttgttatccctactcaaccgtagctacacggcactgagcccgcccaaactggagaagaaaaagagcggcaccatcaagtttggcatcctgggtgcagcgaagactgcgcccctctcactgctgattccagcctcgtctcaccctgaagtgatcgttcaggccatcgcagctcgagaccgtacaaaagcggaacaattcgctaagaagcatggaattcctgacgtagcagactcatatcaagcactcctggacgacccaacaatcgacgcaattttcatcccactaccgaacagtttccacttcgaatgggctgtccgctccctccgcgcagggaaacacgtcttactcgagaaaccctccgtatcaaacgccttcgaagccgacctcctcttcaccctccccgagctctcccaaccaaacgccccagtcctactcgaagccttccacaaccgtttccacccagcgatgcacctattccgcaccctcttcaaacccgcagacgtagtacatgtctacgcggagaacatgattccctggtggctgacggcaaaggacaacatcgagttcaactacaatcttgcgggcgggagtatgatgatggtcggtacttacctcttcgccatgctccgcgagtctctcggtagggaaccggaggagtgcctcgagtgcaatactacagtatttcctgacgggcttcatgacaaagccgagtacgcgtttgaggccaagtttcgcttccccgacggcggaattggggaggcaaaaagtacaatgcagggtcctacaatttggagaccttctgagactagggtcactacgagggatgttttggtgcctgatactgagattccggatacgcaagagaagactaggattagaaaagttacgtttcatgggttcatgaatgcagttatttggcatcgaattgatgtcgttgatacgtacaccgtacgggaggtgtcgagtcagaaggttgtcaggcagtggaacgagagtatgtcgtataaggcatatacttacaaggaagctagcatgcatgtggaagtagaggacaaatatgggaatctgccagcagaggattggtggctgtcacatagacaccagctggagcaattcgttaatcggatcaagggccgggaaacatcgtattggattgatgggacggattctatcaatcagatgaagatgctggatatggcgtatgagaagagtggattgggactacgacctactagtacgtttcgctag

SEQ ID NO: 21711 - protein, 418 aa, Muscodor strobelii
  misc_feature: SGI Peptide ID NO. 567353
  misc_feature (28)..(148): Pfam Id: PF01408 Pfam Desc: Oxidoreductase family, NAD-binding Rossmann fold
  misc_feature (28)..(122): Pfam Id: PF01408 Pfam Desc: Oxidoreductase family, NAD-binding Rossmann fold
  misc_feature (4)..(418): NCBI GI: 242779084 Blast Desc: oxidoreductase, [Talaromyces stipitatus ATCC 10500] gi|218722990|gb|EED22408.1| oxidoreductase, [Talaromyces stipitatus ATCC 10500]
  misc_feature (1)..(418): NCBI GI: 67526133 Blast Desc: AN3524.2 [Aspergillus nidulans FGSC A4] gi|40739895|gb|EAA59085.1| AN3524.2 [Aspergillus nidulans FGSC A4] gi|259481961|tpe|CBF75974.1| TPA: NAD binding Rossmann fold
  misc_feature (1)..(418): NCBI GI: 255932579 Blast Desc: Pc12g10220 [Penicillium chrysogenum Wisconsin 54-1255] gi|211582465|emb|CAP80649.1| Pc12g10220 [Penicillium chrysogenum Wisconsin 54-1255]
  misc_feature (4)..(418): NCBI GI: 189196488 Blast Desc: oxidoreductase domain containing protein [Pyrenophora tritici-repentis Pt-1C-BFP] gi|187980461|gb|EDU47087.1| oxidoreductase domain containing protein [Pyrenophora Pt-1C-BFP]
  misc_feature (4)..(417): NCBI GI: 256729502 Blast Desc: NECHADRAFT_84144 [Nectria haematococca mpVI 77-13-4]
  misc_feature (1)..(418): NCBI GI: 145611164 Blast Desc: MGG_11542 [Magnaporthe grisea 70-15] gi|145018479|gb|EDK02758.1| MGG_11542 [Magnaporthe grisea 70-15]
  misc_feature (4)..(417): NCBI GI: 145247152 Blast Desc: An12g07740 [Aspergillus niger] gi|134080556|emb|CAK41224.1| protein product [Aspergillus niger]
  misc_feature (42)..(415): NCBI GI: 169596054 Blast Desc: SNOG_00777 [Phaeosphaeria nodorum SN15] gi|160701219|gb|EAT92272.2| SNOG_00777 [Phaeosphaeria nodorum SN15]
  misc_feature (22)..(415): NCBI GI: 189202430 Blast Desc: oxidoreductase domain containing protein [Pyrenophora tritici-repentis Pt-1C-BFP] gi|187984650|gb|EDU50138.1| oxidoreductase domain containing protein [Pyrenophora Pt-1C-BFP]
  misc_feature (4)..(414): NCBI GI: 212533825 Blast Desc: oxidoreductase, [Penicillium marneffei ATCC 18224] gi|210072433|gb|EEA26522.1| oxidoreductase, [Penicillium marneffei ATCC 18224]
MLSLLSLLNRSYTALSPPKLEKKKSGTIKFGILGAAKTAPLSLLIPASSHPEVIVQAIAARDRTKAEQFAKKHGIPDVADSYQALLDDPTIDAIFIPLPNSFHFEWAVRSLRAGKHVLLEKPSVSNAFEADLLFTLPELSQPNAPVLLEAFHNRFHPAMHLFRTLFKPADVVHVYAENMIPWWLTAKDNIEFNYNLAGGSMMMVGTYLFAMLRESLGREPEECLECNTTVFPDGLHDKAEYAFEAKFRFPDGGIGEAKSTMQGPTIWRPSETRVTTRDVLVPDTEIPDTQEKTRIRKVTFHGFMNAVIWHRIDVVDTYTVREVSSQKVVRQWNESMSYKAYTYKEASMHVEVEDKYGNLPAEDWWLSHRHQLEQFVNRIKGRETSYWIDGTDSINQMKMLDMAYEKSGLGLRPTSTFR

SEQ ID NO: 21712 - DNA, 1374 bp, Muscodor strobelii
  misc_feature: SGI cDNA ID NO. 567354
  misc_feature: Encodes the peptide sequence at SEQ ID NO 21713
atggtaaaactcaaactcgctctcgacacagtcactctgacgctcgacgatgctgcgctcgccagtgttgtactactgtgcgcgacatcaataatcgctggcgattgtgcgtcactggtgacgcactctaacggtttgcgtaacgtaatccgcctctgcgctgggaggagtatttggggccatgatcctcagtgtctatttatcatgactcggattgagcttttcgtctatttgatcgtaggccagaatctcagcatccggccacctctcgcactacatatgccttatggaccgtggtcaacactatttacctgcgtcgagcatcatgacaatatcttaagctttatctgggacatagcagatcatagagtcgcatccgtattcgagtcattgcacttctttgcacacgcggtgaatgagatcgcgtctcatgggcggacactggcggaatctgacgtgcacggcacaattacacttgctcagactcaactcgtacaactggacggcgccctcgacaacatcatttcagaatgtctacggctcacgatgctcgcattcctcgcaaccacgttccagctccgaaacgttaaagtacgactgactcatgctgcaggccggcttcgcggactatgtttagcggtcgaggcgtcaacgccacaactgcaagagcttctgttttggatattaaccataggtgctgtcgtatttttcgatgaagaagaggcttggcttcgagataagtggcaggcggatgtgcttccaactaccaaagatctgcgatgggaccaagcgagggaaatactcaagcgctatgtttggatcgaccggttgatcatggcacagctcttcggagtcgctctcgccctcccgatccccgtgtctctaaacacgacgaatgtcaatgttagcgacgcattccaaaatctcagcagcgctgagatggcgaagctactcccacctctgcccaccgacatcatcgaccctttcagcaaagacttcttcggcacagagtattcaaatgacatactatctaactcatcatccgacgcccttttcaacaccttcgccaatctacccttcatccccgacggacgacaagatcccaaggagagaatccacaccgaactcctatcagagtgctatcgcggatgtttcgacgagaacgcttataattgtgccttcgtccatgacgtgcgagaggcctcagccgaggatttctgtcactacaaactgatcagcacggggaactggatgctgtacagggtctctccttgtattcatgcaaaatgtctggcttgcggacgagaatgcggcgatcagtccaataagtggattgaatatacttgtgggcgtaagaactttctgaaggagtag

SEQ ID NO: 21713 - protein, 457 aa, Muscodor strobelii
  misc_feature: SGI Peptide ID NO. 567354
  misc_feature (3)..(247): NCBI GI: 256730650 Blast Desc: NECHADRAFT_98493 [Nectria haematococca mpVI 77-13-4]
  misc_feature (4)..(275): NCBI GI: 256734956 Blast Desc: NECHADRAFT_75734 [Nectria haematococca mpVI 77-13-4]
  misc_feature (15)..(275): NCBI GI: 46138011 Blast Desc: FG10520.1 [Gibberella zeae PH-1]
  misc_feature (13)..(275): NCBI GI: 256730301 Blast Desc: NECHADRAFT_45111 [Nectria haematococca mpVI 77-13-4]
  misc_feature (4)..(278): NCBI GI: 119479299 Blast Desc: NFIA_077140 [Neosartorya fischeri NRRL 181] gi|119407832|gb|EAW17781.1| NFIA_077140 [Neosartorya fischeri NRRL 181]
  misc_feature (2)..(277): NCBI GI: 256720804 Blast Desc: NECHADRAFT_85486 [Nectria haematococca mpVI 77-13-4]
  misc_feature (17)..(277): NCBI GI: 212529582 Blast Desc: conserved [Penicillium marneffei ATCC 18224] gi|210074346|gb|EEA28433.1| conserved [Penicillium marneffei ATCC 18224]
  misc_feature (4)..(274): NCBI GI: 145256372 Blast Desc: An19g00360 [Aspergillus niger CBS 513.88] gi|134084771|emb|CAK47359.1| protein product [Aspergillus niger]
  misc_feature (20)..(275): NCBI GI: 239611353 Blast Desc: conserved [Ajellomyces dermatitidis ER-3]
  misc_feature (20)..(275): NCBI GI: 261205392 Blast Desc: conserved [Ajellomyces dermatitidis SLH14081] gi|239592492|gb|EEQ75073.1| conserved [Ajellomyces dermatitidis SLH14081]
MVKLKLALDTVTLTLDDAALASVVLLCATSIIAGDCASLVTHSNGLRNVIRLCAGRSIWGHDPQCLFIMTRIELFVYLIVGQNLSIRPPLALHMPYGPWSTLFTCVEHHDNILSFIWDIADHRVASVFESLHFFAHAVNEIASHGRTLAESDVHGTITLAQTQLVQLDGALDNIISECLRLTMLAFLATTFQLRNVKVRLTHAAGRLRGLCLAVEASTPQLQELLFWILTIGAVVFFDEEEAWLRDKWQADVLPTTKDLRWDQAREILKRYVWIDRLIMAQLFGVALALPIPVSLNTTNVNVSDAFQNLSSAEMAKLLPPLPTDIIDPFSKDFFGTEYSNDILSNSSSDALFNTFANLPFIPDGRQDPKERIHTELLSECYRGCFDENAYNCAFVHDVREASAEDFCHYKLISTGNWMLYRVSPCIHAKCLACGRECGDQSNKWIEYTCGRKNFLKE

SEQ ID NO: 21714 - DNA, 963 bp, Muscodor strobelii
  misc_feature: SGI cDNA ID NO. 567355
  misc_feature: Encodes the peptide sequence at SEQ ID NO 21715
atgaccggagaagcgcaatgtcacggagggatacttcctccatacgaccagaggaaagatcctctcattacttgggagatccccagtcaagatgtgaatatcgaagggattccatcctcgcttcaggacagtgcgtcaatcaaagcgagtaacccaatagtacaagaccaaaacagcctcgaacgtgatcttagtaaggacgagctgatatgcagccctcgtcgggcgaacgctcaagtgcaaagatggctaaccaaaaatacagacttgatgttgagcaaattggacgaattggcggtcacaccctcagacgtacgaaaggagattgacacacccattgttgacgacgaaattgtacccctgatcggcaacctgagggaagcggttgacatcaaccgattgttgcgatatgctatatgcaaaaattcattcgcactcgtccagcatctcattgaaaacgaacatgcccacttgatcagtcctgatgtactaggacgatcagctcttcactacgttgttcaagattatccagatggacggctagtgaagtatattgcagatgaggtaggatgtcatatgatggacaaagattcaaagtctgagattctaaagtctcttcgcctgaaagatgcactcggatcggcgctttcgcggcagtgtatggatgccgtggagctttacctcgcactagacacaagctgtgcaatcgaagaaccaggcgaaattccaagatcctggtcgatgcaggcgcttttgagctttcaagagctactttcgagcctatcgaacttcagcattgggggactattgatcaaagagagcagcgagcaactctggtctccgtcagcagatgttgagacgtggaaaagctcattttctcctttatcaggcgacaagctgtcgggtgaccagtctgacgccattcacacccgctacttccagctcaaccaaacaaatgtatga

SEQ ID NO: 21715 - protein, 320 aa, Muscodor strobelii
  misc_feature: SGI Peptide ID NO. 567355
MTGEAQCHGGILPPYDQRKDPLITWEIPSQDVNIEGIPSSLQDSASIKASNPIVQDQNSLERDLSKDELICSPRRANAQVQRWLTKNTDLMLSKLDELAVTPSDVRKEIDTPIVDDEIVPLIGNLREAVDINRLLRYAICKNSFALVQHLIENEHAHLISPDVLGRSALHYVVQDYPDGRLVKYIADEVGCHMMDKDSKSEILKSLRLKDALGSALSRQCMDAVELYLALDTSCAIEEPGEIPRSWSMQALLSFQELLSSLSNFSIGGLLIKESSEQLWSPSADVETWKSSFSPLSGDKLSGDQSDAIHTRYFQLNQTNV

SEQ ID NO: 21716 - DNA, 458 bp, Muscodor strobelii
  misc_feature: SGI EST ID NO. CUFF.51001.0
  misc_feature: Variant of the nucleotide sequence at SEQ ID NO 21714
gcagcatctgagaccccaccccttgtgttgtgaattgtgctcatgcagattaacggaaccttacgaacggcaccccgcactcgatctcacttcatctacttggtatatctttcttccgaaagagaatttcccgagaatttcgctcagttgacaagtttcctattccaccatcaacatgaccggagaagcgcaatgtcacggagggatacttcctccatacgaccagaggaaagatcctctcattacttgggagatccccagtcaagatgtgaatatcgaagggattccatcctcgcttcaggacagtgcgtcaatcaaagcgagtaacccaatagtacaagaccaaaacagcctcgaacgtgatcttaacttgatgttgagcaaattggacgaattggcggtcacaccctcagacgtacgaaaggagattgacacacccattgttgacgacgaaattg

SEQ ID NO: 21717 - DNA, 612 bp, Muscodor strobelii
  misc_feature: SGI cDNA ID NO. 567356
  misc_feature: Encodes the peptide sequence at SEQ ID NO 21718
atggtacagactattctcgatcagcaactcgagattctaacccgttacattagtgacgttgaacaatacaacccagatggcataggctttctggcgagagactttgatacaaaagctcaatggtacgtaacccatactgcagaggaggacgactttgccgagaaatgttgggcaatagtgaaatcctctcgagagacaatcgtgaagtataaagaacaagtggggaaaatagacagggatgcagaaagagttgagagaatgttgcgagataaactgaacctactacgaacgtacgctagcattaacgatgcccggtctagcctagtcttaggcgttgctgtcatcggattcaccgtcgtcaccatcgtttttgcaccattggctttcgttacagcgctcttcgcgctgccaatcgaaaatctcctccagaaccaagtccaattcagcgcggaaggaagggaaccgatgggagcgtatcctgcgcggtacgtagggggctggttcttcgccgctgaacttgtctcgctggtcgtcacagtcgtcaccgtaattgcctcggtatggttggcgaaaaagcgaggcatatctgctggggcattttctcgaaagtga

SEQ ID NO: 21718 - protein, 203 aa, Muscodor strobelii
  misc_feature: SGI Peptide ID NO. 567356
  misc_feature (1)..(200): NCBI GI: 169613761 Blast Desc: SNOG_10013 [Phaeosphaeria nodorum SN15] gi|111061228|gb|EAT82348.1| SNOG_10013 [Phaeosphaeria nodorum SN15]
  misc_feature (1)..(167): NCBI GI: 169615727 Blast Desc: SNOG_11027 [Phaeosphaeria nodorum SN15] gi|160703031|gb|EAT81526.2| SNOG_11027 [Phaeosphaeria nodorum SN15]
  misc_feature (56)..(187): NCBI GI: 169617431 Blast Desc: SNOG_11894 [Phaeosphaeria nodorum SN15] gi|111059818|gb|EAT80938.1| SNOG_11894 [Phaeosphaeria nodorum SN15]
  misc_feature (61)..(183): NCBI GI: 115492215 Blast Desc: conserved [Aspergillus terreus NIH2624] gi|114197595|gb|EAU39295.1| conserved [Aspergillus terreus NIH2624]
  misc_feature (61)..(199): NCBI GI: 145230782 Blast Desc: An01g12480 [Aspergillus niger] gi|134055776|emb|CAK37300.1| protein product [Aspergillus niger]
  misc_feature (61)..(170): NCBI GI: 121701093 Blast Desc: ankyrin repeat protein [Aspergillus clavatus NRRL 1] gi|119396954|gb|EAW07385.1| ankyrin repeat protein [Aspergillus clavatus NRRL 1]
  misc_feature (61)..(183): NCBI GI: 119495022 Blast Desc: ankyrin repeat protein [Neosartorya fischeri NRRL 181] gi|119412469|gb|EAW22410.1| ankyrin repeat protein [Neosartorya fischeri NRRL 181]
  misc_feature (59)..(193): NCBI GI: 46103918 Blast Desc: FG00110.1 [Gibberella zeae PH-1]
  misc_feature (65)..(183): NCBI GI: 256722578 Blast Desc: NECHADRAFT_85371 [Nectria haematococca mpVI 77-13-4]
  misc_feature (61)..(193): NCBI GI: 70996130 Blast Desc: ankyrin repeat protein [Aspergillus fumigatus Af293] gi|66850455|gb|EAL90782.1| ankyrin repeat protein [Aspergillus fumigatus Af293] gi|159131573|gb|EDP56686.1| ankyrin repeat
MVQTILDQQLEILTRYISDVEQYNPDGIGFLARDFDTKAQWYVTHTAEEDDFAEKCWAIVKSSRETIVKYKEQVGKIDRDAERVERMLRDKLNLLRTYASINDARSSLVLGVAVIGFTVVTIVFAPLAFVTALFALPIENLLQNQVQFSAEGREPMGAYPARYVGGWFFAAELVSLVVTVVTVIASVWLAKKRGISAGAFSRK

SEQ ID NO: 21719 - DNA, 785 bp, Muscodor strobelii
  misc_feature: SGI EST ID NO. CUFF.51010.0
  misc_feature: Variant of the nucleotide sequence at SEQ ID NO 21717
ctttgccgagaaatgttgggcaatagtgaaatcctctcgagagacaatcgtgaagtataaagaacaagtggggaaaatagacagggatgcagaaagagttgagagaatgttgcgagataaactgaacctactacgaacgtacgctagcattaacgatgcccggtctagcctagtcttaggcgttgctgtcatcggattcaccgtcgtcaccatcgtttttgcaccattggctttcgttacagcgctcttcgcgctgccaatcgaaaatctcctccagaaccaagtccaattcagcgcggaaggaagggaaccgatgggagcgtatcctgcgcggtacgtagggggctggttcttcgccgctgaacttgtctcgctggtcgtcacagtcgtcaccgtaattgcctcggtatggttggcgaaaaagcgaggcatatctgctggggcattttctcgaaagtgattagaggctaagcggcgactgacgggataagaagttaacttgtatgcgacgacggtcacagaatcgttcgaaagagaccggtgctgatggcctcagcgctctttatgctgcagtaatctgtcatccagggtgtaaggatgtttttcttcaacacacagaaacctgtgtcactgaaactggacactcgtgttgagcttttgcttggtttcggctcgagagatgaacagtttcttatcagtgtcactacgattgatacctatcacaattaccattacgacagacctttagtctatgtcgaaacacgtatctaactactgtaataaat

SEQ ID NO: 21720 - DNA, 1179 bp, Muscodor strobelii
  misc_feature: SGI cDNA ID NO. 567357
  misc_feature: Encodes the peptide sequence at SEQ ID NO 21721
atgtcctccacgttcgacacggctcttacgtgggtgctcagcctgggcccttggtggctggcggcgtacctcctcgccgctgtctacaccaccaacattcactacgcgtggcgcatactcatcttccaacatgtcgatttcccctatctcggcttgccagcatcgacacaagactggatcgccggcgtcgcgatcatcatcatctcgtcggtcttgaagatgatgtttctgggttcctggggctacaccctctggctcacctggttccgggccaccaggtggacgccccgcgtgtcccgcatcccaccgattgcgcaggccagtgacatcctttttgcctctgccctccaggatacgcttccggaggatgtcgtaggatcatatcgtgatgatggtcctgtccggatatgcctgccttgctacgaccacttttgtcactggataaaggtggccgtctacctgcacactctgaagccatatctcagtcttcagatctggctgatcctcgacatcatgttcaccgtcggcatcaccatcaagtctctcgtcgatgcccctgtgatcgtcgccgcccacgtcgcctgtctcctgctggccggtatcgtcattgccctcatcgcaataaacaacttgcagatgcacttggcgcagcaggtgatgcggaacgagacattcgcggagaagaaaatccacgcccttgcgggtggcatcatgtacaaccctcggctgctcgttttcaggatctacagagtcggaccgattgaacaagagattcgcctaaagcacttccccaataagtcaccttgggactacggcactgcggaaaacattcaccataccctcggcaactggtatgagtggccactcttctggattcaaccagctagagtcaagcagtacgaccgtcgcggcgagttcgcgttcaaccaggaagtcactgatcacggcaactacctgttgagacttaccggcgattcaatctccgatggcgggcaccctgctagtcgtgcagggagctccgttcgtcgccgcgagaatcgttcgggttcagccgtcagtatgggctcctcttccagtcgggttagaggaggaccgcgtcggtcggatcggtcgtcatcagggcagtcagcagtggctccacttggttccatggcggaggatgcgggacatggcgtatga

SEQ ID NO: 21721 - protein, 392 aa, Muscodor strobelii
  misc_feature: SGI Peptide ID NO. 567357
MSSTFDTALTWVLSLGPWWLAAYLLAAVYTTNIHYAWRILIFQHVDFPYLGLPASTQDWIAGVAIIIISSVLKMMFLGSWGYTLWLTWFRATRWTPRVSRIPPIAQASDILFASALQDTLPEDVVGSYRDDGPVRICLPCYDHFCHWIKVAVYLHTLKPYLSLQIWLILDIMFTVGITIKSLVDAPVIVAAHVACLLLAGIVIALIAINNLQMHLAQQVMRNETFAEKKIHALAGGIMYNPRLLVFRIYRVGPIEQEIRLKHFPNKSPWDYGTAENIHHTLGNWYEWPLFWIQPARVKQYDRRGEFAFNQEVTDHGNYLLRLTGDSISDGGHPASRAGSSVRRRENRSGSAVSMGSSSSRVRGGPRRSDRSSSGQSAVAPLGSMAEDAGHGV

SEQ ID NO: 21722 - DNA, 1020 bp, Muscodor strobelii
  misc_feature: SGI cDNA ID NO. 567358
  misc_feature: Encodes the peptide sequence at SEQ ID NO 21723
atgtgcatcgccctcgtcaccacggcgcatcccgattatgccctgatcgctatcgacaatcgggacgagtatatcttgagacccaccagccggccccattggtggacccatgaaccatcaggtacccggattctgtctgctcgagacctgcaccgtcaagagcgcggcacgtggatgggcgtgaccagcgccggtcgacttgccatcctcacgaattacagagaatcgcctcgagatgatccggataagaacatcgagggcctgcgtagtcgtggtgttttagcgacggcatggttcagcgctccagcggacgagagcttggacggcttcgtacaaagaatgttagatgaccccaagacgagagctgtcggcggattctctctcatatgtggagacctcaaacccaaagcagatacgggtattgagccgctggcgatcatttcaaatcgatgcgacaaattcgctgaagtgccgcggattggaggacaaaggggtacgacgtacgcattgagcaacaccatctatatcgagcctcctacgtggccgaagatcaaaaatgggaaacgcttattagaggaagcgctacaggatatcggtgaaaaggaattgagcgagaaagagttgattgatcgacttttgacagtcttggataatgacacaatgcctgtcggacccgacgcatcaatgctcgagcatatgaatgctcttcggcattcagtcttcataccggcctttgctgacgagcaaggttggcgcgatatggcagacgctaagaagcgaggtatgggtcagccggcattcgacgaagctggcgatagcaaagagcccaaatccccgccaagaacagatccaacgacaaatttcctcaaaggcgcatacggcactcagaggcagactgtcattcttgttgattgggacggcaacgttacgtatatggaacgttccctctgggatatgcatgggaataagttagaaaacggaaaaggtgaccagatcatcaagtttaagatagatagctaa

SEQ ID NO: 21723 - protein, 339 aa, Muscodor strobelii
  misc_feature: SGI Peptide ID NO. 567358
  misc_feature (1)..(335): Pfam Id: PF05742 Pfam Desc: Domain of function (DUF833)
  misc_feature (1)..(94): Pfam Id: PF05742 Pfam Desc: Domain of function (DUF833)
  misc_feature (1)..(338): NCBI GI: 256733856 Blast Desc: NECHADRAFT_67033 [Nectria haematococca mpVI 77-13-4]
  misc_feature (1)..(338): NCBI GI: 116201901 Blast Desc: CHGG_08835 [Chaetomium globosum CBS 148.51] gi|88177353|gb|EAQ84821.1| CHGG_08835 [Chaetomium globosum CBS 148.51]
  misc_feature (1)..(339): NCBI GI: 261360682 Blast Desc: ser/Thr-rich protein T10 in DGCR region [Verticillium albo-atrum VaMs.102]
  misc_feature (1)..(338): NCBI GI: 46127845 Blast Desc: FG08300.1 [Gibberella zeae PH-1]
  misc_feature (1)..(338): NCBI GI: 85097642 Blast Desc: NCU05525 [Neurospora crassa OR74A] gi|28921979|gb|EAA31251.1| [Neurospora crassa OR74A]
  misc_feature (1)..(338): NCBI GI: 171681602 Blast Desc: protein product [Podospora anserina] gi|170940760|emb|CAP66409.1| protein product [Podospora anserina]
  misc_feature (1)..(338): NCBI GI: 156057715 Blast Desc: SS1G_04589 [Sclerotinia sclerotiorum 1980] gi|154702374|gb|EDO02113.1| SS1G_04589 [Sclerotinia sclerotiorum 1980]
  misc_feature (1)..(338): NCBI GI: 39974909 Blast Desc: MGG_00399 [Magnaporthe grisea 70-15] gi|145018710|gb|EDK02989.1| MGG_00399 [Magnaporthe grisea 70-15]
  misc_feature (1)..(337): NCBI GI: 119480835 Blast Desc: NFIA_085020 [Neosartorya fischeri NRRL 181] gi|119408600|gb|EAW18549.1| conserved [Neosartorya fischeri NRRL 181]
  misc_feature (1)..(337): NCBI GI: 121698989 Blast Desc: DUF833 domain protein [Aspergillus clavatus NRRL 1] gi|119396012|gb|EAW06444.1| DUF833 domain protein [Aspergillus clavatus NRRL 1]
MCIALVTTAHPDYALIAIDNRDEYILRPTSRPHWWTHEPSGTRILSARDLHRQERGTWMGVTSAGRLAILTNYRESPRDDPDKNIEGLRSRGVLATAWFSAPADESLDGFVQRMLDDPKTRAVGGFSLICGDLKPKADTGIEPLAIISNRCDKFAEVPRIGGQRGTTYALSNTIYIEPPTWPKIKNGKRLLEEALQDIGEKELSEKELIDRLLTVLDNDTMPVGPDASMLEHMNALRHSVFIPAFADEQGWRDMADAKKRGMGQPAFDEAGDSKEPKSPPRTDPTTNFLKGAYGTQRQTVILVDWDGNVTYMERSLWDMHGNKLENGKGDQIIKFKIDS

SEQ ID NO: 21724 - DNA, 1552 bp, Muscodor strobelii
  misc_feature: SGI EST ID NO. CUFF.51022.0
  misc_feature: Variant of the nucleotide sequence at SEQ ID NO 21722
cggggatcacgaggtgcgccagccgacctctgccactgcacgccgcgagtaggggcaatcaccgctggcatcagccccagaacccgcgtcttatcccagtcgctggtgctgtctgcccaatgatgccgaagtcgcacttcaccaacattgctgcatgccaggagatgggattctggaagtagtccgccattttcacgctgttcgcaaaaacatcgacagacgtgtcagtcacttattggcttcatcattgagagtcttattattatctcttcgtcttgctgccttactatatgctagctactgaagcactggctgttggaggtccaacgcaacaccgtctggctgcgcagcgcagtccgctacctgcgtctttcattccaaatccattatagatcaaatcaaatcaattacttcaaaagaagtctcctttctcactagtcctacttttgactattctcaattccttctttgatttcactcttcggggtgatctacacatgcagagataatgtgcatcgccctcgtcaccacggcgcatcccgattatgccctgatcgctatcgacaatcgggacgagtatatcttgagacccaccagccggccccattggtggacccatgaaccatcaggtacccggattctgtctgctcgagacctgcaccgtcaagagcgcggcacgtggatgggcgtgaccagcgccggtcgacttgccatcctcacgaattacagagaatcgcctcgagatgatccggataagaacatcgagggcctgcgtagtcgtggtgttttagcgacggcatggttcagcgctccagcggacgagagcttggacggcttcgtacaaagaatgttagatgaccccaagacgagagctgtcggcggattctctctcatatgtggagacctcaaacccaaagcagatacgggtattgagccgctggcgatcatttcaaatcgatgcgacaaattcgctgaagtgccgcggattggaggacaaaggggtacgacgtacgcattgagcaacaccatctatatcgagcctcctacgtggccgaagatcaaaaatgggaaacgcttattagaggaagcgctacaggatatcggtgaaaaggaattgagcgagaaagagttgattgatcgacttttgacagtcttggataatgacacaatgcctgtcggacccgacgcatcaatgctcgagcatatgaatgctcttcggcattcagtcttcataccggcctttgctgacgagcaaggttggcgcgatatggcagacgctaagaagcgaggtatgggtcagccggcattcgacgaagctggcgatagcaaagagcccaaatccccgccaagaacagatccaacgacaaatttcctcaaaggcgcatacggcactcagaggcagactgtcattcttgttgattgggacggcaacgttacgtatatggaacgttccctctgggatatgcatgggaataagttagaaaacggaaaaggtgaccagatcatcaagtttaagatagatagctaattgaaatagtcatgctcaactgtg

SEQ ID NO: 21725 - DNA, 270 bp, Muscodor strobelii
  misc_feature: SGI cDNA ID NO. 567359
  misc_feature: Encodes the peptide sequence at SEQ ID NO 21726
atgcctctcgacaactcgcaagacaagggcgtaaccggcggcgccaagttcgtcactagcactatcggcaacgcagtcggcggcgtcggacgcaccgtcggaaacgtcacaggcgctgctggccgaggcatcggcgacactatcacgagtgcgaccggctctgcgggcaagcctgttggcgacgcgatccacagcttaggccaaggtgtcgagaatggcgcaaatagtgtctcgaagggtgttgagaatgcggggcagtggaagtcttag

SEQ ID NO: 21726 - protein, 89 aa, Muscodor strobelii
  misc_feature: SGI Peptide ID NO. 567359
  misc_feature (1)..(88): NCBI GI: 145241968 Blast Desc: An09g03140 [Aspergillus niger] gi|134078173|emb|CAK40253.1| protein product [Aspergillus niger]
  misc_feature (1)..(88): NCBI GI: 119474287 Blast Desc: NFIA_004810 [Neosartorya fischeri NRRL 181] gi|119407172|gb|EAW17122.1| NFIA_004810 [Neosartorya fischeri NRRL 181]
  misc_feature (1)..(89): NCBI GI: 238489569 Blast Desc: conserved [Aspergillus flavus NRRL3357] gi|220698410|gb|EED54750.1| conserved [Aspergillus flavus NRRL3357]
  misc_feature (1)..(88): NCBI GI: 121711994 Blast Desc: conserved [Aspergillus clavatus NRRL 1] gi|119401764|gb|EAW12186.1| conserved [Aspergillus clavatus NRRL 1]
  misc_feature (1)..(88): NCBI GI: 70986254 Blast Desc: conserved [Aspergillus fumigatus Af293] gi|66846250|gb|EAL86583.1| conserved [Aspergillus fumigatus Af293]
  misc_feature (1)..(88): NCBI GI: 159128236 Blast Desc: conserved [Aspergillus fumigatus A1163]
  misc_feature (1)..(86): NCBI GI: 242798382 Blast Desc: conserved [Talaromyces stipitatus ATCC 10500] gi|218716503|gb|EED15924.1| conserved [Talaromyces stipitatus ATCC 10500]
  misc_feature (5)..(88): NCBI GI: 256726945 Blast Desc: NECHADRAFT_58192 [Nectria haematococca mpVI 77-13-4]
  misc_feature (3)..(88): NCBI GI: 261358653 Blast Desc: conserved [Verticillium albo-atrum VaMs.102]
  misc_feature (11)..(88): NCBI GI: 46136451 Blast Desc: FG09741.1 [Gibberella zeae PH-1]
MPLDNSQDKGVTGGAKFVTSTIGNAVGGVGRTVGNVTGAAGRGIGDTITSATGSAGKPVGDAIHSLGQGVENGANSVSKGVENAGQWKS

SEQ ID NO: 21727 - DNA, 915 bp, Muscodor strobelii
  misc_feature: SGI EST ID NO. CUFF.51031.0
  misc_feature: Variant of the nucleotide sequence at SEQ ID NO 21725
tctccagtaattctaacattctaacagtcattactatcattacaaacaacctacaatcacctcctcaagattctgcatcatcatcagagaatcaagagtcccaccctttaatcaaccaccagccatcaacaaccccgcactctatccctccaaaacaattaacccaccatgcctctcgacaactcgcaagacaagggcgtaaccggcggcgccaagttcgtcactagcactatcggcaacgcagtcggcggcgtcggacgcaccgtcggaaacgtcacaggcgctgctggccgaggcatcggcgacactatcacgagtgcgaccggctctgcgggcaagcctgttggcgacgcgatccacagcttaggccaaggtgtcgagaatggcgcaaatagtgtctcgaagggtgttgagaatgcggggcagtggaagtcttagagaggcagacgaacaaggacaagctggagggcgaaatgcaggagacaggttcatgcctgtaggaaatactgcaggcgagggtacaacaaaatccctacatgtatgaataccccaggccactacagcgacgatgaggaatatgtattgatacgacaggccctacgcaataagatttagagattcatcaaacctataatgttgtattcatattgtcgttgcacttgaagtgaagctaggcatccggatcaatgatagaatagccactaacattgctacatcactattgtaagaagtttggggcaaggtaggggacgcccggggggaaaacatgacagagataggataggtacatacatttttatcggttccaagcctaccgcgacgaatctacacactttttagctggattgccagactttttgccatgtaatcagtcacttttgactgctatcagcagttaaaacagtcgactttacg

SEQ ID NO: 21728 - DNA, 1908 bp, Muscodor strobelii
  misc_feature: SGI cDNA ID NO. 567360
  misc_feature: Reduced expression when VOC is produced
  misc_feature: Encodes the peptide sequence at SEQ ID NO 21729
atggccccattacgggatgcatcgagccccatgtccagtccgcgctcctccaaatcatcaaaatggtcctccgccaagcgcaaactcgatgaatggctcgaccctgtgtggaaaaggtgcaaaaggcttcggcgctcccgatcacagaccccgcctcaagactactcgcagaaacctaaggttgacgggcaggacactaacagcgatcaagtcgcctcagccacgaacatgccaagcacctcccagtctcaacctccagagccaatgatgtcttctgcccacggcgtcgtcgccgatgagccctattcccccgagtcctcaacggagtcatctaccgaccgacataacagcggaacaagtgacgctgcatcagacgcagaggacagccctgacgcaacatcgcccgcggcttccgacaaccaagagcacgacggcgctgttgatgccgacatggacgacgaggaagacgatgatggaggcgatgatggacacggcgacgaagacggcgacgaggacgatgcctctgttgtctgtcccagcgtgacttcgaccgtagaaaatcgccaggagcctgctgttgagctcatcgctagagccacgcagctgatgtatcataagttttggcctatcaaggctgatcactacatcgtttccgagaaattgacctcaggctggtataaccgcgtcatcaaattctccctgtgtcgtcgcaagcctgtgctccttggcgactattcgcccaaatgtgttcctagtgttcaaggtgcacctttctgcgagccagcgccggaatggtatgtcagccaaagaatcgagactatccaggaatgtgtactgcgaatccctcgaggtccagcggagcccaacaaaaatggcaggccacgacctcatttcatggacggacagcatgtcgaccgtgacgcggcaatattgcattttgtgcaagcaaatacgaagatcccagtccctgcggccctaacgcttgacacgtcgcacaacaacatattaggcaccccgtatatgatccaagaattcgtacatggcgagttactggagtacggctatcagcgtttgagtcatgaagatcgctgtcgactcgcaaaagagcttggtgctgtctatcgagagatgctgaacgttcgatcccaagcaccaggccgtgtcgtttcgtcacgaacgcacaagatcctcaatcgagagtccttccgcatcataccgctgtatccgacgtatccggagcagccaagtcgatacagcagtacgaactccaccaattcagtcaaggatgctcttttggagtctatggatgctgtgatgcgtatggacactaacaagaacgggttcacctacttcaaggaggactggaagaagctcaagataatcgtcgaggagatggatgaggatggtctattttccgacgtccacttcagtttatcgcacaacgactttcaaccacacaatatcttgatcaacaggttcgccaacttagatgagcctatcatctcggctgttatcgactgggacaaagcaacactggcacctggttttcttgcttgcgagccgcctttctggctttggggatggcctgacggcgtctgggatgataccttctgggaacgcgaggaggacatggaggacgaccgcatgttggagatcagtgaagccaagacagccaagggcagagagctcaagaccatctttgatacgtctgctgggcccgacttttgtcgctttgcctacagttcacaatatagactggcacggaagttgatggaggttgccacatcgggcttttttgaatgccacgcacgactatggggtgatgtggtcctggaaaaatggccgacagtccgtgcctgcgggtggtctaggatcaacgacgacatttcagataccgactctgagtga

SEQ ID NO: 21729 - protein, 635 aa, Muscodor strobelii
  misc_feature: SGI Peptide ID NO. 567360
  misc_feature (406)..(618): NCBI GI: 169614660 Blast Desc: SNOG_10476 [Phaeosphaeria nodorum SN15] gi|160702794|gb|EAT81870.2| SNOG_10476 [Phaeosphaeria nodorum SN15]
  misc_feature (274)..(635): NCBI GI: 169611542 Blast Desc: SNOG_08885 [Phaeosphaeria nodorum SN15] gi|160702314|gb|EAT84053.2| SNOG_08885 [Phaeosphaeria nodorum SN15]
  misc_feature (178)..(599): NCBI GI: 189203811 Blast Desc: [Pyrenophora tritici-repentis Pt-1C-BFP] gi|187985340|gb|EDU50828.1| [Pyrenophora tritici-repentis Pt-1C-BFP]
  misc_feature (278)..(594): NCBI GI: 256727316 Blast Desc: NECHADRAFT_76073 [Nectria haematococca mpVI 77-13-4]
  misc_feature (190)..(614): NCBI GI: 189203809 Blast Desc: [Pyrenophora tritici-repentis Pt-1C-BFP] gi|187985339|gb|EDU50827.1| [Pyrenophora tritici-repentis Pt-1C-BFP]
  misc_feature (295)..(510): NCBI GI: 154311674 Blast Desc: [Botryotinia fuckeliana B05.10] gi|150850807|gb|EDN26000.1| [Botryotinia fuckeliana B05.10]
  misc_feature (168)..(598): NCBI GI: 189203383 Blast Desc: [Pyrenophora tritici-repentis Pt-1C-BFP] gi|187985126|gb|EDU50614.1| [Pyrenophora tritici-repentis Pt-1C-BFP]
  misc_feature (207)..(392): NCBI GI: 119186053 Blast Desc: [Coccidioides immitis RS]
  misc_feature (308)..(526): NCBI GI: 154299879 Blast Desc: [Botryotinia fuckeliana B05.10] gi|150857110|gb|EDN32302.1| [Botryotinia fuckeliana B05.10]
  misc_feature (465)..(526): NCBI GI: 169602401 Blast Desc: SNOG_04198 [Phaeosphaeria nodorum SN15] gi|111066838|gb|EAT87958.1| SNOG_04198 [Phaeosphaeria nodorum SN15]
  misc_feature: Useful for introducing or modulating the production of volatile compounds
MAPLRDASSPMSSPRSSKSSKWSSAKRKLDEWLDPVWKRCKRLRRSRSQTPPQDYSQKPKVDGQDTNSDQVASATNMPSTSQSQPPEPMMSSAHGVVADEPYSPESSTESSTDRHNSGTSDAASDAEDSPDATSPAASDNQEHDGAVDADMDDEEDDDGGDDGHGDEDGDEDDASVVCPSVTSTVENRQEPAVELIARATQLMYHKFWPIKADHYIVSEKLTSGWYNRVIKFSLCRRKPVLLGDYSPKCVPSVQGAPFCEPAPEWYVSQRIETIQECVLRIPRGPAEPNKNGRPRPHFMDGQHVDRDAAILHFVQANTKIPVPAALTLDTSHNNILGTPYMIQEFVHGELLEYGYQRLSHEDRCRLAKELGAVYREMLNVRSQAPGRVVSSRTHKILNRESFRIIPLYPTYPEQPSRYSSTNSTNSVKDALLESMDAVMRMDTNKNGFTYFKEDWKKLKIIVEEMDEDGLFSDVHFSLSHNDFQPHNILINRFANLDEPIISAVIDWDKATLAPGFLACEPPFWLWGWPDGVWDDTFWEREEDMEDDRMLEISEAKTAKGRELKTIFDTSAGPDFCRFAYSSQYRLARKLMEVATSGFFECHARLWGDVVLEKWPTVRACGWSRINDDISDTDSE

SEQ ID NO: 21730 - DNA, 2388 bp, Muscodor strobelii
  misc_feature: SGI EST ID NO. CUFF.51394.1
  misc_feature: Variant of the nucleotide sequence at SEQ ID NO 21728
gcagcccgtccgactcatctgcatccgcatcccatctgcaacatcatctacctcatttacatgcactcacctcttctaccttgacaccccgccaaggtgcaaggcgcagagtgccgaggcactgtctcacttgcctctgcttctgtctcattactccagcgctctttcctgtactacttcttgcttctactattttcgcgcgcgcctgccccgtcgtcgcatttgctgtccttacctatctataataatcagatcatcgtacatcctcgctctgcagttgccaccattgcgcatcgacgcatcctcttgcattcattcacccacccagcaccacgacggcagcatggccccattacgggatgcatcgagccccatgtccagtccgcgctcctccaaatcatcaaaatggtcctccgccaagcgcaaactcgatgaatggctcgaccctgtgtggaaaaggtgcaaaaggcttcggcgctcccgatcacagaccccgcctcaagactactcgcagaaacctaaggttgacgggcaggacactaacagcgatcaagtcgcctcagccacgaacatgccaagcacctcccagtctcaacctccagagccaatgatgtcttctgcccacggcgtcgtcgccgatgagccctattcccccgagtcctcaacggagtcatctaccgaccgacataacagcggaacaagtgacgctgcatcagacgcagaggacagccctgacgcaacatcgcccgcggcttccgacaaccaagagcacgacggcgctgttgatgccgacatggacgacgaggaagacgatgatggaggcgatgatggacacggcgacgaagacggcgacgaggacgatgcctctgttgtctgtcccagcgtgacttcgaccgtagaaaatcgccaggagcctgctgttgagctcatcgctagagccacgcagctgatgtatcataagttttggcctatcaaggctgatcactacatcgtttccgagaaattgacctcaggctggtataaccgcgtcatcaaattctccctgtgtcgtcgcaagcctgtgctccttggcgactattcgcccaaatgtgttcctagtgttcaaggtgcacctttctgcgagccagcgccggaatggtatgtcagccaaagaatcgagactatccaggaatgtgtactgcgaatccctcgaggtccagcggagcccaacaaaaatggcaggccacgacctcatttcatggacggacagcatgtcgaccgtgacgcggcaatattgcattttgtgcaagcaaatacgaagatcccagtccctgcggccctaacgcttgacacgtcgcacaacaacatattaggcaccccgtatatgatccaagaattcgtacatggcgagttactggagtacggctatcagcgtttgagtcatgaagatcgctgtcgactcgcaaaagagcttggtgctgtctatcgagagatgctgaacgttcgatcccaagcaccaggccgtgtcgtttcgtcacgaacgcacaagatcctcaatcgagagtccttccgcatcataccgctgtatccgacgtatccggagcagccaagtcgatacagcagtacgaactccaccaattcagtcaaggatgctcttttggagtctatggatgctgtgatgcgtatggacactaacaagaacgggttcacctacttcaaggaggactggaagaagctcaagataatcgtcgaggagatggatgaggatggtctattttccgacgtccacttcagtttatcgcacaacgactttcaaccacacaatatcttgatcaacaggttcgccaacttagatgagcctatcatctcggctgttatcgactgggacaaagcaacactggcacctggttttcttgcttgcgagccgcctttctggctttggggatggcctgacggcgtctgggatgataccttctgggaacgcgaggaggacatggaggacgaccgcatgttggagatcagtgaagccaagacagccaagggcagagagctcaagaccatctttgatacgtctgctgggcccgacttttgtcgctttgcctacagttcacaatatagactggcacggaagttgatggaggttgccacatcgggcttttttgaatgccacgcacgactatggggtgatgtggtcctggaaaaatggccgacagtccgtgcctgcgggtggtctaggatcaacgacgacatttcagataccgactctgagtgaaaaaaatggaggaaagaccaaacgaggcgcaccaaaaaatagatgggactccaaaccccggctattagtgattacccctgtcactactatatagaagcatatatttaatcgaattaattgtaaaatttcgccgcaaa

SEQ ID NO: 21731 - DNA, 294 bp, Muscodor strobelii
  misc_feature: SGI cDNA ID NO. 567361
  misc_feature: Encodes the peptide sequence at SEQ ID NO 21732
atgccaaccctggtcaagggtgcaacgcgcccttcgcatcactgtccgcttgcctccaaaggcaactgcgttagaaataagaaggagcaattttgtgccacacatcagactgaagagatgcctaagcaaaggcttgcaaaggagcagcaaaaggtcaaggagaaggcaatggacgaagcattgcgggccaagaagatggcaccaaaacctggacagaagggctaccgtaagcccagcggaaaagagaacgaagattttgacaacgagaagaagaagaagcgtcatgggaattaa

SEQ ID NO: 21732 - protein, 97 aa, Muscodor strobelii
  misc_feature: SGI Peptide ID NO. 567361
MPTLVKGATRPSHHCPLASKGNCVRNKKEQFCATHQTEEMPKQRLAKEQQKVKEKAMDEALRAKKMAPKPGQKGYRKPSGKENEDFDNEKKKKRHGN

SEQ ID NO: 21733 - DNA, 615 bp, Muscodor strobelii
  misc_feature: SGI cDNA ID NO. 567362
  misc_feature: Encodes the peptide sequence at SEQ ID NO 21734
atgactgctcccagtcaccaggacgaagcagacaagcgcctatggcagtctggaatggtttcagatataaccttgcgctgtggttccaaggtatggaagctacataaggcaatcatcgtctcccgtgtcgcaactttgtctatgcttgctcgtagcgagggtccggatggcattcgtgagatccgataccacgatgccgatgctattggttggatgctagagtgggtgtacaccaaagatgtgtcgattgcttctcttggagctcgtcatggcagactcgatgctttcgtccgactgtttcgcattggagagcttttaaacctcgagaagatgtgcgacttctgtgttgacaatctcaaggagctcttatcatcggccgctacttgccagcttccacgtcctcaaggcaacggacgacttctcggagaagaggaactgagcggagtcatcattgcgatcaccagcgcatacgaacacggcaacggccgtatcacctcgctcttcaagagattcgtcattgaaagcaagcttctacgcgatccgaagtttgttgcaagggcaagagctatccttccattctggagtgagatatctacggatttcttcggcaagtag

SEQ ID NO: 21734 - protein, 204 aa, Muscodor strobelii
  misc_feature: SGI Peptide ID NO. 567362
  misc_feature (10)..(184): NCBI GI: 171680598 Blast Desc: protein product [Podospora anserina] gi|170939926|emb|CAP65152.1| protein product [Podospora anserina]
  misc_feature (10)..(137): NCBI GI: 85079439 Blast Desc: NCU05044 [Neurospora crassa OR74A] gi|28917412|gb|EAA27116.1| [Neurospora crassa OR74A]
  misc_feature (1)..(119): NCBI GI: 262096157 Blast Desc: conserved [Phytophthora infestans T30-4]
MTAPSHQDEADKRLWQSGMVSDITLRCGSKVWKLHKAIIVSRVATLSMLARSEGPDGIREIRYHDADAIGWMLEWVYTKDVSIASLGARHGRLDAFVRLFRIGELLNLEKMCDFCVDNLKELLSSAATCQLPRPQGNGRLLGEEELSGVIIAITSAYEHGNGRITSLFKRFVIESKLLRDPKFVARARAILPFWSEISTDFFGK

SEQ ID NO: 21735 - DNA, 1635 bp, Muscodor strobelii
  misc_feature: SGI cDNA ID NO. 567363
  misc_feature: Encodes the peptide sequence at SEQ ID NO 21736
atgtcacgatctaatcattcctcagaagccaagccttctggctcacgctctgctgatgaaccgaacaatgtgcctgacacagttgatgagacaggtcaaagaccgacagcccgattgaggttctgggttatcatattgtccctgagcctacttggtttcatctcagcccttgatgtcaccatcattcctcctgctcttcctactatcgtcgctgatattggagggcctacccaatatacttggattgcgaacgtgtttgtacttgcgtcctccgcattacagcctctttttggacaagtagcgaatcttctcggtcgtaaaatcccaaccatagtgtcaataatccttttcatcctcggcagcgggctcgcagcaggtgctcattcgtcggctcttttgattgctggcagaggcgttcaaggcgtcggcgccggaggcatctatgtgttaattgacatcgtctgctgcgacctggtctcccttcgggaacgtggcaagtatctagccatagttcaagcctggggcggcgtagcagcagcattgggtccggtcatcgggggcgcccttgctgaatataattggcgctggatattctatatcaatttccctatctgcgctttgccgttgcttgccatcgcgttctttatggatgtcgacacggggggtgaccaacaaaagcaaatgggcattgattttctcggtaatctacttttcatcaccagcactgtttccgttctttttgggcttgttacgggagggaacgactatgcatggtcgtcttggcgagtcgttatcgccttggtcttaggtttcgtggggcagatcgcgtttgtcatacaacaatattatgcacgtaacccaagcgtgccactgcgactattcagtaatagaacctccgcagccggatatggactgaacttcttgacatctatcttgctgcaaacggtcggatatttccttccgatatatttccaggcggttttaggtacgacagtgtctgggtctggcatcgcgtttctcccgatcactgttgggacgctcgtttttgcggcatttggcggaataatgatgagtaaatttggggtataccgttcaatccacgctgccgggtgcgcctcttgcattgttggctgcggcttactcacactacttggtcctaggacagagacggtggcctgggtgttttatgaactgattttagctattggacttggtgtaagtgtttcgacgattctgcccgcaatcctcgcagcgttgcctgagtcagatgtggctgctgctagcgccgcattcgccttttgcagatcattcgggtttacctggggtgtcacagcggcatcaattgtcttcaatgctagtttcggccagcatctggatgggatcgttccaagtctgcagcaaatgttgaaagacggaaaagcttactcctttgcaagtcaagctcaccatgccgcaggccagtttagcattgaagagtggagcaaagtggtcgcggcatacactgttagcctgcaagctgtttggtggttcgctctaggagttggtgcatttgcaattttcttgattgtattcgaagaaaatattgagctctcaacaaagctggagacccagtacgggctccgccaaactcgatag

SEQ ID NO: 21736 - protein, 544 aa, Muscodor strobelii
  misc_feature: SGI Peptide ID NO. 567363
  misc_feature (48)..(443): Pfam Id: PF07690 Pfam Desc: Major Facilitator Superfamily
  misc_feature (77)..(151): Pfam Id: PF00083 Pfam Desc: Sugar (and other) transporter
  misc_feature (29)..(544): NCBI GI: 238843713 Blast Desc: conserved [Microsporum canis CBS 113480]
  misc_feature (1)..(544): NCBI GI: 116203899 Blast Desc: CHGG_09833 [Chaetomium globosum CBS 148.51] gi|88175961|gb|EAQ83429.1| CHGG_09833 [Chaetomium globosum CBS 148.51]
  misc_feature (4)..(542): NCBI GI: 238840894 Blast Desc: major facilitator superfamily MFS_1 [Microsporum canis CBS 113480]
  misc_feature (22)..(542): NCBI GI: 242766628 Blast Desc: efflux pump antibiotic resistance protein, [Talaromyces stipitatus ATCC 10500] gi|218724405|gb|EED23822.1| efflux pump antibiotic resistance protein, [Talaromyces ATCC
  misc_feature (10)..(542): NCBI GI: 258569535 Blast Desc: [Uncinocarpus reesii 1704] gi|237903841|gb|EEP78242.1| [Uncinocarpus reesii 1704]
  misc_feature (4)..(529): NCBI GI: 169612658 Blast Desc: SNOG_09453 [Phaeosphaeria nodorum SN15] gi|111061598|gb|EAT82718.1| SNOG_09453 [Phaeosphaeria nodorum SN15]
  misc_feature (19)..(540): NCBI GI: 171679930 Blast Desc: protein product [Podospora anserina] gi|170939591|emb|CAP64818.1| protein product [Podospora anserina]
  misc_feature (8)..(542): NCBI GI: 240109581 Blast Desc: Major Facilitator Superfamily protein [Coccidioides posadasii C735 delta SOWgp]
  misc_feature (2)..(542): NCBI GI: 212538541 Blast Desc: conserved [Penicillium marneffei ATCC 18224] gi|210069168|gb|EEA23259.1| conserved [Penicillium marneffei ATCC 18224]
  misc_feature (4)..(542): NCBI GI: 242789535 Blast Desc: efflux pump antibiotic resistance protein, [Talaromyces stipitatus ATCC 10500] gi|218717967|gb|EED17387.1| efflux pump antibiotic resistance protein, [Talaromyces ATCC
MSRSNHSSEAKPSGSRSADEPNNVPDTVDETGQRPTARLRFWVIILSLSLLGFISALDVTIIPPALPTIVADIGGPTQYTWIANVFVLASSALQPLFGQVANLLGRKIPTIVSIILFILGSGLAAGAHSSALLIAGRGVQGVGAGGIYVLIDIVCCDLVSLRERGKYLAIVQAWGGVAAALGPVIGGALAEYNWRWIFYINFPICALPLLAIAFFMDVDTGGDQQKQMGIDFLGNLLFITSTVSVLFGLVTGGNDYAWSSWRVVIALVLGFVGQIAFVIQQYYARNPSVPLRLFSNRTSAAGYGLNFLTSILLQTVGYFLPIYFQAVLGTTVSGSGIAFLPITVGTLVFAAFGGIMMSKFGVYRSIHAAGCASCIVGCGLLTLLGPRTETVAWVFYELILAIGLGVSVSTILPAILAALPESDVAAASAAFAFCRSFGFTWGVTAASIVFNASFGQHLDGIVPSLQQMLKDGKAYSFASQAHHAAGQFSIEEWSKVVAAYTVSLQAVWWFALGVGAFAIFLIVFEENIELSTKLETQYGLRQTR

SEQ ID NO: 21737 - DNA, 347 bp, Muscodor strobelii
  misc_feature: SGI EST ID NO. CUFF.51067.0
  misc_feature: Variant of the nucleotide sequence at SEQ ID NO 21735
atataattggcgctggatattctatatcaatttccctatctgcgctttgccgttgcttgccatcgcgttctttatggatgtcgacacggggggtgaccaacaaaagcaaatgggcattgattttctcggtaatctacttttcatcaccagcactgtttccgttctttttgggcttgttacgggagggaacgactatgcatggtcgtcttggcgagtcgttatcgccttggtcttaggtttcgtggggcagatcgcgtttgtcatacaacaatattatgcacgtaacccaagcgtgccactgcgactattcagtaatagaacctccgcagccggatatggactgaact

SEQ ID NO: 21738 - DNA, 1089 bp, Muscodor strobelii
  misc_feature: SGI cDNA ID NO. 567364
  misc_feature: Elevated expression when VOC is produced
  misc_feature: Encodes the peptide sequence at SEQ ID NO 21739
atgtccggaattccaggtacgattcttttgacgggggcgaatggagggttgggtagtgctattgtctccaaaattgtgtccacacccaatcttcgccctcattatggtatctactcggtacgaaatgcaaacgaacctaccccaccccttgatgacatcttgaaccgctgcatcttaaagtctgtctcgtctaggccagagcataagtatgagagggcttcactggatctttcaagattagatcgcatacgggaattcgcatcaaatatcaacgaacgtgtgtctgctgggcaaataccgcccatccgagctatcatcctaaatgctggttatgaggagttcctcacgcagacctggacaaatgatggtttggatacaacgtttgcggtcaactacctcgggcactggctcttggttctccttctcctccaaagcatggaccgtgacaatggacgaatagtatggctgagcagtttctctcatgatcctcacgatcgacgaagtaaacttataggatcccataaagcaattgagcaccgaactatcattcatggcagtctggagggaatcgcaagaggtacctggagcccaaatgggcccaagtccaatgcttggagctgggccccgggttatcgccgatatggtgcctccaagttttgcggtgttgtcatgattcacgagcttcaacgccgcattgacaaagatcctacgctaaataatatttccatccttgcaatagatcctggatctatggctacgggtattatcagacgaagcagctcatggtttcttcgtgtcgtcatcttccgcttcctggtgcccgtcatctctttcgtcatgatgcgattcttccccaatggcaattttcgctcagtagagaaatcttctgaagacgtgctgtccgcagcgctccggtcgacaccaccgccactctcggacaagccaaagggactatacttgaatggatcagaacttggtgtttacaatcctgaggctgcagatccagcaaagggagttctggtctgggaaggttccgtccagtattctagactgagtggaaacgaaacaatgttgaagaggtgggaatga

SEQ ID NO: 21739 - protein, 362 aa, Muscodor strobelii
  misc_feature: SGI Peptide ID NO. 567364
  misc_feature (6)..(362): NCBI GI: 212528992 Blast Desc: short-chain dehydrogenase, [Penicillium marneffei ATCC 18224] gi|210074051|gb|EEA28138.1| short-chain dehydrogenase, [Penicillium marneffei ATCC 18224]
  misc_feature (6)..(362): NCBI GI: 242764805 Blast Desc: short-chain dehydrogenase, [Talaromyces stipitatus ATCC 10500] gi|218724042|gb|EED23459.1| short-chain dehydrogenase, [Talaromyces stipitatus ATCC 10500]
  misc_feature (6)..(362): NCBI GI: 242765007 Blast Desc: short-chain dehydrogenase, [Talaromyces stipitatus ATCC 10500] gi|218724083|gb|EED23500.1| short-chain dehydrogenase, [Talaromyces stipitatus ATCC 10500]
  misc_feature (6)..(362): NCBI GI: 212538423 Blast Desc: short-chain dehydrogenase, [Penicillium marneffei ATCC 18224] gi|210069109|gb|EEA23200.1| short-chain dehydrogenase, [Penicillium marneffei ATCC 18224]
  misc_feature (4)..(361): NCBI GI: 39942728 Blast Desc: MGG_03444 [Magnaporthe grisea 70-15] gi|145010010|gb|EDJ94666.1| MGG_03444 [Magnaporthe grisea 70-15]
  misc_feature (6)..(358): NCBI GI: 238840352 Blast Desc: conserved [Microsporum canis CBS 113480]
  misc_feature (22)..(362): NCBI GI: 154323033 Blast Desc: BC1G_00859 [Botryotinia fuckeliana B05.10] gi|150848193|gb|EDN23386.1| BC1G_00859 [Botryotinia fuckeliana B05.10]
  misc_feature (1)..(362): NCBI GI: 46108216 Blast Desc: FG00990.1 [Gibberella zeae PH-1]
  misc_feature (1)..(362): NCBI GI: 256735183 Blast Desc: NECHADRAFT_74766 [Nectria haematococca mpVI 77-13-4]
  misc_feature (4)..(358): NCBI GI: 238842886 Blast Desc: oxidoreductase [Microsporum canis CBS 113480]
  misc_feature (6)..(343): SWISSPROT Homolog: EC 1.3.1.33 Protochlorophyllide reductase
  misc_feature: Useful for introducing or modulating the production of volatile compounds
MSGIPGTILLTGANGGLGSAIVSKIVSTPNLRPHYGIYSVRNANEPTPPLDDILNRCILKSVSSRPEHKYERASLDLSRLDRIREFASNINERVSAGQIPPIRAIILNAGYEEFLTQTWTNDGLDTTFAVNYLGHWLLVLLLLQSMDRDNGRIVWLSSFSHDPHDRRSKLIGSHKAIEHRTIIHGSLEGIARGTWSPNGPKSNAWSWAPGYRRYGASKFCGVVMIHELQRRIDKDPTLNNISILAIDPGSMATGIIRRSSSWFLRVVIFRFLVPVISFVMMRFFPNGNFRSVEKSSEDVLSAALRSTPPPLSDKPKGLYLNGSELGVYNPEAADPAKGVLVWEGSVQYSRLSGNETMLKRWE

SEQ ID NO: 21740 - DNA, 1771 bp, Muscodor strobelii
  misc_feature: SGI EST ID NO. CUFF.51101.1
  misc_feature: Variant of the nucleotide sequence at SEQ ID NO 21738
cggaaggatgcgaacaagttatagaaaacaagcgaatgcaacgtcggtcaatgtagacgattatcgcacgcggtacttacgagtcgcccatttcttgcttctctaccacaccgaaagcaaatgtactgtctcatgtcgcattctggatggctcagcgcagcagattagccaattagaatcaacaatgtacgacgtcgcgtaatcatgccattatgccctcgacgcgaagttgcggttggagcttccccgctgaatttcgcgaaatgttgccaaggaaggtggaaattctccttctgctacacgctcgctcctcagatctctttctcttcctatgcatttgcacctttcatcatgtccggaattccaggtacgattcttttgacgggggcgaatggagggttgggtagtgctattgtctccaaaattgtgtccacacccaatcttcgccctcattatggtatctactcggtacgaaatgcaaacgaacctaccccaccccttgatgacatcttgaaccgctgcatcttaaagtctgtctcgtctaggccagagcataagtatgagagggcttcactggatctttcaagattagatcgcatacgggaattcgcatcaaatatcaacgaacgtgtgtctgctgggcaaataccgcccatccgagctatcatcctaaatgctggttatgaggagttcctcacgcagacctggacaaatgatggtttggatacaacgtttgcggtcaactacctcgggcactggctcttggttctccttctcctccaaagcatggaccgtgacaatggacgaatagtatggctgagcagtttctctcatgatcctcacgatcgacgaagtaaacttataggatcccataaagcaattgagcaccgaactatcattcatggcagtctggagggaatcgcaagaggtacctggagcccaaatgggcccaagtccaatgcttggagctgggccccgggttatcgccgatatggtgcctccaagttttgcggtgttgtcatgattcacgagcttcaacgccgcattgacaaagatcctacgctaaataatatttccatccttgcaatagatcctggatctatggctacgggtattatcagacgaagcagctcatggtttcttcgtgtcgtcatcttccgcttcctggtgcccgtcatctctttcgtcatgatgcgattcttccccaatggcaattttcgctcagtagagaaatcttctgaagacgtgctgtccgcagcgctccggtcgacaccaccgccactctcggacaagccaaagggactatacttgaatggatcagaacttggtgtttacaatcctgaggctgcagatccagcaaagggagttctggtctgggaaggttccgtccagtattctagactgagtggaaacgaaacaatgttgaagaggtgggaatgaggagtccataacaagaaatattcagtgtgcatgggcatatcgcaataatccttacatttctccaacattgaggccgtgtgttttgtacccggtacatataattaaagtcgtgcgaatgttcctctatttcgtactagcatggccagcaacagcagtattattgtttccctcgtgcgaatttaatactggacactgataaatatacccttgttccataactttgtcccgtgagacgaactgtagggtgctaaaattcgattcatattaaaccaatttgaaaccaccaagcacgcgtttggtgaagatctgatgcgggtcgacacgatgcgcg

SEQ ID NO: 21741 - DNA, 1461 bp, Muscodor strobelii
  misc_feature: SGI cDNA ID NO. 567365
  misc_feature: Encodes the peptide sequence at SEQ ID NO 21742
atgtctgtctttctaaacaccagtctagcatgttgccaaactttatcatctttgcttggaagcaaagtatcttatccattgagtgagacttatcagtcgtcgctgaattcttatttctcggcacaggcagcatcccttcacccatcatgcatcgtttcacccagtacggccgaagatgtctctgtagcagtagctgctctagggcgtccagccagtgctacatgccaagggcgtttatgcccgtgccggttttctgtcagatctggagggcacagcagtaatgtaggggcgtctaacatcgacaatggggtagctttagacctcagtgccttggctacaattgaattaagccccgacaaatcggtcgtcagcctcggagtcggcaacacttgggatcaggtctactcctaccttgatccacttggccttggtgttaatggtggccggagcgcaggagttggggttggcggattgagcctcggtggcggtatctcattcttcggtacgcgatatggatggactgctgacgcagtcgttaattttcagctggcactggcgaacgggtctatttgggaggtcaatgagaagtctcatccggaccttaactgggctctacgcggtggaggcaacaatttcggtgtcgtcactcgcatagatatgcagatatttgaaatgtccccgttttggggaggttacttttatcagccaatctcagtttggccggacgcggcacatcaatttgtgaagatcatccaggccaatgactacgacgaatatgcccatttaactctaagtctgggtcttacttcagacgtcggtatcggtgttgcatatggacttgattacacaaaggctggtactaatggcccacctgctctcttcgcagatattcttgcattacctaccttgttcaactcatcgggggtatcaagcatgacccaaaagtcattagaagtgcgagcgcagcagaccgcggacgggtttcggtatgactggtcaaccattactttggtaccaactactgccttactcagcgcagcatacgaatgtttcaataccagcctgcttgatatcgaaacagtagcaaacattacgtggtctcttacttttgagcctcttccacctgccctgtactcccgtcatgctcgcgaaaacccgctcggactggaaaataggagtgttacacttgctgtagctcttttggaagcttcgtggacaagtagtacagatgatgaagctgtgatcaatgcaagtcgagctcttttcgctgcaatcgagcgcagtgcgcaaaggctgcacgtatgggatccgttcgtgtattttaactacgccggcgcatggcaaaatcccattgctcaatacggcgctgaaaatttgagtaggctacgcaggatcgcgcatcgtgtcgacccgcatcagatcttcaccaaacgcgtgcttggtggtttcaaattggtttaa

SEQ ID NO: 21742 - protein, 486 aa, Muscodor strobelii
  misc_feature: SGI Peptide ID NO. 567365
  misc_feature (48)..(194): Pfam Id: PF01565 Pfam Desc: FAD binding domain
  misc_feature (23)..(485): NCBI GI: 154323027 Blast Desc: BC1G_00856 [Botryotinia fuckeliana B05.10] gi|150848190|gb|EDN23383.1| BC1G_00856 [Botryotinia fuckeliana B05.10]
  misc_feature (2)..(485): NCBI GI: 121716172 Blast Desc: oxidoreductase, FAD-binding, [Aspergillus clavatus NRRL 1] gi|119403852|gb|EAW14269.1| oxidoreductase, FAD-binding, [Aspergillus clavatus NRRL 1]
  misc_feature (11)..(485): NCBI GI: 159129835 Blast Desc: oxidoreductase, FAD-binding, [Aspergillus fumigatus A1163]
  misc_feature (11)..(485): NCBI GI: 71002198 Blast Desc: oxidoreductase, FAD-binding [Aspergillus fumigatus Af293] gi|66853418|gb|EAL93742.1| oxidoreductase, FAD-binding, [Aspergillus fumigatus Af293]
  misc_feature (11)..(485): NCBI GI: 119481753 Blast Desc: oxidoreductase, FAD-binding, [Neosartorya fischeri NRRL 181] gi|119409059|gb|EAW19008.1| oxidoreductase, FAD-binding, [Neosartorya fischeri NRRL 181]
  misc_feature (6)..(485): NCBI GI: 238498002 Blast Desc: oxidoreductase, FAD-binding, [Aspergillus flavus NRRL3357] gi|220693510|gb|EED49855.1| oxidoreductase, FAD-binding, [Aspergillus flavus NRRL3357]
  misc_feature (12)..(485): NCBI GI: 242764810 Blast Desc: oxidoreductase, FAD-binding, [Talaromyces stipitatus ATCC 10500] gi|218724043|gb|EED23460.1| oxidoreductase, FAD-binding, [Talaromyces stipitatus ATCC 10500]
  misc_feature (11)..(486): NCBI GI: 242765021 Blast Desc: conserved [Talaromyces stipitatus ATCC 10500] gi|218724086|gb|EED23503.1| conserved [Talaromyces stipitatus ATCC 10500]
  misc_feature (12)..(485): NCBI GI: 242764815 Blast Desc: oxidoreductase, FAD-binding, [Talaromyces stipitatus ATCC 10500] gi|218724044|gb|EED23461.1| oxidoreductase, FAD-binding, [Talaromyces stipitatus ATCC 10500]
  misc_feature (11)..(485): NCBI GI: 212538429 Blast Desc: oxidoreductase, FAD-binding, [Penicillium marneffei ATCC 18224] gi|210069112|gb|EEA23203.1| oxidoreductase, FAD-binding, [Penicillium marneffei ATCC 18224]
MSVFLNTSLACCQTLSSLLGSKVSYPLSETYQSSLNSYFSAQAASLHPSCIVSPSTAEDVSVAVAALGRPASATCQGRLCPCRFSVRSGGHSSNVGASNIDNGVALDLSALATIELSPDKSVVSLGVGNTWDQVYSYLDPLGLGVNGGRSAGVGVGGLSLGGGISFFGTRYGWTADAVVNFQLALANGSIWEVNEKSHPDLNWALRGGGNNFGVVTRIDMQIFEMSPFWGGYFYQPISVWPDAAHQFVKIIQANDYDEYAHLTLSLGLTSDVGIGVAYGLDYTKAGTNGPPALFADILALPTLFNSSGVSSMTQKSLEVRAQQTADGFRYDWSTITLVPTTALLSAAYECFNTSLLDIETVANITWSLTFEPLPPALYSRHARENPLGLENRSVTLAVALLEASWTSSTDDEAVINASRALFAAIERSAQRLHVWDPFVYFNYAGAWQNPIAQYGAENLSRLRRIAHRVDPHQIFTKRVLGGFKLV

SEQ ID NO: 21743 - DNA, 1368 bp, Muscodor strobelii
  misc_feature: SGI cDNA ID NO. 567366
  misc_feature: Encodes the peptide sequence at SEQ ID NO 21744
atgtctgtctttctaaacaccagtctagcatgtgcagcatcccttcacccatcatgcatcgtttcacccagtacggccgaagatgtctctgtagcagtagctgctctagggcgtccagccagtgctacatgccaagggcgtttatgcccgtgccggttttctgtcagatctggagggcacagcagtaatgtaggggcgtctaacatcgacaatggggtagctttagacctcagtgccttggctacaattgaattaagccccgacaaatcggtcgtcagcctcggagtcggcaacacttgggatcaggtctactcctaccttgatccacttggccttggtgttaatggtggccggagcgcaggagttggggttggcggattgagcctcggtggcggtatctcattcttcggtacgcgatatggatggactgctgacgcagtcgttaattttcagctggcactggcgaacgggtctatttgggaggtcaatgagaagtctcatccggaccttaactgggctctacgcggtggaggcaacaatttcggtgtcgtcactcgcatagatatgcagatatttgaaatgtccccgttttggggaggttacttttatcagccaatctcagtttggccggacgcggcacatcaatttgtgaagatcatccaggccaatgactacgacgaatatgcccatttaactctaagtctgggtcttacttcagacgtcggtatcggtgttgcatatggacttgattacacaaaggctggtactaatggcccacctgctctcttcgcagatattcttgcattacctaccttgttcaactcatcgggggtatcaagcatgacccaaaagtcattagaagtgcgagcgcagcagaccgcggacgggtttcggtatgactggtcaaccattactttggtaccaactactgccttactcagcgcagcatacgaatgtttcaataccagcctgcttgatatcgaaacagtagcaaacattacgtggtctcttacttttgagcctcttccacctgccctgtactcccgtcatgctcgcgaaaacccgctcggactggaaaataggagtgttacacttgctgtagctcttttggaagcttcgtggacaagtagtacagatgatgaagctgtgatcaatgcaagtcgagctcttttcgctgcaatcgagcgcagtgcgcaaaggctgcacgtatgggatccgttcgtgtattttaactacgccggcgcatggcaaaatcccattgctcaatacggcgctgaaaatttgagtaggctacgcaggatcgcgcatcgtgtcgacccgcatcagatcttcaccaaacgcgtgcttggtggtttcaaattggtttaa

SEQ ID NO: 21744 - protein, 455 aa, Muscodor strobelii
  misc_feature: SGI Peptide ID NO. 567366
  misc_feature (17)..(163): Pfam Id: PF01565 Pfam Desc: FAD binding domain
  misc_feature (10)..(454): NCBI GI: 154323027 Blast Desc: BC1G_00856 [Botryotinia fuckeliana B05.10] gi|150848190|gb|EDN23383.1| BC1G_00856 [Botryotinia fuckeliana B05.10]
  misc_feature (13)..(454): NCBI GI: 242764810 Blast Desc: oxidoreductase, FAD-binding, [Talaromyces stipitatus ATCC 10500] gi|218724043|gb|EED23460.1| oxidoreductase, FAD-binding, [Talaromyces stipitatus ATCC 10500]
  misc_feature (13)..(454): NCBI GI: 159129835 Blast Desc: oxidoreductase, FAD-binding, [Aspergillus fumigatus A1163]
  misc_feature (13)..(454): NCBI GI: 119481753 Blast Desc: oxidoreductase, FAD-binding, [Neosartorya fischeri NRRL 181] gi|119409059|gb|EAW19008.1| oxidoreductase, FAD-binding, [Neosartorya fischeri NRRL 181]
  misc_feature (13)..(454): NCBI GI: 71002198 Blast Desc: oxidoreductase, FAD-binding [Aspergillus fumigatus Af293] gi|66853418|gb|EAL93742.1| oxidoreductase, FAD-binding, [Aspergillus fumigatus Af293]
  misc_feature (13)..(454): NCBI GI: 121716172 Blast Desc: oxidoreductase, FAD-binding, [Aspergillus clavatus NRRL 1] gi|119403852|gb|EAW14269.1| oxidoreductase, FAD-binding, [Aspergillus clavatus NRRL 1]
  misc_feature (13)..(454): NCBI GI: 238498002 Blast Desc: oxidoreductase, FAD-binding, [Aspergillus flavus NRRL3357] gi|220693510|gb|EED49855.1| oxidoreductase, FAD-binding, [Aspergillus flavus NRRL3357]
  misc_feature (13)..(454): NCBI GI: 242764815 Blast Desc: oxidoreductase, FAD-binding, [Talaromyces stipitatus ATCC 10500] gi|218724044|gb|EED23461.1| oxidoreductase, FAD-binding, [Talaromyces stipitatus ATCC 10500]
  misc_feature (10)..(455): NCBI GI: 242765021 Blast Desc: conserved [Talaromyces stipitatus ATCC 10500] gi|218724086|gb|EED23503.1| conserved [Talaromyces stipitatus ATCC 10500]
  misc_feature (14)..(454): NCBI GI: 212538429 Blast Desc: oxidoreductase, FAD-binding, [Penicillium marneffei ATCC 18224] gi|210069112|gb|EEA23203.1| oxidoreductase, FAD-binding, [Penicillium marneffei ATCC 18224]
MSVFLNTSLACAASLHPSCIVSPSTAEDVSVAVAALGRPASATCQGRLCPCRFSVRSGGHSSNVGASNIDNGVALDLSALATIELSPDKSVVSLGVGNTWDQVYSYLDPLGLGVNGGRSAGVGVGGLSLGGGISFFGTRYGWTADAVVNFQLALANGSIWEVNEKSHPDLNWALRGGGNNFGVVTRIDMQIFEMSPFWGGYFYQPISVWPDAAHQFVKIIQANDYDEYAHLTLSLGLTSDVGIGVAYGLDYTKAGTNGPPALFADILALPTLFNSSGVSSMTQKSLEVRAQQTADGFRYDWSTITLVPTTALLSAAYECFNTSLLDIETVANITWSLTFEPLPPALYSRHARENPLGLENRSVTLAVALLEASWTSSTDDEAVINASRALFAAIERSAQRLHVWDPFVYFNYAGAWQNPIAQYGAENLSRLRRIAHRVDPHQIFTKRVLGGFKLV

SEQ ID NO: 21745 - DNA, 528 bp, Muscodor strobelii
  misc_feature: SGI cDNA ID NO. 567367
  misc_feature: Encodes the peptide sequence at SEQ ID NO 21746
atgtaccgtttcacgtcatatcccgaacacagtcctaaagacgtgaacgggcgggcctatgactatgtcattgtcggaggtggaacagcgggatgtgttgtcgcatcacgcctgtcagaagaccctggcgtgagtgtactcatgcttgagaagggatacgtaagggacaacatgatctcgaaggtgccgctactcagtcagaacttcttcctaggagatgtcttgcaggttcagagcactcgatggtcagagccgatgacgggtgcgaatatgagaaagaaccagctctggaccgcggaaggcatcggtggtgcctcaagactcaatgccatgctatggacacgtggttggtctgcagactatgaagcatggtctgcgaaaggcttcagcaattggagttgggataaagtcgaaccgtttcttcaaaggattgagaatgccgcattccatcgagagtctggctcacgtgggcataatgggcccgttcatctacgccaggataaatatccgttccattggacgtcatag

SEQ ID NO: 21746 - protein, 175 aa, Muscodor strobelii
  misc_feature: SGI Peptide ID NO. 567367
  misc_feature (21)..(52): Pfam Id: PF01266 Pfam Desc: FAD dependent oxidoreductase
  misc_feature (21)..(54): Pfam Id: PF00890 Pfam Desc: FAD binding domain
  misc_feature (20)..(52): Pfam Id: PF00732 Pfam Desc: GMC oxidoreductase
  misc_feature (96)..(163): Pfam Id: PF00732 Pfam Desc: GMC oxidoreductase
  misc_feature (21)..(50): Pfam Id: PF05834 Pfam Desc: Lycopene cyclase protein
  misc_feature (21)..(52): Pfam Id: PF07992 Pfam Desc: Pyridine nucleotide-disulphide oxidoreductase
  misc_feature (6)..(154): NCBI GI: 164424507 Blast Desc: NCU07113 [Neurospora crassa OR74A] gi|157070544|gb|EAA31038.2| [Neurospora crassa OR74A]
  misc_feature (7)..(173): NCBI GI: 145603600 Blast Desc: MGG_13253 [Magnaporthe grisea 70-15] gi|145011808|gb|EDJ96464.1| MGG_13253 [Magnaporthe grisea 70-15]
  misc_feature (7)..(161): NCBI GI: 154318942 Blast Desc: BC1G_02860 [Botryotinia fuckeliana B05.10] gi|150857990|gb|EDN33182.1| BC1G_02860 [Botryotinia fuckeliana B05.10]
  misc_feature (8)..(152): NCBI GI: 171682970 Blast Desc: protein product [Podospora anserina] gi|170941444|emb|CAP67095.1| protein product [Podospora anserina]
  misc_feature (7)..(160): NCBI GI: 261361490 Blast Desc: choline dehydrogenase [Verticillium albo-atrum VaMs.102]
  misc_feature (4)..(146): NCBI GI: 242209141 Blast Desc: GMC oxidoreductase [Postia placenta Mad-698-R] gi|220730589|gb|EED84444.1| GMC oxidoreductase [Postia placenta Mad-698-R]
  misc_feature (7)..(145): NCBI GI: 156040231 Blast Desc: SS1G_12131 [Sclerotinia sclerotiorum 1980] gi|154696188|gb|EDN95926.1| SS1G_12131 [Sclerotinia sclerotiorum 1980]
  misc_feature (1)..(157): NCBI GI: 255936525 Blast Desc: Pc13g08640 [Penicillium chrysogenum Wisconsin 54-1255] gi|211583909|emb|CAP91933.1| Pc13g08640 [Penicillium chrysogenum Wisconsin 54-1255]
  misc_feature (7)..(145): NCBI GI: 154300493 Blast Desc: BC1G_11070 [Botryotinia fuckeliana B05.10] gi|150856595|gb|EDN31787.1| BC1G_11070 [Botryotinia fuckeliana B05.10]
  misc_feature (20)..(164): NCBI GI: 257482662 Blast Desc: glucose-methanol-choline oxidoreductase [Pseudomonas syringae pv. tabaci ATCC 11528]
  misc_feature (20)..(162): SWISSPROT Homolog: EC 1.1.99.32 L-sorbose 1-dehydrogenase
MYRFTSYPEHSPKDVNGRAYDYVIVGGGTAGCVVASRLSEDPGVSVLMLEKGYVRDNMISKVPLLSQNFFLGDVLQVQSTRWSEPMTGANMRKNQLWTAEGIGGASRLNAMLWTRGWSADYEAWSAKGFSNWSWDKVEPFLQRIENAAFHRESGSRGHNGPVHLRQDKYPFHWTS

SEQ ID NO: 21747 - DNA, 759 bp, Muscodor strobelii
  misc_feature: SGI EST ID NO. CUFF.51092.0
  misc_feature: Variant of the nucleotide sequence at SEQ ID NO 21745
gcggtattgagaagtattatgcttccttaaggtaggattctgtagaaaaggtagccccgaggtttcgtagtcgaacgtcggaggctctcacggattacatgaaatgtggcagatcttctctcactcttcatgttgttgccgctcacatctcgtttatattcatgagcctttctagtagcacgatactgttacagtcatgtaccgtttcacgtcatatcccgaacacagtcctaaagacgtgaacgggcgggcctatgactatgtcattgtcggaggtatgctaagtctatgcggagtctaatctttcaactggtccagtctaaggactaacgggattcggagagttataggtggaacagcgggatgtgttgtcgcatcacgcctgtcagaagaccctggcgtgagtgtactcatgcttgagaagggatacgtaagggacaacatgatctcgaaggtgccgctactcagtcagaacttcttcctaggagatgtcttgcaggttcagagcactcgatggtcagagccgatgacgggtgcgaatatgagaaagaaccagctctggaccgcggaaggcatcggtggtgcctcaagactcaatgccatgctatggacacgtggttggtctgcagactatgaagcatggtctgcgaaaggcttcagcaattggagttgggataaagtcgaaccgtttcttcaaaggattgagaatgccgcattccatcgagagtctggctcacgtgggcataatgggcccgttca

SEQ ID NO: 21748 - DNA, 588 bp, Muscodor strobelii
  misc_feature: SGI cDNA ID NO. 567368
  misc_feature: Encodes the peptide sequence at SEQ ID NO 21749
atgtaccgtttcacgtcatatcccgaacacagtcctaaagacgtgaacgggcgggcctatgactatgtcattgtcggaggtggaacagcgggatgtgttgtcgcatcacgcctgtcagaagaccctggcgtgagtgtactcatgcttgagaagggatacgtaagggacaacatgatctcgaaggtgccgctactcagtcagaacttcttcctaggagatgtcttgcaggttcagagcactcgatggtcagagccgatgacgggtgcgaatatgagaaagaaccagctctggaccgcggaaggcatcggtggtgcctcaagactcaatgccatgctatggacacgtggttggtctgcagactatgaagcatggtctgcgaaaggcttcagcaattggagttgggataaagtcgaaccgtttcttcaaaggattgagaatgccgcattccatcgagagtctggctcacgtgggcataatggtatacctttctgtatccttacttattgtcgcaacatactaagatctcgtcattacttagggcccgttcatctacgccaggataaatatccgttccattggacgtcatag

SEQ ID NO: 21749 - protein, 195 aa, Muscodor strobelii
  misc_feature: SGI Peptide ID NO. 567368
  misc_feature (21)..(52): Pfam Id: PF01266 Pfam Desc: FAD dependent oxidoreductase
  misc_feature (21)..(54): Pfam Id: PF00890 Pfam Desc: FAD binding domain
  misc_feature (20)..(52): Pfam Id: PF00732 Pfam Desc: GMC oxidoreductase
  misc_feature (96)..(150): Pfam Id: PF00732 Pfam Desc: GMC oxidoreductase
  misc_feature (21)..(50): Pfam Id: PF05834 Pfam Desc: Lycopene cyclase protein
  misc_feature (21)..(52): Pfam Id: PF07992 Pfam Desc: Pyridine nucleotide-disulphide oxidoreductase
  misc_feature (6)..(154): NCBI GI: 164424507 Blast Desc: NCU07113 [Neurospora crassa OR74A] gi|157070544|gb|EAA31038.2| [Neurospora crassa OR74A]
  misc_feature (7)..(168): NCBI GI: 154318942 Blast Desc: BC1G_02860 [Botryotinia fuckeliana B05.10] gi|150857990|gb|EDN33182.1| BC1G_02860 [Botryotinia fuckeliana B05.10]
  misc_feature (8)..(152): NCBI GI: 171682970 Blast Desc: protein product [Podospora anserina] gi|170941444|emb|CAP67095.1| protein product [Podospora anserina]
  misc_feature (7)..(163): NCBI GI: 145603600 Blast Desc: MGG_13253 [Magnaporthe grisea 70-15] gi|145011808|gb|EDJ96464.1| MGG_13253 [Magnaporthe grisea 70-15]
  misc_feature (7)..(160): NCBI GI: 261361490 Blast Desc: choline dehydrogenase [Verticillium albo-atrum VaMs.102]
  misc_feature (4)..(146): NCBI GI: 242209141 Blast Desc: GMC oxidoreductase [Postia placenta Mad-698-R] gi|220730589|gb|EED84444.1| GMC oxidoreductase [Postia placenta Mad-698-R]
  misc_feature (1)..(157): NCBI GI: 255936525 Blast Desc: Pc13g08640 [Penicillium chrysogenum Wisconsin 54-1255] gi|211583909|emb|CAP91933.1| Pc13g08640 [Penicillium chrysogenum Wisconsin 54-1255]
  misc_feature (7)..(145): NCBI GI: 156040231 Blast Desc: SS1G_12131 [Sclerotinia sclerotiorum 1980] gi|154696188|gb|EDN95926.1| SS1G_12131 [Sclerotinia sclerotiorum 1980]
  misc_feature (7)..(162): NCBI GI: 154300493 Blast Desc: BC1G_11070 [Botryotinia fuckeliana B05.10] gi|150856595|gb|EDN31787.1| BC1G_11070 [Botryotinia fuckeliana B05.10]
  misc_feature (24)..(192): NCBI GI: 242216939 Blast Desc: GMC oxidoreductase [Postia placenta Mad-698-R] gi|220726565|gb|EED80510.1| GMC oxidoreductase [Postia placenta Mad-698-R]
  misc_feature (3)..(158): SWISSPROT Homolog: EC 1.1.99.10 Glucose dehydrogenase (acceptor)
MYRFTSYPEHSPKDVNGRAYDYVIVGGGTAGCVVASRLSEDPGVSVLMLEKGYVRDNMISKVPLLSQNFFLGDVLQVQSTRWSEPMTGANMRKNQLWTAEGIGGASRLNAMLWTRGWSADYEAWSAKGFSNWSWDKVEPFLQRIENAAFHRESGSRGHNGIPFCILTYCRNILRSRHYLGPVHLRQDKYPFHWTS

SEQ ID NO: 21750 - DNA, 351 bp, Muscodor strobelii
  misc_feature: SGI cDNA ID NO. 567369
  misc_feature: Encodes the peptide sequence at SEQ ID NO 21751
atgacggcatcaaccgtcctcacggccctgcctcgcgatgcaagctcagcgctagccactgcaggaggcttcgatcaagacaaggtcgtcgtgcgcttcaaagccatcggtggatcagtgcctcagctgaaacgagaggtctgcaagatcagcgcgacgcagaagtttgaaactgtggtatcctatctccgaaagacgctgtcccttaagccaactgatagcctcttcctctacgtcaatagcgcatttgcaccggcactggatgagatcgttggcaacttgcatcgatgcttcaaagattcgaatgatcagctaatcgtcgcttatgcgattacgcctgcatttgggtga

SEQ ID NO: 21751 - protein, 116 aa, Muscodor strobelii
  misc_feature: SGI Peptide ID NO. 567369
  misc_feature (19)..(116): Pfam Id: PF04110 Pfam Desc: Ubiquitin-like autophagy protein Apg12
  misc_feature (28)..(116): Pfam Id: PF04110 Pfam Desc: Ubiquitin-like autophagy protein Apg12
  misc_feature (1)..(116): NCBI GI: 39974511 Blast Desc: MGG_00598 [Magnaporthe grisea 70-15] gi|71152266|sp|Q51P78.1|ATG12_MAGGR RecName: Full=Autophagy-related protein 12; AltName: ubiquitin-like ATG12
  misc_feature (1)..(116): NCBI GI: 71152267 Blast Desc: MGG_00598 [Magnaporthe grisea 70-15] gi|71152266|sp|Q51P78.1|ATG12_MAGGR RecName: Full=Autophagy-related protein 12; AltName: ubiquitin-like ATG12
  misc_feature (1)..(116): NCBI GI: 261359627 Blast Desc: conserved [Verticillium albo-atrum VaMs.102]
  misc_feature (1)..(116): NCBI GI: 166989545 Blast Desc: conserved [Verticillium albo-atrum VaMs.102]
  misc_feature (1)..(116): NCBI GI: 116202401 Blast Desc: CHGG_09085 [Chaetomium globosum CBS 148.51] gi|88177603|gb|EAQ85071.1| CHGG_09085 [Chaetomium globosum CBS 148.51]
  misc_feature (1)..(116): NCBI GI: 166989543 Blast Desc: CHGG_09085 [Chaetomium globosum CBS 148.51] gi|88177603|gb|EAQ85071.1| CHGG_09085 [Chaetomium globosum CBS 148.51]
  misc_feature (1)..(116): NCBI GI: 171682292 Blast Desc: protein product [Podospora anserina] gi|170941105|emb|CAP66755.1| protein product [Podospora anserina]
  misc_feature (1)..(116): NCBI GI: 169769262 Blast Desc: [Aspergillus oryzae RIB40] gi|238501718|ref|XP_002382093.1| autophagy protein Apg12, [Aspergillus flavus NRRL3357] RecName: Full=Autophagy-related 12;
  misc_feature (1)..(116): NCBI GI: 259487104 Blast Desc: TPA: Autophagy-related protein 12 (Autophagy-related ubiquitin-like modifier atg12) [Source:UniProtKB/Swiss-Prot;Acc:Q5BCH0] [Aspergillus nidulans
  misc_feature (1)..(116): NCBI GI: 159124367 Blast Desc: AFUB_075140 [Aspergillus fumigatus A1163]
MTASTVLTALPRDASSALATAGGFDQDKVVVRFKAIGGSVPQLKREVCKISATQKFETVVSYLRKTLSLKPTDSLFLYVNSAFAPALDEIVGNLHRCFKDSNDQLIVAYAITPAFG

SEQ ID NO: 21752 - DNA, 2227 bp, Muscodor strobelii
  misc_feature: SGI EST ID NO. CUFF.51164.0
  misc_feature: Variant of the nucleotide sequence at SEQ ID NO 21750
cttaattctaacatgtaggacctgcgcctacagcaccccactataaacgataaacaggtggcttgacgcggtagcgaacggaacctagcgggacctagcgactgcccaatcctactgcctgctaacaagaaccaaatgaaaactatctccccacgtgtccaacagataccggtaatcggaaatataaaactctcaccaagttccatgctccgtcaaggcatcatatagcgaaagctaggaaatgcttgccatcctatcatacttctctactaagaatggagtatccagacgtgccttccccatcacggacgccatcgccgatcaatgaccggccggcgtcacctgaactcccactgacgatgacggcatcaaccgtcctcacggccctgcctcgcgatgcaagctcagcgctagccactgcaggaggcttcgatcaagacaaggtcgtcgtgcgcttcaaagccatcggtggatcagtgcctcagctgaaacgagaggtctgcaagatcagcgcgacgcagaagtttgaaactgtggtatcctatctccgaaagacgctgtcccttaagccaactgatagcctcttcctctacgtcaatagcgcatttgcaccggcactggatgagatcgttggcaacttgcatcgatgcttcaaagattcgaatgatcagctaatcgtcgcttatgcgattacgcctgcatttgggtgaatggtcaccaaacctacagatgtctagcatcatgtccgctgctattccaaactccaggcattgccaaaccgctcgaagactggatggcgtgcctaaacaagtctccattctacgcccaattctatgagtgacagacatctatctataggttttcgatttcttttgcaaatgcatccagctcctcttttgcaatggggtatgtgtgctctggagccgggtactgccgactctttacttcgtcacgataggcttcgattgcacgcaggctctcagcccacacatttccgtactgtttgacaaacttgggaatgaagcgcccgggagggaaattgcccgacatgtcgacttgcaccagaacttggccggagcaaccattccctgcaccaatgccgatggtagggacggagagcttcttagtgatgatgctggccacttcagctggcacagcttccaggatcattgcgaagcatcccgcctcttgcactgcgagcgcatcttccaatacgttcatcgcgccctctgatgttttaccttgcacgcgaaagcctcccagcgcattctgtcgctgaggtgtgagcccgacgtgggccactacaggaataccggcttgggtaatcttcttgatagtaggggccatctccttaccgccctccagcttgataccttgaacacggccttcctttatgaaccggatggcggttgtcaacccttgttctggcgatacctcatacgaacccatcggcaggtcgccaatctgttgtttgtcagcctcaagttctctcttgataagtcgacagtcacgtactgtgaatgctcccttggtggcgcgtgcgaccgaccgacagtgaagtagcatttcctcaactaacacctcgcttgtatcctccattcccaaggcgaccatggctaggctatcgcccactaatattatgtccatacccgctgcgtcggcgacatgtgcactggggaagtcatgcgcagtcatcacagtgattggctctcccttcttatgcattgagcgaaggtttagcattgttaccttcctcctcggcggtcccgatgaggtaccgaggggtgaatgcgaactccatcgttgttgagctcgagttagacgctgttgtgagagtagcgacgacaggggcccagcgactgtcgaggttgtggatgtgcatgaccttatgccccgatatagcaataaggcacacgacctcgaacaagtcgacgccatttgtgtggggatttcttgaagggaatgagttaagttgggatgagaatgttttttacttaggaacaaacaagtcagactttgtaataaggaagaattagagttgcggccatttctgtgcgccgttaactcttttatgccgcgatcatgatggtttttgctgcgtacaaatgagtctcaccactaagggttctggggtttaaggcacagcacagtaaatttaggccgtgctatcgtttacgccacatgatcccccctttcgctagcggaaactggcggattttgcttatcc

SEQ ID NO: 21753 - DNA, 744 bp, Muscodor strobelii
  misc_feature: SGI cDNA ID NO. 567370
  misc_feature: Elevated expression when VOC is produced
  misc_feature: Encodes the peptide sequence at SEQ ID NO 21754
atggacataatattagtgggcgatagcctagccatggtcgccttgggaatggaggatacaagcgaggtgttagttgaggaaatgctacttcactgtcggtcggtcgcacgcgccaccaagggagcattcacaattggcgacctgccgatgggttcgtatgaggtatcgccagaacaagggttgacaaccgccatccggttcataaaggaaggccgtgttcaaggtatcaagctggagggcggtaaggagatggcccctactatcaagaagattacccaagccggtattcctgtagtggcccacgtcgggctcacacctcagcgacagaatgcgctgggaggctttcgcgtgcaaggtaaaacatcagagggcgcgatgaacgtattggaagatgcgctcgcagtgcaagaggcgggatgcttcgcaatgatcctggaagctgtgccagctgaagtggccagcatcatcactaagaagctctccgtccctaccatcggcattggtgcagggaatggttgctccggccaagttctggtgcaagtcgacatgtcgggcaatttccctcccgggcgcttcattcccaagtttgtcaaacagtacggaaatgtgtgggctgagagcctgcgtgcaatcgaagcctatcgtgacgaagtaaagagtcggcagtacccggctccagagcacacataccccattgcaaaagaggagctggatgcatttgcaaaagaaatcgaaaacctatag

SEQ ID NO: 21754 - protein, 247 aa, Muscodor strobelii
  misc_feature: SGI Peptide ID NO. 567370
  misc_feature (1)..(227): Pfam Id: PF02548 Pfam Desc: Ketopantoate hydroxymethyltransferase
  misc_feature (2)..(227): Pfam Id: PF02548 Pfam Desc: Ketopantoate hydroxymethyltransferase
  misc_feature (1)..(247): NCBI GI: 171682294 Blast Desc: protein product [Podospora anserina] gi|170941106|emb|CAP66756.1| protein product [Podospora anserina]
  misc_feature (1)..(247): NCBI GI: 46134927 Blast Desc: FG09312.1 [Gibberella zeae PH-1]
  misc_feature (1)..(247): NCBI GI: 256727711 Blast Desc: NECHADRAFT_32780 [Nectria haematococca mpVI 77-13-4]
  misc_feature (1)..(247): NCBI GI: 261359626 Blast Desc: 3-methyl-2-oxobutanoate hydroxymethyltransferase [Verticillium albo-atrum VaMs.102]
  misc_feature (1)..(245): NCBI GI: 39974509 Blast Desc: MGG_00599 [Magnaporthe grisea 70-15] gi|145018497|gb|EDK02776.1| MGG_00599 [Magnaporthe grisea 70-15]
  misc_feature (1)..(247): NCBI GI: 156060279 Blast Desc: SS1G_02278 [Sclerotinia sclerotiorum 1980] gi|154699686|gb|EDN99424.1| SS1G_02278 [Sclerotinia sclerotiorum 1980]
  misc_feature (1)..(247): NCBI GI: 169769264 Blast Desc: [Aspergillus oryzae RIB40] gi|238501720|ref|XP_002382094.1| 3-methyl-2-oxobutanoate hydroxymethyltransferase PanB [Aspergillus flavus NRRL3357] PanB
  misc_feature (1)..(245): NCBI GI: 169607170 Blast Desc: SNOG_06641 [Phaeosphaeria nodorum SN15] gi|111065352|gb|EAT86472.1| SNOG_06641 [Phaeosphaeria nodorum SN15]
  misc_feature (1)..(247): NCBI GI: 154292656 Blast Desc: BC1G_14654 [Botryotinia fuckeliana B05.10] gi|150845868|gb|EDN21061.1| BC1G_14654 [Botryotinia fuckeliana B05.10]
  misc_feature (1)..(240): NCBI GI: 116202399 Blast Desc: CHGG_09084 [Chaetomium globosum CBS 148.51] gi|88177602|gb|EAQ85070.1| CHGG_09084 [Chaetomium globosum CBS 148.51]
  misc_feature (1)..(247): SWISSPROT Homolog: EC 2.1.2.11 3-methyl-2-oxobutanoate hydroxymethyltransferase
  misc_feature: Useful for introducing or modulating the production of volatile compounds
MDIILVGDSLAMVALGMEDTSEVLVEEMLLHCRSVARATKGAFTIGDLPMGSYEVSPEQGLTTAIRFIKEGRVQGIKLEGGKEMAPTIKKITQAGIPVVAHVGLTPQRQNALGGFRVQGKTSEGAMNVLEDALAVQEAGCFAMILEAVPAEVASIITKKLSVPTIGIGAGNGCSGQVLVQVDMSGNFPPGRFIPKFVKQYGNVWAESLRAIEAYRDEVKSRQYPAPEHTYPIAKEELDAFAKEIENL

SEQ ID NO: 21755 - DNA, 2262 bp, Muscodor strobelii
  misc_feature: SGI EST ID NO. CUFF.51165.1
  misc_feature: Variant of the nucleotide sequence at SEQ ID NO 21753
ggataagcaaaatccgccagtttccgctagcgaaaggggggatcatgtggcgtaaacgatagcacggcctaaatttactgtgctgtgccttaaaccccagaacccttagtggtgagactcatttgtacgcagcaaaaaccatcatgatcgcggcataaaagagttaacggcgcacagaaatggccgcaactctaattcttccttattacaaagtctgacttgtttgttcctaagtaaaaaacattctcatcccaacttaactcattcccttcaagaaatccccacacaaatggcgtcgacttgttcgaggtcgtgtgccttattgctatatcggggcataaggtcatgcacatccacaacctcgacagtcgctgggcccctgtcgtcgctactctcacaacagcgtctaactcgagctcaacaacgatggagttcgcattcacccctcggtacctcatcgggaccgccgaggaggaaggtaacaatgctaaaccttcgctcaatgcataagaagggagagccaatcactgtgatgactgcgcatgacttccccagtgcacatgtcgccgacgcagcgggtatggacataatattagtgggcgatagcctagccatggtcgccttgggaatggaggatacaagcgaggtgttagttgaggaaatgctacttcactgtcggtcggtcgcacgcgccaccaagggagcattcacaattggcgacctgccgatgggttcgtatgaggtatcgccagaacaagggttgacaaccgccatccggttcataaaggaaggccgtgttcaaggtatcaagctggagggcggtaaggagatggcccctactatcaagaagattacccaagccggtattcctgtagtggcccacgtcgggctcacacctcagcgacagaatgcgctgggaggctttcgcgtgcaaggtaaaacatcagagggcgcgatgaacgtattggaagatgcgctcgcagtgcaagaggcgggatgcttcgcaatgatcctggaagctgtgccagctgaagtggccagcatcatcactaagaagctctccgtccctaccatcggcattggtgcagggaatggttgctccggccaagttctggtgcaagtcgacatgtcgggcaatttccctcccgggcgcttcattcccaagtttgtcaaacagtacggaaatgtgtgggctgagagcctgcgtgcaatcgaagcctatcgtgacgaagtaaagagtcggcagtacccggctccagagcacacataccccattgcaaaagaggagctggatgcatttgcaaaagaaatcgaaaacctatagatagatgtctgtcactcatagaattgggcgtagaatggagacttgtttaggcacgccatccagtcttcgagcggtttggcaatgcctggagtttggaatagcagcggacatgatgctagacatctgtaggtttggtgaccattcacccaaatgcaggcgtaatcgcataagcgacgattagctgatcattcgaatctttgaagcactatacacaggcgttaattgacatccgtctccgtgcaatcaaaagattattagcgaagagaacataatactagcgatgtgacatactcgatgcaagttgccaacgatctcatccagtgccggtgcaaatgcgctattgacgtagaggaagaggctatcagttggcttaagggacagcgtctttcggagataggataccacagtttcaaacttctgcgtcgcgctgatcttgcagacctctcgtttcagctgaggcactgatccaccgatggctttgaagcgcacgacgaccttgtcttgatcgaagcctcctgcagtggctagcgctgagcttgcatcgcgaggcagggccgtgaggacggttgatgccgtcatcgtcagtgggagttcaggtgacgccggccggtcattgatcggcgatggcgtccgtgatggggaaggcacgtctggatactccattcttagtagagaagtatgataggatggcaagcatttcctagctttcgctatatgatgccttgacggagcatggaacttggtgagagttttatatttccgattaccggtatctgttggacacgtggggagatagttttcatttggttcttgttagcaggcagtaggattgggcagtcgctaggtcccgctaggttccgttcgctaccgcgtcaagccacctgtttatcgtttatagtggggtgctgtaggcgcaggtcctacatgttagaattaag

SEQ ID NO: 21756 - DNA, 1212 bp, Muscodor strobelii
  misc_feature: SGI cDNA ID NO. 567371
  misc_feature: Encodes the peptide sequence at SEQ ID NO 21757
atgttatcgaagtttctgttcttgacgctgctgaagggcgccctagctgcgcgctccttcttaaatgagccggatactgggttcgagcagttctttgccaacgtcagtgaaggcggccttgctgcgttggacaaattggtagggctcccagactttgatgaggcagcgcgtcttcgcctcccgattgagaactacacgtactaccggaacggcgccggcggtgaatggtcctaccggaataatcttgaagtcttcaatcgctatgcaatccgaccgcggatgatgatcgatgtgacggatcttgatgcatccttccccacgacgatattgggtcacaatttctcggtcccgttcttcatcgcaccctgtgcacgcgcagactatggaaatgttgaagcagagaaaggcttggtagaagccgcagcggctgaagatgttctctacattccgtctatttcggccgccctgtcgattgaacagattgcatcctacaagacggaggatcaggttacgtttcagcaagtctatctcaccgcgaatgatactgcaacgaaagagctcttcgaccggattaaggcaagcggttctaaggccatcgtcttcagcgttgattcggcagcaaatggcgatcgccagcgcggtgcacgttacggtgtggccaacacgcgtgagcggagtatactgactgattctcagtgggaatattacaagcgcttgaccacgttcacagacttgccgatcgttttgaaggggatccaaacagtagaagacgcacggcttgctgtgaagcacggcgtgaaggcgatctacctctctaatcacggcgcgcggcagctagacggctctcgctcacccttggaagtcgcaatagaaatcagccaagaagatcccagcatcttcgatgaaatcgaagtttacgcagatggcggtgtccgctacggttctgatatcatcaagttgctttccctcggcgtccgagctgtcggccttggtcgcccttttatgtacgcgaatgtctggggcactgagggtgtgacacaggcgatcaagctattgaagattgaactcagccgcgatgctgcaaatatgggcgttgcaagcctcaaagaggtcagcaaaaccaacgtgagtatatgcctcctgcgcgtacgtcagcagacatttactaactaccgccagttcgtttggttccctaataaccaagcaagctga

SEQ ID NO: 21757 - protein, 403 aa, Muscodor strobelii
  misc_feature: SGI Peptide ID NO. 567371
  misc_feature (56)..(378): Pfam Id: PF01070 Pfam Desc: FMN-dependent dehydrogenase
  misc_feature (237)..(378): Pfam Id: PF01070 Pfam Desc: FMN-dependent dehydrogenase
  misc_feature (56)..(213): Pfam Id: PF01070 Pfam Desc: FMN-dependent dehydrogenase
  misc_feature (1)..(376): NCBI GI: 238506337 Blast Desc: (S)-2-hydroxy-acid oxidase, [Aspergillus flavus NRRL3357] gi|220689083|gb|EED45434.1| (S)-2-hydroxy-acid oxidase, [Aspergillus flavus NRRL3357]
  misc_feature (1)..(376): NCBI GI: 46109298 Blast Desc: FG01531.1 [Gibberella zeae PH-1]
  misc_feature (7)..(376): NCBI GI: 67541783 Blast Desc: AN7055.2 [Aspergillus nidulans FGSC A4] gi|40742511|gb|EAA61701.1| AN7055.2 [Aspergillus nidulans FGSC A4] gi|259483629|tpe|CBF79176.1| TPA: conserved [Aspergillus FGSC
  misc_feature (15)..(376): NCBI GI: 256730789 Blast Desc: [Nectria haematococca mpVI 77-13-4]
  misc_feature (1)..(371): NCBI GI: 256722027 Blast Desc: NECHADRAFT_97036 [Nectria haematococca mpVI 77-13-4]
  misc_feature (26)..(371): NCBI GI: 169785339 Blast Desc: [Aspergillus oryzae RIB40] gi|83775878|dbj|BAE65997.1| protein product [Aspergillus oryzae]
  misc_feature (1)..(377): NCBI GI: 261356928 Blast Desc: cytochrome b2 [Verticillium albo-atrum VaMs.102]
  misc_feature (1)..(376): NCBI GI: 39957328 Blast Desc: MGG_09162 [Magnaporthe grisea 70-15] gi|149210999|ref|XP_001522874.1| MGCH7_ch7g962 [Magnaporthe grisea 70-15] gi|86196917|gb|EAQ71555.1| MGCH7_ch7g962 grisea
  misc_feature (6)..(377): NCBI GI: 261360549 Blast Desc: hydroxyacid oxidase [Verticillium albo-atrum VaMs.102]
  misc_feature (14)..(371): NCBI GI: 189191088 Blast Desc: cytochrome b2, mitochondrial precursor [Pyrenophora tritici-repentis Pt-1C-BFP] gi|187973489|gb|EDU40988.1| cytochrome b2, mitochondrial precursor [Pyrenophora Pt-1C-BFP]
  misc_feature (40)..(384): SWISSPROT Homolog: EC 1.1.2.3 L-lactate dehydrogenase (cytochrome)
MLSKFLFLTLLKGALAARSFLNEPDTGFEQFFANVSEGGLAALDKLVGLPDFDEAARLRLPIENYTYYRNGAGGEWSYRNNLEVFNRYAIRPRMMIDVTDLDASFPTTILGHNFSVPFFIAPCARADYGNVEAEKGLVEAAAAEDVLYIPSISAALSIEQIASYKTEDQVTFQQVYLTANDTATKELFDRIKASGSKAIVFSVDSAANGDRQRGARYGVANTRERSILTDSQWEYYKRLTTFTDLPIVLKGIQTVEDARLAVKHGVKAIYLSNHGARQLDGSRSPLEVAIEISQEDPSIFDEIEVYADGGVRYGSDIIKLLSLGVRAVGLGRPFMYANVWGTEGVTQAIKLLKIELSRDAANMGVASLKEVSKTNVSICLLRVRQQTFTNYRQFVWFPNNQAS

SEQ ID NO: 21758 - DNA, 3071 bp, Muscodor strobelii
  misc_feature: SGI EST ID NO. CUFF.51105.0
  misc_feature: Variant of the nucleotide sequence at SEQ ID NO 21756
cgctcacctgacgacgacattgatcggttattctctttacaattcaagagagaactaatcaccttcatttctgtctgttttttgtcttggcatcatcttaaatgacattggcatgttccgagaatacgagacggaagcactcaattacataataactctgaaagagggaaaatattacataaggtatgatgctctttatattcacttcgcgcttggctcattgacgttatttctactgaatctctgcctagttaatcgtcttacgcaggattcaaatctgcattttcaggttcatcaggtcagtttaaaactcgggcaaaaggtttgacagggatctgtagtcgcctaagccgcagcacggaggagtaccactcgagccactgccacagcgttctaccgctatgaagaacctccacagagcagacgcaggggtaagcctggtatcaatcgtggggtattgacttctgcacccttggtatcatttaggggttctaccatcacttgttggtgcttcatggtcgcccgttcactaggtcggtagtgttattaattaattcagagagtagatgggttatagaatcgtataccagagtgatctgtctcaataatgagatcatcacacgatccaatgcgctgctatggaactgtactgaggtctggccggtcgtacctaatgagagcctgtcggctacctcggcccgcgagtacccaaattgagtggatcgctctgcgaccctgaatcccatcatcgtacttaaagacgaagagacttgctgagatgacaaagtcatccatagaacatgacattgcagaatatttgactggggagaaatagtagtcatataagatgttgagtctccggctgtatcgctggaacattctcacgattcagatcggtcgggaccgaactgttccatcggattagtaagtgtctacattcggttctgaaccacaccgctaaatctcactccaacgatgatcttatgcctataaactacctgttacagctaagagttatatagctacatgcgtaaggttgtattcacaattataatgcctagaaagaaggatcgcaacgtggtcgagataaacattgattgcaaggtttaattatcaaatgttgtgcataatacagggattgatgagcaagtccctgctcaggacctcaaccgcttatgtactgctatgaaaataatggcgcggtatctcgattttcgttttcatccccttgtcgcgcgaatctgcgggtgaatggtcacggacaggccgtcaaaatgttatcgaagtttctgttcttgacgctgctgaagggcgccctagctgcgcgctccttcttaaatgagccggatactgggttcgagcagttctttgccaacgtcagtgaaggcggccttgctgcgttggacaaattggtagggctcccagactttgatgaggcagcgcgtcttcgcctcccgattgagaactacacgtactaccggaacggcgccggcggtgaatggtcctaccggaataatcttgaagtcttcaatcgctatgcaatccgaccgcggatgatgatcgatgtgacggatcttgatgcatccttccccacgacgatattgggtcacaatttctcggtcccgttcttcatcgcaccctgtgcacgcgcagactatggaaatgttgaagcagagaaaggcttggtagaagccgcagcggctgaagatgttctctacattccgtctatttcggccgccctgtcgattgaacagattgcatcctacaagacggaggatcaggttacgtttcagcaagtctatctcaccgcgaatgatactgcaacgaaagagctcttcgaccggattaaggcaagcggttctaaggccatcgtcttcagcgttgattcggcagcaaatggcgatcgccagcgcggtgcacgttacggtgtggccaacacgtaagacttcctctgaaattgacatattgacatatgggtttggtcgcagagtgactgatttggtgatagcgatacatcgtacaccctgattaccgtaggttgatatgcgtggacattgttgtaaggcgtgagcggagtatactgactgattctcagtgggaatattacaagcgcttgaccacgttcacagacttgccgatcgttttgaaggggatccaaacagtagaagacgcacggcttgctgtgaagcacggcgtgaaggcgatctacctctctaatcacggcgcgcggcagctagacggctctcgctcacccttggaagtcgcaatagaaatcagccaagaagatcccagcatcttcgatgaaatcgaagtttacgcagatggcggtgtccgctacggttctgatatcatcaagttgctttccctcggcgtccgagctgtcggccttggtcgcccttttatgtacgcgaatgtctggggcactgagggtgtgacacaggcgatcaagctattgaagattgaactcagccgcgatgctgcaaatatgggcgttgcaagcctcaaagaggtcagcaaaaccaacttcgtttggttccctaataaccaagcaagctgaagcaacttcagcaccttcgatgtttgaaggagaatggggcccaaataatgacgaagcgctgtagacaatcacattataatctaataagaacacaatcatacagcgatttaatatactggcggcgcaaggctgtgttaagttggccttagtgtgcacgatcatcctatctgttgcaagattggcttcgtcacatggcatatctcgtactaaattgagcagatgaattggcagttgagctgcaaaggaatcggtgacagccctctcatagataggcgtttcacctatcgattaatagaccgatagaagccagtttcagagctttagactattgagaattagtgacctaatgcattgaaatgtagatgttttgtgttgtggcttgtggtgatagagaacatggttcgcggtctatcaaaagctcgtgggcaaaatttgacgctggaatagtgaatctaacattgagaaggcacagcgagttagaagcaagagctctgacattaagtacatcgacagg

SEQ ID NO: 21759 - DNA, 1152 bp, Muscodor strobelii
  misc_feature: SGI cDNA ID NO. 567372
  misc_feature: Encodes the peptide sequence at SEQ ID NO 21760
atgttatcgaagtttctgttcttgacgctgctgaagggcgccctagctgcgcgctccttcttaaatgagccggatactgggttcgagcagttctttgccaacgtcagtgaaggcggccttgctgcgttggacaaattggtagggctcccagactttgatgaggcagcgcgtcttcgcctcccgattgagaactacacgtactaccggaacggcgccggcggtgaatggtcctaccggaataatcttgaagtcttcaatcgctatgcaatccgaccgcggatgatgatcgatgtgacggatcttgatgcatccttccccacgacgatattgggtcacaatttctcggtcccgttcttcatcgcaccctgtgcacgcgcagactatggaaatgttgaagcagagaaaggcttggtagaagccgcagcggctgaagatgttctctacattccgtctatttcggccgccctgtcgattgaacagattgcatcctacaagacggaggatcaggttacgtttcagcaagtctatctcaccgcgaatgatactgcaacgaaagagctcttcgaccggattaaggcaagcggttctaaggccatcgtcttcagcgttgattcggcagcaaatggcgatcgccagcgcggtgcacgttacggtgtggccaacaccgatacatcgtacaccctgattacctgggaatattacaagcgcttgaccacgttcacagacttgccgatcgttttgaaggggatccaaacagtagaagacgcacggcttgctgtgaagcacggcgtgaaggcgatctacctctctaatcacggcgcgcggcagctagacggctctcgctcacccttggaagtcgcaatagaaatcagccaagaagatcccagcatcttcgatgaaatcgaagtttacgcagatggcggtgtccgctacggttctgatatcatcaagttgctttccctcggcgtccgagctgtcggccttggtcgcccttttatgtacgcgaatgtctggggcactgagggtgtgacacaggcgatcaagctattgaagattgaactcagccgcgatgctgcaaatatgggcgttgcaagcctcaaagaggtcagcaaaaccaacttcgtttggttccctaataaccaagcaagctga

SEQ ID NO: 21760 - protein, 383 aa, Muscodor strobelii
  misc_feature: SGI Peptide ID NO. 567372
  misc_feature (56)..(377): Pfam Id: PF01070 Pfam Desc: FMN-dependent dehydrogenase
  misc_feature (229)..(377): Pfam Id: PF01070 Pfam Desc: FMN-dependent dehydrogenase
  misc_feature (56)..(213): Pfam Id: PF01070 Pfam Desc: FMN-dependent dehydrogenase
  misc_feature (1)..(379): NCBI GI: 238506337 Blast Desc: (S)-2-hydroxy-acid oxidase, [Aspergillus flavus NRRL3357] gi|220689083|gb|EED45434.1| (S)-2-hydroxy-acid oxidase, [Aspergillus flavus NRRL3357]
  misc_feature (1)..(380): NCBI GI: 46109298 Blast Desc: FG01531.1 [Gibberella zeae PH-1]
  misc_feature (15)..(380): NCBI GI: 256730789 Blast Desc: [Nectria haematococca mpVI 77-13-4]
  misc_feature (7)..(379): NCBI GI: 67541783 Blast Desc: AN7055.2 [Aspergillus nidulans FGSC A4] gi|40742511|gb|EAA61701.1| AN7055.2 [Aspergillus nidulans FGSC A4] gi|259483629|tpe|CBF79176.1| TPA: conserved [Aspergillus FGSC
  misc_feature (1)..(380): NCBI GI: 256722027 Blast Desc: NECHADRAFT_97036 [Nectria haematococca mpVI 77-13-4]
  misc_feature (26)..(369): NCBI GI: 169785339 Blast Desc: [Aspergillus oryzae RIB40] gi|83775878|dbj|BAE65997.1| protein product [Aspergillus oryzae]
  misc_feature (1)..(380): NCBI GI: 261356928 Blast Desc: cytochrome b2 [Verticillium albo-atrum VaMs.102]
  misc_feature (1)..(380): NCBI GI: 39957328 Blast Desc: MGG_09162 [Magnaporthe grisea 70-15] gi|149210999|ref|XP_001522874.1| MGCH7_ch7g962 [Magnaporthe grisea 70-15] gi|86196917|gb|EAQ71555.1| MGCH7_ch7g962 grisea
  misc_feature (6)..(383): NCBI GI: 261360549 Blast Desc: hydroxyacid oxidase [Verticillium albo-atrum VaMs.102]
  misc_feature (14)..(381): NCBI GI: 189191088 Blast Desc: cytochrome b2, mitochondrial precursor [Pyrenophora tritici-repentis Pt-1C-BFP] gi|187973489|gb|EDU40988.1| cytochrome b2, mitochondrial precursor [Pyrenophora Pt-1C-BFP]
  misc_feature (43)..(370): SWISSPROT Homolog: EC 1.1.2.3 L-lactate dehydrogenase (cytochrome)
MLSKFLFLTLLKGALAARSFLNEPDTGFEQFFANVSEGGLAALDKLVGLPDFDEAARLRLPIENYTYYRNGAGGEWSYRNNLEVFNRYAIRPRMMIDVTDLDASFPTTILGHNFSVPFFIAPCARADYGNVEAEKGLVEAAAAEDVLYIPSISAALSIEQIASYKTEDQVTFQQVYLTANDTATKELFDRIKASGSKAIVFSVDSAANGDRQRGARYGVANTDTSYTLITWEYYKRLTTFTDLPIVLKGIQTVEDARLAVKHGVKAIYLSNHGARQLDGSRSPLEVAIEISQEDPSIFDEIEVYADGGVRYGSDIIKLLSLGVRAVGLGRPFMYANVWGTEGVTQAIKLLKIELSRDAANMGVASLKEVSKTNFVWFPNNQAS

SEQ ID NO: 21761 - DNA, 3071 bp, Muscodor strobelii; identical to SEQ ID NO: 21758
  misc_feature: SGI EST ID NO. CUFF.51105.0
  misc_feature: Variant of the nucleotide sequence at SEQ ID NO 21759

SEQ ID NO: 21762 - DNA, 1068 bp, Muscodor strobelii
  misc_feature: SGI cDNA ID NO. 567373
  misc_feature: Encodes the peptide sequence at SEQ ID NO 21763
atgccatcgaaccaagccgcattcattcccgacctgggcaagaccctcgagatccacgagcacgcctatccaacgccaggagacaacgagctcgtcatcgaagcgaagagtatatcactaaacccatgcgactttgcgatgcaaattcacgggccggcgatctttcctatgctcaagtacccttgcctctgcggcgaagacgttgctggagaagtcgtcgaagtcggatctgcagtaaagcacttcaaagtcggtgatcgcgtcgccggaatgtcattgcaaggatttcagaaatatcccgtgcttcctgagtgcacgacgctcaagctcccggatggaatgagcttcgaagaagcgagtgtcatacctcttggcctgtcgacggcggcttcgtgcctatttcatgagaatttcgtcggccttcaattaccgaccactagtacacctactcctactggaaagactatgctcatctggggcggctcgaccagtgttggcagtaatgctatacaactcgcgaccgtggcgggatacgaagtcatttctacatgctcgccgcgcaatttcgagtatgtcaagtcgatgggtgcgagccaagtctttgactactcatcgtctacaatccgagaagacctgatcagcgcgctcaaagacaaaactctcgcgggatgtcttgcgatcggcggaatcggcacagcgatgccttatgaagaagtcgccggacattgcgcggcagtactgcaagcgtcagagggccgcaaattcatggcgactttgaagcctatgaagaatttagctttcgagggtgtcgaggcgaagttctccaatgcgactctggtccgtaatgagcctgagtttgggttgtctgtcttcagatttgtgtccgaagcgcttgctgcgggcacttatcgcgcattgccacgagcggaagtagttggccagggactcgaaggcattcagggtggattggatatcttgaaagctggcgtttcagcgaagaagctgacaattactctcgaatttacgggagattcggacttgatccgtgtaggacaatctagcgtctag

SEQ ID NO: 21763 - protein, 355 aa, Muscodor strobelii
  misc_feature: SGI Peptide ID NO. 567373
  misc_feature (28)..(110): Pfam Id: PF08240 Pfam Desc: Alcohol dehydrogenase GroES-like domain
  misc_feature (28)..(89): Pfam Id: PF08240 Pfam Desc: Alcohol dehydrogenase GroES-like domain
  misc_feature (152)..(220): Pfam Id: PF00107 Pfam Desc: Zinc-binding dehydrogenase
  misc_feature (1)..(339): NCBI GI: 145241714 Blast Desc: An09g01880 [Aspergillus niger] gi|134078043|emb|CAK40126.1| protein product [Aspergillus niger]
  misc_feature (2)..(339): NCBI GI: 242783896 Blast Desc: alcohol dehydrogenase, [Talaromyces stipitatus ATCC 10500] gi|242783902|ref|XP_002480279.1| alcohol dehydrogenase, [Talaromyces stipitatus ATCC 10500] gi|218720425|gb|EED19844.1|
  misc_feature (2)..(339): NCBI GI: 212527480 Blast Desc: zinc-binding oxidoreductase CipB [Penicillium marneffei ATCC 18224] gi|210073295|gb|EEA27382.1| zinc-binding oxidoreductase CipB [Penicillium marneffei ATCC 18224]
  misc_feature (2)..(340): NCBI GI: 119500206 Blast Desc: oxidoreductase, zinc-binding dehydrogenase family superfamily [Neosartorya fischeri NRRL 181] gi|119415025|gb|EAW24963.1| oxidoreductase, zinc-binding family
  misc_feature (1)..(339): NCBI GI: 46124493 Blast Desc: FG06624.1 [Gibberella zeae PH-1]
  misc_feature (2)..(340): NCBI GI: 159125418 Blast Desc: oxidoreductase, zinc-binding dehydrogenase family superfamily [Aspergillus fumigatus A1163]
  misc_feature (2)..(340): NCBI GI: 70993624 Blast Desc: oxidoreductase, zinc-binding dehydrogenase family superfamily [Aspergillus fumigatus Af293] gi|66849293|gb|EAL89621.1| oxidoreductase, zinc-binding family
  misc_feature (2)..(339): NCBI GI: 145253561 Blast Desc: An17g00640 [Aspergillus niger] gi|134083861|emb|CAK42992.1| protein product [Aspergillus niger]
  misc_feature (2)..(339): NCBI GI: 154299623 Blast Desc: BC1G_10774 [Botryotinia fuckeliana B05.10] gi|150857266|gb|EDN32458.1| BC1G_10774 [Botryotinia fuckeliana B05.10]
  misc_feature (4)..(339): NCBI GI: 156030740 Blast Desc: SS1G_14309 [Sclerotinia sclerotiorum 1980] gi|154700700|gb|EDO00439.1| SS1G_14309 [Sclerotinia sclerotiorum 1980]
  misc_feature (14)..(208): SWISSPROT Homolog: EC 1.6.5.5 NADPH:quinone reductase
MPSNQAAFIPDLGKTLEIHEHAYPTPGDNELVIEAKSISLNPCDFAMQIHGPAIFPMLKYPCLCGEDVAGEVVEVGSAVKHFKVGDRVAGMSLQGFQKYPVLPECTTLKLPDGMSFEEASVIPLGLSTAASCLFHENFVGLQLPTTSTPTPTGKTMLIWGGSTSVGSNAIQLATVAGYEVISTCSPRNFEYVKSMGASQVFDYSSSTIREDLISALKDKTLAGCLAIGGIGTAMPYEEVAGHCAAVLQASEGRKFMATLKPMKNLAFEGVEAKFSNATLVRNEPEFGLSVFRFVSEALAAGTYRALPRAEVVGQGLEGIQGGLDILKAGVSAKKLTITLEFTGDSDLIRVGQSSV

SEQ ID NO: 21764 - DNA, 538 bp, Muscodor strobelii
  misc_feature: SGI EST ID NO. CUFF.51110.0
  misc_feature: Variant of the nucleotide sequence at SEQ ID NO 21762
cttgcctctgcggcgaagacgttgctggagaagtcgtcgaagtcggatctgcagtaaagcacttcaaagtcggtgatcgcgtcgccggaatgtcattgcaaggatttcagaaatatcccgtgcttcctgagtgcacgacgctcaagctcccggatggaatgagcttcgaagaagcgagtgtcatacctcttggcctgtcgacggcggcttcgtgcctatttcatgagaatttcgtcggccttcaattaccgaccactagtacacctactcctactggaaagactatgctcatctggggcggctcgaccagtgttggcagtaatgctatacaactcgcgaccgtggcgggatacgaagtcatttctacatgctcgccgcgcaatttcgagtatgtcaagtcgatgggtgcgagccaagtctttgactactcatcgtctacaatccgagaagacctgatcagcgcgctcaaagacaaaactctcgcgggatgtcttgcgatcggcggaatcggcacagcgatgccttatgaagaagtcgc

SEQ ID NO: 21765 - DNA, 861 bp, Muscodor strobelii
  misc_feature: SGI cDNA ID NO. 567374
  misc_feature: Encodes the peptide sequence at SEQ ID NO 21766
atgcgtgctactcatctatcgacaatctttgttgccgctagcggcgtcgccgctgtaccgactttaaatcaagtcgaagctagatcctgcagctcttcattcagaaatatagtcttcaacagcggcgtaaatgatcaacctgacatagcgggtcgattccggaatcttcagtcttatggcgtgtcttcctggattggatttacactagataatgcgcagccaaatgacgacaatctgaatgctaatcaagttcgaatggttgtcactccggacaatgtccaagctggcgtaggcctcgtcacgggtgcttcgcctccttcctaccttcaactacttaatgaacccgatggcggattctatgggcaagctattttaacgccacaacaagcagtcgatgctatacagccccttctggcagcatcaacgacaacacagttcttgtcgccggcaccggcataccccgagtcaacatggctgccggatttctttacagcatgcaactgcgccgataggttctccgtgatcctggcgcatatctacaacacggatcccaacggcgccatcagtgcaatccagacagtgatgaaccagtttcccggaaagactatctggatcaccgagatctctcctgcgagtagtgcagatcaaggctgtacgcttgacgaagccggtatgattaactggatgaatactgtgcttggctgggcatcacaacagcctgtaattgagcgcgtcttttggaattcgggagaatatggcacattgtatcccgacaaccccggtcaatgcaacccgagtcttaccaatacagacgggagcgccaccgcgctgctgcagaactatggttcgatctgtgcatag

SEQ ID NO: 21766 - protein, 286 aa, Muscodor strobelii
  misc_feature: SGI Peptide ID NO. 567374
  misc_feature (112)..(246): NCBI GI: 169861414 Blast Desc: CC1G_01253 [Coprinopsis cinerea okayama7#130] gi|116501362|gb|EAU84257.1| CC1G_01253 [Coprinopsis cinerea okayama7#130]
  misc_feature (99)..(281): NCBI GI: 169863281 Blast Desc: CC1G_04706 [Coprinopsis cinerea okayama7#130] gi|116500555|gb|EAU83450.1| CC1G_04706 [Coprinopsis cinerea okayama7#130]
MRATHLSTIFVAASGVAAVPTLNQVEARSCSSSFRNIVFNSGVNDQPDIAGRFRNLQSYGVSSWIGFTLDNAQPNDDNLNANQVRMVVTPDNVQAGVGLVTGASPPSYLQLLNEPDGGFYGQAILTPQQAVDAIQPLLAASTTTQFLSPAPAYPESTWLPDFFTACNCADRFSVILAHIYNTDPNGAISAIQTVMNQFPGKTIWITEISPASSADQGCTLDEAGMINWMNTVLGWASQQPVIERVFWNSGEYGTLYPDNPGQCNPSLTNTDGSATALLQNYGSICA

SEQ ID NO: 21767 - DNA, 573 bp, Muscodor strobelii
  misc_feature: SGI cDNA ID NO. 567375
  misc_feature: Encodes the peptide sequence at SEQ ID NO 21768
atgcaactttcacttcttatcggcgtcttggcttcagccacggccctggccggtccggtctcgaagctaacaacccgtgatgaccgcggttcatataccgtgtccggcctcggatcccggaagcaggcaatactcggagcgggcggaaacacaatggacctggcaattgccatgctcgagaccgagactatgagcacggactacacttatggtgacggaaagacggaagactccgccaacttcggtcttttcaagcagaactggaggatgctcagagaatgcgcctctatagccgggttcgccggccagacaacggcagactggaacaatggtgctagattgaactctgatatcaatgccgatgttgcttctcgcgacgagtgcttcgattactacggcgcagacaaatggtttggcggtcaccgcaatggcgagaccggccttaacaacccgtacaccgatgatattgcggcatacaggagcggcgtggagtggattcagcagcaaattgaatctaattctgtgtatcaatccgacgatacaaggttttgggttaatgtcacacccatctga

SEQ ID NO: 21768 - protein, 190 aa, Muscodor strobelii
  misc_feature: SGI Peptide ID NO. 567375
  misc_feature (3)..(190): NCBI GI: 67524505 Blast Desc: AN2710.2 [Aspergillus nidulans FGSC A4] gi|40743928|gb|EAA63112.1| [Aspergillus nidulans FGSC A4] gi|259486379|tpe|CBF84169.1| TPA: conserved [Aspergillus nidulans
  misc_feature (1)..(190): NCBI GI: 256720363 Blast Desc: NECHADRAFT_89135 [Nectria haematococca mpVI 77-13-4]
  misc_feature (19)..(190): NCBI GI: 255953683 Blast Desc: Pc21g05480 [Penicillium chrysogenum Wisconsin 54-1255] gi|211589305|emb|CAP95445.1| Pc21g05480 [Penicillium chrysogenum Wisconsin 54-1255]
  misc_feature (19)..(190): NCBI GI: 121715085 Blast Desc: conserved [Aspergillus clavatus NRRL 1] gi|119403308|gb|EAW13726.1| conserved [Aspergillus clavatus NRRL 1]
  misc_feature (3)..(190): NCBI GI: 67541326 Blast Desc: AN6833.2 [Aspergillus nidulans FGSC A4] gi|40739042|gb|EAA58232.1| [Aspergillus nidulans FGSC A4] gi|259480429|tpe|CBF71552.1| TPA: [Aspergillus nidulans FGSC A4]
  misc_feature (1)..(190): NCBI GI: 255933608 Blast Desc: Pc12g13760 [Penicillium chrysogenum Wisconsin 54-1255] gi|211582802|emb|CAP81003.1| Pc12g13760 [Penicillium chrysogenum Wisconsin 54-1255]
  misc_feature (28)..(190): NCBI GI: 121703445 Blast Desc: conserved [Aspergillus clavatus NRRL 1] gi|119398130|gb|EAW08561.1| conserved [Aspergillus clavatus NRRL 1]
  misc_feature (1)..(190): NCBI GI: 115396908 Blast Desc: conserved [Aspergillus terreus NIH2624] gi|114193662|gb|EAU35362.1| conserved [Aspergillus terreus NIH2624]
  misc_feature (20)..(190): NCBI GI: 159124777 Blast Desc: conserved [Aspergillus fumigatus A1163]
  misc_feature (20)..(190): NCBI GI: 146322341 Blast Desc: conserved [Aspergillus fumigatus Af293] gi|129556969|gb|EAL87863.2| conserved [Aspergillus fumigatus Af293]
MQLSLLIGVLASATALAGPVSKLTTRDDRGSYTVSGLGSRKQAILGAGGNTMDLAIAMLETETMSTDYTYGDGKTEDSANFGLFKQNWRMLRECASIAGFAGQTTADWNNGARLNSDINADVASRDECFDYYGADKWFGGHRNGETGLNNPYTDDIAAYRSGVEWIQQQIESNSVYQSDDTRFWVNVTPI

SEQ ID NO: 21769 - DNA, 5016 bp, Muscodor strobelii
  misc_feature: SGI cDNA ID NO. 567376
  misc_feature: Encodes the peptide sequence at SEQ ID NO 21770
atgttacctcacgaaagccttcgcaagatatacgaatggaacaaacacatacctccagcaattgaacctggtgtcatatcgctgattcagacacaatgcgacaaacaaccaaactcggaggcgatatgtgcatgggatggcagtttcacctatcgtgaagtccatgtgctatcttccacgttggcatcccgtttaatcgatgacggagtcaaggcggaagtattcgtcccaatatgtttcgagaaatctaaatggactgccattgctgtcttagcagtcttgaaggctcgcggcgcattcgtgctgttcgacccatctttaccggtcgctcgtctgaagtcgatggtagatcaaataaaggcaaagctcgcgttgtcgtcgcggggatgtcgaaagctgtgtgagtcgcttgtggagaacacacagattattgatcaatcggcaatagacgacatgggaaagcgtatacagctaggtgcgttcccaatgagcagtcccagagacgcggcatacatcatgttcacatctggaacaactggagcaccgaagggtgtaatcgtggagcatctaaatctctcaacgacagccgtctacttcggcaaaacaatgggatatatgcccgggtgcagaaacttacaattcgcatcacatgcattcgatcctattatcaccgatatctttgcgactctggccaatggcggtactttgtgcatcccttccgactgggaacgtgataatgatcttgttggtgcgatgggccggatgcagattacccacttacgcttgacgccttccctcgttggcaatttggtgatagatgatgtcccaagcttgtgtacattgatcctgggcggagaggttgcgcccactcctttggttgaggaatggtcaaaaaagctgaggttggttttagcgtacggaccagctgagtgttgtgtgatctgcttcgcgacggactctagcacacatgtgcctgagcccgcagagcttgggcgccctttcagtgcatgcggatggattgtcaagcaggagaatcctcatgagctggctacagtaggcgacattggcgagctggttattgaagggccaactgttgcgcgaggctgtctcggagatccgatcaggactgacaaatcattccttcaatctcccacctggctaacaagtatgcgcttcaatgagcgttcgcctgatcgactctataggactggtgatcttgcccgacagttagacgatggtaccttcatttatgcgggtagaagcgacagccaagtcaaaattcggggtcagagattggagctggaggaagtagagaggcatctgatcacctcattatcaagtgttccaaatgttcgaggatttcaagtcgttgtagaggccatctctttccccgacacgagcagcaagcacttagttgcacttttgagcttggacactcctagtggcatcggcagtttacactgggaccagcatgagcgtcccgttgtacaaacatctgaacatgaaagagaaaagtttgcagcgattgtgtccgggctggaaatcgagttgaagaagagtcttccgtcttttgctattccttcgctttgggttccaatgcgcaaggttccgttgactgtctcgaagaaagtcgaccggaaactcttgaatcgtattatatgctcactatctatgaaagacatttctttttttgttagaaaaagcacaatcgcagcggacgatgcccagctcgcaaagttcgatcccaagactatcatcctgcgcgacctgtgggctgagatctttcgtgtcgagtcttcaacgatagggtccaatgagcacttcctaatgatgggtggcgactccgttttagggattaaacttgtcgcagccgctaggcagagaaatttagaattgagtttggatgttgttctcaagcatcctatcctcaaggacatggcgagggtttcaaaaacattagtgagcggacaagcggaatcgtctgtcacccagccattctccatcctcgaacaagggcgtcttattgatatcatcagagaagctacgatacagtgtgaaattaacgaagttgaaatcgaggatatctacccttgcacaccaatgcaggaagggctggtcgcatcgtctagacgacaaccgggcacctatgttcttcagcaagtctacgagttacccgacttcattaatattgagaaacttgaaaacgcatggaaatttgttgcagaacgtacaccagtgatgcgaacgcgatttttcgactttgaagccgatcttatgcaagcagttgtcaaggagccgctccggtgggcagtaattgagggcagcttaagcacaatattgtcgctggagcgggaacaacttcttgatccccggatgacaatgtcctcaatcaccatcgtcaaagacttgaattccaatcataaacaccttatctggacaattcatcacgcgcaacttgacggttgggccgaggcagatatcgcaacctcggtggaaagtcaatacttcgccgaggtagacagcatgcctgaaacacccaagtttagtcagtttgtcaattatgttaggcagcaaaacggaacggaaactagagacttctggaaacggcaactcactggtgctccttcaccccgatttcctgtgttccaaaatcccgactacgtccctcgtgttgagcggtccaaccgcattactgatcacgcctcctcgcatccgaacagtgagatgacacggcagacgcgtcgtcttcgagcaagtaacacaacggctgggactattatacaagcggcgtggatcttattagtaggctcctattcgcaagctactgacgttgtagttggagtgaccctgaacggcagaggcgcatccttgcttggaatagatcagatcttgggacctactatcactaccgtcccattccgcgggaattttcatgcgggtcagatcattgccgactttctacaaggtattcaagatcagtatctcgatatgcttccatacgcccaggctggactagatagtattaggcgtctgaacgatgagattgcaatggcgtgcaagttcaggactcttttgattgtccaatcgcctcaaagacctgaaaccgacagacgtattcttagaggtcgaggctatgcatttcctgtgatggacttcgcggttgttatggagtgcgaaattcttgataacgacatccactttcgagccacttttgacgacgcggtcatttctaattcggagatgaggcgcatactatctcaaatggaagatttggtacgcgtgatctcggaggctgactcgtttgcaacagtgactgacgtgttattgcctctcggtatagcatcagctcagattaaggagtgggaagcgtctgccaaggctgggagacgtaaccacaaatcctcagtggctggggctgagcgctgctacatacctccagcgacagacatggagaagcgagttgctgaactatgggaagtccttctcgatacgaattacattagcgccaatgacaacttctttcagcgcggtggaggcagtgtcagcgcgatgcgtctagtatcccttgcgcgaatgaaaggcatgacactcacaatgaatgccatctttgagactaagactttaagccagttggctctcacagttcgagatcaggctacagcatatgatattagccccttttcattgatcagagatactgaacaggatgctttaaaaacgacagcagctcaatattgtggggttcctgaaagtcaaatcgaagacatatttccctgcagtagattccaattacactacatcttgggctaccccgaggccaatcgagatcccgtcaatgagtcgtggggctggcagtctcaagctacatacttgattccgacgcatatagaactgtcaagcttcagggacgcttggcgatcggcggtgaaaagacaccaaagtcttagaacaagggtgatcaatacttcaagttgcatattccaagtggtactgagggataccgaagtcattccttggcatgaagcagatgatctagacaaatacctgagtaacgataaatcggaaacaatgacctttggaaaacctctccttcgattggcaattgtccgatcgggtgatgcgacggacacttacttcgtgttaacaatgcagcacatcatctatgacgcattttcgagaacgatgctattcaaagagatacatgatatcctcatatccaaagctctccctaaacagatcccgccgaagatgaacagttttatcaatttcttgatgagagctgatagaacagccgccactcagttttggacaaaaaatctttccggagcggagaccgtgccattagtcgacggactacaaagacgagggattgtcgaagtcgaggaacagactctcgaagcagttctgccgcctgttcggtcgtcagaggtcacaattagtacgatcttggaagttgcagtggctttagccgtcgcgcgagatgttcagtgtaaggacgtgatcttctatgctgatcgatcgggtcgcaacctgcccgttgaaggcatcgaagacttgatcgcatgcacgacgttgttcgtacctttacgcatctgcttagacacggatcgaaagattcgagacgtgctacgagacacacagaagttcaaatcagatgccatgccttacgaatatctaggctggcttgagctgagagagatagacgacctgacaccgatcttggagaactcagtcaacatgaatatcaacccatacccaaatacgcacatagcacaaacattaggacttgagttcaagtcgtcgcatctgccatgcgatgatcccttcggcttcaacgttgacttgctcgacaacaacagagtcttgtggaccatctactatgactcgactatcattgctgaagaaaaggtcatgaggttattgagatatgctgactgcttctcaaaagacatcattgaggcggagaacgcaggatcagagcgattagtgggcgagctattgcagtctaaccgctag

SEQ ID NO: 21770 - protein, 1671 aa, Muscodor strobelii
  misc_feature: SGI Peptide ID NO. 567376
  misc_feature (50)..(456): Pfam Id: PF00501 Pfam Desc: AMP-binding enzyme
  misc_feature (692)..(978): Pfam Id: PF00668 Pfam Desc: Condensation domain
  misc_feature (1253)..(1534): Pfam Id: PF00668 Pfam Desc: Condensation domain
  misc_feature (585)..(650): Pfam Id: PF00550 Pfam Desc: Phosphopantetheine attachment site
  misc_feature (1152)..(1215): Pfam Id: PF00550 Pfam Desc: Phosphopantetheine attachment site
  misc_feature (848)..(978): Pfam Id: PF00668 Pfam Desc: Condensation domain
  misc_feature (1253)..(1403): Pfam Id: PF00668 Pfam Desc: Condensation domain
  misc_feature (692)..(751): Pfam Id: PF00668 Pfam Desc: Condensation domain
  misc_feature (5)..(1121): NCBI GI: 145234641 Blast Desc: An03g00650 [Aspergillus niger] gi|134057641|emb|CAK38040.1| protein product [Aspergillus niger]
  misc_feature (7)..(1564): NCBI GI: 226283651 Blast Desc: D-alanine-poly(phosphoribitol) ligase subunit 1 [Paracoccidioides brasiliensis Pb01]
  misc_feature (5)..(1641): NCBI GI: 225554362 Blast Desc: peptide synthetase [Ajellomyces capsulatus G186AR]
  misc_feature (9)..(1125): NCBI GI: 238492173 Blast Desc: nonribosomal peptide synthase, [Aspergillus flavus NRRL3357] gi|220695817|gb|EED52159.1| nonribosomal peptide synthase, [Aspergillus flavus NRRL3357]
  misc_feature (9)..(1125): NCBI GI: 169782552 Blast Desc: [Aspergillus oryzae RIB40] gi|83774482|dbj|BAE64605.1| protein product [Aspergillus oryzae]
  misc_feature (5)..(1564): NCBI GI: 189191354 Blast Desc: D-alanine-poly(phosphoribitol) ligase subunit 1 [Pyrenophora tritici-repentis Pt-1C-BFP] gi|187973622|gb|EDU41121.1| D-alanine-poly(phosphoribitol) ligase
  misc_feature (1)..(1141): NCBI GI: 256724322 Blast Desc: NECHADRAFT_53641 [Nectria haematococca mpVI 77-13-4]
  misc_feature (1)..(1089): NCBI GI: 46115810 Blast Desc: FG03747.1 [Gibberella zeae PH-1]
  misc_feature (1)..(1127): NCBI GI: 59896114 Blast Desc: nonribosomal peptide synthetase 6 [Gibberella moniliformis]
  misc_feature (2)..(1107): NCBI GI: 189208862 Blast Desc: HC-toxin synthetase [Pyrenophora tritici-repentis Pt-1C-BFP] gi|187976857|gb|EDU43483.1| HC-toxin synthetase [Pyrenophora tritici-repentis Pt-1C-BFP]
MLPHESLRKIYEWNKHIPPAIEPGVISLIQTQCDKQPNSEAICAWDGSFTYREVHVLSSTLASRLIDDGVKAEVFVPICFEKSKWTAIAVLAVLKARGAFVLFDPSLPVARLKSMVDQIKAKLALSSRGCRKLCESLVENTQIIDQSAIDDMGKRIQLGAFPMSSPRDAAYIMFTSGTTGAPKGVIVEHLNLSTTAVYFGKTMGYMPGCRNLQFASHAFDPIITDIFATLANGGTLCIPSDWERDNDLVGAMGRMQITHLRLTPSLVGNLVIDDVPSLCTLILGGEVAPTPLVEEWSKKLRLVLAYGPAECCVICFATDSSTHVPEPAELGRPFSACGWIVKQENPHELATVGDIGELVIEGPTVARGCLGDPIRTDKSFLQSPTWLTSMRFNERSPDRLYRTGDLARQLDDGTFIYAGRSDSQVKIRGQRLELEEVERHLITSLSSVPNVRGFQVVVEAISFPDTSSKHLVALLSLDTPSGIGSLHWDQHERPVVQTSEHEREKFAAIVSGLEIELKKSLPSFAIPSLWVPMRKVPLTVSKKVDRKLLNRIICSLSMKDISFFVRKSTIAADDAQLAKFDPKTIILRDLWAEIFRVESSTIGSNEHFLMMGGDSVLGIKLVAAARQRNLELSLDVVLKHPILKDMARVSKTLVSGQAESSVTQPFSILEQGRLIDIIREATIQCEINEVEIEDIYPCTPMQEGLVASSRRQPGTYVLQQVYELPDFINIEKLENAWKFVAERTPVMRTRFFDFEADLMQAVVKEPLRWAVIEGSLSTILSLEREQLLDPRMTMSSITIVKDLNSNHKHLIWTIHHAQLDGWAEADIATSVESQYFAEVDSMPETPKFSQFVNYVRQQNGTETRDFWKRQLTGAPSPRFPVFQNPDYVPRVERSNRITDHASSHPNSEMTRQTRRLRASNTTAGTIIQAAWILLVGSYSQATDVVVGVTLNGRGASLLGIDQILGPTITTVPFRGNFHAGQIIADFLQGIQDQYLDMLPYAQAGLDSIRRLNDEIAMACKFRTLLIVQSPQRPETDRRILRGRGYAFPVMDFAVVMECEILDNDIHFRATFDDAVISNSEMRRILSQMEDLVRVISEADSFATVTDVLLPLGIASAQIKEWEASAKAGRRNHKSSVAGAERCYIPPATDMEKRVAELWEVLLDTNYISANDNFFQRGGGSVSAMRLVSLARMKGMTLTMNAIFETKTLSQLALTVRDQATAYDISPFSLIRDTEQDALKTTAAQYCGVPESQIEDIFPCSRFQLHYILGYPEANRDPVNESWGWQSQATYLIPTHIELSSFRDAWRSAVKRHQSLRTRVINTSSCIFQVVLRDTEVIPWHEADDLDKYLSNDKSETMTFGKPLLRLAIVRSGDATDTYFVLTMQHIIYDAFSRTMLFKEIHDILISKALPKQIPPKMNSFINFLMRADRTAATQFWTKNLSGAETVPLVDGLQRRGIVEVEEQTLEAVLPPVRSSEVTISTILEVAVALAVARDVQCKDVIFYADRSGRNLPVEGIEDLIACTTLFVPLRICLDTDRKIRDVLRDTQKFKSDAMPYEYLGWLELREIDDLTPILENSVNMNINPYPNTHIAQTLGLEFKSSHLPCDDPFGFNVDLLDNNRVLWTIYYDSTIIAEEKVMRLLRYADCFSKDIIEAENAGSERLVGELLQSNR

SEQ ID NO: 21771 - DNA, 1161 bp, Muscodor strobelii
  misc_feature: SGI cDNA ID NO. 567377
  misc_feature: Encodes the peptide sequence at SEQ ID NO 21772
atgcgtcacagtcttgcggcgttaacgatgctctttgccgcgtcgaccggagcggcagagcagattctttaccctaaacctacgggaccgtacaaggttggcagccatgtgcttgaactcgttgacgaatcaagaaaagacatcttttcattgcttggcagtaaacgagatcttatgactactcttcactacccgattgaagatacctacagtaactgcacattccctgccgcattcacgcccttgcttgctggctatctggatctgctgttctctgcgccattgggcactttcaaggacttttctctcccggagtgcaaagatgcccctgtcgcccatcccgagctgcccttgctcattttcagtcacggttacaagggctcaaggctgctttacgcagctattctgcaagagattgccagctatgggtataatgtcctggctgttgaccacactcacgatgctgttgttgtcgagtatccggatggccgtttcgtgtataacagtctcgatgcagtgcaaagtgactacggagccacggaactggacctcaacgaacgaacgaaagatgtgattttcttaattgactccctcagtaatacgacaatcacatcgacgattcccggattgaaaaatgaatgtggcaaggttcaaacatttcaaacgcatcgcgttggaattttcgggcattcatttggaggttccacgtccctccaatccacggttaacgacacacgttttgttgcggggacaagtctggatgggccgttctgggggttcgccaaccagacagggaccgatgcaccgtttatgctgatgcctgctctccagccctccagcttggaatggattccccagtggactgaaacatggcccaagctacgcaacttcaagcgatggttcaacgttgctggtactctgcatctttcctttgatgatttaccattactagctgatctgttgaacgaaaatctcgacgactacgaggagtcggataccatatcggctacattgggcaatgtcacaggagcgagaatgacggcgatagaacaaggttacgttacaagtttcttcgaccaatttttaaagaacacaactgatgggctactggacaaaaacactacgaaagactatcccgaggtgacaatgttcaatccctaa

SEQ ID NO: 21772 - protein, 386 aa, Muscodor strobelii
  misc_feature: SGI Peptide ID NO. 567377
  misc_feature (16)..(353): Pfam Id: PF03403 Pfam Desc: Platelet-activating factor acetylhydrolase, plasma/intracellular isoform II
  misc_feature (116)..(151): Pfam Id: PF03403 Pfam Desc: Platelet-activating factor acetylhydrolase, plasma/intracellular isoform II
  misc_feature (16)..(40): Pfam Id: PF03403 Pfam Desc: Platelet-activating factor acetylhydrolase, plasma/intracellular isoform II
  misc_feature (222)..(255): Pfam Id: PF03403 Pfam Desc: Platelet-activating factor acetylhydrolase, plasma/intracellular isoform II
  misc_feature (8)..(383): NCBI GI: 121704577 Blast Desc: PAF acetylhydrolase family protein [Aspergillus clavatus NRRL 1] gi|119398697|gb|EAW09126.1| PAF acetylhydrolase family protein [Aspergillus clavatus NRRL 1]
  misc_feature (8)..(383): NCBI GI: 242805475 Blast Desc: PAF acetylhydrolase family protein [Talaromyces stipitatus ATCC 10500] gi|218715163|gb|EED14585.1| PAF acetylhydrolase family protein [Talaromyces stipitatus ATCC
  misc_feature (1)..(383): NCBI GI: 119482435 Blast Desc: PAF acetylhydrolase family protein [Neosartorya fischeri NRRL 181] gi|119409400|gb|EAW19349.1| PAF acetylhydrolase family protein [Neosartorya fischeri NRRL 181]
  misc_feature (11)..(381): NCBI GI: 71002852 Blast Desc: PAF acetylhydrolase family protein [Aspergillus fumigatus Af293] gi|66853745|gb|EAL94069.1| PAF acetylhydrolase family protein [Aspergillus fumigatus Af293]
  misc_feature (11)..(381): NCBI GI: 159130162 Blast Desc: PAF acetylhydrolase family protein [Aspergillus fumigatus A1163]
  misc_feature (8)..(383): NCBI GI: 115396058 Blast Desc: [Aspergillus terreus NIH2624] gi|114193237|gb|EAU34937.1| [Aspergillus terreus NIH2624]
  misc_feature (25)..(381): NCBI GI: 169763002 Blast Desc: [Aspergillus oryzae RIB40] gi|83770429|dbj|BAE60562.1| protein product [Aspergillus oryzae]
  misc_feature (25)..(381): NCBI GI: 238488837 Blast Desc: PAF acetylhydrolase family protein [Aspergillus flavus NRRL3357] gi|220698044|gb|EED54384.1| PAF acetylhydrolase family protein [Aspergillus flavus NRRL3357]
  misc_feature (1)..(382): NCBI GI: 145241552 Blast Desc: An09g01050 [Aspergillus niger] gi|134077961|emb|CAK49026.1| protein product [Aspergillus niger]
  misc_feature (3)..(383): NCBI GI: 169605351 Blast Desc: SNOG_05699 [Phaeosphaeria nodorum SN15] gi|111065643|gb|EAT86763.1| SNOG_05699 [Phaeosphaeria nodorum SN15]
  misc_feature (8)..(269): SWISSPROT Homolog: EC 3.1.1.47 1-alkyl-2-acetylglycerophosphocholine esterase
MRHSLAALTMLFAASTGAAEQILYPKPTGPYKVGSHVLELVDESRKDIFSLLGSKRDLMTTLHYPIEDTYSNCTFPAAFTPLLAGYLDLLFSAPLGTFKDFSLPECKDAPVAHPELPLLIFSHGYKGSRLLYAAILQEIASYGYNVLAVDHTHDAVVVEYPDGRFVYNSLDAVQSDYGATELDLNERTKDVIFLIDSLSNTTITSTIPGLKNECGKVQTFQTHRVGIFGHSFGGSTSLQSTVNDTRFVAGTSLDGPFWGFANQTGTDAPFMLMPALQPSSLEWIPQWTETWPKLRNFKRWFNVAGTLHLSFDDLPLLADLLNENLDDYEESDTISATLGNVTGARMTAIEQGYVTSFFDQFLKNTTDGLLDKNTTKDYPEVTMFNP

SEQ ID NO: 21773 - DNA, 2465 bp, Muscodor strobelii
  misc_feature: SGI EST ID NO. CUFF.51155.0
  misc_feature: Variant of the nucleotide sequence at SEQ ID NO 21771
cgacactgctttgggataccattcgtggggctggtgcgagagaatcgccgtcaattggtgggtagatctaggcagcgcgcatagccacatacacacggccgtgcgaacgccaacatgtgtaaacattgagcgcggattaccaacgtttcgggggttgtgatcaattatcactcagccaatacgcaactacgtagaagtcgttattgagggtcgaggggaaatccatcgtgctctacgcatacactggttaggcaaggtgacaatgaaagggatgcttgttatcaggtgagtccgttcttggcttagttacgtcacattgtcgagttgacagctctccgcgttgcctatattcatcatctcgtttacagttgcccctggaattttcactaactctgtatttagcgtagaccctttgggttcaagagaaagaccttgccctacttggccattacggttcctagattggaaagcaggctattctagcagttgcgggtcctgacacacctgaagtgagcacccgaacttatacgtcgtaaatttcgccttattgtacgcgacagtgttcgattaaggctgtggtgatgacttcctgctccttggtaaacttcacagatgagaattaatagaggccaagtgctaatcgtcagagtatcataccttacggagcccagccacttaccaataccctgctagctcggaacgaacctacaccgacgagccaccggtgtctttgatgcatgcatgttgcttgacaggccacgggttgttgttgcggcctcattgatacaccgtttgtccgggtggcagaggagcgtgatcttataagacagttgcattgcccattatgcaaatcatctttcctccaaaggtgcgctgcattatcgattctcgtatttcaccaagttccccactatgcgtcacagtcttgcggcgttaacgatgctctttgccgcgtcgaccggagcggcagagcagattctttaccctaaacctacgggaccgtacaaggttggcagccatgtgcttgaactcgttgacgaatcaagaaaagacatcttttcattgcttggcagtaaacgagatcttatgactactcttcactacccgattgaagatacctacagtaactgcacattccctgccgcattcacgcccttgcttgctggctatctggatctgctgttctctgcgccattgggcactttcaaggacttttctctcccggagtgcaaagatgcccctgtcgcccatcccgagctgcccttgctcattttcagtcacggttacaagggctcaaggctgctttacgcagctattctgcaagagattgccagctatgggtataatgtcctggctgttgaccacactcacgatgctgttgttgtcgagtatccggatggccgtttcgtgtataacagtctcgatgcagtgcaaagtgactacggagccacggaactggacctcaacgaacgaacgaaagatgtgattttcttaattgactccctcagtaatacgacaatcacatcgacgattcccggattgaaaaatgaatgtggcaaggttcaaacatttcaaacgcatcgcgttggaattttcgggcattcatttggaggttccacgtccctccaatccacggttaacgacacacgttttgttgcggggacaagtctggatgggccgttctgggggttcgccaaccagacagggaccgatgcaccgtttatgctgatgcctgctctccagccctccagcttggaatggattccccagtggactgaaacatggcccaagctacgcaacttcaagcgatggttcaacgttgctggtactctgcatctttcctttgatgatttaccattactagctgatctgttgaacgaaaatctcgacgactacgaggagtcggataccatatcggctacattgggcaatgtcacaggagcgagaatgacggcgatagaacaaggttacgttacaagtttcttcgaccaatttttaaagaacacaactgatgggctactggacaaaaacactacgaaagactatcccgaggtgacaatgttcaatccctaaaatcgatggatagaagacaatgtatactcgaggtacgagacgaagacatggacgattgcatatcaacgaccagatgtcagcggtcgtgccgcaacgaatgtgtctttcgctagaatgcaggagtaattatagttattggattgaattcgattcaaaatgcacatcaaggctgatcgatccaataatgtcggatcgtcaagacaattgaagctgaccattgagtgatacatgggtcctttaggtctacttatacccgtatcgacgctcgactgcaacgcgacgtggctatgacaggaatctcggtaggcgacttgcggcgggggtttactacctgcggattgccaaaatcgtgctagtggagtaggagatcagattacggagcgaagcatttt

SEQ ID NO: 21774 - DNA, 2064 bp, Muscodor strobelii
  misc_feature: SGI cDNA ID NO. 567378
  misc_feature: Elevated expression when VOC is produced
  misc_feature: Encodes the peptide sequence at SEQ ID NO 21775
atgagagcgtctaacatttgcgggttcgttcttggcgtggaagttggtctcgctcagcgtcctagttcgggctggatctatccagtcaaccccgagcagagcattttcccgccgaatgggccattatacccttcaaatggcccagtcaatggttcaacttacgactatattgtcgtaggatcagggccaggaggaggccctctagccgcacgtctcgctcaagccgggtacagcgtgctccttgtcgacgccggtgaagatcatggtacggaacgacaggtggaaataccagcgctgcatccgttctcctcggagtacaatcctatacgatgggactacttcgtggatcactattcgaacgtgagccaggccgtcagagactcaaaaatgacctatttgacccctgatggcgattattatgttggaagatatccacctgatggctcagagagactcggcgtgctgtatccgcgggcagctgcacttggaggttgctcgcagcacaacgcgtatgtcacgattcttccgaacgatgatgactggaactacattgccgacgtcaccggggataagtcgtggggaagctcgaacatgcggaagcacttcgaaaagcttgaggcagtgcggtatctgcctaactctgtcgcgggtcatgggttctcaggatggctgcagacccgactcacgcctttagtcttagtcctggaagatttgaaagtgttgtcgcttgtcatcgcggccgctactgcgatgggacaggatctcgctggtaaagtgatcgacacagtcgcaggtcttctcgaaattctcgccctcgacgttaacaacaattcgccttctagagatgatgccgagctgctttatcagataccactcgctgttgacgaatcgtactctcgctcctcaccccgtggccttgtttatgacgttgctactgctgtgaacatcgatggcagcaagaagtacaaccttgacatcgctctcaatacctttgtgactaaagtgaatttcgacacgagcacaagtgaacagccaaaagcggtcagcatcgactatcttgttggaaagagtttgtaccgtgccgatactcgagctgtcacgacagacgcagggacgcctggcaatgtaaaggcggcgcgcgagataatcatatcagccggtgcgtttaacacgcctcaacttctgaagctgagtggcgtaggcccagccgctgagcttcgatcgttcaatattcctgtagtcgttgatttgcctggtgtcggtggcaatctccaagaccgatatgaagtaggggttgttggcaaagcgccgtcggatttctcgttgctcgagccttgcacctttcttgagggaatggggcccgatccttgctacgagaaatggtcctcacctcttctagttgacggactcaaaggcgcgtacacgacgaacgggattgctttcggctggattcatcattcttcagttgctgataaagatcctgacttattcctcggcggcgtacccgcattttttgatggatattacccgggatattccgtgcatgcgactagtgataaaagcatttggacatggctgacattgaaagcgcattcacggaatcacgctggaacagtgaacctcacgtctgcagatccacgtgacactccaagaatcacgtttcactcttttggcgaaggcgtggatccggacagcggagaggaggacatccaagcagtttatgagggtatgctgtatggtatgcgcgctttcgacgatctgataccgttagatgggtctttcgagcgtgtgtggccgccgctcaacgtcagcacagaggaagacttgaagcagttcatccgcgacgaggcctggggccatcacgccagctgcacagctcctataggagcagatggcgatcctatggccgttcttgatggcgagtttcgagtgcgtggcgtagagggcttgagggttgtggatgcttcggtatttccgaagattcccggtacttacattgttctcccgatctatatgatcagcgaaaaagcagcggataccatcatatcgactgctgatgcgtaa

SEQ ID NO: 21775 - protein, 687 aa, Muscodor strobelii
  misc_feature: SGI Peptide ID NO. 567378
  misc_feature (522)..(677): Pfam Id: PF05199 Pfam Desc: GMC oxidoreductase
  misc_feature (54)..(442): Pfam Id: PF00732 Pfam Desc: GMC oxidoreductase
  misc_feature (633)..(677): Pfam Id: PF05199 Pfam Desc: GMC oxidoreductase
  misc_feature (364)..(442): Pfam Id: PF00732 Pfam Desc: GMC oxidoreductase
  misc_feature (55)..(87): Pfam Id: PF05834 Pfam Desc: Lycopene cyclase protein
  misc_feature (54)..(687): NCBI GI: 154321511 Blast Desc: BC1G_01630 [Botryotinia fuckeliana B05.10] gi|150852168|gb|EDN27360.1| BC1G_01630 [Botryotinia fuckeliana B05.10]
  misc_feature (50)..(685): NCBI GI: 238488078 Blast Desc: choline dehydrogenase, [Aspergillus flavus NRRL3357] gi|220700156|gb|EED56495.1| choline dehydrogenase, [Aspergillus flavus NRRL3357]
  misc_feature (50)..(685): NCBI GI: 169769607 Blast Desc: [Aspergillus oryzae RIB40] gi|83767132|dbj|BAE57271.1| protein product [Aspergillus oryzae]
  misc_feature (54)..(685): NCBI GI: 240275508 Blast Desc: GMC oxidoreductase [Ajellomyces capsulatus H143]
  misc_feature (45)..(685): NCBI GI: 255948056 Blast Desc: Pc22g07790 [Penicillium chrysogenum Wisconsin 54-1255] gi|211591812|emb|CAP98067.1| Pc22g07790 [Penicillium chrysogenum Wisconsin 54-1255]
  misc_feature (54)..(685): NCBI GI: 225561900 Blast Desc: glucose-methanol-choline oxidoreductase [Ajellomyces capsulatus G186AR]
  misc_feature (52)..(685): NCBI GI: 115491891 Blast Desc: conserved [Aspergillus terreus NIH2624] gi|114197433|gb|EAU39133.1| conserved [Aspergillus terreus NIH2624]
  misc_feature (54)..(687): NCBI GI: 242791737 Blast Desc: choline dehydrogenase, [Talaromyces stipitatus ATCC 10500] gi|218718402|gb|EED17822.1| choline dehydrogenase, [Talaromyces stipitatus ATCC 10500]
  misc_feature (52)..(682): NCBI GI: 261352468 Blast Desc: alcohol dehydrogenase [Verticillium albo-atrum VaMs.102]
  misc_feature (54)..(685): NCBI GI: 261197980 Blast Desc: choline dehydrogenase [Ajellomyces dermatitidis SLH14081] gi|239595355|gb|EEQ77936.1| choline dehydrogenase [Ajellomyces dermatitidis SLH14081]
  misc_feature (302)..(681): SWISSPROT Homolog: EC 1.1.99.1 Choline dehydrogenase
  misc_feature: Useful for introducing or modulating the production of volatile compounds
MRASNICGFVLGVEVGLAQRPSSGWIYPVNPEQSIFPPNGPLYPSNGPVNGSTYDYIVVGSGPGGGPLAARLAQAGYSVLLVDAGEDHGTERQVEIPALHPFSSEYNPIRWDYFVDHYSNVSQAVRDSKMTYLTPDGDYYVGRYPPDGSERLGVLYPRAAALGGCSQHNAYVTILPNDDDWNYIADVTGDKSWGSSNMRKHFEKLEAVRYLPNSVAGHGFSGWLQTRLTPLVLVLEDLKVLSLVIAAATAMGQDLAGKVIDTVAGLLEILALDVNNNSPSRDDAELLYQIPLAVDESYSRSSPRGLVYDVATAVNIDGSKKYNLDIALNTFVTKVNFDTSTSEQPKAVSIDYLVGKSLYRADTRAVTTDAGTPGNVKAAREIIISAGAFNTPQLLKLSGVGPAAELRSFNIPVVVDLPGVGGNLQDRYEVGVVGKAPSDFSLLEPCTFLEGMGPDPCYEKWSSPLLVDGLKGAYTTNGIAFGWIHHSSVADKDPDLFLGGVPAFFDGYYPGYSVHATSDKSIWTWLTLKAHSRNHAGTVNLTSADPRDTPRITFHSFGEGVDPDSGEEDIQAVYEGMLYGMRAFDDLIPLDGSFERVWPPLNVSTEEDLKQFIRDEAWGHHASCTAPIGADGDPMAVLDGEFRVRGVEGLRVVDASVFPKIPGTYIVLPIYMISEKAADTIISTADA

SEQ ID NO: 21776 - DNA, 2697 bp, Muscodor strobelii
  misc_feature: SGI EST ID NO. CUFF.51159.0
  misc_feature: Variant of the nucleotide sequence at SEQ ID NO 21774
cgtggccgacaatgctgttgatgaagcgcgtcagtgcgattgtcagcttacccctctcgatgtctcgatctcctttagcttgcatcgacgacacatcatgaaagatgtgacgaggacaaaaattgcagtggcgggggtatctaccctcaagtactcattccaagttatctgcttgtgaattcgaacgtcttgcacgcgtctagtcacaatgagagcgtctaacatttgcgggttcgttcttggcgtggaagttggtctcgctcagcgtcctagttcgggctggatctatccagtcaaccccgagcagagcattttcccgccgaatgggccattatacccttcaaatggcccagtcaatggttcaacttacgactatattgtcgtaggatcagggccaggaggaggccctctagccgcacgtctcgctcaagccgggtacagcgtgctccttgtcgacgccggtgaagatcatggtacggaacgacaggtggaaataccagcgctgcatccgttctcctcggagtacaatcctatacgatgggactacttcgtggatcactattcgaacgtgagccaggccgtcagagactcaaaaatgacctatttgacccctgatggcgattattatgttggaagatatccacctgatggctcagagagactcggcgtgctgtatccgcgggcagctgcacttggaggttgctcgcagcacaacgcgtatgtcacgattcttccgaacgatgatgactggaactacattgccgacgtcaccggggataagtcgtggggaagctcgaacatgcggaagcacttcgaaaagcttgaggcagtgcggtatctgcctaactctgtcgcgggtcatgggttctcaggatggctgcagacccgactcacgcctttagtcttagtcctggaagatttgaaagtgttgtcgcttgtcatcgcggccgctactgcgatgggacaggatctcgctggtaaagtgatcgacacagtcgcaggtcttctcgaaattctcgccctcgacgttaacaacaattcgccttctagagatgatgccgagctgctttatcagataccactcgctgttgacgaatcgtactctcgctcctcaccccgtggccttgtttatgacgttgctactgctgtgaacatcgatggcagcaagaagtacaaccttgacatcgctctcaatacctttgtgactaaagtgaatttcgacacgagcacaagtgaacagccaaaagcggtcagcatcgactatcttgttggaaagagtttgtaccgtgccgatactcgagctgtcacgacagacgcagggacgcctggcaatgtaaaggcggcgcgcgagataatcatatcagccggtgcgtttaacacgcctcaacttctgaagctgagtggcgtaggcccagccgctgagcttcgatcgttcaatattcctgtagtcgttgatttgcctggtgtcggtggcaatctccaagaccgatatgaagtaggggttgttggcaaagcgccgtcggatttctcgttgctcgagccttgcacctttcttgagggaatggggcccgatccttgctacgagaaatggtcctcacctcttctagttgacggactcaaaggcgcgtacacgacgaacgggattgctttcggctggattcatcattcttcagttgctgataaagatcctgacttattcctcggcggcgtacccgcattttttgatggatattacccgggatattccgtgcatgcgactagtgataaaagcatttggacatggctgacattgaaagcgcattcacggaatcacgctggaacagtgaacctcacgtctgcagatccacgtgacactccaagaatcacgtttcactcttttggcgaaggcgtggatccggacagcggagaggaggacatccaagcagtttatgagggtatgctgtatggtatgcgcgctttcgacgatctgataccgttagatgggtctttcgagcgtgtgtggccgccgctcaacgtcagcacagaggaagacttgaagcagttcatccgcgacgaggcctggggccatcacgccagctgcacagctcctataggagcagatggcgatcctatggccgttcttgatggcgagtttcgagtgcgtggcgtagagggcttgagggttgtggatgcttcggtatttccgaagattcccggtacttacattgttctcccgatctatatgatcagcgaaaaagcagcggataccatcatatcgactgctgatgcgtaagaaaaattgacaacaggaaatttcagttggttctaagcgccagagacccaattcgtcgcagccatctaagtagaactgtggtgtatctaaggcagtcttcgtgctcttcgagtattgtcgcatttatgctcgcttgttcggaagctacttaataactgagagacgcaaaatacaatacggataaaaacgtgatatcagggttcatggcgctatacatacgggcgctatccgccgccgcttttcaaaagtctagtgagaaggtcatctcaagattggtcactttaatgcgcatccatagtgctccacagacttccatgaatacctagtttgcgcgcatctattgagaagtgtattgatttactagtccttgatgaaggcataggattgcgataaactcgcatcaatgtgctttccgaatgattacg

SEQ ID NO: 21777 - DNA, 1083 bp, Muscodor strobelii
  misc_feature: SGI cDNA ID NO. 567379
  misc_feature: Elevated expression when VOC is produced
  misc_feature: Encodes the peptide sequence at SEQ ID NO 21778
atggagcacgcagccaactgggtggctgaaatcgagggcgactttcccctacatgtcaatgtagtaagagaactaccggaaggcactcgaatcatctctgcacagagacatggcatttcttcatgggcacacacagccaaggttgaggtcatcttggcagatggaaaaaagcaacaatacttcctaaagtgctcctcaggcactagtgcccgagccttagctgagggtgagtttcattctgcctcccgaatgaacgaggtagtatcacaattcgttgcacaacccatagcctggggaaggtatgtcaacgaaggaaaagatgtgtacttcttcctaggcgcgtttcatgagatggatttctcgaagcgccccgatccaactgagttcattgagaagattgtcgagattcataacaaagggaattcaccgaacggtatgtttggattcccggtccccaccactatcggtagaatgccacacgctgttacttgggaacaaagctgggcagcctccttcacacatcaactcaaagctgtcatcaagtacgacaacgatgcgaatggagcctgggccgagcttgaagcagccaataaacatctaatcgagataattattccccggctgctcggagctctgcagactgagggaagacagctaataccagctctcatccacggtgacctatgggaaagaaacgttggaaccgatcagaataccggcagagtcatccttttcgatgcaggaagcacttacgctcacaacgagatggagttcggaacatggcgctgctcatgggcttcccacttcaaggacccagtttacatggacttataccagcgtgcaattccaccttcggagccgaaagaggagtggtgcgatcggaatcggctctacggcatctatcagtatctcattgcgtccgcgggacatcctggaaatgaatgcagaggaatagcatacaacgacattctatatttatgcgaaaagtactcgccgctcgatggtcttgaaaagtatgacgccaaactggatccaaggttgaacggcaagcagatggaggtgccactagaagacaagtcgtaa

SEQ ID NO: 21778 - protein, 360 aa, Muscodor strobelii
  misc_feature: SGI Peptide ID NO. 567379
  misc_feature (8)..(358): NCBI GI: 116214451 Blast Desc: CHGG_11066 [Chaetomium globosum CBS 148.51] gi|88175421|gb|EAQ82890.1| CHGG_11066 [Chaetomium globosum CBS 148.51]
  misc_feature (11)..(334): NCBI GI: 145228563 Blast Desc: An01g01490 [Aspergillus niger] gi|134054681|emb|CAK43522.1| protein product [Aspergillus niger]
  misc_feature (28)..(349): NCBI GI: 171678070 Blast Desc: protein product [Podospora anserina] gi|170937104|emb|CAP61762.1| protein product [Podospora anserina]
  misc_feature (10)..(332): NCBI GI: 240110347 Blast Desc: CPC735_063790 [Coccidioides posadasii C735 delta SOWgp]
  misc_feature (10)..(332): NCBI GI: 119180471 Blast Desc: CIMG_08864 [Coccidioides immitis RS]
  misc_feature (13)..(332): NCBI GI: 261356147 Blast Desc: conserved [Verticillium albo-atrum VaMs.102]
  misc_feature (13)..(316): NCBI GI: 258563734 Blast Desc: [Uncinocarpus reesii 1704] gi|237908119|gb|EEP82520.1| [Uncinocarpus reesii 1704]
  misc_feature (17)..(330): NCBI GI: 116206070 Blast Desc: CHGG_02328 [Chaetomium globosum CBS 148.51] gi|88182925|gb|EAQ90393.1| CHGG_02328 [Chaetomium globosum CBS 148.51]
  misc_feature (1)..(300): NCBI GI: 169765035 Blast Desc: [Aspergillus oryzae RIB40] gi|83764843|dbj|BAE54987.1| protein product [Aspergillus oryzae]
  misc_feature (18)..(300): NCBI GI: 238503680 Blast Desc: conserved [Aspergillus flavus NRRL3357] gi|220690543|gb|EED46892.1| conserved [Aspergillus flavus NRRL3357]
  misc_feature: Useful for introducing or modulating the production of volatile compounds
MEHAANWVAEIEGDFPLHVNVVRELPEGTRIISAQRHGISSWAHTAKVEVILADGKKQQYFLKCSSGTSARALAEGEFHSASRMNEVVSQFVAQPIAWGRYVNEGKDVYFFLGAFHEMDFSKRPDPTEFIEKIVEIHNKGNSPNGMFGFPVPTTIGRMPHAVTWEQSWAASFTHQLKAVIKYDNDANGAWAELEAANKHLIEIIIPRLLGALQTEGRQLIPALIHGDLWERNVGTDQNTGRVILFDAGSTYAHNEMEFGTWRCSWASHFKDPVYMDLYQRAIPPSEPKEEWCDRNRLYGIYQYLIASAGHPGNECRGIAYNDILYLCEKYSPLDGLEKYDAKLDPRLNGKQMEVPLEDKS

SEQ ID NO: 21779 - DNA, 1426 bp, Muscodor strobelii
  misc_feature: SGI EST ID NO. CUFF.51882.1
  misc_feature: Variant of the nucleotide sequence at SEQ ID NO 21777
cagctctccaccaacaatatgtccgagatggagcacgcagccaactgggtggctgaaatcgagggcgactttcccctacatgtcaatgtagtaagaggtgagatgcctaggatgcccgcgatgcacgagtgtatatctaatgtattgaagaactaccggaaggcactcgaatcatctctgcacagagacatggcatttcttcatgggcacacacagccaaggttgaggtcatcttggcagatggaaaaaagcaacaatacttcctaaagtgctcctcaggcactagtgcccgagccttagctgaggattgtcgagattcataacaaagggaattcaccgaacggtatgtttggattcccggtccccaccactatcggtagaatgccacacgctgttacttgggaacaaagctgggcagcctccttcacacatcaactcaaagctgtcatcaagtacgacaacgatgcgaatggagcctgggccgagcttgaagcagccaataaacatctaatcgagataattattccccggctgctcggagctctgcagactgagggaagacagctaataccagctctcatccacggtgacctatgggaaagaaacgttggaaccgatcagaataccggcagagtcatccttttcgatgcaggaagcacttacgctcacaacgagatggagttcggaacatggcgctgctcatgggcttcccacttcaaggacccagtttacatggacttataccagcgtgcaattccaccttcggagccgaaagaggagtggtgcgatcggaatcggctctacggcatctatcagtatctcattgcgtccgcgggacatcctggaaatgaatgcagaggaatagcatacaacgacattctatatttatgcgaaaagtactcgccgctcgatggtcttgaaaagtatgacgccaaactggatccaaggttgaacggcaagcagatggaggtgccactagaagacaagtcgtaaagtgccttccagatagacttgcatcggcttcagcatcacgagaatattccgacatgatcttctttcggcaccttttacgagacgtagtcagtgccttgcatgtggcgacaccgaacagtcgcacctcaacttgtgactgatcacgaaacgctgccgcctgcctcgggaacacagacttaataaattgatggcggttcttgacttgcaagtggatgatcgccggagaaatgaatacagggcaggtgttggtggacgggccataggcgcaaagcgaggtgtttcaattgctattgcatcatagatcacttatatttcttcgcagcgatgcattcgtactattcagaggatatcaatagacagtaatctaactcttaccaaagctggtatctaacagcattgtgcttagagtgcagtgtggattgaaacatggcga

SEQ ID NO: 21780 - DNA, 1074 bp, Muscodor strobelii
  misc_feature: SGI cDNA ID NO. 567380
  misc_feature: Encodes the peptide sequence at SEQ ID NO 21781
atggaactcaccaagtttctcacatttttggcaattgccttgcctgttgcctatggtgccccatcgccgaccgcttcaagccttcaccctcagattctggctgctatgaagcgcgatcttggactcgatgctaagcaggctgttgcccgtgttgcccaagagcaatgggccagtggtgttatcgagcagatcaagacaagcacaaaggattcctttgccggtgcttggattgtcgatggcgcccttaaagttggtgttaccgacaaagctatggtaaaggaggtgaaggctgctggcgctacgccagtgcttatgtccaacagcatggctaagcttaccaaggccaagaaggcaatggacaacatgggcgatgatgctcggtcatctagttccggcattgctgcctactacgtcgatgtgaagacaaacaagcttgtcgttgaggcattatccggcagcaccgctcacgctaagacgatggccacgaaggccggccttgttgagaacgacgagttcgaggtcaagactgtcgcaaagatgccttccactttcgccgatgtccaaggcggcgatgcttattatatcaacaacgctgctcgttgctccgttggcttttcggtaacaagtggcttcgtctcagctggccactgtggaacccctggcagctctgccactactaccagcggcgaaggccttggaacctttcaagcatcagtcttcccaggagacgctgatatgagctatatcagcaccgatggtgctaacctcctcggccagatcaatggctacggcggggatgccattcccgtgtcgggcagcgacgtcgctgctacaggatccagtatctgccgctctggctccaccactggtgtccactgcggcacagtcaacgcatttgacgcaactgtcaactattccgaaggaagtgtttcgggtttgacggagactgatgtgtgtgctgagcctggtgactctggtggctctttctactctggcaaccaggcccagggtggtaacttcgggtgggtccggagactgcacgtcaggcggtaccacctacttccagcctgttaa

SEQ ID NO: 21781 - protein, 357 aa, Muscodor strobelii
  misc_feature: SGI Peptide ID NO. 567380
  misc_feature (1)..(337): NCBI GI: 5042248 Blast Desc: Chymotrypsin [Metarhizium anisopliae] gi|6433954|emb|CAB60729.1| chymotrypsin [Metarhizium anisopliae]
  misc_feature (1)..(337): NCBI GI: 145611928 Blast Desc: MGG_11691 [Magnaporthe grisea 70-15] gi|145019139|gb|EDK03418.1| MGG_11691 [Magnaporthe grisea 70-15]
  misc_feature (1)..(337): NCBI GI: 169598102 Blast Desc: SNOG_01849 [Phaeosphaeria nodorum SN15] gi|111068941|gb|EAT90061.1| SNOG_01849 [Phaeosphaeria nodorum SN15]
  misc_feature (7)..(337): NCBI GI: 239942257 Blast Desc: secreted serine protease [Streptomyces roseosporus NRRL 15998] gi|239988724|ref|ZP_04709388.1| secreted serine protease [Streptomyces roseosporus NRRL 11379]
  misc_feature (30)..(337): NCBI GI: 21223051 Blast Desc: serine protease precursor [Streptomyces coelicolor A3(2)] gi|7288066|emb|CAB81861.1| serine protease precursor [Streptomyces coelicolor A3(2)]
  misc_feature (32)..(337): NCBI GI: 257055965 Blast Desc: trypsin family protease proenzyme [Saccharomonospora viridis DSM 43017] gi|256585837|gb|ACU96970.1| trypsin family protease proenzyme [Saccharomonospora viridis DSM 43017]
  misc_feature (19)..(337): NCBI GI: 282866384 Blast Desc: peptidase alpha-lytic pro domain protein [Streptomyces sp. ACTE] gi|282558780|gb|EFB64337.1| peptidase alpha-lytic pro domain protein [Streptomyces sp. ACTE]
  misc_feature (13)..(337): NCBI GI: 124517186 Blast Desc: preprocellulomonadin [Cellulomonas bogoriensis]
  misc_feature (30)..(337): NCBI GI: 21954478 Blast Desc: serine protease [Streptomyces lividans]
  misc_feature (22)..(337): NCBI GI: 270501228 Blast Desc: peptidase S1 and S6 chymotrypsin/Hap [Micromonospora aurantiaca ATCC 27029] gi|270321891|gb|EFA32821.1| peptidase S1 and S6 chymotrypsin/Hap [Micromonospora aurantiaca ATCC 27029]
  misc_feature (25)..(337): SWISSPROT Homolog: EC 3.4.21.12 Alpha-lytic endopeptidase
MELTKFLTFLAIALPVAYGAPSPTASSLHPQILAAMKRDLGLDAKQAVARVAQEQWASGVIEQIKTSTKDSFAGAWIVDGALKVGVTDKAMVKEVKAAGATPVLMSNSMAKLTKAKKAMDNMGDDARSSSSGIAAYYVDVKTNKLVVEALSGSTAHAKTMATKAGLVENDEFEVKTVAKMPSTFADVQGGDAYYINNAARCSVGFSVTSGFVSAGHCGTPGSSATTTSGEGLGTFQASVFPGDADMSYISTDGANLLGQINGYGGDAIPVSGSDVAATGSSICRSGSTTGVHCGTVNAFDATVNYSEGSVSGLTETDVCAEPGDSGGSFYSGNQAQGGNFGWVRRLHVRRYHLLPAC

SEQ ID NO: 21782 - DNA, 1779 bp, Muscodor strobelii
  misc_feature: SGI EST ID NO. CUFF.51181.0
  misc_feature: Variant of the nucleotide sequence at SEQ ID NO 21780
caacgccggcgaacaccctcgacaccgaggcctgacaaggtacaatcagagtgcaattcgcattacagtgccaatgctagtacccttaaggcgtctaatgtcgcaattgtccctggagatctggatgatgccggatcaacaatcggagaaaatcgagccaaagttgaatctcatgatcgccagtggagaactgctaacagagctacaatatcagcgatcacgggaaataggcggtttatcctgatcaacccctgcggattcttatgaggcattctatgaatatacggttatgcagagattcatgtccaggacttataacgtcatcagtctggtgcagctctgacaacgccaagctacgctaaaataacttgtgcctttgccccttgatgaccagctgcctccgtaaagcggatagaacttgttgtccgcaggtgctatgatgtctgaaactcggagggctgactgcgcccaataggcctaaaaattagacactaaacacattccttcctctgccttcctaatcaagtaccgctggcatgaagacaatcatgccagcttcaccagccttggagaaagggccgagggagttttgatcggcacatgggcgcgtggcgttgtcggtggccggggagcttaatttggcgggctgagtgccgtcgatctctccgcctacggcctagaatagaatccacacggatcggcgtgtcagcatcggcatactgatttagagattgtggccttcccgaagctgatattttcaagtcttgcccgaggctgcttgcgatggcttctcttggctgtttatagccaactaggaaggaggcgagtagactgtggcaatctatggacaacgacaacaatagtatggccatcatctcggggatgaaacaagtataaagaaacagagatgtgcccgtccagtcggtgagttctgtttggctttgtcctgcatcctctcaattcttcagcctgctctcccacatacagtcctcagtacacagcctagccatggaactcaccaagtttctcacatttttggcaattgccttgcctgttgcctatggtgccccatcgccgaccgcttcaagccttcaccctcagattctggctgctatgaagcgcgatcttggactcgatgctaagcaggctgttgcccgtgttgcccaagagcaatgggccagtggtgttatcgagcagatcaagacaagcacaaaggattcctttgccggtgcttggattgtcgatggcgcccttaaagttggtgttaccgacaaagctatggtaaaggaggtgaaggctgctggcgctacgccagtgcttatgtccaacagcatggctaagcttaccaaggccaagaaggcaatggacaacatgggcgatgatgctcggtcatctagttccggcattgctgcctactacgtcgatgtgaagacaaacaagcttgtcgttgaggcattatccggcagcaccgctcacgctaagacgatggccacgaaggccggccttgttgagaacgacgagttcgaggtcaagactgtcgcaaagatgccttccactttcgccgatgtccaaggcggcgatgcttattatatcaacaacgctgctcgttgctccgttggcttttcggtaacaagtggcttcgtctcagctggccactgtggaacccctggcagctctgccactactaccagcggcgaaggccttggaacctttcaagcatcagtcttcccaggagacgctgatatgagctatatcagcaccgatggtgctaacctcctc

SEQ ID NO: 21783 - DNA, 852 bp, Muscodor strobelii
  misc_feature: SGI cDNA ID NO. 567381
  misc_feature: Encodes the peptide sequence at SEQ ID NO 21784
atgtccacaagtataagaaatggtgcaggcgacgctcttgcaagtgagcaggagcctcttctccctctatcgtcgaagacctcgtccgggacacgttgggcgcggttcagaaagcacttgaatgaggatgtgaccatcgatcgcaccgatctgattctcctctacgcgtattttctcaccggcttgctcgatacttcggctaccgcaatatgggggacctttgtctcgatgcagacgggtaacacggtcttcctagcgctaggtctcgccggcccagccacgtcgtcacgttggatcaaatctgggatatcactgttgtcgttctgtctcggctcatttttcttcgcgcgcattcactatgctattcaccctcgacgccgctggatcttgttgctgagcatcatcatccaagtcttgtttgttctcgccgctgcactcatcgtcgtatttacgcctgtgacggaagcgggagacggcaacgatctccattggcacgtgctcttacccctggcacttattgcatttcagagcagtggacaggcagtcgtcagtcgggtgctgaggcacagaacactgactagcgtggcactgacaagcatctactgcgacttgttctctgatgctgagttgcttgcggggttggccagcaacgttgagaggaatcgaagagtgacagctgcaatattgctgttcatcggagcattaaccggcggagcctggtcaagaatggatattggcatgacaggcgcgatatggacggcggtggtgatgaaatctttctacattccagtctggctattttggaaaaaggaacggaaagaagaagaaggtgagggcccgttgatcaactag

SEQ ID NO: 21784 - protein, 283 aa, Muscodor strobelii
  misc_feature: SGI Peptide ID NO. 567381
  misc_feature (53)..(264): Pfam Id: PF06912 Pfam Desc: Domain of function (DUF1275)
  misc_feature (12)..(276): NCBI GI: 212541116 Blast Desc: conserved [Penicillium marneffei ATCC 18224] gi|210068012|gb|EEA22104.1| conserved [Penicillium marneffei ATCC 18224]
  misc_feature (2)..(272): NCBI GI: 39969285 Blast Desc: MGG_10253 [Magnaporthe grisea 70-15] gi|149211109|ref|XP_001522929.1| MGCH7_ch7g1017 [Magnaporthe grisea 70-15] gi|86196972|gb|EAQ71610.1| MGCH7_ch7g1017 grisea
  misc_feature (1)..(278): NCBI GI: 189195254 Blast Desc: PTRG_03632 [Pyrenophora tritici-repentis Pt-1C-BFP] gi|187979844|gb|EDU46470.1| PTRG_03632 [Pyrenophora tritici-repentis Pt-1C-BFP]
  misc_feature (15)..(272): NCBI GI: 242799619 Blast Desc: conserved [Talaromyces stipitatus ATCC 10500] gi|218716763|gb|EED16184.1| conserved [Talaromyces stipitatus ATCC 10500]
  misc_feature (15)..(258): NCBI GI: 85114953 Blast Desc: NCU00866 [Neurospora crassa OR74A] gi|28926576|gb|EAA35546.1| conserved [Neurospora crassa OR74A]
  misc_feature (6)..(276): NCBI GI: 116192717 Blast Desc: CHGG_06076 [Chaetomium globosum CBS 148.51] gi|88181989|gb|EAQ89457.1| CHGG_06076 [Chaetomium globosum CBS 148.51]
  misc_feature (14)..(276): NCBI GI: 145234733 Blast Desc: An03g01130 [Aspergillus niger] gi|134057688|emb|CAK38086.1| protein product [Aspergillus niger]
  misc_feature (8)..(275): NCBI GI: 255930869 Blast Desc: Pc12g00910 [Penicillium chrysogenum Wisconsin 54-1255] gi|211581610|emb|CAP79718.1| Pc12g00910 [Penicillium chrysogenum Wisconsin 54-1255]
  misc_feature (16)..(272): NCBI GI: 256720349 Blast Desc: NECHADRAFT_18644 [Nectria haematococca mpVI 77-13-4]
  misc_feature (16)..(271): NCBI GI: 261358020 Blast Desc: conserved [Verticillium albo-atrum VaMs.102]
MSTSIRNGAGDALASEQEPLLPLSSKTSSGTRWARFRKHLNEDVTIDRTDLILLYAYFLTGLLDTSATAIWGTFVSMQTGNTVFLALGLAGPATSSRWIKSGISLLSFCLGSFFFARIHYAIHPRRRWILLLSIIIQVLFVLAAALIVVFTPVTEAGDGNDLHWHVLLPLALIAFQSSGQAVVSRVLRHRTLTSVALTSIYCDLFSDAELLAGLASNVERNRRVTAAILLFIGALTGGAWSRMDIGMTGAIWTAVVMKSFYIPVWLFWKKERKEEEGEGPLIN

SEQ ID NO: 21785 - DNA, 1873 bp, Muscodor strobelii
  misc_feature: SGI EST ID NO. CUFF.51190.0
  misc_feature: Variant of the nucleotide sequence at SEQ ID NO 21783
cgagacgatacgaagcgcgatgttttcgcgagatttttggcctatataagatctattaccctctaagacatgataacatctatagacccgtagtgcaccacatgagatgcagtcatgaggtcgagatgttgcattcttgagcgagagtgtcacgcgtaactctctcgacgcgtggccaaatggtgggggtcacattctgaacaaagtggctgaatatctgacagtggcgcacttgtgcatcgcacagcacataacggacttgattgttttctcatgagttaagacatatgcgaccgaatattctcgtcgcgcactaaaattgaagtgatccagcatgtcgcaagtcaattggagatcacgtacagaagttggggtcttgctggcggcccaagcatggattatgatgtcatggttcaattacctccgctatggccatgccaaaacgcgtgacagcttgaaactttctttgcttcgagaataactggtagagctgacgccaccaaacgatcgcgcatctcgccatgtccacaagtataagaaatggtgcaggcgacgctcttgcaagtgagcaggagcctcttctccctctatcgtcgaagacctcgtccgggacacgttgggcgcggttcagaaagcacttgaatgaggatgtgaccatcgatcgcaccgatctgattctcctctacgcgtattttctcaccggcttgctcgatacttcggctaccgcaatatgggggacctttgtctcgatgcagacgggtaacacggtcttcctagcgctaggtctcgccggcccagccacgtcgtcacgttggatcaaatctgggatatcactgttgtcgttctgtctcggctcatttttcttcgcgcgcattcactatgctattcaccctcgacgccgctggatcttgttgctgagcatcatcatccaagtcttgtttgttctcgccgctgcactcatcgtcgtatttacgcctgtgacggaagcgggagacggcaacgatctccattggcacgtgctcttacccctggcacttattgcatttcagagcagtggacaggcagtcgtcagtcgggtgctgaggcacagaacactgactagcgtggcactgacaagcatctactgcgacttgttctctgatgctgagttgcttgcggggttggccagcaacgttgagaggaatcgaagagtgacagctgcaatattgctgttcatcggagcattaaccggcggagcctggtcaagaatggatattggcatgacaggcgcgatatggacggcggtggtgatgaaatctttctacattccagtctggctattttggaaaaaggaacggaaagaagaagaaggtgagggcccgttgatcaactagtgttgatgatctttcgcattgcggtcatcccgacttggcccattgccctgagacaaccgtgtcgacgattacctatcacttcgctgtcacaaccaacttccgtcctcacatgtcctgatatcctccgtactttcacaatgtcatcgcgtcaattccttcgcaccatatcattctgatgcataccagaatgaccacaagaatatacgagagttgaacaacaggctccccatgacgaaaagcgttctcttcgtgacgaatggcatacggcagtgttgtaaacgctcatgtacggaaaactaataatggactagctttataattgattttcgaacagaccggcgaatagggctagtatatatactcatctaaactcctatattatgcttcaaggagcggcccgtatcatctcgtgcggtgacccgaactggagggcagcttcgagacacgaattacatgctcattagaatctgtcaaatatggcgatacgaaattaaaatccg

SEQ ID NO: 21786 - DNA, 861 bp, Muscodor strobelii
  misc_feature: SGI cDNA ID NO. 567382
  misc_feature: Encodes the peptide sequence at SEQ ID NO 21787
ttcttgattctccttctaccggagaccctcagggcaattgtagggaatgggagctcaggaagcgttggattattcgtcaaatatcctctggtcgtttatcagaagacaacaaaagtcgaattcactcgtctacccgagcctcccctgactctccgcaaaacgaagatcgatctcctcggaccttttcggatccttttcagcaagcaagcagcatcattaattggcttcctcggaatatattatgctgtttggcaaatgagcattactgccatgtcgaccctgttcgaaacccgatatggtcttggcataactcacattggcttgactttcatcgcgaacggaagtggcgcgattgtcggtactctgatcactgggaaactgcttgatgcagattatcgtcgcgttcaaactacatacaaggttcacgagccagggacagagctgagtatcgagagtggtggtaacggagagaatgtcgcacctcctcagtcgaaccatccagatggctttggatttcctctagagaaggctcattccgttcatatcgcagtacctatcgttatgtcgtttatcacgggctggacattggtatcgacacaatcagctgtcatgacttacttggtcgacgcgtttccggagcacaaggcctcagcaagcgcaagcatgaaccttgccaggtgcctcctcgctgccggcggtacaagcattgtgataccccttgcgaatgctgtcggggtcggctggacttttactattgctgtagccgcccaacttgttgcgagcctgggcttattgattcaatggcggtatggtgcgaaatggaggcgtgaggctgacgaccaaagaatagcaccggcttag

SEQ ID NO: 21787 - protein, 286 aa, Muscodor strobelii
  misc_feature: SGI Peptide ID NO. 567382
  misc_feature (1)..(282): NCBI GI: 145246262 Blast Desc: An12g03020 [Aspergillus niger] gi|134080094|emb|CAK41140.1| protein product [Aspergillus niger]
  misc_feature (7)..(283): NCBI GI: 256727847 Blast Desc: NECHADRAFT_95267 [Nectria haematococca mpVI 77-13-4]
  misc_feature (1)..(277): NCBI GI: 115391695 Blast Desc: conserved [Aspergillus terreus NIH2624] gi|114194276|gb|EAU35976.1| conserved [Aspergillus terreus NIH2624]
  misc_feature (1)..(281): NCBI GI: 159128217 Blast Desc: MFS multidrug transporter, [Aspergillus fumigatus A1163]
  misc_feature (1)..(281): NCBI GI: 70986288 Blast Desc: MFS multidrug transporter [Aspergillus fumigatus Af293] gi|66846267|gb|EAL86600.1| MFS multidrug transporter, [Aspergillus fumigatus Af293]
  misc_feature (2)..(272): NCBI GI: 164429185 Blast Desc: NCU05207 [Neurospora crassa OR74A] gi|157072973|gb|EAA32970.2| conserved [Neurospora crassa OR74A]
  misc_feature (1)..(280): NCBI GI: 238505575 Blast Desc: MFS multidrug transporter, [Aspergillus flavus NRRL3357] gi|220690120|gb|EED46470.1| MFS multidrug transporter, [Aspergillus flavus NRRL3357]
  misc_feature (1)..(279): NCBI GI: 212526574 Blast Desc: MFS multidrug transporter, [Penicillium marneffei ATCC 18224] gi|210072842|gb|EEA26929.1| MFS multidrug transporter, [Penicillium marneffei ATCC 18224]
  misc_feature (2)..(282): NCBI GI: 242781245 Blast Desc: MFS multidrug transporter, [Talaromyces stipitatus ATCC 10500] gi|218719909|gb|EED19328.1| MFS multidrug transporter, [Talaromyces stipitatus ATCC 10500]
  misc_feature (7)..(280): NCBI GI: 240105392 Blast Desc: Major Facilitator Superfamily protein [Coccidioides posadasii C735 delta SOWgp]
FLILLLPETLRAIVGNGSSGSVGLFVKYPLVVYQKTTKVEFTRLPEPPLTLRKTKIDLLGPFRILFSKQAASLIGFLGIYYAVWQMSITAMSTLFETRYGLGITHIGLTFIANGSGAIVGTLITGKLLDADYRRVQTTYKVHEPGTELSIESGGNGENVAPPQSNHPDGFGFPLEKAHSVHIAVPIVMSFITGWTLVSTQSAVMTYLVDAFPEHKASASASMNLARCLLAAGGTSIVIPLANAVGVGWTFTIAVAAQLVASLGLLIQWRYGAKWRREADDQRIAPA

SEQ ID NO: 21788 - DNA, 879 bp, Muscodor strobelii
  misc_feature: SGI cDNA ID NO. 567383
  misc_feature: Encodes the peptide sequence at SEQ ID NO 21789
atgtctaccaacagcttcttgatatggggaggcagaggctgggtggccggccatcttgaacttcttcttcagcagcaagggaagaaggtctatacgaccacggtgcgcatggaagatagagaagccgtcaaactagagctcgagaagatcaagccaactcatgtcatcaactgcgctgggtgcacaggaagacctaacgttgattggtgcgaggagaataaggaagagactatgaggtctaatgtcatcggcgctcttaatttggctgacctctgctttctggcaaacatccactatactatattcgctacaggctgcatttatcagtacgacgacgctcacccgataggaggaacaacgtacaaagagacggaccctttcaatttcactggcagtttttactctcaaacgaaaggccatgtcgaagaggtcatgaagcattacacaaactgcctcgtgttacgtctccggatgcctgtctcagatgatttacacccgcgtagtttcgtcacgaaaatcagcaagtacgagcgcgtcgtggacatacccaatagcaacacagttctcacggacctgctgccggcggctatcctacttgccgagaatcgtgatacgggtgtatataacttcaccaatccaggtgccataagtcataacgaggttctcgctctatttcgggacatcgtccgccctggttttacttggcaaaacttcacgcttgaggaacaggcccatgtcatcaaggcagggcggagcaattgcgagctcgatacgactaagttggaaaacaaactcagagagtatggatatgtcgtgccagaagtccatgaagcttaccgtatgtgctttggtagaatgagggccgcgggtactgtgtga

SEQ ID NO: 21789 - protein, 292 aa, Muscodor strobelii
  misc_feature: SGI Peptide ID NO. 567383
  misc_feature (6)..(211): Pfam Id: PF01370 Pfam Desc: NAD dependent epimerase/dehydratase family
  misc_feature (4)..(281): Pfam Id: PF04321 Pfam Desc: RmlD substrate binding domain
  misc_feature (6)..(148): Pfam Id: PF01370 Pfam Desc: NAD dependent epimerase/dehydratase family
  misc_feature (4)..(290): NCBI GI: 261358765 Blast Desc: NRS/ER [Verticillium albo-atrum VaMs.102]
  misc_feature (2)..(291): NCBI GI: 154322248 Blast Desc: conserved [Botryotinia fuckeliana B05.10] gi|150850518|gb|EDN25711.1| conserved [Botryotinia fuckeliana B05.10]
  misc_feature (6)..(290): NCBI GI: 164425639 Blast Desc: NCU10683 [Neurospora crassa OR74A] gi|157071005|gb|EDO65162.1| conserved [Neurospora crassa OR74A]
  misc_feature (2)..(290): NCBI GI: 171680815 Blast Desc: protein product [Podospora anserina] gi|27764300|emb|CAD60580.1| protein product [Podospora anserina] gi|170940035|emb|CAP65261.1| protein product [Podospora anserina]
  misc_feature (1)..(290): NCBI GI: 39958226 Blast Desc: MGG_09238 [Magnaporthe grisea 70-15] gi|59803144|gb|AAX07722.1| [Magnaporthe grisea] gi|145013321|gb|EDJ97962.1| MGG_09238 [Magnaporthe grisea 70-15]
  misc_feature (4)..(291): NCBI GI: 156060773 Blast Desc: SS1G_02529 [Sclerotinia sclerotiorum 1980] gi|154699933|gb|EDN99671.1| SS1G_02529 [Sclerotinia sclerotiorum 1980]
  misc_feature (6)..(290): NCBI GI: 116200640 Blast Desc: CHGG_10865 [Chaetomium globosum CBS 148.51] gi|88175579|gb|EAQ83047.1| CHGG_10865 [Chaetomium globosum CBS 148.51]
  misc_feature (2)..(270): NCBI GI: 256725313 Blast Desc: NECHADRAFT_45826 [Nectria haematococca mpVI 77-13-4]
  misc_feature (4)..(253): NCBI GI: 46127727 Blast Desc: FG08241.1 [Gibberella zeae PH-1]
  misc_feature (7)..(288): NCBI GI: 219127859 Blast Desc: [Phaeodactylum tricornutum CCAP 1055/1] gi|217404375|gb|EEC44322.1| [Phaeodactylum tricornutum CCAP 1055/1]
MSTNSFLIWGGRGWVAGHLELLLQQQGKKVYTTTVRMEDREAVKLELEKIKPTHVINCAGCTGRPNVDWCEENKEETMRSNVIGALNLADLCFLANIHYTIFATGCIYQYDDAHPIGGTTYKETDPFNFTGSFYSQTKGHVEEVMKHYTNCLVLRLRMPVSDDLHPRSFVTKISKYERVVDIPNSNTVLTDLLPAAILLAENRDTGVYNFTNPGAISHNEVLALFRDIVRPGFTWQNFTLEEQAHVIKAGRSNCELDTTKLENKLREYGYVVPEVHEAYRMCFGRMRAAGTV

SEQ ID NO: 21790 - DNA, 1182 bp, Muscodor strobelii
  misc_feature: SGI cDNA ID NO. 567384
  misc_feature: Encodes the peptide sequence at SEQ ID NO 21791
atggttcttattaccaacggaaagccttctggattagtgacagcgagcggaaccatgaaggctatgaatcacgaccatgactctagcatctggaacaatgcgccattgctcatcggaagtacacagttcgagcatttaccagatgtcaagaatattatggtcactggcggtgcgggattcatcgcagggtggcttgttcgccatttgaccgtcacctaccctcagtaccacatcgtatccttcgataatcttgattattgcgcgtcactgaacaatactcgaatgctcaaccataagagaaactttacgttctatcacggagatattacaaacacgaacgaggtcctcgagtgtatggagcggttcaatatcgataccgtatttcatttcgcagctcaatctcatgtggacttgagcttcgacaattcatacagtttcacgcacacaaatgtatacggcacacatgttatgctcgaaaacgccaaaagagtaggagttaaacgatttatacacatatcaactgacgaggtctacggcgaggtggacgaagatggtgatgatcttttagaaacgagtctgttggcacctacaaatccttacgctgcaagcaaagcagcggcggaaatgttggttcattcatacgccaaaagcttcaagctcccagtcattatcgtacgaagtaataatgtgtacgggccacaccaatttcctgaaaagatcattccgaaattctcattactcctgcaacgtggcagacaaatggttctacatggtgacgggagtcccacgagacggtatctattcgcaggagacgccgcagatgccttcgatactatcctccaccgaggtgaaataggtcatgtgtacaacgtcggctcatatgacgaaatctcaaacatcaaactctgtagcttactattggaagggatgaatatcccgtgccaaagcccggccgactttgataaatgggtgaagcacactcgcgatagacccttcaatgatcagcgttatgcagtggacggcaccaaacttcgacagttgggatgggtacagaagacatcgattgagaagggtttgatgattacgttgaactggtatagtcagttcggcgagaaatggtggggtaacataagcaacatcctgacccctttcccgactatcgatagattatccacagactag

SEQ ID NO: 21791 - protein, 393 aa, Muscodor strobelii
  misc_feature: SGI Peptide ID NO. 567384
  misc_feature (53)..(320): Pfam Id: PF01073 Pfam Desc: 3-beta hydroxysteroid dehydrogenase/isomerase family
  misc_feature (52)..(292): Pfam Id: PF01370 Pfam Desc: NAD dependent epimerase/dehydratase family
  misc_feature (54)..(276): Pfam Id: PF07993 Pfam Desc: Male sterility protein
  misc_feature (52)..(299): Pfam Id: PF02719 Pfam Desc: Polysaccharide biosynthesis protein
  misc_feature (50)..(333): Pfam Id: PF04321 Pfam Desc: RmlD substrate binding domain
  misc_feature (53)..(211): Pfam Id: PF01073 Pfam Desc: 3-beta hydroxysteroid dehydrogenase/isomerase family
  misc_feature (123)..(226): Pfam Id: PF07993 Pfam Desc: Male sterility protein
  misc_feature (107)..(175): Pfam Id: PF02719 Pfam Desc: Polysaccharide biosynthesis protein
  misc_feature (26)..(387): NCBI GI: 154311283 Blast Desc: conserved [Botryotinia fuckeliana B05.10] gi|150850891|gb|EDN26084.1| conserved [Botryotinia fuckeliana B05.10]
  misc_feature (3)..(387): NCBI GI: 156065271 Blast Desc: conserved [Sclerotinia sclerotiorum 1980] gi|154691505|gb|EDN91243.1| conserved [Sclerotinia sclerotiorum 1980]
  misc_feature (27)..(387): NCBI GI: 145608848 Blast Desc: MGG_06324 [Magnaporthe grisea 70-15] gi|145016278|gb|EDK00768.1| MGG_06324 [Magnaporthe grisea 70-15]
  misc_feature (16)..(387): NCBI GI: 256725444 Blast Desc: NECHADRAFT_45636 [Nectria haematococca mpVI 77-13-4]
  misc_feature (15)..(387): NCBI GI: 46122179 Blast Desc: FG05467.1 [Gibberella zeae PH-1]
  misc_feature (21)..(390): NCBI GI: 261358248 Blast Desc: dTDP-D-glucose 4,6-dehydratase [Verticillium albo-atrum VaMs.102]
  misc_feature (30)..(387): NCBI GI: 256729918 Blast Desc: [Nectria haematococca mpVI 77-13-4]
  misc_feature (4)..(387): NCBI GI: 116207954 Blast Desc: CHGG_03270 [Chaetomium globosum CBS 148.51] gi|88183867|gb|EAQ91335.1| CHGG_03270 [Chaetomium globosum CBS 148.51]
  misc_feature (30)..(374): NCBI GI: 189203413 Blast Desc: dTDP-D-glucose 4,6-dehydratase [Pyrenophora tritici-repentis Pt-1C-BFP] gi|187985141|gb|EDU50629.1| dTDP-D-glucose 4,6-dehydratase [Pyrenophora tritici-repentis
  misc_feature (28)..(384): NCBI GI: 119500660 Blast Desc: dtdp-glucose 4,6-dehydratase [Neosartorya fischeri NRRL 181] gi|119415252|gb|EAW25190.1| dtdp-glucose 4,6-dehydratase [Neosartorya fischeri NRRL 181]
  misc_feature (50)..(386): SWISSPROT Homolog: EC 4.2.1.46 dTDP-glucose 4,6-dehydratase
MVLITNGKPSGLVTASGTMKAMNHDHDSSIWNNAPLLIGSTQFEHLPDVKNIMVTGGAGFIAGWLVRHLTVTYPQYHIVSFDNLDYCASLNNTRMLNHKRNFTFYHGDITNTNEVLECMERFNIDTVFHFAAQSHVDLSFDNSYSFTHTNVYGTHVMLENAKRVGVKRFIHISTDEVYGEVDEDGDDLLETSLLAPTNPYAASKAAAEMLVHSYAKSFKLPVIIVRSNNVYGPHQFPEKIIPKFSLLLQRGRQMVLHGDGSPTRRYLFAGDAADAFDTILHRGEIGHVYNVGSYDEISNIKLCSLLLEGMNIPCQSPADFDKWVKHTRDRPFNDQRYAVDGTKLRQLGWVQKTSIEKGLMITLNWYSQFGEKWWGNISNILTPFPTIDRLSTD

SEQ ID NO: 21792 - DNA, 1362 bp, Muscodor strobelii
  misc_feature: SGI cDNA ID NO. 567385
  misc_feature: Encodes the peptide sequence at SEQ ID NO 21793
atggaacctctaccaacgattttttcggatactgaaaacgatcgggagtttgcactgcctaaagaggacatagatactcctctattacgccgaggcagcagacgttccagcgacgaccggattgttccgccttttccatgggtcaattatgggacgttcgccctgctgggcatggctatgttgtggtcttggaatatgtttcttgctgcatcaccatacttccaggtccggtttcagacgaatagatgggtcttagaaaactcacagtcggccattatagccatttcgacggtttcgaacttagtggccatgtcaattcttactaatatgaaatgcatcagctattcttcacgaatttacttgggtttatccatcaactttgctgttttcgcactcttggcaatttctacagtaatctgcgaacacattgggcccagccagtacctagggttcattctggttatggccgtcacttcctcttgggcttcctgtctggtacagaacggatgcctcgcgtttgctgctggtttcggccgacccgaatacatgcaggccatcatggcagggcagggcgtctcaggtgtacttccgtctgtggcccaaatcgtgtcagttctcataacgacatcgggtaaagcagtctcaggtgcaccgcgagaagtcgattctatcgcgcgaaactcgacattggtctacttcctatccgctgttttcgtttacttcgtggttgttctggcattcatcccactcgaaaggttacatagccagctaggcgggcgtcattctgcgtcgaccgaggaccatcttgaaaacgatgagggcgctcacaagcttgtcgggttgacaactgtgttcaagaagctctactggtgctgcgcagctgtatttacatgcttcgtcattgctatgttctttcctgttttgacacctaagatattgtccgtgacaccgcctgcacaggcgagtccactcctgacacctgcggcattcatccctctggctttattcttctggaatctgggcgatctaatcggacgagcaagcgcgctagtattgccgttccgtggacctcaagctttgcttttcaccctgagcatcgccagggttctgtttctaccactttatgcattgtgcaatcttcatggccggggtgccgtcatctccagcgacctcttttacttacttctcgtgcaatttccttacgggctgacaaatggatggctcgcaagcaattgcatgatgagtgcatgtgaaagggtcgacaaagacgaaagggagcttgcaggcgggcttatggctttgtgcctgacatttgggctcgcatttgggagtgttttgagcttcaccgccgcaggaatctga

SEQ ID NO: 21793 - protein, 453 aa, Muscodor strobelii
  misc_feature: SGI Peptide ID NO. 567385
  misc_feature (153)..(452): Pfam Id: PF01733 Pfam Desc: Nucleoside transporter
  misc_feature (330)..(448): Pfam Id: PF01733 Pfam Desc: Nucleoside transporter
  misc_feature (153)..(205): Pfam Id: PF01733 Pfam Desc: Nucleoside transporter
  misc_feature (12)..(453): NCBI GI: 39940112 Blast Desc: MGG_05184 [Magnaporthe grisea 70-15] gi|145010550|gb|EDJ95206.1| MGG_05184 [Magnaporthe grisea 70-15]
  misc_feature (1)..(453): NCBI GI: 171685840 Blast Desc: protein product [Podospora anserina] gi|170942881|emb|CAP68534.1| protein product [Podospora anserina]
  misc_feature (14)..(432): NCBI GI: 85087093 Blast Desc: NCU00356 [Neurospora crassa OR74A] gi|28918922|gb|EAA28591.1| conserved [Neurospora crassa OR74A]
  misc_feature (15)..(451): NCBI GI: 189206770 Blast Desc: nucleoside transporter family [Pyrenophora tritici-repentis Pt-1C-BFP] gi|187975812|gb|EDU42438.1| nucleoside transporter family [Pyrenophora tritici-repentis
  misc_feature (18)..(453): NCBI GI: 154303440 Blast Desc: BC1G_09291 [Botryotinia fuckeliana B05.10] gi|150854602|gb|EDN29794.1| BC1G_09291 [Botryotinia fuckeliana B05.10]
  misc_feature (1)..(449): NCBI GI: 116207364 Blast Desc: CHGG_02975 [Chaetomium globosum CBS 148.51] gi|88183572|gb|EAQ91040.1| CHGG_02975 [Chaetomium globosum CBS 148.51]
  misc_feature (1)..(453): NCBI GI: 156044957 Blast Desc: SS1G_09667 [Sclerotinia sclerotiorum 1980] gi|154694062|gb|EDN93800.1| SS1G_09667 [Sclerotinia sclerotiorum 1980]
  misc_feature (45)..(451): NCBI GI: 169621331 Blast Desc: SNOG_13875 [Phaeosphaeria nodorum SN15] gi|160704234|gb|EAT78899.2| SNOG_13875 [Phaeosphaeria nodorum SN15]
  misc_feature (34)..(452): NCBI GI: 145258487 Blast Desc: An04g07070 [Aspergillus niger] gi|134074675|emb|CAK44707.1| protein product [Aspergillus niger]
  misc_feature (20)..(453): NCBI GI: 169771677 Blast Desc: [Aspergillus oryzae RIB40] gi|83768167|dbj|BAE58306.1| protein product [Aspergillus oryzae]
MEPLPTIFSDTENDREFALPKEDIDTPLLRRGSRRSSDDRIVPPFPWVNYGTFALLGMAMLWSWNMFLAASPYFQVRFQTNRWVLENSQSAIIAISTVSNLVAMSILTNMKCISYSSRIYLGLSINFAVFALLAISTVICEHIGPSQYLGFILVMAVTSSWASCLVQNGCLAFAAGFGRPEYMQAIMAGQGVSGVLPSVAQIVSVLITTSGKAVSGAPREVDSIARNSTLVYFLSAVFVYFVVVLAFIPLERLHSQLGGRHSASTEDHLENDEGAHKLVGLTTVFKKLYWCCAAVFTCFVIAMFFPVLTPKILSVTPPAQASPLLTPAAFIPLALFFWNLGDLIGRASALVLPFRGPQALLFTLSIARVLFLPLYALCNLHGRGAVISSDLFYLLLVQFPYGLTNGWLASNCMMSACERVDKDERELAGGLMALCLTFGLAFGSVLSFTAAGI

SEQ ID NO: 21794 - DNA, 1221 bp, Muscodor strobelii
  misc_feature: SGI cDNA ID NO. 567386
  misc_feature: Encodes the peptide sequence at SEQ ID NO 21795
atgctgctggcactggctgcctccccggaggaaatgcaaatcatgttgatctcggttacctacggaaacgttcccctcaggagttgcatgaagaatgtggtgtccatattccacgtactcgaccaagaactggcatggcgaaaagcacagggcaaacctgaaggcttcgctgcattaaagacatataaacccatcgttgctgcaggtgccgagcatcctttggaagaggaaattctaagggaggatggctttcatggagcggatggattgcatggtgtccacgcgacgtatccccatctaagcccagaggagacttggcagtctctctttgaagatggtattccaacacccaatcaagatccttcgtattataagttctttgtaccgtcgaagcttccggcacataaggagatcctacgcattttggccgaggagccagaaaaaacagttaccatatgtgcagtaggtcccatgacaaatttagctatggctgctgcagaggatccaattacatttctgcgagtcaaggaagtctgtgtcatgggtggcgccgtcgaggttccaggcaacatcacacccctcgctgaattcaatacttatgcagatgccattgctacagcccgagtgatggctctaacatcggctgttccgtcttcgacgatgcctgtcgtccccgagaccaagcttgcgccatacccagagaagctacctgaaagactgaaactgaccctgtttcccttggacatcactacaccgcatctcttaggcaggggtttcttctacgacactctctctgtggtaggagaaggaagtccgctagctacatggatcacccacattgtgggaagtgtctatcgccggatggaacgcattcgtggtccttttccggagcccgcgctaccattacatgaccctcttgtagtatggtatctcctcactcaggaagattcactatggcagcttgccaagaatgctccggaagacatccgcgttgaaacatcgggacagtggactcatggcatgcacattatagacaagcgtggacgtcctcgagcattaggagcagccgctagcgtacctagtcgcccagcctttgacgagattcccggcgacgatttcggatggctgagtgcaaagaggggcaatagggttaaccgcattgttggcagtccgggtttcgcgaagttcgcccctatgctgatggaccgtatctttggttga

SEQ ID NO: 21795 - protein, 406 aa, Muscodor strobelii
  misc_feature: SGI Peptide ID NO. 567386
  misc_feature (2)..(406): Pfam Id: PF01156 Pfam Desc: Inosine-uridine preferring nucleoside hydrolase
  misc_feature (148)..(202): Pfam Id: PF01156 Pfam Desc: Inosine-uridine preferring nucleoside hydrolase
  misc_feature (1)..(406): NCBI GI: 46107164 Blast Desc: FG00465.1 [Gibberella zeae PH-1]
  misc_feature (9)..(406): NCBI GI: 85111938 Blast Desc: NCU03084 [Neurospora crassa OR74A] gi|28925947|gb|EAA34941.1| conserved [Neurospora crassa OR74A]
  misc_feature (4)..(406): NCBI GI: 256735266 Blast Desc: [Nectria haematococca mpVI 77-13-4]
  misc_feature (1)..(405): NCBI GI: 145614584 Blast Desc: MGG_04540 [Magnaporthe grisea 70-15] gi|145021484|gb|EDK05613.1| MGG_04540 [Magnaporthe grisea 70-15]
  misc_feature (9)..(406): NCBI GI: 171687847 Blast Desc: protein product [Podospora anserina] gi|170943885|emb|CAP69537.1| protein product [Podospora anserina]
  misc_feature (1)..(406): NCBI GI: 156053237 Blast Desc: SS1G_06786 [Sclerotinia sclerotiorum 1980] gi|154704564|gb|EDO04303.1| SS1G_06786 [Sclerotinia sclerotiorum 1980]
  misc_feature (1)..(406): NCBI GI: 116180398 Blast Desc: CHGG_00827 [Chaetomium globosum CBS 148.51] gi|88185124|gb|EAQ92592.1| CHGG_00827 [Chaetomium globosum CBS 148.51]
  misc_feature (1)..(405): NCBI GI: 212542657 Blast Desc: nucleoside hydrolase, [Penicillium marneffei ATCC 18224] gi|210066390|gb|EEA20483.1| nucleoside hydrolase, [Penicillium marneffei ATCC 18224]
  misc_feature (9)..(406): NCBI GI: 154314612 Blast Desc: BC1G_04015 [Botryotinia fuckeliana B05.10] gi|150848637|gb|EDN23830.1| BC1G_04015 [Botryotinia fuckeliana B05.10]
  misc_feature (1)..(405): NCBI GI: 242769151 Blast Desc: nucleoside hydrolase, [Talaromyces stipitatus ATCC 10500] gi|218724907|gb|EED24324.1| nucleoside hydrolase, [Talaromyces stipitatus ATCC 10500]
MLLALAASPEEMQIMLISVTYGNVPLRSCMKNVVSIFHVLDQELAWRKAQGKPEGFAALKTYKPIVAAGAEHPLEEEILREDGFHGADGLHGVHATYPHLSPEETWQSLFEDGIPTPNQDPSYYKFFVPSKLPAHKEILRILAEEPEKTVTICAVGPMTNLAMAAAEDPITFLRVKEVCVMGGAVEVPGNITPLAEFNTYADAIATARVMALTSAVPSSTMPVVPETKLAPYPEKLPERLKLTLFPLDITTPHLLGRGFFYDTLSVVGEGSPLATWITHIVGSVYRRMERIRGPFPEPALPLHDPLVVWYLLTQEDSLWQLAKNAPEDIRVETSGQWTHGMHIIDKRGRPRALGAAASVPSRPAFDEIPGDDFGWLSAKRGNRVNRIVGSPGFAKFAPMLMDRIFG

SEQ ID NO: 21796 - DNA, 1731 bp, Muscodor strobelii
  misc_feature: SGI cDNA ID NO. 567387
  misc_feature: Encodes the peptide sequence at SEQ ID NO 21797
atggctgtcacacaggtcgccgaagtcaccgagcctccggtggtgcacaaaaaaatatcggtcgagctacctgctagtacgacaggcgacagcgcaatgccgctcgaaccaatttctttgtccgaaaagcctagggtccggaccaggttgcgattgtacggaattctggcttcactctatctttcattgttcctagctgcacttgacacgaccattgtctcgcagtctatcccgacaatatgtaccgagttacactcggctgcaggctacgtgtggattggtggggcctatctactcgccaacgccgcgacgggtcccatttggtccaaattcagtgacatctggggccgcaagccgatattcctcttggacatcgcagtgtttgctggcgctagcatttttgcggcccttagcaaatcaatggccgagctgatcgctgccagagccttgcagggtgttgctgccggtggtctgattatactgtcgactactatcatctccgacatgttcagtgtgcgcgaacgatcattctatctcggcctcactggctttgtctgggctatcgctggatctgctggaccgctcgttggcggggcttttacccaattcgtgacatggcgctggtgcttctggattaatctccccatttgtggacttacctttggccttggcttcattttgctagatgtcaataatccgcgcacaaaattcgttgagggtatcaaggctgtcgactggctcgggatctttttcattctggcagtcaccgttctcaccctggtcggtctaaatctaggcggagcacagttcccctggaacagtgccacagttattacgctgatcgtggttggggcggccacaattagcctcttcattttcaccgagtatcgccttgctacatatcccctcatgccgctcagtgtgttcaataacaaaatcaataatgctgtgttcatcctcgtgttcgcacatggcgccgtgcttgtcggtatcgagtactacatgccattataccttcaaagcgttcagcaagcatcgcccatccgtagtggcgttttgctattgccgttgatcgtggtacaagcagtcgtcgaaatcctgtccggctgggccattgaccgtaccggccgttatatcagatttctctggtctggctcgatactcatgacgttgggaaccggtctatacatactctttggtgttgacacaactactgcaatggttgtcggactggaaatcatcggcgcatttggtcccgcgctgctattccaagcacctgttgtcgcgattcaaaacagcgtcagccaggaggacaccgccgccgctacggcaactctatttttcctccgcaacatcggcatgtcattgtctgttgttgtaggaggcgtggtgtttgcaaatagcatgaacgcgcgccactcagcgctcgctacagctggcctcgacagttctgtgctcgaagctttgtcggggagcaatgcagccgccaatgtgtacatcacgcgggaaatacaggatgatgctcaacgtcgtgtcgtcctagaggcatttgcctggagcgtgagaaacatgttcatattgtacacggcgttctcggctataactgtcctcgctagcttcttcgtcaggcataaaaatttgactacggaacatacggaaacgaaaacaggattgaagcatttgagaaaatcggaaaattccaaagagtcttcggtacgagagttagagtag

SEQ ID NO: 21797 - protein, 576 aa, Muscodor strobelii
  misc_feature: SGI Peptide ID NO. 567387
  misc_feature (59)..(458): Pfam Id: PF07690 Pfam Desc: Major Facilitator Superfamily
  misc_feature (92)..(167): Pfam Id: PF00083 Pfam Desc: Sugar (and other) transporter
  misc_feature (22)..(567): NCBI GI: 238506441 Blast Desc: efflux pump antibiotic resistance protein, [Aspergillus flavus NRRL3357] gi|220689135|gb|EED45486.1| efflux pump antibiotic resistance protein, [Aspergillus flavus NRRL3357]
  misc_feature (1)..(570): NCBI GI: 240108645 Blast Desc: Major Facilitator Superfamily protein [Coccidioides posadasii C735 delta SOWgp]
  misc_feature (4)..(570): NCBI GI: 258577197 Blast Desc: [Uncinocarpus reesii 1704] gi|237903046|gb|EEP77447.1| [Uncinocarpus reesii 1704]
  misc_feature (47)..(574): NCBI GI: 121714200 Blast Desc: MFS transporter, [Aspergillus clavatus NRRL 1] gi|119402864|gb|EAW13285.1| MFS transporter, [Aspergillus clavatus NRRL 1]
  misc_feature (35)..(574): NCBI GI: 119477055 Blast Desc: MFS transporter, [Neosartorya fischeri NRRL 181] gi|119407384|gb|EAW17333.1| MFS transporter, [Neosartorya fischeri NRRL 181]
  misc_feature (36)..(574): NCBI GI: 238483239 Blast Desc: MFS transporter, [Aspergillus flavus NRRL3357] gi|220700908|gb|EED57246.1| MFS transporter, [Aspergillus flavus NRRL3357]
  misc_feature (1)..(530): NCBI GI: 119186233 Blast Desc: CIMG_03164 [Coccidioides immitis RS]
  misc_feature (47)..(565): NCBI GI: 146324237 Blast Desc: MFS transporter [Aspergillus fumigatus Af293] gi|129558000|gb|EAL91170.2| MFS transporter, [Aspergillus fumigatus Af293] gi|159127062|gb|EDP52178.1| MFS transporter,
  misc_feature (39)..(560): NCBI GI: 145253186 Blast Desc: An16g08080 [Aspergillus niger] gi|134083665|emb|CAK47057.1| protein product [Aspergillus niger]
  misc_feature (3)..(572): NCBI GI: 115491109 Blast Desc: conserved [Aspergillus terreus NIH2624] gi|114197042|gb|EAU38742.1| conserved [Aspergillus terreus NIH2624]
MAVTQVAEVTEPPVVHKKISVELPASTTGDSAMPLEPISLSEKPRVRTRLRLYGILASLYLSLFLAALDTTIVSQSIPTICTELHSAAGYVWIGGAYLLANAATGPIWSKFSDIWGRKPIFLLDIAVFAGASIFAALSKSMAELIAARALQGVAAGGLIILSTTIISDMFSVRERSFYLGLTGFVWAIAGSAGPLVGGAFTQFVTWRWCFWINLPICGLTFGLGFILLDVNNPRTKFVEGIKAVDWLGIFFILAVTVLTLVGLNLGGAQFPWNSATVITLIVVGAATISLFIFTEYRLATYPLMPLSVFNNKINNAVFILVFAHGAVLVGIEYYMPLYLQSVQQASPIRSGVLLLPLIVVQAVVEILSGWAIDRTGRYIRFLWSGSILMTLGTGLYILFGVDTTTAMVVGLEIIGAFGPALLFQAPVVAIQNSVSQEDTAAATATLFFLRNIGMSLSVVVGGVVFANSMNARHSALATAGLDSSVLEALSGSNAAANVYITREIQDDAQRRVVLEAFAWSVRNMFILYTAFSAITVLASFFVRHKNLTTEHTETKTGLKHLRKSENSKESSVRELE

SEQ ID NO: 21798 - DNA, 2708 bp, Muscodor strobelii
  misc_feature: SGI EST ID NO. CUFF.51225.0
  misc_feature: Variant of the nucleotide sequence at SEQ ID NO 21796
gggacaaaggataatgcagggatcattgactattaaccataataggtaaatccgagtcgccgaaccgctcttgtgggtaatgtacgatcactgaggcgcaaggaatcttgacacgtgacagtcatatctctttaattgtcctgcagtgtgccgtcgctggggtggttgttaggtgggagatgccgccatgcaagcctcgcgcagctaggtacagcagggtcctgttggtggaatcgtataagccggggtctggggaagggtccagcggcatgggtctgttttcattacctaatcgcgctccgttttcttcccggacccggcgaccgttgcaatttgagattgccgagctgcaaaggaacatcgctcgacggcaaaacgggaaagctgcgggatctaaaagacacgacggggtagcctagtaattagcgcttgggtggaacccggggtgtgacgcatattcttgtcaacgcccccctcagtaatttccgttattcaaatctccgacctctttttctcaaatccaaagttgcaactcgcatccttcctttgacatctcaacccgtatacatctcgttctaacagaaagtactttgttttgctgaatttgtgtactatccacgacatttgcctgattatttgacaaaattttccctgagctagtgatggctgtcacacaggtcgccgaagtcaccgagcctccggtggtgcacaaaaaaatatcggtcgagctacctgctagtacgacaggcgacagcgcaatgccgctcgaaccaatttctttgtccgaaaagcctagggtccggaccaggttgcgattgtacggaattctggcttcactctatctttcattgttcctagctgcacttgacacgaccattgtctcgcagtctatcccgacaatatgtaccgagttacactcggctgcaggctacgtgtggattggtggggcctatctactcgccaacgccgcgacgggtcccatttggtccaaattcagtgacatctggggccgcaagccgatattcctcttggacatcgcagtgtttgctggcgctagcatttttgcggcccttagcaaatcaatggccgagctgatcgctgccagagccttgcagggtgttgctgccggtggtctgattatactgtcgactactatcatctccgacatgttcagtgtgcgcgaacgatcattctatctcggcctcactggctttgtctgggctatcgctggatctgctggaccgctcgttggcggggcttttacccaattcgtgacatggcgctggtgcttctggattaatctccccatttgtggacttacctttggccttggcttcattttgctagatgtcaataatccgcgcacaaaattcgttgagggtatcaaggctgtcgactggctcgggatctttttcattctggcagtcaccgttctcaccctggtcggtctaaatctaggcggagcacagttcccctggaacagtgccacagttattacgctgatcgtggttggggcggccacaattagcctcttcattttcaccgagtatcgccttgctacatatcccctcatgccgctcagtgtgttcaataacaaaatcaataatgctgtgttcatcctcgtgttcgcacatggcgccgtgcttgtcggtatcgagtactacatgccattataccttcaaagcgttcagcaagcatcgcccatccgtagtggcgttttgctattgccgttgatcgtggtacaagcagtcgtcgaaatcctgtccggctgggccattgaccgtaccggccgttatatcagatttctctggtctggctcgatactcatgacgttgggaaccggtctatacatactctttggtgttgacacaactactgcaatggttgtcggactggaaatcatcggcgcatttggtcccgcgctgctattccaagcacctgttgtcgcgattcaaaacagcgtcagccaggaggacaccgccgccgctacggcaactctatttttcctccgcaacatcggcatgtcattgtctgttgttgtaggaggcgtggtgtttgcaaatagcatgaacgcgcgccactcagcgctcgctacagctggcctcgacagttctgtgctcgaagctttgtcggggagcaatgcagccgccaatgtgtacatcacgcgggaaatacaggatgatgctcaacgtcgtgtcgtcctagaggcatttgcctggagcgtgagaaacatgttcatattgtacacggcgttctcggctataactgtcctcgctagcttcttcgtcaggcataaaaatttgactacggaacatacggaaacgaaaacaggattgaagcatttgagaaaatcggaaaattccaaagagtcttcggtacgagagttagagtagatagatgtggcaatcgaaatttacactctccgtcgtgtacggacttatattatttgtgtctatcgcattgtctttcttgaaccgcagcgagatactgaggcatttcggggaggttgtgtctgaatgtcgttaacgatgcatggactaggcggcgcacaggctacgatgtggtgtacataccctcatttcgcagcccttgttgaaataattggccatttttctccttatacaatatcaatatttactaccagaatttaccggtagtcaaaaatagtgacggaacgagcggtttaaacagcggctatactgcaattg

SEQ ID NO: 21799 - DNA, 4503 bp, Muscodor strobelii
  misc_feature: SGI cDNA ID NO. 567388
  misc_feature: Encodes the peptide sequence at SEQ ID NO 21800
atggattactcggagtccatcctatggtttgtggaccatcatgactggtcggctgccacttcgaatatttcgaatctggcaattccgtccgctgccagctctaatgtcttcacagtccaaactagccctcatattgctctgcgacttatcccggaagtcgtactgctggcactcgtaccattcagaatcagtcagttattcggagcacagatcaaagttctctcgaattatacgggtgctatcaaactaataatcacagtggcaattgtgttattacagattgccgcactgattttatattcggtccaatctgcgggcgggattgacaccgcaatcattgaacgtgttgttgcgctctcggctggtctcgtactttctcccttggtgttcttcgaccatggtagaactactaagccgtccactatattgacactctatttgttggcgtccatctttatagacggtttcttcgtactcccacctctgttctcccgcaatggcgacttcgctgttcccggagtactggctgcagcctctgtctccaaattacttctctttatcatcgaatccatcagcaaacggaactacctaagagatccatacaagtcattatctaaagaacagacaagtagcgttattgagcgcgcgtttctattctggataaatgggtttataattttgggacatagaaaactactaaatcatctcgacttacctggattggatgacagtctcgcctctagtggtttacgatcacggatggaggatatatgggatgatacaaccaagccagagtttgaaaatggggtagacagcggcggtgcattgctttgggcattgctaaagttcttcagactgcaactattactaaccgctatcccacgattgatgatggtggttttcacctactcacaacctatcttgattcacagcacagttagctatgttatggaaaagactgatgaatctgttaagggtcaacaccttatcatcgctgcgcttgtcatctacatgggcatggggatatccttttgcatttactatcagagtcataacagaatcaaggttcaaacacgtggtgccatagttggtctcgtccacggacggtgtatgacgatgcgcgatggagtctatgacggcgccgcagctgtgactcatatgagcagcgacacagaccacctagagaaatgggcttggctctcccaggagatatgggcacaactgatggaattcttcattggaatagccatgctctggactcagttggggtggtggtgccttaccccagttgttgtcgttgtggttctatcgcaagtggctagatggtcaggacgaaggatcagctacgctatggcggattggcaaggtgcaaagcagaaacgcatcgcactgacaacctctactattgactatatgaagcaaatcaaaatgatgggcgtgtcagacacagtaatggagaaagttcaagaaacaaggatggtagatctgatcaccggaatgtcataccgttggattattgtcttcatcaacgttggcgtgaatggaatatccatccttgctccagttttgacactaattgtctatgctaccgatgctttccttcgtggtagatcgcttgacccgaccacggcgtttacatctatcgcaacggtaactttagtaacaacccccgcaaatgtgattctggcgctctttcctcaatttgccactgcctatggctgcgcgtcaagagttcagaaatatcttctcgggccagatcgagaggataaacgtggtttactcgagcccttaccccgttcatctgggctagcagagaatcaatgtatagctggagactttccacccagctcatcggcgcttgacgcgtttccggccataatattcaaagacttaagacttcgcccagctccagatgccggtatctgtttggatggcataagtgcacggctcaataggggctcgttaagtatcttctacggtcccatcggatccggcaagacgactctggccagagccattctcggtgatgttacgccggatagaggctctatctgtgtgttgggaaaacatattgcatattgtgcccaacgaccctggctcataaacactagtattagagcgatggtgtgtggtctctccgacgacaaagaaatcgatgatgagtggtaccggactgtcatttgggcttgtggcctcgatgaggacgttcgacagcttattgacgctgatttaaccgccgtgggtagccgtggagccacattatctggcggtcagaagcaaagggtggctctcgctagagcagtatattccaggcctgaaatagtcattctagatgatgttttgagtgcgttggatccgaaaactgaagctcatgtcgtcgagaggctgcttggttcagacggccttctccgtcaactaaaagcaacagtgatcttaataacccatgccacacagcatctgcctttagccgataagatcttggtcctgaacgattctaagattgaagcacaaggtacttgggatgagctccagggttcctcagactaccttggcaagacaaaaatcgagaaatcaagctcagaccacatcgatgatacaaatggcataagtagcgcatcgcaggtagacacaccgcagatccgtcgacaagctggacctacctcctcaccttgccaaagtggtgacttttcggtatacttatactatttcaaatctataagtatgcccgtgatggcattgtttatcagctgcaatatcatagatggcgttgcgcttgcaattacaccctcgatattgaagacatggtcagagtcaggtggcgaacatacttggttttacatgaccatatatgctctctcgtcgattctgtcatttgctgccaccgtgtctgtcatttggtcaacgattattgtcattgcccctaaggcgggaaacgttctccatcatcgactattgaacatcatcatgagagcaccattatcttattttgccgtcaccgacacaggagagaccctaaatcgatttactgaagacatgagctacgtagaccatgatctacccttcaacctgatgaacacgttttggaagttctctaaattgatctcgcaactggtgctgttattcatctcgcagggattcgtcgcgataggggcgcccttcttattcctgatcctttacttcttacagaagctatatttacacacatctcgacaagtacgatacctagacatcgaattgagagcccaggttatcaccgattttctagagacgctcgaaggtatatctcatatccgcgcgttcagctggcaggctcagtctatcgaacaaaacatcagacatcttgacgtatcccagagagctcattatatgatgctttctattcagcaatggcttacgcttgtgctcgacatgctggttgcaggtctctgtgttctcgtcgttagcttagcagtcatttttagaactactactactggtggccagatcggcattgccctactcatcatccagaccatttctggtactctcacgcgtcttctacaggcatggactcagcttgaaacttcacttggagctgtgtctcgcatcaagttcctagatgagactgttcttccggaggacaaagaatgcgagtccttcgagccagctcccgagtggcctcacatgggcatgatagagttcgacaatgttgtcgcttcatatagctccgctgccactgctttgaagggtgtctcggtgaagatcttaccaggtcagcgggtaggagtatgtggccgtacaggaagcgggaaatccactttactcctgtccatactgcgtctgatcgagctagattctgggaccatcaccattgatggccaagatctgcgcacgcttccccgccaaacaattcgatctaggatgatcacaatcccacaggacgcatacgttctggatgatagtatacgactgaacatggaccctacaggcgtagcgtccgacgaagaaatgatagctgcgcttgagagggtcaagttatgggatcttctcaaaagtcgcgttcccaatgatcaaaatagcactacagaactacccacaacggaagctgagcatgatcctctagatgcacgacttcagaacgcgcctctgtctcatggtcaatttcagctcttcggtcttgctcgagctcttctgcgaaagagttgttcgcgcatagtactgctggatgaagcgacgagcaacgtcgatgcagcaacagatgaattaatgcagcgcatcatccgcgaggagttttctcaacatactatcataacagttgcccaccgactcgataccatcaaggatgctgatattattgtagttctagataagggtatgattgtggagttgggtactccagatgatttattagccaaggagataaacgtacgatccccaaatgaagggagccatgattatgaggaagaacaacaaaagacaaaagcgtggtttcgcgaaatgttaaagtcaggtcatcatgactaa

SEQ ID NO: 21800 - protein, 1500 aa, Muscodor strobelii
  misc_feature: SGI Peptide ID NO. 567388
  misc_feature (910)..(1176): Pfam Id: PF00664 Pfam Desc: ABC transporter transmembrane region
  misc_feature (1251)..(1451): Pfam Id: PF00005 Pfam Desc: ABC transporter
  misc_feature (653)..(832): Pfam Id: PF00005 Pfam Desc: ABC transporter
  misc_feature (663)..(832): Pfam Id: PF00005 Pfam Desc: ABC transporter
  misc_feature (57)..(1471): NCBI GI: 242796555 Blast Desc: multidrug resistance protein, [Talaromyces stipitatus ATCC 10500] gi|218719411|gb|EED18831.1| multidrug resistance protein, [Talaromyces stipitatus ATCC 10500]
  misc_feature (47)..(1469): NCBI GI: 240106194 Blast Desc: ABC transporter family protein [Coccidioides posadasii C735 delta SOWgp]
  misc_feature (69)..(1465): NCBI GI: 238837766 Blast Desc: ABC transporter [Microsporum canis CBS 113480]
  misc_feature (47)..(1466): NCBI GI: 119175968 Blast Desc: CIMG_09753 [Coccidioides immitis RS]
  misc_feature (47)..(1466): NCBI GI: 240108805 Blast Desc: multidrug resistance protein MDR, [Coccidioides posadasii C735 delta SOWgp]
  misc_feature (47)..(1478): NCBI GI: 242811997 Blast Desc: ATP-binding cassette transporter, [Talaromyces stipitatus ATCC 10500] gi|218714206|gb|EED13629.1| ATP-binding cassette transporter, [Talaromyces stipitatus ATCC 10500]
  misc_feature (49)..(1474): NCBI GI: 242795337 Blast Desc: ATP-binding cassette transporter, [Talaromyces stipitatus ATCC 10500] gi|218719153|gb|EED18573.1| ATP-binding cassette transporter, [Talaromyces stipitatus ATCC 10500]
  misc_feature (100)..(1466): NCBI GI: 258572800 Blast Desc: UREG_04679 [Uncinocarpus reesii 1704] gi|237905432|gb|EEP79833.1| UREG_04679 [Uncinocarpus reesii 1704]
  misc_feature (29)..(1474): NCBI GI: 212536286 Blast Desc: multidrug resistance-associated protein, [Penicillium marneffei ATCC 18224] gi|210070698|gb|EEA24788.1| multidrug resistance-associated protein, [Penicillium marneffei ATCC 18224]
  misc_feature (60)..(1465): NCBI GI: 255940098 Blast Desc: Pc16g04670 [Penicillium chrysogenum Wisconsin 54-1255] gi|211585441|emb|CAP93137.1| Pc16g04670 [Penicillium chrysogenum Wisconsin 54-1255]
  misc_feature (205)..(1466): SWISSPROT Homolog: EC 3.6.3.44 Xenobiotic-transporting ATPase
MDYSESILWFVDHHDWSAATSNISNLAIPSAASSNVFTVQTSPHIALRLIPEVVLLALVPFRISQLFGAQIKVLSNYTGAIKLIITVAIVLLQIAALILYSVQSAGGIDTAIIERVVALSAGLVLSPLVFFDHGRTTKPSTILTLYLLASIFIDGFFVLPPLFSRNGDFAVPGVLAAASVSKLLLFIIESISKRNYLRDPYKSLSKEQTSSVIERAFLFWINGFIILGHRKLLNHLDLPGLDDSLASSGLRSRMEDIWDDTTKPEFENGVDSGGALLWALLKFFRLQLLLTAIPRLMMVVFTYSQPILIHSTVSYVMEKTDESVKGQHLIIAALVIYMGMGISFCIYYQSHNRIKVQTRGAIVGLVHGRCMTMRDGVYDGAAAVTHMSSDTDHLEKWAWLSQEIWAQLMEFFIGIAMLWTQLGWWCLTPVVVVVVLSQVARWSGRRISYAMADWQGAKQKRIALTTSTIDYMKQIKMMGVSDTVMEKVQETRMVDLITGMSYRWIIVFINVGVNGISILAPVLTLIVYATDAFLRGRSLDPTTAFTSIATVTLVTTPANVILALFPQFATAYGCASRVQKYLLGPDREDKRGLLEPLPRSSGLAENQCIAGDFPPSSSALDAFPAIIFKDLRLRPAPDAGICLDGISARLNRGSLSIFYGPIGSGKTTLARAILGDVTPDRGSICVLGKHIAYCAQRPWLINTSIRAMVCGLSDDKEIDDEWYRTVIWACGLDEDVRQLIDADLTAVGSRGATLSGGQKQRVALARAVYSRPEIVILDDVLSALDPKTEAHVVERLLGSDGLLRQLKATVILITHATQHLPLADKILVLNDSKIEAQGTWDELQGSSDYLGKTKIEKSSSDHIDDTNGISSASQVDTPQIRRQAGPTSSPCQSGDFSVYLYYFKSISMPVMALFISCNIIDGVALAITPSILKTWSESGGEHTWFYMTIYALSSILSFAATVSVIWSTIIVIAPKAGNVLHHRLLNIIMRAPLSYFAVTDTGETLNRFTEDMSYVDHDLPFNLMNTFWKFSKLISQLVLLFISQGFVAIGAPFLFLILYFLQKLYLHTSRQVRYLDIELRAQVITDFLETLEGISHIRAFSWQAQSIEQNIRHLDVSQRAHYMMLSIQQWLTLVLDMLVAGLCVLVVSLAVIFRTTTTGGQIGIALLIIQTISGTLTRLLQAWTQLETSLGAVSRIKFLDETVLPEDKECESFEPAPEWPHMGMIEFDNVVASYSSAATALKGVSVKILPGQRVGVCGRTGSGKSTLLLSILRLIELDSGTITIDGQDLRTLPRQTIRSRMITIPQDAYVLDDSIRLNMDPTGVASDEEMIAALERVKLWDLLKSRVPNDQNSTTELPTTEAEHDPLDARLQNAPLSHGQFQLFGLARALLRKSCSRIVLLDEATSNVDAATDELMQRIIREEFSQHTIITVAHRLDTIKDADIIVVLDKGMIVELGTPDDLLAKEINVRSPNEGSHDYEEEQQKTKAWFREMLKSGHHD

SEQ ID NO: 21801 - DNA, 1215 bp, Muscodor strobelii
  misc_feature: SGI cDNA ID NO. 567389
  misc_feature: Encodes the peptide sequence at SEQ ID NO 21802
atgctttacccagcaaaccagctccaacttggcggtcaagacggaaggctcgcaaaatggctcatgccagagatcttacgtgaaatctccaagccagatccagacatgacatcgatcgctactttgcttaagttctaccgtgtcgtacatgttacaacaacacggcactcaggcaagaagactcgtccacgtcactcaagcttgaaacttaacccaaagccgaaaggggcatcattacccttctgggtagacaccacacatctacagtttgcggcaaatgtgaaccggctgctcaggagccactcagcatgggtgatgacaccctgcgtcgccgtgtcctttgggaatagcttcaaagaaacgcttatgtggagtcgcttgctcgcagatgccccccaagacgccatgggtgacgaacattttcgtctaatgggccagttccagagctatggccatgcccgacctaatgcgttcgaggagatagcccttgaagcgtttgaacagcggctggcactttctcgaaaatacggaacttggttcgctgagcaggtttcacccgggtggcaacgtggtaatccgcgaaagcgttacatagatcgatggagcggcgcctatgatcgccttgtatggagtttcgggatccagggccatcctcgtgccgatcagatctggcgtctgatgaaagatcgtcttccatccgaccctgatgatgtcacgcgcacgttcccggaagacgtgactgacatagagcctgcactgcgccccaacacttttgccatccgatcgtggacatttccttaccacaatctgctgttctccatctatgaagaccagtgtggcaatttcttcctatgccacaccaaaagccgagacattcgggacatagtgcgcccacgacttgcagccctgtggaatgcaacgctgtgcaaatcgagagcatacaaagagcggctagaatcacttgccgaatttgaatggctctggtattggaccaaccctttcgtacgcggtggcgctacgactggtggggtgctttcagtctttttgcaaaggtccctgctcagcgaagggctgcatgtgaatatcccggatcactttgtaatgcaggatctgtacgctctaagcagcgaatggcgcttctatgttagcgagcgcgtggccaacctgtcggcgggaggagcccattccaccacggaagacgagaacgaggcatga

SEQ ID NO: 21802 - protein, 404 aa, Muscodor strobelii
  misc_feature: SGI Peptide ID NO. 567389
MLYPANQLQLGGQDGRLAKWLMPEILREISKPDPDMTSIATLLKFYRVVHVTTTRHSGKKTRPRHSSLKLNPKPKGASLPFWVDTTHLQFAANVNRLLRSHSAWVMTPCVAVSFGNSFKETLMWSRLLADAPQDAMGDEHFRLMGQFQSYGHARPNAFEEIALEAFEQRLALSRKYGTWFAEQVSPGWQRGNPRKRYIDRWSGAYDRLVWSFGIQGHPRADQIWRLMKDRLPSDPDDVTRTFPEDVTDIEPALRPNTFAIRSWTFPYHNLLFSIYEDQCGNFFLCHTKSRDIRDIVRPRLAALWNATLCKSRAYKERLESLAEFEWLWYWTNPFVRGGATTGGVLSVFLQRSLLSEGLHVNIPDHFVMQDLYALSSEWRFYVSERVANLSAGGAHSTTEDENEA

SEQ ID NO: 21803 - DNA, 322 bp, Muscodor strobelii
  misc_feature: SGI EST ID NO. CUFF.51248.0
  misc_feature: Variant of the nucleotide sequence at SEQ ID NO 21801
tacggaacttggttcgctgagcaggtttcacccgggtggcaacgtggtaatccgcgaaagcgttacatagatcgatggagcggcgcctatgatcgccttgtatggagtttcgggatccagggccatcctcgtgccgatcagatctggcgtctgatgaaagatcgtcttccatccgaccctgatgatgtcacgcgcacgttcccggaagacgtgactgacatagagcctgcactgcgccccaacacttttgccatccgatcgtggacatttccttaccacaatctgctgttctccatctatgaagaccagtgtggcaatttct

SEQ ID NO: 21804 - DNA, 876 bp, Muscodor strobelii
  misc_feature: SGI cDNA ID NO. 567390
  misc_feature: Encodes the peptide sequence at SEQ ID NO 21805
atggcgctcgacactctgtaccaatgtgtctacccgctgaagccccaagaacgcagcaggacaaagcccatgcaagtcctttgtctaggtctgccacgaaccgcaaccgactccctacgagtagctctcactacgcttggctactcttatgtctatcacggttttgatcacatcgccgatgccaacgattgcgtgaactgggttcatctctggtccctcaagacttcgggcaagccgattaaacgggccgattttgatcgtgtcatcggccactgcgaggcagtgacagatgccccggcttgcatgttttataaagagctaattgaggcttaccccgaggcaaagatcatcattaattaccgagaagatgtggaggcgtggcatagaagcgtcgttaactcatggagcacggcagagaagcgagctgggtggactcatcccctactctgctggtttcattctaaaatgttttgggtcaacgtcaacgagtaccgtctgacatacgggggcctatggaaacatgactataggaaatatgcgaaggatacataccacgaacattatgccgatctccgagccctcacgaaggacatgcctagggataaggtccttgagtttaaagcacaagatggctggggccctctctgtaagttcctgggcaaggagattccaaatgaggagtatccgaacagaaacgcactagaggcagttgtcgcgcaagtattgaagagtctcatgcaggactcgactgaggcgtggagaaacttgtctctaacactgggcctggctgttgcaggagcaggagcgttgatttggaaggtggatggtttttcagtatctcaaatactatctcgactcagtaagagtattatgtga

SEQ ID NO: 21805 - protein, 291 aa, Muscodor strobelii
  misc_feature: SGI Peptide ID NO. 567390
  misc_feature (1)..(246): NCBI GI: 242779403 Blast Desc: conserved [Talaromyces stipitatus ATCC 10500] gi|218723054|gb|EED22472.1| conserved [Talaromyces stipitatus ATCC 10500]
  misc_feature (3)..(232): NCBI GI: 145236236 Blast Desc: protein product [Aspergillus niger] gi|134075217|emb|CAK96530.1| protein product [Aspergillus niger]
  misc_feature (3)..(262): NCBI GI: 238838549 Blast Desc: conserved [Microsporum canis CBS 113480]
  misc_feature (4)..(271): NCBI GI: 121700340 Blast Desc: conserved [Aspergillus clavatus NRRL 1] gi|119396577|gb|EAW07009.1| conserved [Aspergillus clavatus NRRL 1]
  misc_feature (4)..(280): NCBI GI: 146324534 Blast Desc: conserved [Aspergillus fumigatus Af293] gi|129557294|gb|EAL89212.2| conserved [Aspergillus fumigatus Af293] gi|159130296|gb|EDP55409.1| conserved [Aspergillus A1163]
  misc_feature (14)..(274): NCBI GI: 46114948 Blast Desc: FG03316.1 [Gibberella zeae PH-1]
  misc_feature (15)..(256): NCBI GI: 171682186 Blast Desc: protein product [Podospora anserina] gi|170941052|emb|CAP66702.1| protein product [Podospora anserina]
  misc_feature (3)..(271): NCBI GI: 115390250 Blast Desc: conserved [Aspergillus terreus NIH2624] gi|114195026|gb|EAU36726.1| conserved [Aspergillus terreus NIH2624]
  misc_feature (4)..(280): NCBI GI: 119473169 Blast Desc: NFIA_059800 [Neosartorya fischeri NRRL 181] gi|119406674|gb|EAW16625.1| conserved [Neosartorya fischeri NRRL 181]
  misc_feature (20)..(288): NCBI GI: 121701191 Blast Desc: conserved [Aspergillus clavatus NRRL 1] gi|119397003|gb|EAW07434.1| conserved [Aspergillus clavatus NRRL 1]
MALDTLYQCVYPLKPQERSRTKPMQVLCLGLPRTATDSLRVALTTLGYSYVYHGFDHIADANDCVNWVHLWSLKTSGKPIKRADFDRVIGHCEAVTDAPACMFYKELIEAYPEAKIIINYREDVEAWHRSVVNSWSTAEKRAGWTHPLLCWFHSKMFWVNVNEYRLTYGGLWKHDYRKYAKDTYHEHYADLRALTKDMPRDKVLEFKAQDGWGPLCKFLGKEIPNEEYPNRNALEAVVAQVLKSLMQDSTEAWRNLSLTLGLAVAGAGALIWKVDGFSVSQILSRLSKSIM

SEQ ID NO: 21806 - DNA, 947 bp, Muscodor strobelii
  misc_feature: SGI EST ID NO. CUFF.51257.0
  misc_feature: Variant of the nucleotide sequence at SEQ ID NO 21804
ccgaggcaaagatcatcattaattaccgagaagatgtggaggcgtggcatagaagcgtcgttaactcatggagcacggcagagaagcgagctgggtggactcatcccctactctgctggtttcattctaaaatgttttgggtcaacgtcaacgagtaccgtctgacatacgggggcctatggaaacatgactataggaaatatgcgaaggatacataccacgaacattatgccgatctccgagccctcacgaaggacatgcctagggataaggtccttgagtttaaagcacaagatggctggggccctctctgtaagttcctgggcaaggagattccaaatgaggagtatccgaacagaaacgcactagaggcagttgtcgcgcaagtattgaagagtctcatgcaggactcgactgaggcgtggagaaacttgtctctaacactgggcctggctgttgcaggagcaggagcgttgatttggaaggtggatggtttttcagtatctcaaatactatctcgactcagtaagagtattatgtgaggtctgaattcatgtgggctcaagaatttgtagcatatgttcattcaatcgacttcatacatcgccaatagatatcttgtcttcttctgccagccatgtgttcccatcatcaatttgattgtctaagccttcggaagaaagtctcacatgccccatatagcagtatctcatcgacgtacttcgtctctttatccattttcatcatgcaggcgatcctgataacccaataaccgttgatgttctgaactcttcggatacaagcggcatcgcaatcagtcgattgagcttgcttagaaatagaaacaagatgctccagatgtcataaaaattctaggcttcacttctcaagagccaacgtgtagaaatttcggacctccatgacacagcttacaggtcatacgattg

SEQ ID NO: 21807 - DNA, 1641 bp, Muscodor strobelii
  misc_feature: SGI cDNA ID NO. 567391
  misc_feature: Encodes the peptide sequence at SEQ ID NO 21808
atggcggccatcaagcatcacaagcgtgttgctcatgaaacatcacacttgatcgcgtcacctgacacacatgatacgagcgcggagagctaccagacattcggcgatccagagccgggccatgaaagcgacgatagctctgcagtggaagagaaaggttacagccgtcttttcgtggcccaagttgttggtgcattattgataggcgtgttcacatccaatgtggacggttcgcttgttctcgcaacgcaccctgtcatttcttctgagtttcacaatctggaagattcaagttggttgtttatcagcttctggcttgcgggttctgctacgcagtctctttacggaaaagtgtgcgatatatatggccggcgaacaatcttggtactaagttatggcttgtttgcaattggatgtgcaatgattggtcttggtcaagcaatgtggcaaatcattctcggccgtgccctatctggctcggggcaagctgggatgtgggttttagctgcagtcgtcataactgatttggtccctttgagagaggttgcagcatggcaaagctatctgaatgtcgttgctacgattggccgaagctttggggggccattcggcgggtggctgtctgatgtcgtaggctggagatggtcatttcttggacaagtcccaatctttttagttgcgaccgcgctctgcttagtcgtattctcgaggcttgaaccacgaaacgaaggaggtgtctcggagaccacggcccccatcggcaatcttgccagatttgatttcattgggattgtcacacttggactaggaattctgaccctaatgttgcctttggagatcggaggccagaagattccctggtctcatcccacgatcttcattctgttcgccatcggattctccctgctcggtgtgttcgttgtggccgagactcgctgggcaaaggaacctgtctttcccatgagagtgttgcgaaaccgtcaaaccttttggggatatctcatcgtggggtgcattcttgcagctcagtccggaatggtattcacagttcccttgtacttccaggtaactcagagatcgtctagcaccggtgtgggagctcgtctattccccgccgtcgtaggtaatgcgattgggggcattgtgtcaggacattatatacgccggactggccggtacaagattttgacagtctttgccacgcttctctcagccctgagctacctacttatgactatccgatggaaaggagataccaattgggttgagtcatcgtacatttttccgggagggcttggatgtggcatcgtccaaagtgctgtgttcatagcgattcagagttccattgacgctgaagataaggcagcaggcatctctggctttttcttagcgacacaagttggcactgttataggaaccgcggcagttagtgcattgatgataggaggcttgcagcaatcgttgcgggtcaaactcatatctctagggctagaccaagctgagttgcgtgaagttctcaagaacgccgtcgccagcgtgcagtatcttgacaaaacatcaaagccgattgcaaaggcaatcgtatcatcatacgtcactggtctagaatatagccatggtaagtttccattttacatataa

SEQ ID NO: 21808 - protein, 546 aa, Muscodor strobelii
  misc_feature: SGI Peptide ID NO. 567391
  misc_feature (66)..(473): Pfam Id: PF07690 Pfam Desc: Major Facilitator Superfamily
  misc_feature (12)..(540): NCBI GI: 256727997 Blast Desc: NECHADRAFT_83345 [Nectria haematococca mpVI 77-13-4]
  misc_feature (59)..(539): NCBI GI: 46126685 Blast Desc: FG07720.1 [Gibberella zeae PH-1]
  misc_feature (24)..(539): NCBI GI: 169611837 Blast Desc: SNOG_09033 [Phaeosphaeria nodorum SN15] gi|111062105|gb|EAT83225.1| SNOG_09033 [Phaeosphaeria nodorum SN15]
  misc_feature (53)..(545): NCBI GI: 171680765 Blast Desc: protein product [Podospora anserina] gi|27764277|emb|CAD60557.1| protein product [Podospora anserina] gi|170940010|emb|CAP65236.1| protein product [Podospora anserina]
  misc_feature (69)..(541): NCBI GI: 256724340 Blast Desc: NECHADRAFT_53466 [Nectria haematococca mpVI 77-13-4]
  misc_feature (35)..(540): NCBI GI: 85094025 Blast Desc: NCU06040 [Neurospora crassa OR74A] gi|28921258|gb|EAA30567.1| conserved [Neurospora crassa OR74A]
  misc_feature (13)..(539): NCBI GI: 154293526 Blast Desc: BC1G_13902 [Botryotinia fuckeliana B05.10] gi|150845283|gb|EDN20476.1| BC1G_13902 [Botryotinia fuckeliana B05.10]
  misc_feature (4)..(539): NCBI GI: 145243634 Blast Desc: An11g03350 [Aspergillus niger] gi|134079017|emb|CAK48326.1| protein product [Aspergillus niger]
  misc_feature (38)..(539): NCBI GI: 256731568 Blast Desc: NECHADRAFT_85140 [Nectria haematococca mpVI 77-13-4]
  misc_feature (20)..(539): NCBI GI: 212538777 Blast Desc: multidrug resistance protein fnx1, [Penicillium marneffei ATCC 18224] gi|210069286|gb|EEA23377.1| multidrug resistance protein fnx1, [Penicillium marneffei ATCC 18224]
MAAIKHHKRVAHETSHLIASPDTHDTSAESYQTFGDPEPGHESDDSSAVEEKGYSRLFVAQVVGALLIGVFTSNVDGSLVLATHPVISSEFHNLEDSSWLFISFWLAGSATQSLYGKVCDIYGRRTILVLSYGLFAIGCAMIGLGQAMWQIILGRALSGSGQAGMWVLAAVVITDLVPLREVAAWQSYLNVVATIGRSFGGPFGGWLSDVVGWRWSFLGQVPIFLVATALCLVVFSRLEPRNEGGVSETTAPIGNLARFDFIGIVTLGLGILTLMLPLEIGGQKIPWSHPTIFILFAIGFSLLGVFVVAETRWAKEPVFPMRVLRNRQTFWGYLIVGCILAAQSGMVFTVPLYFQVTQRSSSTGVGARLFPAVVGNAIGGIVSGHYIRRTGRYKILTVFATLLSALSYLLMTIRWKGDTNWVESSYIFPGGLGCGIVQSAVFIAIQSSIDAEDKAAGISGFFLATQVGTVIGTAAVSALMIGGLQQSLRVKLISLGLDQAELREVLKNAVASVQYLDKTSKPIAKAIVSSYVTGLEYSHGKFPFYI

SEQ ID NO: 21809 - DNA, 1692 bp, Muscodor strobelii
  misc_feature: SGI cDNA ID NO. 567392
  misc_feature: Encodes the peptide sequence at SEQ ID NO 21810
atggcggccatcaagcatcacaagcgtgttgctcatgaaacatcacacttgatcgcgtcacctgacacacatgatacgagcgcggagagctaccagacattcggcgatccagagccgggccatgaaagcgacgatagctctgcagtggaagagaaaggttacagccgtcttttcgtggcccaagttgttggtgcattattgataggcgtgttcacatccaatgtggacggttcgcttgttctcgcaacgcaccctgtcatttcttctgagtttcacaatctggaagattcaagttggttgtttatcagcttctggcttgcgggttctgctacgcagtctctttacggaaaagtgtgcgatatatatggccggcgaacaatcttggtactaagttatggcttgtttgcaattggatgtgcaatgattggtcttggtcaagcaatgtggcaaatcattctcggccgtgccctatctggctcggggcaagctgggatgtgggttttagctgcagtcgtcataactgatttggtccctttgagagaggttgcagcatggcaaagctatctgaatgtcgttgctacgattggccgaagctttggggggccattcggcgggtggctgtctgatgtcgtaggctggagatggtcatttcttggacaagtcccaatctttttagttgcgaccgcgctctgcttagtcgtattctcgaggcttgaaccacgaaacgaaggaggtgtctcggagaccacggcccccatcggcaatcttgccagatttgatttcattgggattgtcacacttggactaggaattctgaccctaatgttgcctttggagatcggaggccagaagattccctggtctcatcccacgatcttcattctgttcgccatcggattctccctgctcggtgtgttcgttgtggccgagactcgctgggcaaaggaacctgtctttcccatgagagtgttgcgaaaccgtcaaaccttttggggatatctcatcgtggggtgcattcttgcagctcagtccggaatggtattcacagttcccttgtacttccaggtaactcagagatcgtctagcaccggtgtgggagctcgtctattccccgccgtcgtaggtaatgcgattgggggcattgtgtcaggacattatatacgccggactggccggtacaagattttgacagtctttgccacgcttctctcagccctgagctacctacttatgactatccgatggaaaggagataccaattgggttgagtcatcgtacatttttccgggagggcttggatgtggcatcgtccaaagtgctgtgttcatagcgattcagagttccattgacgctgaagataaggcagcaggcatctctggctttttcttagcgacacaagttggcactgttataggaaccgcggcagttagtgcattgatgataggaggcttgcagcaatcgttgcgggtcaaactcatatctctagggctagaccaagctgagttgcgtgaagttctcaagaacgccgtcgccagcgtgcagtatcttgacaaaacatcaaagccgattgcaaaggcaatcgtatcatcatacgtcactggtctagaatatagccatgcattttccttcggcagctccatcgtcgcatttttcgccgccttgctactccaagagcgaaagttgaagacttaa

SEQ ID NO: 21810 - protein, 563 aa, Muscodor strobelii
  misc_feature: SGI Peptide ID NO. 567392
  misc_feature (66)..(473): Pfam Id: PF07690 Pfam Desc: Major Facilitator Superfamily
  misc_feature (12)..(539): NCBI GI: 256727997 Blast Desc: NECHADRAFT_83345 [Nectria haematococca mpVI 77-13-4]
  misc_feature (59)..(561): NCBI GI: 46126685 Blast Desc: FG07720.1 [Gibberella zeae PH-1]
  misc_feature (24)..(562): NCBI GI: 169611837 Blast Desc: SNOG_09033 [Phaeosphaeria nodorum SN15] gi|111062105|gb|EAT83225.1| SNOG_09033 [Phaeosphaeria nodorum SN15]
  misc_feature (53)..(562): NCBI GI: 171680765 Blast Desc: protein product [Podospora anserina] gi|27764277|emb|CAD60557.1| protein product [Podospora anserina] gi|170940010|emb|CAP65236.1| protein product [Podospora anserina]
  misc_feature (35)..(562): NCBI GI: 85094025 Blast Desc: NCU06040 [Neurospora crassa OR74A] gi|28921258|gb|EAA30567.1| conserved [Neurospora crassa OR74A]
  misc_feature (69)..(540): NCBI GI: 256724340 Blast Desc: NECHADRAFT_53466 [Nectria haematococca mpVI 77-13-4]
  misc_feature (13)..(562): NCBI GI: 154293526 Blast Desc: BC1G_13902 [Botryotinia fuckeliana B05.10] gi|150845283|gb|EDN20476.1| BC1G_13902 [Botryotinia fuckeliana B05.10]
  misc_feature (4)..(561): NCBI GI: 145243634 Blast Desc: An11g03350 [Aspergillus niger] gi|134079017|emb|CAK48326.1| protein product [Aspergillus niger]
  misc_feature (20)..(561): NCBI GI: 212538777 Blast Desc: multidrug resistance protein fnx1, [Penicillium marneffei ATCC 18224] gi|210069286|gb|EEA23377.1| multidrug resistance protein fnx1, [Penicillium marneffei ATCC 18224]
  misc_feature (38)..(541): NCBI GI: 256731568 Blast Desc: NECHADRAFT_85140 [Nectria haematococca mpVI 77-13-4]
MAAIKHHKRVAHETSHLIASPDTHDTSAESYQTFGDPEPGHESDDSSAVEEKGYSRLFVAQVVGALLIGVFTSNVDGSLVLATHPVISSEFHNLEDSSWLFISFWLAGSATQSLYGKVCDIYGRRTILVLSYGLFAIGCAMIGLGQAMWQIILGRALSGSGQAGMWVLAAVVITDLVPLREVAAWQSYLNVVATIGRSFGGPFGGWLSDVVGWRWSFLGQVPIFLVATALCLVVFSRLEPRNEGGVSETTAPIGNLARFDFIGIVTLGLGILTLMLPLEIGGQKIPWSHPTIFILFAIGFSLLGVFVVAETRWAKEPVFPMRVLRNRQTFWGYLIVGCILAAQSGMVFTVPLYFQVTQRSSSTGVGARLFPAVVGNAIGGIVSGHYIRRTGRYKILTVFATLLSALSYLLMTIRWKGDTNWVESSYIFPGGLGCGIVQSAVFIAIQSSIDAEDKAAGISGFFLATQVGTVIGTAAVSALMIGGLQQSLRVKLISLGLDQAELREVLKNAVASVQYLDKTSKPIAKAIVSSYVTGLEYSHAFSFGSSIVAFFAALLLQERKLKT

SEQ ID NO: 21811 - DNA, 1662 bp, Muscodor strobelii
  misc_feature: SGI cDNA ID NO. 567393
  misc_feature: Encodes the peptide sequence at SEQ ID NO 21812
atggtgaaaaaagctgttgtctcgcagactctttcagacaagattgatccatacgcattgttcgaagccttgactggcaagaagattactcctggcgacttgtctgagagttcctctgcaagctcctctgagaccttttcggaagattttgactatgtgacaagctctaaggcgtacagactcaacactcgctacgagccacgcccagatccgccgccaagggattctgagctcaacatcggtgcaatcaacccttatgctctcgttgaggctatgcttgggcacaagctcgactatagtagcagttatgtctccaaggttatctccgacgttctccaaactgattatgatgagctttttgatatgaagaacaactcggtactctacgccggtcttgagctcaacgtagaggaacgccgagcagagaaactcagccgccgcgacatcaaaattctgccggaacaggatcttcagacacccgatctctccggaattcagaagcttagcgacctggaggctgttggcctcaggggggtcagtcaaagtagcgtcaagacggctcggctccagaatggcaagcttcacgtcgtactggatgctcgatccattgctcagacgctatccaatcgtcaggtcacaaggacaatcaacgaactggccgttccctttcgcgtggaagatgaacggagtttcggtgtaccgcccgtttgtgcgtggcgcaatattgatgaagtcgtcttcaaaaactaccacttcaagaacgcgcttcaaaatctccctgcaaacttcaatcagctagaagctcgggagaccagttacaagagcgtatttgcggattatagccccgccactacgcgctacgatggccctgttcaaggagcaacaagtaattcttggctgatcgctgccatttcttcggtcttttgggccgaccctactgttattcatcaggtattccgtggtgatggaccgccgtatcgtaaagatgaggccaatgctttgcctttccgacatgatgtcgagcttcatgacaaaggaggccgcaacaacgccgagaccagggtggtgaaagttgcttacgaggttcccatcaacaagacaatgaacgagcctgtgtactgccggtcctccggaggaaccgactactggccagccttgtacgaaaaggcttttgcgatgtggtttacggccaaggcaccctaccgaggacggcccgatcgcccagacatcacacagaccgcgcacggtgatcctgtcaaggccatggctcagatagatgggcgcgaaccacaatatttctttaccaagaatcacgatgatctgatcggccttgtacgtcatagttctgtcaacttcagagctaggtctcctatgtgcgcctggactcatgcgtctggagactttttccgtggtgcaaatttagtagccaaccatgcctattccattctcggttgggcgaatatcggaaatcgccaatactttgtaataaggaatccatggggagtgacagagccccgaggcttgacaagctaccctggtcttctcgatcgggtcgagccagcaatctggcctccagcttctctccttgatagtggcggtgtcatggccattgaggcaccttatttccgcgaatactttgcttgtatcggaaggaccgtatga

SEQ ID NO: 21812 - protein, 553 aa, Muscodor strobelii
  misc_feature: SGI Peptide ID NO. 567393
  misc_feature (15)..(550): NCBI GI: 39946748 Blast Desc: MGG_08526 [Magnaporthe grisea 70-15] gi|145012368|gb|EDJ97024.1| MGG_08526 [Magnaporthe grisea 70-15]
  misc_feature (15)..(550): NCBI GI: 256724159 Blast Desc: NECHADRAFT_86428 [Nectria haematococca mpVI 77-13-4]
  misc_feature (81)..(507): NCBI GI: 34540792 Blast Desc: thiol protease [Porphyromonas gingivalis W83] gi|37538283|sp|P25806.2|TPR_PORGI RecName: Full=Thiol protease gi|34397106|gb|AAQ66170.1| thiol protease [Porphyromonas W83]
  misc_feature (81)..(550): NCBI GI: 150852 Blast Desc: thiol protease [Porphyromonas gingivalis]
  misc_feature (185)..(507): NCBI GI: 260826055 Blast Desc: BRAFLDRAFT_74930 [Branchiostoma floridae] gi|229293331|gb|EEN63991.1| BRAFLDRAFT_74930 [Branchiostoma floridae]
  misc_feature (257)..(507): NCBI GI: 51011085 Blast Desc: calpain 9 [Danio rerio] gi|50369285|gb|AAH76509.1| Calpain 9 [Danio rerio] gi|182890056|gb|AAI65218.1| Capn9 protein [Danio rerio]
  misc_feature (292)..(549): NCBI GI: 145551304 Blast Desc: [Paramecium tetraurelia strain d4-2] gi|124429163|emb|CAK93956.1| protein product [Paramecium tetraurelia]
  misc_feature (255)..(507): NCBI GI: 189238641 Blast Desc: : similar to calpain B [Tribolium castaneum] gi|270008381|gb|EFA04829.1| TcasGA2_TC014879 [Tribolium castaneum]
  misc_feature (120)..(507): NCBI GI: 118395752 Blast Desc: Calpain family cysteine protease containing protein [Tetrahymena thermophila] gi|89284517|gb|EAR82559.1| Calpain family cysteine protease containing protein [Tetrahymena SB210]
MVKKAVVSQTLSDKIDPYALFEALTGKKITPGDLSESSSASSSETFSEDFDYVTSSKAYRLNTRYEPRPDPPPRDSELNIGAINPYALVEAMLGHKLDYSSSYVSKVISDVLQTDYDELFDMKNNSVLYAGLELNVEERRAEKLSRRDIKILPEQDLQTPDLSGIQKLSDLEAVGLRGVSQSSVKTARLQNGKLHVVLDARSIAQTLSNRQVTRTINELAVPFRVEDERSFGVPPVCAWRNIDEVVFKNYHFKNALQNLPANFNQLEARETSYKSVFADYSPATTRYDGPVQGATSNSWLIAAISSVFWADPTVIHQVFRGDGPPYRKDEANALPFRHDVELHDKGGRNNAETRVVKVAYEVPINKTMNEPVYCRSSGGTDYWPALYEKAFAMWFTAKAPYRGRPDRPDITQTAHGDPVKAMAQIDGREPQYFFTKNHDDLIGLVRHSSVNFRARSPMCAWTHASGDFFRGANLVANHAYSILGWANIGNRQYFVIRNPWGVTEPRGLTSYPGLLDRVEPAIWPPASLLDSGGVMAIEAPYFREYFACIGRTV

SEQ ID NO: 21813 - DNA, 1857 bp, Muscodor strobelii
  misc_feature: SGI cDNA ID NO. 567394
  misc_feature: Encodes the peptide sequence at SEQ ID NO 21814
atgctcgcgccaaaaacaattgccgttattctccaggcattgaccttatacatcgatcaagcgcataccgcccctaatgctcaaaacaatcaagttccacttggattggtaggcgaaagtggtgctaaaacggtcaagcggccaaatgttgtctttatcctcaccgacgaccaggatgcccagatgcaatcgttggactacatgcctctgttaaaaaagcaccttttggaacgaggaacatcgtacaagcgccattactgcaccacagctatttgctgtcccgctcgtgtaacaatatggaccggccgagctgcccataacacaaacgtcactgacgttagtcctccgcatggtggattcccaaagtttctgagtcaagggctcaatgagagatatctccctgtgtggctgcagcacgaaggatacaatacttattacgcagggaagctattcaatgcacacacaacagacaactataattcgccgcatgcagctgggtggaatggctccgacttcctcttagacccattcacctactcatatatgaacagcacctatcagcgcaatacggatcctcctatcagttatgaaggctcatataccactgacgtgcttacgaaaaaagcacttggctttctcgacgaagctgcaagctttgataatcctttctttttgggaatttcgcctatagctccacatattaatgtgtgggaaaacgcgcctactgatgaaaaggcagatagcagaacgaatggtcgagtgagagaaatgggagagctcaaggatcttgtgttcacacctcctgttcctgcagaacgtcacaaacatctatttcagaatgtgacagtgcccaggacccaaaacttcaatcctgatagtccttcaggggccaactggatgctggggttacccaaactggacttggacagcatggagctttatgaccactattatcggtcgcgtctacgggcccttcagtccgtagatgagctcatcgaggatgtagtagagcgactcgaaggcttaggtatcctcgagaatacttatatcatatatacgtccgacaatggatatcacatcggccaacaccgacttccaccgggaaagacatgtagcatcgaagaggatatcaatgtgccactcattatacgtggacctcatgtgccgcaaaatcacatcactgaaatcgttaccacgcatacagaccttgcgccaaccattatcggcctcatcggcggaaaatcaccttcaaatgcccagtttgacggaacacctatccctctgacacttcaaggtcttgaaaacgctgctacaaatcgtcatgagcatgtcaacgttgagttttggggtattggagtagacgaaggacgggcacacccgagtatcgagagcatatttactaacaatacgtacaaggcgctacggattgtaagcaattcctggaacctttactactctgtgtggtgcacgaatgagcacgagttgtatgatctcaagaccgacccagggcagctaaacaacctcttagtgttgtcatcagaagcaggagttcctcgaactttgaacggatactctttaagcaaggtcgttgctcgtttagattctctactacttgttttgaaaacatgcaaggaagaaacttgcgtgcgtccctgggaagctcttcatccagagggtgacgtgcaaaatcttgatgacgcattgtccgtagtattcgaccagttctatctcgaagagcaagtcagagtatcgttcagccgctgcgagcttgggcatctgctcgatgcggaaggtccgcagtttgacagagaaggcctaatatatcgacacgggttaccatggtccgcatggacttaa

SEQ ID NO: 21814 - protein, 618 aa, Muscodor strobelii
  misc_feature: SGI Peptide ID NO. 567394
  misc_feature (46)..(507): Pfam Id: PF00884 Pfam Desc: Sulfatase
  misc_feature (27)..(618): NCBI GI: 171680767 Blast Desc: protein product [Podospora anserina] gi|27764278|emb|CAD60558.1| protein product [Podospora anserina] gi|170940011|emb|CAP65237.1| protein product [Podospora anserina]
  misc_feature (23)..(618): NCBI GI: 2873363 Blast Desc: arylsulfatase [Neurospora crassa]
  misc_feature (27)..(618): NCBI GI: 256724341 Blast Desc: NECHADRAFT_53397 [Nectria haematococca mpVI 77-13-4]
  misc_feature (62)..(615): NCBI GI: 116200710 Blast Desc: CHGG_10900 [Chaetomium globosum CBS 148.51] gi|88175614|gb|EAQ83082.1| CHGG_10900 [Chaetomium globosum CBS 148.51]
  misc_feature (29)..(618): NCBI GI: 46126687 Blast Desc: FG07721.1 [Gibberella zeae PH-1]
  misc_feature (42)..(618): NCBI GI: 171693357 Blast Desc: protein product [Podospora anserina] gi|170946627|emb|CAP73430.1| protein product [Podospora anserina]
  misc_feature (27)..(618): NCBI GI: 256726163 Blast Desc: NECHADRAFT_94512 [Nectria haematococca mpVI 77-13-4]
  misc_feature (47)..(617): NCBI GI: 145251061 Blast Desc: An15g05130 [Aspergillus niger] gi|134082572|emb|CAK42487.1| protein product [Aspergillus niger]
  misc_feature (27)..(618): NCBI GI: 261354177 Blast Desc: arylsulfatase [Verticillium albo-atrum VaMs.102]
  misc_feature (46)..(607): NCBI GI: 164425630 Blast Desc: NCU06041 [Neurospora crassa OR74A] gi|157071002|gb|EAA30568.2| NCU06041 [Neurospora crassa OR74A]
  misc_feature (34)..(576): SWISSPROT Homolog: EC 3.1.6.1 Arylsulfatase
MLAPKTIAVILQALTLYIDQAHTAPNAQNNQVPLGLVGESGAKTVKRPNVVFILTDDQDAQMQSLDYMPLLKKHLLERGTSYKRHYCTTAICCPARVTIWTGRAAHNTNVTDVSPPHGGFPKFLSQGLNERYLPVWLQHEGYNTYYAGKLFNAHTTDNYNSPHAAGWNGSDFLLDPFTYSYMNSTYQRNTDPPISYEGSYTTDVLTKKALGFLDEAASFDNPFFLGISPIAPHINVWENAPTDEKADSRTNGRVREMGELKDLVFTPPVPAERHKHLFQNVTVPRTQNFNPDSPSGANWMLGLPKLDLDSMELYDHYYRSRLRALQSVDELIEDVVERLEGLGILENTYIIYTSDNGYHIGQHRLPPGKTCSIEEDINVPLIIRGPHVPQNHITEIVTTHTDLAPTIIGLIGGKSPSNAQFDGTPIPLTLQGLENAATNRHEHVNVEFWGIGVDEGRAHPSIESIFTNNTYKALRIVSNSWNLYYSVWCTNEHELYDLKTDPGQLNNLLVLSSEAGVPRTLNGYSLSKVVARLDSLLLVLKTCKEETCVRPWEALHPEGDVQNLDDALSVVFDQFYLEEQVRVSFSRCELGHLLDAEGPQFDREGLIYRHGLPWSAWT

SEQ ID NO: 21815 - DNA, 1839 bp, Muscodor strobelii
  misc_feature: SGI cDNA ID NO. 567395
  misc_feature: Elevated expression when VOC is produced
  misc_feature: Encodes the peptide sequence at SEQ ID NO 21816
atgtcaggccataatggaatcgaattatcgtctgtaagcgcgtcggacagtattaggcgaatccaggctctacagagagataacataagattattaccatctgaaaaacacgcgttgcgggatttagacaggggaactcgtcgtcggggccaaggccaaaattttgaacccatcagcactcgccatattttggaaaactttgaactctacgtaacaccacgcgaaccttcatcccggcctgacaaaggctgggagaaaattcggagacgctcgaaagaggagaacaggccccgtcgtgtacctttggtacttcctcggcaagttcaagatattggggacaatgaccttgccagtctggacatcagtttccttcaacgacaacacgttcaggttcatgtgtgtgatttttacgagaccaaggcgacacatgatattcgccacatgaatgatttcgataaagattgtagagagaagccaccggggtgtttggtgagatggatacatgttccggtaggccggggggtatttcagtcgacgctcgaagatatcttccttcactcggacccaccagactttgatcggtctacggtattcaataatactgcatattcacaatggacatatcctgagatcaatatgttgacgttccgtaaccgagaagaccacaacgatgttctgaatcttgcggataagctgatggcggctcgaccgtcctcacgattccacctctatgatggcctcagcgaccgtatgaaggaagacttgagctggagaatcaatctgttgggcattgacagacattccgatccgttctgggacatggtgcacgcagacttcccaatgtccttgacagacgcgaaatatgtggctagagaaatcggccccttggtctctaaaggaactttcgcagacatccccccacaagcgctgtcaactcatagacagtttgaagaggctgtaatgacggtagccaagcttcgagctttcaatcgagacgatggattccttttaacttttgcgaacacgactggagtcgattatttaaacagcagttttcaagggctactgcagcagtcgaacacagatattcttgaatatgcggaaggctctgcacttgcccatacaatgaatgccttcaaagtgtcgggcactcaaaactgggttcgcaacagtatcgagcgccctgagatatggctcattgtctatttaatgaccgaggcggtggtgacacctcacaatattcgaggtgggagaagtgccgttgatatcgtgacggcttaccgccagatcatgcttaaattgtccggatctcgagcgcagccatgggtcctcgggaaaagccctgagctcgttcgaaaatatcagaactacctcgaagaactaagggctgtccaaaaggttacaataacgaatcttgttgttatggaaaacatgttcaaagacatcaaagtcatggaagctgctggctcaagtgccagctcgccacgtcccagtcaagtccgccaagcaagcgttgtgtctttgtcaaggggcaggcaggagtcaatgccggaaaggcttgaatgggctattagcctactgaaagagcggcaacaggacctaagtgaaatcgaagacttcttcaagcttcttcttaaagatcttctggatctatgtacggtggagcaaaacgatcgagccatcgtgacagagcttcagaacaaagctattgtgctaattaccgccatcacggtgatttttctgccaatttctgcctttacgggctatttcggcatgaacttgaccgatatcctagtctcgaagtctcgagaacgcctagtcttcattgtccagatttag

SEQ ID NO: 21816 - protein, 612 aa, Muscodor strobelii
  misc_feature: SGI Peptide ID NO. 567395
  misc_feature (113)..(610): NCBI GI: 261206416 Blast Desc: conserved [Ajellomyces dermatitidis SLH14081] gi|239593004|gb|EEQ75585.1| conserved [Ajellomyces dermatitidis SLH14081] gi|239610819|gb|EEQ87806.1| conserved [Ajellomyces
  misc_feature (71)..(610): NCBI GI: 154278591 Blast Desc: [Ajellomyces capsulatus NAm1] gi|150413694|gb|EDN09077.1| [Ajellomyces capsulatus NAm1]
  misc_feature (71)..(610): NCBI GI: 240280105 Blast Desc: conserved [Ajellomyces capsulatus H143]
  misc_feature (113)..(610): NCBI GI: 225680233 Blast Desc: [Paracoccidioides brasiliensis Pb03]
  misc_feature (112)..(610): NCBI GI: 226281767 Blast Desc: conserved [Paracoccidioides brasiliensis Pb01]
  misc_feature (112)..(610): NCBI GI: 226287876 Blast Desc: conserved [Paracoccidioides brasiliensis Pb18]
  misc_feature (71)..(431): NCBI GI: 225560542 Blast Desc: conserved [Ajellomyces capsulatus G186AR]
  misc_feature (335)..(598): NCBI GI: 169603095 Blast Desc: SNOG_04555 [Phaeosphaeria nodorum SN15] gi|160706324|gb|EAT88315.2| SNOG_04555 [Phaeosphaeria nodorum SN15]
  misc_feature (398)..(598): NCBI GI: 189203761 Blast Desc: [Pyrenophora tritici-repentis Pt-1C-BFP] gi|187985315|gb|EDU50803.1| [Pyrenophora tritici-repentis Pt-1C-BFP]
  misc_feature (123)..(286): NCBI GI: 189203763 Blast Desc: [Pyrenophora tritici-repentis Pt-1C-BFP] gi|187985316|gb|EDU50804.1| [Pyrenophora tritici-repentis Pt-1C-BFP]
  misc_feature: Useful for introducing or modulating the production of volatile compounds
MSGHNGIELSSVSASDSIRRIQALQRDNIRLLPSEKHALRDLDRGTRRRGQGQNFEPISTRHILENFELYVTPREPSSRPDKGWEKIRRRSKEENRPRRVPLVLPRQVQDIGDNDLASLDISFLQRQHVQVHVCDFYETKATHDIRHMNDFDKDCREKPPGCLVRWIHVPVGRGVFQSTLEDIFLHSDPPDFDRSTVFNNTAYSQWTYPEINMLTFRNREDHNDVLNLADKLMAARPSSRFHLYDGLSDRMKEDLSWRINLLGIDRHSDPFWDMVHADFPMSLTDAKYVAREIGPLVSKGTFADIPPQALSTHRQFEEAVMTVAKLRAFNRDDGFLLTFANTTGVDYLNSSFQGLLQQSNTDILEYAEGSALAHTMNAFKVSGTQNWVRNSIERPEIWLIVYLMTEAVVTPHNIRGGRSAVDIVTAYRQIMLKLSGSRAQPWVLGKSPELVRKYQNYLEELRAVQKVTITNLVVMENMFKDIKVMEAAGSSASSPRPSQVRQASVVSLSRGRQESMPERLEWAISLLKERQQDLSEIEDFFKLLLKDLLDLCTVEQNDRAIVTELQNKAIVLITAITVIFLPISAFTGYFGMNLTDILVSKSRERLVFIVQI

SEQ ID NO: 21817 - DNA, 2737 bp, Muscodor strobelii
  misc_feature: SGI EST ID NO. CUFF.51296.0
  misc_feature: Variant of the nucleotide sequence at SEQ ID NO 21815
aattgctttcatggcctaagcacaagtgattgtatgtgcctgaaaagagccgtatttcggttgcccaaaagcagtgctgaagtcggcctagctgctcgtttcgtcgacgcgcatatgcaatgccttcgctgcccgagacaagggtcagcaaccccgactggctgtcgcaatctcgagaatttggacaaatggaagtaggacgcgccagtcagtctggggcttgcggctctgcaagatgaaggattgaaacgatcgaatacagcaggggggtcaagggcatacaaatgcaaaccaatcccactagaaacgaagactaaatggcaaagtagccaattttccaactatcgcgatctgcgctactacaatgtcaggccataatggaatcgaattatcgtctgtaagcgcgtcggacagtattaggcgaatccaggctctacagagagataacataagattattaccatctgaaaaacacgcgttgcgggatttagacaggggaactcgtcgtcggggccaaggccaaaattttgaacccatcagcactcgccatattttggaaaactttgaactctacgtaacaccacgcgaaccttcatcccggcctgacaaaggctgggagaaaattcggagacgctcgaaagaggagaacaggccccgtcgtgtacctttggtacttcctcggcaagttcaagatattggggacaatgaccttgccagtctggacatcagtttccttcaacgacaacacgttcaggttcatgtgtgtgatttttacgagaccaaggcgacacatgatattcgccacatgaatgatttcgataaagattgtagagagaagccaccggggtgtttggtgagatggatacatgttccggtaggccggggggtatttcagtcgacgctcgaagatatcttccttcactcggacccaccagactttgatcggtctacggtattcaataatactgcatattcacaatggacatatcctgagatcaatatgttgacgttccgtaaccgagaagaccacaacgatgttctgaatcttgcggataagctgatggcggctcgaccgtcctcacgattccacctctatgatggcctcagcgaccgtatgaaggaagacttgagctggagaatcaatctgttgggcattgacagacattccgatccgttctgggacatggtgcacgcagacttcccaatgtccttgacagacgcgaaatatgtggctagagaaatcggccccttggtctctaaaggaactttcgcagacatccccccacaagcgctgtcaactcatagacagtttgaagaggctgtaatgacggtagccaagcttcgagctttcaatcgagacgatggattccttttaacttttgcgaacacgactggagtcgattatttaaacagcagttttcaagggctactgcagcagtcgaacacagatattcttgaatatgcggaaggctctgcacttgcccatacaatgaatgccttcaaagtgtcgggcactcaaaactgggttcgcaacagtatcgagcgccctgagatatggctcattgtctatttaatgaccgaggcggtggtgacacctcacaatattcgaggtgggagaagtgccgttgatatcgtgacggcttaccgccagatcatgcttaaattgtccggatctcgagcgcagccatgggtcctcgggaaaagccctgagctcgttcgaaaatatcagaactacctcgaagaactaagggctgtccaaaaggttacaataacgaatcttgttgttatggaaaacatgttcaaagacatcaaagtcatggaagctgctggctcaagtgccagctcgccacgtcccagtcaagtccgccaagcaagcgttgtgtctttgtcaaggggcaggcaggagtcaatgccggaaaggcttgaatgggctattagcctactgaaagagcggcaacaggacctaagtgaaatcgaagacttcttcaagcttcttcttaaagatcttctggatctatgtacggtggagcaaaacgatcgagccatcgtgacagagcttcagaacaaagctattgtgctaattaccgccatcacggtgatttttctgccaatttctgcctttacgggctatttcggcatgaacttgaccgatatccgtgagacacccaaagattcagattggttctggtcgtctttaggtgtagctggagtgataattgctgttgcctcaatcgtactcgcttttcaaaggacttttcgcgtattcgttaccggactttggaggtcttttatcggaagcgcttgtttcattcatcggcgaagagattgaacgatataacgatgactgctcttcaaatagtagtctcgaagtctcgagaacgcctagtcttcattgtccagatttagcatacatgattgattcctttgtgcacatattggctaatatcaataccccatctttacaatatctgttcttgagcgggctacaggtgtcgtgctatggctctgtgcttatgcttcgtgggataaaatgcggatcggaaggcgttcatttggcagaagcagcttattgactggtcaggaacactttcctcaagcccagaacagtcgagaccttgtaggtatcatggagtttatgatgttgcttatcaatgtggtaccgaccaaacggtctttgagtcagcgatatattatcaaaatcatcagacgagttcaagagcttattgacttgcggaga

SEQ ID NO: 21818 - DNA, 978 bp, Muscodor strobelii
  misc_feature: SGI cDNA ID NO. 567396
  misc_feature: Encodes the peptide sequence at SEQ ID NO 21819
atgagcgacaacgaaaacaagcttcgagatgggctcctcaagagtctcttgggccaagccgatctcgccaacagggccaagccctcgatgcttgagtggctgtccatcatcgccgagtcatctgaccacgactcgatggcttacgaggctctcctagctagtctctcgtactttcagcagagcgacagaatctctgacgagttgaagacgcagctgctgttcaatcgcacttggctcgagaaagtgctccctggcggcaacagcaacggacatcttgtaaccaagaatatcgctagtgccgaatcccctactcccgagaagctgcagaagccgatcagcactgtcaacaaacaagagttgaagtcccagaaagtgggtgatgcagtttccctccagcatacctcaacttccgagggtattcctgccagcatcaacaacagtaccagtgtcagtatctacggcgacaatttcgcgatgatcgaggagatcaacagagccgcttcaaaacttgcgatcagtgcaagcaacagcacctgtaccgagacaatggctgtctctgacggcaatgacaaatcgcctgccaacctcaatgcattcgttcgtggacagcctctcaagacgatcttcgtctcaggtagtgagcaccacgctgctcagaagaatgattccttcctgaagaacaatgcgtctgtcaaagctccggagaacagcattcactccatgtcgtcgatcgcagctcagaacatggcaatgatgaagcaactcgcaagcgtctctgagcgtcagagaatcatcaatgatgagtctctcaagggcgttaaggattctagcaacaagcagtatcccgccaatggcaagatgtatgtcgagtccggctccatgaggattgagagacatctactaaaagcttataggtcatcctacgactatacagagccttggtcaggtcccagcaatgagggatataaaggttggtga

SEQ ID NO: 21819 - protein, 325 aa, Muscodor strobelii
  misc_feature: SGI Peptide ID NO. 567396
MSDNENKLRDGLLKSLLGQADLANRAKPSMLEWLSIIAESSDHDSMAYEALLASLSYFQQSDRISDELKTQLLFNRTWLEKVLPGGNSNGHLVTKNIASAESPTPEKLQKPISTVNKQELKSQKVGDAVSLQHTSTSEGIPASINNSTSVSIYGDNFAMIEEINRAASKLAISASNSTCTETMAVSDGNDKSPANLNAFVRGQPLKTIFVSGSEHHAAQKNDSFLKNNASVKAPENSIHSMSSIAAQNMAMMKQLASVSERQRIINDESLKGVKDSSNKQYPANGKMYVESGSMRIERHLLKAYRSSYDYTEPWSGPSNEGYKGW

SEQ ID NO: 21820 - DNA, 1092 bp, Muscodor strobelii
  misc_feature: SGI cDNA ID NO. 567397
  misc_feature: Encodes the peptide sequence at SEQ ID NO 21821
atgatcttcagcgtttcactgttgctgagcctagccgctctagcgagtgcgcatccagggcatgagcatcatgagagaagtcagattattgcggctcgttccgcatttgctgccaacaaacgcgcactcgacaattgcgcttctaagctcaccgcacgcggagtttattcggccgctgctgagcgccgacaggctgagttggagaaacagcgcgaatctcgtggacttcccctgagaaattcccacgccaagcgaagcaatgagagacgtgatactccagatgtactctcaaccgatcatgagggtactctcaatggcgagatggcaattgatgacgaactgtatgtcttcaattctacccagtgcacggtgttgaacccggagggagaagttggtcctttctacgtcttgggcgagtatattcgcgatgatttcagagatgatgagcctggcgttgagatttatgtcgatgcgcagttcatcgacgtcaacacctgtgagcccatcgtgggaggttggtttgatgcttggaactgcaacacaactggtgtttatagtggcatccagtctggcatgaacggcaatggcaacgacgcaagtaacttgaacaatacggccctgcgtggaattacacagacagacgagaacggtgtcgccaagttcacgagcatcttccctggccattacggtggacgcaccaatcatatgcatgtcgtcttccaccaaacgggaacggttcaaacgaatggaacactgactggtggctctgtctcgcacattggtcaactcttctgggaccaaaagctcatcgacgaggttgaaactctggcgccctacagtaccaatacgcaatcaatcacaaccaatgcgcaggatcatgtgtttggcgaacaggagacagcaggctcagattccgatcctgtgttcgattatgtatatctcggtgatgatgtgtcagatggcctctttacttggatcgtaattggtatcgacacttccgccacctacacacctacatattctttccaactcacctccagcggaggcaaagccgttagtggaggcggtggtggtcccggcggtcctccttga

SEQ ID NO: 21821 - protein, 363 aa, Muscodor strobelii
  misc_feature: SGI Peptide ID NO. 567397
  misc_feature (132)..(347): Pfam Id: PF00775 Pfam Desc: Dioxygenase
  misc_feature (6)..(349): NCBI GI: 145247742 Blast Desc: An12g10740 [Aspergillus niger] gi|134080863|emb|CAK41421.1| protein product [Aspergillus niger]
  misc_feature (5)..(352): NCBI GI: 70998883 Blast Desc: extracellular dioxygenase [Aspergillus fumigatus Af293] gi|66851800|gb|EAL92125.1| extracellular dioxygenase, [Aspergillus fumigatus Af293] gi|159127181|gb|EDP52296.1| A1163]
  misc_feature (5)..(345): NCBI GI: 119490176 Blast Desc: NFIA_062650 [Neosartorya fischeri NRRL 181] gi|119411161|gb|EAW21104.1| conserved [Neosartorya fischeri NRRL 181]
  misc_feature (2)..(345): NCBI GI: 169784688 Blast Desc: [Aspergillus oryzae RIB40] gi|83775552|dbj|BAE65672.1| protein product [Aspergillus oryzae]
  misc_feature (2)..(345): NCBI GI: 238508112 Blast Desc: extracellular dioxygenase, [Aspergillus flavus NRRL3357] gi|220688776|gb|EED45128.1| extracellular dioxygenase, [Aspergillus flavus NRRL3357]
  misc_feature (12)..(352): NCBI GI: 145230347 Blast Desc: An01g10640 [Aspergillus niger] gi|134055599|emb|CAK37245.1| protein product [Aspergillus niger]
  misc_feature (17)..(354): NCBI GI: 67538456 Blast Desc: AN5398.2 [Aspergillus nidulans FGSC A4] gi|40743368|gb|EAA62558.1| AN5398.2 [Aspergillus nidulans FGSC A4] gi|259485157|tpe|CBF81975.1| TPA: extracellular dioxygenase,
  misc_feature (8)..(358): NCBI GI: 67527915 Blast Desc: AN4203.2 [Aspergillus nidulans FGSC A4] gi|40740112|gb|EAA59302.1| AN4203.2 [Aspergillus nidulans FGSC A4] gi|259481191|tpe|CBF74489.1| TPA: conserved [Aspergillus FGSC
  misc_feature (8)..(351): NCBI GI: 170940080 Blast Desc: protein product [Podospora anserina]
  misc_feature (1)..(335): NCBI GI: 46127319 Blast Desc: FG08037.1 [Gibberella zeae PH-1]
MIFSVSLLLSLAALASAHPGHEHHERSQIIAARSAFAANKRALDNCASKLTARGVYSAAAERRQAELEKQRESRGLPLRNSHAKRSNERRDTPDVLSTDHEGTLNGEMAIDDELYVFNSTQCTVLNPEGEVGPFYVLGEYIRDDFRDDEPGVEIYVDAQFIDVNTCEPIVGGWFDAWNCNTTGVYSGIQSGMNGNGNDASNLNNTALRGITQTDENGVAKFTSIFPGHYGGRTNHMHVVFHQTGTVQTNGTLTGGSVSHIGQLFWDQKLIDEVETLAPYSTNTQSITTNAQDHVFGEQETAGSDSDPVFDYVYLGDDVSDGLFTWIVIGIDTSATYTPTYSFQLTSSGGKAVSGGGGGPGGPP

SEQ ID NO: 21822 - DNA, 786 bp, Muscodor strobelii
  misc_feature: SGI EST ID NO. CUFF.51308.0
  misc_feature: Variant of the nucleotide sequence at SEQ ID NO 21820
gctctattgactagcccacgccaagcgaagcaatgagagacgtgatactccagatgtactctcaaccgatcatgagggtactctcaatggcgagatggcaattgatgacgaactgtatgtcttcaattctacccagtgcacggtgttgaacccggagggagaagttggtcctttctacgtcttgggcgagtatattcgcgatgatttcagagatgatgagcctggcgttgagatttatgtcgatgcgcagttcatcgacgtcaacacctgtgagcccatcgtgggaggttggtttgatgcttggaactgcaacacaactggtgtttatagtggcatccagtctggcatgaacggcaatggcaacgacgcaagtaacttgaacaatacggccctgcgtggaattacacagacagacgagaacggtgtcgccaagttcacgagcatcttccctggccattacggtggacgcaccaatcatatgcatgtcgtcttccaccaaacgggaacggttcaaacgaatggaacactgactggtggctctgtctcgcacattggtcaactcttctgggaccaaaagctcatcgacgaggttgaaactctggcgccctacagtaccaatacgcaatcaatcacaaccaatgcgcaggatcatgtgtttggcgaacaggagacagcaggctcagattccgatcctgtgttcgattatgtatatctcggtgatgatgtgtcagatggcctctttacttggatcgtaattggtatcgacacttccgccacctacacacc

SEQ ID NO: 21823 - DNA, 1161 bp, Muscodor strobelii
  misc_feature: SGI cDNA ID NO. 567398
  misc_feature: Encodes the peptide sequence at SEQ ID NO 21824
atggtcgaagtgcacggaacttgcgactctcaatttgagaaggttcgcaccctcttgaaggaatttattgactctggcgaggaagttggggcttctatttccgttaatcttgatgggcgcgaagtcgtaaacctctggggtggatatacgaacgcagattgctcgaagccatggaccgaggcaacgttagtcggcgtggcgtccagctccaagatgttttccagccttgccgtccttatgctcattgatagtggtgcagtctcagcatatgacaaggtctccaaatactggcctgaatttggagtcaacgggaaagagaatgtggagattcgacacttgctttcgcatacttcaggtgtcgcgggcttcgatgaaaagatcacaatggacgaagttgccgacagtataacgtcatcggccaagcttgcggcgcaagcaccgtggtgggaacccgggtcggcctcagcttaccatgcttggacttttggtcatccgcttggagaaatagtgcggcgtgtgaccgggatgcggttgaaagacttcatcgcagagaagattgccgccccattaggagcggacttccaacttggcgccgcaaaaaaggactggccgcgactcgcagaatccgttccaacgccttcgcaaggaccacctgccaattggaagccagggcctttattcatgagagtcgttacaaatccgataatagactcctctatgacgaaacgcatcgcctggagagaaggagagattggcgcctcaaacggatattcaaatgcgcatgcaatgactaccattctatctactatcacattagctgataacgagcacgccgacggggtcaaacaattgatatctagaaagacgcggtctttgatatttgaggaacaatcaaatggtatggatctcgctgttggtgtgccgattcgctttggaattggctacgcaatcaaaggacatggcgattgggtcagcgactttttacccgatggggagatcgcatattggggcggctcaggtggctcacttggcatcatggatgtcggaaggaagttgactatctcatatgctatgaacaagagatcacctcagctaatagcgaacacggcatccaaggcttatgttagagcaatctatgaagcattagcggtagatatataa

SEQ ID NO: 21824 - protein, 386 aa, Muscodor strobelii
  misc_feature: SGI Peptide ID NO. 567398
  misc_feature (15)..(377): Pfam Id: PF00144 Pfam Desc: Beta-lactamase
  misc_feature (4)..(383): NCBI GI: 261204870 Blast Desc: beta-lactamase [Ajellomyces dermatitidis SLH14081] gi|239592231|gb|EEQ74812.1| beta-lactamase [Ajellomyces dermatitidis SLH14081] gi|239611611|gb|EEQ88598.1| beta-lactamase
  misc_feature (4)..(383): NCBI GI: 225562374 Blast Desc: lactone hydrolase [Ajellomyces capsulatus G186AR]
  misc_feature (1)..(382): NCBI GI: 46102640 Blast Desc: FG00024.1 [Gibberella zeae PH-1]
  misc_feature (4)..(383): NCBI GI: 154279150 Blast Desc: CaaX prenyl protease [Ajellomyces capsulatus NAm1] gi|150412331|gb|EDN07718.1| CaaX prenyl protease [Ajellomyces capsulatus NAm1]
  misc_feature (4)..(383): NCBI GI: 240281216 Blast Desc: beta-lactamase [Ajellomyces capsulatus H143]
  misc_feature (1)..(382): NCBI GI: 226361732 Blast Desc: esterase [Rhodococcus opacus B4] gi|226240217|dbj|BAH50565.1| esterase [Rhodococcus opacus B4]
  misc_feature (1)..(383): NCBI GI: 111019585 Blast Desc: lactone hydrolase [Rhodococcus jostii RHA1] gi|110819115|gb|ABG94399.1| lactone hydrolase [Rhodococcus jostii RHA1]
  misc_feature (1)..(382): NCBI GI: 119479365 Blast Desc: beta-lactamase [Neosartorya fischeri NRRL 181] gi|119407865|gb|EAW17814.1| beta-lactamase [Neosartorya fischeri NRRL 181]
  misc_feature (10)..(384): NCBI GI: 256724612 Blast Desc: NECHADRAFT_95921 [Nectria haematococca mpVI 77-13-4]
  misc_feature (4)..(383): NCBI GI: 16209565 Blast Desc: lactone hydrolase [Rhodococcus ruber]
MVEVHGTCDSQFEKVRTLLKEFIDSGEEVGASISVNLDGREVVNLWGGYTNADCSKPWTEATLVGVASSSKMFSSLAVLMLIDSGAVSAYDKVSKYWPEFGVNGKENVEIRHLLSHTSGVAGFDEKITMDEVADSITSSAKLAAQAPWWEPGSASAYHAWTFGHPLGEIVRRVTGMRLKDFIAEKIAAPLGADFQLGAAKKDWPRLAESVPTPSQGPPANWKPGPLFMRVVTNPIIDSSMTKRIAWREGEIGASNGYSNAHAMTTILSTITLADNEHADGVKQLISRKTRSLIFEEQSNGMDLAVGVPIRFGIGYAIKGHGDWVSDFLPDGEIAYWGGSGGSLGIMDVGRKLTISYAMNKRSPQLIANTASKAYVRAIYEALAVDI

SEQ ID NO: 21825 - DNA, 2004 bp, Muscodor strobelii
  misc_feature: SGI EST ID NO. CUFF.51311.0
  misc_feature: Variant of the nucleotide sequence at SEQ ID NO 21823
cctggttcagcgtagcatgttgaagtaatgagtcgcgggcacaagacaattcgaagttgagcaggattcgcaattgtataccaagtaatgagaaattggaagagacgtgcgaacgcaacgcgggaaactaatttccaattgtacgagtcttacagcttgtgtcatgttcaacgttaagcttgaatttcaatcccgcattagggcgcgacacatctagaggcctggtttagtgcactatctacctcctaatgcctgtgccaatcaacgtcctccaaatccgagcacccaggtcgcacgccgctcgcgccacaggcttccgctgactaaatttagcgttcctgtcgggcgtgagtcacggaccgaaagtaacaccatagccgctctcattccctacctaaggtaccagtacacagcactgaaactcaacaacctatctcggatttgtcgacctgtgattgggttggaacaactgatggtcatatatcctgcgccagggctcaaaacattagacactgcaaaggggccttatacaacatcagtggctatatatttctacagtttctcccgaaaatgatatctgtattttcgttgccaggttcttttaacttcaattctcaagatcaatccgacccaacctaaatcaagtcataggggcttacggtcaacagtaccagtccgtcgatcatcgaataattgcgatcatggtcgaagtgcacggaacttgcgactctcaatttgagaaggttcgcaccctcttgaaggaatttattgactctggcgaggaagttggggcttctatttccgttaatcttgatgggcgcgaagtcgtaaacctctggggtggatatacgaacgcagattgctcgaagccatggaccgaggcaacgttagtcggcgtggcgtccagctccaagatgttttccagccttgccgtccttatgctcattgatagtggtgcagtctcagcatatgacaaggtctccaaatactggcctgaatttggagtcaacgggaaagagaatgtggagattcgacacttgctttcgcatacttcaggtgtcgcgggcttcgatgaaaagatcacaatggacgaagttgccgacagtataacgtcatcggccaagcttgcggcgcaagcaccgtggtgggaacccgggtcggcctcagcttaccatgcttggacttttggtcatccgcttggagaaatagtgcggcgtgtgaccgggatgcggttgaaagacttcatcgcagagaagattgccgccccattaggagcggacttccaacttggcgccgcaaaaaaggactggccgcgactcgcagaatccgttccaacgccttcgcaaggaccacctgccaattggaagccagggcctttattcatgagagtcgttacaaatccgataatagactcctctatgacgaaacgcatcgcctggagagaaggagagattggcgcctcaaacggatattcaaatgcgcatgcaatgactaccattctatctactatcacattagctgataacgagcacgccgacggggtcaaacaattgatatctagaaagacgcggtctttgatatttgaggaacaatcaaatggtatggatctcgctgttggtgtgccgattcgctttggaattggctacgcaatcaaaggacatggcgattgggtcagcgactttttacccgatggggagatcgcatattggggcggctcaggtggctcacttggcatcatggatgtcggaaggaagttgactatctcatatgctatgaacaagagatcacctcagctaatagcgaacacggcatccaaggcttatgttagagcaatctatgaagcattagcggtagatatataatgggcagaatacctcagagcagtttcgtgataaactcattccgatgttacctcgagcgaatgtgaactgggcttaacagctatgtcgcgtggtcttagataggcgaagtagtggcgggcgcaattctaacggacacctaaac

SEQ ID NO: 21826 - DNA, 1632 bp, Muscodor strobelii
  misc_feature: SGI cDNA ID NO. 567399
  misc_feature: Encodes the peptide sequence at SEQ ID NO 21827
atgacaagctcaaagtgtttgttgatgatcgcagtggccggaatactaagccatcggctttacttcatcaagggcgagcaccacttacagagtccaacatacgcaaagatttgggctctcgcgtgcgcttcaattcttgcctctgccttgtttacaagtaacagagattctcaagacgctaacagctcctcgaccttaattcatgtcttttgtagcgtcgccattatcaacaccttctatttcgggagcctgttcacgagcattgtcgtctaccgacttcttgaacatcccctgaaggagtttcctggcgatgttttggcagcatcgacaaagttttatcacacgtggaaccaattgttcttgtcaaatcacatattccttgagaatcagtggcgcaagtatggtgcaatagttcgaacagggccccaggaacttaccgttacagatcctgcagtctttgacgctatttctggtccggggacaagttgcatgaaggcgccgttctatgatgccatacatccttatgttggcttgctcaatatccgaacgaaagaaggttatgctcctcgtcgtaaacagtgggatgatgtattgggtgtcaagtctacagatgcgagtctagatgtcagtggaaaagaggttcgcattcagcactttgcaacacagctccttcggattattgcaaaatccaggggaaagccgatgaacgtaactacatggttcaatctttttgcgttcgactatattggcgaacttgcattcggggagtcattcggcttaacagaccaagacgaatcttcaaccataaaagaattggcagaggtgccaaagctactatccgaaggtatgataatgtggaaatacttcattggactaccttggctagtatgcctgattgcgaaatatgcgccaatcgtgcctattgtgaacaagaaattcaatgccgcccgcggttgggctgccagtgttgttgacttgcgactggcgaagtatgcttccgatagaaatgagactgacgttgaggtcgtcagtggggaaggtgatgcttttgcccgcttcattcgtaaagctgctcgtgatggtgacattaaatcgctcgacaagatgtcactctacggagattccttaatcatgacagtcgctggaagtcatactacagcactcacgctaaccatggtatcttacgaacttgcgcgccgaaaagacatacaagataagctacgggatgagatcattagttctggggccgtcacgcgactgtcaaaagacgacgtcgcttgtagcaagctcaacgttgctgcgcttagtgctttgccatatttgaatggctgcatcaacgaagcacttagactctacccccctgtgcctaccggcggtgctcgtcagacgacagataaacctatcaagataggcgagactattattccacctcagactgtgatcattgcgcctcgttggtcaattggtcgactggaatcggcattcgagcgagcgagcgagtacatccccgaaagatgggagtctaagactgcaatggttaaagaccgacgagctatgaatgcattcagtataggtcagtttttgtatcaggttcaactcaaatacccattaccagagttcaggacgcgttga

SEQ ID NO: 21827 - protein, 543 aa, Muscodor strobelii
  misc_feature: SGI Peptide ID NO. 567399
  misc_feature (106)..(543): Pfam Id: PF00067 Pfam Desc: Cytochrome P450
  misc_feature (376)..(525): Pfam Id: PF00067 Pfam Desc: Cytochrome P450
  misc_feature (215)..(270): Pfam Id: PF00067 Pfam Desc: Cytochrome P450
  misc_feature (11)..(527): NCBI GI: 171691038 Blast Desc: protein product [Podospora anserina] gi|170945467|emb|CAP71579.1| protein product [Podospora anserina]
  misc_feature (1)..(526): NCBI GI: 121720148 Blast Desc: benzoate 4-monooxygenase cytochrome P450 [Aspergillus clavatus NRRL 1] gi|119404984|gb|EAW15346.1| benzoate 4-monooxygenase cytochrome P450 [Aspergillus clavatus NRRL 1]
  misc_feature (9)..(527): NCBI GI: 121707431 Blast Desc: cytochrome P450 monooxygenase, [Aspergillus clavatus NRRL 1] gi|119399978|gb|EAW10404.1| cytochrome P450 monooxygenase, [Aspergillus clavatus NRRL 1]
  misc_feature (3)..(527): NCBI GI: 242771984 Blast Desc: benzoate 4-monooxygenase cytochrome P450, [Talaromyces stipitatus ATCC 10500] gi|218721570|gb|EED20988.1| benzoate 4-monooxygenase cytochrome P450, [Talaromyces stipitatus ATCC
  misc_feature (11)..(525): NCBI GI: 67541805 Blast Desc: AN7066.2 [Aspergillus nidulans FGSC A4] gi|40742005|gb|EAA61195.1| AN7066.2 [Aspergillus nidulans FGSC A4] gi|259483617|tpe|CBF79154.1| TPA: cytochrome P450, (Eurofung)
  misc_feature (11)..(527): NCBI GI: 156051546 Blast Desc: SS1G_07180 [Sclerotinia sclerotiorum 1980] gi|154704958|gb|EDO04697.1| SS1G_07180 [Sclerotinia sclerotiorum 1980]
  misc_feature (14)..(527): NCBI GI: 261354521 Blast Desc: benzoate 4-monooxygenase cytochrome P450 [Verticillium albo-atrum VaMs.102]
  misc_feature (5)..(526): NCBI GI: 256722711 Blast Desc: NECHADRAFT_87276 [Nectria haematococca mpVI 77-13-4]
  misc_feature (8)..(527): NCBI GI: 212536985 Blast Desc: benzoate 4-monooxygenase cytochrome P450, [Penicillium marneffei ATCC 18224] gi|210068390|gb|EEA22481.1| benzoate 4-monooxygenase cytochrome P450, [Penicillium marneffei ATCC
  misc_feature (1)..(527): NCBI GI: 145258880 Blast Desc: An04g08440 [Aspergillus niger] gi|134074816|emb|CAK38931.1| protein product [Aspergillus niger]
  misc_feature (98)..(525): SWISSPROT Homolog: EC 1.14.13.12 Benzoate 4-monooxygenase
MTSSKCLLMIAVAGILSHRLYFIKGEHHLQSPTYAKIWALACASILASALFTSNRDSQDANSSSTLIHVFCSVAIINTFYFGSLFTSIVVYRLLEHPLKEFPGDVLAASTKFYHTWNQLFLSNHIFLENQWRKYGAIVRTGPQELTVTDPAVFDAISGPGTSCMKAPFYDAIHPYVGLLNIRTKEGYAPRRKQWDDVLGVKSTDASLDVSGKEVRIQHFATQLLRIIAKSRGKPMNVTTWFNLFAFDYIGELAFGESFGLTDQDESSTIKELAEVPKLLSEGMIMWKYFIGLPWLVCLIAKYAPIVPIVNKKFNAARGWAASVVDLRLAKYASDRNETDVEVVSGEGDAFARFIRKAARDGDIKSLDKMSLYGDSLIMTVAGSHTTALTLTMVSYELARRKDIQDKLRDEIISSGAVTRLSKDDVACSKLNVAALSALPYLNGCINEALRLYPPVPTGGARQTTDKPIKIGETIIPPQTVIIAPRWSIGRLESAFERASEYIPERWESKTAMVKDRRAMNAFSIGQFLYQVQLKYPLPEFRTR

SEQ ID NO: 21828 - DNA, 701 bp, Muscodor strobelii
  misc_feature: SGI EST ID NO. CUFF.51314.0
  misc_feature: Variant of the nucleotide sequence at SEQ ID NO 21826
catcatttgtaccatacttaccaagatgacaagctcaaagtgtttgttgatgatcgcagtggccggaatactaagccatcggctttacttcatcaagggcgagcaccacttacagagtccaacatacgcaaagatttgggctctcgcgtgcgcttcaattcttgcctctgccttgtttacaagtaacagagattctcaagacgctaacagctcctcgaccttaattcatgtcttttgtagcgtcgccattatcaacaccttctatttcgggagcctgttcacgagcattgtcgtctaccgacttcttgaacatcccctgaaggagtttcctggcgatgttttggcagcatcgacaaagttttatcacacgtggaaccaattgttcttgtcaaatcacatattccttgagaatcagtggcgcaagtatggtgcaatagttcgaacagggccccaggaacttaccgttacagatcctgcagtctttgacgctatttctggtccggggacaagttgcatgaaggcgccgttctatgatgccatacatccttatgttggcttgctcaatatccgaacgaaagaaggttatgctcctcgtcgtaaacagtgggatgatgtattgggtgtcaagtctacagatgtcagtggaaaagaggttcgcattcagcactttgcaacacagctccttcggattattgcaaaat

SEQ ID NO: 21829 - DNA, 918 bp, Muscodor strobelii
  misc_feature: SGI cDNA ID NO. 567400
  misc_feature: Encodes the peptide sequence at SEQ ID NO 21830
atggcaaaaactgtcggcattctgtccattggcgagatgggactaggcattgcaaaggtgctacagtttcacggctatcgagtcgtgactaacgtctctgaccgaagtcaggccacacaggccagagctagggagcacaatatagatattttgctgactgacgctgaattggtccagcaatgcgattacattctatcaattgtgccaccacgtgacgctctcgcaacggcaaaacgtataagaaatgcggcaactgagtgtgacacgatgaaaaagacaaactttcttgacctcaacgccgtttcaccttcatcatcaaagacaacatacgagttgttcgagaacttgaaagatatgacattctatgacggtgtgattagtggcggcgtgccgtacccgaaggagaacgggacgtggcactgcccgacagtgctgatgtcgggtccctcgaagatagaggatgccgacctatgcagcgccctcaatatcgaacatctcagcgacaagattggggctgcggccgcggtcaaaatgtgcttcggcatggttactaagggttacatagcactggcaatccagagcttcacgaccgcataccgcctcggtgtcctcgaggaccttgaggcattcttgggacggtacaagccgcaacacctgcaaattgcccgtgagggattagtgcgcatgcctcatactgcgtaccgctggatccacgagatgctggagatggcagaaactacttctgagtatggtggcttcaataagactctgttcgagggagttgctgaatcctaccgtgtcgtggccaaagataccatactcggcaatgagctaccggataatcgagttaggggaatgacggttgaagatgtcgtacaatgcgtgagcgagggaatagatcgcgtatcgtctacctag

SEQ ID NO: 21830 - protein, 305 aa, Muscodor strobelii
  misc_feature: SGI Peptide ID NO. 567400
  misc_feature (198)..(270): Pfam Id: PF09130 Pfam Desc: Domain of function (DUF1932)
  misc_feature (3)..(301): NCBI GI: 145241920 Blast Desc: An09g02920 [Aspergillus niger] gi|134078148|emb|CAK40229.1| protein product [Aspergillus niger]
  misc_feature (5)..(301): NCBI GI: 256733108 Blast Desc: NECHADRAFT_68400 [Nectria haematococca mpVI 77-13-4]
  misc_feature (5)..(301): NCBI GI: 39944832 Blast Desc: MGG_04398 [Magnaporthe grisea 70-15] gi|145011450|gb|EDJ96106.1| MGG_04398 [Magnaporthe grisea 70-15]
  misc_feature (4)..(299): NCBI GI: 156061457 Blast Desc: SS1G_02873 [Sclerotinia sclerotiorum 1980] gi|154700275|gb|EDO00014.1| SS1G_02873 [Sclerotinia sclerotiorum 1980]
  misc_feature (5)..(299): NCBI GI: 46124949 Blast Desc: FG06852.1 [Gibberella zeae PH-1]
  misc_feature (4)..(299): NCBI GI: 154313865 Blast Desc: BC1G_05782 [Botryotinia fuckeliana B05.10] gi|150849364|gb|EDN24557.1| BC1G_05782 [Botryotinia fuckeliana B05.10]
  misc_feature (4)..(263): NCBI GI: 169595914 Blast Desc: SNOG_00704 [Phaeosphaeria nodorum SN15] gi|111071079|gb|EAT92199.1| SNOG_00704 [Phaeosphaeria nodorum SN15]
  misc_feature (1)..(297): NCBI GI: 242800561 Blast Desc: conserved [Talaromyces stipitatus ATCC 10500] gi|218716959|gb|EED16380.1| conserved [Talaromyces stipitatus ATCC 10500]
  misc_feature (1)..(297): NCBI GI: 212540868 Blast Desc: conserved [Penicillium marneffei ATCC 18224] gi|210067888|gb|EEA21980.1| conserved [Penicillium marneffei ATCC 18224]
  misc_feature (5)..(263): NCBI GI: 189202578 Blast Desc: conserved [Pyrenophora tritici-repentis Pt-1C-BFP] gi|187984724|gb|EDU50212.1| conserved [Pyrenophora tritici-repentis Pt-1C-BFP]
MAKTVGILSIGEMGLGIAKVLQFHGYRVVTNVSDRSQATQARAREHNIDILLTDAELVQQCDYILSIVPPRDALATAKRIRNAATECDTMKKTNFLDLNAVSPSSSKTTYELFENLKDMTFYDGVISGGVPYPKENGTWHCPTVLMSGPSKIEDADLCSALNIEHLSDKIGAAAAVKMCFGMVTKGYIALAIQSFTTAYRLGVLEDLEAFLGRYKPQHLQIAREGLVRMPHTAYRWIHEMLEMAETTSEYGGFNKTLFEGVAESYRVVAKDTILGNELPDNRVRGMTVEDVVQCVSEGIDRVSST

SEQ ID NO: 21831 - DNA, 1366 bp, Muscodor strobelii
  misc_feature: SGI EST ID NO. CUFF.51323.0
  misc_feature: Variant of the nucleotide sequence at SEQ ID NO 21829
ccgctctcgccgctgaatcgttacagagtaggacgatgtaagaaactccgttgattcttagagagtaacagaggtattgcgatttcttgcggccagtctatgctatgcaactgagttccatagttggtacccttaaccctagaagaagacgaagacgatcgtgatcgtccagttcttgagacactgtcaactcatctcatctacagcaatcctgatccctcttctcacgatactcatcgtaccattacactagcatggccatggcaaaaactgtcggcattctgtccattggcgagatgggactaggcattgcaaaggtgctacagtttcacggctatcgagtcgtgactaacgtctctgaccgaagtcaggccacacaggccagagctagggagcacaatatagatattttgctgactgacgctgaattggtccagcaatgcgattacattctatcaattgtgccaccacgtgacgctctcgcaacggcaaaacgtataagaaatgcggcaactgagtgtgacacgatgaaaaagacaaactttcttgacctcaacgccgtttcaccttcatcatcaaagacaacatacgagttgttcgagaacttgaaagatatgacattctatgacggtgtgattagtggcggcgtgccgtacccgaaggagaacgggacgtggcactgcccgacagtgctgatgtcgggtccctcgaagatagaggatgccgacctatgcagcgccctcaatatcgaacatctcagcgacaagattggggctgcggccgcggtcaaaatgtgcttcggcatggttactaagggttacatagcactggcaatccagagcttcacgaccgcataccgcctcggtgtcctcgaggaccttgaggcattcttgggacggtacaagccgcaacacctgcaaattgcccgtgagggattagtgcgcatgcctcatactgcgtaccgctggatccacgagatgctggagatggcagaaactacttctgagtatggtggcttcaataagactctgttcgagggagttgctgaatcctaccgtgtcgtggccaaagataccatactcggcaatgagctaccggataatcgagttaggggaatgacggttgaagatgtcgtacaatgcgtgagcgagggaatagatcgcgtatcgtctacctagggtttgttctggtactatatgggaaccgatacgaactcgtggattcgccaccgcaatgcagttgcaggtagtaaagtcaattaaccgtctactccatctttaatgtcctcttgcatcagtagggccaacgcaagttcattcttgcgaacatgcttgcattcttactacagacacgtgcacggccgttc

SEQ ID NO: 21832 - DNA, 2178 bp, Muscodor strobelii
  misc_feature: SGI cDNA ID NO. 567401
  misc_feature: Encodes the peptide sequence at SEQ ID NO 21833
atgtatggcaacaactccgacacacatcgataccttccatcagaccaaccccataaactatccataaaggatgctattggagtggccaatgcaagcatgattttcggcggtaccatcttgtcactcgccacacttgctttcctagtcttcttgtgggcaggccgcggatttgacttagacggcgaaggtgcgagtcatgtctggcgaacaatcatgttcagtggtcaccttactcaactcattactatctcttccttgatacttcgggctgccatctcggcacaaacggcgatctgcacctcgttcgtggctgctctggtacttgagcgtcgatcggtccctctttctcaatcagcgtcgctctccgtcctacgcagcgtgaacgcgggccctcggcacttgatatggcaacttctcaggagaaactcatggtaccgcctctttggggttgagttggggttgttctacattcttgccctgggaagtattgcgatccagtttgcttccacgatactggtgtctgatctacgcgactcctccttgatagggtttccacaggaaatcgaacgaaacctgaccttatctaaggatcaagatggaggcttggcatcgtgggaacaacctgttcgagactattctctgtttggagagctctactcaggctataatgccagtccggaccttcacgggttgagtgatacaggcagcaagcgccatgtcatgatgccgttcactaagccactggacagggaggttatacgggagtatgatggccctagtctggtctatagctctcgagtggcatgcatggcaccaacgatcgatgatggtgagatcagcgacttcctcatcaaagctacagaaaacattgccggtataatgcaaggccaggtggtagtcggggataccttagccagagcagacctgagttcccagggcgattgtaacctagacggttgcccgtccaagattcccttcaaatgtgacgttccgactgtgccgtacttggattacgtcgggagctctttttgcacaccacaagacacggattctaacgtcttcaactcgccgtggaaggttgacatgacaaattggacctcagccgccaacgtcgtactcgttatcagctcgaatgtacagtataccggctttaatacctccagcaacggctcaagtctgcctaaatcaatgatcacagacgagtgggtttcatatgattttggcgatcagcgaacggtcaatgtgtcgttctgctatattgcatcgaatatcatgctgtcaaatgtcaccatgggcaccaacatgactctcgaggagccaactctcgggtatcgtaacgatctgagcgacacacgagatattaggcagatgtacggcgcagattctgtagtacaggatctgagcgaaagaggcatattgactgttcaagacatcaaggacaacaaagaccacgtctacggtgcaacacaagacacggtgccagattctcaatttggtgctagcctactggactggtttatgctgttgacctctgccaatcagactttcacgggttgtgaagtctgcgaaggaaatgcatctcctgttgccagagactaccgaagagtgttcctcgatactcttacgaccacgcagcgagcatctgttgcactccagactagctacacaattctcgcccagagtcttcacgatcagtttctcgagtttctgaccattccatcaaccgtcgaagtaacgcggacacaatcctcaaatataccagtgcgctactcgggtcttatcgcagtcatagttttggttgttgttgacttagcttgcatcgtcctactcactgccttgtatctttcccattctagatactcgatgataggagactactggcacgctatttcgcagattgtcgctgacataagctgggatatcctgcctcgcgcaaatcagaggaaggaccgcttgatcacgagacatcttagaaagaatgatcgtcctgtgaggttggtgaagctggcggacactgggttcgtcaaaatcgttgatgctgagtatgcgcctcttccttggtcaaagctgcgaacaacatggggatctacgagcttcactgctcggctgagacagcttctccagttcaaaaggcctacgacgcagaatgataaggaccgcggagtcaacactgggtaa

SEQ ID NO: 21833 - protein, 725 aa, Muscodor strobelii
  misc_feature: SGI Peptide ID NO. 567401
  misc_feature (26)..(678): NCBI GI: 145605162 Blast Desc: MGG_02132 [Magnaporthe grisea 70-15] gi|145013020|gb|EDJ97661.1| MGG_02132 [Magnaporthe grisea 70-15]
  misc_feature (23)..(635): NCBI GI: 46139113 Blast Desc: FG11071.1 [Gibberella zeae PH-1]
  misc_feature (48)..(662): NCBI GI: 119474385 Blast Desc: NFIA_005330 [Neosartorya fischeri NRRL 181] gi|119407221|gb|EAW17171.1| conserved [Neosartorya fischeri NRRL 181]
  misc_feature (26)..(272): NCBI GI: 256733978 Blast Desc: NECHADRAFT_77642 [Nectria haematococca mpVI 77-13-4]
  misc_feature (24)..(673): NCBI GI: 256722986 Blast Desc: NECHADRAFT_52602 [Nectria haematococca mpVI 77-13-4]
  misc_feature (32)..(275): NCBI GI: 256726575 Blast Desc: NECHADRAFT_79667 [Nectria haematococca mpVI 77-13-4]
  misc_feature (25)..(269): NCBI GI: 46127455 Blast Desc: FG08105.1 [Gibberella zeae PH-1]
  misc_feature (17)..(269): NCBI GI: 119482479 Blast Desc: NFIA_093340 [Neosartorya fischeri NRRL 181] gi|119409422|gb|EAW19371.1| [Neosartorya fischeri NRRL 181]
  misc_feature (449)..(632): NCBI GI: 46127455 Blast Desc: FG08105.1 [Gibberella zeae PH-1]
  misc_feature (422)..(650): NCBI GI: 119482479 Blast Desc: NFIA_093340 [Neosartorya fischeri NRRL 181] gi|119409422|gb|EAW19371.1| [Neosartorya fischeri NRRL 181]
MYGNNSDTHRYLPSDQPHKLSIKDAIGVANASMIFGGTILSLATLAFLVFLWAGRGFDLDGEGASHVWRTIMFSGHLTQLITISSLILRAAISAQTAICTSFVAALVLERRSVPLSQSASLSVLRSVNAGPRHLIWQLLRRNSWYRLFGVELGLFYILALGSIAIQFASTILVSDLRDSSLIGFPQEIERNLTLSKDQDGGLASWEQPVRDYSLFGELYSGYNASPDLHGLSDTGSKRHVMMPFTKPLDREVIREYDGPSLVYSSRVACMAPTIDDGEISDFLIKATENIAGIMQGQVVVGDTLARADLSSQGDCNLDGCPSKIPFKCDVPTVPYLDYVGSSFCTPQDTDSNVFNSPWKVDMTNWTSAANVVLVISSNVQYTGFNTSSNGSSLPKSMITDEWVSYDFGDQRTVNVSFCYIASNIMLSNVTMGTNMTLEEPTLGYRNDLSDTRDIRQMYGADSVVQDLSERGILTVQDIKDNKDHVYGATQDTVPDSQFGASLLDWFMLLTSANQTFTGCEVCEGNASPVARDYRRVFLDTLTTTQRASVALQTSYTILAQSLHDQFLEFLTIPSTVEVTRTQSSNIPVRYSGLIAVIVLVVVDLACIVLLTALYLSHSRYSMIGDYWHAISQIVADISWDILPRANQRKDRLITRHLRKNDRPVRLVKLADTGFVKIVDAEYAPLPWSKLRTTWGSTSFTARLRQLLQFKRPTTQNDKDRGVNTG

SEQ ID NO: 21834 - DNA, 1422 bp, Muscodor strobelii
  misc_feature: SGI EST ID NO. CUFF.51326.0
  misc_feature: Variant of the nucleotide sequence at SEQ ID NO 21832
agcgacttcctcatcaaagctacagaaaacattgccggtataatgcaaggccaggtggtagtcggggataccttagccagagcagacctgagttcccagggcgattgtaacctagacggttgcccgtccaagattcccttcaaatgtgacgttccgactgtgccgtacttggattacgtcgggagctctttttgcacaccacaagacacggattctaacgtcttcaactcgccgtggaaggttgacatgacaaattggacctcagccgccaacgtcgtactcgttatcagctcgaatgtacagtataccggctttaatacctccagcaacggctcaagtctgcctaaatcaatgatcacagacgagtgggtttcatatgattttggcgatcagcgaacggtcaatgtgtcgttctgctatattgcatcgaatatcatgctgtcaaatgtcaccatgggcaccaacatgactctcgaggagccaactctcgggtatcgtaacgatctgagcgacacacgagatattaggcagatgtacggcgcagattctgtagtacaggatctgagcgaaagaggcatattgactgttcaagacatcaaggacaacaaagaccacgtctacggtgcaacacaagacacggtgccagattctcaatttggtgctagcctactggactggtttatgctgttgacctctgccaatcagactttcacgggttgtgaagtctgcgaaggaaatgcatctcctgttgccagagactaccgaagagtgttcctcgatactcttacgaccacgcagcgagcatctgttgcactccagactagctacacaattctcgcccagagtcttcacgatcagtttctcgagtttctgaccattccatcaaccgtcgaagtaacgcggacacaatcctcaaatataccagtgcgctactcgggtcttatcgcagtcatagttttggttgttgttgacttagcttgcatcgtcctactcactgccttgtatctttcccattctagatactcgatgataggagactactggcacgctatttcgcagattgtcgctgacataagctgggatatcctgcctcgcgcaaatcagaggaaggaccgcttgatcacgagacatcttagaaagaatgatcgtcctgtgaggttggtgaagctggcggacactgggttcgtcaaaatcgttgatgctgagtatgcgcctcttccttggtcaaagctgcgaacaacatggggatctacgagcttcactgctcggctgagacagcttctccagttcaaaaggcctacgacgcagaatgataaggaccgcggagtcaacactgggtaatctaagtcattcagtagaaaacagcttggaataattttcttgtatatctttttgcactctatgctctttattcacggcccg

SEQ ID NO: 21835 - DNA, 1455 bp, Muscodor strobelii
  misc_feature: SGI cDNA ID NO. 567402
  misc_feature: Encodes the peptide sequence at SEQ ID NO 21836
atgccgttcactaagccactggacagggaggttatacgggagtatgatggccctagtctggtctatagctctcgagtggcatgcatggcaccaacgatcgatgatggtgagatcagcgacttcctcatcaaagctacagaaaacattgccggtataatgcaaggccaggtggtagtcggggataccttagccagagcagacctgagttcccagggcgattgtaacctagacggttgcccgtccaagattcccttcaaatgtgacgttccgactgtgccgtacttggattacgtcgggagctctttttgcacaccacaagacacggattctaacgtcttcaactcgccgtggaaggttgacatgacaaattggacctcagccgccaacgtcgtactcgttatcagctcgaatgtacagtataccggctttaatacctccagcaacggctcaagtctgcctaaatcaatgatcacagacgagtgggtttcatatgattttggcgatcagcgaacggtcaatgtgtcgttctgctatattgcatcgaatatcatgctgtcaaatgtcaccatgggcaccaacatgactctcgaggagccaactctcgggtatcgtaacgatctgagcgacacacgagatattaggcagatgtacggcgcagattctgtagtacaggatctgagcgaaagaggcatattgactgttcaagacatcaaggacaacaaagaccacgtctacggtgcaacacaagacacggtgccagattctcaatttggtgctagcctactggactggtttatgctgttgacctctgccaatcagactttcacgggttgtgaagtctgcgaaggaaatgcatctcctgttgccagagactaccgaagagtgttcctcgatactcttacgaccacgcagcgagcatctgttgcactccagactagctacacaattctcgcccagagtcttcacgatcagtttctcgagtttctgaccattccatcaaccgtcgaagtaacgcggacacaatcctcaaatataccagtgcgctactcgggtcttatcgcagtcatagttttggttgttgttgacttagcttgcatcgtcctactcactgccttgtatctttcccattctagatactcgatgataggagactactggcacgctatttcgcagattgtcgctgacataagctgggatatcctgcctcgcgcaaatcagaggaaggaccgcttgatcacgagacatcttagaaagaatgatcgtcctgtgaggttggtgaagctggcggacactgggttcgtcaaaatcgttgatgctgagtatgcgcctcttccttggtcaaagctgcgaacaacatggggatctacgagcttcactgctcggctgagacagcttctccagttcaaaaggcctacgacgcagaatgataaggaccgcggagtcaacactgggtaa

SEQ ID NO: 21836 - protein, 484 aa, Muscodor strobelii
  misc_feature: SGI Peptide ID NO. 567402
  misc_feature (1)..(394): NCBI GI: 46139113 Blast Desc: FG11071.1 [Gibberella zeae PH-1]
  misc_feature (6)..(437): NCBI GI: 145605162 Blast Desc: MGG_02132 [Magnaporthe grisea 70-15] gi|145013020|gb|EDJ97661.1| MGG_02132 [Magnaporthe grisea 70-15]
  misc_feature (1)..(421): NCBI GI: 119474385 Blast Desc: NFIA_005330 [Neosartorya fischeri NRRL 181] gi|119407221|gb|EAW17171.1| conserved [Neosartorya fischeri NRRL 181]
  misc_feature (208)..(391): NCBI GI: 46127455 Blast Desc: FG08105.1 [Gibberella zeae PH-1]
  misc_feature (290)..(393): NCBI GI: 256726575 Blast Desc: NECHADRAFT_79667 [Nectria haematococca mpVI 77-13-4]
  misc_feature (181)..(409): NCBI GI: 119482479 Blast Desc: NFIA_093340 [Neosartorya fischeri NRRL 181] gi|119409422|gb|EAW19371.1| [Neosartorya fischeri NRRL 181]
MPFTKPLDREVIREYDGPSLVYSSRVACMAPTIDDGEISDFLIKATENIAGIMQGQVVVGDTLARADLSSQGDCNLDGCPSKIPFKCDVPTVPYLDYVGSSFCTPQDTDSNVFNSPWKVDMTNWTSAANVVLVISSNVQYTGFNTSSNGSSLPKSMITDEWVSYDFGDQRTVNVSFCYIASNIMLSNVTMGTNMTLEEPTLGYRNDLSDTRDIRQMYGADSVVQDLSERGILTVQDIKDNKDHVYGATQDTVPDSQFGASLLDWFMLLTSANQTFTGCEVCEGNASPVARDYRRVFLDTLTTTQRASVALQTSYTILAQSLHDQFLEFLTIPSTVEVTRTQSSNIPVRYSGLIAVIVLVVVDLACIVLLTALYLSHSRYSMIGDYWHAISQIVADISWDILPRANQRKDRLITRHLRKNDRPVRLVKLADTGFVKIVDAEYAPLPWSKLRTTWGSTSFTARLRQLLQFKRPTTQNDKDRGVNTG

SEQ ID NO: 21837 - DNA, 1422 bp, Muscodor strobelii; identical to SEQ ID NO: 21834
  misc_feature: SGI EST ID NO. CUFF.51326.0
  misc_feature: Variant of the nucleotide sequence at SEQ ID NO 21835

SEQ ID NO: 21838 - DNA, 639 bp, Muscodor strobelii
  misc_feature: SGI cDNA ID NO. 567403
  misc_feature: Encodes the peptide sequence at SEQ ID NO 21839
atgaaatacattatagaaaaagtgttctggctcctggccgctggacggtctgcaactgctgtcaacacgcttgttgacctgggatacacaaaactccaaggctctgacgacagtataggagtcactcaatggctaggtgtgccatatgcagccgcccctttgggtgacctgcggtttgcagcacccatcgatccgccggcgacgacaggaattgtcgatgccctcgaattcaaaccaatatgccttccacgttcagcatcggacttcacgatgcaacctaataagaggttcgtagttgacgaggactgcctatttgcgaatatttttgcaccatcgaacgcgaccgaggactcgaagcttccggtcatgtactttattcaaggaggtggcttccagtcgaactcgaacgcaaacttcaaaggcagcgatttggctctgttcggaaatatggtcgtcatccagatcaactaccgtgtagggccgtttggttttatacagagtcaggaggtcatgaagaatgggagtttgaatattgggttaagagaccaagttcagggcctgaaatgggttcagcaaaacatcgcatcggcaagtcgaaccccaaaactcagatctgcttgttcaaagactaatgattaa

SEQ ID NO: 21839 - protein, 212 aa, Muscodor strobelii
  misc_feature: SGI Peptide ID NO. 567403
  misc_feature (1)..(196): Pfam Id: PF00135 Pfam Desc: Carboxylesterase
  misc_feature (20)..(195): NCBI GI: 145602711 Blast Desc: MGG_09801 [Magnaporthe grisea 70-15] gi|145011101|gb|EDJ95757.1| MGG_09801 [Magnaporthe grisea 70-15]
  misc_feature (20)..(201): NCBI GI: 261352645 Blast Desc: para-nitrobenzyl esterase [Verticillium albo-atrum VaMs.102]
  misc_feature (17)..(202): NCBI GI: 255954793 Blast Desc: Pc21g11170 [Penicillium chrysogenum Wisconsin 54-1255] gi|211589860|emb|CAP96014.1| Pc21g11170 [Penicillium chrysogenum Wisconsin 54-1255]
  misc_feature (18)..(202): NCBI GI: 121719655 Blast Desc: triacylglycerol lipase, [Aspergillus clavatus NRRL 1] gi|119404738|gb|EAW15100.1| triacylglycerol lipase, [Aspergillus clavatus NRRL 1]
  misc_feature (17)..(201): NCBI GI: 119484132 Blast Desc: triacylglycerol lipase, [Neosartorya fischeri NRRL 181] gi|119410125|gb|EAW20072.1| triacylglycerol lipase, [Neosartorya fischeri NRRL 181]
  misc_feature (20)..(201): NCBI GI: 39946192 Blast Desc: MGG_08416 [Magnaporthe grisea 70-15] gi|145019923|gb|EDK04151.1| MGG_08416 [Magnaporthe grisea 70-15]
  misc_feature (17)..(201): NCBI GI: 258575583 Blast Desc: conserved [Uncinocarpus reesii 1704] gi|237902239|gb|EEP76640.1| conserved [Uncinocarpus reesii 1704]
  misc_feature (5)..(194): NCBI GI: 189190532 Blast Desc: lipase 1 precursor [Pyrenophora tritici-repentis Pt-1C-BFP] gi|187973211|gb|EDU40710.1| lipase 1 precursor [Pyrenophora tritici-repentis Pt-1C-BFP]
  misc_feature (15)..(195): NCBI GI: 145253344 Blast Desc: An16g08870 [Aspergillus niger] gi|134083750|emb|CAK47084.1| protein product [Aspergillus niger]
  misc_feature (11)..(194): NCBI GI: 169626549 Blast Desc: SNOG_16576 [Phaeosphaeria nodorum SN15] gi|111054936|gb|EAT76056.1| SNOG_16576 [Phaeosphaeria nodorum SN15]
  misc_feature (41)..(195): SWISSPROT Homolog: EC 3.1.1.1 Carboxylesterase
MKYIIEKVFWLLAAGRSATAVNTLVDLGYTKLQGSDDSIGVTQWLGVPYAAAPLGDLRFAAPIDPPATTGIVDALEFKPICLPRSASDFTMQPNKRFVVDEDCLFANIFAPSNATEDSKLPVMYFIQGGGFQSNSNANFKGSDLALFGNMVVIQINYRVGPFGFIQSQEVMKNGSLNIGLRDQVQGLKWVQQNIASASRTPKLRSACSKTND

SEQ ID NO: 21840 - DNA, 1092 bp, Muscodor strobelii
  misc_feature: SGI cDNA ID NO. 567404
  misc_feature: Encodes the peptide sequence at SEQ ID NO 21841
atggaatcagcatcagtagctactcttcgaactctcgatcaagggcaacaacagtacgattgtctcgtcaacgcgacaggatgctccgaaatgccagacacgctttcatgtctgcgatctactcctgccgctagtctactaactgaagagtgtcaatttaatcctcatatagacaacgatatgatcaaggaatctatgctcgatgcatttggaaaggggaattatctccaaatacccacaatcatcggttcctgcacagatgaggggacgaaaaacgtgccgcaggatacaaatacaacagcgcaagctcttgcagtcctcaacagtcgcgtctcgaactcgctctccaactcttcgctctcactcttggcacagacatacttgagtccatcaccgcctgcacctgttttccctaactcggggcccctctggcgaccacttgcgaatgcggttggtgatatcagcgcacactgcgttgcatccattctccaagactctatcgtagcaatctcccaacagccaacatggagctatcgctatgcagtgaaagatccgcaaaatgaagctcaaggttttggagcctaccacacggtagagctaaacggcgtcttcggaccaaacaatacggacggtttcccacccgtcagctaccgtacaattaatgcgccgattgtgcctgtgactatggcgtactgggcgagcttcgtcaaaaccctggatccgaattcggatagattgccagggtcgccggaatgggtcccatggcaaggtgaacaaggcggtgaaaggctgagattgagattccaaacgaatagcacggcaatggaacccatgcctgatcagcagattttgaattgcgctatggttgaaccgatggtgaaggctatggaaatacagccggtgaaaggcactctcattcagctgactcggcctgggccggctgtccttactgctccggacacaaaaggacctaacactaattcaggaggcattttgcctgctattgcgggcgcgtctagggattctcagagtgtatcggttctgggtctaggcttgggctcattgttggctttacttatgcttgtagaataa

SEQ ID NO: 21841 - protein, 363 aa, Muscodor strobelii
  misc_feature: SGI Peptide ID NO. 567404
  misc_feature (174)..(287): Pfam Id: PF00135 Pfam Desc: Carboxylesterase
  misc_feature (22)..(96): Pfam Id: PF00135 Pfam Desc: Carboxylesterase
  misc_feature (1)..(312): NCBI GI: 145602711 Blast Desc: MGG_09801 [Magnaporthe grisea 70-15] gi|145011101|gb|EDJ95757.1| MGG_09801 [Magnaporthe grisea 70-15]
  misc_feature (1)..(308): NCBI GI: 169626549 Blast Desc: SNOG_16576 [Phaeosphaeria nodorum SN15] gi|111054936|gb|EAT76056.1| SNOG_16576 [Phaeosphaeria nodorum SN15]
  misc_feature (2)..(308): NCBI GI: 39946192 Blast Desc: MGG_08416 [Magnaporthe grisea 70-15] gi|145019923|gb|EDK04151.1| MGG_08416 [Magnaporthe grisea 70-15]
  misc_feature (1)..(308): NCBI GI: 189190532 Blast Desc: lipase 1 precursor [Pyrenophora tritici-repentis Pt-1C-BFP] gi|187973211|gb|EDU40710.1| lipase 1 precursor [Pyrenophora tritici-repentis Pt-1C-BFP]
  misc_feature (2)..(286): NCBI GI: 67521952 Blast Desc: AN1433.2 [Aspergillus nidulans FGSC A4] gi|40745407|gb|EAA64563.1| AN1433.2 [Aspergillus nidulans FGSC A4] gi|259486743|tpe|CBF84847.1| TPA: triacylglycerol lipase, A4]
  misc_feature (2)..(289): NCBI GI: 169784384 Blast Desc: [Aspergillus oryzae RIB40] gi|83775400|dbj|BAE65520.1| protein product [Aspergillus oryzae]
  misc_feature (2)..(286): NCBI GI: 255954793 Blast Desc: Pc21g11170 [Penicillium chrysogenum Wisconsin 54-1255] gi|211589860|emb|CAP96014.1| Pc21g11170 [Penicillium chrysogenum Wisconsin 54-1255]
  misc_feature (2)..(289): NCBI GI: 115490983 Blast Desc: conserved [Aspergillus terreus NIH2624] gi|114196979|gb|EAU38679.1| conserved [Aspergillus terreus NIH2624]
  misc_feature (2)..(289): NCBI GI: 238508487 Blast Desc: triacylglycerol lipase, [Aspergillus flavus NRRL3357] gi|220688955|gb|EED45307.1| triacylglycerol lipase, [Aspergillus flavus NRRL3357]
  misc_feature (2)..(286): NCBI GI: 145253344 Blast Desc: An16g08870 [Aspergillus niger] gi|134083750|emb|CAK47084.1| protein product [Aspergillus niger]
MESASVATLRTLDQGQQQYDCLVNATGCSEMPDTLSCLRSTPAASLLTEECQFNPHIDNDMIKESMLDAFGKGNYLQIPTIIGSCTDEGTKNVPQDTNTTAQALAVLNSRVSNSLSNSSLSLLAQTYLSPSPPAPVFPNSGPLWRPLANAVGDISAHCVASILQDSIVAISQQPTWSYRYAVKDPQNEAQGFGAYHTVELNGVFGPNNTDGFPPVSYRTINAPIVPVTMAYWASFVKTLDPNSDRLPGSPEWVPWQGEQGGERLRLRFQTNSTAMEPMPDQQILNCAMVEPMVKAMEIQPVKGTLIQLTRPGPAVLTAPDTKGPNTNSGGILPAIAGASRDSQSVSVLGLGLGSLLALLMLVE

SEQ ID NO: 21842 - DNA, 514 bp, Muscodor strobelii
  misc_feature: SGI EST ID NO. CUFF.51347.0
  misc_feature: Variant of the nucleotide sequence at SEQ ID NO 21840
gcccttcaaaggtgcagtaatggaatcagcatcagtagctactcttcgaactctcgatcaagggcaacaacagtacgattgtctcgtcaacgcgacaggatgctccgaaatgccagacacgctttcatgtctgcgatctactcctgccgctagtctactaactgaagagtgtcaatttaatcctcatatagacaacgatatgatcaaggaatctatgctcgatgcatttggaaaggggaattatctccaaatacccacaatcatcggttcctgcacagatgaggggacgaaaaacgtgccgcaggatacaaatacaacagcgcaagctcttgcagtcctcaacagtcgcgtctcgaactcgctctccaactcttcgctctcactcttggcacagacatacttgagtccatcaccgcctgcacctgttttccctaactcggggcccctctggcgaccacttgcgaatgcggttggtgatatcagcgcacactgcgttgcatccattctccaagac

SEQ ID NO: 21843 - DNA, 510 bp, Muscodor strobelii
  misc_feature: SGI cDNA ID NO. 567405
  misc_feature: Encodes the peptide sequence at SEQ ID NO 21844
atggactttttcgatcatcttgcctctgagtacgagaagaacctcacggacagaatgaggggttcattcgcacccacgaacggcataggatctgaaaagagcacctctttaccgcatggtgaattggaactatcgcgtaaagcccccaaaatacgaattgtgcatatttgctacccacggacgtgcgaacgactttttgaagagaggtggaaaatgtggtatcgcttcctgttggacaaaggtggagaagctcggcttgttgctatcaaagaggcgctcgatgaagtttccactgtgcctagtagtcgtgattggtttcgtgaccctgatcccctccgtccgccatctccgttttctgagcgatacagcgacgatttcgaagttctcgaggagcaaatcatgaacgaaatagatggctatggtgacgactattatgaggcctcggagcgcgaacaccagcgtaggaggttgcagctagacctgcttccgccagatgagagtcggcgatga

SEQ ID NO: 21844 - protein, 169 aa, Muscodor strobelii
  misc_feature: SGI Peptide ID NO. 567405
MDFFDHLASEYEKNLTDRMRGSFAPTNGIGSEKSTSLPHGELELSRKAPKIRIVHICYPRTCERLFEERWKMWYRFLLDKGGEARLVAIKEALDEVSTVPSSRDWFRDPDPLRPPSPFSERYSDDFEVLEEQIMNEIDGYGDDYYEASEREHQRRRLQLDLLPPDESRR

SEQ ID NO: 21845 - DNA, 1020 bp, Muscodor strobelii
  misc_feature: SGI EST ID NO. CUFF.51362.0
  misc_feature: Variant of the nucleotide sequence at SEQ ID NO 21843
tgcgaatggactttttcgatcatcttgcctctgagtacgagaagaacctcacggacagaatgaggggttcattcgcacccacgaacggcataggatctgaaaagagcacctctttaccgcatggtgaattggaactatcgcgtaaagcccccaaaatacgaattgtgcatatttgctacccacggacgtgcgaacgactttttgaagagaggtggaaaatgtggtatcgcttcctgttggacaaaggtggagaagctcggcttgttgctatcaaagaggcgctcgatgaagtttccactgtgcctagtagtcgtgattggtttcgtgaccctgatcccctccgtccgccatctccgttttctgagcgatacagcgacgatttcgaagttctcgaggagcaaatcatgaacgaaatagatggctatggtgacgactattatgaggcctcggagcgcgaacaccagcgtaggaggttgcagctagacctgcttccgccagatgagagtcggcgatgagactagtattaagaagcacaaagaccgttagaactttcgaattttgtgaccaaggtatgatggcaattgctcggtaatctggataaggagtagggctgaacacattcgtctttccgttttcccgaaacactactcttagagtagtcttcataggactaatacagatcacacggactgagctaactttgcggtcaactttgttactattagttaccagtctcgacaaggttgggcagcgaactatcacttagtcgatttcctgaggtttcgatgggcccgttatcacaacaacagcggaagagaaggatcgcgtctgtgagttacataaaagttggaagtagaagccgagctgtcgcaaagtggcctgctcattcgggttaccacctaaggtaacatggtacgctccgaggaacataatataggggttcaggtgtatatttatacgagtgttattcaccggtttactcggaagatagttagaaagctatcccattattacttttcc

SEQ ID NO: 21846 - DNA, 1062 bp, Muscodor strobelii
  misc_feature: SGI cDNA ID NO. 567406
  misc_feature: Reduced expression when VOC is produced
  misc_feature: Encodes the peptide sequence at SEQ ID NO 21847
atgggtagaatacggcacccgtgggcgatagcggttgcgaccacacttggaatactcacaagtagcatcgcagcagcagattcgaaacgtgggatgggatacatcggcgccgatgatcacgactcggactacgcgctcctactatcagataaatcaccaataaattggtactacacatggtctccggtggcagctccatccgacatatttcccgatggcgcccaggacaggctcgagtttgtacctgcattgccaggcatcgataacatcaatgatgatattgacgccgcgaaaaagctaccagattcgtcgaaacatctactcacgttcaacgaacctgacgggacgacgtcctctggaggatccagcatagatccaaaagatgcagcacaagcctacatcgaccaagtagtcccactacgagaccaattccaagtctcacatcctgccgtcaccggatcatcccgaggtctcgactggctaaacgacttcaattcgtcatgttgggaaatcgactcggacaacgggtgccccgcagacttcgtcgccgtccactggtacggtgactacaccgggctaacatactggcttgaccaaattaccggatggtacaacgacagcatgagcggcatcgacggcgatctcaaagtctgggtgaccgagctgggactcgcccaagccgacgaagacaccaccttcgccatgatgaaccaaaccctaccctacctcgactcactctcctacatcgagcgatactcctggttcggcgtcttccgcccaaaagaagccaatgaatggacaggcgattctatagcccttctcgaaaacgacggcggactaagcaaactaggcgcctactacctcggaggacaatccaacggtttcgaacaaggccaaacgggcggaggcggagaaagtggaagcagcggtaatggcaacagcaccaatcccggcggcgatagcggcgacgatggcgacgatactaacgtggctacagggctacgcacctccataacgatcgtctggcttacggctctggctgcttgcttgtgggtcatatag

SEQ ID NO: 21847 - protein, 353 aa, Muscodor strobelii
  misc_feature: SGI Peptide ID NO. 567406
  misc_feature (15)..(353): NCBI GI: 189208887 Blast Desc: conserved [Pyrenophora tritici-repentis Pt-1C-BFP] gi|187976869|gb|EDU43495.1| conserved [Pyrenophora tritici-repentis Pt-1C-BFP]
  misc_feature (3)..(316): NCBI GI: 169598994 Blast Desc: SNOG_02309 [Phaeosphaeria nodorum SN15] gi|111069401|gb|EAT90521.1| SNOG_02309 [Phaeosphaeria nodorum SN15]
  misc_feature (28)..(302): NCBI GI: 256722044 Blast Desc: NECHADRAFT_64367 [Nectria haematococca mpVI 77-13-4]
  misc_feature (28)..(302): NCBI GI: 46109892 Blast Desc: FG01828.1 [Gibberella zeae PH-1]
  misc_feature (28)..(297): NCBI GI: 39968329 Blast Desc: MGG_02257 [Magnaporthe grisea 70-15] gi|145014184|gb|EDJ98825.1| MGG_02257 [Magnaporthe grisea 70-15]
  misc_feature (10)..(302): NCBI GI: 261361455 Blast Desc: conserved [Verticillium albo-atrum VaMs.102]
  misc_feature (26)..(294): NCBI GI: 212544029 Blast Desc: conserved [Penicillium marneffei ATCC 18224] gi|210067076|gb|EEA21169.1| conserved [Penicillium marneffei ATCC 18224]
  misc_feature (1)..(290): NCBI GI: 242788360 Blast Desc: conserved [Talaromyces stipitatus ATCC 10500] gi|218721350|gb|EED20769.1| conserved [Talaromyces stipitatus ATCC 10500]
  misc_feature (11)..(308): NCBI GI: 85091052 Blast Desc: NCU09647 [Neurospora crassa OR74A] gi|28920095|gb|EAA29477.1| conserved [Neurospora crassa OR74A]
  misc_feature (20)..(307): NCBI GI: 156031221 Blast Desc: SS1G_14032 [Sclerotinia sclerotiorum 1980] gi|154699434|gb|EDN99172.1| SS1G_14032 [Sclerotinia sclerotiorum 1980]
  misc_feature: Useful for introducing or modulating the production of volatile compounds
MGRIRHPWAIAVATTLGILTSSIAAADSKRGMGYIGADDHDSDYALLLSDKSPINWYYTWSPVAAPSDIFPDGAQDRLEFVPALPGIDNINDDIDAAKKLPDSSKHLLTFNEPDGTTSSGGSSIDPKDAAQAYIDQVVPLRDQFQVSHPAVTGSSRGLDWLNDFNSSCWEIDSDNGCPADFVAVHWYGDYTGLTYWLDQITGWYNDSMSGIDGDLKVWVTELGLAQADEDTTFAMMNQTLPYLDSLSYIERYSWFGVFRPKEANEWTGDSIALLENDGGLSKLGAYYLGGQSNGFEQGQTGGGGESGSSGNGNSTNPGGDSGDDGDDTNVATGLRTSITIVWLTALAACLWVI

SEQ ID NO: 21848 - DNA, 1806 bp, Muscodor strobelii
  misc_feature: SGI EST ID NO. CUFF.51412.1
  misc_feature: Variant of the nucleotide sequence at SEQ ID NO 21846
ccgttgtacgccaagaagggccgtcgcgattggcgctcagcacgatgacatcatcgcggatgccctcgatagtaattgtctcgttctgtctcaactggcgactggttctcttaagcctacagtagactgacggcatccctgaatcatcaaattgtcagcccatcccacactactttacaacgagttgcttggcataccacgcaaagatcgcctagccttatctacgcacaacggctctccggcggatcatctcgctaaacaacgtgtttcgctacggccaggtttttgatccctgctgaggtcaccatgctacgtcagcgaatgaacatgctaaatggtcgaggctctcaaaaccgcaatcttcgcggtttacttttttggtatatgaatttgaattgatatttattggttgatgtgaagtgtgtctttcttctgtattatactgtacatcatatcatagttggcttcttggaaatactttgatcacaatgggtagaatacggcacccgtgggcgatagcggttgcgaccacacttggaatactcacaagtagcatcgcagcagcagattcgaaacgtgggatgggatacatcggcgccgatgatcacgactcggactacgcgctcctactatcagataaatcaccaataaattggtactacacatggtctccggtggcagctccatccgacatatttcccgatggcgcccaggacaggctcgagtttgtacctgcattgccaggcatcgataacatcaatgatgatattgacgccgcgaaaaagctaccagattcgtcgaaacatctactcacgttcaacgaacctgacgggacgacgtcctctggaggatccagcatagatccaaaagatgcagcacaagcctacatcgaccaagtagtcccactacgagaccaattccaagtctcacatcctgccgtcaccggatcatcccgaggtctcgactggctaaacgacttcaattcgtcatgttgggaaatcgactcggacaacgggtgccccgcagacttcgtcgccgtccactggtacggtgactacaccgggctaacatactggcttgaccaaattaccggatggtacaacgacagcatgagcggcatcgacggcgatctcaaagtctgggtgaccgagctgggactcgcccaagccgacgaagacaccaccttcgccatgatgaaccaaaccctaccctacctcgactcactctcctacatcgagcgatactcctggttcggcgtcttccgcccaaaagaagccaatgaatggacaggcgattctatagcccttctcgaaaacgacggcggactaagcaaactaggcgcctactacctcggaggacaatccaacggtttcgaacaaggccaaacgggcggaggcggagaaagtggaagcagcgggctacgcacctccataacgatcgtctggcttacggctctggctgcttgcttgtgggtcatatagcgaataggaggtgtctcatagaggtgagactggtgatcgtggaagcttacggaagtgctgtaaacgcttatgtaggacaagtaataacgggatgactttttacctaacttccgaatagattggcgaataacgcatgtatatatatccacctaaacccctatattatgcgccagtaagcgtaccacattacctcaagtggttaccccgaataggtagggccactttgtgacaaggtggccaaggcgagtataccattatgaacgacacgatattatgagatgagacaatggccatattagatcaactattacatgaataaagcgaa

SEQ ID NO: 21849 - DNA, 2076 bp, Muscodor strobelii
  misc_feature: SGI cDNA ID NO. 567407
  misc_feature: Reduced expression when VOC is produced
  misc_feature: Encodes the peptide sequence at SEQ ID NO 21850
atgagcacccacggtggcgctgctggcatgccttattacgtcccccaccagcccgtttccgctactcctagcgtcgttatgaacccttccctccccgtcaacgcagtggcgcgaccaagcacgccgtcgcggcgatcaagttccgcgacggcgccaggtagtggtgctagctacaagatggcccagcaacacgactctcgcttccagtccatgccgcctccgttccgtgatgtgactggccaatcctccgcccctgtcgctcagagctttggtgatagtcaacccctttcgtcacacgcctacagctctcccgcgacagtccaatcagaccttcccgcccacctcgctctgagtgttgaagcgtataactctatggctgctaagttcggcctacagttggggcctgaatttgctacgcaataccatggcaatgttatggagggccagagcaatgttactggtaatcatcaccatcaagccggcgccgcccacgcgcagctcacacaaccccaccctatccaaggccacaataaccacaatgctgtgcatcaactcagagctcaggccatgatgagtgcccagtcgcccttccaaaatcatatcgtccaggcccagcattaccagcgtgcccagactatcaatcctcggacgcttattcattcccaggcgatggtcgacccccaccctattatcaaacaccaggctgctatcaatccccagatgatggtcaaaccccaggcgacggctaaccctcaggctgctatgaaaccccaggcaagggtcaatacttgcgtaattgctaaccatcaggcaatgcttaagccccaagcaaggaccacccctcaggctgttgttacctcccaggcccttggccagcatcttggacatcatgtccccaagcagtcgccacatgcgtcaccagccctacttaatggctacccagatgccagacgacggagtgactcgtatgctccgtccgaagttttagaaaccgaccttctccagttcaaaacgcccgagatcatcccgcaaacgatcagcccgaagctgcctcaagtggatcagggtaccaagcccggtcccatgaccgccatgaacgggaagacacctactactagtgccacaccacagccgtctcatactgcccccggtatccaaccagactccagcggctacgcgcctcagaataagaacactccacttccgccacctagaaaaaggcgacgttccggcacgcaagacaagaatgacaataagcgcgtcaaggttggtaataaacccgatggagctaccagggtcaacggtgccagcagggtcaacggtgccaacggagtcaaggttgccgacggattcaatggtgcttacggaattgacgttaccaacgtagccggatgcatcaacggtgtcaacggtgtcaatagtgtcaacggtgtcaacggttctggaaaacccagcagtaatggtccccgaaaacctacgccttccattgcttgtcctcccattgccccgccgcccagcgatcagcgtcctcttccccctttacccgtcgttgtgcaaccaaactccatcaactcttccgagtcccctcaagtcaaggatgaatttggactatatcatctcgcggcacaccttgctcaagagaaggaggagaagcaacaacaagaagcagagcgacgtcggcagcaggaggagcatgaggccaagaaagatcagatggagaaggaaagcaggtggcctggcgacccggccttctggcctgccggagtcttgccagacctcaagcgtccaggctgtccctggcgtcgcgagtctatcttcgtgggtactatccgccgcggaggtggctgcgtccgtgccatcaaagccgacaatgaagttggcgttgagcttcatatcgtctcaacggacccgactgaggaaaattgcaaggcaggcgagattgcaacgttcgagaagatcgaactggctcctctttttgaccaaatgagcgagcctcaggtcattcgctgggcccactatctactctcaaccattccgggtcacaacgactgcattacatcgtggaagaatgcctag

SEQ ID NO: 21850 - protein, 691 aa, Muscodor strobelii
  misc_feature: SGI Peptide ID NO. 567407
  misc_feature: Useful for introducing or modulating the production of volatile compounds
MSTHGGAAGMPYYVPHQPVSATPSVVMNPSLPVNAVARPSTPSRRSSSATAPGSGASYKMAQQHDSRFQSMPPPFRDVTGQSSAPVAQSFGDSQPLSSHAYSSPATVQSDLPAHLALSVEAYNSMAAKFGLQLGPEFATQYHGNVMEGQSNVTGNHHHQAGAAHAQLTQPHPIQGHNNHNAVHQLRAQAMMSAQSPFQNHIVQAQHYQRAQTINPRTLIHSQAMVDPHPIIKHQAAINPQMMVKPQATANPQAAMKPQARVNTCVIANHQAMLKPQARTTPQAVVTSQALGQHLGHHVPKQSPHASPALLNGYPDARRRSDSYAPSEVLETDLLQFKTPEIIPQTISPKLPQVDQGTKPGPMTAMNGKTPTTSATPQPSHTAPGIQPDSSGYAPQNKNTPLPPPRKRRRSGTQDKNDNKRVKVGNKPDGATRVNGASRVNGANGVKVADGFNGAYGIDVTNVAGCINGVNGVNSVNGVNGSGKPSSNGPRKPTPSIACPPIAPPPSDQRPLPPLPVVVQPNSINSSESPQVKDEFGLYHLAAHLAQEKEEKQQQEAERRRQQEEHEAKKDQMEKESRWPGDPAFWPAGVLPDLKRPGCPWRRESIFVGTIRRGGGCVRAIKADNEVGVELHIVSTDPTEENCKAGEIATFEKIELAPLFDQMSEPQVIRWAHYLLSTIPGHNDCITSWKNA

SEQ ID NO: 21851 - DNA, 5074 bp, Muscodor strobelii
  misc_feature: SGI EST ID NO. CUFF.51397.0
  misc_feature: Variant of the nucleotide sequence at SEQ ID NO 21849
cggtctttctgttcggtcagcctgtgctgatctcgcctataaagagagtagatatatgatgcgacgatcccagtatgtcgatccggccgcgctcgcattgaggcacgacatcaacgatgagagcgttactttcaagatggctactgagcattctatttacatcaggtggaacaagtggtttacgaacccttcatgacaataatggcttcacggttgaaaccttgacaggtcgttacacaggcctccagaatgccgaatatacgggtgtaaaggaattccgaaacatcccatatgcagaggcgcctgtgggcaaactgcgatggaaacctccaaagccgcttcgaccttcgcgccagcatcactactcccacaggttcgcgtctccgtgtccacagtatctgtccagcaggctttcattatggaattccaatatcacagacttctcaatcgttactgcagaccagagtcatcatgccggtgagattgcacagacaagttcggaggactgcctcggtctcgccgtatggacaccaatgaacatatcccgggatgacctgctgcccgtaggactttttgtgccgggaggaagcttccaaggtggtggcctcacctcgccgtaccagaaccctgcgggattcgtcaacaggacacagaaacacatcatggtgtcgatgaactacaggacgaatatctttggctttcctgatgccgcgggccttgaaactcaaaatctagggatcttggatcagaggcttgccttagaatgggtgtattcgaatatcgaggcgtttggaggagatcggaatcgaatcgtactatggggtcattcagctggcggcgtgtctgtggatgtgttgaacttcgcgtatcacgacgagcctttggctgccggctttttccttatgtcgggcaccgccatgaggaccttttctcagggggataatgctctgcagaccaactttagcttcgttgcgaagaagctagggtgtggattcccagacgacgcagaagcagaagttgattgtatgcgaggggtaccagccaatctcatcagcaacttggttggtcattacggcgacaatcgtaccaaaccggcgctcttctttcgaccaacagtggatgacgagatcatttacaagaactacacggagcgggcactcaagggccttatttctaaggtaccggcgctagtatcggatacttcgaatgagcaatccagcttgattcaatatccgcttaataacttgagcggcgggcctaacaaaacagacgtcgataaagggacgcttagtgatttcatctgcccagcatataatacatctaacgttcggtcagccaacaatctgactacttacagatatcagtatgtgggcaattatccgaatctgactccttactcttggatgggcgcgtatcacggggccgatgtgccgatgatttttggaagttacaatctcacaggcggtgcgacagagtgccagaagaaagcagctgaggcgatgcaagacttcgtgctggctttcctgacagaccctcggcatgggctggcgggactgggctggcgggcaagcaatggatcgaacaacagcaacatgatgccgcggttcggcgtggcaggaggcgtggtaaagaacatcagctcgattgaggtcgatacggggtgcatgggggtaggcacctacaactcgacacctaatgagtaaagacatgagtgcagcgggaatagggtttggccattgttcgcatatcaattgcatatcaattcgctccttgttcacccattcaataaaagtttgagtctcagaccgccagacaagcagtttgctttgcagcagccagtgacctaccaacctactacaccactgcgatctctccattgacttaagcagcccttaatgcgcattgttttgctactgcagcgatctagcaattgtgaataggaggcttggaccgagatatccagcttggtcgccgccacctggggcatatggtagcgagcgagctgcagctctgggcctttctctcgtctgcgtctgcgtggccgacgcgttgcgcaccttcctcccgtcaccttcctccgacgacctcgcaccttcctcgtggtggtagactcgcatcttcaatgcccactgttttccaatctggtggaggtacctgaggtagttcgccagccggcacactatctggcgcctccttagaccgctgacctttctccgatcactatcgaactccctctccagaagcgacacttaccttacctacctgccctactttcctcagttacctgcagaagattcagcaggtagccttatcctgcaacgccagtttcttctctttctcttcccgcctaccatctgccagcccgcctggcgacctgcgttcgcactttagtctcttctctttcgtccctctaccaaactcttccaattttgtcatcctctcgccttcatccctaacatctacataatcacattttacctttccctgcaactgtctgtccttcatcaacaacgtcgtcatggacaccggctgcaacttccccgcgcctacgcaaggcggccagcggcaacaccagtagccgtagaaccaccagggacacaacctcaacattccccagcaaccgtacaacgccgcatccttgaattatcagcacatgcaacaaattcagcagggcaactttaacaacaacagcattatgagcacccacggtggcgctgctggcatgccttattacgtcccccaccagcccgtttccgctactcctagcgtcgttatgaacccttccctccccgtcaacgcagtggcgcgaccaagcacgccgtcgcggcgatcaagttccgcgacggcgccaggtagtggtgctagctacaagatggcccagcaacacgactctcgcttccagtccatgccgcctccgttccgtgatgtgactggccaatcctccgcccctgtcgctcagagctttggtgatagtcaacccctttcgtcacacgcctacagctctcccgcgacagtccaatcagaccttcccgcccacctcgctctgagtgttgaagcgtataactctatggctgctaagttcggcctacagttggggcctgaatttgctacgcaataccatggcaatgttatggagggccagagcaatgttactggtaatcatcaccatcaagccggcgccgcccacgcgcagctcacacaaccccaccctatccaaggccacaataaccacaatgctgtgcatcaactcagagctcaggccatgatgagtgcccagtcgcccttccaaaatcatatcgtccaggcccagcattaccagcgtgcccagactatcaatcctcggacgcttattcattcccaggcgatggtcgacccccaccctattatcaaacaccaggctgctatcaatccccagatgatggtcaaaccccaggcgacggctaaccctcaggctgctatgaaaccccaggcaagggtcaatacttgcgtaattgctaaccatcaggcaatgcttaagccccaagcaaggaccacccctcaggctgttgttacctcccaggcccttggccagcatcttggacatcatgtccccaagcagtcgccacatgcgtcaccagccctacttaatggctacccagatgccagacgacggagtgactcgtatgctccgtccgaagttttagaaaccgaccttctccagttcaaaacgcccgagatcatcccgcaaacgatcagcccgaagctgcctcaagtggatcagggtaccaagcccggtcccatgaccgccatgaacgggaagacacctactactagtgccacaccacagccgtctcatactgcccccggtatccaaccagactccagcggctacgcgcctcagaataagaacactccacttccgccacctagaaaaaggcgacgttccggcacgcaagacaagaatgacaataagcgcgtcaaggttggtaataaacccgatggagctaccagggtcaacggtgccagcagggtcaacggtgccaacggagtcaaggttgccgacggattcaatggtgcttacggaattgacgttaccaacgtagccggatgcatcaacggtgtcaacggtgtcaatagtgtcaacggtgtcaacggttctggaaaacccagcagtaatggtccccgaaaacctacgccttccattgcttgtcctcccattgccccgccgcccagcgatcagcgtcctcttccccctttacccgtcgttgtgcaaccaaactccatcaactcttccgagtcccctcaagtcaaggatgaatttggactatatcatctcgcggcacaccttgctcaagagaaggaggagaagcaacaacaagaagcagagcgacgtcggcagcaggaggagcatgaggccaagaaagatcagatggagaaggaaagcaggtggcctggcgacccggccttctggcctgccggagtcttgccagacctcaagcgtccaggctgtccctggcgtcgcgagtctatcttcgtgggtactatccgccgcggaggtggctgcgtccgtgccatcaaagccgacaatgaagttggcgttgagcttcatatcgtctcaacggacccgactgaggaaaattgcaaggcaggcgagattgcaacgttcgagaagatcgaactggctcctctttttgaccaaatgagcgagcctcaggtcattcgctgggcccactatctactctcaaccattccgggtcacaacgactgcattacatcgtggaagaatgcctagacaggaggatgtggctttcagcttcatgggcttgagcgtagacatctgcattaactgcgcattagcgattttgttatgacttccggggaattacagaaatactttgtgtatttaccgcacttgagtaacgtaccaggcggtatagggcgttggggcgttatggcaaaagccctcggttaggcaccagatcttttataccgtctcatcagtaaacgatcttattaggcgcacatagggaaggcgcacttaggggaagcgcagatcaacgcgcgaaattaggctaattgcataaatacatcattg

SEQ ID NO: 21852 - DNA, 1614 bp, Muscodor strobelii
  misc_feature: SGI cDNA ID NO. 567408
  misc_feature: Encodes the peptide sequence at SEQ ID NO 21853
atggcggcgcagctttcaaccgcccaccagcagtatggcgatgacgttcaacaggcaaatgaacgaacgcctctagtctcccaaacgggagtcgccgaggattcagcattagatgcatcggcaaaaggataccatttggggtcatggagatcagttgcgaccgtatttcctcgggctcgtagtccaaacgcaatcgtcgcagtcctctgtgcttctatctttataggatctgcatctggcggcttcctcaatataccaatgaccagagtctttgaagatgttctgtgccgccagtattatgaccgaatacacagccgcgatggacctattgacgaggaaatgtgcaaggaggatgtcatacagtcaagacttgcgtacctttttgccatcatggctgcactaaatgctgggctgagttgtttagttgccctaccatggggtattgcagcagacagaattggccgaagggcagtctttgccataggtataatcggcatgtcgatggcaacgctctggattatggtcgtgggctggttttcgaactcgctttcacccaaactaatctggttgtcgccaatcttttatatgcttggaggagggaatcctgtactagcagccactcttcaaggcatggtcaccgacgtcgtgcccgaatcaaaacgatctataaacttgatgcgcgtgcacgcctctagcatgatgggaaacctggtatctcctgcgttggcctccatcatgatgaagtccgtcggtccttggccaccacttttcctctcattttggatgctcttaataacggggccattgatttaccttgcgccagaaagcttgaaacacacagcaaaggacgacgtcgacgactccagagacagcactcttaagcggcgactcattgagagtttcggggaactcaagaactcggcaacgattttcaaatcaccctcaatggtcctcatcgcgattttgacgatgcttcacttatcagtcgttatctgcacttaccaattcatggcccaatttgtgtccaaacgctaccacatacctctcgcagatacaggatatgttcagaccacatatggcatagcttacgttggggtgggtttcctcatcctgccttttgtctcatcggcggtcacttcgcctaggataccagcccttatgcgcattggcgatgagaggagacgcgatttagcttttatcaaagggtcaattttgtttgctttattcggtacattcctactcggcgtggcgccatccctcgaggggttcatgtttggtctaattgttctttccttcggtggtgccgccgatagctacattagaggcgtggcgactctttacatcgcacctgaacagagatctcggctcttcaccatcttggggctcgttgcaatcgcaagcgatctgtggatatcaccaggtcttgcagctctattctcgttaggcatgaaactcggtggcacgtggattgggttgccgtacttcggtatttctgccatttgtctggtcatgctcatagtgtcgatgttcataaggcttccgggtcccacgcacgagaccgatagccccacatgtgatgattcggattgtgagcgaagtggacttttatcataa

SEQ ID NO: 21853 - protein, 537 aa, Muscodor strobelii
  misc_feature: SGI Peptide ID NO. 567408
  misc_feature (69)..(475): Pfam Id: PF07690 Pfam Desc: Major Facilitator Superfamily
  misc_feature (69)..(436): Pfam Id: PF07690 Pfam Desc: Major Facilitator Superfamily
  misc_feature (69)..(522): NCBI GI: 255940990 Blast Desc: Pc16g09500 [Penicillium chrysogenum Wisconsin 54-1255] gi|211585887|emb|CAP93620.1| Pc16g09500 [Penicillium chrysogenum Wisconsin 54-1255]
  misc_feature (58)..(501): NCBI GI: 156055966 Blast Desc: SS1G_05335 [Sclerotinia sclerotiorum 1980] gi|154703119|gb|EDO02858.1| SS1G_05335 [Sclerotinia sclerotiorum 1980]
  misc_feature (68)..(521): NCBI GI: 238495034 Blast Desc: conserved [Aspergillus flavus NRRL3357] gi|220695403|gb|EED51746.1| conserved [Aspergillus flavus NRRL3357]
  misc_feature (60)..(527): NCBI GI: 46123529 Blast Desc: FG06142.1 [Gibberella zeae PH-1]
  misc_feature (79)..(514): NCBI GI: 171678127 Blast Desc: protein product [Podospora anserina] gi|170937133|emb|CAP61790.1| protein product [Podospora anserina]
  misc_feature (11)..(532): NCBI GI: 256731445 Blast Desc: NECHADRAFT_49452 [Nectria haematococca mpVI 77-13-4]
  misc_feature (46)..(529): NCBI GI: 225555800 Blast Desc: conserved [Ajellomyces capsulatus G186AR]
  misc_feature (68)..(504): NCBI GI: 226282709 Blast Desc: conserved [Paracoccidioides brasiliensis Pb01]
  misc_feature (22)..(504): NCBI GI: 225681172 Blast Desc: conserved [Paracoccidioides brasiliensis Pb03]
  misc_feature (22)..(504): NCBI GI: 226292121 Blast Desc: conserved [Paracoccidioides brasiliensis Pb18]
MAAQLSTAHQQYGDDVQQANERTPLVSQTGVAEDSALDASAKGYHLGSWRSVATVFPRARSPNAIVAVLCASIFIGSASGGFLNIPMTRVFEDVLCRQYYDRIHSRDGPIDEEMCKEDVIQSRLAYLFAIMAALNAGLSCLVALPWGIAADRIGRRAVFAIGIIGMSMATLWIMVVGWFSNSLSPKLIWLSPIFYMLGGGNPVLAATLQGMVTDVVPESKRSINLMRVHASSMMGNLVSPALASIMMKSVGPWPPLFLSFWMLLITGPLIYLAPESLKHTAKDDVDDSRDSTLKRRLIESFGELKNSATIFKSPSMVLIAILTMLHLSVVICTYQFMAQFVSKRYHIPLADTGYVQTTYGIAYVGVGFLILPFVSSAVTSPRIPALMRIGDERRRDLAFIKGSILFALFGTFLLGVAPSLEGFMFGLIVLSFGGAADSYIRGVATLYIAPEQRSRLFTILGLVAIASDLWISPGLAALFSLGMKLGGTWIGLPYFGISAICLVMLIVSMFIRLPGPTHETDSPTCDDSDCERSGLLS

SEQ ID NO: 21854 - DNA, 4189 bp, Muscodor strobelii
  misc_feature: SGI EST ID NO. CUFF.51400.0
  misc_feature: Variant of the nucleotide sequence at SEQ ID NO 21852
aagctcaccacgaggttatcttggacaagtgcatcttgtatgtcttggcggcaaatataatttagcctgttggtgcaatcgccctttcagaataatctgaaagcatcagcattcaacagagagcagagatcagatatggccttcatgatgaaagggcccaattgtatcggggcttgtatacccccgatcaatgtttgaccccggtcggtctcggcactgagcaacgctcgtttgtctcaatactcgattgcttcgatatctagggcggcctcattgcgatacgaattgccgtataagtgacctccatcggaagggcctgttgctacggagcatggagtttttcttatgactataacagcgttcttgtcatggtctcagcactgaggttcgcatgtcatctcaatatcccagccaaagtcactgctggaacagatgtcaaggaaagcgatgcgaatatgaagctgtgtccattgcggaggttgtgatagtgaagaaataatgtaaaaatatcaacacttgttaccagtggtgtcactgtttgtccaaatctagacttcgccttgtgagacgtgtcgttcccttgttgacacgttcggctttcggagtattgccgctcctggcataagctacctatctagttacgtgatactgacacaaacagatacccgattgaacccgaacgtttcaaccgctgaggcacgaagagacgagcattaatttgatactacctatcgtagtgtcgaacctaacagactcgatcatctgtcgttgatcatgacaaatatttcacgttgcaaaaagttaatgtagacgacatgcaatgatgataaagggatccaactatataggtcagagacccctacagaatggctcggagctcagttggaatccttcggagtttgttatcaagcgcggggccgttaaacccactccagggtgcccagttttcatacccggcgccgtcatgtcttatcgcattactacatcgcgtccttacctacatattgatttcgaagaggttctcatctcccaagagcgtgccaggacatcaggaggaagtccaaatcatccagagcagccgctcgtgatttggatacatgtacgatcaaaaattgctgcactaattatcgatggcggcgcagctttcaaccgcccaccagcagtatggcgatgacgttcaacaggcaaatgaacgaacgcctctagtctcccaaacgggagtcgccgaggattcagcattagatgcatcggcaaaaggataccatttggggtcatggagatcagttgcgaccgtatttcctcgggctcgtagtccaaacgcaatcgtcgcagtcctctgtgcttctatctttataggatctgcatctggcggcttcctcaatataccaatgaccagagtctttgaagatgttctgtgccgccagtattatgaccgaatacacagccgcgatggacctattgacgaggaaatgtgcaaggaggatgtcatacagtcaagacttgcgtacctttttgccatcatggctgcactaaatgctgggctgagttgtttagttgccctaccatggggtattgcagcagacagaattggccgaagggcagtctttgccataggtataatcggcatgtcgatggcaacgctctggattatggtcgtgggctggttttcgaactcgctttcacccaaactaatctggttgtcgccaatcttttatatgcttggaggagggaatcctgtactagcagccactcttcaaggcatggtcaccgacgtcgtgcccgaatcaaaacgatctataaacttgatgcgcgtgcacgcctctagcatgatgggaaacctggtatctcctgcgttggcctccatcatgatgaagtccgtcggtccttggccaccacttttcctctcattttggatgctcttaataacggggccattgatttaccttgcgccagaaagcttgaaacacacagcaaaggacgacgtcgacgactccagagacagcactcttaagcggcgactcattgagagtttcggggaactcaagaactcggcaacgattttcaaatcaccctcaatggtcctcatcgcgattttgacgatgcttcacttatcagtcgttatctgcacttaccaattcatggcccaatttgtgtccaaacgctaccacatacctctcgcagatacaggatatgttcagaccacatatggcatagcttacgttggggtgggtttcctcatcctgccttttgtctcatcggcggtcacttcgcctaggataccagcccttatgcgcattggcgatgagaggagacgcgatttagcttttatcaaagggtcaattttgtttgctttattcggtacattcctactcggcgtggcgccatccctcgaggggttcatgtttggtctaattgttctttccttcggtggtgccgccgatagctacattagaggcgtggcgactctttacatcgcacctgaacagagatctcggctcttcaccatcttggggctcgttgcaatcgcaagcgatctgtggatatcaccaggtcttgcagctctattctcgttaggcatgaaactcggtggcacgtggattgggttgccgtacttcggtatttctgccatttgtctggtcatgctcatagtgtcgatgttcataaggcttccgggtcccacgcacgagaccgatagccccacatgtgatgattcggattgtgagcgaagtggacttttatcataaatcgtagtgacgcatcagagatgaaagtggcgtgcaaatacatggcaatttaagagtatatagagagacttagacaatacacgatctaatgagctagaaattactagaagtcttgctaacgcattttgatccggtgagatgaacgctatcattatgccatgatgcaggggtttaagcgtatacatatacggatgttaccacccaaggtaatatggtccgctccgaggaacataatacaggggttcaggtgtatatatatacgagtgttattcgtcggtttattcggaagatagttagaaagtcatcccattattattcttcccacatgtgcgtctacagcatttccggatgctcccacaatcaccggtcttacctcccagttgggtctgcccatgaccctaataatgccgcaagtgtttgcatcatccatatcctcatgataaatacaacggtacttatgtccacctggtttgcaagctgtccatgggctaaattggggccagctccggtcgcaaccgacctcagactttgctcaagatttccatgacgaaggtgcccattcgctatgcccagactcccgtctctcgaacgtgaccgactaggatgtacatccaaaggcgcttcagagggtctgggcgatacagatctatgccgccctatttctggaagtctggtcaccggtgtaagagggggagccatcagccacctagaagacagggaggcgatatcatcaatagttggcaccgtctgactattgtgtcctccttgtaaatgattttcttctgtcggagaatggatcaactgttcaggaactgaggcagatgcctggtcatcgaaaaacctaggcctttgtgcccgtctcacctctgtcggtggagtcatgttttcgtgttccattgcgagttccaagccttgaacgagtccatctaagggggtagtgaatcgctgttgtccattaaaattgatgagggttgtagcgtatcgagtgctctgtggattagctggaaatttcaatcgtcgtattttgtgtttgatctggtgcccaatatctgatctaagactctcgagacgaccgcttacctcgactcgcatgaaaaatggttgcccgccatgaacgaaagagaaggcagtatgtacggtgttactgtgtagagactggctctcaagctcgttctcggtgatatgccattgcagaaccttatatgcccaattgcttttccctttacttggccggctgcctgtcattaggtggctttcgaacatccatcgacattctctcactgtgacttttgaagattcccggccgactcctcctacaccgccgaacgggccaacgttcacagacggaatatatgtgttacgagtagccgttcgttcatctgatggcccaaaagatgcgctattagtatcgctctcaagattttcttagaaacgtcccgtaataa

SEQ ID NO: 21855 - DNA, 1605 bp, Muscodor strobelii
  misc_feature: SGI cDNA ID NO. 567409
  misc_feature: Encodes the peptide sequence at SEQ ID NO 21856
atgggagacaaattatttgtaatgggccaaaatactactttacatgtatggcatctggaactggatcgtctagaatcatttgaagtacccgagatcttcaaaaggtgtattgccgagggtgaaatggtcctcgttgtttcccaaagctccgacatatttctttggagattcgggcagacactacagcgtcttgacatgcaaaagctttcttgctatccgagggagagcgtcgtaataggcggtccgcctatctggacgccaagaatatggctcgcctcacaacaagggttgcatcttaggaacagtcaaatgcttattgatttcatcctcaatcccgtcgatattaacgtctttttcgttgtcacactggctcttgagagcgggaagctcaccgtttatgagatcgtccgcggcgaaatcactggaacatttgctatggaggatcgtatctattccagccaccgtacgagcgagcgcggtctcctcaaatgggcgaagctcgactcctacggagggtacagtctagtccagataattcaagaacctgaggctacagacgcctgcccgtgtggccgcaattcacgtcaacttgtttcattgtgcttcaacatttataccaggacattttcgatacttcggcaccatcttggcgagctcagtccttggatatctcatgtttggaataatcggcttcttattatggacgacaatatccatgctcggccacaaatttcctctcctcaaaaaaggccggtgatgtcactggcaccctgctcggagctggaaacattgggagaggacacctcgcgaaagacggtctacacgtccgagactggcgatgcatcgctcatccatcgtcggcatcgtacctattttgaaacagacaattctaataaggagcttgctatagaaattggtctcgatgttctgcaagacttcgtgtcggagcctcaggcgtggcaagagccgtttgtgtcggttcaaccagaaatcgtgccaggtagactagtcggtgacgacaactttctcgtttttgtcatgacgccgatttataccgtgctcaacttcgagaacgggtttcttgcaaaaactaaaactcccgccgttcgtgaaatccgaccggagagtaagaaagccagccaaggattcaaagagcacatcgccgagaagtgcctcctgggtgtagttgtgtgcctgccgccaacaaacgatggagaaattgccggagagcctgttggtatactctgtctcaaagggaacccaccgtcttgggcccctcaccgatggacggatgtcagcatcgatatcctgaagaagtaccaaggcaaaggctatggcggcgaagcaattagatggtctttatggtgggccttccagatggctggtttacatcgcgttcagatccaagcattctctttcaataccggtgccatgaaactatatgagaagcttggattcagagaagaaggtcggttgcgggatcacatgtggtttgcgggagcttggcacgacggccttatctacggcatgctcgaagatgaatggcgcgagcaacaggttcgagttggacgagagatctcttcgcctcttgaacagtcacagtga

SEQ ID NO: 21856 - protein, 534 aa, Muscodor strobelii
  misc_feature: SGI Peptide ID NO. 567409
  misc_feature (403)..(487): Pfam Id: PF00583 Pfam Desc: Acetyltransferase (GNAT) family
  misc_feature (409)..(487): Pfam Id: PF00583 Pfam Desc: Acetyltransferase (GNAT) family
  misc_feature (372)..(515): NCBI GI: 238486952 Blast Desc: GNAT family acetyltransferase, [Aspergillus flavus NRRL3357] gi|220699593|gb|EED55932.1| GNAT family acetyltransferase, [Aspergillus flavus NRRL3357]
  misc_feature (348)..(521): NCBI GI: 189192637 Blast Desc: acetyltransferase [Pyrenophora tritici-repentis Pt-1C-BFP] gi|187978221|gb|EDU44847.1| acetyltransferase [Pyrenophora tritici-repentis Pt-1C-BFP]
  misc_feature (373)..(515): NCBI GI: 67904434 Blast Desc: AN9204.2 [Aspergillus nidulans FGSC A4] gi|40742305|gb|EAA61495.1| AN9204.2 [Aspergillus nidulans FGSC A4] gi|259485366|tpe|CBF82329.1| TPA: GNAT family AFUA_4G14730)
  misc_feature (409)..(521): NCBI GI: 169605411 Blast Desc: SNOG_05730 [Phaeosphaeria nodorum SN15] gi|160706761|gb|EAT86794.2| SNOG_05730 [Phaeosphaeria nodorum SN15]
  misc_feature (372)..(520): NCBI GI: 169770609 Blast Desc: [Aspergillus oryzae RIB40] gi|83767633|dbj|BAE57772.1| protein product [Aspergillus oryzae]
  misc_feature (372)..(515): NCBI GI: 46111901 Blast Desc: FG02832.1 [Gibberella zeae PH-1]
  misc_feature (360)..(520): NCBI GI: 119499608 Blast Desc: GNAT family acetyltransferase, [Neosartorya fischeri NRRL 181] gi|119414726|gb|EAW24664.1| GNAT family acetyltransferase, [Neosartorya fischeri NRRL 181]
  misc_feature (372)..(517): NCBI GI: 256723794 Blast Desc: NECHADRAFT_37130 [Nectria haematococca mpVI 77-13-4]
  misc_feature (372)..(517): NCBI GI: 256730665 Blast Desc: NECHADRAFT_30277 [Nectria haematococca mpVI 77-13-4]
  misc_feature (373)..(504): NCBI GI: 255933181 Blast Desc: Pc12g12470 [Penicillium chrysogenum Wisconsin 54-1255] gi|211582680|emb|CAP80874.1| Pc12g12470 [Penicillium chrysogenum Wisconsin 54-1255]
MGDKLFVMGQNTTLHVWHLELDRLESFEVPEIFKRCIAEGEMVLVVSQSSDIFLWRFGQTLQRLDMQKLSCYPRESVVIGGPPIWTPRIWLASQQGLHLRNSQMLIDFILNPVDINVFFVVTLALESGKLTVYEIVRGEITGTFAMEDRIYSSHRTSERGLLKWAKLDSYGGYSLVQIIQEPEATDACPCGRNSRQLVSLCFNIYTRTFSILRHHLGELSPWISHVWNNRLLIMDDNIHARPQISSPQKRPVMSLAPCSELETLGEDTSRKTVYTSETGDASLIHRRHRTYFETDNSNKELAIEIGLDVLQDFVSEPQAWQEPFVSVQPEIVPGRLVGDDNFLVFVMTPIYTVLNFENGFLAKTKTPAVREIRPESKKASQGFKEHIAEKCLLGVVVCLPPTNDGEIAGEPVGILCLKGNPPSWAPHRWTDVSIDILKKYQGKGYGGEAIRWSLWWAFQMAGLHRVQIQAFSFNTGAMKLYEKLGFREEGRLRDHMWFAGAWHDGLIYGMLEDEWREQQVRVGREISSPLEQSQ

SEQ ID NO: 21857 - DNA, 3323 bp, Muscodor strobelii
  misc_feature: SGI EST ID NO. CUFF.51468.0
  misc_feature: Variant of the nucleotide sequence at SEQ ID NO 21855
cacgatacctttcctgatactagatagcatgccatacttggcagttgtcgatgatcttcggagccgagttagacggacataccttttcccaaaccatggaaacgacaaacgtgggtacagaaccgctatgggagacaaattatttgtaatgggccaaaatactactttacatgtatggcatctggaactggatcgtctagaatcatttgaagtacccgagatcttcaaaaggtgtattgccgagggtgaaatggtcctcgttgtttcccaaagctccgacatatttctttggagattcgggcagacactacagcgtcttgacatgcaaaagctttcttgctatccgagggagagcgtcgtaataggcggtccgcctatctggacgccaagaatatggctcgcctcacaacaagggttgcatcttaggaacagtcaaatgcttattgatttcatcctcaatcccgtcgatattaacgtctttttcgttgtcacactggctcttgagagcgggaagctcaccgtttatgagatcgtccgcggcgaaatcactggaacatttgctatggaggatcgtatctattccagccaccgtacgagcgagcgcggtctcctcaaatgggcgaagctcgactcctacggagggtacagtctagtccagataattcaagaacctgaggctacagacgcctgcccgtgtggccgcaattcacgtcaacttgtttcattgtgcttcaacatttataccaggacattttcgatacttcggcaccatcttggcgagctcagtccttggatatctcatgtttggaataatcggcttcttattatggacgacaatatccatgctcggccacaaatttcctctcctcaaaaaaggccggtgatgtcactggcaccctgctcggagctggaaacattgggagaggacacctcgcgaaagacggtctacacgtccgagactggcgatgcatcgctcatccatcgtcggcatcgtacctattttgaaacagacaattctaataaggagcttgctatagaaattggtctcgatgttctgcaagacttcgtgtcggagcctcaggcgtggcaagagccgtttgtgtcggttcaaccagaaatcgtgccaggtagactagtcggtgacgacaactttctcgtttttgtcatgacgccgatttataccgtgctcaacttcgagaacgggtttcttgcaaaaactaaaactcccgccgttcgtgaaagtagatcgtggtggagaaaacatagagtgaaagagattgcgagatagaaacgcgggtgtgactgcacgccgagatatagtacatatagatacccataaagagagtggcttggaggcatattcggcgagactaaaacggcttagcggtcagcagccgcagacctgcgaacacctaaagttgaagaacttcatattcttctgtaatcttttcaaagctcaacgatgtgatagaaaagctgcgtatatgattctatgtcaacgattttcaaatcttcgttaacaccttaccattatccgaagttgagaccctacgatgtcagcgaccaaaccattcgaccccttccggtcgaacaatttagtctatcgcgcagttaatgacgatgataaagacgaagcatttgtgcatgcgatccagcgcgatgcagaggcacagtctgggtccagttatggattacggtactttggatatcatcccatttctctctttaaactgttacttgcaaggatggcaatgctaatacgtgttatagtaagtatcatctctttaaattgaacgagtcataaaagccgggaagtcctgaaatatgacaattggtttttagactataacatatccaagaaaaactgacatgttctcatacaccagtccgaccggagagtaagaaagccagccaaggattcaaagagcacatcgccgagaagtgcctcctgggtgtagttgtgtgcctgccgccaacaaacgatggagaaattgccggagagcctgttggtatactctgtctcaaagggaacccaccgtcttgggcccctcaccgatggacggatgtcagcatcgatatcctgaagaagtaccaaggcaaaggctatggcggcgaagcaattagatggtctttatggtgggccttccagatggctggtttacatcgcgttcagatccaagcattctctttcaataccggtgccatgaaactatatgagaagcttggattcagagaagaaggtcggttgcgggatcacatgtggtttgcgggagcttggcacgacggccttatctacggcatgctcgaagatgaatggcgcgagcaacaggttcgagttggacgagagatctcttcgcctcttgaacagtcacagtgatatgagcgcttaatgcggcgaggcactagggattactgaaatgttactgcttgggtccttaaactgaagcatctttctcatgagcgaatctgacaaatcaattatcgatgaatttccctaaatttgtacaatgatgtcgaggcggtaaataacactaatgataaccttataattttgtcctagataaaaccatagatagtaacgcgtatagggtctgttcggagtccgaacgattggtacaatcaactacctattgggcatttgattaattctaccatcgatctcgtccgcaatctggatgcttacatgaagtatcttgtgtcacaaactggttcccttattcgggttactctccgaggtaatacggtacgctctagggctttctataggcatcaagaatcaccatcgtgtacaaatcgattaatcgtccaccaactcttcgctacctgatgattccgtagtcgtaacagacccacgccggcgtcgtcgcaacacagcggattttaaagacgaaaatacgttcgcgattctccttctacgtgacatagtaatttcctcgtccgagaaatcgtaactgtaacccgctgacaaagcatcattgtcatcggaagctgcagagctacgaggtcttgatgcttctgcggggtctagtggtatcgaggcgttgttttcgttttcctgaggaagattaggggggttggtaaatggaggtagtggaggtggcaggcccggaattggttgtcctagaggctgcggcggcgggtgtggtggcattggttgtagcgccggagcaggctcgaccatcggccacattgacattgagatattccatccaggttgcactatcttgtcccaagtcgatggtaatattatcgtgtctgacggtcccatcagatcgtctggcagccgcaaatgtgtcgagttagttattttccgccatttctcc

SEQ ID NO: 21858 - DNA, 234 bp, Muscodor strobelii
  misc_feature: SGI cDNA ID NO. 567410
  misc_feature: Reduced expression when VOC is produced
  misc_feature: Encodes the peptide sequence at SEQ ID NO 21859
atgagcgacaaagtcacagatcagacccagaaggtccagaacgagcagcctcaggctaccgcccaagaacaagggcctgagaagactgcagaggataacaacgaatccggagaggagaagtttgtcggagtaggagagcccggtccgaagaaactgctctcccacttcaagggcatgcctaagcaatgggagaagaacaacctatcaaacaaagagtgcaagagtgtcaaataa

SEQ ID NO: 21859 - protein, 77 aa, Muscodor strobelii
  misc_feature: SGI Peptide ID NO. 567410
  misc_feature: Useful for introducing or modulating the production of volatile compounds
MSDKVTDQTQKVQNEQPQATAQEQGPEKTAEDNNESGEEKFVGVGEPGPKKLLSHFKGMPKQWEKNNLSNKECKSVK

SEQ ID NO: 21860 - DNA, 1714 bp, Muscodor strobelii
  misc_feature: SGI EST ID NO. CUFF.51572.0
  misc_feature: Variant of the nucleotide sequence at SEQ ID NO 21858
gatccaaatgacgtcagcctcttagtcacaacatgtgacacccgcgcgcaatggttccaggcaaacatgtaaaagcaatgataaaaacgacctcacatatacattcctcgaaaatcatcaccttacaaaatccactacaccacagaactttccgcgtcagcagatactatctcgacctacaagagaaatccaaactccccaccacacaccccaaaatgagcgacaaagtcacagatcagacccagaaggtccagaacgagcagcctcaggctaccgcccaagaacaagggcctgagaagactgcagaggataacaacgaatccggagaggagaagtttgtcggagtaggagagcccggtccgaagaaactgctctcccacttcaagggcatgcctaagcaatgggagaagaacaacctatcaaacaaagagtgcaagagtgtcaaataataataaggatcgcgaataatacattctaggcaggctagatgaaggaacggcgttataatgtgtgtaccaagactgcatgttgcttcgggtcggctgaacactctgtatagctaagacgctatgttcaccaagaataagtaagagtcacttcgcattatcagttatgccaatacaagtacccatcagaaaaggatgacaatcggtcaggttgccgatgtagaaccataaatcatacttcgtgctcaggggtatcatagtctcattttaatcacatgtgcagcaagccacccagatctttctccatggcccgtagtcgctcctgcaactctttcttcttcttatcgagctcacgaacctcctcctctgtgttcctcagatcctcctcagtatttatggcatcgccaccggctcctatctcttcgtcctcgtcctcgtccatccaatggtccttgttcatctggcgcaaagcctcagcctgttcttcgaccttggcctcgtagtacgctagtgtattgagattgtgtgcatacttggcacgctgtgtaggtatgcgctccatcgcgcccggtaagggatagacgccacacagcttctcggcgcccttgagcaggatctcgacgtcgacgtcatctttgccacccctccgctcgctcctccggatctggtcgtgtagagcgcctcccagcactgccgcgacggcggtattacgtctcggggctcctgcggtgcgactcgtggtgccggcagacgtggtgacctcgcctgacgcgacgttgaaaacggtctggcgccgcgacgactctttcgcaggctctttgggtggtgcactggagagcggcggcggtgcgggtacggagaagagggcgcgctcgtgagcttcggtgtcgcgtatcagggatgtgatgtcgtggctcgaaagcagcgagtttgtgaagatcttgggcggaggaaatctacatcggaacggtcagaaaactattgcgattgcattttaaaaggaccatcgccgcggtgagcatacgggagactgtcaatgccttgacatgatatggtgatctgctcgaagtgtgccgacagcagagacattgtgatgatttcgggggaggcacacaagctctgcagcttgcatgcccgggttgcggcgaacgagttagggcggttgaggatgagatatcgagcttgaatgcaggtgcaagtcttctatttatttctatatctcaagggcttcgcgcgtaaagaaacaaacgttgtttcagactattttc

SEQ ID NO: 21861 - DNA, 750 bp, Muscodor strobelii
  misc_feature: SGI cDNA ID NO. 567411
  misc_feature: Encodes the peptide sequence at SEQ ID NO 21862
atgtctctgctgtcggcacacttcgagcagatcaccatatcatgtcaaggcattgacagtctcccatttcctccgcccaagatcttcacaaactcgctgctttcgagccacgacatcacatccctgatacgcgacaccgaagctcacgagcgcgccctcttctccgtacccgcaccgccgccgctctccagtgcaccacccaaagagcctgcgaaagagtcgtcgcggcgccagaccgttttcaacgtcgcgtcaggcgaggtcaccacgtctgccggcaccacgagtcgcaccgcaggagccccgagacgtaataccgccgtcgcggcagtgctgggaggcgctctacacgaccagatccggaggagcgagcggaggggtggcaaagatgacgtcgacgtcgagatcctgctcaagggcgccgagaagctgtgtggcgtctatcccttaccgggcgcgatggagcgcatacctacacagcgtgccaagtatgcacacaatctcaatacactagcgtactacgaggccaaggtcgaagaacaggctgaggctttgcgccagatgaacaaggaccattggatggacgaggacgaggacgaagagataggagccggtggcgatgccataaatactgaggaggatctgaggaacacagaggaggaggttcgtgagctcgataagaagaagaaagagttgcaggagcgactacgggccatggagaaagatctgggtggcttgctgcacatgtga

SEQ ID NO: 21862 - protein, 249 aa, Muscodor strobelii
  misc_feature: SGI Peptide ID NO. 567411
  misc_feature (4)..(233): Pfam Id: PF08657 Pfam Desc: DASH complex subunit Spc34
  misc_feature (1)..(249): NCBI GI: 85093145 Blast Desc: NCU02221 [Neurospora crassa OR74A] gi|28921080|gb|EAA30398.1| [Neurospora crassa OR74A]
  misc_feature (1)..(249): NCBI GI: 256729165 Blast Desc: NECHADRAFT_80135 [Nectria haematococca mpVI 77-13-4]
  misc_feature (1)..(248): NCBI GI: 156042934 Blast Desc: SS1G_11266 [Sclerotinia sclerotiorum 1980] gi|154695651|gb|EDN95389.1| SS1G_11266 [Sclerotinia sclerotiorum 1980]
  misc_feature (1)..(195): NCBI GI: 46138499 Blast Desc: FG10764.1 [Gibberella zeae PH-1]
  misc_feature (2)..(243): NCBI GI: 145610811 Blast Desc: MGG_00887 [Magnaporthe grisea 70-15] gi|145018165|gb|EDK02444.1| MGG_00887 [Magnaporthe grisea 70-15]
  misc_feature (1)..(247): NCBI GI: 154313386 Blast Desc: BC1G_05390 [Botryotinia fuckeliana B05.10] gi|150849459|gb|EDN24652.1| BC1G_05390 [Botryotinia fuckeliana B05.10]
  misc_feature (23)..(249): NCBI GI: 171679637 Blast Desc: protein product [Podospora anserina] gi|170939444|emb|CAP64672.1| protein product [Podospora anserina]
  misc_feature (2)..(247): NCBI GI: 258573659 Blast Desc: conserved [Uncinocarpus reesii 1704] gi|237901277|gb|EEP75678.1| conserved [Uncinocarpus reesii 1704]
  misc_feature (1)..(247): NCBI GI: 240273959 Blast Desc: conserved [Ajellomyces capsulatus H143]
  misc_feature (1)..(246): NCBI GI: 259486313 Blast Desc: TPA: conserved [Aspergillus nidulans FGSC A4]
MSLLSAHFEQITISCQGIDSLPFPPPKIFTNSLLSSHDITSLIRDTEAHERALFSVPAPPPLSSAPPKEPAKESSRRQTVFNVASGEVTTSAGTTSRTAGAPRRNTAVAAVLGGALHDQIRRSERRGGKDDVDVEILLKGAEKLCGVYPLPGAMERIPTQRAKYAHNLNTLAYYEAKVEEQAEALRQMNKDHWMDEDEDEEIGAGGDAINTEEDLRNTEEEVRELDKKKKELQERLRAMEKDLGGLLHM

SEQ ID NO: 21863 - DNA, 1736 bp, Muscodor strobelii
  misc_feature: SGI EST ID NO. CUFF.51573.1
  misc_feature: Variant of the nucleotide sequence at SEQ ID NO 21861
gaaaatagtctgaaacaacgtttgtttctttacgcgcgaagcccttgagatatagaaataaatagaagacttgcacctgcattcaagctcgatatctcatcctcaaccgccctaactcgttcgccgcaacccgggcatgcaagctgcagagcttgtgtgcctcccccgaaatcatcacaatgtctctgctgtcggcacacttcgagcagatcaccatatcatgtcaaggcattgacagtctcccatttcctccgcccaagatcttcacaaactcgctgctttcgagccacgacatcacatccctgatacgcgacaccgaagctcacgagcgcgccctcttctccgtacccgcaccgccgccgctctccagtgcaccacccaaagagcctgcgaaagagtcgtcgcggcgccagaccgttttcaacgtcgcgtcaggcgaggtcaccacgtctgccggcaccacgagtcgcaccgcaggagccccgagacgtaataccgccgtcgcggcagtgctgggaggcgctctacacgaccagatccggaggagcgagcggaggggtggcaaagatgacgtcgacgtcgagatcctgctcaagggcgccgagaagctgtgtggcgtctatcccttaccgggcgcgatggagcgcatacctacacagcgtgccaagtatgcacacaatctcaatacactagcgtactacgaggccaaggtcgaagaacaggctgaggctttgcgccagatgaacaaggaccattggatggacgaggacgaggacgaagagataggagccggtggcgatgccataaatactgaggaggatctgaggaacacagaggaggaggttcgtgagctcgataagaagaagaaagagttgcaggagcgactacgggccatggagaaagatctgggtggcttgctgcacatgtgattaaaatgagactatgatacccctgagcacgaagtatgatttatggttctacatcggcaacctgaccgattgtcatccttttctgatgggtacttgtattggcataactgataatgcgaagtgactcttacttattcttggtgaacatagcgtcttagctatacagagtgttcagccgacccgaagcaacatgcagtcttggtacacacattataacgccgttccttcatctagcctgcctagaatgtattattcgcgatccttattattatttgacactcttgcactctgaacagctgttagcttttatgctttgaatccgcctcttcgacgggaaagccgaggaggcaaatggtagaggtggaaaggggaacagacctttgtttgataggttgttcttctcccattgcttaggcatgcccttgaagtgggagagcagtttcttcggaccgggctctcctactccgacaaacttctcctctccggattcgttgttatcctctgcagtcttctcaggcccttgttcttgggcggtagcctgaggctgctcgttctggaccttctgggtctgatctgtgactttgtcgctcattttggggtgtgtggtggggagtttggatttctcttgtaggtcgagatagtatctgctgacgcggaaagttctgtggtgtagtggattttgtaaggtgatgattttcgaggaatgtatatgtgaggtcgtttttatcattgcttttacatgtttgcctggaaccattgcgcgcgggtgtcacatgttgtgactaagaggctgacgtcatttggatc

SEQ ID NO: 21864 - DNA, 948 bp, Muscodor strobelii
  misc_feature: SGI cDNA ID NO. 567412
  misc_feature: Encodes the peptide sequence at SEQ ID NO 21865
atgcggccacgcactcccgctttgaatttcggccagtccatagccggaggtggaccaacctcgccaccagagacgccaacgacggcgtcccccacgctccatcgcgcgcgggcctccattggcaatatgtcaccccaggcgaaagcacgacagtacagtgccagtcggtcaaatatccgacctttaggtggaaacaaattcagctacagccgtgatccacggcctgcggaattctcaccgcgatcttcgcattccggcgacgaagagtccgacgagtcagagagtcctcgccggtcgcctgtagctgatatacccgctatccatatacgaagcgggttccaattcacgacggcgttcgctgctctcgcgactcgtacaattcattatgacgatgcaacatttgcactcgaagacttggacagtgacactttcgacagcgatgatgatgatatccgcctatcagttcgacgacctgatgccattgaatacgagggtgattcggacgacagccaagctccttctagtcgaccacctgatcgattagctaatgacatggcaaacatgacaccctttatttcagactctgaaagtgagatcgacgaagatgacgaattccagagatcgcttctgcttagacgtcgggaccgtcggattcgccgcatgaaatctggtagtatcagcaaacgtaccgtcagtgagcgaggcagtgacgggtcggaccgggaggatgtcgatccttggtacgagtcgaatgaacatggcgtggcgtttcatcgacgtgtacgaagaaaagcagaaaatcgcatgagcctgatctccacggtcgagcgaatcgaggagctcaaggaaccgaacagcgacgatgaaaaccctcaatttcccaatgaagcggaactctccctccgagaactaccatacttcacctttatggaagtcgactccgagtag

SEQ ID NO: 21865 - protein, 315 aa, Muscodor strobelii
  misc_feature: SGI Peptide ID NO. 567412
  misc_feature (18)..(314): NCBI GI: 116203477 Blast Desc: CHGG_09622 [Chaetomium globosum CBS 148.51] gi|88175750|gb|EAQ83218.1| CHGG_09622 [Chaetomium globosum CBS 148.51]
  misc_feature (18)..(314): NCBI GI: 171679633 Blast Desc: protein product [Podospora anserina] gi|170939442|emb|CAP64670.1| protein product [Podospora anserina]
  misc_feature (1)..(314): NCBI GI: 154313390 Blast Desc: [Botryotinia fuckeliana B05.10] gi|150849461|gb|EDN24654.1| [Botryotinia fuckeliana B05.10]
  misc_feature (1)..(314): NCBI GI: 156042932 Blast Desc: SS1G_11265 [Sclerotinia sclerotiorum 1980] gi|154695650|gb|EDN95388.1| SS1G_11265 [Sclerotinia sclerotiorum 1980]
  misc_feature (134)..(314): NCBI GI: 46138497 Blast Desc: FG10763.1 [Gibberella zeae PH-1]
MRPRTPALNFGQSIAGGGPTSPPETPTTASPTLHRARASIGNMSPQAKARQYSASRSNIRPLGGNKFSYSRDPRPAEFSPRSSHSGDEESDESESPRRSPVADIPAIHIRSGFQFTTAFAALATRTIHYDDATFALEDLDSDTFDSDDDDIRLSVRRPDAIEYEGDSDDSQAPSSRPPDRLANDMANMTPFISDSESEIDEDDEFQRSLLLRRRDRRIRRMKSGSISKRTVSERGSDGSDREDVDPWYESNEHGVAFHRRVRRKAENRMSLISTVERIEELKEPNSDDENPQFPNEAELSLRELPYFTFMEVDSE

SEQ ID NO: 21866 - DNA, 3673 bp, Muscodor strobelii
  misc_feature: SGI EST ID NO. CUFF.51418.0
  misc_feature: Variant of the nucleotide sequence at SEQ ID NO 21864
cttcagaaggacggaaatcttgaccgctttgtctctcgctgcatccgcttcaaggccatgccacatctaatgcacgtcacgccaattctagtccgtgggctgaatctaccgcctctcagctgcatgtacatagtctcgcatcgaacccgccgccatcgtgaagtccataagccagattgccgtgattagatattcatttcggacatttggataatgtcttacacttacgtcgactataaagcttttccccttcggtacaacactacggacaacggccatcggtgacagatatatatctgccatacgtcccgtccgggtcggccatgccttaccctcttaggcaggtcgaagcccggctctacagaatcccaaagccgggcaaaagaaacggccaaccctcaacgctccattgttatcaattggcattcatcaatgacccgacacgaaggtgataggatagtgcgcgatcagccgcctccttcgtcacattttccatattgcagccacatggatactgccagaggggtgtgatcaatgcatccgtccgtccatttcgcctcctcatcctgtcaagtttgcgccgttgcgcgattgcgctgcgcgaatgcttgttctcttcttgcgcactcgaaaagtttcgatgtgcgatccttggtgctctggcgagtctagtcttcgggctcctcactggttcacgtttggctggccctctgcaaacggccaatcttcgtccaactccaccacatcaccacctttcccttctctctttcctgcatgaaagagcccatcatcattgggcataactgctgccgctgtccccggcccacatctggtgctttgggtgcccgccaccgtctctcgctccagtcttgtctttttctcatacgctcgcataaacaccgctgagcaaagcactgaagcagctagcttcgcgggagcgaatcctcgtccagaccgtccgctttgtccagcgtattaaaatagtccaggggggctccaagattgacaactcatgcctccaaattctgacaatctcccaccgcctctgcttcgtgtctgtgaggagttgtcgggagtcatagcctctttgtatattccaacatgcttcagtgtgtccgtcgcctctttttgccacgagccatatcgcaatgaagaatatggatctgcggtagaagaaaccaggtagaacctggaacaacaaagaccgttgctgcccaagaacccgcaacaagtcgcgagctcctccgaaataggctcgtgagagagactgactaagcctgcgtctctcctctttcgagctgccgttacacctacaccgtctgtgttgcatattggctcgctgtctacaccagtccctctgcctgctatattcgcccccggtcgctgctgcactcccctagtatttgcacgtatgagattcgctgtcgtgaagctggacgatagaaatactggatctgtccttgtctgtttctgtgtccattgaagttttttctctctctcgcagaccttgaaacgtgcagccagcccaatttgccagcgttttccctctgcccctccttcactcaactttttgctcgtgccgcaccatcggattggtataaaacgcattgcttctcacattctggtattacttccagccgatcccatcgaggtgccttcgtctctctcgtggtgatctgctgctctctgaatgctcattgctgaattacaactgtttctctaccgaaaccagtgtactccatcggattgaggcgacgacgcaaggtccgacgcaactcaaattccagatacccacaccaccactatctcaacggttccgagtcctttttcttcggtgaagaaactgcgcatctggtggccgacctctatcgacctcaacctcttgaaagattatcatgacaagttatcggactatattcatttcttctccgcattggaggtttctgctttgggtattgacgccttaaccattgatctccctcattcctccgttctctacacccgatctttcgcctccccgcgattttaccccacattgtaagatccggttgagcccgttgataagatcacaagcgacttgtctcgctaccgcgggagctatccccacgattaggccagtccaagaagatgcggccacgcactcccgctttgaatttcggccagtccatagccggaggtggaccaacctcgccaccagagacgccaacgacggcgtcccccacgctccatcgcgcgcgggcctccattggcaatatgtcaccccaggcgaaagcacgacagtacagtgccagtcggtcaaatatccgacctttaggtggaaacaaattcagctacagccgtgatccacggcctgcggaattctcaccgcgatcttcgcattccggcgacgaagagtccgacgagtcagagagtcctcgccggtcgcctgtagctgatatacccgctatccatatacgaagcgggttccaattcacgacggcgttcgctgctctcgcgactcgtacaattcattatgacgatgcaacatttgcactcgaagacttggacagtgacactttcgacagcgatgatgatgatatccgcctatcagttcgacgacctgatgccattgaatacgagggtgattcggacgacagccaagctccttctagtcgaccacctgatcgattagctaatgacatggcaaacatgacaccctttatttcagactctgaaagtgagatcgacgaagatgacgaattccagagatcgcttctgcttagacgtcgggaccgtcggattcgccgcatgaaatctggtagtatcagcaaacgtaccgtcagtgagcgaggcagtgacgggtcggaccgggaggatgtcgatccttggtacgagtcgaatgaacatggcgtggcgtttcatcgacgtgtacgaagaaaagcagaaaatcgcatgagcctgatctccacggtcgagcgaatcgaggagctcaaggaaccgaacagcgacgatgaaaaccctcaatttcccaatgaagcggaactctccctccgagaactaccatacttcacctttatggaagtcgactccgagtaggagtgtgattcgagcaacgttaatctggtatgactgcaccgttctcggacggcgaccatccagacgcttgtatatcgatcttagactacgatatcaaagaggaatggtcactgtacgtagtaatcgcaatgaagagagcaaagaacgacattcgggctctgggcctgatggtccggtatggacaaatgatattgcagcaacgaagagagataattaggacagccaggcaaaaaggaaatggcttttatagagagatggccgacgtagccagtggatatatcggattgcttcagttggggcagatacccagctcttctcagggcagtgctgcgaactgtgcattgggtttgtccgtgcccttgttcatgatacctactagacgcatggaattggcccttgacaaacaaagggtggggtgttgtactcattcctacgataatgacgaaatgaagctcaatgatagacagcatggcgcggcgggttctttgagatgtgtttcttctcgtctgctcttctcgtttgatatgacaatagactttatagttcaatatgtagatgaacgcaacatacatgaaactatgccagctaagctacctga

SEQ ID NO: 21867 - DNA, 1935 bp, Muscodor strobelii
  misc_feature: SGI cDNA ID NO. 567413
  misc_feature: Reduced expression when VOC is produced
  misc_feature: Encodes the peptide sequence at SEQ ID NO 21868
atgaatcagcagcctcagcagccccagaaccgggccccaggccaagccccccaggcagcacgcatgccccagctcctccgaccagagcagatgcgtaccttcagctacctcgacgccaccgacaaagccaagtacgaagccggcctcaagcagctctgggccaaggtcgattccacccccgccgactcccaagagcacctctcggccaaggccaagatcgccgagttctcccgcatggtcatcgagaagatgcgcaagctgcacaacttgcagcagcagcaacgccagcagcagggccagcagtccaccgacgcccagccccagccggccgtacctgctccgacgaaccctatcgcccgccctcagccatccgccgcggcgaccaccgcgaccaccagcgctccagtccccgccaacaccgctatacctaagggcataatggagcacgtccagaagttcccctggaacatgtatcccatccccgcccagtacagcagcccggagcagagtcagaagttcctccaagagacgaaagcgcagtatgcccgcgccctgatgaccatggagagcactaagggccacctccgccgcctagacgccataaccaaggagcggctggacaagaaccccggcatggacactaaggacttgggcgagcagaaggctaagatccagaagaactacgcagatgcctcggtcttcatccagaagatccgagctcagatccccagccagtccaccggcgctcagggcacggccgctgctcagcaggcacgagccggccagcccatgcagcccaccagctcgggcggcgtggcagcgacgcatcccatgcaggacgcgactgcctccgtcacggccgccatgaacgctgcgagggcggcgcacagagggtcggtaggtggggtcgcgcaaccacagcagtcgcaaccccaggcgcaacctgcctcgcagcagcctcagacacccgctaccccggcaacgccgtcgaccaatgcgcctggacagcttccccagtccgtatctgtgcctaatgcccaggtcaagcttgaacccggcgtcaacccacagcacccgcctccggtgaacacagctctggccgcagcttcgagcgccaatctgccctctgccggcacgcctacccacgcatccgcccgcgtccagacgcctcagtctgcacaaccgccagccagtgctaccgctcaggtccgccctttgacgcacgcagccgccgtgaatcgagccaattcgtcgtccaacattgcccaagctggctctgcctccagtagcggcgtcggcaacaacaacaccaacggccctacacctatggtcaacagcgctacgccctctgcgcacactcacgctcatccccagcctgctgcgacattgacctctaaacttcccatccccaaagttctgcccgagaaagcgcagatgccgcccgtccccgccgccgttggtggtggcaacaccccgggccgcccctcatacggaggcggtagcagcgctggtggtgttcagaaccagcctgtcctgcccaagattcaagtgccccaatatgacaccgagggcgagcatgtgctgtccaagaagaagcttgacgagcttgtccgccaggtctgcggcggaggttctcctggtgccgacggcaactacctgactcctgacgtcgaagagtctgttctcagcgtcgccgacaatttcgtcgacaacacgatttcgatggcttgccgtctagccaaggagcgtggcagcaaggtactggagattcgcgacatccagcttgtcctcgagcgcgtctacaacatccgcatccccggctacacttcggacgagctgcgcaccgtccgcaaggtgcagcctgctgccaactggatccagaagatgagcgcgatccaggcagccaaggtgacgtcgaacaaggacgacaagtag

SEQ ID NO: 21868 - protein, 644 aa, Muscodor strobelii
  misc_feature: SGI Peptide ID NO. 567413
  misc_feature (529)..(603): Pfam Id: PF03847 Pfam Desc: Transcription initiation factor TFIID subunit A
  misc_feature (141)..(643): NCBI GI: 116203479 Blast Desc: CHGG_09623 [Chaetomium globosum CBS 148.51] gi|88175751|gb|EAQ83219.1| CHGG_09623 [Chaetomium globosum CBS 148.51]
  misc_feature (321)..(643): NCBI GI: 171679631 Blast Desc: protein product [Podospora anserina] gi|170939441|emb|CAP64669.1| protein product [Podospora anserina]
  misc_feature (359)..(643): NCBI GI: 261355072 Blast Desc: transcription initiation factor TFIID subunit 12 [Verticillium albo-atrum VaMs.102]
  misc_feature (348)..(643): NCBI GI: 256732565 Blast Desc: NECHADRAFT_104053 [Nectria haematococca mpVI 77-13-4]
  misc_feature (379)..(642): NCBI GI: 39973937 Blast Desc: MGG_00885 [Magnaporthe grisea 70-15] gi|145018167|gb|EDK02446.1| MGG_00885 [Magnaporthe grisea 70-15]
  misc_feature (348)..(643): NCBI GI: 46123333 Blast Desc: FG06044.1 [Gibberella zeae PH-1]
  misc_feature (142)..(641): NCBI GI: 156042930 Blast Desc: SS1G_11264 [Sclerotinia sclerotiorum 1980] gi|154695649|gb|EDN95387.1| SS1G_11264 [Sclerotinia sclerotiorum 1980]
  misc_feature (13)..(641): NCBI GI: 115402741 Blast Desc: transcription initiation factor TFIID subunit 12 [Aspergillus terreus NIH2624] gi|114189293|gb|EAU30993.1| transcription initiation factor TFIID subunit 12 [Aspergillus
  misc_feature (452)..(641): NCBI GI: 240273957 Blast Desc: transcription initiation factor TFIID subunit 12 [Ajellomyces capsulatus H143]
  misc_feature (166)..(643): NCBI GI: 255945085 Blast Desc: Pc20g07870 [Penicillium chrysogenum Wisconsin 54-1255] gi|211588045|emb|CAP86116.1| Pc20g07870 [Penicillium chrysogenum Wisconsin 54-1255]
  misc_feature: Useful for introducing or modulating the production of volatile compounds
MNQQPQQPQNRAPGQAPQAARMPQLLRPEQMRTFSYLDATDKAKYEAGLKQLWAKVDSTPADSQEHLSAKAKIAEFSRMVIEKMRKLHNLQQQQRQQQGQQSTDAQPQPAVPAPTNPIARPQPSAAATTATTSAPVPANTAIPKGIMEHVQKFPWNMYPIPAQYSSPEQSQKFLQETKAQYARALMTMESTKGHLRRLDAITKERLDKNPGMDTKDLGEQKAKIQKNYADASVFIQKIRAQIPSQSTGAQGTAAAQQARAGQPMQPTSSGGVAATHPMQDATASVTAAMNAARAAHRGSVGGVAQPQQSQPQAQPASQQPQTPATPATPSTNAPGQLPQSVSVPNAQVKLEPGVNPQHPPPVNTALAAASSANLPSAGTPTHASARVQTPQSAQPPASATAQVRPLTHAAAVNRANSSSNIAQAGSASSSGVGNNNTNGPTPMVNSATPSAHTHAHPQPAATLTSKLPIPKVLPEKAQMPPVPAAVGGGNTPGRPSYGGGSSAGGVQNQPVLPKIQVPQYDTEGEHVLSKKKLDELVRQVCGGGSPGADGNYLTPDVEESVLSVADNFVDNTISMACRLAKERGSKVLEIRDIQLVLERVYNIRIPGYTSDELRTVRKVQPAANWIQKMSAIQAAKVTSNKDDK

SEQ ID NO: 21869 - DNA, 2994 bp, Muscodor strobelii
  misc_feature: SGI EST ID NO. CUFF.51554.0
  misc_feature: Variant of the nucleotide sequence at SEQ ID NO 21867
cggcagctgtttttgaagacttgcaactccatcgcgtttgagcactgccgaatgactgccggtgccaatcacgctgggaaaacggataactccagttgcccagctggcctatccacacacatttaatcatttaatccattcaatctggtctatttcatcccatctgtgacctcttattcctcgatccttccttagactgtgccacagcacgaacctcagcgagaaccagctctgaacccacctcgaacatcaaacgtgaggtgcagctatccctacacatcccgggtccctttgtctactggctagccattctatccggcgccgtcggccaactcttgattcgttcgtcccgactcgggcagtgatactgcgtacccctcgcgcaatccggaagatagcaccaaccttcattctcaacacccacttcctgcgatcccgtctcccacctccctcgtcagtcttgcccggagcctctgaagcgattcggatccaccttcacagcaccatccgcatcctccactgcgtctctgatcctcgttactatataccactgccctcgacgttgaatatcgagtcgcaaccatgaatcagcagcctcagcagccccagaaccgggccccaggccaagccccccaggcagcacgcatgccccagctcctccgaccagagcagatgcgtaccttcagctacctcgacgccaccgacaaagccaagtacgaagccggcctcaagcagctctgggccaaggtcgattccacccccgccgactcccaagagcacctctcggccaaggccaagatcgccgagttctcccgcatggtcatcgagaagatgcgcaagctgcacaacttgcagcagcagcaacgccagcagcagggccagcagtccaccgacgcccagccccagccggccgtacctgctccgacgaaccctatcgcccgccctcagccatccgccgcggcgaccaccgcgaccaccagcgctccagtccccgccaacaccgctatacctaagggcataatggagcacgtccagaagttcccctggaacatgtatcccatccccgcccagtacagcagcccggagcagagtcagaagttcctccaagagacgaaagcgcagtatgcccgcgccctgatgaccatggagagcactaagggccacctccgccgcctagacgccataaccaaggagcggctggacaagaaccccggcatggacactaaggacttgggcgagcagaaggctaagatccagaagaactacgcagatgcctcggtcttcatccagaagatccgagctcagatccccagccagtccaccggcgctcagggcacggccgctgctcagcaggcacgagccggccagcccatgcagcccaccagctcgggcggcgtggcagcgacgcatcccatgcaggacgcgactgcctccgtcacggccgccatgaacgctgcgagggcggcgcacagagggtcggtaggtggggtcgcgcaaccacagcagtcgcaaccccaggcgcaacctgcctcgcagcagcctcagacacccgctaccccggcaacgccgtcgaccaatgcgcctggacagcttccccagtccgtatctgtgcctaatgcccaggtcaagcttgaacccggcgtcaacccacagcacccgcctccggtgaacacagctctggccgcagcttcgagcgccaatctgccctctgccggcacgcctacccacgcatccgcccgcgtccagacgcctcagtctgcacaaccgccagccagtgctaccgctcaggtccgccctttgacgcacgcagccgccgtgaatcgagccaattcgtcgtccaacattgcccaagctggctctgcctccagtagcggcgtcggcaacaacaacaccaacggccctacacctatggtcaacagcgctacgccctctgcgcacactcacgctcatccccagcctgctgcgacattgacctctaaacttcccatccccaaagttctgcccgagaaagcgcagatgccgcccgtccccgccgccgttggtggtggcaacaccccgggccgcccctcatacggaggcggtagcagcgctggtggtgttcagaaccagcctgtcctgcccaagattcaagtgccccaatatgacaccgagggcgagcatgtgctgtccaagaagaagcttgacgagcttgtccgccaggtctgcggcggaggttctcctggtgccgacggcaactacctgactcctgacgtcgaagagtctgttctcagcgtcgccgacaatttcgtcgacaacacgatttcgatggcttgccgtctagccaaggagcgtggcagcaaggtactggagattcgcgacatccagcttgtcctcgagcgcgtctacaacatccgcatccccggctacacttcggacgagctgcgcaccgtccgcaaggtgcagcctgctgccaactggatccagaagatgagcgcgatccaggcagccaaggtgacgtcgaacaaggacgacaagtaggactctgattctcctgcgacggccaccaacacgaagaagcgtcgtcgtcgctcgtcggctgctaaggccgctgatccgatcgccactgagaagcgtggctaagacgcatagttcggcattacaggaggtgcccctagcttcgcaccgtagtgaagcttgattgttcttgtatccaaggatggatacgttggcgttagggaccatggcgttcggtatctgattatggattcttcgcatggcatgtggctcacccaaaaggctttctcggactggcgttagggagagagggatggtcggcatgcgttcatgataccacatcaggctgagaataattgagatactcataaggaactgtgtctacatgatgctgtgatatggtgactgtcttgatatttacgtgattacttgccatccagtgccgagatacgagagagccgtctccggcttcgttgtaggtttttatgatacagtacgtcg

SEQ ID NO: 21870 - DNA, 1755 bp, Muscodor strobelii
  misc_feature: SGI cDNA ID NO. 567414
  misc_feature: Encodes the peptide sequence at SEQ ID NO 21871
atgccaggcaagatgccccataagaaaggcaacgagcctgtcgagaacggcatccgcaacaacaaagatgtcgagatgacggacgagaaggccgccatgaagggcaagggcaagaagggcgccaaggagggcgaggatatgacggtcgttgttcccccttccaaagccaccaagcagtcctcccagccgccgcccgccgacgctgacggcgacgtcgatatggatgactcggagaagagccaggatgccgaggccaaagtcgatcccaccacccaggccatctcagatatcaagagcaatttcgctctccttaaccgcgccgtagagttgttcgattccaggttcacattacgggcactccgctccatctcatcccttcgcaagcgtctctcccccgagatcctcgcccaggccattgctgagacggtgcccccaacgagcgcatccgccaatgtagccaagcagcttctcgccgctctcggcaagggcaacatgcctctgggtcgccagccaagcacggagatggacatcgacagcgagtctaaaacaccagcgaagaacggcaagagagaaaacaaggatatataccctgagatcgatgtcttcttgggcattcttatccaggtctatctttacgacaacaagaagttccagcagggtgccgagttctctaagtcactggcagagcgtatacactctctcaaccggcgtactttggattccctctcggccaaggcctacttctacttctctctgttctgcgagcagctgaccccgcttccaccatcccctcgatctcctatcattgcgatccgcccaacgctgctcactgcgctccgcactgcagttctgcgcaaggacatcgatactcaggcttccgtcattgttctcctgttgcgcaactacctcctcacctcacacatctcgcaagccgacctgcttgtctcgcacacccagttccctgagaatgccgccaacacacaggtcgcgcgtttcttgtactacctgggccgcatccgggccgtccagctgcggtacacagaggctcacgagcacctgactgcggctacccgcaaatcgcccgccagccaatgcgctctcggcttctcccagaccgcgaccaagcttctgcttgtcgtcgagctcttgatgggtgacattccggagcgagctaccttccgggcctcggacatggagcaggcgctgcatccgtacttccttctggtgcaggccgttcgagtcggtaacctggaggacttcgaaacgaccatcgccgatcacgccgagacattccggcgcgacaacacgtactccctgatcctgcgcctccgacagaacgtgatcaagacgggcatccgcatgatgagcttgagttatagcagaatttcgctccgtgacatatgcatccgtctgcatctgggaagcgaggagagcgccgagtacatcgtggccaaggcgatcagagacggcgtgatcgaggcgacgttggatcgggagcacggattcatgaagagcaaggaagtcggggatgtctatgccacgcgggaacccggcgaagcatttcacgaccgcatccgcgcctgtcttggactgcacgacgagagtgtcaaggctatgcgcttcccgaaccaccagcaccggctcgagctcaagaacgcgtccgaggcgcgagagcgggagagagagatggccaaggagatacaagaaggcgacctggacgaagacgatctcggaggcgactttgagggcatgtaa

SEQ ID NO: 21871 - protein, 584 aa, Muscodor strobelii
  misc_feature: SGI Peptide ID NO. 567414
  misc_feature (403)..(507): Pfam Id: PF01399 Pfam Desc: PCI domain
  misc_feature (510)..(574): Pfam Id: PF08375 Pfam Desc: Proteasome regulatory subunit C-terminal
  misc_feature (1)..(584): NCBI GI: 145610813 Blast Desc: MGG_00884 [Magnaporthe grisea 70-15] gi|145018168|gb|EDK02447.1| MGG_00884 [Magnaporthe grisea 70-15]
  misc_feature (1)..(584): NCBI GI: 261355073 Blast Desc: 26S proteasome non-ATPase regulatory subunit 3 [Verticillium albo-atrum VaMs.102]
  misc_feature (45)..(584): NCBI GI: 46123335 Blast Desc: FG06045.1 [Gibberella zeae PH-1]
  misc_feature (38)..(584): NCBI GI: 85093155 Blast Desc: NCU02224 [Neurospora crassa OR74A] gi|28921083|gb|EAA30401.1| NCU02224 [Neurospora crassa OR74A]
  misc_feature (1)..(584): NCBI GI: 116203481 Blast Desc: CHGG_09624 [Chaetomium globosum CBS 148.51] gi|88175752|gb|EAQ83220.1| CHGG_09624 [Chaetomium globosum CBS 148.51]
  misc_feature (1)..(584): NCBI GI: 154313394 Blast Desc: BC1G_05394 [Botryotinia fuckeliana B05.10] gi|150849463|gb|EDN24656.1| BC1G_05394 [Botryotinia fuckeliana B05.10]
  misc_feature (43)..(584): NCBI GI: 171679629 Blast Desc: protein product [Podospora anserina] gi|170939440|emb|CAP64668.1| protein product [Podospora anserina]
  misc_feature (1)..(584): NCBI GI: 156042928 Blast Desc: SS1G_11263 [Sclerotinia sclerotiorum 1980] gi|154695648|gb|EDN95386.1| SS1G_11263 [Sclerotinia sclerotiorum 1980]
  misc_feature (6)..(584): NCBI GI: 145245455 Blast Desc: An11g10380 [Aspergillus niger] gi|134079695|emb|CAK97121.1| protein product [Aspergillus niger]
  misc_feature (6)..(584): NCBI GI: 238505988 Blast Desc: proteasome regulatory particle subunit (RpnC), [Aspergillus flavus NRRL3357] gi|220690310|gb|EED46660.1| proteasome regulatory particle subunit (RpnC), [Aspergillus
MPGKMPHKKGNEPVENGIRNNKDVEMTDEKAAMKGKGKKGAKEGEDMTVVVPPSKATKQSSQPPPADADGDVDMDDSEKSQDAEAKVDPTTQAISDIKSNFALLNRAVELFDSRFTLRALRSISSLRKRLSPEILAQAIAETVPPTSASANVAKQLLAALGKGNMPLGRQPSTEMDIDSESKTPAKNGKRENKDIYPEIDVFLGILIQVYLYDNKKFQQGAEFSKSLAERIHSLNRRTLDSLSAKAYFYFSLFCEQLTPLPPSPRSPIIAIRPTLLTALRTAVLRKDIDTQASVIVLLLRNYLLTSHISQADLLVSHTQFPENAANTQVARFLYYLGRIRAVQLRYTEAHEHLTAATRKSPASQCALGFSQTATKLLLVVELLMGDIPERATFRASDMEQALHPYFLLVQAVRVGNLEDFETTIADHAETFRRDNTYSLILRLRQNVIKTGIRMMSLSYSRISLRDICIRLHLGSEESAEYIVAKAIRDGVIEATLDREHGFMKSKEVGDVYATREPGEAFHDRIRACLGLHDESVKAMRFPNHQHRLELKNASEAREREREMAKEIQEGDLDEDDLGGDFEGM

SEQ ID NO: 21872 - DNA, 2733 bp, Muscodor strobelii
  misc_feature: SGI EST ID NO. CUFF.51439.0
  misc_feature: Variant of the nucleotide sequence at SEQ ID NO 21870
gtggtggactggtgactggcgactggcgctgggctgctgctgagaaagcctagaggtgtgtgaggcctaggtatctgctccgggcgcgcttgcatcacctgggcctggacactggacctaccttgcacaaacgacgtccggtggtcgatcgacctcaatccatcatcatccatccgtcaatcagccctccttcgaccacagaaacatcccttctctccgatctccatctcactaatcaaccacaccaacatcccacaatctacataaccttcatttgtcttcctccgccgttctctctgctgccagcgtgtctcgtttgagataggcccgtgtccttttgccgctgcatacgctcgtcatccgttctgcttttcccacctttccaccaccaccgccgggccgcatctacccaaccagcagacaggcacccgacgttgcgcgccttgcagacaaatccacgccgtcgtctgcactgcacgcgacccctccaccacaggaccctttccatatagcgagcattatctcgactccctctgcatcgacgcctctcccccatcccccgtagccgacatgccaggcaagatgccccataagaaaggcaacgagcctgtcgagaacggcatccgcaacaacaaagatgtcgagatgacggacgagaaggccgccatgaagggcaagggcaagaagggcgccaaggagggcgaggatatgacggtcgttgttcccccttccaaagccaccaagcagtcctcccagccgccgcccgccgacgctgacggcgacgtcgatatggatgactcggagaagagccaggatgccgaggccaaagtcgatcccaccacccaggccatctcagatatcaagagcaatttcgctctccttaaccgcgccgtagagttgttcgattccaggttcacattacgggcactccgctccatctcatcccttcgcaagcgtctctcccccgagatcctcgcccaggccattgctgagacggtgcccccaacgagcgcatccgccaatgtagccaagcagcttctcgccgctctcggcaagggcaacatgcctctgggtcgccagccaagcacggagatggacatcgacagcgagtctaaaacaccagcgaagaacggcaagagagaaaacaaggatatataccctgagatcgatgtcttcttgggcattcttatccaggtctatctttacgacaacaagaagttccagcagggtgccgagttctctaagtcactggcagagcgtatacactctctcaaccggcgtactttggattccctctcggccaaggcctacttctacttctctctgttctgcgagcagctgaccccgcttccaccatcccctcgatctcctatcattgcgatccgcccaacgctgctcactgcgctccgcactgcagttctgcgcaaggacatcgatactcaggcttccgtcattgttctcctgttgcgcaactacctcctcacctcacacatctcgcaagccgacctgcttgtctcgcacacccagttccctgagaatgccgccaacacacaggtcgcgcgtttcttgtactacctgggccgcatccgggccgtccagctgcggtacacagaggctcacgagcacctgactgcggctacccgcaaatcgcccgccagccaatgcgctctcggcttctcccagaccgcgaccaagcttctgcttgtcgtcgagctcttgatgggtgacattccggagcgagctaccttccgggcctcggacatggagcaggcgctgcatccgtacttccttctggtgcaggccgttcgagtcggtaacctggaggacttcgaaacgaccatcgccgatcacgccgagacattccggcgcgacaacacgtactccctgatcctgcgcctccgacagaacgtgatcaagacgggcatccgcatgatgagcttgagttatagcagaatttcgctccgtgacatatgcatccgtctgcatctgggaagcgaggagagcgccgagtacatcgtggccaaggcgatcagagacggcgtgatcgaggcgacgttggatcgggagcacggattcatgaagagcaaggaagtcggggatgtctatgccacgcgggaacccggcgaagcatttcacgaccgcatccgcgcctgtcttggactgcacgacgagagtgtcaaggctatgcgcttcccgaaccaccagcaccggctcgagctcaagaacgcgtccgaggcgcgagagcgggagagagagatggccaaggagatacaagaaggcgacctggacgaagacgatctcggaggcgactttgagggcatgtaaaattaactgggaagctgtgtactctgggacgggggatctactctagcaatggtacgtgggtagtctattccggctggtgtagattacccaggcagttttgacatacatgacacgcggggaagcgcagtagagacgggatggtagctgatggttgatggagaggcggcttgagtcaaggccagccagcaccgcagctatttcatcatggcgcagaccccttgtattagatacggcagatactctatttcggcatggggcggttgggagtgcggtgatttggccagttagaccatttccacatgcggtcgtcaaggagtccttgcacaatgaaaaccaattccattaatactgtactctgcaggccatattgtgccatagcgttgggttgagattagaatgtcactgccg

SEQ ID NO: 21873 - DNA, 1836 bp, Muscodor strobelii
  misc_feature: SGI cDNA ID NO. 567415
  misc_feature: Reduced expression when VOC is produced
  misc_feature: Encodes the peptide sequence at SEQ ID NO 21874
atgccaggcaagatgccccataagaaaggcaacgagcctgtcgagaacggcatccgcaacaacaaagatgtcgagatgacggacgagaaggccgccatgaagggcaagggcaagaagggcgccaaggagggcgaggatatgacggtcgttgttcccccttccaaagccaccaagcagtcctcccagccgccgcccgccgacgctgacggcgacgtcgatatggatgactcggagaagagccaggatgccgaggccaaagtcgatcccaccacccaggccatctcaggtacgtctgcgctcagccagcttcctctccgtttgcacttctatatcagccttactaacttggcccccaccatcgtgacagatatcaagagcaatttcgctctccttaaccgcgccgtagagttgttcgattccaggttcacattacgggcactccgctccatctcatcccttcgcaagcgtctctcccccgagatcctcgcccaggccattgctgagacggtgcccccaacgagcgcatccgccaatgtagccaagcagcttctcgccgctctcggcaagggcaacatgcctctgggtcgccagccaagcacggagatggacatcgacagcgagtctaaaacaccagcgaagaacggcaagagagaaaacaaggatatataccctgagatcgatgtcttcttgggcattcttatccaggtctatctttacgacaacaagaagttccagcagggtgccgagttctctaagtcactggcagagcgtatacactctctcaaccggcgtactttggattccctctcggccaaggcctacttctacttctctctgttctgcgagcagctgaccccgcttccaccatcccctcgatctcctatcattgcgatccgcccaacgctgctcactgcgctccgcactgcagttctgcgcaaggacatcgatactcaggcttccgtcattgttctcctgttgcgcaactacctcctcacctcacacatctcgcaagccgacctgcttgtctcgcacacccagttccctgagaatgccgccaacacacaggtcgcgcgtttcttgtactacctgggccgcatccgggccgtccagctgcggtacacagaggctcacgagcacctgactgcggctacccgcaaatcgcccgccagccaatgcgctctcggcttctcccagaccgcgaccaagcttctgcttgtcgtcgagctcttgatgggtgacattccggagcgagctaccttccgggcctcggacatggagcaggcgctgcatccgtacttccttctggtgcaggccgttcgagtcggtaacctggaggacttcgaaacgaccatcgccgatcacgccgagacattccggcgcgacaacacgtactccctgatcctgcgcctccgacagaacgtgatcaagacgggcatccgcatgatgagcttgagttatagcagaatttcgctccgtgacatatgcatccgtctgcatctgggaagcgaggagagcgccgagtacatcgtggccaaggcgatcagagacggcgtgatcgaggcgacgttggatcgggagcacggattcatgaagagcaaggaagtcggggatgtctatgccacgcgggaacccggcgaagcatttcacgaccgcatccgcgcctgtcttggactgcacgacgagagtgtcaaggctatgcgcttcccgaaccaccagcaccggctcgagctcaagaacgcgtccgaggcgcgagagcgggagagagagatggccaaggagatacaagaaggcgacctggacgaagacgatctcggaggcgactttgagggcatgtaa

SEQ ID NO: 21874 - protein, 611 aa, Muscodor strobelii
  misc_feature: SGI Peptide ID NO. 567415
  misc_feature (430)..(534): Pfam Id: PF01399 Pfam Desc: PCI domain
  misc_feature (537)..(601): Pfam Id: PF08375 Pfam Desc: Proteasome regulatory subunit C-terminal
  misc_feature (1)..(611): NCBI GI: 145610813 Blast Desc: MGG_00884 [Magnaporthe grisea 70-15] gi|145018168|gb|EDK02447.1| MGG_00884 [Magnaporthe grisea 70-15]
  misc_feature (1)..(611): NCBI GI: 261355073 Blast Desc: 26S proteasome non-ATPase regulatory subunit 3 [Verticillium albo-atrum VaMs.102]
  misc_feature (120)..(611): NCBI GI: 116203481 Blast Desc: CHGG_09624 [Chaetomium globosum CBS 148.51] gi|88175752|gb|EAQ83220.1| CHGG_09624 [Chaetomium globosum CBS 148.51]
  misc_feature (45)..(611): NCBI GI: 46123335 Blast Desc: FG06045.1 [Gibberella zeae PH-1]
  misc_feature (38)..(611): NCBI GI: 85093155 Blast Desc: NCU02224 [Neurospora crassa OR74A] gi|28921083|gb|EAA30401.1| NCU02224 [Neurospora crassa OR74A]
  misc_feature (1)..(611): NCBI GI: 154313394 Blast Desc: BC1G_05394 [Botryotinia fuckeliana B05.10] gi|150849463|gb|EDN24656.1| BC1G_05394 [Botryotinia fuckeliana B05.10]
  misc_feature (43)..(611): NCBI GI: 171679629 Blast Desc: protein product [Podospora anserina] gi|170939440|emb|CAP64668.1| protein product [Podospora anserina]
  misc_feature (1)..(611): NCBI GI: 156042928 Blast Desc: SS1G_11263 [Sclerotinia sclerotiorum 1980] gi|154695648|gb|EDN95386.1| SS1G_11263 [Sclerotinia sclerotiorum 1980]
  misc_feature (6)..(611): NCBI GI: 145245455 Blast Desc: An11g10380 [Aspergillus niger] gi|134079695|emb|CAK97121.1| protein product [Aspergillus niger]
  misc_feature (6)..(611): NCBI GI: 238505988 Blast Desc: proteasome regulatory particle subunit (RpnC), [Aspergillus flavus NRRL3357] gi|220690310|gb|EED46660.1| proteasome regulatory particle subunit (RpnC), [Aspergillus
  misc_feature: Useful for introducing or modulating the production of volatile compounds
MPGKMPHKKGNEPVENGIRNNKDVEMTDEKAAMKGKGKKGAKEGEDMTVVVPPSKATKQSSQPPPADADGDVDMDDSEKSQDAEAKVDPTTQAISGTSALSQLPLRLHFYISLTNLAPTIVTDIKSNFALLNRAVELFDSRFTLRALRSISSLRKRLSPEILAQAIAETVPPTSASANVAKQLLAALGKGNMPLGRQPSTEMDIDSESKTPAKNGKRENKDIYPEIDVFLGILIQVYLYDNKKFQQGAEFSKSLAERIHSLNRRTLDSLSAKAYFYFSLFCEQLTPLPPSPRSPIIAIRPTLLTALRTAVLRKDIDTQASVIVLLLRNYLLTSHISQADLLVSHTQFPENAANTQVARFLYYLGRIRAVQLRYTEAHEHLTAATRKSPASQCALGFSQTATKLLLVVELLMGDIPERATFRASDMEQALHPYFLLVQAVRVGNLEDFETTIADHAETFRRDNTYSLILRLRQNVIKTGIRMMSLSYSRISLRDICIRLHLGSEESAEYIVAKAIRDGVIEATLDREHGFMKSKEVGDVYATREPGEAFHDRIRACLGLHDESVKAMRFPNHQHRLELKNASEAREREREMAKEIQEGDLDEDDLGGDFEGM

SEQ ID NO: 21875 - DNA, 2733 bp, Muscodor strobelii; identical to SEQ ID NO: 21872
  misc_feature: SGI EST ID NO. CUFF.51439.0
  misc_feature: Variant of the nucleotide sequence at SEQ ID NO 21873

SEQ ID NO: 21876 - DNA, 1914 bp, Muscodor strobelii
  misc_feature: SGI cDNA ID NO. 567416
  misc_feature: Encodes the peptide sequence at SEQ ID NO 21877
atggcgcctcaaacgcgcaacatgccccatccagcggcggccgacagcgctgcgagggagctgccccagcgacggagtaccaggcagcatcccaccgccaacaaagagactgcagagcccgaataccagctgagaagtgggagatcacgcgcaaataccatcgagaagcctcgccccgcggaatcagagcgatcggcctctcgtgcgaggagaagcgacgcgtcgaagaatggcaatggcactgtcactaaagagaatgtagcgcccaaagtagacgatacgaggcgctcatcccactccaagaaagcccgaatcgacatccgtcaaccctcaccgcccccctccaccaaaccacacgcctcctcgccccccaagaaacgaacgagacactccagatcctcaccagcaccacccacatccaccaaacccacagtttcaggcccgtcacaagctacagccaacgtagcgacaatcacagcaacaccaaaacgaaccctatctaaccccgcgcaaacccccaagccgccgggcacgccacactccgaccgcaacatcgataaggtcgtgttcgggagcgtggcattcaaggcctggtatgtctcctactacgctaaggaagttctgggcgacatctcgggcaataacaacaacaccaacaatgccagtaccaagattgggggagggaagaaagacctgcagatcgtggataagctgtatatctgtccttgctgcttcaagtattcgagagatagcgagatgtggcttgcgcatgtgagggtctgcgaggagagggggtttgtgcccggggagaaggtctatactcatccttctagcggaaagggtgtcagggtcccccgcgtgggcaatgcgagggagagtgcgagtcccaggggtaagaggaagagaggtgagattttgactgagaatgggaatggggatgcggatgaggtggaggataggggcgagtggagtgtttgggaggttgatggtgagaaggaaggtctattctgccaaaacctctccctgttcgcgaagctcttcctagataacaaatcggtcttcttcgacgtcacggggttcaactacttcctgctcgtctacactcctcctccaccatccactccctcgatatccacctccccacccctccgatcaccgcccgaatccaacgatgtgcttcctccctctatatacccctccaataccgcaagaccgcagatcgtgggcttcttctcgaaagaaaagatgtcgtgggataacaataatctcgcatgtatcctcgtgtttcccccctggcagcggaagggcctgggttcgttgctcatgggtgtctcgtatgagatttcgagacgggaggggattatgggcgggcctgagaaacctatttctaaacttgggaggaagggatactcacggttttggactggggagattacgaggtggttgttggagcttgatgtacctactcctcccccaatctctagtatgaggcccgggagaagtaaggaaaaagagaaagagagggaagagtgtgtcgtcgacgttgagaggtgttctagggagacgtggatcgcgcctgaggactgtctagcgaccctgagggatatgggttgtgttgaggaggcggggctgggtgtgcgtgtacccagggctaaggtcgaggctgatgccgagactcactcacaagcacatcccaactcgcattctgcaacgggcaaggataaagacaccaaggaaaacggaaatggaaacggtaatagtccggccatggtgcctagggtcaagatcgataagagcgccgttaggaagtgggccttgcagaacaagattgatgtctcgaggacttgtgatccgaagggtttcgttgagggatatgctgttaaggtccctagagaggaggaagaggaggtttag

SEQ ID NO: 21877 - protein, 637 aa, Muscodor strobelii
  misc_feature: SGI Peptide ID NO. 567416
  misc_feature (314)..(551): Pfam Id: PF01853 Pfam Desc: MOZ/SAS family
  misc_feature (407)..(486): Pfam Id: PF01853 Pfam Desc: MOZ/SAS family
  misc_feature (324)..(357): Pfam Id: PF01853 Pfam Desc: MOZ/SAS family
  misc_feature (181)..(630): NCBI GI: 256732568 Blast Desc: NECHADRAFT_78882 [Nectria haematococca mpVI 77-13-4]
  misc_feature (117)..(636): NCBI GI: 261355079 Blast Desc: histone acetyltransferase SAS2 [Verticillium albo-atrum VaMs.102]
  misc_feature (181)..(630): NCBI GI: 46123339 Blast Desc: FG06047.1 [Gibberella zeae PH-1]
  misc_feature (3)..(628): NCBI GI: 171679567 Blast Desc: protein product [Podospora anserina] gi|170939409|emb|CAP64637.1| protein product [Podospora anserina]
  misc_feature (127)..(628): NCBI GI: 116203491 Blast Desc: CHGG_09629 [Chaetomium globosum CBS 148.51] gi|88175757|gb|EAQ83225.1| CHGG_09629 [Chaetomium globosum CBS 148.51]
  misc_feature (182)..(635): NCBI GI: 85094502 Blast Desc: NCU02249 [Neurospora crassa OR74A] gi|28921350|gb|EAA30657.1| conserved [Neurospora crassa OR74A] gi|40804640|emb|CAF05900.1| related to histone acetyltransferase
  misc_feature (182)..(493): NCBI GI: 154313396 Blast Desc: BC1G_05395 [Botryotinia fuckeliana B05.10] gi|150849464|gb|EDN24657.1| BC1G_05395 [Botryotinia fuckeliana B05.10]
  misc_feature (182)..(486): NCBI GI: 156042926 Blast Desc: SS1G_11262 [Sclerotinia sclerotiorum 1980] gi|154695647|gb|EDN95385.1| SS1G_11262 [Sclerotinia sclerotiorum 1980]
  misc_feature (111)..(560): NCBI GI: 189211259 Blast Desc: histone acetyltransferase MYST2 [Pyrenophora tritici-repentis Pt-1C-BFP] gi|187978053|gb|EDU44679.1| histone acetyltransferase MYST2 [Pyrenophora tritici-repentis Pt-1C-BFP]
  misc_feature (179)..(540): NCBI GI: 238484403 Blast Desc: histone acetyltransferase (MysT1), [Aspergillus flavus NRRL3357] gi|220701490|gb|EED57828.1| histone acetyltransferase (MysT1), [Aspergillus flavus NRRL3357]
MAPQTRNMPHPAAADSAARELPQRRSTRQHPTANKETAEPEYQLRSGRSRANTIEKPRPAESERSASRARRSDASKNGNGTVTKENVAPKVDDTRRSSHSKKARIDIRQPSPPPSTKPHASSPPKKRTRHSRSSPAPPTSTKPTVSGPSQATANVATITATPKRTLSNPAQTPKPPGTPHSDRNIDKVVFGSVAFKAWYVSYYAKEVLGDISGNNNNTNNASTKIGGGKKDLQIVDKLYICPCCFKYSRDSEMWLAHVRVCEERGFVPGEKVYTHPSSGKGVRVPRVGNARESASPRGKRKRGEILTENGNGDADEVEDRGEWSVWEVDGEKEGLFCQNLSLFAKLFLDNKSVFFDVTGFNYFLLVYTPPPPSTPSISTSPPLRSPPESNDVLPPSIYPSNTARPQIVGFFSKEKMSWDNNNLACILVFPPWQRKGLGSLLMGVSYEISRREGIMGGPEKPISKLGRKGYSRFWTGEITRWLLELDVPTPPPISSMRPGRSKEKEKEREECVVDVERCSRETWIAPEDCLATLRDMGCVEEAGLGVRVPRAKVEADAETHSQAHPNSHSATGKDKDTKENGNGNGNSPAMVPRVKIDKSAVRKWALQNKIDVSRTCDPKGFVEGYAVKVPREEEEEV

SEQ ID NO: 21878 - DNA, 2552 bp, Muscodor strobelii
  misc_feature: SGI EST ID NO. CUFF.51421.0
  misc_feature: Variant of the nucleotide sequence at SEQ ID NO 21876
cataagcgacgagagcctagaggtacaatgtacacgtgccttcagcaattgattgccttctgaactttatctacttaattattcccagactgcagataggacttgaattctacgtgtcgcagtatgcacagcttcgcagacatcaccaccagctagaatggcgcctcaaacgcgcaacatgccccatccagcggcggccgacagcgctgcgagggagctgccccagcgacggagtaccaggcagcatcccaccgccaacaaagagactgcagagcccgaataccagctgagaagtgggagatcacgcgcaaataccatcgagaagcctcgccccgcggaatcagagcgatcggcctctcgtgcgaggagaagcgacgcgtcgaagaatggcaatggcactgtcactgtcgaccccgccactactgcgacgaggacgaccagagcaaactcgacacagcaaagacgccgcacctgaagctccaactactcagaaagagaatgtagcgcccaaagtagacgatacgaggcgctcatcccactccaagaaagcccgaatcgacatccgtcaaccctcaccgcccccctccaccaaaccacacgcctcctcgccccccaagaaacgaacgagacactccagatcctcaccagcaccacccacatccaccaaacccacagtttcaggcccgtcacaagctacagccaacgtagcgacaatcacagcaacaccaaaacgaaccctatctaaccccgcgcaaacccccaagccgccgggcacgccacactccgaccgcaacatcgataaggtcgtgttcgggagcgtggcattcaaggcctggtatgtctcctactacgctaaggaagttctgggcgacatctcgggcaataacaacaacaccaacaatgccagtaccaagattgggggagggaagaaagacctgcagatcgtggataagctgtatatctgtccttgctgcttcaagtattcgagagatagcgagatgtggcttgcgcatgtgagggtctgcgaggagagggggtttgtgcccggggagaaggtctatactcatccttctagcggaaagggtgtcagggtcccccgcgtgggcaatgcgagggagagtgcgagtcccaggggtaagaggaagagaggtgagattttgactgagaatgggaatggggatgcggatgaggtggaggataggggcgagtggagtgtttgggaggttgatggtgagaaggaaggtctattctgccaaaacctctccctgttcgcgaagctcttcctagataacaaatcggtcttcttcgacgtcacggggttcaactacttcctgctcgtctacactcctcctccaccatccactccctcgatatccacctccccacccctccgatcaccgcccgaatccaacgatgtgcttcctccctctatatacccctccaataccgcaagaccgcagatcgtgggcttcttctcgaaagaaaagatgtcgtgggataacaataatctcgcatgtatcctcgtgtttcccccctggcagcggaagggcctgggttcgttgctcatgggtgtctcgtatgagatttcgagacgggaggggattatgggcgggcctgagaaacctatttctaaacttgggaggaagggatactcacggttttggactggggagattacgaggtggttgttggagcttgatgtacctactcctcccccaatctctagtatgaggcccgggagaagtaaggaaaaagagaaagagagggaagagtgtgtcgtcgacgttgagaggtgttctagggagacgtggatcgcgcctgaggactgtctagcgaccctgagggatatgggttgtgttgaggaggcggggctgggtgtgcgtgtacccagggctaaggtcgaggctgatgccgagactcactcacaagcacatcccaactcgcattctgcaacgggcaaggataaagacaccaaggaaaacggaaatggaaacggtaatagtccggccatggtgcctagggtcaagatcgataagagcgccgttaggaagtgggccttgcagaacaagattgatgtctcgaggacttgtgatccgaagggtttcgttgagggatatgctgttaaggtccctagagaggaggaagaggaggtttagatgttgagggtggttgatatttgtgtttgtgtttatgtttatgaagcgtggcgtttgggtgtgaacaggaaaggctctggcacggggactgggaagagttgtgataccagcttagaggctgagggcttggaatatgttggttaaagggtttatgtgttgcagttgtggaatgaagaattgtaatgacaagatgatcagtcgccagagactttggaagcgatggtgtattgacggatacaatctttcgtgttgtgtgtcgtagtttatacaggcaacctgaggcccaatctactatgaattgcgcttggtagaatgctcttttcaaacatagttcgctggtgcttttgttctggtagcatattctctaggtgttcgatattttccatataatggcag

SEQ ID NO: 21879 - DNA, 453 bp, Muscodor strobelii
  misc_feature: SGI cDNA ID NO. 567417
  misc_feature: Reduced expression when VOC is produced
  misc_feature: Encodes the peptide sequence at SEQ ID NO 21880
atggcctccgctcgcattgtcgctacccgcgctgctgcctccatcggcagcaaggtcgctcgccctgctgtccgcgcttcattcgccagcactgctgccaagcgcaccatcaccagcaatgccactcctttccaggccatgaagcgtcaggccatgccctccaagatcatcggcgctaccacccgccaggccttccagcgccgtgcatactcttctgagatcgctcaggccatggttgaggtctccaagaacttgggtatgggttctgcggctatcggcttgactggtgctggtatcggtatcggtctcgttttcgctgctctcctcaatggtgttgcccgcaacccagctctccgtggccagctcttctcttacgccattttgggtttcgccttcgtcgaggccattggccttttcgatctcatggttgccctcatggccaagttcacgtaa

SEQ ID NO: 21880 - protein, 150 aa, Muscodor strobelii
  misc_feature: SGI Peptide ID NO. 567417
  misc_feature (82)..(150): Pfam Id: PF00137 Pfam Desc: ATP synthase subunit C
  misc_feature (1)..(150): NCBI GI: 85094506 Blast Desc: ATP synthase protein 9, mitochondrial precursor [Neurospora crassa OR74A] gi|114671|sp|P00842.1|ATP9_NEUCR RecName: Full=ATP synthase subunit 9, mitochondrial; AltName: ATP
  misc_feature (1)..(150): NCBI GI: 46123341 Blast Desc: ATP9_NEUCR ATP synthase protein 9, mitochondrial precursor (Lipid-binding protein) [Gibberella zeae PH-1]
  misc_feature (1)..(150): NCBI GI: 2982 Blast Desc: protein product [Neurospora crassa]
  misc_feature (1)..(150): NCBI GI: 171679571 Blast Desc: protein product [Podospora anserina] gi|461561|sp|Q03672.1|ATP9_PODAN RecName: Full=ATP synthase subunit 9, mitochondrial; AltName: Full=Lipid-binding protein; 9
  misc_feature (1)..(150): NCBI GI: 256732569 Blast Desc: [Nectria haematococca mpVI 77-13-4]
  misc_feature (1)..(150): NCBI GI: 39973923 Blast Desc: MGG_00892 [Magnaporthe grisea 70-15] gi|145018159|gb|EDK02438.1| MGG_00892 [Magnaporthe grisea 70-15]
  misc_feature (1)..(132): NCBI GI: 116203493 Blast Desc: CHGG_09630 [Chaetomium globosum CBS 148.51] gi|88175758|gb|EAQ83226.1| CHGG_09630 [Chaetomium globosum CBS 148.51]
  misc_feature (1)..(149): NCBI GI: 12583548 Blast Desc: ATP synthase 9 [Colletotrichum gloeosporioides f. sp. aeschynomene]
  misc_feature (1)..(150): NCBI GI: 261355078 Blast Desc: ATP synthase protein [Verticillium albo-atrum VaMs.102]
  misc_feature (3)..(149): NCBI GI: 212540790 Blast Desc: ATP synthase subunit ATP9, [Penicillium marneffei ATCC 18224] gi|210067849|gb|EEA21941.1| ATP synthase subunit ATP9, [Penicillium marneffei ATCC 18224]
  misc_feature: Useful for introducing or modulating the production of volatile compounds
MASARIVATRAAASIGSKVARPAVRASFASTAAKRTITSNATPFQAMKRQAMPSKIIGATTRQAFQRRAYSSEIAQAMVEVSKNLGMGSAAIGLTGAGIGIGLVFAALLNGVARNPALRGQLFSYAILGFAFVEAIGLFDLMVALMAKFT

SEQ ID NO: 21881 - DNA, 2534 bp, Muscodor strobelii
  misc_feature: SGI EST ID NO. CUFF.51433.0
  misc_feature: Variant of the nucleotide sequence at SEQ ID NO 21879
tttcaataactatttctactatagatttaaacaacttacattcaaattatcttgtatcttaccttacgtggataaatgcgctcgtatatcgagtaaaaattgtggtcgtggacgcaaagctgcttgatctcggagacctggttgcacccgtcatccgagctatgtcagggtccatcattaaatgcagagatggtgtcgtggttccttttcttccaggttggctgtccaaggtctccactctccgccattcattacacaatttcccgatctcttggaaacgaagagtacctttcctctcctggcattctcctttctcctgcaagtgctgggcccgggtgacagctgattggttcaatttcccaattggatattcattgaagtcgctcgctaggattatcaaaattccaggacgtctgccgaatttccattggttccatggccgttcccgaaatagggagcacgtaaagctgtgccgttaagtttgcagatgcgtgtggtgcaggggcgggaagcttggtactcgatttggaagggcaatcgtctcttgatcagactcttcacctgctgaccactgcatgacagtcctacggaggcttgctgcaaagtcgttggtctcggagtggcatctgttcccgattctatgctcgttagccgagggatctccgtctccttttatgtttcgaagtgagggtgatttcaagtcttatcttggactactatagagcctccccccacgtgcgtgggcatggatacgtcgtgtacccagtgccgagaatttttcgcccacccgtcttgacgttcacgagacatagcttggtggagtatgtcttccagatggtggagattcatctccccaattctttttcgtccatccgctgcaactcagtatgattgaccttcgatgaataagatacgcattagttgatgcattcgaatgatccaatccaactgtgtgtaagagtgatgaaatcgttgcttgtgaaggttgcatctctgtcgcggtcgagtcataacttgactcatgtaagctgcgtgcaagctgtgccaagcctagtggttaaaagcctcaatgccaacgaatagcacgggtaacccctgcaagtgccgcacccggaaatacccgacttcttcatcatctggtccgtcatcaatgaaacccgtcagccttgcctgctttgggtaatctcgatcagagccaaaaaatttctggcaagccttactgtgtcgttgatctcgtgggctggtagtcacagtccacagtccaatagtccaacaataacggtgcgagaaatagctggtggtcacagctccggaacaattgttctgtcggtctcctggaggacaccagtcagacttttcttccttccacacccaccttcaacgaagctctcttcttcttcaagctcttatctctttctcatcagctcatctgcttgttcgacatctcccctctcatcaccaaccacatcaaccctcacatccttcacaatggcctccgctcgcattgtcgctacccgcgctgctgcctccatcggcagcaaggtcgctcgccctgctgtccgcgcttcattcgccagcactgctgccaagcgcaccatcaccagcaatgccactcctttccaggccatgaagcgtcaggccatgccctccaagatcatcggcgctaccacccgccaggccttccagcgccgtgcatactcttctgagatcgctcaggccatggttgaggtctccaagaacttgggtatgggttctgcggctatcggcttgactggtgctggtatcggtatcggtctcgttttcgctgctctcctcaatggtgttgcccgcaacccagctctccgtggccagctcttctcttacgccattttgggtttcgccttcgtcgaggccattggccttttcgatctcatggttgccctcatggccaagttcacgtaaacaacttaatctccaccgtcaaatctggcgatcacatcatgtcttggacgatgtgagaatagcagatcggagactcgagtcgctgtaccaacaacctaattgtgcactattatgcattcaattgggaatccggcatagaataatagaggtcctagattcgggttggtttagaacatagaacggggtatgaatccgtttgagacgggggcttcattgcatagcattcaggcttgtgtaacgatggggaagggaaaagcatatgtcaccaaggttgatcaccttgttgattacaacatttgtaaaatattataccaaccatcatgatcgaactggagcattctatcttctcctttgtactgaaagcgatggcctgagttggtgtttatttgaaaatatgggtttctgccatatactaatgaaatctccactcactcaatattgaaacagtgcctgggagcaactcatgaagtagctgttccatggctttgtgtaaaggtcacatgaccatctctggcttgttcactgaatgagggaatttgggactgtcgtcgttgttccttggtccactcgccccataaagctcttgattcgcg

SEQ ID NO: 21882 - DNA, 651 bp, Muscodor strobelii
  misc_feature: SGI cDNA ID NO. 567418
  misc_feature: Elevated expression when VOC is produced
  misc_feature: Encodes the peptide sequence at SEQ ID NO 21883
atgacgcactttaatatcaaaatcgtgtcagacacggtctgcccatggtgctatgttggcaagaagcggctggatagagccatcgaactctatcggaagtcatcgcctactgcgcgtgatgatacattcacgataaaatggagcccgttctatttggaccctaccgcgccaaaggttggcgttccactcaaggagcgtatgacagagagattcggtgcagagagattggagatgatacagcagcgcctacttacgattggaaaagaggagggtattaacttcgccttctcatcacgtactggaaacacaagagattctcatcgcttgatccaacttgctaaaacgaaagggaacgatgtagagaatagggttgtcactgaactcttcaagtcttattttgagggggagggtgatatcacgtctttcgaaacgctcatcgcagctgctgagagggctggcttatcgacaagcgaagtaaaagactggctggacacaggaaagggaggtcccgaagttgataaggaggttgaggaggcatatgcgaaggacattcatggggtccctaacttcacaatacaagggcataatgtcggcggcgctcaggagccagagacattttttgcaactattttcgcagatcaaggagtctag

SEQ ID NO: 21883 - protein, 216 aa, Muscodor strobelii
  misc_feature: SGI Peptide ID NO. 567418
  misc_feature (5)..(211): Pfam Id: PF01323 Pfam Desc: DSBA-like thioredoxin domain
  misc_feature (1)..(207): NCBI GI: 119195171 Blast Desc: CIMG_01960 [Coccidioides immitis RS]
  misc_feature (1)..(207): NCBI GI: 238838309 Blast Desc: DSBA oxidoreductase [Microsporum canis CBS 113480]
  misc_feature (1)..(210): NCBI GI: 171679639 Blast Desc: protein product [Podospora anserina] gi|170939445|emb|CAP64673.1| protein product [Podospora anserina]
  misc_feature (1)..(206): NCBI GI: 85093141 Blast Desc: NCU02220 [Neurospora crassa OR74A] gi|28921079|gb|EAA30397.1| [Neurospora crassa OR74A]
  misc_feature (12)..(207): NCBI GI: 240105002 Blast Desc: DSBA-like thioredoxin domain containing protein [Coccidioides posadasii C735 delta SOWgp]
  misc_feature (1)..(206): NCBI GI: 189211181 Blast Desc: PTRG_11590 [Pyrenophora tritici-repentis Pt-1C-BFP] gi|187978014|gb|EDU44640.1| PTRG_11590 [Pyrenophora tritici-repentis Pt-1C-BFP]
  misc_feature (1)..(207): NCBI GI: 156040748 Blast Desc: SS1G_11352 [Sclerotinia sclerotiorum 1980] gi|154695736|gb|EDN95474.1| SS1G_11352 [Sclerotinia sclerotiorum 1980]
  misc_feature (8)..(206): NCBI GI: 258566355 Blast Desc: conserved [Uncinocarpus reesii 1704] gi|237907623|gb|EEP82024.1| conserved [Uncinocarpus reesii 1704]
  misc_feature (1)..(207): NCBI GI: 154303838 Blast Desc: BC1G_08803 [Botryotinia fuckeliana B05.10] gi|150854387|gb|EDN29579.1| BC1G_08803 [Botryotinia fuckeliana B05.10]
  misc_feature (1)..(207): NCBI GI: 242812844 Blast Desc: conserved [Talaromyces stipitatus ATCC 10500] gi|218714381|gb|EED13804.1| conserved [Talaromyces stipitatus ATCC 10500]
  misc_feature: Useful for introducing or modulating the production of volatile compounds
MTHFNIKIVSDTVCPWCYVGKKRLDRAIELYRKSSPTARDDTFTIKWSPFYLDPTAPKVGVPLKERMTERFGAERLEMIQQRLLTIGKEEGINFAFSSRTGNTRDSHRLIQLAKTKGNDVENRVVTELFKSYFEGEGDITSFETLIAAAERAGLSTSEVKDWLDTGKGGPEVDKEVEEAYAKDIHGVPNFTIQGHNVGGAQEPETFFATIFADQGV

SEQ ID NO: 21884 - DNA, 1334 bp, Muscodor strobelii
  misc_feature: SGI EST ID NO. CUFF.51491.1
  misc_feature: Variant of the nucleotide sequence at SEQ ID NO 21882
tagcaattcaatattgaagatagcaagcttttcaaatcattgactatgacgcactttaatatcaaaatcgtgtcagacacggtctgcccatggtgctatgttggcaagaagcggctggatagagccatcgaactctatcggaagtcatcgcctactgcgcgtgatgatacattcacgataaaatggagcccgttctatttggaccctaccgcgccaaaggttggcgttccactcaaggagcgtatgacagagagattcggtgcagagagattggagatgatacagcagcgcctacttacgattggaaaagaggagggtattaacttcgccttctcatcacgtactggaaacacaagagattctcatcgcttgatccaacttgctaaaacgaaagggaacgatgtagagaatagggttgtcactgaactcttcaagtcttattttgagggggagggtgatatcacgtctttcgaaacgctcatcgcagctgctgagagggctggcttatcgacaagcgaagtaaaagactggctggacacaggaaagggaggtcccgaagttgataaggaggttgaggaggcatatgcgaaggacattcatggggtccctaacttcacaatacaagggcataatgtcggcggcgctcaggagccagagacattttttgcaactattttcgcagatcaaggagtctagcaaatgaactagcgttgttatcatactcgaatattgttgataaacaacaggaataagccgcgacaactagcagagttccaaagaagatgaaaaatgctcgctgaaatggtattgatttatctattctcaattcagcaagttgtgcgtagtgcaaagtaaccaatgccatctagtaaatgccctaagcgagttaatctggtgatgccacaacttagaggcagagatgtatgacaatactgttcgtcagcttcaaatctataagctagttcttggtcttcctgttcggacgaacgtcaacataggtacttacgatcacgcggccaattcccaaaagggacttcaacacaattactaggtcggggcgtctttgtgtgacttcgaccttagaggaatccgtccgtaggtcaagggtgaaatctactgactctgattatgaactatcaactgctacatttagctgaagaatagcttttttgttagccagagcatatttcaaacttgccggttctcttgatacaatttcactggatcgtttgactgagaaattgagaatgatatgacaatgcttcgtttcgtttcttatttcatatttgggcgttgtttgacacgtgattcctgcgactaccctccatctgcgt

SEQ ID NO: 21885 - DNA, 675 bp, Muscodor strobelii
  misc_feature: SGI cDNA ID NO. 567419
  misc_feature: Encodes the peptide sequence at SEQ ID NO 21886
atgatgtctttcactgcaatcctcgtctggtttgtcgcctttatgggcgccctcgccttcccggtcaatatggctgaagacggaatctcaatcactgcacgccatcatcacgttatttcctcagccgtggtcaccttgaagaatgtcgttgatcgttccgctaccgatctattccctatcaccaccggcatcgttcatctccccactactagtcctgacatcgtccgttctgctactatcatgaccaatatcagctacccagacactcgcggtacagtcaacaacaacctcagcagagaagacagcgatgatcatggcagcaccaaggaggacaatactctacaagctcttccgattttattccttgttgtgaatgggctagctctggtcgcctggactgtcggtatctgggcgtacttctatcatggccgtaagaatgcggccaccacccgtaccgactcccgtggcaataacgaagagctgaacacgaccgacgaaggcacggagcttggagtcatccatgcccgctctgcccccaactggccgcttcccgccgcgacaagtcctgacatcacctatcctgatcttgtattccagcattgtcatggacatgatcccaacgatcgtcgtgccgattgtcgcgccgatcgccgtaacaatcctcgcattgactag

SEQ ID NO: 21886 - protein, 224 aa, Muscodor strobelii
  misc_feature: SGI Peptide ID NO. 567419
MMSFTAILVWFVAFMGALAFPVNMAEDGISITARHHHVISSAVVTLKNVVDRSATDLFPITTGIVHLPTTSPDIVRSATIMTNISYPDTRGTVNNNLSREDSDDHGSTKEDNTLQALPILFLVVNGLALVAWTVGIWAYFYHGRKNAATTRTDSRGNNEELNTTDEGTELGVIHARSAPNWPLPAATSPDITYPDLVFQHCHGHDPNDRRADCRADRRNNPRID

SEQ ID NO: 21887 - DNA, 834 bp, Muscodor strobelii
  misc_feature: SGI cDNA ID NO. 567420
  misc_feature: Encodes the peptide sequence at SEQ ID NO 21888
atgccgacgctggcggacttggtgaatgtgcctgcatctcaacctccggatggccgagtgtcaaatttgatcgatccggagtcaaaatcgtggaggatcagagttactattggcatgtcgctgggaccggcagtaattttgacactgttgcgaatttatgctcgaattggattgtctcgagctatgggcattgacgattggttctgtgtacttgcgctgctcactgctatcacgtttaacagcctggtactcagcttcctagacgttcctgggagcggtcccataggacctcatatctgggatgtatccgtagctgcggagctcagatacatgtacccgtctatcgccgagtctgtcctgtcacggctcgccaatacgtttgtcaagatctcactgcttacattatatctacgcatcttcagccctattccgcgaataaaatggatggcatatttcggattggctgctgtgtcgagcttttttctcgcaatacttattgcgaccttgatcgtctgtgttcctcgaggcacgaaaactgggcttgacgcctacatcacttcagattattgcaacgagacagtcggccagctcgtcactgcaggggctatcttcagtgttatatccgacgtctatatcctactaatacctctccacctcttgcctactttgaaactctcgaaaagccgcaaagttgctatcagcagtgttttcctacttggctttgccgctattgccgcaggcatcgccaatgtcgtattgagatatgtgcaatatcttcctcaggggctgaatgactttacatggaatgttgtggacacttatatcactaagtaa

SEQ ID NO: 21888 - protein, 277 aa, Muscodor strobelii
  misc_feature: SGI Peptide ID NO. 567420
  misc_feature (6)..(255): NCBI GI: 145252774 Blast Desc: An16g05920 [Aspergillus niger] gi|134083454|emb|CAK46932.1| protein product [Aspergillus niger]
  misc_feature (10)..(269): NCBI GI: 242818275 Blast Desc: conserved [Talaromyces stipitatus ATCC 10500] gi|218713549|gb|EED12973.1| conserved [Talaromyces stipitatus ATCC 10500]
  misc_feature (1)..(268): NCBI GI: 145242916 Blast Desc: An11g00060 [Aspergillus niger] gi|134078677|emb|CAK48239.1| protein product [Aspergillus niger]
  misc_feature (15)..(248): NCBI GI: 242761452 Blast Desc: conserved [Talaromyces stipitatus ATCC 10500] gi|218723378|gb|EED22795.1| conserved [Talaromyces stipitatus ATCC 10500]
  misc_feature (1)..(261): NCBI GI: 156041152 Blast Desc: [Sclerotinia sclerotiorum 1980] gi|154695938|gb|EDN95676.1| [Sclerotinia sclerotiorum 1980]
  misc_feature (6)..(250): NCBI GI: 169786133 Blast Desc: [Aspergillus oryzae RIB40] gi|83776275|dbj|BAE66394.1| protein product [Aspergillus oryzae]
  misc_feature (6)..(267): NCBI GI: 238507075 Blast Desc: integral membrane protein (Pth11), [Aspergillus flavus NRRL3357] gi|220689452|gb|EED45803.1| integral membrane protein (Pth11), [Aspergillus flavus NRRL3357]
  misc_feature (3)..(268): NCBI GI: 242784837 Blast Desc: conserved [Talaromyces stipitatus ATCC 10500] gi|218720621|gb|EED20040.1| conserved [Talaromyces stipitatus ATCC 10500]
  misc_feature (4)..(276): NCBI GI: 238840889 Blast Desc: conserved [Microsporum canis CBS 113480]
  misc_feature (4)..(268): NCBI GI: 145229771 Blast Desc: An01g07700 [Aspergillus niger] gi|134055305|emb|CAK43867.1| protein product [Aspergillus niger]
MPTLADLVNVPASQPPDGRVSNLIDPESKSWRIRVTIGMSLGPAVILTLLRIYARIGLSRAMGIDDWFCVLALLTAITFNSLVLSFLDVPGSGPIGPHIWDVSVAAELRYMYPSIAESVLSRLANTFVKISLLTLYLRIFSPIPRIKWMAYFGLAAVSSFFLAILIATLIVCVPRGTKTGLDAYITSDYCNETVGQLVTAGAIFSVISDVYILLIPLHLLPTLKLSKSRKVAISSVFLLGFAAIAAGIANVVLRYVQYLPQGLNDFTWNVVDTYITK

SEQ ID NO: 21889 - DNA, 1818 bp, Muscodor strobelii
  misc_feature: SGI cDNA ID NO. 567421
  misc_feature: Elevated expression when VOC is produced
  misc_feature: Encodes the peptide sequence at SEQ ID NO 21890
atgggtctctacaagagtctaagcgaggacctcaccgaggtcgatgttatcattgctggaggtggtacggcgggatgcattgttgcagggcgactagcggaagcctcgccggaattgtcaattctagtaattgagggcggcatggacaattacgagaatccaacggtggttacgcccgccatgtttctgtcacatttgctaccagactcgaagacggccttgttctaccaagcaaccaagtcggattaccttgctgacagaggagtgatcgttccctctgggggagttcttggtggtggatcctcgattaatttcatgatgtacacgcgcgggcagcgtgacgattatgataattgggaaactcctggctggacggcggatgaattgctgcctttcttcaaaaagcttgaaacatatcacggcccgccagatgcggagcaccacggttccgacggccccgttcatgtttcagatggcaccttgcgtctaaagaacatcgaagatgatttcttacgtgcagcggcggaagttggctggtctgagactccagacctccagaactttgacgggaacagtgccacttctcgctggaaacgctatatctcaccagagggaaaccgttctgatacagctcatgcctatctgcatccgcggctgcgcgacgggaaacatcccaatttgcacgttcttgttgaatcgcaagtcgtgcgtgtgctatttgacgagaacaagcgcgcctctggtatcgagtatgttgcaaacactcgtttccaggagacagcttctccgcctcaaaagcaccaagtgaaggcgcgcaaacttgtcatcgtatcatgtggtgcatgcggttcgccgtcggtcctagaacgctctggtctcggacgcaaagatgttctggacaaagccggcgtgcctttagtggaagagcttccaggtgttggcaacgattatcaggaccatcacctgattctcctcccttacaaatcatctctcgagcctcatgagactctggatgacctgttttttggacgatcaacctaccaagcggcgatagagaaaaaagatccgagactaggttggaataccatagacgttgcggccaaagtacgcccgactgaagaagaagtggctgagcttggcccagaattcaaaaagaggtgggacgaggactatcgagatcatccaaatcggccgctcatgttgtttgcgttgctcaattcatatttcggtaatccggcgacccttggcgaaggtcaatactacacgtttggtgccttctcggcatatccttactcgcgaggtcacatccacataacagggcgggaggtcggcgacccactcgacttcaatgtgggtttcttcagcgatcctggagatgtcgatatcaaaaagcacgtctgggcatacaagaaaggtcgggaaattatgcgtcgaatgtcttcatacaagggcgaacacccgccatctcacccgcctttcgcggctgaatccgccgctgcccacatatcggtagagaagaacgaccccaatggagtgcaagatatcaagtataccccggaagatgagaaactgatcgagactttcctgcgggaaaacataaacacgacttggcattcaattggcaccaacaagatggcgccacgcgagaaacttggtgtcgtggacaaagatctcaacgtgtatggcgtttctggattgaagattgttgacatcagtattgcaccgggcaatgttgcaagcaacacgaacaataccgctctcgtgattggtgaaaaggccgcggatatcatcatcagggaattgggtctccttaactag

SEQ ID NO: 21890 - protein, 605 aa, Muscodor strobelii
  misc_feature: SGI Peptide ID NO. 567421
  misc_feature (423)..(593): Pfam Id: PF05199 Pfam Desc: GMC oxidoreductase
  misc_feature (14)..(335): Pfam Id: PF00732 Pfam Desc: GMC oxidoreductase
  misc_feature (15)..(47): Pfam Id: PF05834 Pfam Desc: Lycopene cyclase protein
  misc_feature (1)..(601): NCBI GI: 189210457 Blast Desc: alcohol dehydrogenase [Pyrenophora tritici-repentis Pt-1C-BFP] gi|187977653|gb|EDU44279.1| alcohol dehydrogenase [Pyrenophora tritici-repentis Pt-1C-BFP]
  misc_feature (1)..(603): NCBI GI: 46115592 Blast Desc: FG03638.1 [Gibberella zeae PH-1]
  misc_feature (1)..(603): NCBI GI: 256723917 Blast Desc: NECHADRAFT_92276 [Nectria haematococca mpVI 77-13-4]
  misc_feature (1)..(603): NCBI GI: 261361015 Blast Desc: alcohol oxidase [Verticillium albo-atrum VaMs.102]
  misc_feature (1)..(603): NCBI GI: 256722595 Blast Desc: [Nectria haematococca mpVI 77-13-4]
  misc_feature (1)..(603): NCBI GI: 242821127 Blast Desc: glucose dehydrogenase, [Talaromyces stipitatus ATCC 10500] gi|218712539|gb|EED11964.1| glucose dehydrogenase, [Talaromyces stipitatus ATCC 10500]
  misc_feature (1)..(603): NCBI GI: 256730307 Blast Desc: NECHADRAFT_94976 [Nectria haematococca mpVI 77-13-4]
  misc_feature (1)..(603): NCBI GI: 256725109 Blast Desc: NECHADRAFT_98136 [Nectria haematococca mpVI 77-13-4]
  misc_feature (1)..(602): NCBI GI: 169620997 Blast Desc: SNOG_13701 [Phaeosphaeria nodorum SN15] gi|160704151|gb|EAT78725.2| SNOG_13701 [Phaeosphaeria nodorum SN15]
  misc_feature (1)..(603): NCBI GI: 145250491 Blast Desc: An15g02200 [Aspergillus niger] gi|134082279|emb|CAK42323.1| protein product [Aspergillus niger]
  misc_feature (13)..(602): SWISSPROT Homolog: EC 1.1.3.13 Alcohol oxidase
  misc_feature: Useful for introducing or modulating the production of volatile compounds
MGLYKSLSEDLTEVDVIIAGGGTAGCIVAGRLAEASPELSILVIEGGMDNYENPTVVTPAMFLSHLLPDSKTALFYQATKSDYLADRGVIVPSGGVLGGGSSINFMMYTRGQRDDYDNWETPGWTADELLPFFKKLETYHGPPDAEHHGSDGPVHVSDGTLRLKNIEDDFLRAAAEVGWSETPDLQNFDGNSATSRWKRYISPEGNRSDTAHAYLHPRLRDGKHPNLHVLVESQVVRVLFDENKRASGIEYVANTRFQETASPPQKHQVKARKLVIVSCGACGSPSVLERSGLGRKDVLDKAGVPLVEELPGVGNDYQDHHLILLPYKSSLEPHETLDDLFFGRSTYQAAIEKKDPRLGWNTIDVAAKVRPTEEEVAELGPEFKKRWDEDYRDHPNRPLMLFALLNSYFGNPATLGEGQYYTFGAFSAYPYSRGHIHITGREVGDPLDFNVGFFSDPGDVDIKKHVWAYKKGREIMRRMSSYKGEHPPSHPPFAAESAAAHISVEKNDPNGVQDIKYTPEDEKLIETFLRENINTTWHSIGTNKMAPREKLGVVDKDLNVYGVSGLKIVDISIAPGNVASNTNNTALVIGEKAADIIIRELGLLN

SEQ ID NO: 21891 - DNA, 2715 bp, Muscodor strobelii
  misc_feature: SGI EST ID NO. CUFF.51483.0
  misc_feature: Variant of the nucleotide sequence at SEQ ID NO 21889
gggagctagggtcctttgccatgaacctgggcgactatgtgactatgtggctacgctgaatgatatgactatctctagttagagggttcagaggaggggtccaaggcaggacttcgtactcgcagatagtacaaaagcctcagccagccccagccgtggcacacttatcccgatacttgaacatataattatagactattgcaatatcaaacatgggtctctacaagagtctaagcgaggacctcaccgaggtcgatgttatcattgctggaggtggtacggcgggatgcattgttgcagggcgactagcggaagcctcgccggaattgtcaattctagtaattgagggcggcatggacaattacgagaatccaacggtggttacgcccgccatgtttctgtcacatttgctaccagactcgaagacggccttgttctaccaagcaaccaagtcggattaccttgctgacagaggagtgatcgttccctctgggggagttcttggtggtggatcctcgattaatttcatgatgtacacgcgcgggcagcgtgacgattatgataattgggaaactcctggctggacggcggatgaattgctgcctttcttcaaaaagcttgaaacatatcacggcccgccagatgcggagcaccacggttccgacggccccgttcatgtttcagatggcaccttgcgtctaaagaacatcgaagatgatttcttacgtgcagcggcggaagttggctggtctgagactccagacctccagaactttgacgggaacagtgccacttctcgctggaaacgctatatctcaccagagggaaaccgttctgatacagctcatgcctatctgcatccgcggctgcgcgacgggaaacatcccaatttgcacgttcttgttgaatcgcaagtcgtgcgtgtgctatttgacgagaacaagcgcgcctctggtatcgagtatgttgcaaacactcgtttccaggagacagcttctccgcctcaaaagcaccaagtgaaggcgcgcaaacttgtcatcgtatcatgtggtgcatgcggttcgccgtcggtcctagaacgctctggtctcggacgcaaagatgttctggacaaagccggcgtgcctttagtggaagagcttccaggtgttggcaacgattatcaggaccatcacctgattctcctcccttacaaatcatctctcgagcctcatgagactctggatgacctgttttttggacgatcaacctaccaagcggcgatagagaaaaaagatccgagactaggttggaataccatagacgttgcggccaaagtacgcccgactgaagaagaagtggctgagcttggcccagaattcaaaaagaggtgggacgaggactatcgagatcatccaaatcggccgctcatgttgtttgcgttgctcaattcatatttcggtaatccggcgacccttggcgaaggtcaatactacacgtttggtgccttctcggcatatccttactcgcgaggtcacatccacataacagggcgggaggtcggcgacccactcgacttcaatgtgggtttcttcagcgatcctggagatgtcgatatcaaaaagcacgtctgggcatacaagaaaggtcgggaaattatgcgtcgaatgtcttcatacaagggcgaacacccgccatctcacccgcctttcgcggctgaatccgccgctgcccacatatcggtagagaagaacgaccccaatggagtgcaagatatcaagtataccccggaagatgagaaactgatcgagactttcctgcgggaaaacataaacacgacttggcattcaattggcaccaacaagatggcgccacgcgagaaacttggtgtcgtggacaaagatctcaacgtgtatggcgtttctggattgaagattgttgacatcagtattgcaccgggcaatgttgcaagcaacacgaacaataccgctctcgtgattggtgaaaaggccgcggatatcatcatcagggaattgggtctccttaactagagatctcagcgtcccagtcttacactcctgcggcttgagttcaggtatcggttggttttcctggccatccttgctttcagggtcgcattaacagccgtgctgcttgaatggggtttgtttctgtcggctcggtgcgaaatctccggagaatcgtagaagcaggaacaaagattcctttttgagagaccatatatgcttcatttgctctcatatggatgaaattctgtccgtatatcctgctaaacttgaggtatctcctccagtacttgttcgacttctatgactagccaatttgagagacgatggacgcgctttcaagtgggaatgataatgatcatcatccataattgtcaatcctttatgtgaagcagatgcattcgaacgtccctcatctgatgaacttcttgatcccccagagatattgcggatcattgtgcggatgcctgtcagcgcgccgccaggtattttgacatcgcttgcggtgttttggcctcttgagctgtttgaaggaatgtctctatagcccctggctgagttgtttgtctccttcgttcgaaaccatgatcttattatttccttgaggtgtttgataggagcagcaaagatggcagacacgacaggcatacaagcgcaaagtatgccgatgtttatctcgaggattctataggattcaatattagatgca

SEQ ID NO: 21892 - DNA, 1446 bp, Muscodor strobelii
  misc_feature: SGI cDNA ID NO. 567422
  misc_feature: Reduced expression when VOC is produced
  misc_feature: Encodes the peptide sequence at SEQ ID NO 21893
atgaatgagaagtctagtgttctgtctgagggtcgtcgtgaccgtgactctaccgcttccctttcgtcttcatcgtcccatgaggaacatgatgttattgaggatatcccgcacgactcctcgctccacagagttcagacagataagtccggcatcgcaagagcttctggggacatgaagagaacggcgagcaatgtgctatctcatgttgcctcacgcatcacgacacgaaattggcccgagccaccgccgccgccggatggaggagtgaaagcatggactcaagtcgcaatgggatccttagcgattgccactgcatggggctacgcaaactcttttggtgcattccagagttattatgtcgaaacactgccccagtctgcgtcgacaatttcatggattggttccattcagatctggcttacgcttactgttggcgcattctctggtcgactactagatgcgggattctttgtgccaaccttcatcgtcggtgctgtgttacaacttcttggcatcttcttaatgagcatctcaactaaatactggcaaatattccttacacagggtgtacttagtggtctcggtgcagggatttactttacgccttgcatctctctcgttaatacgtattttgacaagagacgtggtcttgcagttggtctggctaccgctggaaattctgctggcggtattatatatccagttctagtgaggcagttgctctcgcagattggctttgcgtggaccacgagagtgatcggtttcctcaaccttgcattactcggtgtcgtattggcgttcatgcgacctcgcttgccacctaggaagtccggtccgctgttggatctatcagccttcaaagaccctgcctacaccggtttcgttttcgccacattctttgcgctgtggtcgaattacttcgttttctactatgtcgcctcattcggaatccaaactctgggtatgacttacaaagccgcatccactcttacgatcatcgtgaacggcgccggactccccttccgtgtcattactccctttttcgccgatcgctttggcttcttcaacacgaactatgtcatcatgtttgcgtgggcaattgtgggcttcacttggctcgctatacataccattggagggtgttatgcatttacaattgtctacggcattttgtctgctagtttccagtgcctcacttcatctacaatcgccaagattacgccacggcttgacatgatcggcacgagacttggcatggcatttaccattagtgctttatcagctttgacgggacctcctatcggcggagctatattaggccgtagcgatggtatttataggaatacgcaggtctggcaagggttgtccctcgtcgttgcattttctttgctggtatttgtgagggttcggatgagtgggtggaagctcaatgtgagaatttga

SEQ ID NO: 21893 - protein, 481 aa, Muscodor strobelii
  misc_feature: SGI Peptide ID NO. 567422
  misc_feature (98)..(433): Pfam Id: PF07690 Pfam Desc: Major Facilitator Superfamily
  misc_feature (29)..(481): NCBI GI: 145604747 Blast Desc: MGG_07882 [Magnaporthe grisea 70-15] gi|145012689|gb|EDJ97343.1| MGG_07882 [Magnaporthe grisea 70-15]
  misc_feature (67)..(480): NCBI GI: 256721290 Blast Desc: NECHADRAFT_52759 [Nectria haematococca mpVI 77-13-4]
  misc_feature (89)..(480): NCBI GI: 46105138 Blast Desc: FG00197.1 [Gibberella zeae PH-1]
  misc_feature (12)..(480): NCBI GI: 169601970 Blast Desc: SNOG_03862 [Phaeosphaeria nodorum SN15] gi|111067947|gb|EAT89067.1| SNOG_03862 [Phaeosphaeria nodorum SN15]
  misc_feature (73)..(481): NCBI GI: 169764347 Blast Desc: [Aspergillus oryzae RIB40] gi|83764499|dbj|BAE54643.1| protein product [Aspergillus oryzae]
  misc_feature (73)..(481): NCBI GI: 238504424 Blast Desc: monocarboxylate permease, [Aspergillus flavus NRRL3357] gi|220690914|gb|EED47263.1| monocarboxylate permease, [Aspergillus flavus NRRL3357]
  misc_feature (25)..(481): NCBI GI: 154311335 Blast Desc: BC1G_06520 [Botryotinia fuckeliana B05.10] gi|150850917|gb|EDN26110.1| BC1G_06520 [Botryotinia fuckeliana B05.10]
  misc_feature (85)..(481): NCBI GI: 255948762 Blast Desc: Pc22g12020 [Penicillium chrysogenum Wisconsin 54-1255] gi|211592165|emb|CAP98490.1| Pc22g12020 [Penicillium chrysogenum Wisconsin 54-1255]
  misc_feature (23)..(481): NCBI GI: 225559569 Blast Desc: conserved [Ajellomyces capsulatus G186AR]
  misc_feature (78)..(481): NCBI GI: 145245927 Blast Desc: An12g01250 [Aspergillus niger] gi|134079923|emb|CAK41054.1| protein product [Aspergillus niger]
  misc_feature: Useful for introducing or modulating the production of volatile compounds
MNEKSSVLSEGRRDRDSTASLSSSSSHEEHDVIEDIPHDSSLHRVQTDKSGIARASGDMKRTASNVLSHVASRITTRNWPEPPPPPDGGVKAWTQVAMGSLAIATAWGYANSFGAFQSYYVETLPQSASTISWIGSIQIWLTLTVGAFSGRLLDAGFFVPTFIVGAVLQLLGIFLMSISTKYWQIFLTQGVLSGLGAGIYFTPCISLVNTYFDKRRGLAVGLATAGNSAGGIIYPVLVRQLLSQIGFAWTTRVIGFLNLALLGVVLAFMRPRLPPRKSGPLLDLSAFKDPAYTGFVFATFFALWSNYFVFYYVASFGIQTLGMTYKAASTLTIIVNGAGLPFRVITPFFADRFGFFNTNYVIMFAWAIVGFTWLAIHTIGGCYAFTIVYGILSASFQCLTSSTIAKITPRLDMIGTRLGMAFTISALSALTGPPIGGAILGRSDGIYRNTQVWQGLSLVVAFSLLVFVRVRMSGWKLNVRI

SEQ ID NO: 21894 - DNA, 3553 bp, Muscodor strobelii
  misc_feature: SGI EST ID NO. CUFF.51531.1
  misc_feature: Variant of the nucleotide sequence at SEQ ID NO 21892
tcggaggtcgtatcgcaaggcatacctcgaatacccactctcagagacgaatttttgaatcatacctaaaatcttttgattagctttgacataagtggcgccgaaaacggagcctagagattttacttaatctgtgatccttctcatcatcgatggatctttgtgcgctggctcatagtgtatcgtcttcatctcctcgagatctcttgttatctttcttgttgtcaataagttgaagttgacttgttgtagcatggcaaatattgtcacgagacctatacttcttgtcttcaaacatctgtattggtaaagagatttccaacacaacaaagtgttgagcttcaatcatagcaattatcaccatgaatgagaagtctagtgttctgtctgagggtcgtcgtgaccgtgactctaccgcttccctttcgtcttcatcgtcccatgaggaacatgatgttattgaggatatcccgcacgactcctcgctccacagagttcagacagataagtccggcatcgcaagagcttctggggacatgaagagaacggcgagcaatgtgctatctcatgttgcctcacgcatcacgacacgaaattggcccgagccaccgccgccgccggatggaggagtgaaagcatggactcaagtcgcaatgggatccttagcgattgccactgcatggggctacgcaaactcttttggtgcattccagagttattatgtcgaaacactgccccagtctgcgtcgacaatttcatggattggttccattcagatctggcttacgcttactgttggcgcattctctggtcgactactagatgcgggattctttgtgccaaccttcatcgtcggtgctgtgttacaacttcttggcatcttcttaatgagcatctcaactaaatactggcaaatattccttacacagggtgtacttagtggtctcggtgcagggatttactttacgccttgcatctctctcgttaatacgtattttgacaagagacgtggtcttgcagttggtctggctaccgctggaaattctgctggcggtattatatatccagttctagtgaggcagttgctctcgcagattggctttgcgtggaccacgagagtgatcggtttcctcaaccttgcattactcggtgtcgtattggcgttcatgcgacctcgcttgccacctaggaagtccggtccgctgttggatctatcagccttcaaagaccctgcctacaccggtttcgttttcgccacattctttgcgctgtggtcgaattacttcgttttctactatgtcgcctcattcggaatccaaactctgggtatgacttacaaagccgcatccactcttacgatcatcgtgaacggcgccggactccccttccgtgtcattactccctttttcgccgatcgctttggcttcttcaacacgaactatgtcatcatgtttgcgtgggcaattgtgggcttcacttggctcgctatacataccattggagggtgttatgcatttacaattgtctacggcattttgtctgctagtttccagtgcctcacttcatctacaatcgccaagattacgccacggcttgacatgatcggcacgagacttggcatggcatttaccattagtgctttatcagctttgacgggacctcctatcggcggagctatattaggccgtagcgatggtatttataggaatacgcaggtctggcaagggttgtccctcgtcgttgcattttctttgctggtatttgtgagggttcggatgagtgggtggaagctcaatgtgagaatttgagcgaaccatgttgtgcgaagagctaatgccggttgttgtgttggactttcagatttggtgaaactcgtcatttcttgctttttattgacgttggtagaacatctaggtgttattgggattctcaagtcgtaatgtttaattccgccatccacaggcgcttttattactatcttaaatactacgtttccctcctatcacacataactagactatctaccttcactctctagtcggtagaaagctcataggctaaggccaaaggtaatttagcggcagtcgttttacatcatctgtcacatctgtgtcgttttgtataatacccgccaatctctatgccagaccatactgtcttcaagttaacttgtctcccagcaccggcatcgtggagcatgaaatacacccgcagccgcaagaaaaagcgcgatgatagctaccacataactgcccaccgtgaacccagctgatacgtccccgacactatgcgaccaccacagtgcaagagcaaaacttgacgtcaaccctaaaatgatcgttgcaatgaggtaatagcagacgcgcttacttggcgtcggccgaagtcgctgggactctgtggtcgtcgcagcagtggtgttcctcatctgccttattgggggatgatccactgcagtctctgcattgagaaaccgactcatgagtactgtatctgccgcgagagcttcgtgagccggccgaccgcgttgttggattcccgactgtccagtctcgaggctattaggatccccgtgctcgccatcgttgagcttcatgagctcgattgcggagtctatcaaggggtctattaaaggtttatatttttgatagctttgatagcccaattgcaagagctcaagtcctctttcggcattttgtaaccagctttgcgcgcttgaactggaacccggtgcaagaacgatgtcgtcaggactctggtccctcgcctgtcggctcgtcgtgatatcactcgcgcttgtgtctggagggcccgaacatccaataggtaaattaagaaactcctcatagctaagctcgggaaattctagcctagccctagtttcattgtccagttccactgtccccaatatgtcgtcgttgaactgctcctctacgaggtgctcatcggaacgattgatgcgatatgcactgccgtttgttgcactctcgaggactcggccatgccacgaaccactggcatatgacttcagcggttcccgactacgtgatctcgtaggttgttcattgcagcttccatttggaatggaaagtctcgggccgggtcttcttcttaatccttcttcgttacttaaggtctgatctgcgacatattttcgtttgagtatcgattccctcgacttcaatgccgtagaagatccgtatggccccagattgtcgttaaattcattcgataatgataattccatcagtctcacattcagccacttcccaaaatctttcatgaatgcatcaatcggttcctctctcagtctcgcaagaagccacttattcacatattccgtaatcgcatcatctcgttcctctttgttcttcaagtatattaggtcccctgagacggatttatggtccgatcgtccctcgtatgctgaagacatcgtgccaagatagatatctagtactgagagaaaagtccacccgtccaactcatccttagatcattccttcaagtactccaaacaattaagaagaatcgatctctatgtagctaaaag

SEQ ID NO: 21895 - DNA, 1674 bp, Muscodor strobelii
  misc_feature: SGI cDNA ID NO. 567423
  misc_feature: Encodes the peptide sequence at SEQ ID NO 21896
atgtctttcggcggccaaacaccgaccattatcgtcctgaaagagggtaccgatgcgtcacaagggaaagggcagataataagcaacataaatgcctgccaggccgttcaggccaccatcaagtccacactcggcccctatggcggggatctgttgatggtcgacgagaatggcagacagaccatcaccaacgacggcgccaccgtcatgaagcttctcgacattgtccaccccgccgcccgaatcctcgtcgacatcgcccggtcccaagacgctgaagtaggagatggaaccacctccgtagtcgtcctggccggagagatcctgaaggagatcaaggaccatgtcgaacagggcgtcagttcacaggtcatcatcaagggtctgagaagagcatcccagatggccgtcaacaagataaaggagatcgccgtgcgcacggacgagggcaaccaacgagagacgctacggaagctggctggtacagctatgacgagcaaactgatcaagagaaataccgagttcttcacaaagatggttgtcgacgccgtcctatcattagaccaggacgacctcaacgaaaagctgatcggtatgaagaagatacccggtggatcattgacagagtgtctctttgtcaacggtgtcgctttcaagaagaccttttcttacgctggcttcgaacaacagcccaagtccttcaagaagcctaaggtcctatgcttaaatgtggagctcgaactcaaggcagagaaggataatgccgaagtccgcgttgagcaggtttccgaataccaggccatcgttgacgccgaatggcaaatcatctataagaagctcgaggccgctcacaagactggcgccaaagtcgtgctttccaagctaccgattggagatttagcaacacagtacttcgctgatagagacatcttctgcgctggtcgtgtgtcttctgaggatatggagcgggtcgtccaggccactggcgccacagtacaatcaacatgttctgatatcctccctcatcatcttggtacttgcggatccttcgaggaacgacagatcggcggcgaacgcttcaattttttcgaagactgccccgaagccaagacctgcacacttatcctacgtggtggtgccgagcagttcatcgcagaggtagagcgctctctacacgatgctatcatgatcgtaaagcgagcgatcaagaaccagacaatcgtcggcggcggtggtgcctgtgagatggaggtttctgcgtacctacattccttcgccgacaagaacatccgcgacaagcagcagggtgtcatcaaatcgttcgccaaagccctcgaggttatccctcggcagctgtgcgacaacgccggctttgacgcaacggatatactcaacaagcttcgcgttgaacaccgaaagggacgtacttgggcgggtgttgacttcaccaacgagggtgtcgccgatatgatggagaaattcgtatgggagcctgctctcgtcaagatcaacgctattcagtctgccgtcgaggctagttgtttgatcctcggcgtagatgagacgattcgcaacgaggagagcgcagcgcctcaggcgcccggacaggccttaccccctggagcagcccaaagggctttgaggggacgtggaaggggtatgccgcgccggtga

SEQ ID NO: 21896 - protein, 557 aa, Muscodor strobelii
  misc_feature: SGI Peptide ID NO. 567423
  misc_feature (36)..(527): Pfam Id: PF00118 Pfam Desc: TCP-1/cpn60 chaperonin family
  misc_feature (1)..(547): NCBI GI: 46123857 Blast Desc: FG06306.1 [Gibberella zeae PH-1]
  misc_feature (1)..(547): NCBI GI: 261354552 Blast Desc: T-complex protein 1 subunit eta [Verticillium albo-atrum VaMs.102]
  misc_feature (1)..(547): NCBI GI: 85091515 Blast Desc: T-complex protein 1 subunit eta [Neurospora crassa OR74A] gi|28920332|gb|EAA29703.1| T-complex protein 1 subunit eta [Neurospora crassa OR74A]
  misc_feature (1)..(547): NCBI GI: 156039699 Blast Desc: conserved [Sclerotinia sclerotiorum 1980] gi|154697723|gb|EDN97461.1| conserved [Sclerotinia sclerotiorum 1980]
  misc_feature (1)..(547): NCBI GI: 171679832 Blast Desc: protein product [Podospora anserina] gi|170939542|emb|CAP64769.1| protein product [Podospora anserina]
  misc_feature (1)..(547): NCBI GI: 145608184 Blast Desc: conserved [Magnaporthe grisea 70-15] gi|145015683|gb|EDK00173.1| conserved [Magnaporthe grisea 70-15]
  misc_feature (1)..(544): NCBI GI: 116204179 Blast Desc: conserved [Chaetomium globosum CBS 148.51] gi|88176101|gb|EAQ83569.1| conserved [Chaetomium globosum CBS 148.51]
  misc_feature (1)..(547): NCBI GI: 154293865 Blast Desc: BC1G_14004 [Botryotinia fuckeliana B05.10] gi|150845159|gb|EDN20352.1| BC1G_14004 [Botryotinia fuckeliana B05.10]
  misc_feature (1)..(547): NCBI GI: 189194429 Blast Desc: T-complex protein 1 subunit eta [Pyrenophora tritici-repentis Pt-1C-BFP] gi|187979117|gb|EDU45743.1| T-complex protein 1 subunit eta [Pyrenophora tritici-repentis Pt-1C-BFP]
  misc_feature (1)..(544): NCBI GI: 212528286 Blast Desc: t-complex protein 1, eta subunit, [Penicillium marneffei ATCC 18224] gi|210073698|gb|EEA27785.1| t-complex protein 1, eta subunit, [Penicillium marneffei ATCC 18224]
MSFGGQTPTIIVLKEGTDASQGKGQIISNINACQAVQATIKSTLGPYGGDLLMVDENGRQTITNDGATVMKLLDIVHPAARILVDIARSQDAEVGDGTTSVVVLAGEILKEIKDHVEQGVSSQVIIKGLRRASQMAVNKIKEIAVRTDEGNQRETLRKLAGTAMTSKLIKRNTEFFTKMVVDAVLSLDQDDLNEKLIGMKKIPGGSLTECLFVNGVAFKKTFSYAGFEQQPKSFKKPKVLCLNVELELKAEKDNAEVRVEQVSEYQAIVDAEWQIIYKKLEAAHKTGAKVVLSKLPIGDLATQYFADRDIFCAGRVSSEDMERVVQATGATVQSTCSDILPHHLGTCGSFEERQIGGERFNFFEDCPEAKTCTLILRGGAEQFIAEVERSLHDAIMIVKRAIKNQTIVGGGGACEMEVSAYLHSFADKNIRDKQQGVIKSFAKALEVIPRQLCDNAGFDATDILNKLRVEHRKGRTWAGVDFTNEGVADMMEKFVWEPALVKINAIQSAVEASCLILGVDETIRNEESAAPQAPGQALPPGAAQRALRGRGRGMPRR

SEQ ID NO: 21897 - DNA, 4980 bp, Muscodor strobelii
  misc_feature: SGI EST ID NO. CUFF.51798.0
  misc_feature: Variant of the nucleotide sequence at SEQ ID NO 21895
cttccacagcgctggaaagtcaacaaaccactgacgatctactgcccggacttacccttctcttgactacctggtccgcaaaatactccttggtcgcagccgtattatcgcgcgtcagaggacacgtccaacaccgttcgaaatgtctttcggcggccaaacaccgaccattatcgtcctgaaagagggtaccgatgcgtcacaagggaaagggcagataataagcaacataaatgcctgccaggccgttcaggccaccatcaagtccacactcggcccctatggcggggatctgttgatggtcgacgagaatggcagacagaccatcaccaacgacggcgccaccgtcatgaagcttctcgacattgtccaccccgccgcccgaatcctcgtcgacatcgcccggtcccaagacgctgaagtaggagatggaaccacctccgtagtcgtcctggccggagagatcctgaaggagatcaaggaccatgtcgaacagggcgtcagttcacaggtcatcatcaagggtctgagaagagcatcccagatggccgtcaacaagataaaggagatcgccgtgcgcacggacgagggcaaccaacgagagacgctacggaagctggctggtacagctatgacgagcaaactgatcaagagaaataccgagttcttcacaaagatggttgtcgacgccgtcctatcattagaccaggacgacctcaacgaaaagctgatcggtatgaagaagatacccggtggatcattgacagagtgtctctttgtcaacggtgtcgctttcaagaagaccttttcttacgctggcttcgaacaacagcccaagtccttcaagaagcctaaggtcctatgcttaaatgtggagctcgaactcaaggcagagaaggataatgccgaagtccgcgttgagcaggtttccgaataccaggccatcgttgacgccgaatggcaaatcatctataagaagctcgaggccgctcacaagactggcgccaaagtcgtgctttccaagctaccgattggagatttagcaacacagtacttcgctgatagagacatcttctgcgctggtcgtgtgtcttctgaggatatggagcgggtcgtccaggccactggcgccacagtacaatcaacatgttctgatatcctccctcatcatcttggtacttgcggatccttcgaggaacgacagatcggcggcgaacgcttcaattttttcgaagactgccccgaagccaagacctgcacacttatcctacgtggtggtgccgagcagttcatcgcagaggtagagcgctctctacacgatgctatcatgatcgtaaagcgagcgatcaagaaccagacaatcgtcggcggcggtggtgcctgtgagatggaggtttctgcgtacctacattccttcgccgacaagaacatccgcgacaagcagcagggtgtcatcaaatcgttcgccaaagccctcgaggttatccctcggcagctgtgcgacaacgccggctttgacgcaacggatatactcaacaagcttcgcgttgaacaccgaaagggacgtacttgggcgggtgttgacttcaccaacgagggtgtcgccgatatgatggagaaattcgtatgggagcctgctctcgtcaagatcaacgctattcagtctgccgtcgaggctagttgtttgatcctcggcgtagatgagacgattcgcaacgaggagagcgcagcgcctcaggcgcccggacaggccttaccccctggagcagcccaaagggctttgaggggacgtggaaggggtatgccgcgccggtgagcgcattaaaaaggtgttgagctacgaatgagtctcaggctagcgatgtataatacctaaaacgcttggctggtagtagatttggtattaatgaatagaggacggcggacgtcccatgaagacaatgaacctcaaatgatatcttgtgactgtaatttaaatggaatactatataccggactatgctttgtcgctgactttttaatccaagagtaggtatcaatccgcgtcgccgcggcgctcggtctatgcctcgctatatatcaatttaagttattcaagtgaatcgaaaacaacatcatatatactactccttttctgtcggccctctgccccctccacaatgtcatcatcaacactcatatgcttctcgctcccacctcccggatccacgtccttccggtgttcgttgtcatcgagtagatgatccgacagtcccaaatcgtcgatatccatacctgagccgtgatgtggtgtcgaggatggtgatggggatgagctgtctggatgctctaatagcatcgccatgtcacggtctacggcgtcttcgtcgtggtcgtgggttatgggtgtggcgcggggtgagcggtgcgatgggctgtctggatcggcgaggagggtgtggaaggtgtcgtggtctgtgtcgtgtccgcgtagggcgtgactgggcagggttgggtgagaggtgtgggggctgtattctaggtcgtgggctgagagggaggtgtgaggtagttgtgaggatggagctggttgagtgtgatgatggtggtggtgatggtgatggtgacgctcgtggtggtagtgctcgcgtgagtgaaaagtgtggaaagtggatgatgcatcatgatggtgagaatgagaatgatcgtgtgaaaggtggtgtggcggctgctgagatattatctgaggatctatagggtgatatatgtcggcgtcgtgaagcgaggcgagcgttgctgctgccgatgcgtggtgaggctcgccatgaagcatgaggtgatgtgttggagagtgcatgacgggcgaggtaggggtctggaaaggtgggtttaggatagatgataggtcacttgggtgggcgtatgggctaggtgttgtaagatcatggtgtgaagcagcctcatgtatggagtcatgcaatccgagaattcgagtagtatcatccacgcctccatgatcatggagcggagggtgtggggagatgagcagagcagcggcatcgtcagacagattgcgcatcccgtccaattcctgatacggtcgcgatgcactatggaaagtatgtgactcggcttctgtttggctttggtttggtatttgattttgattctgtgtagatggtgttttgcctaggtctttgcattggtcacatgtcttaattacatcggagactgtttctttaattcggctccagtggtatttctcggcgatgaccgatgtcgtcttgttgatacctacgtggccaccatcctcgtggaacctccgagcaaccgccatttgccggatcgggtcgctgatgacctccttgcctttgagcatcaagacgtcgttatcgaggagcttatagtgcgtcgccgcgctccggagcctgcttttctcggcgcggtcagatccgtttggatagcgcccgtactttaggtagaacttgattttgtcgaaacgttcttcactcacgagaagcgggtcgccaccttcgctggaatcggtgcccaggtcccggccataaatgatggcgtcgacaagccggtccgggtacgacttaaggttaccacagcccttaactcggccaatacgcttgaaaccgagagcatcccagatcttgcaagatgcgacattcgtttcgtacactagattgaacacggaatacgaatagcctagcttcggagcccagtccaaataagtttcacccataagccgaccaacaccacggttgcgggcagcatccgtgaccaggaagccggcgttgcacacgtgactactccggccgggataattgggcttgatgtagaaactacctaggcattcgtgggaccagtctttaccttcaacgacttcatctgggctattgatctgaccgagaagcatgacacctgcaaaattctgtagccagtacgcggagaacttctcgaacggcatcggatctatcattggataggtgtcgccaccttctatctccttggcaaactggtctgaaagatagcgcagtagcgaaagtggaacctggtcacgggatacgaaaggtacaatagtcgcgatggtttggcgatctctcagggtgacctggcgcggccggatgtttacgggcaacgccggcttattcggatccgggtacggaagagcaccggaaacccgatgaatcgtcggagccgacggatcatccataatggccggcatgcctagaaaatgcgcgctagggcggcactcttaatgcagggatcctagacatgttctgcatcagcgctactacacacaaaagtcttgaggctttggatccgtgctgtctcttaccgaactgcaccctgggttggaccggggatctgataagacaagtccggttggtctcgtaccacaggatcaacagggtacgccggtgtcgattaaggttacaatggaaccccaattgtgctctctgtgccgaaatattcgtcgctggtgacgagaaatgccgccatgatttatggaggggagttctgggcctgacgcatgacctgggagccgaggtcggttgctaaagccccatctgcgcccttctgtcttctctaggttaacttaagccggctaaacaccggcgacctgcttctatcctcatcaactaggcattcagcgttcgtgttcatttactcaccttgattacttgggtctcgttgtaggcgcacgagtcatttgtatcaatagtggcatttactacgcccttcggatatctttaggggcagttgaagtccgcttggcggtctcctgcacaacctctcagcgggctcccgaaaaccccgcgatacaccataccaaacaggtttccacgcaaacaaaagaaatgagactggacatctgcggaagctcgaatggctatcttgctcggatgactatctctgaatagatgtcgattcatgcacgtagtatataatcacttgtgtcctcctgatcggagtcgaatcctcaacagg

SEQ ID NO: 21898 - DNA, 2124 bp, Muscodor strobelii
  misc_feature: SGI cDNA ID NO. 567424
  misc_feature: Encodes the peptide sequence at SEQ ID NO 21899
atgccggccattatggatgatccgtcggctccgacgattcatcgggtttccggtgctcttccgtacccggatccgaataagccggcgttgcccgtaaacatccggccgcgccaggtcaccctgagagatcgccaaaccatcgcgactattgtacctttcgtatcccgtgaccaggttccactttcgctactgcgctatctttcagaccagtttgccaaggagatagaaggtggcgacacctatccaatgatagatccgatgccgttcgagaagttctccgcgtactggctacagaattttgcaggtgtcatgcttctcggtcagatcaatagcccagatgaagtcgttgaaggtaaagactggtcccacgaatgcctaggtagtttctacatcaagcccaattatcccggccggagtagtcacgtgtgcaacgccggcttcctggtcacggatgctgcccgcaaccgtggtgttggtcggcttatgggtgaaacttatttggactgggctccgaagctaggctattcgtattccgtgttcaatctagtgtacgaaacgaatgtcgcatcttgcaagatctgggatgctctcggtttcaagcgtattggccgagttaagggctgtggtaaccttaagtcgtacccggaccggcttgtcgacgccatcatttatggccgggacctgggcaccgattccagcgaaggtggcgacccgcttctcgtgagtgaagaacgtttcgacaaaatcaagttctacctaaagtacgggcgctatccaaacggatctgaccgcgccgagaaaagcaggctccggagcgcggcgacgcactataagctcctcgataacgacgtcttgatgctcaaaggcaaggaggtcatcagcgacccgatccggcaaatggcggttgctcggaggttccacgaggatggtggccacgtaggtatcaacaagacgacatcggtcatcgccgagaaataccactggagccgaattaaagaaacagtctccgatgtaattaagacatgtgaccaatgcaaagacctaggcaaaacaccatctacacagaatcaaaatcaaataccaaaccaaagccaaacagaagccgagtcacatactttccatagtgcatcgcgaccgtatcaggaattggacgggatgcgcaatctgtctgacgatgccgctgctctgctcatctccccacaccctccgctccatgatcatggaggcgtggatgatactactcgaattctcggattgcatgactccatacatgaggctgcttcacaccatgatcttacaacacctagcccatacgcccacccaagtgacctatcatctatcctaaacccacctttccagacccctacctcgcccgtcatgcactctccaacacatcacctcatgcttcatggcgagcctcaccacgcatcggcagcagcaacgctcgcctcgcttcacgacgccgacatatatcaccctatagatcctcagataatatctcagcagccgccacaccacctttcacacgatcattctcattctcaccatcatgatgcatcatccactttccacacttttcactcacgcgagcactaccaccacgagcgtcaccatcaccatcaccaccaccatcatcacactcaaccagctccatcctcacaactacctcacacctccctctcagcccacgacctagaatacagcccccacacctctcacccaaccctgcccagtcacgccctacgcggacacgacacagaccacgacaccttccacaccctcctcgccgatccagacagcccatcgcaccgctcaccccgcgccacacccataacccacgaccacgacgaagacgccgtagaccgtgacatggcgatgctattagagcatccagacagctcatccccatcaccatcctcgacaccacatcacggctcaggtatggatatcgacgatttgggactgtcggatcatctactcgatgacaacgaacaccggaaggacgtggatccgggaggtgggagcgagaagcatatgagtgttgatgatgacattgtggagggggcagagggccgacagaaaaggagtagtatatatgatgttgttttcgattcacttgaataa

SEQ ID NO: 21899 - protein, 707 aa, Muscodor strobelii
  misc_feature: SGI Peptide ID NO. 567424
  misc_feature (117)..(200): Pfam Id: PF00583 Pfam Desc: Acetyltransferase (GNAT) family
  misc_feature (307)..(346): Pfam Id: PF09337 Pfam Desc: His(2)-Cys(2) zinc finger
  misc_feature (5)..(539): NCBI GI: 39942462 Blast Desc: MGG_03311 [Magnaporthe grisea 70-15] gi|145015682|gb|EDK00172.1| MGG_03311 [Magnaporthe grisea 70-15]
  misc_feature (1)..(514): NCBI GI: 256732918 Blast Desc: [Nectria haematococca mpVI 77-13-4]
  misc_feature (1)..(514): NCBI GI: 46123859 Blast Desc: FG06307.1 [Gibberella zeae PH-1]
  misc_feature (1)..(372): NCBI GI: 156039697 Blast Desc: SS1G_11985 [Sclerotinia sclerotiorum 1980] gi|154697722|gb|EDN97460.1| SS1G_11985 [Sclerotinia sclerotiorum 1980]
  misc_feature (29)..(501): NCBI GI: 116204177 Blast Desc: CHGG_09972 [Chaetomium globosum CBS 148.51] gi|88176100|gb|EAQ83568.1| CHGG_09972 [Chaetomium globosum CBS 148.51]
  misc_feature (1)..(350): NCBI GI: 171679830 Blast Desc: protein product [Podospora anserina] gi|170939541|emb|CAP64768.1| protein product [Podospora anserina]
  misc_feature (1)..(500): NCBI GI: 261354554 Blast Desc: SPT10 [Verticillium albo-atrum VaMs.102]
  misc_feature (1)..(351): NCBI GI: 261206270 Blast Desc: histone acetyltransferase Spt10 [Ajellomyces dermatitidis SLH14081] gi|239592931|gb|EEQ75512.1| histone acetyltransferase Spt10 [Ajellomyces dermatitidis SLH14081]
  misc_feature (1)..(351): NCBI GI: 239610895 Blast Desc: histone acetyltransferase Spt10 [Ajellomyces dermatitidis ER-3]
  misc_feature (1)..(351): NCBI GI: 225560601 Blast Desc: conserved [Ajellomyces capsulatus G186AR]
MPAIMDDPSAPTIHRVSGALPYPDPNKPALPVNIRPRQVTLRDRQTIATIVPFVSRDQVPLSLLRYLSDQFAKEIEGGDTYPMIDPMPFEKFSAYWLQNFAGVMLLGQINSPDEVVEGKDWSHECLGSFYIKPNYPGRSSHVCNAGFLVTDAARNRGVGRLMGETYLDWAPKLGYSYSVFNLVYETNVASCKIWDALGFKRIGRVKGCGNLKSYPDRLVDAIIYGRDLGTDSSEGGDPLLVSEERFDKIKFYLKYGRYPNGSDRAEKSRLRSAATHYKLLDNDVLMLKGKEVISDPIRQMAVARRFHEDGGHVGINKTTSVIAEKYHWSRIKETVSDVIKTCDQCKDLGKTPSTQNQNQIPNQSQTEAESHTFHSASRPYQELDGMRNLSDDAAALLISPHPPLHDHGGVDDTTRILGLHDSIHEAASHHDLTTPSPYAHPSDLSSILNPPFQTPTSPVMHSPTHHLMLHGEPHHASAAATLASLHDADIYHPIDPQIISQQPPHHLSHDHSHSHHHDASSTFHTFHSREHYHHERHHHHHHHHHHTQPAPSSQLPHTSLSAHDLEYSPHTSHPTLPSHALRGHDTDHDTFHTLLADPDSPSHRSPRATPITHDHDEDAVDRDMAMLLEHPDSSSPSPSSTPHHGSGMDIDDLGLSDHLLDDNEHRKDVDPGGGSEKHMSVDDDIVEGAEGRQKRSSIYDVVFDSLE

SEQ ID NO: 21900 - DNA, 4491 bp, Muscodor strobelii
  misc_feature: SGI EST ID NO. CUFF.51799.3
  misc_feature: Variant of the nucleotide sequence at SEQ ID NO 21898
gattatatactacgtgcatgaatcgacatctattcagagatagtcatccgagcaagatagccattcgagcttccgcagatgtccagtctcatttcttttgtttgcgtggaaacctgtttggtatggtgtatcgcggggttttcgggagcccgctgagaggttgtgcaggagaccgccaagcggacttcaactgcccctaaagatatccgaagggcgtagtaaatgccactattgatacaaatgactcgtgcgcctacaacgagacccaagtaatcaaggtgagtaaatgaacacgaacgctgaatgcctagttgatgaggatagaagcaggtcgccggtgtttagccggcttaagttaacctagagaagacagaagggcgcagatggggctttagcaaccgacctcggctcccaggtcatgcgtcaggcccagaactcccctccataaatcatggcggcatttctcgtcaccagcgacgaatatttcggcacagagagcacaattggggttccattgtaaccttaatcgacaccggcgtaccctgttgatcctgtggtacgagaccaaccggacttgtcttatcagatccccggtccaacccagggtgcagttcggatccctgcattaagagtgccgccctagcgcgcattttctaggcatgccggccattatggatgatccgtcggctccgacgattcatcgggtttccggtgctcttccgtacccggatccgaataagccggcgttgcccgtaaacatccggccgcgccaggtcaccctgagagatcgccaaaccatcgcgactattgtacctttcgtatcccgtgaccaggttccactttcgctactgcgctatctttcagaccagtttgccaaggagatagaaggtggcgacacctatccaatgatagatccgatgccgttcgagaagttctccgcgtactggctacagaattttgcaggtgtcatgcttctcggtcagatcaatagcccagatgaagtcgttgaaggtaaagactggtcccacgaatgcctaggtagtttctacatcaagcccaattatcccggccggagtagtcacgtgtgcaacgccggcttcctggtcacggatgctgcccgcaaccgtggtgttggtcggcttatgggtgaaacttatttggactgggctccgaagctaggctattcgtattccgtgttcaatctagtgtacgaaacgaatgtcgcatcttgcaagatctgggatgctctcggtttcaagcgtattggccgagttaagggctgtggtaaccttaagtcgtacccggaccggcttgtcgacgccatcatttatggccgggacctgggcaccgattccagcgaaggtggcgacccgcttctcgctccggagcgcggcgacgcactataagctcctcgataacgacgtcttgatgctcaaaggcaaggaggtcatcagcgacccgatccggcaaatggcggttgctcggaggttccacgaggatggtggccacgtaggtatcaacaagacgacatcggtcatcgccgagaaataccactggagccgaattaaagaaacagtctccgatgtaattaagacatgtgaccaatgcaaagacctaggcaaaacaccatctacacagaatcaaaatcaaataccaaaccaaagccaaacagaagccgagtcacatactttccatagtgcatcgcgaccgtatcaggaattggacgggatgcgcaatctgtctgacgatgccgctgctctgctcatctccccacaccctccgctccatgatcatggaggcgtggatgatactactcgaattctcggattgcatgactccatacatgaggctgcttcacaccatgatcttacaacacctagcccatacgcccacccaagtgacctatcatctatcctaaacccacctttccagacccctacctcgcccgtcatgcactctccaacacatcacctcatgcttcatggcgagcctcaccacgcatcggcagcagcaacgctcgcctcgcttcacgacgccgacatatatcaccctatagatcctcagataatatctcagcagccgccacaccacctttcacacgatcattctcattctcaccatcatgatgcatcatccactttccacacttttcactcacgcgagcactaccaccacgagcgtcaccatcaccatcaccaccaccatcatcacactcaaccagctccatcctcacaactacctcacacctccctctcagcccacgacctagaatacagcccccacacctctcacccaaccctgcccagtcacgccctacgcggacacgacacagaccacgacaccttccacaccctcctcgccgatccagacagcccatcgcaccgctcaccccgcgccacacccataacccacgaccacgacgaagacgccgtagaccgtgacatggcgatgctattagagcatccagacagctcatccccatcaccatcctcgacaccacatcacggctcaggtatggatatcgacgatttgggactgtcggatcatctactcgatgacaacgaacaccggaaggacgtggatccgggaggtgggagcgagaagcatatgagtgttgatgatgacattgtggagggggcagagggccgacagaaaaggagtagtatatatgatgttgttttcgattcacttgaataacttaaattgatatatagcgaggcatagaccgagcgccgcggcgacgcggattgatacctactcttggattaaaaagtcagcgacaaagcatagtccggtatatagtattccatttaaattacagtcacaagatatcatttgaggttcattgtcttcatgggacgtccgccgtcctctattcattaataccaaatctactaccagccaagcgttttaggtattatacatcgctagcctgagactcattcgtagctcaacacctttttaatgcgctcaccggcgcggcataccccttccacgtcccctcaaagccctttgggctgctccagggggtaaggcctgtccgggcgcctgaggcgctgcgctctcctcgttgcgaatcgtctcatctacgccgaggatcaaacaactagcctcgacggcagactgaatagcgttgatcttgacgagagcaggctcccatacgaatttctccatcatatcggcgacaccctcgttggtgaagtcaacacccgcccaagtacgtccctttcggtgttcaacgcgaagcttgttgagtatatccgttgcgtcaaagccggcgttgtcgcacagctgccgagggataacctcgagggctttggcgaacgatttgatgacaccctgctgcttgtcgcggatgttcttgtcggcgaaggaatgtaggtacgcagaaacctccatctcacaggcaccaccgccgccgacgattgtctggttcttgatcgctcgctttacgatcatgatagcatcgtgtagagagcgctctacctctgcgatgaactgctcggcaccaccacgtaggataagtgtgcaggtcttggcttcggggcagtcttcgaaaaaattgaagcgttcgccgccgatctgtcgttcctcgaaggatccgcaagtaccaagatgatgagggaggatatcagaacatgttgattgtactgtggcgccagtggcctggacgacccgctccatatcctcagaagacacacgaccagcgcagaagatgtctctatcagcgaagtactgtgttgctaaatctccaatcggtagcttggaaagcacgactttggcgccagtcttgtgagcggcctcgagcttcttatagatgatttgccattcggcgtcaacgatggcctggtattcggaaacctgctcaacgcggacttcggcattatccttctctgccttgagttcgagctccacatttaagcataggaccttaggcttcttgaaggacttgggctgttgttcgaagccagcgtaagaaaaggtcttcttgaaagcgacaccgttgacaaagagacactctgtcaatgatccaccgggtatcttcttcataccgatcagcttttcgttgaggtcgtcctggtctaatgataggacggcgtcgacaaccactgtataaagactgtcagctgtgggcaatccaggggtagactgcgatgtcgctcactctttgtgaagaactcggtatttctcttgatcagtttgctcgtcatagctgtaccagccagcttccgtagcgtctctcgttggttgccctcgtccgtgcgcacggcgatctcctttatcttgttgacggccatctgggatgctcttctcagacccttgatgatgacctgtgaactgacgccctgttcgacatggtccttgatctccttcaggatctctccggccaggacgactacggaggtggttccatctcctacttcagcgtcttgggaccgggcgatgtcgacgaggattcgggcggcggggtggacaatgtcgagaagctaa

SEQ ID NO: 21901 - DNA, 1269 bp, Muscodor strobelii
  misc_feature: SGI cDNA ID NO. 567425
  misc_feature: Reduced expression when VOC is produced
  misc_feature: Encodes the peptide sequence at SEQ ID NO 21902
atgctcaaaggcaaggaggtcatcagcgacccgatccggcaaatggcggttgctcggaggttccacgaggatggtggccacgtaggtatcaacaagacgacatcggtcatcgccgagaaataccactggagccgaattaaagaaacagtctccgatgtaattaagacatgtgaccaatgcaaagacctaggcaaaacaccatctacacagaatcaaaatcaaataccaaaccaaagccaaacagaagccgagtcacatactttccatagtgcatcgcgaccgtatcaggaattggacgggatgcgcaatctgtctgacgatgccgctgctctgctcatctccccacaccctccgctccatgatcatggaggcgtggatgatactactcgaattctcggattgcatgactccatacatgaggctgcttcacaccatgatcttacaacacctagcccatacgcccacccaagtgacctatcatctatcctaaacccacctttccagacccctacctcgcccgtcatgcactctccaacacatcacctcatgcttcatggcgagcctcaccacgcatcggcagcagcaacgctcgcctcgcttcacgacgccgacatatatcaccctatagatcctcagataatatctcagcagccgccacaccacctttcacacgatcattctcattctcaccatcatgatgcatcatccactttccacacttttcactcacgcgagcactaccaccacgagcgtcaccatcaccatcaccaccaccatcatcacactcaaccagctccatcctcacaactacctcacacctccctctcagcccacgacctagaatacagcccccacacctctcacccaaccctgcccagtcacgccctacgcggacacgacacagaccacgacaccttccacaccctcctcgccgatccagacagcccatcgcaccgctcaccccgcgccacacccataacccacgaccacgacgaagacgccgtagaccgtgacatggcgatgctattagagcatccagacagctcatccccatcaccatcctcgacaccacatcacggctcaggtatggatatcgacgatttgggactgtcggatcatctactcgatgacaacgaacaccggaaggacgtggatccgggaggtgggagcgagaagcatatgagtgttgatgatgacattgtggagggggcagagggccgacagaaaaggagtagtatatatgatgttgttttcgattcacttgaataa

SEQ ID NO: 21902 - protein, 422 aa, Muscodor strobelii
  misc_feature: SGI Peptide ID NO. 567425
  misc_feature (22)..(61): Pfam Id: PF09337 Pfam Desc: His(2)-Cys(2) zinc finger
  misc_feature (1)..(229): NCBI GI: 46123859 Blast Desc: FG06307.1 [Gibberella zeae PH-1]
  misc_feature (1)..(229): NCBI GI: 256732918 Blast Desc: [Nectria haematococca mpVI 77-13-4]
  misc_feature (1)..(68): NCBI GI: 39942462 Blast Desc: MGG_03311 [Magnaporthe grisea 70-15] gi|145015682|gb|EDK00172.1| MGG_03311 [Magnaporthe grisea 70-15]
  misc_feature (1)..(87): NCBI GI: 156039697 Blast Desc: SS1G_11985 [Sclerotinia sclerotiorum 1980] gi|154697722|gb|EDN97460.1| SS1G_11985 [Sclerotinia sclerotiorum 1980]
  misc_feature (1)..(75): NCBI GI: 116204177 Blast Desc: CHGG_09972 [Chaetomium globosum CBS 148.51] gi|88176100|gb|EAQ83568.1| CHGG_09972 [Chaetomium globosum CBS 148.51]
  misc_feature (1)..(79): NCBI GI: 154293863 Blast Desc: BC1G_14003 [Botryotinia fuckeliana B05.10] gi|150845158|gb|EDN20351.1| BC1G_14003 [Botryotinia fuckeliana B05.10]
  misc_feature (1)..(215): NCBI GI: 261354554 Blast Desc: SPT10 [Verticillium albo-atrum VaMs.102]
  misc_feature (1)..(65): NCBI GI: 171679830 Blast Desc: protein product [Podospora anserina] gi|170939541|emb|CAP64768.1| protein product [Podospora anserina]
  misc_feature (1)..(67): NCBI GI: 190345911 Blast Desc: PGUG_01979 [Pichia guilliermondii ATCC 6260]
  misc_feature (1)..(81): NCBI GI: 199429098 Blast Desc: DEHA2A10406p [Debaryomyces hansenii]
  misc_feature: Useful for introducing or modulating the production of volatile compounds
MLKGKEVISDPIRQMAVARRFHEDGGHVGINKTTSVIAEKYHWSRIKETVSDVIKTCDQCKDLGKTPSTQNQNQIPNQSQTEAESHTFHSASRPYQELDGMRNLSDDAAALLISPHPPLHDHGGVDDTTRILGLHDSIHEAASHHDLTTPSPYAHPSDLSSILNPPFQTPTSPVMHSPTHHLMLHGEPHHASAAATLASLHDADIYHPIDPQIISQQPPHHLSHDHSHSHHHDASSTFHTFHSREHYHHERHHHHHHHHHHTQPAPSSQLPHTSLSAHDLEYSPHTSHPTLPSHALRGHDTDHDTFHTLLADPDSPSHRSPRATPITHDHDEDAVDRDMAMLLEHPDSSSPSPSSTPHHGSGMDIDDLGLSDHLLDDNEHRKDVDPGGGSEKHMSVDDDIVEGAEGRQKRSSIYDVVFDSLE

SEQ ID NO: 21903 - DNA, 4491 bp, Muscodor strobelii; identical to SEQ ID NO: 21900
  misc_feature: SGI EST ID NO. CUFF.51799.3
  misc_feature: Variant of the nucleotide sequence at SEQ ID NO 21901

SEQ ID NO: 21904 - DNA, 1797 bp, Muscodor strobelii
  misc_feature: SGI cDNA ID NO. 567426
  misc_feature: Encodes the peptide sequence at SEQ ID NO 21905
atggcagatgagaggtcgtcaagacgaagccttgcaactggagacgacatggagggcaatctcaagcaagtttacgaagaccttgaggatgccaggaacaaatttgtgaatgcgctacgggtcgacttattccaagcagcatgcaaatatacccgcgagatttataaagcccgtcttatgttcgaggaagacatccagtctcatgccgacgatgaattcaaaaccgcctccagagaaaagatgctagaagcgatcgatacgaaaagggattacatcgctcgaacacccaatggacatgtattgatagacttcacaatccgtgatcttcgcaatgctcaattcatgaacatcgggaggtcagaggccagtcacaaaagccaagactcgcgtcgccacacaattaagatagaagcttcgcgctctccgccgcgcctgattcctgacagtccagcgcccctccgccaaaccgcgttcgaagccgtcaaagcagcgtacgggagtgtccgccgccattatacctccagaccctcctccgagtactcgtctctcacccccttgttggaccgacctgccgttcgcccccttcagtataaagtgaacagccgccgtgtctttagtcttggttgtaggcccagccctaatcttagggctgctctccttcaagtgtcagagcccttgtcccagaaagaatgctcgcgctgtctcgctggcaacagcttgtgggatgtatgcgttggcgggagggccggccaagcctgcgctagctgtcactataatgggaaaggaagcctctgtaacttcgtagaatcatcagcaaagattcactatgctcgcgccaagcgaacacgagagacgacgctggacgacttcgaaattacaggtttatcaaaacaccgtcgagtggaagatggagtagattcagatgcatttagcgaatcgtcaagtttggtcatatctcatggagaaagctatggtattgatgatagcaacgttgattctgatgaggacgaatgcgaccccagcttcatcttcgaattcccaccacgttcaaaaaggttttgcgtgctgcgttgtccggagcccaaatgtgatcaccggttccaatatagccctttcagaaaacccgggagctatttacaacacttcactcgcagcgatcattcacagtggtacccaatgacgaagcaggatctcgcaggcatcatggtccatcagacgcgtgttgtggaagggatggatgtgagatctgcatacaattgtaataacaagaactatcggaaacgagaaaatacggtgtgcgaggattccaagctcctggccccaatggccgtgaagagtgattggatttacgacagattgccccaaagggaaattcagaaggcacttaaagaactcgagaacgcacgaggaagtagtgctcagagaatggaagcgtcagacatgagacgctttcctcggccaccctggctgccatatgatagccctgagttgggaacatcaagcacacccaagaaataccagtccaatctatcggccccattgacgaacccatgtttcctaacctttctcgaaagccaccaagtggcgcgaaaatcaatagcgctgaacatgagcaagactttggccacagcgatcgattacgcgaggcgaagacgcgatccttacggcaacatccacgcagaagtactggccctcacctgcacaaccgctacgaatcggaggttttggacgactacgtgtgaccaacctgacggtatcaagcttgagcaagggtccatgcattatacggaagagtaa

SEQ ID NO: 21905 - protein, 598 aa, Muscodor strobelii
  misc_feature: SGI Peptide ID NO. 567426
MADERSSRRSLATGDDMEGNLKQVYEDLEDARNKFVNALRVDLFQAACKYTREIYKARLMFEEDIQSHADDEFKTASREKMLEAIDTKRDYIARTPNGHVLIDFTIRDLRNAQFMNIGRSEASHKSQDSRRHTIKIEASRSPPRLIPDSPAPLRQTAFEAVKAAYGSVRRHYTSRPSSEYSSLTPLLDRPAVRPLQYKVNSRRVFSLGCRPSPNLRAALLQVSEPLSQKECSRCLAGNSLWDVCVGGRAGQACASCHYNGKGSLCNFVESSAKIHYARAKRTRETTLDDFEITGLSKHRRVEDGVDSDAFSESSSLVISHGESYGIDDSNVDSDEDECDPSFIFEFPPRSKRFCVLRCPEPKCDHRFQYSPFRKPGSYLQHFTRSDHSQWYPMTKQDLAGIMVHQTRVVEGMDVRSAYNCNNKNYRKRENTVCEDSKLLAPMAVKSDWIYDRLPQREIQKALKELENARGSSAQRMEASDMRRFPRPPWLPYDSPELGTSSTPKKYQSNLSAPLTNPCFLTFLESHQVARKSIALNMSKTLATAIDYARRRRDPYGNIHAEVLALTCTTATNRRFWTTTCDQPDGIKLEQGSMHYTEE

SEQ ID NO: 21906 - DNA, 564 bp, Muscodor strobelii
  misc_feature: SGI EST ID NO. CUFF.51509.0
  misc_feature: Variant of the nucleotide sequence at SEQ ID NO 21904
tggatgtgagatctgcatacaattgtaataacaagaactatcggaaacgagaaaatacggtgtgcgaggattccaagctcctggccccaatggccgtgaagagtgattggatttacgacagattgccccaaagggaaattcagaaggcacttaaagaactcgagaacgcacgaggaagtagtgctcagagaatggaagcgtcagacatgagacgctttcctcggccaccctggctgccatatgatagccctgagttgggaacatcaagcacacccaagaaataccagtccaatctatcggccccattgacgaacccatgtttcctaacctttctcgaaagccaccaagtggcgcgaaaatcaatagcgctgaacatgagcaagactttggccacagcgatcgattacgcgaggcgaagacgcgatccttacggcaacatccacgcagaagtactggccctcacctgcacaaccgctacgaatcggaggttttggacgactacgtgtgaccaacctgacggtatcaagcttgagcaagggtccatgcattatacggaagagtaag

SEQ ID NO: 21907 - DNA, 1671 bp, Muscodor strobelii
  misc_feature: SGI cDNA ID NO. 567427
  misc_feature: Encodes the peptide sequence at SEQ ID NO 21908
atggccgtgccgcgactccaagctgacctaccagtcacggactaccctgtcttggattcgtccgagtcgactgacgacaaaaaggtcagctatgctgagggctcgattccaccgtctgaagatgacttgacgctcaagagtaatccgttcgcggatcctagtgttgcgattcattggagaaaggtgtatgatgatgctcattatgagtgtcgtcatctcttcgaccctgcgctggagtggaccgaggaagaggagaggaagattgtgcgtaaactagactggagagtgtgcctatgggcttgcatcatgttcttcgcgttgcaagttgatagaaacaacctcgtccaagtagtatcagatacttttttacaagatctcaaactaaacacgaacgactacaacacaggaaacacgatattctacgtctcattcttcttcgccgagctcccatcccaattgatatccaagaagatcggacccgatcgctggatccctatgcagatctgtttatggtcgattgtcgcagctctgcaaagtctcttaagcggacgatcgagtttcttcgccactagatcgcttctgggtctgctcgagggcggatttatcccagatgtcgtgttatggctcagttatttctacacatctcgggagctcccaattcgtctgagctatttctggacagcactatccgtcacaggcgtagctgcatccctcctcgcgttcgctctcttccatctgcgcggagtggcaggttgggccggatggcgctggctattcctcatcgaaggcctaatcactcttttagtgggtatactatcattcttcatgatgcccgcctcagccgcgcagacgaaagcatggttccgtcccaacggatggttttcagaccgtgaggtctccattgtcgtaaaccgggtgctacgcgacgacccttcaaaaggcgacatgcacaaccgtgaggctgtcacaccaagccgtctgtggaactgtctcaaagactatgatctttggcctttgtatgcgttaggtcttgtatgctatataccacagggaccattacaacagtacatcacgctggttctcagaggaaccggtttcagtacattcaacaccaatctcctgggtattcctgcctccgtaacacacataatattcctcatcctcctcacccgcctctccgaaaagctcaacgaacgaacctgggtcgcctcgctgcagaactggtggatactaccatgtatcatcgcccttcgcttctggccaggagcatacacggacaaatggggtacatacgcacttgtcgtaactttactatcatacccctactgtcacgcgatcctagtagcatgggtatcaaaaaactccaacaacgtcggctcgcgcagcgtatccgccgcactatacaacatggccgtgcaagccggaacagtgatctcgacattcgtctaccgggacgacgataagccgctctaccaccggggtaacttagtcttactcgggatcaatttatttgccctggtactgtttgctttcacaaaattctactatacaaagcgaaatcagcagaaggaaaaagtctggagggctatgagcgaggaggagagaaatgactatatactcaattgtaaacttgttggcagtcgacggttggatttccggtttgctcattag

SEQ ID NO: 21908 - protein, 556 aa, Muscodor strobelii
  misc_feature: SGI Peptide ID NO. 567427
  misc_feature (100)..(480): Pfam Id: PF07690 Pfam Desc: Major Facilitator Superfamily
  misc_feature (35)..(556): NCBI GI: 242772686 Blast Desc: pantothenate transporter, [Talaromyces stipitatus ATCC 10500] gi|218721706|gb|EED21124.1| pantothenate transporter, [Talaromyces stipitatus ATCC 10500]
  misc_feature (19)..(556): NCBI GI: 145230497 Blast Desc: An01g11450 [Aspergillus niger] gi|134055675|emb|CAK44049.1| protein product [Aspergillus niger]
  misc_feature (21)..(556): NCBI GI: 169770149 Blast Desc: [Aspergillus oryzae RIB40] gi|83767403|dbj|BAE57542.1| protein product [Aspergillus oryzae]
  misc_feature (21)..(556): NCBI GI: 238487474 Blast Desc: allantoate permease, [Aspergillus flavus NRRL3357] gi|220699854|gb|EED56193.1| allantoate permease, [Aspergillus flavus NRRL3357]
  misc_feature (35)..(556): NCBI GI: 121712208 Blast Desc: MFS transporter, [Aspergillus clavatus NRRL 1] gi|119401871|gb|EAW12293.1| MFS transporter, [Aspergillus clavatus NRRL 1]
  misc_feature (24)..(556): NCBI GI: 164423159 Blast Desc: NCU09039 [Neurospora crassa OR74A] gi|157069971|gb|EAA29750.2| NCU09039 [Neurospora crassa OR74A]
  misc_feature (4)..(556): NCBI GI: 156057127 Blast Desc: SS1G_04294 [Sclerotinia sclerotiorum 1980] gi|154702080|gb|EDO01819.1| SS1G_04294 [Sclerotinia sclerotiorum 1980]
  misc_feature (18)..(556): NCBI GI: 242804648 Blast Desc: pantothenate transporter, [Talaromyces stipitatus ATCC 10500] gi|218717762|gb|EED17183.1| pantothenate transporter, [Talaromyces stipitatus ATCC 10500]
  misc_feature (37)..(556): NCBI GI: 259481303 Blast Desc: TPA: conserved [Aspergillus nidulans FGSC A4]
  misc_feature (41)..(556): NCBI GI: 50549539 Blast Desc: YALI0D00407p [Yarrowia lipolytica] gi|49648108|emb|CAG80426.1| YALI0D00407p [Yarrowia lipolytica]
MAVPRLQADLPVTDYPVLDSSESTDDKKVSYAEGSIPPSEDDLTLKSNPFADPSVAIHWRKVYDDAHYECRHLFDPALEWTEEEERKIVRKLDWRVCLWACIMFFALQVDRNNLVQVVSDTFLQDLKLNTNDYNTGNTIFYVSFFFAELPSQLISKKIGPDRWIPMQICLWSIVAALQSLLSGRSSFFATRSLLGLLEGGFIPDVVLWLSYFYTSRELPIRLSYFWTALSVTGVAASLLAFALFHLRGVAGWAGWRWLFLIEGLITLLVGILSFFMMPASAAQTKAWFRPNGWFSDREVSIVVNRVLRDDPSKGDMHNREAVTPSRLWNCLKDYDLWPLYALGLVCYIPQGPLQQYITLVLRGTGFSTFNTNLLGIPASVTHIIFLILLTRLSEKLNERTWVASLQNWWILPCIIALRFWPGAYTDKWGTYALVVTLLSYPYCHAILVAWVSKNSNNVGSRSVSAALYNMAVQAGTVISTFVYRDDDKPLYHRGNLVLLGINLFALVLFAFTKFYYTKRNQQKEKVWRAMSEEERNDYILNCKLVGSRRLDFRFAH

SEQ ID NO: 21909 - DNA, 551 bp, Muscodor strobelii
  misc_feature: SGI EST ID NO. CUFF.51521.0
  misc_feature: Variant of the nucleotide sequence at SEQ ID NO 21907
tgatgcccgcctcagccgcgcagacgaaagcatggttccgtcccaacggatggttttcagaccgtgaggtctccattgtcgtaaaccgggtgctacgcgacgacccttcaaaaggcgacatgcacaaccgtgaggctgtcacaccaagccgtctgtggaactgtctcaaagactatgatctttggcctttgtatgcgttaggtcttgtatgctatataccacagggaccattacaacagtacatcacgctggttctcagaggaaccggtttcagtacattcaacaccaatctcctgggtattcctgcctccgtaacacacataatattcctcatcctcctcacccgcctctccgaaaagctcaacgaacgaacctgggtcgcctcgctgcagaactggtggatactaccatgtatcatcgcccttcgcttctggccaggagcatacacggacaaatggggtacatacgcacttgtcgtaactttactatcatacccctactgtcacgcgatcctagtagcatgggtatcaaaaaactccaacaacgtcggc

SEQ ID NO: 21910 - DNA, 1092 bp, Muscodor strobelii
  misc_feature: SGI cDNA ID NO. 567428
  misc_feature: Reduced expression when VOC is produced
  misc_feature: Encodes the peptide sequence at SEQ ID NO 21911
atgataataagggagtttggcgtgcgccaagcccaaaaggctctggcccgtcctgtgcggcaggcctgtcgacgagctctctcgacagaaccaacccagacatccgtccctgatgtcacgccaaccgcgcagcctccttccatattcaccgccaacgccaaagtcgtctccacgcgccggagaaaacaagatgagcccgacagaatcgccaagacgtggaagacgaactgggccgcgaagacgaagctacagcccctcggcacgcaggtcgagcaggcatacaggccaggcgacctcttcaagaaccccccaggccccaaagatgtcaccctcgagctgctcatggcctcgcagtgccacatgggccaccacacctccctctggaacccggccaacgcccgctacatctacggcatccgcgagggcatccacatcatctccctcgagcagatcgctgcccatctgcgtcgcgccgcccgtctcgtcgaagaagtcacctaccacggcggtctagttctattcgtcggcacacgtccggggcagatgagggccgtgacgcaggctgcgcggctcgctggtgcatgccacttgttcaccaagtggacgccgggctccatcaccaacagcgacgtcattctcgccggcatgcagcagaagattgtcgacgagaatgatcagccgctgcaggggtttgaccgccacatgaatgaccgcaggcctctggtcccggatttggtggtttgtttcaacccgatggagaactacacgctgttgcatgagtgctccctcgccaatgtgcccactgtgggaattatcgacacgaatgctgagccttcgtgggttacgtatgctattcctgcgaatgacgatagtatgagaggcgtgaccgtcatcgccagtgttctcggtcgcgcaggtgaggcaggcaataagcgccggcttgcagatgccgcgctgggtattgttaagtggcagacaccgctcgatgttaccaagttcttggacaatgagcggaaaatgagtgaggataactatgatggtgctaagtccaaggaagtaggcgatgctcttgataaattagaaatggagtag

SEQ ID NO: 21911 - protein, 363 aa, Muscodor strobelii
  misc_feature: SGI Peptide ID NO. 567428
  misc_feature (114)..(310): Pfam Id: PF00318 Pfam Desc: Ribosomal protein S2
  misc_feature (114)..(208): Pfam Id: PF00318 Pfam Desc: Ribosomal protein S2
  misc_feature (243)..(310): Pfam Id: PF00318 Pfam Desc: Ribosomal protein S2
  misc_feature (1)..(339): NCBI GI: 256732919 Blast Desc: NECHADRAFT_103997 [Nectria haematococca mpVI 77-13-4]
  misc_feature (1)..(336): NCBI GI: 39944640 Blast Desc: MGG_04331 [Magnaporthe grisea 70-15] gi|145015070|gb|EDJ99638.1| MGG_04331 [Magnaporthe grisea 70-15]
  misc_feature (1)..(337): NCBI GI: 116204175 Blast Desc: CHGG_09971 [Chaetomium globosum CBS 148.51] gi|88176099|gb|EAQ83567.1| CHGG_09971 [Chaetomium globosum CBS 148.51]
  misc_feature (15)..(341): NCBI GI: 46123861 Blast Desc: FG06308.1 [Gibberella zeae PH-1]
  misc_feature (44)..(350): NCBI GI: 261354555 Blast Desc: 37S ribosomal protein MRP4 [Verticillium albo-atrum VaMs.102]
  misc_feature (1)..(327): NCBI GI: 156039607 Blast Desc: SS1G_11940 [Sclerotinia sclerotiorum 1980] gi|154697677|gb|EDN97415.1| SS1G_11940 [Sclerotinia sclerotiorum 1980]
  misc_feature (1)..(334): NCBI GI: 171679828 Blast Desc: protein product [Podospora anserina] gi|170939540|emb|CAP64767.1| protein product [Podospora anserina]
  misc_feature (1)..(333): NCBI GI: 189194455 Blast Desc: 37S ribosomal protein MRP4, mitochondrial precursor [Pyrenophora tritici-repentis Pt-1C-BFP] gi|187979130|gb|EDU45756.1| 37S ribosomal protein MRP4, precursor
  misc_feature (1)..(327): NCBI GI: 159130880 Blast Desc: 40S ribosomal protein S2, [Aspergillus fumigatus A1163]
  misc_feature (1)..(352): NCBI GI: 121702475 Blast Desc: 40S ribosomal protein S2, [Aspergillus clavatus NRRL 1] gi|119397645|gb|EAW08076.1| 40S ribosomal protein S2, [Aspergillus clavatus NRRL 1]
  misc_feature: Useful for introducing or modulating the production of volatile compounds
MIIREFGVRQAQKALARPVRQACRRALSTEPTQTSVPDVTPTAQPPSIFTANAKVVSTRRRKQDEPDRIAKTWKTNWAAKTKLQPLGTQVEQAYRPGDLFKNPPGPKDVTLELLMASQCHMGHHTSLWNPANARYIYGIREGIHIISLEQIAAHLRRAARLVEEVTYHGGLVLFVGTRPGQMRAVTQAARLAGACHLFTKWTPGSITNSDVILAGMQQKIVDENDQPLQGFDRHMNDRRPLVPDLVVCFNPMENYTLLHECSLANVPTVGIIDTNAEPSWVTYAIPANDDSMRGVTVIASVLGRAGEAGNKRRLADAALGIVKWQTPLDVTKFLDNERKMSEDNYDGAKSKEVGDALDKLEME

SEQ ID NO: 21912 - DNA, 1305 bp, Muscodor strobelii
  misc_feature: SGI EST ID NO. CUFF.51528.0
  misc_feature: Variant of the nucleotide sequence at SEQ ID NO 21910
gagacattgaacctcgccgtcgttgctaatacgtccagatccgccaccaacccccaacggcatatcaaccaattgagccatgataataagggagtttggcgtgcgccaagcccaaaaggctctggcccgtcctgtgcggcaggcctgtcgacgagctctctcgacagaaccaacccagacatccgtccctgatgtcacgccaaccgcgcagcctccttccatattcaccgccaacgccaaagtcgtctccacgcgccggagaaaacaagatgagcccgacagaatcgccaagacgtggaagacgaactgggccgcgaagacgaagctacagcccctcggcacgcaggtcgagcaggcatacaggccaggcgacctcttcaagaaccccccaggccccaaagatgtcaccctcgagctgctcatggcctcgcagtgccacatgggccaccacacctccctctggaacccggccaacgcccgctacatctacggcatccgcgagggcatccacatcatctccctcgagcagatcgctgcccatctgcgtcgcgccgcccgtctcgtcgaagaagtcacctaccacggcggtctagttctattcgtcggcacacgtccggggcagatgagggccgtgacgcaggctgcgcggctcgctggtgcatgccacttgttcaccaagtggacgccgggctccatcaccaacagcgacgtcattctcgccggcatgcagcagaagattgtcgacgagaatgatcagccgctgcaggggtttgaccgccacatgaatgaccgcaggcctctggtcccggatttggtggtttgtttcaacccgatggagaactacacgctgttgcatgagtgctccctcgccaatgtgcccactgtgggaattatcgacacgaatgctgagccttcgtgggttacgtatgctattcctgcgaatgacgatagtatgagaggcgtgaccgtcatcgccagtgttctcggtcgcgcaggtgaggcaggcaataagcgccggcttgcagatgccgcgctgggtattgttaagtggcagacaccgctcgatgttaccaagttcttggacaatgagcggaaaatgagtgaggataactatgatggtgctaagtccaaggaagtaggcgatgctcttgataaattagaaatggagtagagaccctggagttgatgtaggcgtgggtgagatacgggctggtttgcctgtgtacacattgtgtgatgtacattgctgtatctatgtaacaacctgtatctatagtacgaatgagacggcattgtgtcctgata

SEQ ID NO: 21913 - DNA, 2157 bp, Muscodor strobelii
  misc_feature: SGI cDNA ID NO. 567429
  misc_feature: Reduced expression when VOC is produced
  misc_feature: Encodes the peptide sequence at SEQ ID NO 21914
atgtcgggcaccatgtcaggcacaatgagaggcacgcccaatcgtaaccaagggcgtggcggcatccccttcaacccaagcagccctatggcctccaacatcccgcggcccagcatcgagacgcaccagagccatgcctcccagcctgcccccagcgaggcggcctcgggtgtcagcgccagccgtcagaagcagagcaaacgagatgaaccaacaaacggcctgtatcgagacaacatggctccccacgcctacatgaccctggactacgacacctacatcgcccacaagcaggccaacgatgctgactactaccgccaggccatccgccgcaagctggagagcgacctctccaagaagaagcacctcgccggccgcgcccgccacacccgcaaggccccgccgggcaccgtcctcgccctcaagccgagcccggccctccagatcaagccctccaccaccgtcgccgaggctgcccagctgatggccgccaagcgagaggactgcgtgctagtgactgacgacgatgaccgcatcgcgggtatcttcaccgccaaggatctggcttttcgcgtggtgggaactggccagaaggccaccaatgtcaccatcgccgagattatgaccaagaaccccctgtgcgcccgcaccgataccagtgccaccgatgctctggacctgatggtcaggaagggcttccgccatctgcccgtcatggacgagaaccaggacatctcgggcattctagatatcaccaagtgtttctacgacgctatggagaagctggagcgagcctacgcgtcttcgaccaagctctacgctgctctggagggtgtccagtccgagctcggtaccagccagcccgcgcagatcatccagtatgtcgaggctctccgatccaagatgtctggcccgaccctggagtcggttcttaatggcaacgggcccaccaccgtgagcgtcaggacctcggtcaaggaagccgccatgctcatgaaggagaatcacacaaccgccgtgctagtccaggatcagggccagatcaccggcatcttcaccagcaaggacgtggtcttgcgggttattgcccctggcctagaccccgccaactgcagcgtcgttcgtgtcatgacacctcaccctgactttgcccccatggatatgagcattcaggctgctctgcgaaagatgcatgatggtcactatctcaatctcccagttatgaacggcgaaggcgagattgtgggcatggtcgacgtgctcaagcttacctacgcgacgctggaacagattaacacgatgggcaccagcgacagcgaaggtcctgcgtggaacaagttctggctgtcactggacaatgagaccgagtcgatggtgtcgggtgacggcagccacagccaccaccagggcacgattgcttccaggtccatgatgacaactgatatccgcgaacggatcaacgagtcagtggcccctggcgacagcgcatcccacatgggcgtagactcgcctccgcactcgatgctggctgagcaaccgccggccgagatcccgttcgccttcaagttcaaggccccgagtggtcgcgtacaccgcctccaggttatcgctagtcaaggtatctcggagcttgtgtctgctgtcgcggcaaagctaggctcagaggctgagtccattggcggtgtgcccgtggcagaggagggcaagcttacgtcgggcggatttgctttgagctatctagatgatgaaggggacactgtcagcatcaccaccgaccaggacctgctagaggctattctactagctcgccaacatcgccacgagaaggtggacctgtttgttcacgaccccgagaagccagcggtgacggtggtggcgccccagcccgaaacaccggccgtggcgacaccgccaatcagctcggcaccatcagaggtccggcgtagacgcgccgctgtggacgacgacgaggatgaggaagagagcgaagaggaggactacgcgacggttaggcgccggaagaaggtgggtggtcgtagcgaggcggagcaagtgattgcaggtgtccccaacgagctgctgctgcccggtgctatcgttacgctggcagtggtgatcgtaggcgttttcacgattgcgcgggccactagccgttaa

SEQ ID NO: 21914 - protein, 718 aa, Muscodor strobelii
  misc_feature: SGI Peptide ID NO. 567429
  misc_feature (140)..(259): Pfam Id: PF00571 Pfam Desc: CBS domain pair
  misc_feature (310)..(428): Pfam Id: PF00571 Pfam Desc: CBS domain pair
  misc_feature (518)..(617): Pfam Id: PF00564 Pfam Desc: PB1 domain
  misc_feature (140)..(252): Pfam Id: PF00571 Pfam Desc: CBS domain pair
  misc_feature (4)..(718): NCBI GI: 171679826 Blast Desc: protein product [Podospora anserina] gi|170939539|emb|CAP64766.1| protein product [Podospora anserina]
  misc_feature (5)..(718): NCBI GI: 261354556 Blast Desc: CBS domain-containing protein [Verticillium albo-atrum VaMs.102]
  misc_feature (5)..(718): NCBI GI: 256732920 Blast Desc: [Nectria haematococca mpVI 77-13-4]
  misc_feature (7)..(717): NCBI GI: 116204175 Blast Desc: CHGG_09971 [Chaetomium globosum CBS 148.51] gi|88176099|gb|EAQ83567.1| CHGG_09971 [Chaetomium globosum CBS 148.51]
  misc_feature (1)..(718): NCBI GI: 46123863 Blast Desc: FG06309.1 [Gibberella zeae PH-1]
  misc_feature (6)..(718): NCBI GI: 156039609 Blast Desc: SS1G_11941 [Sclerotinia sclerotiorum 1980] gi|154697678|gb|EDN97416.1| SS1G_11941 [Sclerotinia sclerotiorum 1980]
  misc_feature (113)..(717): NCBI GI: 164422735 Blast Desc: mitochondrial ribosomal protein subunit S4 [Neurospora crassa OR74A] gi|157069798|gb|EDO64901.1| mitochondrial ribosomal protein subunit S4 [Neurospora crassa OR74A]
  misc_feature (58)..(717): NCBI GI: 145607543 Blast Desc: MGG_04330 [Magnaporthe grisea 70-15] gi|145015069|gb|EDJ99637.1| MGG_04330 [Magnaporthe grisea 70-15]
  misc_feature (58)..(718): NCBI GI: 154301338 Blast Desc: BC1G_10339 [Botryotinia fuckeliana B05.10] gi|150856240|gb|EDN31432.1| BC1G_10339 [Botryotinia fuckeliana B05.10]
  misc_feature (6)..(718): NCBI GI: 189194755 Blast Desc: CBS and PB1 domain containing protein [Pyrenophora tritici-repentis Pt-1C-BFP] gi|187979280|gb|EDU45906.1| CBS and PB1 domain containing protein [Pyrenophora tritici-repentis
  misc_feature: Useful for introducing or modulating the production of volatile compounds
MSGTMSGTMRGTPNRNQGRGGIPFNPSSPMASNIPRPSIETHQSHASQPAPSEAASGVSASRQKQSKRDEPTNGLYRDNMAPHAYMTLDYDTYIAHKQANDADYYRQAIRRKLESDLSKKKHLAGRARHTRKAPPGTVLALKPSPALQIKPSTTVAEAAQLMAAKREDCVLVTDDDDRIAGIFTAKDLAFRVVGTGQKATNVTIAEIMTKNPLCARTDTSATDALDLMVRKGFRHLPVMDENQDISGILDITKCFYDAMEKLERAYASSTKLYAALEGVQSELGTSQPAQIIQYVEALRSKMSGPTLESVLNGNGPTTVSVRTSVKEAAMLMKENHTTAVLVQDQGQITGIFTSKDVVLRVIAPGLDPANCSVVRVMTPHPDFAPMDMSIQAALRKMHDGHYLNLPVMNGEGEIVGMVDVLKLTYATLEQINTMGTSDSEGPAWNKFWLSLDNETESMVSGDGSHSHHQGTIASRSMMTTDIRERINESVAPGDSASHMGVDSPPHSMLAEQPPAEIPFAFKFKAPSGRVHRLQVIASQGISELVSAVAAKLGSEAESIGGVPVAEEGKLTSGGFALSYLDDEGDTVSITTDQDLLEAILLARQHRHEKVDLFVHDPEKPAVTVVAPQPETPAVATPPISSAPSEVRRRRAAVDDDEDEEESEEEDYATVRRRKKVGGRSEAEQVIAGVPNELLLPGAIVTLAVVIVGVFTIARATSR

SEQ ID NO: 21915 - DNA, 2780 bp, Muscodor strobelii
  misc_feature: SGI EST ID NO. CUFF.51772.0
  misc_feature: Variant of the nucleotide sequence at SEQ ID NO 21913
aatttctgggtggtcaacacgcgccatattccgatgtctctggaaattaatcggaacggaggctagtccagagtctagactagcactgacaacaacaaaaaacacatcgttggcttccgtcacgaccctcgtcggcacttgtccgatctgcttcccccctttgctcctgtacgaatactacaattgtacactattgtatatcatcgcatactcgctgaccaagacggcaaatcgggagctgctcgcattattctgcaggaaccccagtaatctcgcgggctcctcccagttcatgcaaaatgtcgggcaccatgtcaggcacaatgagaggcacgcccaatcgtaaccaagggcgtggcggcatccccttcaacccaagcagccctatggcctccaacatcccgcggcccagcatcgagacgcaccagagccatgcctcccagcctgcccccagcgaggcggcctcgggtgtcagcgccagccgtcagaagcagagcaaacgagatgaagtacgtattaatttcaacctacctgcatcatcttcacatacgtacagctgtgggatcgtgatcgtgaaagccaacaaacggcctgtatcgagacaacatggctccccacgcctacatgaccctggactacgacacctacatcgcccacaagcaggccaacgatgctgactactaccgccaggccatccgccgcaagctggagagcgacctctccaagaagaagcacctcgccggccgcgcccgccacacccgcaaggccccgccgggcaccgtcctcgccctcaagccgagcccggccctccagatcaagccctccaccaccgtcgccgaggctgcccagctgatggccgccaagcgagaggactgcgtgctagtgactgacgacgatgaccgcatcgcgggtatcttcaccgccaaggatctggcttttcgcgtggtgggaactggccagaaggccaccaatgtcaccatcgccgagattatgaccaagaaccccctgtgcgcccgcaccgataccagtgccaccgatgctctggacctgatggtcaggaagggcttccgccatctgcccgtcatggacgagaaccaggacatctcgggcattctagatatcaccaagtgtttctacgacgctatggagaagctggagcgagcctacgcgtcttcgaccaagctctacgctgctctggagggtgtccagtccgagctcggtaccagccagcccgcgcagatcatccagtatgtcgaggctctccgatccaagatgtctggcccgaccctggagtcggttcttaatggcaacgggcccaccaccgtgagcgtcaggacctcggtcaaggaagccgccatgctcatgaaggagaatcacacaaccgccgtgctagtccaggatcagggccagatcaccggcatcttcaccagcaaggacgtggtcttgcgggttattgcccctggcctagaccccgccaactgcagcgtcgttcgtgtcatgacacctcaccctgactttgcccccatggatatgagcattcaggctgctctgcgaaagatgcatgatggtcactatctcaatctcccagttatgaacggcgaaggcgagattgtgggcatggtcgacgtgctcaagcttacctacgcgacgctggaacagattaacacgatgggcaccagcgacagcgaaggtcctgcgtggaacaagttctggctgtcactggacaatgagaccgagtcgatggtgtcgggtgacggcagccacagccaccaccagggcacgattgcttccaggtccatgatgacaactgatatccgcgaacggatcaacgagtcagtggcccctggcgacagcgcatcccacatgggcgtagactcgcctccgcactcgatgctggctgagcaaccgccggccgagatcccgttcgccttcaagttcaaggccccgagtggtcgcgtacaccgcctccaggttatcgctagtcaaggtatctcggagcttgtgtctgctgtcgcggcaaagctaggctcagaggctgagtccattggcggtgtgcccgtggcagaggagggcaagcttacgtcgggcggatttgctttgagctatctagatgatgaaggggacactgtcagcatcaccaccgaccaggacctgctagaggctattctactagctcgccaacatcgccacgagaaggtggacctgtttgttcacgaccccgagaagccagcggtgacggtggtggcgccccagcccgaaacaccggccgtggcgacaccgccaatcagctcggcaccatcagaggtccggcgtagacgcgccgctgtggacgacgacgaggatgaggaagagagcgaagaggaggactacgcgacggttaggcgccggaagaaggtgggtggtcgtagcgaggcggagcaagtgattgcaggtgtccccaacgagctgctgctgcccggtgctatcgttacgctggcagtggtgatcgtaggcgttttcacgattgcgcgggccactagccgttaaggcatggtcatctcgaatttagaatttgctgcatggctttaggagtttgatcgattgcttgagaagagccttgttcgatatagctacttattgtacacgcttatgacgaccccaattagataataatacctttgacgatgctggattccagatttttgtttcttctccaaagaccattattgtaactgatcagccaactcccatctatgtattttaaacagacttgcgagactaccttattcaatccattaatc

SEQ ID NO: 21916 - DNA, 681 bp, Muscodor strobelii
  misc_feature: SGI cDNA ID NO. 567430
  misc_feature: Encodes the peptide sequence at SEQ ID NO 21917
atgacagaataccttcaaaacgcctttcatacagagcgacttataatgcgccatgtggaaaacaacgaaagagacagagacttcattgcgcagaacttcttcaacgacaccgtaaaccgtggcttcgcttcagatgccgtcccgcagccctttaccaagagcatatcaaggcccattatagagcactccatcaactgctacctgcccatcatgatatgtctgcccacagacgccagcaccttgttcaatatggtcgggacagcctccaatccccacagtagtactaacgctcaccccataggtgtcatgttcatctaccgcaaggaataccggcgcatgacgtgttcgatccagatcgcggccgagtaccaaaatcagggctacggacgggaggcactgaattgggtcatagagtacgcgttccgttgggcggacatgaaccgctttgaaatcgccgcgttctcttataatgaacgtgccttgcggctgtatcggagcgttggtctcgtggaagaaggcgtggctcggaaagtggtctttatgaatggagactggcatgatgttcataaattcgctattctcgcctcggagtggtggtttcgtcaagttgagcgtggcctgggccagacaagtaaggggagtagcaggccggaccgaaagcgtttgcaggcaaaggcatag

SEQ ID NO: 21917 - protein, 226 aa, Muscodor strobelii
  misc_feature: SGI Peptide ID NO. 567430
  misc_feature (91)..(170): Pfam Id: PF00583 Pfam Desc: Acetyltransferase (GNAT) family
  misc_feature (119)..(170): Pfam Id: PF00583 Pfam Desc: Acetyltransferase (GNAT) family
  misc_feature (9)..(198): NCBI GI: 67904434 Blast Desc: AN9204.2 [Aspergillus nidulans FGSC A4] gi|40742305|gb|EAA61495.1| AN9204.2 [Aspergillus nidulans FGSC A4] gi|259485366|tpe|CBF82329.1| TPA: GNAT family AFUA_4G14730)
  misc_feature (1)..(198): NCBI GI: 256723794 Blast Desc: NECHADRAFT_37130 [Nectria haematococca mpVI 77-13-4]
  misc_feature (1)..(216): NCBI GI: 171685316 Blast Desc: protein product [Podospora anserina] gi|170942619|emb|CAP68271.1| protein product [Podospora anserina]
  misc_feature (7)..(198): NCBI GI: 238486952 Blast Desc: GNAT family acetyltransferase, [Aspergillus flavus NRRL3357] gi|220699593|gb|EED55932.1| GNAT family acetyltransferase, [Aspergillus flavus NRRL3357]
  misc_feature (5)..(198): NCBI GI: 85090157 Blast Desc: NCU04583 [Neurospora crassa OR74A] gi|28919629|gb|EAA29048.1| [Neurospora crassa OR74A] gi|28950022|emb|CAD70777.1| conserved [Neurospora crassa]
  misc_feature (5)..(198): NCBI GI: 46111901 Blast Desc: FG02832.1 [Gibberella zeae PH-1]
  misc_feature (2)..(198): NCBI GI: 256730665 Blast Desc: NECHADRAFT_30277 [Nectria haematococca mpVI 77-13-4]
  misc_feature (2)..(209): NCBI GI: 46139701 Blast Desc: FG11365.1 [Gibberella zeae PH-1]
  misc_feature (2)..(197): NCBI GI: 255933181 Blast Desc: Pc12g12470 [Penicillium chrysogenum Wisconsin 54-1255] gi|211582680|emb|CAP80874.1| Pc12g12470 [Penicillium chrysogenum Wisconsin 54-1255]
  misc_feature (1)..(198): NCBI GI: 119499608 Blast Desc: GNAT family acetyltransferase, [Neosartorya fischeri NRRL 181] gi|119414726|gb|EAW24664.1| GNAT family acetyltransferase, [Neosartorya fischeri NRRL 181]
MTEYLQNAFHTERLIMRHVENNERDRDFIAQNFFNDTVNRGFASDAVPQPFTKSISRPIIEHSINCYLPIMICLPTDASTLFNMVGTASNPHSSTNAHPIGVMFIYRKEYRRMTCSIQIAAEYQNQGYGREALNWVIEYAFRWADMNRFEIAAFSYNERALRLYRSVGLVEEGVARKVVFMNGDWHDVHKFAILASEWWFRQVERGLGQTSKGSSRPDRKRLQAKA

SEQ ID NO: 21918 - DNA, 342 bp, Muscodor strobelii
  misc_feature: SGI EST ID NO. CUFF.51536.0
  misc_feature: Variant of the nucleotide sequence at SEQ ID NO 21916
tttaaatcgaccaaattactgtcgccacacttaggtgatccaggcctcaaccatggattctatgacagaataccttcaaaacgcctttcatacagagcgacttataatgcgccatgtggaaaacaacgaaagagacagagacttcattgcgcagaacttcttcaacgacaccgtaaaccgtggcttcgcttcagatgccgtcccgcagccctttaccaagagcatatcaaggcccattatagagcactccatcaactgctacctgcccatcatgatatgtctgcccacagacgccagcaccttgttcaatatggtcgggacagcctccaatccccacagtag

SEQ ID NO: 21919 - DNA, 1338 bp, Muscodor strobelii
  misc_feature: SGI cDNA ID NO. 567431
  misc_feature: Encodes the peptide sequence at SEQ ID NO 21920
atggcgaactttcgagccatcattcttggcgcaggccccgtgggcctttttaccgcaaacgcgcttacagccgttggcatcgacttcttggtactcgaaagacagccggaggtcgtcagctaccgcggcgcgctcatcttcctggtatgtatactatcatctcgatggccacctgtgctccgtttgttggaccaacttggtatgtatgatgcgatcaccaagattggggcccgaatgagaggcaagacggacttcacttatgaaggtgaacaactaaaccgccttgccatctttgattcgctcgaagagaaacttgggtatcctagcattggttgctctcgcaataatctggtcagggtgctctatgaaaaccttccgcagcgtgagacaaaaatcaggaccagtgcagaggccaaggatatcgagaatctccaagatggtgtgagagttcacctcgcggacgggactaccgtggatggatcgattgtgatcgccggcgacggcgttcatagtttagcccgacaattcattcaacgatcaacagcacccagtgggtcgaagcttgagacgccaatggtagctagctttatgtccattttcggacggtctcccatgggcgacaaacacgttgacctgggatggttcgctgagtcacatggacctggttttgcatcgcagtcagcaaggtgtcaagatgggctatattacacagttttggcccctttgccaaaacccacaacagacaggaaacggttcacgaccgaggagctggaacagcttgcggcatccctatcagaaacgaccatatttccaggcgtcaaattgaaagaactctggccttcaagagatcagcagaacatcacgcttcttcagcaggaagagggcggagcggacaaatggtatcatggacgaacagtaattgttggcgatgcggcacacaaaatgacatcggtcaatggccaaggagctttccaaggaattctctcggccacgaacctcgtaaaccgcctctacgccactctgcggaagaactcgtcgcctagcactgaggaattcgaaggtgcatttgacaaataccaaaactcacgacagagatatgttgaagccgtgtgccaatatggctatgacagaactcgcgtaatcacctgggctagccctgagataaaggctacagatctcaaggagtcgccactattctcagtcgaggtcaatgtcaacgaaaggctcatgccacagatggtagggtgtgatattctagattttgtgccgtttgagagtaagaatggtacgacgccttggaagaaggacgggaagggtccaatacgggcacgtttgtag

SEQ ID NO: 21920 - protein, 445 aa, Muscodor strobelii
  misc_feature: SGI Peptide ID NO. 567431
  misc_feature (3)..(374): Pfam Id: PF01494 Pfam Desc: FAD binding domain
  misc_feature (4)..(435): NCBI GI: 226885243 Blast Desc: dehydrogenase / monooxygenase [Sordaria macrospora]
  misc_feature (4)..(435): NCBI GI: 85119265 Blast Desc: NCU02925 [Neurospora crassa OR74A] gi|28927418|gb|EAA36371.1| [Neurospora crassa OR74A]
  misc_feature (2)..(382): NCBI GI: 145602534 Blast Desc: MGG_10908 [Magnaporthe grisea 70-15] gi|145010942|gb|EDJ95598.1| MGG_10908 [Magnaporthe grisea 70-15]
  misc_feature (4)..(435): NCBI GI: 46115866 Blast Desc: FG03775.1 [Gibberella zeae PH-1]
  misc_feature (4)..(433): NCBI GI: 145234591 Blast Desc: An03g00370 [Aspergillus niger] gi|134057615|emb|CAK38015.1| protein product [Aspergillus niger]
  misc_feature (2)..(392): NCBI GI: 256728452 Blast Desc: NECHADRAFT_97875 [Nectria haematococca mpVI 77-13-4]
  misc_feature (5)..(433): NCBI GI: 145606496 Blast Desc: MGG_02292 [Magnaporthe grisea 70-15] gi|145014141|gb|EDJ98782.1| MGG_02292 [Magnaporthe grisea 70-15]
  misc_feature (1)..(441): NCBI GI: 256722281 Blast Desc: NECHADRAFT_54408 [Nectria haematococca mpVI 77-13-4]
  misc_feature (15)..(422): NCBI GI: 145606566 Blast Desc: MGG_02256 [Magnaporthe grisea 70-15] gi|145014185|gb|EDJ98826.1| MGG_02256 [Magnaporthe grisea 70-15]
  misc_feature (4)..(435): NCBI GI: 116192699 Blast Desc: CHGG_06067 [Chaetomium globosum CBS 148.51] gi|88181980|gb|EAQ89448.1| CHGG_06067 [Chaetomium globosum CBS 148.51]
MANFRAIILGAGPVGLFTANALTAVGIDFLVLERQPEVVSYRGALIFLVCILSSRWPPVLRLLDQLGMYDAITKIGARMRGKTDFTYEGEQLNRLAIFDSLEEKLGYPSIGCSRNNLVRVLYENLPQRETKIRTSAEAKDIENLQDGVRVHLADGTTVDGSIVIAGDGVHSLARQFIQRSTAPSGSKLETPMVASFMSIFGRSPMGDKHVDLGWFAESHGPGFASQSARCQDGLYYTVLAPLPKPTTDRKRFTTEELEQLAASLSETTIFPGVKLKELWPSRDQQNITLLQQEEGGADKWYHGRTVIVGDAAHKMTSVNGQGAFQGILSATNLVNRLYATLRKNSSPSTEEFEGAFDKYQNSRQRYVEAVCQYGYDRTRVITWASPEIKATDLKESPLFSVEVNVNERLMPQMVGCDILDFVPFESKNGTTPWKKDGKGPIRARL

SEQ ID NO: 21921 - DNA, 1374 bp, Muscodor strobelii
  misc_feature: SGI EST ID NO. CUFF.51540.0
  misc_feature: Variant of the nucleotide sequence at SEQ ID NO 21919
cttggtatgtatgatgcgatcaccaagattggggcccgaatgagaggcaagacggacttcacttatgaaggtgaacaactaaaccgccttgccatctttgattcgctcgaagagaaacttgggtatcctagcattggttgctctcgcaataatctggtcagggtgctctatgaaaaccttccgcagcgtgagacaaaaatcaggaccagtgcagaggccaaggatatcgagaatctccaagatggtgtgagagttcacctcgcggacgggactaccgtggatggatcgattgtgatcgccggcgacggcgttcatagtttagcccgacaattcattcaacgatcaacagcacccagtgggtcgaagcttgagacgccaatggtagctagctttatgtccattttcggacggtctcccatgggcgacaaacacgttgacctgggatggttcgctgagtcacatggacctggttttgcatcgcagtcagcaaggtgtcaagatgggctatattacacagttttggcccctttgccaaaacccacaacagacaggaaacggttcacgaccgaggagctggaacagcttgcggcatccctatcagaaacgaccatatttccaggcgtcaaattgaaagaactctggccttcaagagatcagcagaacatcacgcttcttcagcaggaagagggcggagcggacaaatggtatcatggacgaacagtaattgttggcgatgcggcacacaaaatgacatcggtcaatggccaaggagctttccaaggaattctctcggccacgaacctcgtaaaccgcctctacgccactctgcggaagaactcgtcgcctagcactgaggaattcgaaggtgcatttgacaaataccaaaactcacgacagagatatgttgaagccgtgtgccaatatggctatgacagaactcgcgtaatcacctgggctagccctgagataaaggctacagatctcaaggagtcgccactattctcagtcgaggtcaatgtcaacgaaaggctcatgccacagatggtagggtgtgatattctagattttgtgccgtttgagagtaagaatggtacgacgccttggaagaaggacgggaagggtccaatacgggcacgtttgtagcatcgtatatcgaaaaggagatcttcgcatcaagattatgataaactcagcagactcgttagacatatagatacctcactcctctagattgtatattgctatacttgtatcatttacgaattaatcatctatatagatatctagttatactccgaccaatctacataataccaataggtctatgcctttgcctgcaaacgctttcggtccggcctgctactccccttactt

SEQ ID NO: 21922 - DNA, 813 bp, Muscodor strobelii
  misc_feature: SGI cDNA ID NO. 567432
  misc_feature: Encodes the peptide sequence at SEQ ID NO 21923
atggatgaagattggcaagaaggagcattcacagcaaggcattcgcataaccgagtagggcgaggatctcgtcacaacaaacgaaacgccgcattcgatgttcacaagactttcggcacatacaagctggacgcgagtaacatactgaaacgctgtaatggagttccgcgtgcaagcgatagggcatcggcagcgggcagaattgagatttaccgactgaccgaaagtggcgatggcttaattggagcgtttgcaattgcaggcgtgttggaaacaatcgcgatcttcgccgggagtaggaagacattagagagactgattaaagagatggatgaagaactcaatcccgcagaaactgtcgaatcagacaggtcagatgaaggcaatcagacgagcaatattgtaataagcccgggtgaacaagtggatatcggagttgaagaaagcgacaaggaagatgatgacgactctgaaggacccgacccggaagtcgacagtcccgagataaccgatcggcgacgcttccagacgtttgagaagaacagtttccgggtgcccaagttctggatggcctggcgaggagacatggtttcctccgactccgagcaacttgaaagaatatccgggacaggatacatcgtgttctcgggcaacgattgccgcagacttaatggcacggttagctgcgaggacaaagcgtggaataatgtgaatgtgaccggctggaaggatgttgccagacacccaagagatactccggtttgctggccacagatcaacgtggtgaacgaaaagcaggtcgagggcgcctga

SEQ ID NO: 21923 - protein, 270 aa, Muscodor strobelii
  misc_feature: SGI Peptide ID NO. 567432
  misc_feature (3)..(261): NCBI GI: 189204478 Blast Desc: catalase [Pyrenophora tritici-repentis Pt-1C-BFP] gi|187985673|gb|EDU51161.1| catalase [Pyrenophora tritici-repentis Pt-1C-BFP]
  misc_feature (1)..(244): NCBI GI: 27924032 Blast Desc: catalase [Fusarium sporotrichioides]
  misc_feature (1)..(244): NCBI GI: 46115414 Blast Desc: FG03549.1 [Gibberella zeae PH-1] gi|28202145|gb|AAO34682.1| catalase [Gibberella zeae]
  misc_feature (174)..(256): NCBI GI: 169619904 Blast Desc: SNOG_13152 [Phaeosphaeria nodorum SN15] gi|160703922|gb|EAT79479.2| SNOG_13152 [Phaeosphaeria nodorum SN15]
  misc_feature (1)..(108): NCBI GI: 169619904 Blast Desc: SNOG_13152 [Phaeosphaeria nodorum SN15] gi|160703922|gb|EAT79479.2| SNOG_13152 [Phaeosphaeria nodorum SN15]
  misc_feature (1)..(110): NCBI GI: 39976225 Blast Desc: [Magnaporthe grisea 70-15] gi|145011767|gb|EDJ96423.1| [Magnaporthe grisea 70-15]
MDEDWQEGAFTARHSHNRVGRGSRHNKRNAAFDVHKTFGTYKLDASNILKRCNGVPRASDRASAAGRIEIYRLTESGDGLIGAFAIAGVLETIAIFAGSRKTLERLIKEMDEELNPAETVESDRSDEGNQTSNIVISPGEQVDIGVEESDKEDDDDSEGPDPEVDSPEITDRRRFQTFEKNSFRVPKFWMAWRGDMVSSDSEQLERISGTGYIVFSGNDCRRLNGTVSCEDKAWNNVNVTGWKDVARHPRDTPVCWPQINVVNEKQVEGA

SEQ ID NO: 21924 - DNA, 3673 bp, Muscodor strobelii
  misc_feature: SGI EST ID NO. CUFF.51549.0
  misc_feature: Variant of the nucleotide sequence at SEQ ID NO 21922
agttttcacaactgactgaaatctaggtagttacaaattagaacaatacttcaatttctatcaaagcccaacaagcaaagcgcgaacacttgctgctagcatgcgacgtgaggagatagacgccaatgtaggccgcacgggttgactttaggccaatgacctgtctgttgctaagttgtctttgctgtaatttgatatggatataagagtgtagagggttgatatcaagatatttggtaaggccctgcagtcgtttcaaacaattccgccttgttggaaacgagcacattctggaacgcaaaaagatgcagcacagcctcgacctgtcgcatcccctgcaagtgtcaccaacaatatccacaaccatgcaagcatcaataacatgccacatgtagcccccatccgtgcctccacatacaagctcaggtaatgcccagggatgttgctcctcctcgagcctcacgctctcctgcatgccgtttcacaagattcatctagggagagccggccatgttgttgataaatagtcgagacaccgcaggcatcatgagattcatgattgcggcctcctcagcaggcggtccttatatattcttccattacccttttcccggtctcattagttgaaagttctcaattggttgttacccaagcactttcgttgacatcgaaactatgaaatttcaagatttctcttgccttctagggctctcgggagcttcatttgtgagtgcatcggcacttcgccctggagatgtatcagcaccagtcgtagatcccttccatgcgctcgctagagatgtcagactggcaaaacttcaaggacgtgatattgagttgagaaacacaacgagtatcgcaaagagttggaacggagccacgctcttcgccttatcggaaccagtcggtgacacaggaataacggccgggatcagcgtgacatgcacgacatgctatgtgacgggaagcatcacagctgaaatttcctatagcgaagattttgacctaggtgaagcggtgatgaatttcacacaagatgctatcgaagacgttaaaaatgtgaccgaccaggctctcgaatacttcgaagatcaggttgacgggctatggacaaacgttactcgtgcaatcgtgtctcctgatttcgacttggacgatattgacttcccgccaatcaacgttagtctaaacctcgactttcctgacgtttcgggatgtgacctaaggttcgagctcgacgggctggaactctaccttgagctcgacacagtactctctgctgaatcgtcttacactttgaacttgtatacaagcaagactcctatcgggttcgccgttagcgaagacaactacgttggagtcgttgtcgcagtcgatctcattttgagcgcagatgcaagcatcgatatcagcaccggcgtgcactttaaggctaatgatggtcttgcgtttgacctgtctcttttcggaaagaatgtaactggcattgagaatcccgggagttcattcgagtttcttcctctgacggtctccggtgcaggcactttgactgcagtcctgcgtgttgctcttcaagctggtatcgatcttgacatcgatgctccattacacggaattagtggaggtgcagaagtcaaagtctatgccgacttggcggagttcacgaccaatgtcacggcttctacagacgctgacgctgacgggggttgcgagttgcgcgtccaagagtattacacctttgctctgggtgccgctgctggtgcaacttttgctatcgtggatgagacatggggcccagactacgaaacgcaagttccgattttctacaccacgttagccgagaagtgtatcactgcggcttcgtcatcttcgatcccaacctcaaccgtctcagtgcaagctcgagcggatttaacgaccacgacactgacaacagaagtaaccgtgactggtatgacttgtgagagtaccggtctggttgcctgtcccgcgtcgttgcgtagcacgaccaaggtgacgaaaacagagacttttatcacgtccgtgggattaggatcagaggcgacctggcctgcaacaaccgcaacaaccgtctctaccatcgaattctcggacaacaaaaaggaaatagaatcctcgtccggcgatcccaagtcatacgtgccaccaccgccaaagacgacatcaactacgagtgggcaagaaccttcaggaaccgcagccccgtctgagactcccatgtcacaagctgtgctcaacgagcgccttatcatcggcctcagtgtcggtcttggagttccagtcgtggcgggattcctagctgcagcctttatcttattccgacgcaaaaagtacgttgctgtcccaaaaggcgagggcgccaaggtggtttcgccacaatatgacgagaccatggactatcaatacaacaagcctgaagttagcataattgaagccgaggtttgggctcgagacgggcgtcgttagccctgacttatacataaaaatgcttaacggggtgtaggtgtttggtttggcatattttcaattattgggttagtaggatcatatcaagcgctggaatttagaaacatacagagttggagatagagagactttggttgattcatatctccttcaatctaatattatgacgtcacgacgtagtcaacatcagcttctgcccatgattgatcgtgtcttgtcaacagatcataatttctccctatctgacgcataatattcattgacagccgactgaattatggatgaagattggcaagaaggagcattcacagcaaggcattcgcataaccgagtagggcgaggatctcgtcacaacaaacgaaacgccgcattcgatgttcacaagactttcggcacatacaagctggacgcgagtaacatactgaaacgctgtaatggagttccgcgtgcaagcgatagggcatcggcagcgggcagaattgagatttaccgactgaccgaaagtggcgatggcttaattggagcgtttgcaattgcaggcgtgttggaaacaatcgcgatcttcgccgggagtaggaagacattagagagactgattaaagagatggatgaagaactcaatcccgcagaaactgtcgaatcagacaggtcagatgaaggcaatcagacgagcaatattgtaataagcccgggtgaacaagtggatatcggagttgaagaaagcgacaaggaagatgatgacgactctgaaggacccgacccggaagtcgacagtcccgagataaccgatcggcgacgcttccagacgtttgagaagaacagtttccgggtgcccaagttctggatggcctggcgaggagacatggtttcctccgactccgagcaacttgaaagaatatccgggacaggatacatcgtgttctcgggcaacgattgccgcagacttaatggcacggttagctgcgaggacaaagcgtggaataatgtgaatgtgaccggctggaaggatgttgccagacacccaagagatactccggtttgctggccacagatcaacgtggtgaacgaaaagcaggtcgagggcgcctgatcgaatgattattacggatgcctacatgtacgtaggtatttaccatgtctactagacacctcatccaattccaatatttgtacttcccaacggggc

SEQ ID NO: 21925 - DNA, 1812 bp, Muscodor strobelii
  misc_feature: SGI cDNA ID NO. 567433
  misc_feature: Elevated expression when VOC is produced
  misc_feature: Encodes the peptide sequence at SEQ ID NO 21926
atgaaatttcaagatttctcttgccttctagggctctcgggagcttcatttgtgagtgcatcggcacttcgccctggagatgtatcagcaccagtcgtagatcccttccatgcgctcgctagagatgtcagactggcaaaacttcaaggacgtgatattgagttgagaaacacaacgagtatcgcaaagagttggaacggagccacgctcttcgccttatcggaaccagtcggtgacacaggaataacggccgggatcagcgtgacatgcacgacatgctatgtgacgggaagcatcacagctgaaatttcctatagcgaagattttgacctaggtgaagcggtgatgaatttcacacaagatgctatcgaagacgttaaaaatgtgaccgaccaggctctcgaatacttcgaagatcaggttgacgggctatggacaaacgttactcgtgcaatcgtgtctcctgatttcgacttggacgatattgacttcccgccaatcaacgttagtctaaacctcgactttcctgacgtttcgggatgtgacctaaggttcgagctcgacgggctggaactctaccttgagctcgacacagtactctctgctgaatcgtcttacactttgaacttgtatacaagcaagactcctatcgggttcgccgttagcgaagacaactacgttggagtcgttgtcgcagtcgatctcattttgagcgcagatgcaagcatcgatatcagcaccggcgtgcactttaaggctaatgatggtcttgcgtttgacctgtctcttttcggaaagaatgtaactggcattgagaatcccgggagttcattcgagtttcttcctctgacggtctccggtgcaggcactttgactgcagtcctgcgtgttgctcttcaagctggtatcgatcttgacatcgatgctccattacacggaattagtggaggtgcagaagtcaaagtctatgccgacttggcggagttcacgaccaatgtcacggcttctacagacgctgacgctgacgggggttgcgagttgcgcgtccaagagtattacacctttgctctgggtgccgctgctggtgcaacttttgctatcgtggatgagacatggggcccagactacgaaacgcaagttccgattttctacaccacgttagccgagaagtgtatcactgcggcttcgtcatcttcgatcccaacctcaaccgtctcagtgcaagctcgagcggatttaacgaccacgacactgacaacagaagtaaccgtgactggtatgacttgtgagagtaccggtctggttgcctgtcccgcgtcgttgcgtagcacgaccaaggtgacgaaaacagagacttttatcacgtccgtgggattaggatcagaggcgacctggcctgcaacaaccgcaacaaccgtctctaccatcgaattctcggacaacaaaaaggaaatagaatcctcgtccggcgatcccaagtcatacgtgccaccaccgccaaagacgacatcaactacgagtgggcaagaaccttcaggaaccgcagccccgtctgagactcccatgtcacaagctgtgctcaacgagcgccttatcatcggcctcagtgtcggtcttggagttccagtcgtggcgggattcctagctgcagcctttatcttattccgacgcaaaaagtacgttgctgtcccaaaaggcgagggcgccaaggtggtttcgccacaatatgacgagaccatggactatcaatacaacaagcctgaagttagcataattgaagccgaggtttgggctcgagacgggcgtcgttag

SEQ ID NO: 21926 - protein, 603 aa, Muscodor strobelii
  misc_feature: SGI Peptide ID NO. 567433
  misc_feature (60)..(589): NCBI GI: 189201047 Blast Desc: conserved [Pyrenophora tritici-repentis Pt-1C-BFP] gi|187983959|gb|EDU49447.1| conserved [Pyrenophora tritici-repentis Pt-1C-BFP]
  misc_feature (15)..(562): NCBI GI: 256720765 Blast Desc: NECHADRAFT_101767 [Nectria haematococca mpVI 77-13-4]
  misc_feature (17)..(558): NCBI GI: 46127191 Blast Desc: FG07973.1 [Gibberella zeae PH-1]
  misc_feature (34)..(567): NCBI GI: 212539049 Blast Desc: conserved [Penicillium marneffei ATCC 18224] gi|210069422|gb|EEA23513.1| conserved [Penicillium marneffei ATCC 18224]
  misc_feature (36)..(554): NCBI GI: 261356440 Blast Desc: conserved [Verticillium albo-atrum VaMs.102]
  misc_feature (34)..(567): NCBI GI: 242819763 Blast Desc: conserved [Talaromyces stipitatus ATCC 10500] gi|218713848|gb|EED13272.1| conserved [Talaromyces stipitatus ATCC 10500]
  misc_feature (45)..(567): NCBI GI: 145259425 Blast Desc: An04g10140 [Aspergillus niger] gi|134074993|emb|CAK39073.1| [Aspergillus niger]
  misc_feature (57)..(578): NCBI GI: 67526125 Blast Desc: AN3520.2 [Aspergillus nidulans FGSC A4] gi|40739891|gb|EAA59081.1| AN3520.2 [Aspergillus nidulans FGSC A4] gi|259481965|tpe|CBF75982.1| TPA: conserved [Aspergillus FGSC
  misc_feature (54)..(495): NCBI GI: 169618213 Blast Desc: SNOG_12296 [Phaeosphaeria nodorum SN15] gi|111058989|gb|EAT80109.1| SNOG_12296 [Phaeosphaeria nodorum SN15]
  misc_feature (326)..(580): NCBI GI: 116179168 Blast Desc: CHGG_00212 [Chaetomium globosum CBS 148.51] gi|88184509|gb|EAQ91977.1| CHGG_00212 [Chaetomium globosum CBS 148.51]
  misc_feature: Useful for introducing or modulating the production of volatile compounds
MKFQDFSCLLGLSGASFVSASALRPGDVSAPVVDPFHALARDVRLAKLQGRDIELRNTTSIAKSWNGATLFALSEPVGDTGITAGISVTCTTCYVTGSITAEISYSEDFDLGEAVMNFTQDAIEDVKNVTDQALEYFEDQVDGLWTNVTRAIVSPDFDLDDIDFPPINVSLNLDFPDVSGCDLRFELDGLELYLELDTVLSAESSYTLNLYTSKTPIGFAVSEDNYVGVVVAVDLILSADASIDISTGVHFKANDGLAFDLSLFGKNVTGIENPGSSFEFLPLTVSGAGTLTAVLRVALQAGIDLDIDAPLHGISGGAEVKVYADLAEFTTNVTASTDADADGGCELRVQEYYTFALGAAAGATFAIVDETWGPDYETQVPIFYTTLAEKCITAASSSSIPTSTVSVQARADLTTTTLTTEVTVTGMTCESTGLVACPASLRSTTKVTKTETFITSVGLGSEATWPATTATTVSTIEFSDNKKEIESSSGDPKSYVPPPPKTTSTTSGQEPSGTAAPSETPMSQAVLNERLIIGLSVGLGVPVVAGFLAAAFILFRRKKYVAVPKGEGAKVVSPQYDETMDYQYNKPEVSIIEAEVWARDGRR

SEQ ID NO: 21927 - DNA, 3673 bp, Muscodor strobelii; identical to SEQ ID NO: 21924
  misc_feature: SGI EST ID NO. CUFF.51549.0
  misc_feature: Variant of the nucleotide sequence at SEQ ID NO 21925

SEQ ID NO: 21928 - DNA, 852 bp, Muscodor strobelii
  misc_feature: SGI cDNA ID NO. 567434
  misc_feature: Elevated expression when VOC is produced
  misc_feature: Encodes the peptide sequence at SEQ ID NO 21929
atgaatacacgacctactctcttggggatcccccgagaggttcgactcgatatatataagcgtgtcttactcctagacctcgactataaggtcatacaaagctacaaggattcatgggctcgtgacgggtttgcgacagctcttcagcgccactcagactcgaagctagtcgtgccatggcttagtctcatgcaaagctgcaaactcatcaaggaagagctcagcgcttacatgagtactgcttcgataacgaaagatgccgattgttcaacctatgttctgagtatagttgcaagttgcaagggtcgtctctgcagtgcaacatggcaaaacatcccatgcccgcccactagactcaagaatcttgtggtgaacatgcaattgacggatcgaaagatttctgagcgccccggaagatatatagatgccaaattttgggggtgcggcggccctatgggaatcgtgaggcaactctatcaaaccatgaacttgatacttcataacggggtagtgcttgaccgcaaaaagccactctcggaacacttaagttttgagagcctaattgtcaactatcccgagttgggaccatttcgcccagaggacgaacggcccaaattttcgagaggtggtcatcgagtggctgggttcatgcgctctatgcaaggaaccggcttactctggacttatttcaatcaattccatttcaatcaaggacaggagcatgaagaatacccgatctctgctgttgaagatgctcgagtgcctacttattgggatcgatacgggttcgaatggggtagtcccaaccctgccgtcacttgggaagaggagatcacgcattgcgcggaataa

SEQ ID NO: 21929 - protein, 283 aa, Muscodor strobelii
  misc_feature: SGI Peptide ID NO. 567434
  misc_feature: Useful for introducing or modulating the production of volatile compounds
MNTRPTLLGIPREVRLDIYKRVLLLDLDYKVIQSYKDSWARDGFATALQRHSDSKLVVPWLSLMQSCKLIKEELSAYMSTASITKDADCSTYVLSIVASCKGRLCSATWQNIPCPPTRLKNLVVNMQLTDRKISERPGRYIDAKFWGCGGPMGIVRQLYQTMNLILHNGVVLDRKKPLSEHLSFESLIVNYPELGPFRPEDERPKFSRGGHRVAGFMRSMQGTGLLWTYFNQFHFNQGQEHEEYPISAVEDARVPTYWDRYGFEWGSPNPAVTWEEEITHCAE

SEQ ID NO: 21930 - DNA, 2116 bp, Muscodor strobelii
  misc_feature: SGI EST ID NO. CUFF.51586.1
  misc_feature: Variant of the nucleotide sequence at SEQ ID NO 21928
ctgggggttcacttgctaattaagtcggtgacatctgtattgtaggctagtacgtaaggcacagaaaggcgtcgctcgaactctgctagtgcttccccaaatgttctactaacctcaacaattactgtaagtccttctatcattctttgatgccgagcaatatcataatatcacttcgaatttttaaagctctttgaaggcagagatgcatccctaagagcattttactcaacttgcagatggcgccaattgaccgggcacagtggcaggtgtcgaggcataaataaaacatgcgtcatcccatcaccataattgatggtgctatttgactattctcttcgtcgttcagtgactacatgtcttttaagctatcgaactatcgcaacgggactctagccattatttaggctcgggatagttgtgttgtctgtataaaagacctcgactcctcgtctcggcacttcacatgtgactatgacatttattttggtcacccctgcctatcgcagcttaagtactacaacgaagggtttctgcctagcgctgcctagctcttgtcagcgtcgactatatgcccaagccaataacgaaacatcctcctgtcagctatctacgtttttatgctagggcgaattaattgtgagcagtttataccggaggcacatggagtcaaccttgttgactcaagatctgaattgaacccaaagtatctagtaggcattggccccactccttggagcgtgcctacctcccaagtatggtatatcttaaaatatcgtcgtgaccatcataccagtctcccagttccttgctgattgcgcgagatacaaaacagcgagcttaggtagaactccttttttgtctcatattctcgttgcgtcgcgcaatatctctacccacgatgaatacacgacctactctcttggggatcccccgagaggttcgactcgatatatataagcgtgtcttactcctagacctcgactataaggtcatacaaagctacaaggattcatgggctcgtgacgggtttgcgacagctcttcagcgccactcagactcgaagctagtcgtgccatggcttagtctcatgcaaagctgcaaactcatcaaggaagagctcagcgcttacatgagtactgcttcgataacgaaagatgccgattgttcaacctatgttctgagtatagttgcaagttgcaagggtcgtctctgcagtgcaacatggcaaaacatcccatgcccgcccactagactcaagaatcttgtggtgaacatgcaattgacggatcgaaagatttctgagcgccccggaagatatatagatgccaaattttgggggtgcggcggccctatgggaatcgtgaggcaactctatcaaaccatgaacttgatacttcataacggggtagtgcttgaccgcaaaaagccactctcggaacacttaagttttgagagcctaattgtcaactatcccgagttgggaccatttcgcccagaggacgaacggcccaaattttcgagaggtggtcatcgagtggctgggttcatgcgctctatgcaaggaaccggcttactctggacttatttcaatcaattccatttcaatcaaggacaggagcatgaagaatacccgatctctgctgttgaagatgctcgagtgcctacttattgggatcgatacgggttcgaatggggtagtcccaaccctgccgtcacttgggaagaggagatcacgcattgcgcggaataaatgataaaccgaaggtactactggttctcttgaacatagcaaaaacccacgatgccatatgtactctcggcgcgaggttatggatggtcaatacggaagagagagtgatcaaggccaggacaaacagcgcgggaaaagcaatctgggacaaggagtctaatgaagccataaagcctagtttggcgctgaaaaatgggatggctaattcggatagatatttgcattcttagtagcttcgtttctaaaacaattctttcaagacagccaatgtgtcataaatattgataaacgagcagacgaggcatgtaatcccactgcgtcgatcttgcgcagaacatgataattggtggatgttcaacccaa

SEQ ID NO: 21931 - DNA, 1008 bp, Muscodor strobelii
  misc_feature: SGI cDNA ID NO. 567435
  misc_feature: Encodes the peptide sequence at SEQ ID NO 21932
atggcgttcgagtatgtgccaaactcgcccgcagcaacgcctgccccctcgaggaagggctcactccgtcctgtttcgcgaaaaggttcaatggtcgctatgagctcggatatcccagacgtaccgtacagcacgtttagtagcgacgcactgaaacggtcaggctcggcagataaattcagactcaacgctatggaatcgatgctccttatggtcctttatctacgagttcgtgatgcttctagtcagagtcctattcttggggacatctacgcccagagaattatcaacaaagtcaacgccgacttcacgcaaagcatgtttggcttggacgagagatacgttcgttacgctgccgggcgcgccagaaaaatcgatgtctggtgccaagatttcttagactcgcatggagatgaaccagtgactgttcttcatcttgcctgtgggcttgacagccggaatctaagggtaaaccggaagagttcagtgcaatggatagacgtcgacagacctgtggttgtcagccttcgacaccggctcgtcgacactccatctggagactatcggcttgtggcggcaaatatcgtggatgaagaagactggttgaacgacatacctaccgatcgaccgattatgatcatactcgaaggcctcactatgtatctagcgccagagaagggcatcaatttattccaaaaaattcttgctcgttttccccacggatgcttagcatttgataccatcggttcgatcgctaaaacgttcaattctttcttggaagccttcaggcagaccaaagctgttattagatggggaatcgacgatcctaaaacgatattggcattagatcccagacttcaactcaaagatgttgtatacctttacgactggatggaaacacgggcatttgggagaaatggtgttccccttttcggtggatggactccgttgatcagcctgttgccaagttatcgtaagaatgggcaatttctacttttcgaattttga

SEQ ID NO: 21932 - protein, 335 aa, Muscodor strobelii
  misc_feature: SGI Peptide ID NO. 567435
  misc_feature (64)..(156): Pfam Id: PF02409 Pfam Desc: O-methyltransferase N-terminus
  misc_feature (69)..(156): Pfam Id: PF02409 Pfam Desc: O-methyltransferase N-terminus
  misc_feature (38)..(335): NCBI GI: 256782382 Blast Desc: polyketide synthase protein [Streptomyces hygroscopicus ATCC 53653]
  misc_feature (59)..(335): NCBI GI: 169628060 Blast Desc: polyketide synthase protein [Mycobacterium abscessus ATCC 19977] gi|169240027|emb|CAM61055.1| polyketide synthase protein [Mycobacterium abscessus]
  misc_feature (59)..(288): NCBI GI: 260649581 Blast Desc: conserved [Streptomyces scabiei 87.22]
  misc_feature (63)..(288): NCBI GI: 254818808 Blast Desc: tetracenomycin polyketide synthesis O-methyltransferase TcmP [Mycobacterium intracellulare ATCC 13950]
  misc_feature (61)..(294): NCBI GI: 183982973 Blast Desc: O-methyltransferase [Mycobacterium marinum M] gi|183176299|gb|ACC41409.1| O-methyltransferase [Mycobacterium marinum M]
  misc_feature (58)..(335): NCBI GI: 229863167 Blast Desc: O-methyltransferase involved in polyketide biosynthesis [Stackebrandtia nassauensis DSM 44728] gi|229748483|gb|EEP06277.1| O-methyltransferase involved in DSM
  misc_feature (69)..(335): NCBI GI: 254822367 Blast Desc: O-methyltransferase domain-containing protein [Mycobacterium intracellulare ATCC 13950]
  misc_feature (57)..(296): NCBI GI: 153491 Blast Desc: O-methyltransferase [Streptomyces glaucescens]
  misc_feature (57)..(296): NCBI GI: 730915 Blast Desc: O-methyltransferase [Streptomyces glaucescens]
  misc_feature (57)..(288): NCBI GI: 134103104 Blast Desc: O-methyltransferase-like protein [Saccharopolyspora erythraea NRRL 2338] gi|133915727|emb|CAM05840.1| O-methyltransferase-like protein [Saccharopolyspora erythraea
  misc_feature: Useful for fungicidal and/or biocontrol applications
MAFEYVPNSPAATPAPSRKGSLRPVSRKGSMVAMSSDIPDVPYSTFSSDALKRSGSADKFRLNAMESMLLMVLYLRVRDASSQSPILGDIYAQRIINKVNADFTQSMFGLDERYVRYAAGRARKIDVWCQDFLDSHGDEPVTVLHLACGLDSRNLRVNRKSSVQWIDVDRPVVVSLRHRLVDTPSGDYRLVAANIVDEEDWLNDIPTDRPIMIILEGLTMYLAPEKGINLFQKILARFPHGCLAFDTIGSIAKTFNSFLEAFRQTKAVIRWGIDDPKTILALDPRLQLKDVVYLYDWMETRAFGRNGVPLFGGWTPLISLLPSYRKNGQFLLFEF

SEQ ID NO: 21933 - DNA, 839 bp, Muscodor strobelii
  misc_feature: SGI EST ID NO. CUFF.51558.0
  misc_feature: Variant of the nucleotide sequence at SEQ ID NO 21931
cgggcgcgccagaaaaatcgatgtctggtgccaagatttcttagactcgcatggagatgaaccagtgactgttcttcatcttgcctgtgggcttgacagccggaatctaagggtaaaccggaagagttcagtgcaatggatagacgtcgacagacctgtggttgtcagccttcgacaccggctcgtcgacactccatctggagactatcggcttgtggcggcaaatatcgtggatgaagaagactggttgaacgacatacctaccgatcgaccgattatgatcatactcgaaggcctcactatgtatctagcgccagagaagggcatcaatttattccaaaaaattcttgctcgttttccccacggatgcttagcatttgataccatcggttcgatcgctaaaacgttcaattctttcttggaagccttcaggcagaccaaagctgttattagatggggaatcgacgatcctaaaacgatattggcattagatcccagacttcaactcaaagatgttgtatacctttacgactggatggaaacacgggcatttgggagaaatggtgttccccttttcggtggatggactccgttgatcagcctgttgccaagttatcgtaagaatgggcaatttctacttttcgaattttgatacgttggaaatgagtcgagatgcaatgcttggaaacttagatacccatggacggagtctggcgttcgtattaactatttcaggagttcatggctataatatcagtggcgccgaacttcattttcttgtaaatttgggtctctagcatgcaaaagcgacaatgaacaatccaaaagcaacaccttga

SEQ ID NO: 21934 - DNA, 2715 bp, Muscodor strobelii
  misc_feature: SGI cDNA ID NO. 567436
  misc_feature: Encodes the peptide sequence at SEQ ID NO 21935
atgaccgtcttcttagcatccctatttcttccaaagaccatctacttcaatctccctgatgctcctccgagcaaagcaactcggccccggctgagcgccaaacagccaccgaagccgctttctcttgctgttcgcccgagcttgttcgaaccacgcgtggccgacacaccgccgcttactcccacaagtgacgattgcgccatcgacgaagatgatcttttcgcaaacgaggacggcctccgtgtccatctcaccgatgatattgccttgcgggccccggcagacaaagagtctccgacttggggccgtcgggctttccagccgaggtctcgcgccaattcgcctcctcccgcctcgttggtcgaggacgagaaaacattagagaaggcaaaagagctgggaagacaagggatctatcaacctcggacaacacggagcgacagccacgacagagttttcgcgaacgccaattggtgtattgtgaatgcagaccagggaaacggtgggcttcgcaatgcagcggaagcagcggcaagagacgggttcaatggagagtacacctggattgggacattgggcatgccaacagatgccatcgatgatacacagcaaaaacaagacatgcacgaccgactggccactgagttcaatatgcacccggtatttgtgagagacgaggactttgatggtcactatcttcatttttgcaagcagattttatggccagtatttcattatcagatccccgacaatccaaagagcaaagcatacgaggatcactcctggaaatattacgttaacgtcaaccaagcctttgcagatctgattgttaggcattggaaaaggggcgatactatttggattcacgattatcacttactcctccttcccaatatgatccgcaagaggctaccggacgccaagattggattatttttgcacgtcgcctttccttcatctgaggtctttcgctgtcttgctgttcggaaacagcttttggatggcatgctcggtgccaacttgatcggtttccagattgtcgaatatactcgccactttcttcagacctgcagtcggctactttcggtcgaagcaacgagcgatggtgtccaactcgaggatcgatatgttgacgttacgcatcacgcaattggtattgatccagtaaacttgaacatccaccgtcaagaccctgaagttaagaaatggattgacattatgcgcgaccggtataaggacaagaaaatcatagtggcacgtgataaacttgatctggtccgaggcgtacgacagaaactactatctttcgagctttttctcaataagaacccttcttggagggacaagatcgttctgatacaagtggctcttgcaacgagcgagaaaagcggcctcgatgctgctgtgggagatattgtgacaaggatcaattccgcctgggccaatttagcgtatcagccagttgtgtacctgaagcaagatattccgtactctcagtacttggctctcttgactatagcagacgctctgatgattacaagccagcgcgagggcatgaatctcacgtcccacgagttcatcgtgtgtcaggatggaaccaattgtgagaagaaacatggctctctgattctgtccgaattcgcgggtacatcgtcgatattctccggtaaccagttatcggtgaatccttggagctatcgccagtgctcagatgcaatcaaaattgcaatggaaatgcctggcaacgaaaagagtacaagatggggcgcacttcgcgaggtaatcactcatcacactggtagccgttggttttcgaccatagtctcccaattagactctagctacgagattcagcatcgccatcatcagacctctgttcctcgtttaaatctcaataccttggcacaacagtacaatcacagccagcgccggctgttcctgctagacctcgaaggcactcttgtcccttccaacttcatgaacagcctgtcccctgtaaatcctcaacgtatgcttacagtgctcaatgatctggtggatgataatcgcaatactgttttcgtcatgtccgggcgaaaaccagacgaacttgatcgactatttcgacaggtgccaaatttaggcctgatagcggaaaatggctgttttgtcaaatatgctagcaaacactcttgggccgagtttgctgatcgacagcaggttttttcctggaagcagtccgtgaagaatgtgctccaatactatcttgatcgaacgccaggatcggagatcgaggatcgaaactgttctctagtctttcactacagaaacgcggaagactttgacatggcggcgagacaggcgagtgactggactgcgcatgtcaacgaatcatgcgaacagcagcaagttcacgccactcaactcgaagactgtgttgtggttgaatcgtacgactggagcaaagaaacagcagcagctcatgttttcacggatttgcaagcggctggaagtgctacgacaacccaaagtgccccggatttcctcatgatcattggcgatggccgagaggatgagaaggtcttccggtgggccaacgaacttcaggcaaatggcgaggtagacgaagctgtcactgtgagcttgagcgcgcgaaatacggaagctacagctactctcacccagggtgtcagcggtgtactcatcgcgctccagaagcttgcgagtgtctcctag

SEQ ID NO: 21935 - protein, 904 aa, Muscodor strobelii
  misc_feature: SGI Peptide ID NO. 567436
  misc_feature (134)..(613): Pfam Id: PF00982 Pfam Desc: Glycosyltransferase family 20
  misc_feature (647)..(890): Pfam Id: PF02358 Pfam Desc: Trehalose-phosphatase
  misc_feature (1)..(903): NCBI GI: 158534849 Blast Desc: trehalose phosphate synthase [Blumeria graminis f. sp. hordei]
  misc_feature (1)..(904): NCBI GI: 226289363 Blast Desc: trehalose-phosphatase [Paracoccidioides brasiliensis Pb18]
  misc_feature (1)..(904): NCBI GI: 225682174 Blast Desc: trehalose-phosphatase [Paracoccidioides brasiliensis Pb03]
  misc_feature (1)..(904): NCBI GI: 226280090 Blast Desc: trehalose-phosphatase [Paracoccidioides brasiliensis Pb01]
  misc_feature (1)..(904): NCBI GI: 261190692 Blast Desc: alpha,alpha-trehalose phosphate synthase subunit TPS3 [Ajellomyces dermatitidis SLH14081] gi|239591178|gb|EEQ73759.1| alpha,alpha-trehalose phosphate synthase subunit TPS3 SLH14081]
  misc_feature (1)..(669): NCBI GI: 145601221 Blast Desc: MGG_14118 [Magnaporthe grisea 70-15] gi|145009252|gb|EDJ93963.1| MGG_14118 [Magnaporthe grisea 70-15]
  misc_feature (1)..(904): NCBI GI: 240278443 Blast Desc: trehalose phosphate synthase [Ajellomyces capsulatus H143]
  misc_feature (1)..(903): NCBI GI: 115394888 Blast Desc: conserved [Aspergillus terreus NIH2624] gi|114193024|gb|EAU34724.1| conserved [Aspergillus terreus NIH2624]
  misc_feature (1)..(904): NCBI GI: 225556063 Blast Desc: trehalose phosphate synthase [Ajellomyces capsulatus G186AR]
  misc_feature (1)..(904): NCBI GI: 258564524 Blast Desc: conserved [Uncinocarpus reesii 1704] gi|237908514|gb|EEP82915.1| conserved [Uncinocarpus reesii 1704]
  misc_feature (4)..(902): SWISSPROT Homolog: EC 2.4.1.15 Alpha,alpha-trehalose-phosphate synthase (UDP-forming)
MTVFLASLFLPKTIYFNLPDAPPSKATRPRLSAKQPPKPLSLAVRPSLFEPRVADTPPLTPTSDDCAIDEDDLFANEDGLRVHLTDDIALRAPADKESPTWGRRAFQPRSRANSPPPASLVEDEKTLEKAKELGRQGIYQPRTTRSDSHDRVFANANWCIVNADQGNGGLRNAAEAAARDGFNGEYTWIGTLGMPTDAIDDTQQKQDMHDRLATEFNMHPVFVRDEDFDGHYLHFCKQILWPVFHYQIPDNPKSKAYEDHSWKYYVNVNQAFADLIVRHWKRGDTIWIHDYHLLLLPNMIRKRLPDAKIGLFLHVAFPSSEVFRCLAVRKQLLDGMLGANLIGFQIVEYTRHFLQTCSRLLSVEATSDGVQLEDRYVDVTHHAIGIDPVNLNIHRQDPEVKKWIDIMRDRYKDKKIIVARDKLDLVRGVRQKLLSFELFLNKNPSWRDKIVLIQVALATSEKSGLDAAVGDIVTRINSAWANLAYQPVVYLKQDIPYSQYLALLTIADALMITSQREGMNLTSHEFIVCQDGTNCEKKHGSLILSEFAGTSSIFSGNQLSVNPWSYRQCSDAIKIAMEMPGNEKSTRWGALREVITHHTGSRWFSTIVSQLDSSYEIQHRHHQTSVPRLNLNTLAQQYNHSQRRLFLLDLEGTLVPSNFMNSLSPVNPQRMLTVLNDLVDDNRNTVFVMSGRKPDELDRLFRQVPNLGLIAENGCFVKYASKHSWAEFADRQQVFSWKQSVKNVLQYYLDRTPGSEIEDRNCSLVFHYRNAEDFDMAARQASDWTAHVNESCEQQQVHATQLEDCVVVESYDWSKETAAAHVFTDLQAAGSATTTQSAPDFLMIIGDGREDEKVFRWANELQANGEVDEAVTVSLSARNTEATATLTQGVSGVLIALQKLASVS

SEQ ID NO: 21936 - DNA, 3494 bp, Muscodor strobelii
  misc_feature: SGI EST ID NO. CUFF.51566.0
  misc_feature: Variant of the nucleotide sequence at SEQ ID NO 21934
ctcagctctcggcgatctgcccagcattgtgcttctagccaattacgggccggtgactcgccgatttagggaataggtcgaccagatattgatatctggcttgctttagatttcttccaaagaccatctacttcaatctccctgatgctcctccgagcaaagcaactcggccccggctgagcgccaaacagccaccgaagccgctttctcttgctgttcgcccgagcttgttcgaaccacgcgtggccgacacaccgccgcttactcccacaagtgacgattgcgccatcgacgaagatgatcttttcgcaaacgaggacggcctccgtgtccatctcaccgatgatattgccttgcgggccccggcagacaaagagtctccgacttggggccgtcgggctttccagccgaggtctcgcgccaattcgcctcctcccgcctcgttggtcgaggacgagaaaacattagagaaggcaaaagagctgggaagacaagggatctatcaacctcggacaacacggagcgacagccacgacagagttttcgcgaacgccaattggtgtattgtgaatgcagaccagggaaacggtgggcttcgcaatgcagcggaagcagcggcaagagacgggttcaatggagagtacacctggattgggacattgggcatgccaacagatgccatcgatgatacacagcaaaaacaagacatgcacgaccgactggccactgagttcaatatgcacccggtatttgtgagagacgaggactttgatggtcactatcttcatttttgcaagcagattttatggccagtatttcattatcagatccccgacaatccaaagagcaaagcatacgaggatcactcctggaaatattacgttaacgtcaaccaagcctttgcagatctgattgttaggcattggaaaaggggcgatactatttggattcacgattatcacttactcctccttcccaatatgatccgcaagaggctaccggacgccaagattggattatttttgcacgtcgcctttccttcatctgaggtctttcgctgtcttgctgttcggaaacagcttttggatggcatgctcggtgccaacttgatcggtttccagattgtcgaatatactcgccactttcttcagacctgcagtcggctactttcggtcgaagcaacgagcgatggtgtccaactcgaggatcgatatgttgacgttacgcatcacgcaattggtattgatccagtaaacttgaacatccaccgtcaagaccctgaagttaagaaatggattgacattatgcgcgaccggtataaggacaagaaaatcatagtggcacgtgataaacttgatctggtccgaggcgtacgacagaaactactatctttcgagctttttctcaataagaacccttcttggagggacaagatcgttctgatacaagtggctcttgcaacgagcgagaaaagcggcctcgatgctgctgtgggagatattgtgacaaggatcaattccgcctgggccaatttagcgtatcagccagttgtgtacctgaagcaagatattccgtactctcagtacttggctctcttgactatagcagacgctctgatgattacaagccagcgcgagggcatgaatctcacgtcccacgagttcatcgtgtgtcaggatggaaccaattgtgagaagaaacatggctctctgattctgtccgaattcgcgggtacatcgtcgatattctccggtaaccagttatcggtgaatccttggagctatcgccagtgctcagatgcaatcaaaattgcaatggaaatgcctggcaacgaaaagagtacaagatggggcgcacttcgcgaggtaatcactcatcacactggtagccgttggttttcgaccatagtctcccaattagactctagctacgagattcagcatcgccatcatcagacctctgttcctcgtttaaatctcaataccttggcacaacagtacaatcacagccagcgccggctgttcctgctagacctcgaaggcactcttgtcccttccaacttcatgaacagcctgtcccctgtaaatcctcaacgtatgcttacagtgctcaatgatctggtggatgataatcgcaatactgttttcgtcatgtccgggcgaaaaccagacgaacttgatcgactatttcgacaggtgccaaatttaggcctgatagcggaaaatggctgttttgtcaaatatgctagcaaacactcttgggccgagtttgctgatcgacagcaggttttttcctggaagcagtccgtgaagaatgtgctccaatactatcttgatcgaacgccaggatcggagatcgaggatcgaaactgttctctagtctttcactacagaaacgcggaagactttgacatggcggcgagacaggcgagtgactggactgcgcatgtcaacgaatcatgcgaacagcagcaagttcacgccactcaactcgaagactgtgttgtggttgaatcgtacgactggagcaaagaaacagcagcagctcatgttttcacggatttgcaagcggctggaagtgctacgacaacccaaagtgccccggatttcctcatgatcattggcgatggccgagaggatgagaaggtcttccggtgggccaacgaacttcaggcaaatggcgaggtagacgaagctgtcactgtgagcttgagcgcgcgaaatacggaagctacagctactctcacccagggtgtcagcggtgtactcatcgcgctccagaagcttgcgagtgtctcctagcaggagagatgtgtagcgtacaggtcatatgtccttgacagtctttcggcttctgctcgaagaaggactggtagcagctctttcggacatcggccctaccaattctaacgctgtatcctccagtccctcctctatgctccaagataagtttgacatgcatctcggttttcattacccgttggtcatagcacggatacttgtactcgcattcaaaagaacagtgcatcttttcaagcgtgatttgtttgttgggggaccgtatagacatgcatgcatatttcagtagttccaggagtattgtcatggtgtagacatcaggtatactgtatgattataactattaagaggattaatggataagtcacctactctcccctaattcaacccttgccgatagttgtggcttcgttaccaaagcagagatggcacattggcaatctattgaacttctctaagtcaccccaggatatggttatgcaagccaagaacatggagttgggtgtagtgaccaaaacaccccatgcactagatggtgtggtgaccaaagttaggggtcctcattccacttgtccgccacatgggggattgctttaaggtatctgcaatacagcttctcttctcgatgaagcaatctgtacgcaacaaaattagatagatcatccaatggcgttgaccaattcaattatctttgcg

SEQ ID NO: 21937 - DNA, 678 bp, Muscodor strobelii
  misc_feature: SGI cDNA ID NO. 567437
  misc_feature: Encodes the peptide sequence at SEQ ID NO 21938
atggccggagactcaagccccttttacctcttcgctaatgtcaacttcgtgcccgattgctatgatgcatggcaagcggcatacgacgaccttggtcgctacgttttcgatcaagaacattcgactgagtcctactactttggtatcccggtcgaatatggatcagaaatctccaagacgccgcatatgtttgctttcgaggtgtatggcaagcgggaggatttatacacaacacacctgggctcaccagccatgcaaatgtttctccaaaaagtgccgccgctgatgacgacagggctcgacttactgcactttgaaaaggtcggcgggtacatcgaccggcggaacgatctatctccctgcgcggttatgaaggacacgaggatcaaggcaacatctgcatcttcccgcgaggcgattgtggaagcgatgaagatattatcgaagagcatcgaagaagataaagagtgcgagggtattttaacattcgctactttcaagagcctagacaatgatgttgacgggcggatgtttgcgcgttgggacacgagagagcggatggagtggtttgagaggagggctgatgttttggcgttttggaagggtattaaggattttgtggtgcagatggaatggaagaattatgttgagaacgggaaaggatggctccataggtag

SEQ ID NO: 21938 - protein, 225 aa, Muscodor strobelii
  misc_feature: SGI Peptide ID NO. 567437
  misc_feature (8)..(223): NCBI GI: 261361417 Blast Desc: conserved [Verticillium albo-atrum VaMs.102]
  misc_feature (24)..(225): NCBI GI: 169595044 Blast Desc: SNOG_00255 [Phaeosphaeria nodorum SN15] gi|111070630|gb|EAT91750.1| SNOG_00255 [Phaeosphaeria nodorum SN15]
MAGDSSPFYLFANVNFVPDCYDAWQAAYDDLGRYVFDQEHSTESYYFGIPVEYGSEISKTPHMFAFEVYGKREDLYTTHLGSPAMQMFLQKVPPLMTTGLDLLHFEKVGGYIDRRNDLSPCAVMKDTRIKATSASSREAIVEAMKILSKSIEEDKECEGILTFATFKSLDNDVDGRMFARWDTRERMEWFERRADVLAFWKGIKDFVVQMEWKNYVENGKGWLHR

SEQ ID NO: 21939 - DNA, 1206 bp, Muscodor strobelii
  misc_feature: SGI cDNA ID NO. 567438
  misc_feature: Reduced expression when VOC is produced
  misc_feature: Encodes the peptide sequence at SEQ ID NO 21940
atggcttcccaattcccgccgccgccggtcaacaccattgactgggctcatgtgggcttcagagtccgtgaagtgaacggccacatcgaatcccactattccaagaagacgggcaagtggtcgcccctccaattcgtcgccgacccctatatccgcatccatggcatggcgcccggcctcaactacggtcagcaggcctatgagggtctcaaggcctttcgcacaccgacaggcgagatcaccgtcttccgccccgaccgaaacgctcgccgtctgcagcgctcagccgagttcatctcgtgtcctcccgtgcctgaggacctattcgtcgacgccgtcaaggctgccgtctccctcaacgccgaatacgtaccccctcacgagacaggcgccgccatgtacattcgcccccagatctacggttccagtgctcatctgcctctcgaaccccccgaggaatacatgttctgtgtcttcgtcatgcccacaggcgtgtaccacggcactcatctcgtaaaggccctgatcctcgacgacttcgacagagctgcgcccaatggaaccggcagcgcaaaggtgggcggtaactatgcaccggtcttgaggtggagcgacagagcccgaacccagggatatggtatcacgctacatctcgacagtgccacgcatacggagatcgacgagttcagcaccagtggcttcatcggcgccaaggtggacggcgatgatgtcaccttggttgtccctgactccaagaacgtcatcaagagcgtaacccaggacagtatcatggatcttgggcagagcttcggttggaagatcgagcgtcgctccatcaaatatgcagagctgccgactttctcggaagtcatggcagccggcacagctgctgccctggtgcccatccgttccatcacccgtagcataccgcctacatcgcctcaatccatctttactgctatcgggaaacacgagagattatcgtccgacaacgattccgagaaggtcacctacgctcccgacgatcaagaggatattggtgccatctgcacccgcttgttaacgcagttgcgggctatacagctcggaaaggccaaggatgatttcaactggcgtttccaggtgagccgcgaagatggcacaaaggtggtaggcgaagagtcgccgacaaatggcaatagcaagacgattgatcaacttgattga

SEQ ID NO: 21940 - protein, 401 aa, Muscodor strobelii
  misc_feature: SGI Peptide ID NO. 567438
  misc_feature (44)..(319): Pfam Id: PF01063 Pfam Desc: Aminotransferase class IV
  misc_feature (44)..(199): Pfam Id: PF01063 Pfam Desc: Aminotransferase class IV
  misc_feature (256)..(305): Pfam Id: PF01063 Pfam Desc: Aminotransferase class IV
  misc_feature (1)..(401): NCBI GI: 171695708 Blast Desc: protein product [Podospora anserina] gi|170948096|emb|CAP60260.1| protein product [Podospora anserina]
  misc_feature (1)..(382): NCBI GI: 39968065 Blast Desc: MGG_02125 [Magnaporthe grisea 70-15] gi|145013009|gb|EDJ97650.1| MGG_02125 [Magnaporthe grisea 70-15]
  misc_feature (3)..(401): NCBI GI: 46122637 Blast Desc: FG05696.1 [Gibberella zeae PH-1]
  misc_feature (3)..(401): NCBI GI: 256727260 Blast Desc: [Nectria haematococca mpVI 77-13-4]
  misc_feature (5)..(400): NCBI GI: 156036256 Blast Desc: SS1G_12816 [Sclerotinia sclerotiorum 1980] gi|154698222|gb|EDN97960.1| SS1G_12816 [Sclerotinia sclerotiorum 1980]
  misc_feature (5)..(400): NCBI GI: 154308438 Blast Desc: branched-chain-amino-acid aminotransferase [Botryotinia fuckeliana B05.10] gi|150852820|gb|EDN28012.1| branched-chain-amino-acid aminotransferase [Botryotinia B05.10]
  misc_feature (5)..(401): NCBI GI: 116181200 Blast Desc: CHGG_01228 [Chaetomium globosum CBS 148.51] gi|88185525|gb|EAQ92993.1| CHGG_01228 [Chaetomium globosum CBS 148.51]
  misc_feature (5)..(377): NCBI GI: 70990138 Blast Desc: branched-chain amino acid aminotransferase [Aspergillus fumigatus Af293] gi|66847550|gb|EAL87880.1| branched-chain amino acid aminotransferase [Aspergillus fumigatus
  misc_feature (2)..(392): NCBI GI: 169766938 Blast Desc: [Aspergillus oryzae RIB40] gi|83765795|dbj|BAE55938.1| protein product [Aspergillus oryzae]
  misc_feature (5)..(377): NCBI GI: 159130400 Blast Desc: branched-chain amino acid aminotransferase [Aspergillus fumigatus A1163]
  misc_feature (21)..(371): SWISSPROT Homolog: EC 2.6.1.42 Branched-chain-amino-acid transaminase
  misc_feature: Useful for introducing or modulating the production of volatile compounds
  misc_feature: Useful for fungicidal and/or biocontrol applications
  misc_feature: Useful for production of fusel alcohols
MASQFPPPPVNTIDWAHVGFRVREVNGHIESHYSKKTGKWSPLQFVADPYIRIHGMAPGLNYGQQAYEGLKAFRTPTGEITVFRPDRNARRLQRSAEFISCPPVPEDLFVDAVKAAVSLNAEYVPPHETGAAMYIRPQIYGSSAHLPLEPPEEYMFCVFVMPTGVYHGTHLVKALILDDFDRAAPNGTGSAKVGGNYAPVLRWSDRARTQGYGITLHLDSATHTEIDEFSTSGFIGAKVDGDDVTLVVPDSKNVIKSVTQDSIMDLGQSFGWKIERRSIKYAELPTFSEVMAAGTAAALVPIRSITRSIPPTSPQSIFTAIGKHERLSSDNDSEKVTYAPDDQEDIGAICTRLLTQLRAIQLGKAKDDFNWRFQVSREDGTKVVGEESPTNGNSKTIDQLD

SEQ ID NO: 21941 - DNA, 5655 bp, Muscodor strobelii
  misc_feature: SGI EST ID NO. CUFF.52041.1
  misc_feature: Variant of the nucleotide sequence at SEQ ID NO 21939
gacgaatgcaactgtagcaccggttacaacgccggggcttttgtgcgtcacggtgtgtcgaaggtgtcactccgttattcggagcactcctgaaaatttcccctacgccctcgtgtcatacggcttcttactcagaccatgagatgtcgtgataattcaattcgtagatactagagtgcagattgtgtcctgttccaagtacgcccttcagctgtcaggtgtggttattaaacagtaactcaatcgctcaggcttagaattcttgcatccccttccaatccgcctgctgcaaactgagcacagctagacgcatattgcacacgatggcttcccaattcccgccgccgccggtcaacaccattgactgggctcatgtgggcttcagagtccgtgaagtgaacggccacatcgaatcccactattccaagaagacgggcaagtggtcgcccctccaattcgtcgccgacccctatatccgcatccatggcatggcgcccggcctcaactacggtcagcaggcctatgagggtctcaaggcctttcgcacaccgacaggcgagatcaccgtcttccgccccgaccgaaacgctcgccgtctgcagcgctcagccgagttcatctcgtgtcctcccgtgcctgaggacctattcgtcgacgccgtcaaggctgccgtctccctcaacgccgaatacgtaccccctcacgagacaggcgccgccatgtacattcgcccccagatctacggttccagtgctcatctgcctctcgaaccccccgaggaatacatgttctgtgtcttcgtcatgcccacaggcgtgtaccacggcactcatctcgtaaaggccctgatcctcgacgacttcgacagagctgcgcccaatggaaccggcagcgcaaaggtgggcggtaactatgcaccggtcttgaggtggagcgacagagcccgaacccagggatatggtatcacgctacatctcgacagtgccacgcatacggagatcgacgagttcagcaccagtggcttcatcggcgccaaggtggacggcgatgatgtcaccttggttgtccctgactccaagaacgtcatcaagagcgtaacccaggacagtatcatggatcttgggcagagcttcggttggaagatcgagcgtcgctccatcaaatatgcagagctgccgactttctcggaagtcatggcagccggcacagctgctgccctggtgcccatccgttccatcacccgtagcataccgcctacatcgcctcaatccatctttactgctatcgggaaacacgagagattatcgtccgacaacgattccgagaaggtcacctacgctcccgacgatcaagaggatattggtgccatctgcacccgcttgttaacgcagttgcgggctatacagctcggaaaggccaaggatgatttcaactggcgtttccaggtgagccgcgaagatggcacaaaggtggtaggcgaagagtcgccgacaaatggcaatagcaagacgattgatcaacttgattgaaatatcacatgattcctcagatgatggcgcgcataaatggcttaaatgtctaaaggctcataacagggaaacggaaaatgcaaaagaacaacgaggcaagtgccaatcttgtatatcgctatctggcacttggggcctttaataaacaaagagattcattatcggcccctctgtcagaattgttggcaagagggtaggctcgatcaaaagacaggtctatgggctgctgcatgttggtcatctacgaaattggagtgcatatagtctcgtctgaatatgcaaactacttcatcaggcaggttgctgtagcatacctcggctccccagagtagcttcatccaaggttgtaataatacaggatgcccacgagcatatccagtctctcggctccaaacaattgctgtagatgggatgacattgattcaagaatgtctgtgacatcacaaagttgcagcacggtcacttgattagggttcactgcgccgccttgcgtctggcgccaggggccgttcgcaaaatgtagtacccctcatatggccaaaacccgctgacatgtgtttatcccacagggccactttaccttactcaggaccctttctggccagggcaccaaaacgcaagcctgtggttgttcaagcccgcatgtttctctaatggttatctttgctacaaattacaattacactatccttaatgaaacgacagaagtcatgaaaatccctcacgccaccagcaatgccacgcagcctcttgcgctcgtcagttcgagggtggggagatctagtacacggcgagcaggggtcgactcggtcaagggtttcattcggtatagcgccaagaaggatagcactaatagtgccagctccagccctaccacctttctgtgaggtttatgatatcaagttgttatcctattatcaccaccaaacaaacgatacaccaccgccctaaactgtaatcatcatgcacataagacgaattttcaaaacgatggcgatctgtatctcatccctgcgctagcaaaagatagcaagccggccaatggagcctccgctccttgaccaggtgttgcgatgtggctatccgcggcgctggtctattgagagaagagagtgggatgaatgggaacaaagacagagtttggaccaagaccgggtcaagtccttgatttcaagacgaaaatctcaactgctagtccacattcaagcaagtagaatctgaaagatagttctctacgtataaatctgagatccgtccccccttgctagcccctttacctcaccgttgtaaccatactttcaacgctttggccgggcgttcctccaaaacacagcgtcggatctgcatctgtatgcaaccgttgcgcttgtgaaaatcttacgtattgattacctattgccgtgtttcgttgctacctttagctacaggctatggctactccaaccatcaccattgctgatgatacatatccggagaagcgagaagctgccggccgatctgaggctggcggtgtctacaatgtccggagcttgtcccgttcacgccagccacgtgcgcgtcggagtgcctctcgagcctcacaggatggccggggcactaatgacgacgtagaggacggtgatgatgggtggcttcgtgaggatggcaaagtaaagcaggtctacaagggaacaacactgctctggctcgcatatcagtcgacaggcgcaatctatggagatattggtactagtcctctatacgtgtattccagtactttcaccgattcaccttcgaaagccgatcttctcgaagtcctctcagtaattctctggtcactgacgattatggtcacattcaaatatgtcctgatcatcttgcgcgcggataaccaaggcgagggcggcactttcagctgctactctttgctcacacgttatgccaacctaacggatcgagaccctcgtgaagccgcccttgttaagatggagcgccatttgacaggagacttacgtcctagtaatcagacagtacgcaataagttggagaaaagcaagtttctacgtggcctattaaagactgtcggagtgttggctgtgtccatggtaatagcggatggcattctcacaccggcgcaatcggtactgggagcaattcaaggccttaaagtcgtacgaccagaaattacacagtcagcaattgtcggcgcctcgagcggcatccttatcttgctattcgccattcagcctctcggtctcactaggctcgcttctacctttgcacccattgttatcgtatggcttgcattcaacgcatcattcggaatatacaatcttgtcaagtatgaccattccgtcctgaaagctttctcgccctattacgccatccacttcttcattcggggtaaaaccgaggcatggaagaagcttggtggcatcttgctctcatttactggcgtcgaggccttgttcgcggacttgggcgcattcagcatgcaagcaatccaaattagctggttaggttattgctaccctgcgttgctattagcatacgtcggacaagcagcctttattagcgttcatccggaagcctggtcgaacccctttttcaacaccgttcctccaggacttctctaccccagtttggttgttgctgtcctagctgccatcgtagcctcgcaagccatgatcactgcctgcttccagcttgtcagccaactaatgaagctctcttattgccctcaagtgaaaatcgtccacacttctacaaaatttcatggccagctttacgttccatttcttaactggattcttctagttgggactgttatagtcaccgctgtctactcgaatactactcgcttggggaatgcatatggcgtttgcgttatctttgtcacattcttcgatacttgcttcgtgacactcgtcgccttgatagtttggcgagtgccaccctactatgtctttctaccatggctattctttgccactcacgatggtctctatcttacttcagcgctcaataaagttcctgacggagcctggtttactcttcttctggctggaattcttgctagcattttccttctctggcggttcgggaaggaaaatcaatggcgcgcagaagctgaggatcgtttccgtcttgattctctcgtcaagagagatccggacggtggtctcatgctcacgtcgcgttggggtggcaatgatgtcgcccccatccgcggctttggtatctatttcgataaaactggtgtgcttacaccgaccgtcttcacacaattcgttacgaagtttggagctttacctgatgttatgatcttctttcatctacatcccgttgagacacccactgtgccatcgagcgagcggtatgttgtatctagaatggcagctgtgcccggatgctacagactcgttgtgcgacatggcttcatggacgaagtcattactcccgatctagcaattctgatttacgaacaagttcgtcagtttgtagtgcataaagcggccggcgccgacttcgatgacagaaccgctcccaattcgagatcgagcgagtccactgccatggcctctggatctgagaaaccggggagcgaatctacagaacccaagaacaatacccccgccgaggataacgagttgggcgctactgcttcctccgacgagctggacaaggggaagcgtcgacaaatcggagcagccgagctttccgacaagaaaatacgagatgagcttggtcggctcgaccgggcttatgctacgaaagtgatgtacgtcgtcggcaaagagcaaatgaaaatcaaaaccggcgcctcaatatttcgccgtatcatacttcagacattccttatcattcgcgaaaatactcgcacaaaggttgcaaacctgcgcctcgccatggatcgtgttgttgaggtgggatttgttaaagagatatagcaggacgcaggatctgaagagtcatctgattgtcggaccttggacttgggtaaagtgagcgattgtctttgttttattagtctgatggaaatattgggcttgactggttgcacatagatcatagcgaattaaggtacttgtgacacactgcttgaataaccatttttaagaaatccatttcagtatgaagtaatgcg

SEQ ID NO: 21942 - DNA, 2499 bp, Muscodor strobelii
  misc_feature: SGI cDNA ID NO. 567439
  misc_feature: Reduced expression when VOC is produced
  misc_feature: Encodes the peptide sequence at SEQ ID NO 21943
atggctactccaaccatcaccattgctgatgatacatatccggagaagcgagaagctgccggccgatctgaggctggcggtgtctacaatgtccggagcttgtcccgttcacgccagccacgtgcgcgtcggagtgcctctcgagcctcacaggatggccggggcactaatgacgacgtagaggacggtgatgatgggtggcttcgtgaggatggcaaagtaaagcaggtctacaagggaacaacactgctctggctcgcatatcagtcgacaggcgcaatctatggagatattggtactagtcctctatacgtgtattccagtactttcaccgattcaccttcgaaagccgatcttctcgaagtcctctcagtaattctctggtcactgacgattatggtcacattcaaatatgtcctgatcatcttgcgcgcggataaccaaggcgagggcggcactttcagctgctactctttgctcacacgttatgccaacctaacggatcgagaccctcgtgaagccgcccttgttaagatggagcgccatttgacaggagacttacgtcctagtaatcagacagtacgcaataagttggagaaaagcaagtttctacgtggcctattaaagactgtcggagtgttggctgtgtccatggtaatagcggatggcattctcacaccggcgcaatcggtactgggagcaattcaaggccttaaagtcgtacgaccagaaattacacagtcagcaattgtcggcgcctcgagcggcatccttatcttgctattcgccattcagcctctcggtctcactaggctcgcttctacctttgcacccattgttatcgtatggcttgcattcaacgcatcattcggaatatacaatcttgtcaagtatgaccattccgtcctgaaagctttctcgccctattacgccatccacttcttcattcggggtaaaaccgaggcatggaagaagcttggtggcatcttgctctcatttactggcgtcgaggccttgttcgcggacttgggcgcattcagcatgcaagcaatccaaattagctggttaggttattgctaccctgcgttgctattagcatacgtcggacaagcagcctttattagcgttcatccggaagcctggtcgaacccctttttcaacaccgttcctccaggacttctctaccccagtttggttgttgctgtcctagctgccatcgtagcctcgcaagccatgatcactgcctgcttccagcttgtcagccaactaatgaagctctcttattgccctcaagtgaaaatcgtccacacttctacaaaatttcatggccagctttacgttccatttcttaactggattcttctagttgggactgttatagtcaccgctgtctactcgaatactactcgcttggggaatgcatatggcgtttgcgttatctttgtcacattcttcgatacttgcttcgtgacactcgtcgccttgatagtttggcgagtgccaccctactatgtctttctaccatggctattctttgccactcacgatggtctctatcttacttcagcgctcaataaagttcctgacggagcctggtttactcttcttctggctggaattcttgctagcattttccttctctggcggttcgggaaggaaaatcaatggcgcgcagaagctgaggatcgtttccgtcttgattctctcgtcaagagagatccggacggtggtctcatgctcacgtcgcgttggggtggcaatgatgtcgcccccatccgcggctttggtatctatttcgataaaactggtgtgcttacaccgaccgtcttcacacaattcgttacgaagtttggagctttacctgatgttatgatcttctttcatctacatcccgttgagacacccactgtgccatcgagcgagcggtatgttgtatctagaatggcagctgtgcccggatgctacagactcgttgtgcgacatggcttcatggacgaagtcattactcccgatctagcaattctgatttacgaacaagttcgtcagtttgtagtgcataaagcggccggcgccgacttcgatgacagaaccgctcccaattcgagatcgagcgagtccactgccatggcctctggatctgagaaaccggggagcgaatctacagaacccaagaacaatacccccgccgaggataacgagttgggcgctactgcttcctccgacgagctggacaaggggaagcgtcgacaaatcggagcagccgagctttccgacaagaaaatacgagatgagcttggtcggctcgaccgggcttatgctacgaaagtgatgtacgtcgtcggcaaagagcaaatgaaaatcaaaaccggcgcctcaatatttcgccgtatcatacttcagacattccttatcattcgcgaaaatactcgcacaaaggttgcaaacctgcgcctcgccatggatcgtgttgttgaggtgggatttgttaaagagatatag

SEQ ID NO: 21943 - protein, 832 aa, Muscodor strobelii
  misc_feature: SGI Peptide ID NO. 567439
  misc_feature (85)..(832): Pfam Id: PF02705 Pfam Desc: K+ potassium transporter
  misc_feature (14)..(832): NCBI GI: 171695710 Blast Desc: protein product [Podospora anserina] gi|170948097|emb|CAP60261.1| protein product [Podospora anserina]
  misc_feature (26)..(832): NCBI GI: 85115837 Blast Desc: NCU00790 [Neurospora crassa OR74A] gi|3724139|emb|CAA08814.1| potassium transporter [Neurospora crassa] gi|28926744|gb|EAA35710.1| conserved [Neurospora crassa
  misc_feature (15)..(832): NCBI GI: 261356634 Blast Desc: potassium transporter 1 [Verticillium albo-atrum VaMs.102]
  misc_feature (6)..(832): NCBI GI: 145605142 Blast Desc: MGG_02124 [Magnaporthe grisea 70-15] gi|145013008|gb|EDJ97649.1| MGG_02124 [Magnaporthe grisea 70-15]
  misc_feature (15)..(832): NCBI GI: 169622079 Blast Desc: SNOG_14254 [Phaeosphaeria nodorum SN15] gi|160704690|gb|EAT78491.2| SNOG_14254 [Phaeosphaeria nodorum SN15]
  misc_feature (18)..(832): NCBI GI: 238496899 Blast Desc: conserved [Aspergillus flavus NRRL3357] gi|220694565|gb|EED50909.1| conserved [Aspergillus flavus NRRL3357]
  misc_feature (18)..(832): NCBI GI: 145232510 Blast Desc: An02g05630 [Aspergillus niger] gi|134056616|emb|CAK47691.1| protein product [Aspergillus niger]
  misc_feature (42)..(832): NCBI GI: 169774541 Blast Desc: [Aspergillus oryzae RIB40] gi|83769601|dbj|BAE59736.1| protein product [Aspergillus oryzae]
  misc_feature (21)..(832): NCBI GI: 226281207 Blast Desc: potassium transporter 5 [Paracoccidioides brasiliensis Pb01]
  misc_feature (71)..(832): NCBI GI: 154309702 Blast Desc: BC1G_07321 [Botryotinia fuckeliana B05.10] gi|150851782|gb|EDN26975.1| BC1G_07321 [Botryotinia fuckeliana B05.10]
  misc_feature: Useful for introducing or modulating the production of volatile compounds
MATPTITIADDTYPEKREAAGRSEAGGVYNVRSLSRSRQPRARRSASRASQDGRGTNDDVEDGDDGWLREDGKVKQVYKGTTLLWLAYQSTGAIYGDIGTSPLYVYSSTFTDSPSKADLLEVLSVILWSLTIMVTFKYVLIILRADNQGEGGTFSCYSLLTRYANLTDRDPREAALVKMERHLTGDLRPSNQTVRNKLEKSKFLRGLLKTVGVLAVSMVIADGILTPAQSVLGAIQGLKVVRPEITQSAIVGASSGILILLFAIQPLGLTRLASTFAPIVIVWLAFNASFGIYNLVKYDHSVLKAFSPYYAIHFFIRGKTEAWKKLGGILLSFTGVEALFADLGAFSMQAIQISWLGYCYPALLLAYVGQAAFISVHPEAWSNPFFNTVPPGLLYPSLVVAVLAAIVASQAMITACFQLVSQLMKLSYCPQVKIVHTSTKFHGQLYVPFLNWILLVGTVIVTAVYSNTTRLGNAYGVCVIFVTFFDTCFVTLVALIVWRVPPYYVFLPWLFFATHDGLYLTSALNKVPDGAWFTLLLAGILASIFLLWRFGKENQWRAEAEDRFRLDSLVKRDPDGGLMLTSRWGGNDVAPIRGFGIYFDKTGVLTPTVFTQFVTKFGALPDVMIFFHLHPVETPTVPSSERYVVSRMAAVPGCYRLVVRHGFMDEVITPDLAILIYEQVRQFVVHKAAGADFDDRTAPNSRSSESTAMASGSEKPGSESTEPKNNTPAEDNELGATASSDELDKGKRRQIGAAELSDKKIRDELGRLDRAYATKVMYVVGKEQMKIKTGASIFRRIILQTFLIIRENTRTKVANLRLAMDRVVEVGFVKEI

SEQ ID NO: 21944 - DNA, 5711 bp, Muscodor strobelii
  misc_feature: SGI EST ID NO. CUFF.52041.2
  misc_feature: Variant of the nucleotide sequence at SEQ ID NO 21942
gacgaatgcaactgtagcaccggttacaacgccggggcttttgtgcgtcacggtgtgtcgaaggtgtcactccgttattcggagcactcctgaaaatttcccctacgccctcgtgtcatacggcttcttactcagaccatgagatgtcgtgataattcaattcgtagatactagagtgcagattgtgtcctgttccaagtacgcccttcagctgtcaggtgtggttattaaacagtaactcaatcgctcaggcttagaattcttgcatccccttccaatccgcctgctgcaaactgagcacagctagacgcatattgcacacgatggcttcccaattcccgccgccgccggtcaacaccattgactgggctcatgtgggcttcagagtccgtgaaggtgagcagcaaccgaccgccgagatgccgacgtgcccgattgacaaagcccgaaagtgaacggccacatcgaatcccactattccaagaagacgggcaagtggtcgcccctccaattcgtcgccgacccctatatccgcatccatggcatggcgcccggcctcaactacggtcagcaggcctatgagggtctcaaggcctttcgcacaccgacaggcgagatcaccgtcttccgccccgaccgaaacgctcgccgtctgcagcgctcagccgagttcatctcgtgtcctcccgtgcctgaggacctattcgtcgacgccgtcaaggctgccgtctccctcaacgccgaatacgtaccccctcacgagacaggcgccgccatgtacattcgcccccagatctacggttccagtgctcatctgcctctcgaaccccccgaggaatacatgttctgtgtcttcgtcatgcccacaggcgtgtaccacggcactcatctcgtaaaggccctgatcctcgacgacttcgacagagctgcgcccaatggaaccggcagcgcaaaggtgggcggtaactatgcaccggtcttgaggtggagcgacagagcccgaacccagggatatggtatcacgctacatctcgacagtgccacgcatacggagatcgacgagttcagcaccagtggcttcatcggcgccaaggtggacggcgatgatgtcaccttggttgtccctgactccaagaacgtcatcaagagcgtaacccaggacagtatcatggatcttgggcagagcttcggttggaagatcgagcgtcgctccatcaaatatgcagagctgccgactttctcggaagtcatggcagccggcacagctgctgccctggtgcccatccgttccatcacccgtagcataccgcctacatcgcctcaatccatctttactgctatcgggaaacacgagagattatcgtccgacaacgattccgagaaggtcacctacgctcccgacgatcaagaggatattggtgccatctgcacccgcttgttaacgcagttgcgggctatacagctcggaaaggccaaggatgatttcaactggcgtttccaggtgagccgcgaagatggcacaaaggtggtaggcgaagagtcgccgacaaatggcaatagcaagacgattgatcaacttgattgaaatatcacatgattcctcagatgatggcgcgcataaatggcttaaatgtctaaaggctcataacagggaaacggaaaatgcaaaagaacaacgaggcaagtgccaatcttgtatatcgctatctggcacttggggcctttaataaacaaagagattcattatcggcccctctgtcagaattgttggcaagagggtaggctcgatcaaaagacaggtctatgggctgctgcatgttggtcatctacgaaattggagtgcatatagtctcgtctgaatatgcaaactacttcatcaggcaggttgctgtagcatacctcggctccccagagtagcttcatccaaggttgtaataatacaggatgcccacgagcatatccagtctctcggctccaaacaattgctgtagatgggatgacattgattcaagaatgtctgtgacatcacaaagttgcagcacggtcacttgattagggttcactgcgccgccttgcgtctggcgccaggggccgttcgcaaaatgtagtacccctcatatggccaaaacccgctgacatgtgtttatcccacagggccactttaccttactcaggaccctttctggccagggcaccaaaacgcaagcctgtggttgttcaagcccgcatgtttctctaatggttatctttgctacaaattacaattacactatccttaatgaaacgacagaagtcatgaaaatccctcacgccaccagcaatgccacgcagcctcttgcgctcgtcagttcgagggtggggagatctagtacacggcgagcaggggtcgactcggtcaagggtttcattcggtatagcgccaagaaggatagcactaatagtgccagctccagccctaccacctttctgtgaggtttatgatatcaagttgttatcctattatcaccaccaaacaaacgatacaccaccgccctaaactgtaatcatcatgcacataagacgaattttcaaaacgatggcgatctgtatctcatccctgcgctagcaaaagatagcaagccggccaatggagcctccgctccttgaccaggtgttgcgatgtggctatccgcggcgctggtctattgagagaagagagtgggatgaatgggaacaaagacagagtttggaccaagaccgggtcaagtccttgatttcaagacgaaaatctcaactgctagtccacattcaagcaagtagaatctgaaagatagttctctacgtataaatctgagatccgtccccccttgctagcccctttacctcaccgttgtaaccatactttcaacgctttggccgggcgttcctccaaaacacagcgtcggatctgcatctgtatgcaaccgttgcgcttgtgaaaatcttacgtattgattacctattgccgtgtttcgttgctacctttagctacaggctatggctactccaaccatcaccattgctgatgatacatatccggagaagcgagaagctgccggccgatctgaggctggcggtgtctacaatgtccggagcttgtcccgttcacgccagccacgtgcgcgtcggagtgcctctcgagcctcacaggatggccggggcactaatgacgacgtagaggacggtgatgatgggtggcttcgtgaggatggcaaagtaaagcaggtctacaagggaacaacactgctctggctcgcatatcagtcgacaggcgcaatctatggagatattggtactagtcctctatacgtgtattccagtactttcaccgattcaccttcgaaagccgatcttctcgaagtcctctcagtaattctctggtcactgacgattatggtcacattcaaatatgtcctgatcatcttgcgcgcggataaccaaggcgagggcggcactttcagctgctactctttgctcacacgttatgccaacctaacggatcgagaccctcgtgaagccgcccttgttaagatggagcgccatttgacaggagacttacgtcctagtaatcagacagtacgcaataagttggagaaaagcaagtttctacgtggcctattaaagactgtcggagtgttggctgtgtccatggtaatagcggatggcattctcacaccggcgcaatcggtactgggagcaattcaaggccttaaagtcgtacgaccagaaattacacagtcagcaattgtcggcgcctcgagcggcatccttatcttgctattcgccattcagcctctcggtctcactaggctcgcttctacctttgcacccattgttatcgtatggcttgcattcaacgcatcattcggaatatacaatcttgtcaagtatgaccattccgtcctgaaagctttctcgccctattacgccatccacttcttcattcggggtaaaaccgaggcatggaagaagcttggtggcatcttgctctcatttactggcgtcgaggccttgttcgcggacttgggcgcattcagcatgcaagcaatccaaattagctggttaggttattgctaccctgcgttgctattagcatacgtcggacaagcagcctttattagcgttcatccggaagcctggtcgaacccctttttcaacaccgttcctccaggacttctctaccccagtttggttgttgctgtcctagctgccatcgtagcctcgcaagccatgatcactgcctgcttccagcttgtcagccaactaatgaagctctcttattgccctcaagtgaaaatcgtccacacttctacaaaatttcatggccagctttacgttccatttcttaactggattcttctagttgggactgttatagtcaccgctgtctactcgaatactactcgcttggggaatgcatatggcgtttgcgttatctttgtcacattcttcgatacttgcttcgtgacactcgtcgccttgatagtttggcgagtgccaccctactatgtctttctaccatggctattctttgccactcacgatggtctctatcttacttcagcgctcaataaagttcctgacggagcctggtttactcttcttctggctggaattcttgctagcattttccttctctggcggttcgggaaggaaaatcaatggcgcgcagaagctgaggatcgtttccgtcttgattctctcgtcaagagagatccggacggtggtctcatgctcacgtcgcgttggggtggcaatgatgtcgcccccatccgcggctttggtatctatttcgataaaactggtgtgcttacaccgaccgtcttcacacaattcgttacgaagtttggagctttacctgatgttatgatcttctttcatctacatcccgttgagacacccactgtgccatcgagcgagcggtatgttgtatctagaatggcagctgtgcccggatgctacagactcgttgtgcgacatggcttcatggacgaagtcattactcccgatctagcaattctgatttacgaacaagttcgtcagtttgtagtgcataaagcggccggcgccgacttcgatgacagaaccgctcccaattcgagatcgagcgagtccactgccatggcctctggatctgagaaaccggggagcgaatctacagaacccaagaacaatacccccgccgaggataacgagttgggcgctactgcttcctccgacgagctggacaaggggaagcgtcgacaaatcggagcagccgagctttccgacaagaaaatacgagatgagcttggtcggctcgaccgggcttatgctacgaaagtgatgtacgtcgtcggcaaagagcaaatgaaaatcaaaaccggcgcctcaatatttcgccgtatcatacttcagacattccttatcattcgcgaaaatactcgcacaaaggttgcaaacctgcgcctcgccatggatcgtgttgttgaggtgggatttgttaaagagatatagcaggacgcaggatctgaagagtcatctgattgtcggaccttggacttgggtaaagtgagcgattgtctttgttttattagtctgatggaaatattgggcttgactggttgcacatagatcatagcgaattaaggtacttgtgacacactgcttgaataaccatttttaagaaatccatttcagtatgaagtaatgcg

SEQ ID NO: 21945 - DNA, 1626 bp, Muscodor strobelii
  misc_feature: SGI cDNA ID NO. 567440
  misc_feature: Encodes the peptide sequence at SEQ ID NO 21946
atggcagcccgttggcaactcaatgaattccgccgagaaaagatagaccaattctggtactacagacatgcatacgtatgggatcgcgaggaacgacgaagagcaggcttttcgaaagcagatctcccgctcttggatccagcacctgatgtcttcgttccaaatgtagtgccatttgaaaaggcgttacaaaggccgatgcatcaccaactcaatatcgaccagtattcgaagtcgggtgatatcagagacttgccgccaaaagcccaaactgcctggcgtgaatcgcatcgacttagaacagcattcttgaaaaacaggcggggatttagatatctgaaatctcttggctggggcggcaatggcatcgcctcggcttacgaacagttagacatagaagatgcgaacacatattccgatgtcgaagctgcgaacgctgctacacagactgataatactgaagatggcaatgcggcgggctcaacggcgccaccacctcctatgccaacggtgctgattatcgaaatgctggagaatgggaatctccacgactttctagtccaagtgagagaacataatgaaacggtcccgcagacggttctgtggcattttttcaagtgccttgtacgcatgtgtattggcatggcgtatcctccagactcaaggccaaacgagtatcaaaatgtcccaggtccgatttcagagactgttcccaggacgccagatccgcctcctgaacctcggcgcttcgttcatttcgatatggatccactaaatatcttcattggtggcttcaggggagctgagcatagagtaacgccaatactcaagctcggagattttggctgttcgacaaatgttttagatgcccgacctgatttttactacgagcaactgagatggagaggcaaacgaaatttcctagcccccgaacaattctgtattgattgggattatatccctcgagactcgaacttagtcgccgcgcatgaagtggcaggcaactatcacgctcacactaatgtttggtccattggtttgttaatggaatgtatgatcacgttatgtcgcccgagagcgccgccataccctgcaacgattaccagattgccgccagctggtgtagaggagtactactcctacggaacacatctcctaaactctaacattgacgacgatcttttgaacgttatcatgcgttgtcaagcccatgtgcctgtacatagaccagatctcggcttcctcgaaacttttgtgtcctcagcaatagaatcgaaggtatatccgaacgagtcagatgatgagatggcggcatgggtgaatcgagtcttgttctcacctcccccatcgacaacaccggtgcctccagtgggccaagctgctacagtccagcaagttgggacaggacatgcgaatgtaccgactctaccaatcaagtcgtggctttcattaggctcacaaggcactcaagcggatccccaggcagctcctgcggcaggaggtgtaccaccagcaccgttgcagccagttgcgccagggcagaatacgaccactcccagatctagtcaattcgttaccgcgtcagactcgattaacgaagcaacgatgttctacagttttacttag

SEQ ID NO: 21946 - protein, 541 aa, Muscodor strobelii
  misc_feature: SGI Peptide ID NO. 567440
  misc_feature (171)..(449): NCBI GI: 85092153 Blast Desc: NCU06906 [Neurospora crassa OR74A] gi|28920656|gb|EAA30017.1| [Neurospora crassa OR74A]
  misc_feature (94)..(474): NCBI GI: 116201425 Blast Desc: [Chaetomium globosum CBS 148.51] gi|88177115|gb|EAQ84583.1| [Chaetomium globosum CBS 148.51]
  misc_feature (98)..(455): NCBI GI: 145601223 Blast Desc: [Magnaporthe grisea 70-15] gi|145009254|gb|EDJ93965.1| [Magnaporthe grisea 70-15]
  misc_feature (109)..(442): NCBI GI: 85109420 Blast Desc: NCU05722 [Neurospora crassa OR74A] gi|28924551|gb|EAA33672.1| [Neurospora crassa OR74A]
  misc_feature (169)..(447): NCBI GI: 85111903 Blast Desc: NCU00763 [Neurospora crassa OR74A] gi|28925929|gb|EAA34924.1| [Neurospora crassa OR74A] gi|38636417|emb|CAE81954.1| [Neurospora crassa]
  misc_feature (171)..(380): NCBI GI: 116201421 Blast Desc: [Chaetomium globosum CBS 148.51] gi|88177113|gb|EAQ84581.1| [Chaetomium globosum CBS 148.51]
  misc_feature (171)..(457): NCBI GI: 171695774 Blast Desc: protein product [Podospora anserina] gi|170948129|emb|CAP60293.1| protein product [Podospora anserina]
  misc_feature (171)..(457): NCBI GI: 171678998 Blast Desc: protein product [Podospora anserina] gi|170937570|emb|CAP62227.1| protein product [Podospora anserina]
  misc_feature (171)..(455): NCBI GI: 256730581 Blast Desc: NECHADRAFT_74247 [Nectria haematococca mpVI 77-13-4]
  misc_feature (135)..(438): NCBI GI: 85081014 Blast Desc: NCU05146 [Neurospora crassa OR74A] gi|28881434|emb|CAD70551.1| [Neurospora crassa] gi|28917716|gb|EAA27408.1| [Neurospora crassa OR74A]
MAARWQLNEFRREKIDQFWYYRHAYVWDREERRRAGFSKADLPLLDPAPDVFVPNVVPFEKALQRPMHHQLNIDQYSKSGDIRDLPPKAQTAWRESHRLRTAFLKNRRGFRYLKSLGWGGNGIASAYEQLDIEDANTYSDVEAANAATQTDNTEDGNAAGSTAPPPPMPTVLIIEMLENGNLHDFLVQVREHNETVPQTVLWHFFKCLVRMCIGMAYPPDSRPNEYQNVPGPISETVPRTPDPPPEPRRFVHFDMDPLNIFIGGFRGAEHRVTPILKLGDFGCSTNVLDARPDFYYEQLRWRGKRNFLAPEQFCIDWDYIPRDSNLVAAHEVAGNYHAHTNVWSIGLLMECMITLCRPRAPPYPATITRLPPAGVEEYYSYGTHLLNSNIDDDLLNVIMRCQAHVPVHRPDLGFLETFVSSAIESKVYPNESDDEMAAWVNRVLFSPPPSTTPVPPVGQAATVQQVGTGHANVPTLPIKSWLSLGSQGTQADPQAAPAAGGVPPAPLQPVAPGQNTTTPRSSQFVTASDSINEATMFYSFT

SEQ ID NO: 21947 - DNA, 855 bp, Muscodor strobelii
  misc_feature: SGI cDNA ID NO. 567441
  misc_feature: Encodes the peptide sequence at SEQ ID NO 21948
atggaagatgcgccaatcgtgcctgtacttccaccatggtctctgaagggaacagtgtacatgatcacatttaagtccaaggcggaacagctcccggaacatacatattctccccttgagagggactcagcgtacgcctcacccactgaatcagggaaacacctaggaggcatctctcaacttcagattattcgctacacagagagtccagtaggaccctatgatgaacttatagtttgtcctggatactacacctacgatgttgaagagaacggcaagcggaaaacgaagaagaatgcgcggatcagtcgaatatacgtatcacaaaaatatacttgctggaatggacgcaccaattggaatatacccaagcatcttgctaaatttgaatttgaagatcttgagggaggagtgacgaagatacgtgtgtatccgcacgacacgacaggtgacatcagcgaagcgcaacccagcaaggttccgttctttcaagcgaccttccaaccaatacgatgggcacctacttttccactctcaacatcgtggttcaagtatctaggacttgatatatcccttgttcaaccacccttacctgccggcccgggctccaagttcggcgagctaccaggaacagatcgctggtgcaagatcgagtcactccaagcttcaaagcggacgagcataggatgggtcgacttgtcgcagaagaatgaaaagggtgaaattgctacgagcgtgcagcacgaaaatttctggcctgatctagggcgatggcagctagcattcaaaatggacaacgccgatattggctttggggaagggacatactgggagactcctaagacaaagctctga

SEQ ID NO: 21948 - protein, 284 aa, Muscodor strobelii
  misc_feature: SGI Peptide ID NO. 567441
  misc_feature (1)..(284): NCBI GI: 39945594 Blast Desc: MGG_04779 [Magnaporthe grisea 70-15] gi|145011224|gb|EDJ95880.1| MGG_04779 [Magnaporthe grisea 70-15]
  misc_feature (6)..(280): NCBI GI: 256729827 Blast Desc: NECHADRAFT_47096 [Nectria haematococca mpVI 77-13-4]
  misc_feature (9)..(284): NCBI GI: 261353849 Blast Desc: conserved [Verticillium albo-atrum VaMs.102]
  misc_feature (4)..(279): NCBI GI: 189207499 Blast Desc: conserved [Pyrenophora tritici-repentis Pt-1C-BFP] gi|187976176|gb|EDU42802.1| conserved [Pyrenophora tritici-repentis Pt-1C-BFP]
  misc_feature (1)..(228): NCBI GI: 46122503 Blast Desc: FG05629.1 [Gibberella zeae PH-1]
  misc_feature (2)..(278): NCBI GI: 169616654 Blast Desc: SNOG_11503 [Phaeosphaeria nodorum SN15] gi|111060091|gb|EAT81211.1| SNOG_11503 [Phaeosphaeria nodorum SN15]
  misc_feature (2)..(239): NCBI GI: 189197371 Blast Desc: conserved [Pyrenophora tritici-repentis Pt-1C-BFP] gi|187980971|gb|EDU47597.1| conserved [Pyrenophora tritici-repentis Pt-1C-BFP]
  misc_feature (5)..(117): NCBI GI: 171695712 Blast Desc: protein product [Podospora anserina] gi|170948098|emb|CAP60262.1| protein product [Podospora anserina]
  misc_feature (27)..(214): NCBI GI: 239610530 Blast Desc: conserved [Ajellomyces dermatitidis ER-3]
  misc_feature (28)..(215): NCBI GI: 154281877 Blast Desc: [Ajellomyces capsulatus NAm1] gi|150411930|gb|EDN07318.1| [Ajellomyces capsulatus NAm1]
MEDAPIVPVLPPWSLKGTVYMITFKSKAEQLPEHTYSPLERDSAYASPTESGKHLGGISQLQIIRYTESPVGPYDELIVCPGYYTYDVEENGKRKTKKNARISRIYVSQKYTCWNGRTNWNIPKHLAKFEFEDLEGGVTKIRVYPHDTTGDISEAQPSKVPFFQATFQPIRWAPTFPLSTSWFKYLGLDISLVQPPLPAGPGSKFGELPGTDRWCKIESLQASKRTSIGWVDLSQKNEKGEIATSVQHENFWPDLGRWQLAFKMDNADIGFGEGTYWETPKTKL

SEQ ID NO: 21949 - DNA, 1812 bp, Muscodor strobelii
  misc_feature: SGI EST ID NO. CUFF.51592.1
  misc_feature: Variant of the nucleotide sequence at SEQ ID NO 21947
taagatgttggactgcaatcaatacatcatgcgctgttctgttcggaattgtaacctcgttgtggtgttcaatggaatccgccgatgacaccctaaaacgcccttctcaatgtgccaccaacatcctattacttaagcttcaccgcccattgatctgtctcagcgccatcctcgtcactagtggcatactcgtataatccctcgaccgtgtgctgtatgtcagggcgacagcacgaccgactgtactcctcaacagcaaatgatctcacttttctggtcaatcaccgtgctgcataaatcaaagtatacactaagaatccaacctaaagcggacagaccaagaacaggatcaggttcaaggaccgcgattatctcacaagctccccctcatctacctaggtaggcagtcatttctaagagcgaatggcgctccagcacttggatccacaattggtatagaaacatcctatcgccaagatagtcctaaatggcctcggcactctggacctcttgtatgtcatttaacaagtctacacgtcgtgaagtaagtcgtcggggcaccgattatttcaagctagcaaggaaagcaagccaagagtagggatcttattttcgccactgtcttgcatcacattccaagttctacctgacttgtggacggtcgagaaattacccgaagctctcgaagatggaagatgcgccaatcgtgcctgtacttccaccatggtctctgaagggaacagtgtacatgatcacatttaagtccaaggcggaacagctcccggaacatacatattctccccttgagagggactcagcgtacgcctcacccactgaatcagggaaacacctaggaggcatctctcaacttcagattattcgctacacagagagtccagtaggaccctatgatgaacttatagtttgtcctggatactacacctacgatgttgaagagaacggcaagcggaaaacgaagaagaatgcgcggatcagtcgaatatacgtatcacaaaaatatacttgctggaatggacgcaccaattggaatatacccaagcatcttgctaaatttgaatttgaagatcttgagggaggagtgacgaagatacgtgtgtatccgcacgacacgacaggtgacatcagcgaagcgcaacccagcaaggttccgttctttcaagcgaccttccaaccaatacgatgggcacctacttttccactctcaacatcgtggttcaagtatctaggacttgatatatcccttgttcaaccacccttacctgccggcccgggctccaagttcggcgagctaccaggaacagatcgctggtgcaagatcgagtcactccaagcttcaaagcggacgagcataggatgggtcgacttgtcgcagaagaatgaaaagggtgaaattgctacgagcgtgcagcacgaaaatttctggcctgatctagggcgatggcagctagcattcaaaatggacaacgccgatattggctttggggaagggacatactgggagactcctaagacaaagctctgagtattcaagcgggatgttcgcgcttagctcgtccatcactcacagtacttgaataagagccgagcaacactgtttcaaagacaatcatgacacaggcgagacggtctagcaaggtattgatcaaaacatggctcgaggattgtcgaccagaaagcattgaagtatcaatttccgagtgcatatatccattgtcataacagtggctacattatatacatcatctacttaattttggaaaatgatcagtataaatacattaaatgtgctca

SEQ ID NO: 21950 - DNA, 2193 bp, Muscodor strobelii
  misc_feature: SGI cDNA ID NO. 567442
  misc_feature: Encodes the peptide sequence at SEQ ID NO 21951
atgtctaatacaggccagaagccggccagccaagagcccaaggtcactattagtattggcgacagcactgatacccgtggttcccgtggttcccgcccacctctgaatcgtcgtcgcgacaagccacaattgagttgtaacctgtgccgacgtcgcaagcttcgatgtgaccgacaacacccgtgctctaattgcaagaagcgtgaaataggctcgtcctgtacctatgccaccggattccctacgtcaccttcagctaccgtacaggatcggttaagacgattagaagatctcgtggtttcatatattggggtggatccttctgtcccggctgcgccatcaaaccccccagccgaatctaaatcccttgcgtcctctgattttagtagcctcaaaagaagttgcaccgagacgaagtattcagatcagacgcactgggggtccatcctggacgctatctcagagctgaaggaagatgttggcaatacgagtgacatcaagccatctcaaagcattgcgcttctaccatctccgtccctcgatgccccattgctctatggctgcaaaccggcaactaaagatgagatattggctgctctaccttcgagagaaatagtcgactcacttgtttcggactacttcgaagtcctcgaggtcgcatcttgtgctttgcaccaggttgagtttgtcaagcaatgtatctcattttggcaagatcctcagaaaaccccagtgatgtggctgggtcttctttttagcattctagcagtatcatcgtaccttcaagaccaggaagctactggcatgaaccgtggtcgatatgaactagactacgcatttctaggggcagtttatcgcgagaaaacggcccagtgtctcttactaggtcaatacacaagatgtgggcctttcgtatgtgaaactcttatgcattatcttgcagcggagttcatgaggcgacgcgacacaaataacgaagtgtggcttctattaagctcaaccgctcatctcgcaatgcgaatgggataccatcgtgacccgtcccatttcgagtcgctttctccttatgaaggagagatgcgacggcgcctctgggccatgatctatcatctggatatctgcatgtctggccaactaggagttcctagacttgttaatgatgcattttgcgacacagaactacctcgtaatttgcttgattctgacttcagcgccgagtcatctcaactcccgccgtcgagaccagacacggaagttacacccatgctcatcattctgtcaaaaattcgcattggtcgtctttatacaatggttacgaacacagtaacgaacactcaggggtccacatatgctcaaatactccaggttgatcgcgatatcgaagaagcattttcggcaattccctcttgttgcaggatacacagtctctctgagtccgcgtccgattcgcctgtgattctccttcagaaaattttaatcgtaatgtcatactacaaagcacaaatcattctgcactggagatacttgaccatggcaaaaaaggaagatcgatactcatactctaaaaaggtcacaatatcagctgcgctaaagatcgtagaattgagccatgcgatatgtgagggactaaacaatggaggacgactcttcgctgttaggtggagagttggctctatccttaacaatgactcctttttcctggctacgagtgtcctatgtttttacttatcacaataccgcgatacaattagcaccccagagcttgacgagataacacgatgtctacgtgaaacgaaacagatctgggatatccgtggccgttcttcaaccgaggcacagcgagcagccactgccattcagactatcttacccggtattatagactttaatacaagtgagacctcgagcggaagctgggtttcaacgccgaacgataacgacgagcggacggcttttctaaacagtcaaggtattctaacctcatccgcgccgttgctagctatcacgcttacaagtgcttttctagatccctttgcgggcggtatgatgccattttttgactcgatgttcgaaggggcccctatgtttcgtccgcaacaaaatgagtcgcttgttgactcttttctgaccggtaatatggacctttggttccaggtaagtgcgactgccgagaatatgagatttgttagctga

SEQ ID NO: 21951 - protein, 730 aa, Muscodor strobelii
  misc_feature: SGI Peptide ID NO. 567442
  misc_feature (44)..(83): Pfam Id: PF00172 Pfam Desc: Fungal Zn(2)-Cys(6) binuclear cluster domain
  misc_feature (300)..(402): Pfam Id: PF04082 Pfam Desc: Fungal specific transcription factor domain
  misc_feature (306)..(402): Pfam Id: PF04082 Pfam Desc: Fungal specific transcription factor domain
  misc_feature (18)..(623): NCBI GI: 146323062 Blast Desc: fungal specific transcription factor [Aspergillus fumigatus Af293] gi|129558597|gb|EAL93929.2| fungal specific transcription factor, [Aspergillus fumigatus Af293]
  misc_feature (33)..(623): NCBI GI: 116205828 Blast Desc: CHGG_02207 [Chaetomium globosum CBS 148.51] gi|88182804|gb|EAQ90272.1| CHGG_02207 [Chaetomium globosum CBS 148.51]
  misc_feature (37)..(623): NCBI GI: 212538667 Blast Desc: fungal specific transcription factor, [Penicillium marneffei ATCC 18224] gi|210069231|gb|EEA23322.1| fungal specific transcription factor, [Penicillium marneffei ATCC 18224]
  misc_feature (113)..(623): NCBI GI: 159130022 Blast Desc: fungal specific transcription factor, [Aspergillus fumigatus A1163]
  misc_feature (23)..(637): NCBI GI: 238846084 Blast Desc: fungal specific transcription factor domain-containing protein [Microsporum canis CBS 113480]
  misc_feature (27)..(623): NCBI GI: 145249886 Blast Desc: An14g06590 [Aspergillus niger] gi|134081966|emb|CAK97232.1| protein product [Aspergillus niger]
  misc_feature (105)..(623): NCBI GI: 119482131 Blast Desc: fungal specific transcription factor, [Neosartorya fischeri NRRL 181] gi|119409248|gb|EAW19197.1| fungal specific transcription factor, [Neosartorya fischeri NRRL 181]
  misc_feature (37)..(652): NCBI GI: 121719872 Blast Desc: C6 transcription factor, [Aspergillus clavatus NRRL 1] gi|119404846|gb|EAW15208.1| C6 transcription factor, [Aspergillus clavatus NRRL 1]
  misc_feature (34)..(664): NCBI GI: 169604456 Blast Desc: SNOG_05242 [Phaeosphaeria nodorum SN15] gi|160706575|gb|EAT87633.2| SNOG_05242 [Phaeosphaeria nodorum SN15]
  misc_feature (37)..(623): NCBI GI: 259484596 Blast Desc: TPA: Zn(II)2Cys6 transcription factor (Eurofung) [Aspergillus nidulans FGSC A4]
MSNTGQKPASQEPKVTISIGDSTDTRGSRGSRPPLNRRRDKPQLSCNLCRRRKLRCDRQHPCSNCKKREIGSSCTYATGFPTSPSATVQDRLRRLEDLVVSYIGVDPSVPAAPSNPPAESKSLASSDFSSLKRSCTETKYSDQTHWGSILDAISELKEDVGNTSDIKPSQSIALLPSPSLDAPLLYGCKPATKDEILAALPSREIVDSLVSDYFEVLEVASCALHQVEFVKQCISFWQDPQKTPVMWLGLLFSILAVSSYLQDQEATGMNRGRYELDYAFLGAVYREKTAQCLLLGQYTRCGPFVCETLMHYLAAEFMRRRDTNNEVWLLLSSTAHLAMRMGYHRDPSHFESLSPYEGEMRRRLWAMIYHLDICMSGQLGVPRLVNDAFCDTELPRNLLDSDFSAESSQLPPSRPDTEVTPMLIILSKIRIGRLYTMVTNTVTNTQGSTYAQILQVDRDIEEAFSAIPSCCRIHSLSESASDSPVILLQKILIVMSYYKAQIILHWRYLTMAKKEDRYSYSKKVTISAALKIVELSHAICEGLNNGGRLFAVRWRVGSILNNDSFFLATSVLCFYLSQYRDTISTPELDEITRCLRETKQIWDIRGRSSTEAQRAATAIQTILPGIIDFNTSETSSGSWVSTPNDNDERTAFLNSQGILTSSAPLLAITLTSAFLDPFAGGMMPFFDSMFEGAPMFRPQQNESLVDSFLTGNMDLWFQVSATAENMRFVS

SEQ ID NO: 21952 - DNA, 3479 bp, Muscodor strobelii
  misc_feature: SGI EST ID NO. CUFF.51659.0
  misc_feature: Variant of the nucleotide sequence at SEQ ID NO 21950
gtcggacgctgcctcaaagccgaagggtcaacatgacgcaggtctgctgtctgacttgagtgttctcttgctccagtttgacggcgtacaggttaacttcttttcactgacaaactgaatctcccgagtccaattgccatcatgttggcagggatcctccacgagcactatccgactgtgtcttgagttgttctcaggccactcgaagcctttggtatccatcatgtctaatacaggccagaagccggccagccaagagcccaaggtcactattagtattggcgacagcactgatacccgtggttcccgtggttcccgcccacctctgaatcgtcgtcgcgacaagccacaattgagttgtaacctgtgccgacgtcgcaatgtgctttgatccacttgacttgcaactgaccaatcccttaggcttcgatgtgaccgacaacacccgtgctctaattgcaagaagcgtgaaataggctcgtcctgtacctatgccaccggattccctacgtcaccttcagctaccgtacaggatcggttaagacgattagaagatctcgtggtttcatatattggggtggatccttctgtcccggctgcgccatcaaaccccccagccgaatctaaatcccttgcgtcctctgattttagtagcctcaaaagaagttgcaccgagacgaagtattcagatcagacgcactgggggtccatcctggacgctatctcagagctgaaggaagatgttggcaatacgagtgacatcaagccatctcaaagcattgcgcttctaccatctccgtccctcgatgccccattgctctatggctgcaaaccggcaactaaagatgagatattggctgctctaccttcgagagaaatagtcgactcacttgtttcggactacttcgaagtcctcgaggtcgcatcttgtgctttgcaccaggttgagtttgtcaagcaatgtatctcattttggcaagatcctcagaaaaccccagtgatgtggctgggtcttctttttagcattctagcagtatcatcgtaccttcaagaccaggaagctactggcatgaaccgtggtcgatatgaactagactacgcatttctaggggcagtttatcgcgagaaaacggcccagtgtctcttactaggtcaatacacaagatgtgggcctttcgtatgtgaaactcttatgcattatcttgcagcggagttcatgaggcgacgcgacacaaataacgaagtgtggcttctattaagctcaaccgctcatctcgcaatgcgaatgggataccatcgtgacccgtcccatttcgagtcgctttctccttatgaaggagagatgcgacggcgcctctgggccatgatctatcatctggatatctgcatgtctggccaactaggagttcctagacttgttaatgatgcattttgcgacacagaactacctcgtaatttgcttgattctgacttcagcgccgagtcatctcaactcccgccgtcgagaccagacacggaagttacacccatgctcatcattctgtcaaaaattcgcattggtcgtctttatacaatggttacgaacacagtaacgaacactcaggggtccacatatgctcaaatactccaggttgatcgcgatatcgaagaagcattttcggcaattccctcttgttgcaggatacacagtctctctgagtccgcgtccgattcgcctgtgattctccttcagaaaattttaatcgtaatgtcatactacaaagcacaaatcattctgcactggagatacttgaccatggcaaaaaaggaagatcgatactcatactctaaaaaggtcacaatatcagctgcgctaaagatcgtagaattgagccatgcgatatgtgagggactaaacaatggaggacgactcttcgctgttaggtggagagttggctctatccttaacaatgactcctttttcctggctacgagtgtcctatgtttttacttatcacaataccgcgatacaattagcaccccagagcttgacgagataacacgatgtctacgtgaaacgaaacagatctgggatatccgtggccgttcttcaaccgaggcacagcgagcagccactgccattcagactatcttacccggtattatagactttaatacaagtgagacctcgagcggaagctgggtttcaacgccgaacgataacgacgagcggacggcttttctaaacagtcaagatccctttgcgggcggtatgatgccattttttgactcgatgttcgaaggggcccctatgtttcgtccgcaacaaaatgagtcgcttgttgactcttttctgaccggtaatatggacctttggttccaggcatctcagagttctccatatctttgaccacatataaggtattttcaagcatggcagttctaaacggtagtctggagtaaggcaaataccaacagcacaatcctattgcaaataagaagtgtacacttataggtactgcatgtaatctgattgaattgagggtacgtagcccgagcttttcgtctcaagggctaaggcaagaacgacggtttctgcggttaccattcaacacctgacaacatattcaatgtaatcaatagagtgaattgataaaggaaaacacattcgcccttgctatctactcctatccttcacccgtagtcccatcagtgcaaattgccaacctgagagcccacaaccacacattttgtttttgctccagccgtcagctttcaagtcacaactgatattttcttcggaaaggaccaacgcgcttgtacccatgcactgcacttcctttcaaacaaagtcgtcagctcagcgtcagctcacgtcaacgaattagcaaaatggctgatgccgtggagagtctgtgcaagagcctcgctgatcccgatgttgacagagagacagcaggcgaagaaacgggtgagcaggacatgcaagctgtcaagcttttcgcagcgcagccggtttctgacgacgccgaccacaaataccttttcacacatgcccagagggcactcgcgaaaggtggtattggcagttcctacttccgtgcacagtttgcacagcttgcagtgcagaagactatatcgcgtaaagacgacagcaacaaagcacgccagatgaaatactataaatggatcgcacagggcaagaaggatgagacgtacccttttacctcatcgaagactcaggtcctgccctcatcaacgcgaatcgcgacacttactgggtcggccgagtgctcgacttgtggcaaggaaggagcgacctacagatgcccttcttgcaccattcaagacgaccaccatatcatcaacaaaactacatattgcaacaagatttgtcttgagcaagatcgagagtcacacaagcttctgtgcgacgcgcgcaagatgctgcatcgcgccacttgcctgcttgacaagatgttcttcgccatagtatcagc

SEQ ID NO: 21953 - DNA, 792 bp, Muscodor strobelii
  misc_feature: SGI cDNA ID NO. 567443
  misc_feature: Encodes the peptide sequence at SEQ ID NO 21954
atgtctaatacaggccagaagccggccagccaagagcccaaggtcactattagtattggcgacagcactgatacccgtggttcccgtggttcccgcccacctctgaatcgtcgtcgcgacaagccacaattgagttgtaacctgtgccgacgtcgcaagcttcgatgtgaccgacaacacccgtgctctaattgcaagaagcgtgaaataggctcgtcctgtacctatgccaccggattccctacgtcaccttcagctaccgtacaggatcggttaagacgattagaagatctcgtggtttcatatattggggtggatccttctgtcccggctgcgccatcaaaccccccagccgaatctaaatcccttgcgtcctctgattttagtagcctcaaaagaagttgcaccgagacgaagtattcagatcagacgcactgggggtccatcctggacgctatctcagagctgaaggaagatgttggcaatacgagtgacatcaagccatctcaaagcattgcgcttctaccatctccgtccctcgatgccccattgctctatggctgcaaaccggcaactaaagatgagatattggctgctctaccttcgagagaaatagtcgactcacttgtttcggactacttcgaagtcctcgaggtcgcatcttgtgctttgcaccaggttgagtttgtcaagcaagtatgtctgtctaggctgttgtccaatcggaaacggaagatgctgactacaacaagtgtatctcattttggcaagatcctcagaaaaccccagtga

SEQ ID NO: 21954 - protein, 263 aa, Muscodor strobelii
  misc_feature: SGI Peptide ID NO. 567443
  misc_feature (44)..(83): Pfam Id: PF00172 Pfam Desc: Fungal Zn(2)-Cys(6) binuclear cluster domain
  misc_feature (18)..(232): NCBI GI: 146323062 Blast Desc: fungal specific transcription factor [Aspergillus fumigatus Af293] gi|129558597|gb|EAL93929.2| fungal specific transcription factor, [Aspergillus fumigatus Af293]
  misc_feature (34)..(220): NCBI GI: 169604456 Blast Desc: SNOG_05242 [Phaeosphaeria nodorum SN15] gi|160706575|gb|EAT87633.2| SNOG_05242 [Phaeosphaeria nodorum SN15]
  misc_feature (37)..(232): NCBI GI: 212538667 Blast Desc: fungal specific transcription factor, [Penicillium marneffei ATCC 18224] gi|210069231|gb|EEA23322.1| fungal specific transcription factor, [Penicillium marneffei ATCC 18224]
  misc_feature (27)..(224): NCBI GI: 145249886 Blast Desc: An14g06590 [Aspergillus niger] gi|134081966|emb|CAK97232.1| protein product [Aspergillus niger]
  misc_feature (27)..(221): NCBI GI: 67516913 Blast Desc: AN0738.2 [Aspergillus nidulans FGSC A4] gi|40746224|gb|EAA65380.1| AN0738.2 [Aspergillus nidulans FGSC A4]
  misc_feature (33)..(220): NCBI GI: 116205828 Blast Desc: CHGG_02207 [Chaetomium globosum CBS 148.51] gi|88182804|gb|EAQ90272.1| CHGG_02207 [Chaetomium globosum CBS 148.51]
  misc_feature (40)..(232): NCBI GI: 256730276 Blast Desc: NECHADRAFT_94954 [Nectria haematococca mpVI 77-13-4]
  misc_feature (15)..(255): NCBI GI: 156048168 Blast Desc: SS1G_08815 [Sclerotinia sclerotiorum 1980] gi|154693212|gb|EDN92950.1| SS1G_08815 [Sclerotinia sclerotiorum 1980]
  misc_feature (40)..(225): NCBI GI: 67901968 Blast Desc: AN7971.2 [Aspergillus nidulans FGSC A4] gi|40740435|gb|EAA59625.1| AN7971.2 [Aspergillus nidulans FGSC A4] gi|259480720|tpe|CBF73621.1| TPA: Zn(II)2Cys6 transcription
  misc_feature (37)..(218): NCBI GI: 154302989 Blast Desc: BC1G_09238 [Botryotinia fuckeliana B05.10] gi|150855162|gb|EDN30354.1| BC1G_09238 [Botryotinia fuckeliana B05.10]
MSNTGQKPASQEPKVTISIGDSTDTRGSRGSRPPLNRRRDKPQLSCNLCRRRKLRCDRQHPCSNCKKREIGSSCTYATGFPTSPSATVQDRLRRLEDLVVSYIGVDPSVPAAPSNPPAESKSLASSDFSSLKRSCTETKYSDQTHWGSILDAISELKEDVGNTSDIKPSQSIALLPSPSLDAPLLYGCKPATKDEILAALPSREIVDSLVSDYFEVLEVASCALHQVEFVKQVCLSRLLSNRKRKMLTTTSVSHFGKILRKPQ

SEQ ID NO: 21955 - DNA, 3479 bp, Muscodor strobelii; identical to SEQ ID NO: 21952
  misc_feature: SGI EST ID NO. CUFF.51659.0
  misc_feature: Variant of the nucleotide sequence at SEQ ID NO 21953

SEQ ID NO: 21956 - DNA, 1563 bp, Muscodor strobelii
  misc_feature: SGI cDNA ID NO. 567444
  misc_feature: Encodes the peptide sequence at SEQ ID NO 21957
atggctgatgccgtggagagtctgtgcaagagcctcgctgatcccgatgttgacagagagacagcaggcgaagaaacgggtgagcaggacatgcaagctgtcaagcttttcgcagcgcagccggtttctgacgacgccgaccacaaataccttttcacacatgcccagagggcactcgcgaaaggtggtattggcagttcctacttccgtgcacagtttgcacagcttgcagtgcagaagactatatcgcgtaaagacgacagcaacaaagcacgccagatgaaatactataaatggatcgcacagggcaagaaggatgagacgtacccttttacctcatcgaagactcaggtcctgccctcatcaacgcgaatcgcgacacttactgggtcggccgagtgctcgacttgtggcaaggaaggagcgacctacagatgcccttcttgcaccattcaagacgaccaccatatcatcaacaaaactacatattgcaacaagatttgtcttgagcaagatcgagagtcacacaagcttctgtgcgacgcgcgcaagatgctgcatcgcgccacttgcctgcttgacaagatgttcttcgccatagtatcagcaacgtatacccatccgctggcccgcgttttcgagaagaatggaattctgtatccattacacgagccttgggagcaacatggcatgactggtcgctgtatattctggcccttcccgaaacatcttactccatcagatgatgtccaccgcgctttgctcttttggagcgagggtgaggaggtcaacctctccttcgccccaatggtcaagtgtcttctgaagcattcgtgcaagtccatcaagcaggtccacatgagtctgaagaacatcaagcgcccaatttgctacatcacccaagcccaggcgatcagcaacgtatctctcacgcatactgtactgaaagtgacgctgcccggtgacgagaaatatgctatcgatttgactgcggcatcatttggctggaaggaaacagttgccccgtggaacacgtggagcaagctccgatgcgatgtgcagttcggtatatttccattcccacacttggaggaagttcaaaaaaaccagatacggcaacgcgatctcgaatataaccaacaggtcttgcgtgaggtcctcctcgactatgtcgacgagcgattagacatgatggttcgcgccaccaatggattgtatgcagttcacagggtgcttacatgttcacctcaagcatacgcacgaattgagagggaaattatgcaactgattcgacagagcgttgcatccctagagaacaatgcgctctctaaggactgcgctagagtgttcttcggacccgggcccgattaccctcttcgcgttgcatgcgcttttgcgccggagttgaaggatatctggctcagcaaagaagaatacgatgagctcaaaagaagcaaggcagacctgcagaaattgtgggacgagaaaatcaccccgaaaattgatcgtttgggggtttgtggtagcctaaagcgaatgtccttgagtggcaagttcatctag

SEQ ID NO: 21957 - protein, 520 aa, Muscodor strobelii
  misc_feature: SGI Peptide ID NO. 567444
  misc_feature (128)..(346): NCBI GI: 255942553 Blast Desc: Pc18g02010 [Penicillium chrysogenum Wisconsin 54-1255] gi|211586778|emb|CAP94425.1| Pc18g02010 [Penicillium chrysogenum Wisconsin 54-1255]
  misc_feature (132)..(408): NCBI GI: 256735452 Blast Desc: NECHADRAFT_30705 [Nectria haematococca mpVI 77-13-4]
  misc_feature (58)..(185): NCBI GI: 171676728 Blast Desc: protein product [Podospora anserina] gi|170936431|emb|CAP61088.1| protein product [Podospora anserina]
  misc_feature (132)..(377): NCBI GI: 169601908 Blast Desc: SNOG_03830 [Phaeosphaeria nodorum SN15] gi|111067915|gb|EAT89035.1| SNOG_03830 [Phaeosphaeria nodorum SN15]
  misc_feature (131)..(343): NCBI GI: 145251033 Blast Desc: An15g04980 [Aspergillus niger] gi|134082558|emb|CAK42473.1| protein product [Aspergillus niger]
MADAVESLCKSLADPDVDRETAGEETGEQDMQAVKLFAAQPVSDDADHKYLFTHAQRALAKGGIGSSYFRAQFAQLAVQKTISRKDDSNKARQMKYYKWIAQGKKDETYPFTSSKTQVLPSSTRIATLTGSAECSTCGKEGATYRCPSCTIQDDHHIINKTTYCNKICLEQDRESHKLLCDARKMLHRATCLLDKMFFAIVSATYTHPLARVFEKNGILYPLHEPWEQHGMTGRCIFWPFPKHLTPSDDVHRALLFWSEGEEVNLSFAPMVKCLLKHSCKSIKQVHMSLKNIKRPICYITQAQAISNVSLTHTVLKVTLPGDEKYAIDLTAASFGWKETVAPWNTWSKLRCDVQFGIFPFPHLEEVQKNQIRQRDLEYNQQVLREVLLDYVDERLDMMVRATNGLYAVHRVLTCSPQAYARIEREIMQLIRQSVASLENNALSKDCARVFFGPGPDYPLRVACAFAPELKDIWLSKEEYDELKRSKADLQKLWDEKITPKIDRLGVCGSLKRMSLSGKFI

SEQ ID NO: 21958 - DNA, 3479 bp, Muscodor strobelii; identical to SEQ ID NO: 21952
  misc_feature: SGI EST ID NO. CUFF.51659.0
  misc_feature: Variant of the nucleotide sequence at SEQ ID NO 21956

SEQ ID NO: 21959 - DNA, 1158 bp, Muscodor strobelii
  misc_feature: SGI cDNA ID NO. 567445
  misc_feature: Encodes the peptide sequence at SEQ ID NO 21960
atggctgcaacggcaacgatatcttcatcgctccctaataagcctactttcactccaatcattgcaaccgatccggttaacacagatgtcaaagatgatttcactccatcaaagcatatttcgttcaaaaagatacccaagacccacagcatgaaagaactagggtttccggaagatcaaggtgtttcgcccattgccgtctcagaacccttcccactgttcaccaaagcggccgtgcatcgtatgagacaggaggtcctcgctccagaagtttttgagaagtttcaatactcaagtaacttagctcactgctatctaagaggcttcgcaaacagatatgctcccttcgtctatgacgcatggaagaatccagagacacttgcgatcgtctccaagattgctggcattgatttagttccggctttggatattgacatagcgcacatcaatctgtctgtcaaatcagaagaagaaaaacaggaagagctagaagctgtgagagaaagagcgaaccatgaagccgatgagggtattgctgggtgcccatgggaagatgataagcctatagtcgggtggcacacagactcctacccctttgtttgtgtgactatgttgagcgactgcaccgaaatggtcggaggcgagacagcacttcgaacagggacaggagatattatcaaagttcggggcccacagatgggctgtgcggttattcttcaaggtcggtatattgagcatcaagcgcttcggaccctaggagggacagaacgaataactatggtcacatcattccgaccccgcaacccgtttgctcgggatgatacggtcttgaccactgtccggccaatatcaaacgttacggaattgtacaatcaattctccgaatatcgctttgagatcctcgaggaacgactccgcttacagctgaaggagattcgcgaaatgatggcaaccggtaggggtgttcctaccaaaaagctcaaaagtttcattacggagcaggaacaatttctcgctcatatgaataacgagatggtgagtgaggaagatatagcttttgggatgcttgttcaggatgttccacaagataaagttgatgaaagccgagttatcaaatacacttctccaaaaggtaggaagcgccagaggcggatctga

SEQ ID NO: 21960 - protein, 385 aa, Muscodor strobelii
  misc_feature: SGI Peptide ID NO. 567445
  misc_feature (34)..(355): NCBI GI: 238844715 Blast Desc: conserved [Microsporum canis CBS 113480]
  misc_feature (16)..(354): NCBI GI: 239611640 Blast Desc: conserved [Ajellomyces dermatitidis ER-3]
  misc_feature (12)..(355): NCBI GI: 121706818 Blast Desc: conserved [Aspergillus clavatus NRRL 1] gi|119399787|gb|EAW10213.1| conserved [Aspergillus clavatus NRRL 1]
  misc_feature (16)..(354): NCBI GI: 261201486 Blast Desc: conserved [Ajellomyces dermatitidis SLH14081] gi|239592202|gb|EEQ74783.1| conserved [Ajellomyces dermatitidis SLH14081]
  misc_feature (8)..(355): NCBI GI: 119175350 Blast Desc: CIMG_09539 [Coccidioides immitis RS]
  misc_feature (8)..(355): NCBI GI: 240107096 Blast Desc: CPC735_018870 [Coccidioides posadasii C735 delta SOWgp]
  misc_feature (34)..(355): NCBI GI: 225562341 Blast Desc: conserved [Ajellomyces capsulatus G186AR]
  misc_feature (34)..(355): NCBI GI: 154279086 Blast Desc: [Ajellomyces capsulatus NAm1] gi|150412299|gb|EDN07686.1| [Ajellomyces capsulatus NAm1]
  misc_feature (34)..(355): NCBI GI: 240281179 Blast Desc: conserved [Ajellomyces capsulatus H143]
  misc_feature (34)..(355): NCBI GI: 258566696 Blast Desc: conserved [Uncinocarpus reesii 1704] gi|237905538|gb|EEP79939.1| conserved [Uncinocarpus reesii 1704]
MAATATISSSLPNKPTFTPIIATDPVNTDVKDDFTPSKHISFKKIPKTHSMKELGFPEDQGVSPIAVSEPFPLFTKAAVHRMRQEVLAPEVFEKFQYSSNLAHCYLRGFANRYAPFVYDAWKNPETLAIVSKIAGIDLVPALDIDIAHINLSVKSEEEKQEELEAVRERANHEADEGIAGCPWEDDKPIVGWHTDSYPFVCVTMLSDCTEMVGGETALRTGTGDIIKVRGPQMGCAVILQGRYIEHQALRTLGGTERITMVTSFRPRNPFARDDTVLTTVRPISNVTELYNQFSEYRFEILEERLRLQLKEIREMMATGRGVPTKKLKSFITEQEQFLAHMNNEMVSEEDIAFGMLVQDVPQDKVDESRVIKYTSPKGRKRQRRI

SEQ ID NO: 21961 - DNA, 646 bp, Muscodor strobelii
  misc_feature: SGI EST ID NO. CUFF.51598.0
  misc_feature: Variant of the nucleotide sequence at SEQ ID NO 21959
tcaaaaagatacccaagacccacagcatgaaagaactagggtttccggaagatcaaggtgtttcgcccattgccgtctcagaacccttcccactgttcaccaaagcggccgtgcatcgtatgagacaggaggtcctcgctccagaagtttttgagaagtttcaatactcaagtaacttagctcactgctatctaagaggcttcgcaaacagatatgctcccttcgtctatgacgcatggaagaatccagagacacttgcgatcgtctccaagattgctggcattgatttagttccggctttggatattgacatagcgcacatcaatctgtctgtcaaatcagaagaagaaaaacaggaagagctagaagctgtgagagaaagagcgaaccatgaagccgatgagggtattgctgggtgcccatgggaagatgataagcctatagtcgggtggcacacagactcctacccctttgtttgtgtgactatgttgagcgactgcaccgaaatggtcggaggcgagacagcacttcgaacagggacaggagatattatcaaagttcggggcccacagatggtagataataacccgttcaaatatagtcgctcttgtcatgcgataattaatgctctactagggctgtgcgg

SEQ ID NO: 21962 - DNA, 1599 bp, Muscodor strobelii
  misc_feature: SGI cDNA ID NO. 567446
  misc_feature: Elevated expression when VOC is produced
  misc_feature: Encodes the peptide sequence at SEQ ID NO 21963
atggagagtgttcgcctcctgattttgtatctggcggtgccaagccttgtaatatccgtatttcgtcagtttctgtcatggaggaagaatgctgtcgactcggacaaaaagtttccagggccgcaacagtttccagtagtaggacgggtgcatgatctggatcgcttttgtatgtggaagaaattcacagagtgggcaaatatttatggaccgatctaccgaacaagtatgctgggccaaaagttcatcattatatctgatgaaaaaattgcagaggagcttctcgtcaagcgaggtaacaattatgctggtcgtcctcagattcgagcactgttcgatcacaaaacaagccctggttatgttgcattgatggaccgccaagagtactggaaagagcaacggaaatgggttcatgctgctatggcagacttccatcgacatcatttctacggagtcatcgaaaccgaagtacgaagattcttagccgtcctcttaattgatccagcaaaattccactcctccacgagagagcactgtgggcgcataatgagtcggctagcgtgggacgatgcgccgttagggaaagaaaacggagacagtgctgataatactttgggacgcatttcagtttcaggcccgctcgtcaataccatgactcctttgtggtccttgccatgggcgttcaatccctggaagcaatacgaacgtgcgagagaggacaagcagagagcatggtggctgaactccctccagaccgccaaacaaagatacttaagagatgatctgccgaaaaatacttggtcttatcgctatttcaaaggtcttcaacaacaaggcaatgccagcctcgaacagagctcaaaggacgaggagtttgcaagttgcatgcttggtttccacaatctcgttggagtggtaacgatagctggaccgctagagtttttctggatggctatgatgctccatcccgaatggcagaaaaaggcccaagcagagatcgatggagtttgcggtgatcgaatgcctactacagccgatatgccacatcttccaatagtacgcgcatgtcttaaagagactttacgttggcggtcaggcgttcctctaggagtaccgcatcaagctgaaggcgacgatgagttcagaggagagaagattacgaaaggcacaatcattctagcttgtgaatgggccctaaatcgtgttccagagaagtatcccgatccagagaacttccatcctgaacgataccttgaaaaagggtggcccacctatcaagagccactatcaaggtatcccaactttcgggagggcgccagtatgcacacttttggctggggccgaaggacctgcctaggtcagcatattgttgatgatgaaatgtttgtctcaggtgctggtgttctatgggggttcaacctcgaccgcgtaaagtgtccaaaaacaggacaaaacatcgaatttgattcagaagcaactaacgctcacgttattcttgagccactgccatttccctgcgccatgacgcctcgaagtccagaaaaagcctctcagatcctcaaaggatacgaagaagtaaggcacgaaatgaaagtttag

SEQ ID NO: 21963 - protein, 532 aa, Muscodor strobelii
  misc_feature: SGI Peptide ID NO. 567446
  misc_feature (38)..(507): Pfam Id: PF00067 Pfam Desc: Cytochrome P450
  misc_feature (304)..(456): Pfam Id: PF00067 Pfam Desc: Cytochrome P450
  misc_feature (38)..(164): Pfam Id: PF00067 Pfam Desc: Cytochrome P450
  misc_feature (1)..(532): NCBI GI: 171678771 Blast Desc: protein product [Podospora anserina] gi|170937455|emb|CAP62113.1| protein product [Podospora anserina]
  misc_feature (1)..(532): NCBI GI: 145610891 Blast Desc: MGG_00832 [Magnaporthe grisea 70-15] gi|145018228|gb|EDK02507.1| MGG_00832 [Magnaporthe grisea 70-15]
  misc_feature (1)..(532): NCBI GI: 116206038 Blast Desc: CHGG_02312 [Chaetomium globosum CBS 148.51] gi|88182909|gb|EAQ90377.1| CHGG_02312 [Chaetomium globosum CBS 148.51]
  misc_feature (12)..(525): NCBI GI: 164425406 Blast Desc: NCU11306 [Neurospora crassa OR74A] gi|157070916|gb|EDO65142.1| conserved [Neurospora crassa OR74A]
  misc_feature (30)..(520): NCBI GI: 169619032 Blast Desc: SNOG_12709 [Phaeosphaeria nodorum SN15] gi|111058887|gb|EAT80007.1| SNOG_12709 [Phaeosphaeria nodorum SN15]
  misc_feature (36)..(520): NCBI GI: 189210291 Blast Desc: cytochrome P450 2C30 [Pyrenophora tritici-repentis Pt-1C-BFP] gi|187977570|gb|EDU44196.1| cytochrome P450 2C30 [Pyrenophora tritici-repentis Pt-1C-BFP]
  misc_feature (16)..(525): NCBI GI: 164424520 Blast Desc: NCU07092 [Neurospora crassa OR74A] gi|157070549|gb|EAA31017.2| [Neurospora crassa OR74A]
  misc_feature (39)..(525): NCBI GI: 171682764 Blast Desc: protein product [Podospora anserina] gi|170941341|emb|CAP66991.1| protein product [Podospora anserina]
  misc_feature (6)..(512): NCBI GI: 154314207 Blast Desc: BC1G_05197 [Botryotinia fuckeliana B05.10] gi|150848842|gb|EDN24035.1| BC1G_05197 [Botryotinia fuckeliana B05.10]
  misc_feature (9)..(522): NCBI GI: 156036044 Blast Desc: SS1G_12708 [Sclerotinia sclerotiorum 1980] gi|154698116|gb|EDN97854.1| SS1G_12708 [Sclerotinia sclerotiorum 1980]
  misc_feature (39)..(463): SWISSPROT Homolog: EC 1.14.14.1 Unspecific monooxygenase
  misc_feature: Useful for introducing or modulating the production of volatile compounds
MESVRLLILYLAVPSLVISVFRQFLSWRKNAVDSDKKFPGPQQFPVVGRVHDLDRFCMWKKFTEWANIYGPIYRTSMLGQKFIIISDEKIAEELLVKRGNNYAGRPQIRALFDHKTSPGYVALMDRQEYWKEQRKWVHAAMADFHRHHFYGVIETEVRRFLAVLLIDPAKFHSSTREHCGRIMSRLAWDDAPLGKENGDSADNTLGRISVSGPLVNTMTPLWSLPWAFNPWKQYERAREDKQRAWWLNSLQTAKQRYLRDDLPKNTWSYRYFKGLQQQGNASLEQSSKDEEFASCMLGFHNLVGVVTIAGPLEFFWMAMMLHPEWQKKAQAEIDGVCGDRMPTTADMPHLPIVRACLKETLRWRSGVPLGVPHQAEGDDEFRGEKITKGTIILACEWALNRVPEKYPDPENFHPERYLEKGWPTYQEPLSRYPNFREGASMHTFGWGRRTCLGQHIVDDEMFVSGAGVLWGFNLDRVKCPKTGQNIEFDSEATNAHVILEPLPFPCAMTPRSPEKASQILKGYEEVRHEMKV

SEQ ID NO: 21964 - DNA, 2605 bp, Muscodor strobelii
  misc_feature: SGI EST ID NO. CUFF.51605.0
  misc_feature: Variant of the nucleotide sequence at SEQ ID NO 21962
tagcctcacgtggttgtacggagtcagcacaattgtccgaaaatttcttccgctgcccaaccaggtgagattccgaccagttgtacacaaccatttctcatttggatggatggaaggccaaatggcgattaggccaacaactacgattgcgacgaaagaacatgcactgctttgaagttattaacacggatatccccaccgctcggatttgtctgagatcagcttgaccaacagagtctttagaagtaaccacgttacaccacatgacgttaagccggagatttgatcccagaacttttgtacagtacaacgttttggacctattcacgacttttagcgaagtcgacctttgtggtgtcttaagggagagatatacactggcgattggttgactaaagaaatagcgcgaaagagcttttgaacaagtatagaaggacgaagggcaaatcctcatgcaggctacgacttgatgtgaggatgcagtagctgtcatcgtgaaacagctgcatatctggcgcccagcccttattccaagacttccccacaggagttgcgaccatgtaagatttatcacccaagaatagtgtgcaaggaactggatctgcgtgtataagatctatactggagcctgaggaccgcctgtcattctcataaagttggttcttgctggagtgacacacacggtacagacctgtctttcaccttcatctgatctctcattatggagagtgttcgcctcctgattttgtatctggcggtgccaagccttgtaatatccgtatttcgtcagtttctgtcatggaggaagaatgctgtcgactcggacaaaaagtttccagggccgcaacagtttccagtagtaggacgggtgcatgatctggatcgcttttgtatgtggaagaaattcacagagtgggcaaatatttatggaccgatctaccgaacaagtatgctgggccaaaagttcatcattatatctgatgaaaaaattgcagaggagcttctcgtcaagcgaggtaacaattatgctggtcgtcctcagattcgagcactgttcgatcacaaaacaagccctggttatgttgcattgatggaccgccaagagtactggaaagagcaacggaaatgggttcatgctgctatggcagacttccatcgacatcatttctacggagtcatcgaaaccgaagtacgaagattcttagccgtcctcttaattgatccagcaaaattccactcctccacgagagagcactgtgggcgcataatgagtcggctagcgtgggacgatgcgccgttagggaaagaaaacggagacagtgctgataatactttgggacgcatttcagtttcaggcccgctcgtcaataccatgactcctttgtggtccttgccatgggcgttcaatccctggaagcaatacgaacgtgcgagagaggacaagcagagagcatggtggctgaactccctccagaccgccaaacaaagatacttaagagatgatctgccgaaaaatacttggtcttatcgctatttcaaaggtcttcaacaacaaggcaatgccagcctcgaacagagctcaaaggacgaggagtttgcaagttgcatgcttggtttccacaatctcgttggagtggtaacgatagctggaccgctagagtttttctggatggctatgatgctccatcccgaatggcagaaaaaggcccaagcagagatcgatggagtttgcggtgatcgaatgcctactacagccgatatgccacatcttccaatagtacgcgcatgtcttaaagagactttacgttggcggtcaggcgttcctctaggagtaccgcatcaagctgaaggcgacgatgagttcagaggagagaagattacgaaaggcacaatcattctagcttgtgaatgggccctaaatcgtgttccagagaagtatcccgatccagagaacttccatcctgaacgataccttgaaaaagggtggcccacctatcaagagccactatcaaggtatcccaactttcgggagggcgccagtatgcacacttttggctggggccgaaggacctgcctaggtcagcatattgttgatgatgaaatgtttgtctcaggtgctggtgttctatgggggttcaacctcgaccgcgtaaagtgtccaaaaacaggacaaaacatcgaatttgattcagaagcaactaacgctcacgttattcttgagccactgccatttccctgcgccatgacgcctcgaagtccagaaaaagcctctcagatcctcaaaggatacgaagaagtaaggcacgaaatgaaagtttagggtggaattcgtaaaaacgtggtatacagctgagggaacaagaggctaacactagatgaaactgcgcttattttgacgttatagacggctttatctcttccaagcttgtgtggtgaccaggacagcgtatatatgcatatacctcatatatatttcattaaatggaaagcgtgcacaatgttattcgatcttgccgtctttagcacgaagcgatggaccgttgcttcaagtttcatgaaggagaaggtcttggaaacatctgcaatgataatagagtgcgccagg

SEQ ID NO: 21965 - DNA, 1110 bp, Muscodor strobelii
  misc_feature: SGI cDNA ID NO. 567447
  misc_feature: Elevated expression when VOC is produced
  misc_feature: Encodes the peptide sequence at SEQ ID NO 21966
atggcgatccttggtgctaacggcgacaccgccaacaacggcgcggatgccccgaagctccgccgcgcccctatccgggtctcgggttcgatcgctcatctagcctatgtggacgtgacaccgaccatcgggcgtgagtatccgacggcgaagttgaaggcgatgctagaggcggacgatgcggaggcgcagctgcgcgatctagcggtgaccatctgcgagcgcggcgtcgtcttcttccgcgcgccgcaggacgacctttccatcgcggaccagaagcgcatcaccgagctgctgggcagcttgacgggtcggcctgcgggccacggccttcacgtacacccgctgtttaacgacccgaacaatatcgcgatggcggatgggacgacggacccaaatatatacgtgatcaactcagaggcgatgaaaaagatctataagacgatgaaggaccggcccggtggggacggcgaaccgagggatctggcgagagagtggcatagtgacagtctcttcgaaaattgcccgtctgacttcagcttcctccggatgcaggacacgcccgactccggtggtgacacgctctggtgctcaggctatgagctctacgatcgcatgtccccctcgttccgtgcctacctcgagactctgacggcgacatgtgcgcagccggtgttcaaatcggcctgtgaggccggcggatatagcgtgacgtcgccgcggggggctccgctgaaccgggacttcgaatttgcgccctcccatccagtaatccgcacgcatcctgtcacagggtggaagtccgtgttcgccggcgcgggactgcacgtcagccgcatcgacggagtatattcctacgaggaccagatgatccgggactatatcatgaggctgatcacgaggaaccacgacggcatcgcgcggatgcactggacgaagcaggcgtgtgcgatttggagcaatgcctgcacactgcatgcagcgacgccggacacacatctcacccatggcatcagggtgggagtccgagcatcgggcattggcgaggttccctacctcgatcctgcatccaagggacgccgagaggcccttggtctaccgcacaactga

SEQ ID NO: 21966 - protein, 369 aa, Muscodor strobelii
  misc_feature: SGI Peptide ID NO. 567447
  misc_feature (35)..(353): Pfam Id: PF02668 Pfam Desc: Taurine catabolism dioxygenase TauD, TfdA family
  misc_feature (22)..(365): NCBI GI: 116202901 Blast Desc: CHGG_09335 [Chaetomium globosum CBS 148.51] gi|88177853|gb|EAQ85321.1| CHGG_09335 [Chaetomium globosum CBS 148.51]
  misc_feature (20)..(365): NCBI GI: 121700426 Blast Desc: TfdA family taurine dioxygenase, [Aspergillus clavatus NRRL 1] gi|119396620|gb|EAW07052.1| TfdA family taurine dioxygenase, [Aspergillus clavatus NRRL 1]
  misc_feature (20)..(364): NCBI GI: 255953905 Blast Desc: Pc21g06600 [Penicillium chrysogenum Wisconsin 54-1255] gi|211589416|emb|CAP95557.1| Pc21g06600 [Penicillium chrysogenum Wisconsin 54-1255]
  misc_feature (13)..(364): NCBI GI: 171688138 Blast Desc: protein product [Podospora anserina] gi|170944031|emb|CAP70141.1| protein product [Podospora anserina]
  misc_feature (20)..(364): NCBI GI: 115436892 Blast Desc: ATEG_09049 [Aspergillus terreus NIH2624] gi|114188486|gb|EAU30186.1| ATEG_09049 [Aspergillus terreus NIH2624]
  misc_feature (14)..(366): NCBI GI: 156057123 Blast Desc: SS1G_04292 [Sclerotinia sclerotiorum 1980] gi|154702078|gb|EDO01817.1| SS1G_04292 [Sclerotinia sclerotiorum 1980]
  misc_feature (22)..(364): NCBI GI: 171682728 Blast Desc: protein product [Podospora anserina] gi|170941323|emb|CAP66973.1| protein product [Podospora anserina]
  misc_feature (24)..(365): NCBI GI: 145609604 Blast Desc: MGG_12505 [Magnaporthe grisea 70-15] gi|145017018|gb|EDK01381.1| MGG_12505 [Magnaporthe grisea 70-15]
  misc_feature (24)..(364): NCBI GI: 164424068 Blast Desc: NCU07610 [Neurospora crassa OR74A] gi|157070358|gb|EAA33608.2| NCU07610 [Neurospora crassa OR74A]
  misc_feature (22)..(365): NCBI GI: 85074576 Blast Desc: NCU09800 [Neurospora crassa OR74A] gi|28921578|gb|EAA30874.1| NCU09800 [Neurospora crassa OR74A]
  misc_feature (34)..(352): SWISSPROT Homolog: EC 1.14.11.17 Taurine dioxygenase
  misc_feature: Useful for introducing or modulating the production of volatile compounds
MAILGANGDTANNGADAPKLRRAPIRVSGSIAHLAYVDVTPTIGREYPTAKLKAMLEADDAEAQLRDLAVTICERGVVFFRAPQDDLSIADQKRITELLGSLTGRPAGHGLHVHPLFNDPNNIAMADGTTDPNIYVINSEAMKKIYKTMKDRPGGDGEPRDLAREWHSDSLFENCPSDFSFLRMQDTPDSGGDTLWCSGYELYDRMSPSFRAYLETLTATCAQPVFKSACEAGGYSVTSPRGAPLNRDFEFAPSHPVIRTHPVTGWKSVFAGAGLHVSRIDGVYSYEDQMIRDYIMRLITRNHDGIARMHWTKQACAIWSNACTLHAATPDTHLTHGIRVGVRASGIGEVPYLDPASKGRREALGLPHN

SEQ ID NO: 21967 - DNA, 2577 bp, Muscodor strobelii
  misc_feature: SGI EST ID NO. CUFF.51638.1
  misc_feature: Variant of the nucleotide sequence at SEQ ID NO 21965
cgtcgccaggaaattcagcagcgctgctacccacagccccgccctcctgccaaaacggctgctgaaagggccaactagcagtgacgcgatcagcgtgcctatcgtcaggagacttgttatgagttgctgtactgtgggctgtcaagaagttcagcttcccagctcgggccagccgactttctacttcactttacctcaatgccccacgtctttcggttctcatcgtagtatccgaacacctctaagaatcctggcatgcttcaatgtgtgagcaagaacctccataagctttatcttctgatacgtacgataggaaaccgccgatgagtgcgtagtcgaggcctgagtcactgtaagtgtctcttcagacaatccattttctcggaaactcaacccaccatactgaaacgtcgagattgtagctacgaagcagatggcgagacacttggcatgactgcgaacgtcgagtttgagtgggtttgctgatatcgcggcggcatgcattttggatttggaattcggcagcgactattctcgcgatggatagatacgactagcctaagtgaaggtagaagttgggggtcagcgggtaggcggactggcccgacgacatgccacggtcttaacttcacttatgcacgtcacatcgcgcatcactcaggtgtcttggctgggccaagaacgatagcgcccagactccctacccaactactatacgaactgcatgtcgcttacccgcaatgcttaccaggaatggaggaggaatgtgcgatcgatagagaggagtatagcaagaatgcggagaggtagcatgggtcggcccggcagttggatgttggggtatctgcgggccgtcggttgtcgtctccgacagcaccctcaaaagcattgtccgacgagagcgctcaaggtaggcagcttgatcgtcgacgatggaatgctgacaagcattgccgaaatacatatggtctaatggcaaccttgagagtatcttttcatctgaacagtaccagcatataggctctgttgtatcccagcaaacggcatggcgatccttggtgctaacggcgacaccgccaacaacggcgcggatgccccgaagctccgccgcgcccctatccgggtctcgggttcgatcgctcatctagcctatgtggacgtgacaccgaccatcgggcgtgagtatccgacggcgaagttgaaggcgatgctagaggcggacgatgcggaggcgcagctgcgcgatctagcggtgaccatctgcgagcgcggcgtcgtcttcttccgcgcgccgcaggacgacctttccatcgcggaccagaagcgcatcaccgagctgctgggcagcttgacgggtcggcctgcgggccacggccttcacgtacacccgctgtttaacgacccgaacaatatcgcgatggcggatgggacgacggacccaaatatatacgtgatcaactcagaggcgatgaaaaagatctataagacgatgaaggaccggcccggtggggacggcgaaccgagggatctggcgagagagtggcatagtgacagtctcttcgaaaattgcccgtctgacttcagcttcctccggatgcaggacacgcccgactccggtggtgacacgctctggtgctcaggctatgagctctacgatcgcatgtccccctcgttccgtgcctacctcgagactctgacggcgacatgtgcgcagccggtgttcaaatcggcctgtgaggccggcggatatagcgtgacgtcgccgcggggggctccgctgaaccgggacttcgaatttgcgccctcccatccagtaatccgcacgcatcctgtcacagggtggaagtccgtgttcgccggcgcgggactgcacgtcagccgcatcgacggagtatattcctacgaggaccagatgatccgggactatatcatgaggctgatcacgaggaaccacgacggcatcgcgcggatgcactggacgaagcaggcgtgtgcgatttggagcaatgcctgcacactgcatgcagcgacgccggacacacatctcacccatggcatcagggtgggagtccgagcatcgggcattggcgaggttccctacctcgatcctgcatccaagggacgccgagaggcccttggtctaccgcacaactgacttcgcacctgaggtcggaactcgtcggtgtcggctcctgagtctagttcccagtttcgtaggtgtctagggatctcaaactggcattatttacaattgtccagactaagcattagtccagtatcagtcgggggattatcccatgcctgcatactatgctgtacgactctctaagtcggctttgaggaatataacagatcagtaaaaggttgttgtataggttacgcatcgcgataatcggcgaggacgatactggagggctagtctgtggaggaggcgaatgcgatacgggcgagccaggtagaatgaagacttaacctcaccacatcaagagccatcgagtcatagtatataccaagtagccacaatcttgaggaaagtcacaattggttgtatgatttactcgactgcatcagaaccgg

SEQ ID NO: 21968 - DNA, 1293 bp, Muscodor strobelii
  misc_feature: SGI cDNA ID NO. 567448
  misc_feature: Encodes the peptide sequence at SEQ ID NO 21969
atggcgatccttggtgctaacggcgacaccgccaacaacggcgcggatgccccgaagctccgccgcgcccctatccgggtctcgggttcgatcgctcatctagcctatgtggacgtgacaccgaccatcgggcgtgagtatccgacggcgaagttgaaggcgatgctagaggcggacgatgcggaggcgcagctgcgcgatctagcggtgaccatctgcgagcgcggcgtcgtcttcttccgcgcgccgcaggacgacctttccatcgcggaccagaagcgcatcaccgagctgctgggcagcttgacgggtcggcctgcgggccacggccttcacgtacacccgctgtttaacgacccgaacaatatcgcgatggcggatgggacgacggacccaaatatatacgtgatcaactcagaggcgatgaaaaagatctataagacgatgaaggaccggcccggtggggacggcgaaccgagggatctggcgagagagtggcatagtgacagtctcttcgaaaattgcccgtctgacttcagcttcctccggatgcaggacacgcccgactccggtggtgacacgctctggtgctcaggctatgagctctacgatcgcatgtccccctcgttccgtgcctacctcgagactctgacggcgacatgtgcgcagccggtgttcaaatcggcctgtgaggccggcggatatagcgtgacgtcgccgcggggggctccgctgaaccgggacttcgaatttgcgccctcccatccagtaatccgcacgcatcctgtcacagggtggaagtccgtgttcgccggcgcgggactgcacgtcagccgcatcgacggagtatattcctacgaggaccagatgatccgggactatatcagtgagtcgtgcttttattgtgttggtgggaggggacgtcgagagggcacgagcgaattagaggagagtggtcaatctgtgccaccggttgaggctgatcacgaggaaccacgacggcatcgcgcggatgcactggacgaagcaggcgtgtgcgatttggagcaatgcctgcacactgcatgcagcgacggtaagcaactctttttctttccttctttctcaccctgctcacgcctcggcgcgacagcgatcaacaaaagctccgctgctgaccaaattcgtaagccggacacacatctcacccatggcatcagggtgggagtccgagcatcgggcattggcgaggttccctacctcgatcctgcatccaagggacgccgagaggcccttggtctaccgcacaactga

SEQ ID NO: 21969 - protein, 430 aa, Muscodor strobelii
  misc_feature: SGI Peptide ID NO. 567448
  misc_feature (35)..(414): Pfam Id: PF02668 Pfam Desc: Taurine catabolism dioxygenase TauD, TfdA family
  misc_feature (35)..(297): Pfam Id: PF02668 Pfam Desc: Taurine catabolism dioxygenase TauD, TfdA family
  misc_feature (20)..(426): NCBI GI: 121700426 Blast Desc: TfdA family taurine dioxygenase, [Aspergillus clavatus NRRL 1] gi|119396620|gb|EAW07052.1| TfdA family taurine dioxygenase, [Aspergillus clavatus NRRL 1]
  misc_feature (22)..(426): NCBI GI: 116202901 Blast Desc: CHGG_09335 [Chaetomium globosum CBS 148.51] gi|88177853|gb|EAQ85321.1| CHGG_09335 [Chaetomium globosum CBS 148.51]
  misc_feature (20)..(425): NCBI GI: 255953905 Blast Desc: Pc21g06600 [Penicillium chrysogenum Wisconsin 54-1255] gi|211589416|emb|CAP95557.1| Pc21g06600 [Penicillium chrysogenum Wisconsin 54-1255]
  misc_feature (20)..(425): NCBI GI: 115436892 Blast Desc: ATEG_09049 [Aspergillus terreus NIH2624] gi|114188486|gb|EAU30186.1| ATEG_09049 [Aspergillus terreus NIH2624]
  misc_feature (11)..(425): NCBI GI: 171688138 Blast Desc: protein product [Podospora anserina] gi|170944031|emb|CAP70141.1| protein product [Podospora anserina]
  misc_feature (10)..(427): NCBI GI: 67526225 Blast Desc: AN3570.2 [Aspergillus nidulans FGSC A4] gi|40740588|gb|EAA59778.1| AN3570.2 [Aspergillus nidulans FGSC A4] gi|259481907|tpe|CBF75866.1| TPA: conserved [Aspergillus FGSC
  misc_feature (24)..(426): NCBI GI: 145609604 Blast Desc: MGG_12505 [Magnaporthe grisea 70-15] gi|145017018|gb|EDK01381.1| MGG_12505 [Magnaporthe grisea 70-15]
  misc_feature (13)..(425): NCBI GI: 238508338 Blast Desc: alpha-ketoglutarate-dependent sulfonate dioxygenase, [Aspergillus flavus NRRL3357] gi|220688884|gb|EED45236.1| alpha-ketoglutarate-dependent sulfonate dioxygenase, [Aspergillus
  misc_feature (14)..(427): NCBI GI: 156057123 Blast Desc: SS1G_04292 [Sclerotinia sclerotiorum 1980] gi|154702078|gb|EDO01817.1| SS1G_04292 [Sclerotinia sclerotiorum 1980]
  misc_feature (13)..(425): NCBI GI: 169784512 Blast Desc: [Aspergillus oryzae RIB40] gi|83775464|dbj|BAE65584.1| protein product [Aspergillus oryzae]
  misc_feature (34)..(295): SWISSPROT Homolog: EC 1.14.11.17 Taurine dioxygenase
MAILGANGDTANNGADAPKLRRAPIRVSGSIAHLAYVDVTPTIGREYPTAKLKAMLEADDAEAQLRDLAVTICERGVVFFRAPQDDLSIADQKRITELLGSLTGRPAGHGLHVHPLFNDPNNIAMADGTTDPNIYVINSEAMKKIYKTMKDRPGGDGEPRDLAREWHSDSLFENCPSDFSFLRMQDTPDSGGDTLWCSGYELYDRMSPSFRAYLETLTATCAQPVFKSACEAGGYSVTSPRGAPLNRDFEFAPSHPVIRTHPVTGWKSVFAGAGLHVSRIDGVYSYEDQMIRDYISESCFYCVGGRGRREGTSELEESGQSVPPVEADHEEPRRHRADALDEAGVCDLEQCLHTACSDGKQLFFFPSFSPCSRLGATAINKSSAADQIRKPDTHLTHGIRVGVRASGIGEVPYLDPASKGRREALGLPHN

SEQ ID NO: 21970 - DNA, 2577 bp, Muscodor strobelii; identical to SEQ ID NO: 21967
  misc_feature: SGI EST ID NO. CUFF.51638.1
  misc_feature: Variant of the nucleotide sequence at SEQ ID NO 21968

SEQ ID NO: 21971 - DNA, 1590 bp, Muscodor strobelii
  misc_feature: SGI cDNA ID NO. 567449
  misc_feature: Elevated expression when VOC is produced
  misc_feature: Encodes the peptide sequence at SEQ ID NO 21972
atgcatgccgccgcgatatcagcaaacccactcaaactcgacgttcgcagtcatgccaagtgtctcgccatctgcttcgtagctacaatctcgacgtttcagtatggcctcgactacgcactcatcggcggtttcctatccatgccaggattcttagaggtgttcggatactacgatgagaaccgaaagacgtggggcattgagcccacagtacagcaactcataacaagtctcctgacgataggcacgctgatcgcgtcactgctagttggccctttcagcagccgttttggcaggagggcggggctgtgggtagcagcgctgctgaatttcctggcgacggcgattatgattgctacgaccagcgttggggttctgtacttcgctcgcctgatactaggggtttctgtcgggtggttcctgaccttctcgcagctgtacgtgcacgaagttgcgcctgctcaccttagggggatagcgttcgccgtttaccaaacccagctcagtatcggatctattgttggcgctgccatcgattatggatcccatgatatcaacggtagacgagcgtatcaaatccctctcgccgtcttctttgctgcgcctaccatccagtccatcgcgatgctcttctttcccgagacaccgcgctggctgatggttcgaggtagagaggacgaagcggaggcatcactccgcgcgcttcgaaactctgatatcgatcaacgggagcttcaggcggagttgaatgagatcaggcagtcgacgagggaacaggtgggacagaacaagaaggctctctttctagagatgtggcgaggcaccaatctccgccggtcactactctctattgccgtcgtatgctttcattgcgcaagtggttcatcgtattcgacgatctacacaacatactatctccaaatagccggtgttaaggatccgttcgggttttcaatcctgatcacgagcatgggactgatcggtatcctgtttagcttttggttcgtccgctcaattgacaggcgcgtcatcatgctggttggtgtcgcaggttgcgggttcacgcagctagcacaggcgatagtgtggtcggtccggccggggtccgatgtggccggacaggtcgttttggcgttcgtcgccctgtttacgttgatttatacggcctttggaccttttgcctggctccttgggggcgagtatcccaatagcgccctgcgtggctactgcttcggctttgctacggcgttgaactttctggggaactgggtgggtaccttcacagctccgtacttcatcaacccagctagtctggggattggaccccagtatggctatatatggttcgcgtcgaacatgatcgtgctagtgttcgtatggttctgcgtaccagagactagagaccgcacgctcgaagaaatacacgagatgttcgaagcccgtgtaccaacacgcgagttcaaaacttacgtctgcgttggtgtcgagcaattcgccgccgaggctgttggcgtcaacgctttcaagagagacgagaagaccggagcactgcacgtcgagacagcagcgaccacatccgcaagggcctaa

SEQ ID NO: 21972 - protein, 529 aa, Muscodor strobelii
  misc_feature: SGI Peptide ID NO. 567449
  misc_feature (40)..(426): Pfam Id: PF07690 Pfam Desc: Major Facilitator Superfamily
  misc_feature (24)..(478): Pfam Id: PF00083 Pfam Desc: Sugar (and other) transporter
  misc_feature (17)..(523): NCBI GI: 189207749 Blast Desc: conserved [Pyrenophora tritici-repentis Pt-1C-BFP] gi|187976301|gb|EDU42927.1| conserved [Pyrenophora tritici-repentis Pt-1C-BFP]
  misc_feature (8)..(494): NCBI GI: 256726309 Blast Desc: NECHADRAFT_94696 [Nectria haematococca mpVI 77-13-4]
  misc_feature (6)..(513): NCBI GI: 115384804 Blast Desc: [Aspergillus terreus NIH2624] gi|114196641|gb|EAU38341.1| [Aspergillus terreus NIH2624]
  misc_feature (16)..(500): NCBI GI: 116194081 Blast Desc: CHGG_06758 [Chaetomium globosum CBS 148.51] gi|88182671|gb|EAQ90139.1| CHGG_06758 [Chaetomium globosum CBS 148.51]
  misc_feature (9)..(526): NCBI GI: 212532729 Blast Desc: maltose permease, [Penicillium marneffei ATCC 18224] gi|210071885|gb|EEA25974.1| maltose permease, [Penicillium marneffei ATCC 18224]
  misc_feature (12)..(494): NCBI GI: 39972779 Blast Desc: MGG_07691 [Magnaporthe grisea 70-15] gi|145016913|gb|EDK01343.1| MGG_07691 [Magnaporthe grisea 70-15]
  misc_feature (15)..(490): NCBI GI: 46115710 Blast Desc: FG03697.1 [Gibberella zeae PH-1]
  misc_feature (16)..(494): NCBI GI: 170940358 Blast Desc: protein product [Podospora anserina]
  misc_feature (14)..(525): NCBI GI: 119189631 Blast Desc: CIMG_04863 [Coccidioides immitis RS]
  misc_feature (14)..(522): NCBI GI: 67541807 Blast Desc: AN7067.2 [Aspergillus nidulans FGSC A4] gi|40742006|gb|EAA61196.1| AN7067.2 [Aspergillus nidulans FGSC A4] gi|259483616|tpe|CBF79152.1| TPA: conserved [Aspergillus FGSC
  misc_feature: Useful for introducing or modulating the production of volatile compounds
MHAAAISANPLKLDVRSHAKCLAICFVATISTFQYGLDYALIGGFLSMPGFLEVFGYYDENRKTWGIEPTVQQLITSLLTIGTLIASLLVGPFSSRFGRRAGLWVAALLNFLATAIMIATTSVGVLYFARLILGVSVGWFLTFSQLYVHEVAPAHLRGIAFAVYQTQLSIGSIVGAAIDYGSHDINGRRAYQIPLAVFFAAPTIQSIAMLFFPETPRWLMVRGREDEAEASLRALRNSDIDQRELQAELNEIRQSTREQVGQNKKALFLEMWRGTNLRRSLLSIAVVCFHCASGSSYSTIYTTYYLQIAGVKDPFGFSILITSMGLIGILFSFWFVRSIDRRVIMLVGVAGCGFTQLAQAIVWSVRPGSDVAGQVVLAFVALFTLIYTAFGPFAWLLGGEYPNSALRGYCFGFATALNFLGNWVGTFTAPYFINPASLGIGPQYGYIWFASNMIVLVFVWFCVPETRDRTLEEIHEMFEARVPTREFKTYVCVGVEQFAAEAVGVNAFKRDEKTGALHVETAATTSARA

SEQ ID NO: 21973 - DNA, 3096 bp, Muscodor strobelii
  misc_feature: SGI EST ID NO. CUFF.51637.4
  misc_feature: Variant of the nucleotide sequence at SEQ ID NO 21971
cggtccttcatcgtcttatagatctttttcatcgcctctgagttgatcacgtatctgcctcgtgtcaacgggccagtctgatcagcaaccactctacccgccgctagccctctcccgtcttcaccggatcactcaactcaagcacctcatccttgaggccaccctcggtcactgatctcccactgccaacagctagcctcctcaaaggcaggcaagcaagtagagagccgaccggaagagagagagccccactcacatatttgggtccgtcgtcccatccgccatcgcgatattgttcgggtcgttaaacagcgggtgtacgtgaaggccgtggcccgcaggccgacccgtcaagctgcccagcagctcggtgatgcgcttctggtccgcgatggaaaggtcgtcctgcggcgcgcggaagaagacgacgccgcgctcgcagatggtcaccgctagatcgcgcagctgcgcctccgcatcgtccgcctctagcatcgccttcaacttcgccgtcggatactcacgcccgatggtcggtgtcacgtccacataggctagatgagcgatcgaacccgagacccggataggggcgcggcggagcttcggggcatccgcgccgttgttggcggtgtcgccgttagcaccaaggatcgccatgccgtttgctgggatacaacagagcctatatgctggtactgttcagatgaaaagatactctcaaggttgccattagaccatatgtatttcggcaatgcttgtcagcattccatcgtcgacgatcaagctgcctaccttgagcgctctcgtcggacaatgcttttgagggtgctgtcggagacgacaaccgacggcccgcagataccccaacatccaactgccgggccgacccatgctacctctccgcattcttgctatactcctctctatcgatcgcacattcctcctccattcctggtaagcattgcgggtaagcgacatgcagttcgtatagtagttgggtagggagtctgggcgctatcgttcttggcccagccaagacacctgagtgatgcgcgatgtgacgtgcataagtgaagttaagaccgtggcatgtcgtcgggccagtccgcctacccgctgacccccaacttctaccttcacttaggctagtcgtatctatccatcgcgagaatagtcgctgccgaattccaaatccaaaatgcatgccgccgcgatatcagcaaacccactcaaactcgacgttcgcagtcatgccaagtgtctcgccatctgcttcgtagctacaatctcgacgtttcagtatggcctcgactacgcactcatcggcggtttcctatccatgccaggattcttagaggtgttcggatactacgatgagaaccgaaagacgtggggcattgagcccacagtacagcaactcataacaagtctcctgacgataggcacgctgatcgcgtcactgctagttggccctttcagcagccgttttggcaggagggcggggctgtgggtagcagcgctgctgaatttcctggcgacggcgattatgattgctacgaccagcgttggggttctgtacttcgctcgcctgatactaggggtttctgtcgggtggttcctgaccttctcgcagctgtacgtgcacgaagttgcgcctgctcaccttagggggatagcgttcgccgtttaccaaacccagctcagtatcggatctattgttggcgctgccatcgattatggatcccatgatatcaacggtagacgagcgtatcaaatccctctcgccgtcttctttgctgcgcctaccatccagtccatcgcgatgctcttctttcccgagacaccgcgctggctgatggttcgaggtagagaggacgaagcggaggcatcactccgcgcgcttcgaaactctgatatcgatcaacgggagcttcaggcggagttgaatgagatcaggcagtcgacgagggaacaggtgggacagaacaagaaggctctctttctagagatgtggcgaggcaccaatctccgccggtcactactctctattgccgtcgtatgctttcattgcgcaagtggttcatcgtattcgacgatctacacaacatactatctccaaatagccggtgttaaggatccgttcgggttttcaatcctgatcacgagcatgggactgatcggtatcctgtttagcttttggttcgtccgctcaattgacaggcgcgtcatcatgctggttggtgtcgcaggttgcgggttcacgcagctagcacaggcgatagtgtggtcggtccggccggggtccgatgtggccggacaggtcgttttggcgttcgtcgccctgtttacgttgatttatacggcctttggaccttttgcctggctccttgggggcgagtatcccaatagcgccctgcgtggctactgcttcggctttgctacggcgttgaactttctggggaactgggtgggtaccttcacagctccgtacttcatcaacccagctagtctggggattggaccccagtatggctatatatggttcgcgtcgaacatgatcgtgctagtgttcgtatggttctgcgtaccagagactagagaccgcacgctcgaagaaatacacgagatgttcgaagcccgtgtaccaacacgcgagttcaaaacttacgtctgcgttggtgtcgagcaattcgccgccgaggctgttggcgtcaacgctttcaagagagacgagaagaccggagcactgcacgtcgagacagcagcgaccacatccgcaagggcctaagaggcgtagttgagaaacatggcagaacgaaagttgactataagtcagttggcgagaattggcccataattaagaacactttccactcatcatactgcttacttgggttagtaattacggccttgcagcctactcgcccgtagatgaaaacattggtactgatggagtgcccaacaatgttggcgggtatgagccacattcacaatgttcttcgatctgcaacccccttatgtagtgcaccaacccaagtctccagtgtgtttgtgcacgtgtatatacattgtgaagatggcgtaattgtatcgaac

SEQ ID NO: 21974 - DNA, 1974 bp, Muscodor strobelii
  misc_feature: SGI cDNA ID NO. 567450
  misc_feature: Reduced expression when VOC is produced
  misc_feature: Encodes the peptide sequence at SEQ ID NO 21975
atgcaaaggacaacacttctcctctccgccctaggaggcgctcacggcctcgctatgcgtcgagatgggtgttcctttaacataacgacagcgggggcgtatacataccccgtcggtcaatatcctaccggacagactcgagctggtcccatcgagacgcagtcactcttcacacttaacggtgacacactcacagacaatcgtggtcgtggatgctggtggacaccacctgctctagttctgcaatgtgatatcgggcagatcccggaacatggattcagcattggctgcgatggtacagtttcgtacaatggacagaccacattctatgaatgtcaaactggcgtagacgatcttatcatgatctattccgaacccaacggatctgtctgcgataaaatcacgctgaaagccgatggatgctacccgagtgattgcggctcgtcgtcatcgacgatcggtagctcctctagctcctctagctcctcgcctgcaacgtcgagcagtcctgtaggcggctcgtcaagctatgctgtcacatccatccctactggcggaagcggcgccggaagctctcatcccacgagtagtgcctcagcacctagcagctcgtctgtcccgtcttccggcgaatcgagcacgccaggttctggatctggaacttcgtatccaggaggtacccctagctcttccagcagtgaatctatccctacgaccccggcgcagaccagtcctagccagcccggctcgggttattctacaggcccgggactgtctgccactacagaaaccactagcgtccccgagtccagcgcacctggctctaccacggctgtcagcacctcaactgcccccgagtcttctccttcaggatatcctactggaggcatgacttcgtacataacgtcgaccatctactcgaccagcagctacgaaactggtggcagcacgactactgtcagcattcctgtcacgaccactgtctgccctgtgaccgagacttcccctactggcggatatccaacgactattcctagcacttctagcttagctccatccactacgctctcttctcattcaacatcctcggccagttctgaatatcctaccgggccggcgacatccacggcctcagtatcttcaagctcaccgagcacatctggctctggatatcctactggcccaggttattccactaggtccagcatccttacaacatctactgcccccgggacgtcatcaagcactgatgctaccacaagcgcgagtgttcctggcagctcatcagtgtccagctaccccgttggcacaccatccacgtcttcgacttcagctggaacgacttcaagtgcaagtgctacgacgcatcccattgttccaacaactacttcatctggctatcccacgggcacgaacactttccccacatctatcgccacttccagcgccccaacctcatccggcactccaggtgttaattgtcccggggagctgtctggtgcatgggaatacccccacctaatcattcccgttgaccgtagcagcccaaatagcgcagctggtactaccttcttccccgaaattagctcaacaaagtcaacttcattcaacttcgatattccttccagcgacagcggcaagacatgctcgctggtattttacttccctctcaagagccagctcgaaacctcatcttataccttcagcggctcgggccagatcacattttccaagctcaagaataccgtcagcgccactactacatacaaaagcctccccgatgtcgtggagtcgtatggcacgaagagcgttacacctggcactggctacaccatcgcagagtttgactgcccagctggcaaggctgtcgctttcgagatggctgtagccgagggtgactcctctacgagtctccgatacttccaggactacaacccttgcccacttgggctttacatcaatgtctctgcttaa

SEQ ID NO: 21975 - protein, 657 aa, Muscodor strobelii
  misc_feature: SGI Peptide ID NO. 567450
  misc_feature (419)..(655): NCBI GI: 238491366 Blast Desc: GPI anchored cell wall protein, [Aspergillus flavus NRRL3357] gi|220697333|gb|EED53674.1| GPI anchored cell wall protein, [Aspergillus flavus NRRL3357]
  misc_feature (468)..(655): NCBI GI: 145257471 Blast Desc: An04g03830 [Aspergillus niger] gi|134058663|emb|CAK38647.1| protein product [Aspergillus niger]
  misc_feature (493)..(655): NCBI GI: 159125156 Blast Desc: GPI anchored cell wall protein, [Aspergillus fumigatus A1163]
  misc_feature (493)..(655): NCBI GI: 70994164 Blast Desc: GPI anchored cell wall protein [Aspergillus fumigatus Af293] gi|66849563|gb|EAL89891.1| GPI anchored cell wall protein, [Aspergillus fumigatus Af293]
  misc_feature (494)..(648): NCBI GI: 119500740 Blast Desc: NFIA_107210 [Neosartorya fischeri NRRL 181] gi|119415292|gb|EAW25230.1| NFIA_107210 [Neosartorya fischeri NRRL 181]
  misc_feature (494)..(653): NCBI GI: 121707289 Blast Desc: PAP2 superfamily protein [Aspergillus clavatus NRRL 1] gi|119399937|gb|EAW10363.1| PAP2 superfamily protein [Aspergillus clavatus NRRL 1]
  misc_feature (494)..(655): NCBI GI: 261355345 Blast Desc: PAP2 superfamily protein [Verticillium albo-atrum VaMs.102]
  misc_feature (494)..(655): NCBI GI: 259487009 Blast Desc: TPA: GPI anchored cell wall protein, (AFU_orthologue; AFUA_4G08960) [Aspergillus nidulans FGSC A4]
  misc_feature (494)..(655): NCBI GI: 67522427 Blast Desc: AN1670.2 [Aspergillus nidulans FGSC A4] gi|40745634|gb|EAA64790.1| AN1670.2 [Aspergillus nidulans FGSC A4]
  misc_feature (499)..(655): NCBI GI: 238482305 Blast Desc: conserved [Aspergillus flavus NRRL3357] gi|220700441|gb|EED56779.1| conserved [Aspergillus flavus NRRL3357]
  misc_feature: Useful for introducing or modulating the production of volatile compounds
MQRTTLLLSALGGAHGLAMRRDGCSFNITTAGAYTYPVGQYPTGQTRAGPIETQSLFTLNGDTLTDNRGRGCWWTPPALVLQCDIGQIPEHGFSIGCDGTVSYNGQTTFYECQTGVDDLIMIYSEPNGSVCDKITLKADGCYPSDCGSSSSTIGSSSSSSSSSPATSSSPVGGSSSYAVTSIPTGGSGAGSSHPTSSASAPSSSSVPSSGESSTPGSGSGTSYPGGTPSSSSSESIPTTPAQTSPSQPGSGYSTGPGLSATTETTSVPESSAPGSTTAVSTSTAPESSPSGYPTGGMTSYITSTIYSTSSYETGGSTTTVSIPVTTTVCPVTETSPTGGYPTTIPSTSSLAPSTTLSSHSTSSASSEYPTGPATSTASVSSSSPSTSGSGYPTGPGYSTRSSILTTSTAPGTSSSTDATTSASVPGSSSVSSYPVGTPSTSSTSAGTTSSASATTHPIVPTTTSSGYPTGTNTFPTSIATSSAPTSSGTPGVNCPGELSGAWEYPHLIIPVDRSSPNSAAGTTFFPEISSTKSTSFNFDIPSSDSGKTCSLVFYFPLKSQLETSSYTFSGSGQITFSKLKNTVSATTTYKSLPDVVESYGTKSVTPGTGYTIAEFDCPAGKAVAFEMAVAEGDSSTSLRYFQDYNPCPLGLYINVSA

SEQ ID NO: 21976 - DNA, 3294 bp, Muscodor strobelii
  misc_feature: SGI EST ID NO. CUFF.51647.0
  misc_feature: Variant of the nucleotide sequence at SEQ ID NO 21974
gagactttcactatgataatgctcaatcgtcaagtaaatgctacgctttgaacggatatcacgattcaaatcggtttcttttctagcctccgcagtcttgccagcccgttaatatgagacacgactcagttcgtgtgtgcacgacgtcagccgctccacccagagaaaatatgagtctgcagccaggcgagccagcggcttcaacacacatgtacatcataaactccattccgttgcataagaccaatgccagtcccgtcgatcgtcgctagcgaccgttgacggatcgctccacgtcgttttcaaacaccaataacctttggcctgattgcaccggcgtatgaaccagctgcgggtatcacggaacccgtcaagccctatccacggggccgctgtgtatctatgcactcttgggcggacataatcgcccttacctcgacctcggaacttggaacaacactggggaacatcctccactgtcccgatctttgagaatagcgttgaaaaaaagaaaagagtccgatgtggcttcgctcgcattgtgcgcgtacacatcccgctcagcccacttgttgcatcataatggtgatgtggtttccgatcgtaccgatctcgacttcgcgcaacgtggtattctcgcatcgagcgaagagaagcgtgccgagtgcccgcagagcctcaagacctcacaatggatcgacactgactcaatggccactggggccgctgagtgacgtctgttggccaaaagcttctcgagttgggaattgggatgtagacgattcagctcacgtggagccgacctgaacatgtataaagtctatgttgcacctatggcggttggttttctgaccagctctgcattgacctgtttggcagtcgtgcgattctgtcactctttggactgtccggacgactaacttataccttgtcactcgttatcatcatgcaaaggacaacacttctcctctccgccctaggaggcgctcacggcctcgctatgcgtcgagatgggtgttcctttaacataacgacagcgggggcgtatacataccccgtcggtcaatatcctaccggacagactcgagctggtcccatcgagacgcagtcactcttcacacttaacggtgacacactcacagacaatcgtggtcgtggatgctggtggacaccacctgctctagttctgcaatgtgatatcgggcagatcccggaacatggattcagcattggctgcgatggtacagtttcgtacaatggacagaccacattctatgaatgtcaaactggcgtagacgatcttatcatgatctattccgaacccaacggatctgtctgcgataaaatcacgctgaaagccgatggatgctacccgagtgattgcggctcgtcgtcatcgacgatcggtagctcctctagctcctctagctcctcgcctgcaacgtcgagcagtcctgtaggcggctcgtcaagctatgctgtcacatccatccctactggcggaagcggcgccggaagctctcatcccacgagtagtgcctcagcacctagcagctcgtctgtcccgtcttccggcgaatcgagcacgccaggttctggatctggaacttcgtatccaggaggtacccctagctcttccagcagtgaatctatccctacgaccccggcgcagaccagtcctagccagcccggctcgggttattctacaggcccgggactgtctgccactacagaaaccactagcgtccccgagtccagcgcacctggctctaccacggctgtcagcacctcaactgcccccgagtcttctccttcaggatatcctactggaggcatgacttcgtacataacgtcgaccatctactcgaccagcagctacgaaactggtggcagcacgactactgtcagcattcctgtcacgaccactgtctgccctgtgaccgagacttcccctactggcggatatccaacgactattcctagcacttctagcttagctccatccactacgctctcttctcattcaacatcctcggccagttctgaatatcctaccgggccggcgacatccacggcctcagtatcttcaagctcaccgagcacatctggctctggatatcctactggcccaggttattccactaggtccagcatccttacaacatctactgcccccgggacgtcatcaagcactgatgctaccacaagcgcgagtgttcctggcagctcatcagtgtccagctaccccgttggcacaccatccacgtcttcgacttcagctggaacgacttcaagtgcaagtgctacgacgcatcccattgttccaacaactacttcatctggctatcccacgggcacgaacactttccccacatctatcgccacttccagcgccccaacctcatccggcactccaggtgttaattgtcccggggagctgtctggtgcatgggaatacccccacctaatcattcccgttgaccgtagcagcccaaatagcgcagctggtactaccttcttccccgaaattagctcaacaaagtcaacttcattcaacttcgatattccttccagcgacagcggcaagacatgctcgctggtattttacttccctctcaagagccagctcgaaacctcatcttataccttcagcggctcgggccagatcacattttccaagctcaagaataccgtcagcgccactactacatacaaaagcctccccgatgtcgtggagtcgtatggcacgaagagcgttacacctggcactggctacaccatcgcagagtttgactgcccagctggcaaggctgtcgctttcgagatggctgtagccgagggtgactcctctacgagtctccgatacttccaggactacaacccttgcccacttgggctttacatcaatgtctctgcttaaggatggaatatttgtgaagatgatgaatgtgacaagatgattagtcatagaaattgtaatatgataaaacatgtaacatattagggatcgtggcgaaggtatatagatagtatgaagtatttatatatgttatgtgaaataggaattaaaggaggacaaataggacgtattaaaattttgcaatgttgatcattcaatctcccggggtatgttatcttatttgcgagcttgtcgcatttctagattattgaatgtctcattccgagcatcatttatagcctgaactacatttcaaggatgattagagcttttctactgcacagagtttcgtacaacatgctacttctcgcgcatgcattcataattcgtgtctg

SEQ ID NO: 21977 - DNA, 1311 bp, Muscodor strobelii
  misc_feature: SGI cDNA ID NO. 567451
  misc_feature: Encodes the peptide sequence at SEQ ID NO 21978
atgtccgctacaattgaacaacggttaaattcagcagaagacctcgaaggctgcaagatatgccgtgatatctggctgcaattgactgatcctgcgcctcagccagatctacagataggttcttttcagcaagctgtaaaaagtggttgtccaatacacgttccactgcttgagtcattcaagtcatggagtgaaaacctaagcgacaaagcaggatttcaatgggatgatatcggcatttggcagaacgacgagactccttgtttgattcagtctttcagtcttggagggactggctggcacttacgacttgtgagagatgaacgtttgtctggtcatctaggacgtggtagaatattggatcctgactggattgacgttgagcctctgcgccaatgcaagcagcactgcctggaggcccatggagagcgatgtgccaaccctttaaagctcgcatctgtcacgcccatgctactagttgatgttcatcagaactgccttgtgcctggtcatgttgccgagtcttacgtagcattgagctatgtttggggtgaaggtagcaatcatcgactcaacgttcccattgagctgctgcctagattacaggaaccgaacgcactcagtagtcgtgaagcagagtattacgtgtctccaataatcaggcgtgccatggctttgaccaccatgataggagaaaggtggctatgggtcgatgcgctatgcgtccctgtgggagatcgaaacactactaagggacaaatcgacatgatgggcagcatttttgctatggctgtcttaaccatagtgtcagctgacggtgacgccgagagcggactttgtgggcttcagggattctctccttctcggggcttaaaccaaatcgtcataccattcggggaggagcgaattctggccgagaatactgagctttttgggccgccatatgcccagggcaaatactctgagcgtgcgtggacatatcaagaggagatgatgtcgtcaagaatgatcttgttccaagacaacatggttgcctggagctgccaatgtaacttatggcgtgaggatatggcacaggatactatcccgaacatccgtaactgcagtgacaacagactgggcaccattcttgcgggcatccccgacatagcatctgttggtcaaattttatcacattacagcgaacgacatctgtcatacccagaggatgccctatcgggtattcaggggctgctttctgtcattggtagggcttttgatggcggcttcctggttagtggcaacggtccccttgtgatatgcttcaactga

SEQ ID NO: 21978 - protein, 436 aa, Muscodor strobelii
  misc_feature: SGI Peptide ID NO. 567451
  misc_feature (176)..(329): Pfam Id: PF06985 Pfam Desc: Heterokaryon incompatibility protein (HET)
  misc_feature (176)..(280): Pfam Id: PF06985 Pfam Desc: Heterokaryon incompatibility protein (HET)
  misc_feature (17)..(424): NCBI GI: 256728622 Blast Desc: NECHADRAFT_50543 [Nectria haematococca mpVI 77-13-4]
  misc_feature (18)..(424): NCBI GI: 46138127 Blast Desc: FG10578.1 [Gibberella zeae PH-1]
  misc_feature (120)..(425): NCBI GI: 46114308 Blast Desc: FG02996.1 [Gibberella zeae PH-1]
  misc_feature (35)..(424): NCBI GI: 256722497 Blast Desc: NECHADRAFT_77207 [Nectria haematococca mpVI 77-13-4]
  misc_feature (150)..(424): NCBI GI: 256723993 Blast Desc: NECHADRAFT_86295 [Nectria haematococca mpVI 77-13-4]
  misc_feature (117)..(427): NCBI GI: 171688856 Blast Desc: protein product [Podospora anserina] gi|170944390|emb|CAP70500.1| protein product [Podospora anserina]
  misc_feature (93)..(424): NCBI GI: 46126483 Blast Desc: FG07619.1 [Gibberella zeae PH-1]
  misc_feature (98)..(424): NCBI GI: 171679984 Blast Desc: protein product [Podospora anserina] gi|170939618|emb|CAP64845.1| protein product [Podospora anserina]
  misc_feature (101)..(424): NCBI GI: 256730682 Blast Desc: NECHADRAFT_30021 [Nectria haematococca mpVI 77-13-4]
  misc_feature (117)..(427): NCBI GI: 189188748 Blast Desc: conserved [Pyrenophora tritici-repentis Pt-1C-BFP] gi|187972319|gb|EDU39818.1| conserved [Pyrenophora tritici-repentis Pt-1C-BFP]
MSATIEQRLNSAEDLEGCKICRDIWLQLTDPAPQPDLQIGSFQQAVKSGCPIHVPLLESFKSWSENLSDKAGFQWDDIGIWQNDETPCLIQSFSLGGTGWHLRLVRDERLSGHLGRGRILDPDWIDVEPLRQCKQHCLEAHGERCANPLKLASVTPMLLVDVHQNCLVPGHVAESYVALSYVWGEGSNHRLNVPIELLPRLQEPNALSSREAEYYVSPIIRRAMALTTMIGERWLWVDALCVPVGDRNTTKGQIDMMGSIFAMAVLTIVSADGDAESGLCGLQGFSPSRGLNQIVIPFGEERILAENTELFGPPYAQGKYSERAWTYQEEMMSSRMILFQDNMVAWSCQCNLWREDMAQDTIPNIRNCSDNRLGTILAGIPDIASVGQILSHYSERHLSYPEDALSGIQGLLSVIGRAFDGGFLVSGNGPLVICFN

SEQ ID NO: 21979 - DNA, 1634 bp, Muscodor strobelii
  misc_feature: SGI EST ID NO. CUFF.51653.0
  misc_feature: Variant of the nucleotide sequence at SEQ ID NO 21977
caaggtgtcattggccatcgagggctaggactatgtcaaatgtaaaagcctgcagaaatgccgtcatcaccatcatcgtgcaaccctcctctgcctagaatacagggcaatacattcccaacaggggcttcatgttgcgccgccgcacattccgttgtctgcagctaatttaaaagcatgacggacctcgtgtctatgatttgatttttgcatctctcgcattccttgttcgcagcatccagcttgcacattgcttgtttgtcgcatgcgtgacctaaacgacgatttgtcaacacaatgtccgctacaattgaacaacggttaaattcagcagaagacctcgaaggctgcaagatatgccgtgatatctggctgcaattgactgatcctgcgcctcagccagatctacagataggttcttttcagcaagctgtaaaaagtggttgtccaatacacgttccactgcttgagtcattcaagtcatggagtgaaaacctaagcgacaaagcaggatttcaatgggatgatatcggcatttggcagaacgacgagactccttgtttgattcagtctttcagtcttggagggactggctggcacttacgacttgtgagagatgaacgtttgtctggtcatctaggacgtggtagaatattggatcctgactggattgacgttgagcctctgcgccaatgcaagcagcactgcctggaggcccatggagagcgatgtgccaaccctttaaagctcgcatctgtcacgcccatgctactagttgatgttcatcagaactgccttgtgcctggtcatgttgccgagtcttacgtagcattgagctatgtttggggtgaaggtagcaatcatcgactcaacgttcccattgagctgctgcctagattacaggaaccgaacgcactcagtagtcgtgaagcagagtattacgtgtctccaataatcaggcgtgccatggctttgaccaccatgataggagaaaggtggctatgggtcgatgcgctatgcgtccctgtgggagatcgaaacactactaagggacaaatcgacatgatgggcagcatttttgctatggctgtcttaaccatagtgtcagctgacggtgacgccgagagcggactttgtgggcttcagggattctctccttctcggggcttaaaccaaatcgtcataccattcggggaggagcgaattctggccgagaatactgagctttttgggccgccatatgcccagggcaaatactctgagcgtgcgtggacatatcaagaggagatgatgtcgtcaagaatgatcttgttccaagacaacatggttgcctggagctgccaatgtaacttatggcgtgaggatatggcacaggatactatcccgaacatccgtaactgcagtgacaacagactgggcaccattcttgcgggcatccccgacatagcatctgttggtcaaattttatcacattacagcgaacgacatctgtcatacccagaggatgccctatcgggtattcaggggctgctttctgtcattggtagggcttttgatggcggcttcctgtacgtttgtaaatgacatcttaatcgagattttgggagttcttaagttggagagtctcgtagctt

SEQ ID NO: 21980 - DNA, 924 bp, Muscodor strobelii
  misc_feature: SGI cDNA ID NO. 567452
  misc_feature: Encodes the peptide sequence at SEQ ID NO 21981
atgtggcttctaaacacaacaacatacagccttgaggagttctgggagtttgaagctccaagctatgcgattttatcccatacctgggagaaggaagaggcttcattccgcgatctgctcgagaagccaaatggataccagcaaaaagttgggtatagcaaagtgaaagcgtgctgcgacttagccgctcatcgcgtaattccatatgcttggatcgatacatgttgcatcgacaaacggaacagcgcagatctttcagaggcgctcaattcgatgtataactactatagcaatgccgtcgagtgctacatctaccttagcgatgtttctaacggagccattcaaggatgtgagactaacctaggcaccatagcgagcgatgaatatgagaagaacattcaattgcttgcacaaatacgcaacagccggtggttcacgcgaggatggactctccaagaactgatcgcgccgaaatctcgattcttctacacttctaactggtctcccattccctcaacggccgacgttatcgttctcatttcagacatgacatcaatacctttgacccttctccacgatagagacacactcgtatcatactgcgcagcaaagcgtatgtcatgggcagcaaaacggacaactacacggcccgaggatgctgcgtactctcttctaggcttatttggcgttagtatgcctattctctatggcgagggaggcccacgtgcttttgagcgcttgcaagctactatcatggaaaggacagccgatcataccctgtttgtatggcggggtccatatgagacttgtggtctgcttgcgagagcgccttcggattttcgtgatacctggacattaggacagtgggctcccgcgaatctcgcgccgttctccatgacaaatattggactagcgggtatgtaa

SEQ ID NO: 21981 - protein, 307 aa, Muscodor strobelii
  misc_feature: SGI Peptide ID NO. 567452
  misc_feature (22)..(153): Pfam Id: PF06985 Pfam Desc: Heterokaryon incompatibility protein (HET)
  misc_feature (1)..(305): NCBI GI: 171688176 Blast Desc: protein product [Podospora anserina] gi|170944050|emb|CAP70160.1| protein product [Podospora anserina]
  misc_feature (1)..(304): NCBI GI: 46139867 Blast Desc: FG11448.1 [Gibberella zeae PH-1]
  misc_feature (5)..(304): NCBI GI: 238492441 Blast Desc: ankyrin repeat-containing protein, [Aspergillus flavus NRRL3357] gi|220695951|gb|EED52293.1| ankyrin repeat-containing protein, [Aspergillus flavus NRRL3357]
  misc_feature (1)..(304): NCBI GI: 164425178 Blast Desc: NCU06304 [Neurospora crassa OR74A] gi|157070820|gb|EAA33330.2| conserved [Neurospora crassa OR74A]
  misc_feature (5)..(304): NCBI GI: 169782792 Blast Desc: [Aspergillus oryzae RIB40] gi|83774602|dbj|BAE64725.1| protein product [Aspergillus oryzae]
  misc_feature (1)..(305): NCBI GI: 171688186 Blast Desc: protein product [Podospora anserina] gi|170944055|emb|CAP70165.1| protein product [Podospora anserina]
  misc_feature (1)..(304): NCBI GI: 145249734 Blast Desc: An14g05830 [Aspergillus niger] gi|134081889|emb|CAK42144.1| protein product [Aspergillus niger]
  misc_feature (1)..(304): NCBI GI: 169780438 Blast Desc: [Aspergillus oryzae RIB40] gi|83773423|dbj|BAE63550.1| protein product [Aspergillus oryzae]
  misc_feature (1)..(305): NCBI GI: 256720502 Blast Desc: NECHADRAFT_55867 [Nectria haematococca mpVI 77-13-4]
  misc_feature (1)..(304): NCBI GI: 46126619 Blast Desc: FG07687.1 [Gibberella zeae PH-1]
MWLLNTTTYSLEEFWEFEAPSYAILSHTWEKEEASFRDLLEKPNGYQQKVGYSKVKACCDLAAHRVIPYAWIDTCCIDKRNSADLSEALNSMYNYYSNAVECYIYLSDVSNGAIQGCETNLGTIASDEYEKNIQLLAQIRNSRWFTRGWTLQELIAPKSRFFYTSNWSPIPSTADVIVLISDMTSIPLTLLHDRDTLVSYCAAKRMSWAAKRTTTRPEDAAYSLLGLFGVSMPILYGEGGPRAFERLQATIMERTADHTLFVWRGPYETCGLLARAPSDFRDTWTLGQWAPANLAPFSMTNIGLAGM

SEQ ID NO: 21982 - DNA, 453 bp, Muscodor strobelii
  misc_feature: SGI cDNA ID NO. 567453
  misc_feature: Reduced expression when VOC is produced
  misc_feature: Encodes the peptide sequence at SEQ ID NO 21983
atgcagtccaaagcaatcgctttttccttcgtaatcgcggcggtcgcagctcagaacagcacaaattcgtcattgacggatcttgtctcgcagcttccgacctgtgctattccatgtttcgaaagcggcgcagaggcagccaattgctcgaccaccgacttcgattgcctttgcggtcctggaaaacaaacattcatttcgagcgccggcatctgcatcgtcacttccagctgctcaagcgaagaccaagccaaagttacaaatcttgcccccgagatctgccaggacgtggatgctggcgtgtcagactccgaccaggctgctgcttcgagcattgtctcatccgccctctctgccgccgcgaccaatccgcctgacgatgccgctgttcgaccagagatcggctacggtgtattcggcgctgctgccgtcgccgcgatgtgggcgctatag

SEQ ID NO: 21983 - protein, 150 aa, Muscodor strobelii
  misc_feature: SGI Peptide ID NO. 567453
  misc_feature (28)..(95): Pfam Id: PF05730 Pfam Desc: CFEM domain
  misc_feature (3)..(123): NCBI GI: 46110599 Blast Desc: FG02181.1 [Gibberella zeae PH-1]
  misc_feature (8)..(94): NCBI GI: 46110547 Blast Desc: FG02155.1 [Gibberella zeae PH-1]
  misc_feature (6)..(147): NCBI GI: 29027709 Blast Desc: immunoreactive protein [Magnaporthe grisea]
  misc_feature (6)..(147): NCBI GI: 39973409 Blast Desc: conserved [Magnaporthe grisea 70-15] gi|145017878|gb|EDK02157.1| conserved [Magnaporthe grisea 70-15]
  misc_feature (2)..(121): NCBI GI: 189204526 Blast Desc: PTRG_08266 [Pyrenophora tritici-repentis Pt-1C-BFP] gi|187985697|gb|EDU51185.1| PTRG_08266 [Pyrenophora tritici-repentis Pt-1C-BFP]
  misc_feature (6)..(94): NCBI GI: 156055446 Blast Desc: SS1G_05075 [Sclerotinia sclerotiorum 1980] gi|154702859|gb|EDO02598.1| SS1G_05075 [Sclerotinia sclerotiorum 1980]
  misc_feature (29)..(94): NCBI GI: 154310477 Blast Desc: [Botryotinia fuckeliana B05.10] gi|150851490|gb|EDN26683.1| [Botryotinia fuckeliana B05.10]
  misc_feature (24)..(82): NCBI GI: 261359317 Blast Desc: [Verticillium albo-atrum VaMs.102]
  misc_feature: Useful for introducing or modulating the production of volatile compounds
MQSKAIAFSFVIAAVAAQNSTNSSLTDLVSQLPTCAIPCFESGAEAANCSTTDFDCLCGPGKQTFISSAGICIVTSSCSSEDQAKVTNLAPEICQDVDAGVSDSDQAAASSIVSSALSAAATNPPDDAAVRPEIGYGVFGAAAVAAMWAL

SEQ ID NO: 21984 - DNA, 1928 bp, Muscodor strobelii
  misc_feature: SGI EST ID NO. CUFF.51766.0
  misc_feature: Variant of the nucleotide sequence at SEQ ID NO 21982
gtttcatctcaactcagattctgcacagagatgaggtgatttcatgatttgatcaatccagtaagtgatagtcgtctagattgccctgactgctgatgcctcacagcacagccgccttctcagcagccgtttccagtggctctcatgccaaacgcgcggctttctggtgttttagggtctcgtagggggctgtgtcaacagtgcgggtctcgttcaggacccttttactgcttatttaagctcccaggtcaggtctgagtggttgagcgggacggttatgcgggctcggcaggatgtggcgtcgtcggggataactggaatacgaactgtggtggtgggattgaatcaatcttggctgatgactgactgttgaccaagtcacacatcgacagcagtttcgattgcaagatcctcatctatctttcactgtgtcactgtgattttttctttgtctgcataatcatcgttttgctatccaacattgctcttgtctcttattatacccgtttcctgctcgttgcttccaacattcctctcccacgtcatttgcaaatccacagatccaaaggtcgaactcgctgctatctatcctgacttttggctggccaaagtttcgttcgtcatcatcgttgccacagccgaaacaaaacagcaacgaattcgttttaacaatcaacccaatcccaacaatcaaatcgctccgaatttgttaatacactcatacatcaatcaaaatgcagtccaaagcaatcgctttttccttcgtaatcgcggcggtcgcagctcagaacagcacaaattcgtcattgacggatcttgtctcgcagcttccgacctgtgctattccatgtttcgaaagcggcgcagaggcagccaattgctcgaccaccgacttcgattgcctttgcggtcctggaaaacaaacattcatttcgagcgccggcatctgcatcgtcacttccagctgctcaagcgaagaccaagccaaagttacaaatcttgcccccgagatctgccaggacgtggatgctggcgtgtcagactccgaccaggctgctgcttcgagcattgtctcatccgccctctctgccgccgcgaccaatccgcctgacgatgccgctgttcgaccagagatcggctacggtgtattcggcgctgctgccgtcgccgcgatgtgggcgctatagaaaggatacaatgttttcaatacactgcttttggctgctttctaatgacctcgctcatgaaaatgcttgggaatggcgctcttcgggtcttgcattgggataaatatacaccactagatcggaataaactagatatgctagtttcagggttacagattgttcatctcggcaaacggcgttccggatatggcagacaaacataggtcgtcacaagtccaattgaaaatatatttattactctattctaagtgctactatttgaattcgaagttcttttctcccgtactgcccctgccgcatgtaaccgttttgttaagaacggctgataacgatctcatgagtagcctggttggactgggaccatcccggacgatcacggactagatatcactcaccatcgtccgctgctactacctgcacacgactgtctccgaatcagtcatctcaagttagcacttttcacaccatacaactcccactgtggcggtcttagtccaccacccaaatatctttgccgtgtctcaacactatgttgggtcccccatctcgcattgtgctcttctatagatcgcaccactctcgcatattgctcatcttgtagaataagggcgtcctcccacacatggcctaccaatttgtaccgattatgtgtttctaatacagaacaatctactcgtctgtatgcattacacttctgcccgttgagaaaacagtgagcgccaggtatgagacggaggcgca

SEQ ID NO: 21985 - DNA, 1083 bp, Muscodor strobelii
  misc_feature: SGI cDNA ID NO. 567454
  misc_feature: Encodes the peptide sequence at SEQ ID NO 21986
atgaagccatcgcaagcaatccaggctcaaagttggttcttcaaggaccgttccgcacgccaacatgtgtatcaacccacccatgaccgtatagtgatcattatgtcttttctctacagccagctcttcgtgacacctccttatccaaaggactccgcgaaaggcaagacaatcattgtgacgggaagcaacactgggcttggcaaggaagcggtacggcactacattcgacttggagcaagtttggtgatcatcgctgtgcgaaacctgacgaaaggcgctgaagcgagggacgatatcattcggacgacacaatgcagtgcgaaccggctccaagtatgggagctggacatggctagatacgctagcgtcaaggcgttcgctaagagggcgacgctggagctggacaggatcgacatagtgaacgcgaatgctgggctcgcagcagcggcgtacacacagtcagagagaaacgagactatgatcacggtcaacttcatttcgacgtactatcttctcgccctcctgatgccgaagctaagggatgttgcagcgcaatacgacatccggcctacattttgcattaccggatctggtgctcatgcgcataccaagtttccccagaagagcgctcccgaaggtcagcttcttgtgcggtgcaatgataaggccactttcgaagctcacgcgatggagcaatacccggtttcgaagcttctcccacttctggccttgcgccacctggcagtgttgcgtcctgcggactcaaaagacttccctgtgaccgtgaacaatccgagtccgggtttgtgtatcagcgagttagcacgggatgcgaacagcttcttattttggctttttcgcatggtcttcgcgaggactactgaagttggcagtcgaactgttgtccatggtggcagtgcggggagagagacacatggggcttatcttgaggactgtaagataggtaggcctagtgccattgtcaccggccctggcggagcagatcttgcgaagagggtatgggacgagttgagtacggcgcttgagggtattgaaccgggtattatgaagaatttctaa

SEQ ID NO: 21986 - protein, 360 aa, Muscodor strobelii
  misc_feature: SGI Peptide ID NO. 567454
  misc_feature (56)..(200): Pfam Id: PF00106 Pfam Desc: short chain dehydrogenase
  misc_feature (56)..(185): Pfam Id: PF00106 Pfam Desc: short chain dehydrogenase
  misc_feature (35)..(360): NCBI GI: 212529402 Blast Desc: short-chain dehydrogenase, [Penicillium marneffei ATCC 18224] gi|210074256|gb|EEA28343.1| short-chain dehydrogenase, [Penicillium marneffei ATCC 18224]
  misc_feature (35)..(360): NCBI GI: 189210838 Blast Desc: retinol dehydrogenase 12 [Pyrenophora tritici-repentis Pt-1C-BFP] gi|187977843|gb|EDU44469.1| retinol dehydrogenase 12 [Pyrenophora tritici-repentis Pt-1C-BFP]
  misc_feature (34)..(358): NCBI GI: 189204127 Blast Desc: retinol dehydrogenase 12 [Pyrenophora tritici-repentis Pt-1C-BFP] gi|187985498|gb|EDU50986.1| retinol dehydrogenase 12 [Pyrenophora tritici-repentis Pt-1C-BFP]
  misc_feature (36)..(359): NCBI GI: 154312603 Blast Desc: BC1G_05904 [Botryotinia fuckeliana B05.10] gi|150850005|gb|EDN25198.1| BC1G_05904 [Botryotinia fuckeliana B05.10]
  misc_feature (34)..(359): NCBI GI: 169619898 Blast Desc: SNOG_13148 [Phaeosphaeria nodorum SN15] gi|111058355|gb|EAT79475.1| SNOG_13148 [Phaeosphaeria nodorum SN15]
  misc_feature (35)..(360): NCBI GI: 119497485 Blast Desc: NFIA_023150 [Neosartorya fischeri NRRL 181] gi|119413663|gb|EAW23604.1| conserved [Neosartorya fischeri NRRL 181]
  misc_feature (36)..(356): NCBI GI: 239609457 Blast Desc: short-chain dehydrogenase/reductase [Ajellomyces dermatitidis ER-3]
  misc_feature (35)..(360): NCBI GI: 121703447 Blast Desc: conserved [Aspergillus clavatus NRRL 1] gi|119398131|gb|EAW08562.1| conserved [Aspergillus clavatus NRRL 1]
  misc_feature (37)..(360): NCBI GI: 212538669 Blast Desc: short-chain dehydrogenase/reductase family protein, [Penicillium marneffei ATCC 18224] gi|210069232|gb|EEA23323.1| short-chain dehydrogenase/reductase family protein, [Penicillium
  misc_feature (36)..(356): NCBI GI: 261196470 Blast Desc: short-chain dehydrogenase/reductase [Ajellomyces dermatitidis SLH14081] gi|239595883|gb|EEQ78464.1| short-chain dehydrogenase/reductase [Ajellomyces dermatitidis SLH14081]
MKPSQAIQAQSWFFKDRSARQHVYQPTHDRIVIIMSFLYSQLFVTPPYPKDSAKGKTIIVTGSNTGLGKEAVRHYIRLGASLVIIAVRNLTKGAEARDDIIRTTQCSANRLQVWELDMARYASVKAFAKRATLELDRIDIVNANAGLAAAAYTQSERNETMITVNFISTYYLLALLMPKLRDVAAQYDIRPTFCITGSGAHAHTKFPQKSAPEGQLLVRCNDKATFEAHAMEQYPVSKLLPLLALRHLAVLRPADSKDFPVTVNNPSPGLCISELARDANSFLFWLFRMVFARTTEVGSRTVVHGGSAGRETHGAYLEDCKIGRPSAIVTGPGGADLAKRVWDELSTALEGIEPGIMKNF

SEQ ID NO: 21987 - DNA, 1533 bp, Muscodor strobelii
  misc_feature: SGI cDNA ID NO. 567455
  misc_feature: Encodes the peptide sequence at SEQ ID NO 21988
atggcgcggggaccagagtcgttcttcagctacaacgtgacgcgaccgtatccctacagatggttcacaccagtcggaatagcaatcctcatcgtcacgacggcaattttcacatttctcaatttcgcctcatatggatatgatctcgttcttcaagtctcatctgagcctaatgtcacaattgcaagcagcaaatggctaaaacattggccatcattcttcacagcaaaggtgaacccgacttgcgaagctacagattttcccgtgaactcgcctctcttcactaatcagacggcattggtttacaatttggcctcggtctggaatgacaaacctgacggaacgcgccaaatactaccgtcgttgagctatttcaaccaagttatcgaaaattgctcgattagctccgtagacattgattacagcgcacttgatcgcgccgcgaaccagattggctattctgaatggggagctgtcgtccgtacgttcgcaatgtgtcgcgtcaccaccgccgaaggtgtagtgtcattcaacctcactcaaacgtatgactatgtcccggatacactagcttttaatggcctttacactttccttggcaccaactttcttagccgcaatctgacgtcgcgcgcgagtttgtggtggggggagacgttgatgtctacgtactgggcgtatacatcgcgtctcatgcaggatatcagactcgcgaataatacgaacgaggaacctggactcactaagggcttcatcgcgtttacgccaaacaagattaagggtgcagctgtgaccgatattacgaaccctaagttcttccatatcgaatatcgatttcttgaggaccaactctacggcaggttcaacatctactcgggtaatgacacatcccaagatcaaacggccgatttgatggataagaatgaagtacatccgaagatctggctcccggcagacacgttagctaaggctgcatggtcgacagtcctcaccgatctcggacagcagaatgctgaatcgaacctccttgccagtgaatcaactgtcgagctctttacggccaatttctcgacggcagcgaagcattttgccaatgccaaccccgggcctggaaacatgagttacgcaatgcttcaagcctcttcaacgccgtcaggttcgattggtctcacgccatctgtgttctctgcaaaatacatctgccaagtcccgagaagaaaatcaaccggcgcattgcttctttctatcttcgtcgcagatatagttttgatacagggcgtctggtggatatataagactgctgttgagcagtatctattccgtatcaatccggatgccaatgtatcaagagagccattgaggcaagcagctcaatcgacggtccctgccatgcccggcaagagcgaccatgattcaggcgagtttggaacagatggactggcatatccacatgaagagcagtacacatatatgggagccagcggagtcatgggagacacggagtcttacgaattgatttcaagaagaacatga

SEQ ID NO: 21988 - protein, 510 aa, Muscodor strobelii
  misc_feature: SGI Peptide ID NO. 567455
  misc_feature (139)..(396): NCBI GI: 242821387 Blast Desc: TSTA_000880 [Talaromyces stipitatus ATCC 10500] gi|218712591|gb|EED12016.1| TSTA_000880 [Talaromyces stipitatus ATCC 10500]
  misc_feature (9)..(375): NCBI GI: 189208318 Blast Desc: [Pyrenophora tritici-repentis Pt-1C-BFP] gi|187976585|gb|EDU43211.1| [Pyrenophora tritici-repentis Pt-1C-BFP]
  misc_feature (7)..(480): NCBI GI: 256730167 Blast Desc: [Nectria haematococca mpVI 77-13-4]
MARGPESFFSYNVTRPYPYRWFTPVGIAILIVTTAIFTFLNFASYGYDLVLQVSSEPNVTIASSKWLKHWPSFFTAKVNPTCEATDFPVNSPLFTNQTALVYNLASVWNDKPDGTRQILPSLSYFNQVIENCSISSVDIDYSALDRAANQIGYSEWGAVVRTFAMCRVTTAEGVVSFNLTQTYDYVPDTLAFNGLYTFLGTNFLSRNLTSRASLWWGETLMSTYWAYTSRLMQDIRLANNTNEEPGLTKGFIAFTPNKIKGAAVTDITNPKFFHIEYRFLEDQLYGRFNIYSGNDTSQDQTADLMDKNEVHPKIWLPADTLAKAAWSTVLTDLGQQNAESNLLASESTVELFTANFSTAAKHFANANPGPGNMSYAMLQASSTPSGSIGLTPSVFSAKYICQVPRRKSTGALLLSIFVADIVLIQGVWWIYKTAVEQYLFRINPDANVSREPLRQAAQSTVPAMPGKSDHDSGEFGTDGLAYPHEEQYTYMGASGVMGDTESYELISRRT

SEQ ID NO: 21989 - DNA, 1996 bp, Muscodor strobelii
  misc_feature: SGI EST ID NO. CUFF.51672.0
  misc_feature: Variant of the nucleotide sequence at SEQ ID NO 21987
gaacctccttgccagtgaatcaactgtcgagctctttacggccaatttctcgacggcagcgaagcattttgccaatgccaaccccgggcctggaaacatgagttacgcaatgcttcaagcctcttcaacgccgtcaggttcgattggtctcacgccatctgtgttctctgcaaaatacatctgccaagtcccgagaagaaaatcaaccggcgcattgcttctttctatcttcgtcgcagatatagttttgatacagggcgtctggtggatatataagactgctgttgagcagtatctattccgtatcaatccggatgccaatgtatcaagagagccattgaggcaagcagctcaatcgacggtccctgccatgcccggcaagagcgaccatgattcaggcgagtttggaacagatggactggcatatccacatgaagagcagtacacatatatgggagccagcggagtcatgggagacacggagtcttacgaattgatttcaagaagaacatgagcttcgggacactttcaataatagggcatcacaactacgcttgaatcattcttgcacgccatcagtctccaactcaagcccaccattttcgccatcaccaagcgatccatcaagaccacctggatgcagtctggtatggattcgatacaagaacttgccatctgcgtatgtatcctcagcttccttcttactccaccccaacaaaggcgtataaagcgacaagtccagacgctcgcgacagttctcgcagttgcttgtctcccagcgactaagaatcggctctgcgttaactaagacaagtgagtcatcgtcgttccgcaaccaggtggagactacaaatgaccccttgtatcgtccgcgattgatcgttgggagcttaagacgaggggctgttatgatgggagcggttgtgaaatcccgaccttctggatctgcgtacatgtagcctagattggcaatgttggcgacatcctgtgatgcagatgatcagtactgacttacaaacaccacgattaacggaagtcacatacctgagatgtcatagatcgggatccatcaggcattttgaacgggtctaacgcagtctgaatcgtgtattttccaacgccagggtcaccagtgatgaactccaaagtatcagtcgacttattcaacacttgccagctccagaaagtgtagtcgatgaaacaatgatggaagtagaagatgggatcaaaagctgcggtttcattctcccccatgtcaccattagcaaaatccaccgcactggcatcctgttcaggtacttgaataccgccgactgcaagatgcatcacattatgaggcttttcaaccggatatatgaccttgccggggtgcctcttgttccaatctgccgctgacgttgtgttggagaatgcggtgtaattaggcgcgcttaggcattgttcataccactccctagcgcccgcggcatacttgttgcctaagctagtcttgtactcctttgacagaagccatgtagcgacgttcgcgttgagcattgcggtggtagtcgcggaacccttgttctggtactcctgattatggatctgcgttttctcgcgatactcgtcggtcactaaacccgagaagggatagcgaaccgtttcgtatccctttggcttcgtatacagctgtgtgacatcgtctgcgatatcttgctgaagcgtatatgagtatagcgggtttgggatggtggttccatccgcgtaagtgtagttttcatcggtgaggatagtggggataggcacaatgccaccttgcatgcttgctgtctcgttccagtagggaagagtgacaccaggcacctgtttctgcagagactgctctagtttgttaagatacgcgcggtgccaggttgggaagagcacgtcgccatgatggcaccagaagcctccaggtatcccatggtagctagcgatcgtatagaaggaatcgtcatccgagggagatagctccttc

SEQ ID NO: 21990 - DNA, 1458 bp, Muscodor strobelii
  misc_feature: SGI cDNA ID NO. 567456
  misc_feature: Encodes the peptide sequence at SEQ ID NO 21991
atggcgcccttgatccgaaaaagccttgttgatcttacaacagaagagaaggataatctcgtcaaggctttcgcggctgtgaaggagctatctccctcggatgacgattccttctatacgatcgctagctaccatgggatacctggaggcttctggtgccatcatggcgacgtgctcttcccaacctggcaccgcgcgtatcttaacaaactagagcagtctctgcagaaacaggtgcctggtgtcactcttccctactggaacgagacagcaagcatgcaaggtggcattgtgcctatccccactatcctcaccgatgaaaactacacttacgcggatggaaccaccatcccaaacccgctatactcatatacgcttcagcaagatatcgcagacgatgtcacacagctgtatacgaagccaaagggatacgaaacggttcgctatcccttctcgggtttagtgaccgacgagtatcgcgagaaaacgcagatccataatcaggagtaccagaacaagggttccgcgactaccaccgcaatgctcaacgcgaacgtcgctacatggcttctgtcaaaggagtacaagactagcttaggcaacaagtatgccgcgggcgctagggagtggtatgaacaatgcctaagcgcgcctaattacaccgcattctccaacacaacgtcagcggcagattggaacaagaggcaccccggcaaggtcatatatccggttgaaaagcctcataatgtgatgcatcttgcagtcggcggtattcaagtacctgaacaggatgccagtgcggtggattttgctaatggtgacatgggggagaatgaaaccgcagcttttgatcccatcttctacttccatcattgtttcatcgactacactttctggagctggcaagtgttgaataagtcgactgatactttggagttcatcactggtgaccctggcgttggaaaatacacgattcagactgcgttagacccgttcaaaatgcctgatggatcccgatctatgacatctcaggatgtcgccaacattgccaatctaggctacatgtacgcagatccagaaggtcgggatttcacaaccgctcccatcataacagcccctcgtcttaagctcccaacgatcaatcgcggacgatacaaggggtcatttgtagtctccacctggttgcggaacgacgatgactcacttgtcttagttaacgcagagccgattcttagtcgctgggagacaagcaactgcgagaactgtcgcgagcgtctggacttgtcgctttatacgcctttgttggggtggagtaagaaggaagctgaggatacatacgcagatggcaagttcttgtatcgaatccataccagactgcatccaggtggtcttgatggatcgcttggtgatggcgaaaatggtgggcttgagttggagactgatggcgtgcaagaatga

SEQ ID NO: 21991 - protein, 485 aa, Muscodor strobelii
  misc_feature: SGI Peptide ID NO. 567456
  misc_feature (1)..(363): Pfam Id: PF00264 Pfam Desc: Common central domain of tyrosinase
  misc_feature (5)..(88): Pfam Id: PF00264 Pfam Desc: Common central domain of tyrosinase
  misc_feature (245)..(312): Pfam Id: PF00264 Pfam Desc: Common central domain of tyrosinase
  misc_feature (5)..(463): NCBI GI: 46139811 Blast Desc: FG11420.1 [Gibberella zeae PH-1]
  misc_feature (53)..(463): NCBI GI: 256722105 Blast Desc: NECHADRAFT_98192 [Nectria haematococca mpVI 77-13-4]
  misc_feature (6)..(463): NCBI GI: 226335537 Blast Desc: Tyrosinase [Aspergillus oryzae]
  misc_feature (6)..(463): NCBI GI: 169781160 Blast Desc: [Aspergillus oryzae RIB40] gi|3122981|sp|Q00234.1|TYRO_ASPOR RecName: Full=Tyrosinase; AltName: Full=Monophenol monooxygenase gi|1066141|dbj|BAA07149.1|
  misc_feature (18)..(458): NCBI GI: 78060101 Blast Desc: tyrosinase [Burkholderia sp. 383] gi|77964651|gb|ABB06032.1| tyrosinase [Burkholderia sp. 383]
  misc_feature (15)..(458): NCBI GI: 169773009 Blast Desc: [Aspergillus oryzae RIB40] gi|83768834|dbj|BAE58971.1| protein product [Aspergillus oryzae]
  misc_feature (15)..(458): NCBI GI: 238490942 Blast Desc: tyrosinase, [Aspergillus flavus NRRL3357] gi|220697121|gb|EED53462.1| tyrosinase, [Aspergillus flavus NRRL3357]
  misc_feature (18)..(458): NCBI GI: 167589865 Blast Desc: tyrosinase [Burkholderia ubonensis Bu]
  misc_feature (2)..(454): NCBI GI: 83717810 Blast Desc: tyrosinase (monophenol monooxygenase) [Burkholderia thailandensis E264] gi|83651635|gb|ABC35699.1| Tyrosinase (Monophenol monooxygenase) [Burkholderia thailandensis E264]
  misc_feature (7)..(434): NCBI GI: 167573552 Blast Desc: Tyrosinase (Monophenol monooxygenase) [Burkholderia oklahomensis C6786]
  misc_feature (6)..(461): SWISSPROT Homolog: EC 1.14.18.1 Monophenol monooxygenase
MAPLIRKSLVDLTTEEKDNLVKAFAAVKELSPSDDDSFYTIASYHGIPGGFWCHHGDVLFPTWHRAYLNKLEQSLQKQVPGVTLPYWNETASMQGGIVPIPTILTDENYTYADGTTIPNPLYSYTLQQDIADDVTQLYTKPKGYETVRYPFSGLVTDEYREKTQIHNQEYQNKGSATTTAMLNANVATWLLSKEYKTSLGNKYAAGAREWYEQCLSAPNYTAFSNTTSAADWNKRHPGKVIYPVEKPHNVMHLAVGGIQVPEQDASAVDFANGDMGENETAAFDPIFYFHHCFIDYTFWSWQVLNKSTDTLEFITGDPGVGKYTIQTALDPFKMPDGSRSMTSQDVANIANLGYMYADPEGRDFTTAPIITAPRLKLPTINRGRYKGSFVVSTWLRNDDDSLVLVNAEPILSRWETSNCENCRERLDLSLYTPLLGWSKKEAEDTYADGKFLYRIHTRLHPGGLDGSLGDGENGGLELETDGVQE

SEQ ID NO: 21992 - DNA, 474 bp, Muscodor strobelii
  misc_feature: SGI cDNA ID NO. 567457
  misc_feature: Encodes the peptide sequence at SEQ ID NO 21993
atgacgaacagacattatgtgacatacgtctctgccactgaggcaacacctggttctgcgtatctgatttatcgagcatacaatatggccttcacgcatggcatcctgcctgacgaggcgagtgcagaccgccgatacgcaagcgtgaacacgctgggtggctcgatagttggaattcccagtccaccaagaatagatcctaaagttgccgtgtcacgttcgcgacctttcgagtcattgcgatttacagccaaggatatcatagatttgagaggtgtcaaggccccaaacgtgaacaaagcatggttcgagctgtatgatgcccagcatgcccttgcgcctgctatccagcttatgattgatgaggaagctgtcatcagtagcaacaccaaaacagcgaaatctgcgaatgccaatcgacctgcctctgattggcttgactatcagtacgaggcatcccacattgctctatag

SEQ ID NO: 21993 - protein, 157 aa, Muscodor strobelii
  misc_feature: SGI Peptide ID NO. 567457
  misc_feature (20)..(149): NCBI GI: 156064527 Blast Desc: SS1G_00271 [Sclerotinia sclerotiorum 1980] gi|154691133|gb|EDN90871.1| SS1G_00271 [Sclerotinia sclerotiorum 1980]
  misc_feature (14)..(149): NCBI GI: 116192597 Blast Desc: CHGG_06016 [Chaetomium globosum CBS 148.51] gi|88181929|gb|EAQ89397.1| CHGG_06016 [Chaetomium globosum CBS 148.51]
  misc_feature (14)..(149): NCBI GI: 145614783 Blast Desc: MGG_10599 [Magnaporthe grisea 70-15] gi|145021720|gb|EDK05797.1| MGG_10599 [Magnaporthe grisea 70-15]
  misc_feature (14)..(149): NCBI GI: 171684273 Blast Desc: protein product [Podospora anserina] gi|170942097|emb|CAP67749.1| protein product [Podospora anserina]
  misc_feature (14)..(149): NCBI GI: 149209319 Blast Desc: MGCH7_ch7g152 [Magnaporthe grisea 70-15] gi|86196107|gb|EAQ70745.1| MGCH7_ch7g152 [Magnaporthe grisea 70-15]
  misc_feature (20)..(149): NCBI GI: 67903332 Blast Desc: AN8653.2 [Aspergillus nidulans FGSC A4] gi|40741497|gb|EAA60687.1| AN8653.2 [Aspergillus nidulans FGSC A4] gi|259483128|tpe|CBF78247.1| TPA: glutamyl-tRNA(Gln) subunit
  misc_feature (20)..(149): NCBI GI: 255946445 Blast Desc: Pc20g15160 [Penicillium chrysogenum Wisconsin 54-1255] gi|211588725|emb|CAP86845.1| Pc20g15160 [Penicillium chrysogenum Wisconsin 54-1255]
  misc_feature (9)..(147): NCBI GI: 256731989 Blast Desc: NECHADRAFT_93947 [Nectria haematococca mpVI 77-13-4]
  misc_feature (26)..(149): NCBI GI: 154323071 Blast Desc: BC1G_00878 [Botryotinia fuckeliana B05.10] gi|150848212|gb|EDN23405.1| BC1G_00878 [Botryotinia fuckeliana B05.10]
  misc_feature (20)..(149): NCBI GI: 119483210 Blast Desc: orf near mel [Neosartorya fischeri NRRL 181] gi|119409788|gb|EAW19736.1| orf near mel [Neosartorya fischeri NRRL 181]
MTNRHYVTYVSATEATPGSAYLIYRAYNMAFTHGILPDEASADRRYASVNTLGGSIVGIPSPPRIDPKVAVSRSRPFESLRFTAKDIIDLRGVKAPNVNKAWFELYDAQHALAPAIQLMIDEEAVISSNTKTAKSANANRPASDWLDYQYEASHIAL

SEQ ID NO: 21994 - DNA, 2406 bp, Muscodor strobelii
  misc_feature: SGI cDNA ID NO. 567458
  misc_feature: Encodes the peptide sequence at SEQ ID NO 21995
atgttatcctatacgatactcttccttgcaataggcaccagcgctcttgacattgtccgttatggcgcattcacgcaaactgcgacatactccatagcaaatcagctcgggttcttcgaggcctatgaactaaatgtcacttatgaacaagttcctaactcaacgtttgcttattcgacacttctcaacgggggttacgacatcttgacgggcacaattgacaatgctgtgaatttgcggttcaactccaatcaaagctttacggtactaggccagctagacatgggtcctgacattgttcttgcttcgattcctagtattacaaatgttgagcaattaaggggcaagcctctcattgttgactcgcctataagtggctatgcatatctacttcgggagatactcagtgcatttgatcttgtactggaaaatggagactacagttttactactgtgggcagcaccaatgtccgttacgccgacctcgtatccggagcccttccagacgggaccccggtctatgccaccatcctcacatacccgtttacatctgaacgcgtcgatctcccaacggcacaacaacctaatattctcgcacgactatcggactacgtgaatccgatatcatcctccgcatttacgactcgcgaggccgcactacaaaacgaaacgcaagttcgtctccttacgagattcatcagcgccatggcggcagcaaacatgttattgggagattcctcaattcaatcaaaagatgactcgatcaaagcaatccgtgcgcaactcgatgtctccgcagacatagcagcgctggagtatgctgctgcgacagctgccggaaccggagaagtgagccctggggagatattcgcggtcagccaggaggggcttcaaaatatcatttcggttcggaaagagttcagagggttcagtggtgtaacagctgacttcaatttttccgctgctactgttcctggcgttggaaaacttatcgattactcgattcgagatgctgctgcaatgttgctggacaaatttgttgatgtagtaatgacgggcgatgaagctctcactgatagcgaggtctcttgttgcctgaattcaactttgattgacatgtcggcggatgctgaacagtcaccaacccaagtgcctggcgacagtcgggtgatgggtcaagctcaagcctcatctcctgtcgttgagaatgaagacgcaaaagcctggcttcaagtccttggtggctttcttgtcttcttcaatatatggggcctaccaaactcattcggcgccttccaatcgttttattccctcgagtatcttccccaatactcttcgtcggccatttcatggataggcacgttacaaggcgctctattagtcttgcttggcttgatctcaggtcctctcaccgatctcggctactatcgcgtcctgctgtacatgggtagtctcctgacggttcttggattgatgacgctgagcttatccaccgaatactatcaagtttttctttcccagggtgtctgtatcggcatcggatgcggtttactctacatcccaacgctgtcgttactaggcgatgcaatcaaggcaaggcgcgcgacagctatgggaatagtcacatctgggattgctctcggtggcgttgtatacacgatcctcttcctccaacttattcccaagctcggcttcccttggaccgtccgtgtcattggattcgtttgtttattcgcctcgatcttagcaatacccgcgctgtcggcgcgtcatgtgaggactcctgggaaggcccgaagcctttatgactcatctgtattcagagacgtgccatttctgtgcttcgcgctcgcccagtttttcatattcttgggctacctggtacccattttcttcattccgacatacgcggagatagtcttaaagagtagtaactcatccgctctttacctgctcgtcatatgccaatctgcttctttattcggacgactcactgcgtcaattcccgcgcagtatttcggcgtgatgccagtttggttgttctgttgcacaatatctagtgttctatgcttcacctggatagctagtgttagtctgcctgcattcatcgcattctgcgttttgtacggatacttcagcggtgccttgatagctcttccgcccaccatatttccagtcctctgccctgatccgactaccttggggacccgtatgggggtttcatgggcatcatccgcaatttcattcttggtaggctctcctattggaggcgctctcttagatctaagaaccgccgacttcgtcggtcttcagatttttagcggtgttgcactgtttatcggtgcaatgcttctagctgtattatggattatgctttcgcgcaagcaaagcaaggtctttgtttag

SEQ ID NO: 21995 - protein, 801 aa, Muscodor strobelii
  misc_feature: SGI Peptide ID NO. 567458
  misc_feature (411)..(749): Pfam Id: PF07690 Pfam Desc: Major Facilitator Superfamily
  misc_feature (353)..(798): NCBI GI: 255936081 Blast Desc: Pc13g06330 [Penicillium chrysogenum Wisconsin 54-1255] gi|211583687|emb|CAP91702.1| Pc13g06330 [Penicillium chrysogenum Wisconsin 54-1255]
  misc_feature (424)..(798): NCBI GI: 169596654 Blast Desc: SNOG_01094 [Phaeosphaeria nodorum SN15] gi|160701362|gb|EAT92589.2| SNOG_01094 [Phaeosphaeria nodorum SN15]
  misc_feature (387)..(747): NCBI GI: 115383794 Blast Desc: conserved [Aspergillus terreus NIH2624] gi|114196136|gb|EAU37836.1| conserved [Aspergillus terreus NIH2624]
  misc_feature (377)..(798): NCBI GI: 189202386 Blast Desc: conserved [Pyrenophora tritici-repentis Pt-1C-BFP] gi|187984628|gb|EDU50116.1| conserved [Pyrenophora tritici-repentis Pt-1C-BFP]
  misc_feature (370)..(789): NCBI GI: 67903226 Blast Desc: AN8600.2 [Aspergillus nidulans FGSC A4] gi|40741444|gb|EAA60634.1| AN8600.2 [Aspergillus nidulans FGSC A4]
  misc_feature (386)..(786): NCBI GI: 225685272 Blast Desc: conserved [Paracoccidioides brasiliensis Pb03]
  misc_feature (376)..(789): NCBI GI: 259483186 Blast Desc: TPA: MFS monocarboxylate transporter, (AFU_orthologue; AFUA_7G00780) [Aspergillus nidulans FGSC A4]
  misc_feature (373)..(795): NCBI GI: 255952965 Blast Desc: Pc21g01690 [Penicillium chrysogenum Wisconsin 54-1255] gi|211588946|emb|CAP95066.1| Pc21g01690 [Penicillium chrysogenum Wisconsin 54-1255]
  misc_feature (372)..(796): NCBI GI: 226279271 Blast Desc: conserved [Paracoccidioides brasiliensis Pb01]
  misc_feature (376)..(798): NCBI GI: 119488522 Blast Desc: MFS monocarboxylate transporter, [Neosartorya fischeri NRRL 181] gi|119410869|gb|EAW20814.1| MFS monocarboxylate transporter, [Neosartorya fischeri NRRL 181]
MLSYTILFLAIGTSALDIVRYGAFTQTATYSIANQLGFFEAYELNVTYEQVPNSTFAYSTLLNGGYDILTGTIDNAVNLRFNSNQSFTVLGQLDMGPDIVLASIPSITNVEQLRGKPLIVDSPISGYAYLLREILSAFDLVLENGDYSFTTVGSTNVRYADLVSGALPDGTPVYATILTYPFTSERVDLPTAQQPNILARLSDYVNPISSSAFTTREAALQNETQVRLLTRFISAMAAANMLLGDSSIQSKDDSIKAIRAQLDVSADIAALEYAAATAAGTGEVSPGEIFAVSQEGLQNIISVRKEFRGFSGVTADFNFSAATVPGVGKLIDYSIRDAAAMLLDKFVDVVMTGDEALTDSEVSCCLNSTLIDMSADAEQSPTQVPGDSRVMGQAQASSPVVENEDAKAWLQVLGGFLVFFNIWGLPNSFGAFQSFYSLEYLPQYSSSAISWIGTLQGALLVLLGLISGPLTDLGYYRVLLYMGSLLTVLGLMTLSLSTEYYQVFLSQGVCIGIGCGLLYIPTLSLLGDAIKARRATAMGIVTSGIALGGVVYTILFLQLIPKLGFPWTVRVIGFVCLFASILAIPALSARHVRTPGKARSLYDSSVFRDVPFLCFALAQFFIFLGYLVPIFFIPTYAEIVLKSSNSSALYLLVICQSASLFGRLTASIPAQYFGVMPVWLFCCTISSVLCFTWIASVSLPAFIAFCVLYGYFSGALIALPPTIFPVLCPDPTTLGTRMGVSWASSAISFLVGSPIGGALLDLRTADFVGLQIFSGVALFIGAMLLAVLWIMLSRKQSKVFV

SEQ ID NO: 21996 - DNA, 880 bp, Muscodor strobelii
  misc_feature: SGI EST ID NO. CUFF.51687.0
  misc_feature: Variant of the nucleotide sequence at SEQ ID NO 21994
gcacgttacaaggcgctctattagtcttgcttggcttgatctcaggtcctctcaccgatctcggctactatcgcgtcctgctgtacatgggtagtctcctgacggttcttggattgatgacgctgagcttatccaccgaatactatcaagtttttctttcccagggtgtctgtatcggcatcggatgcggtttactctacatcccaacgctgtcgttactaggcgatgcaatcaaggcaaggcgcgcgacagctatgggaatagtcacatctgggattgctctcggtggcgttgtatacacgatcctcttcctccaacttattcccaagctcggcttcccttggaccgtccgtgtcattggattcgtttgtttattcgcctcgatcttagcaatacccgcgctgtcggcgcgtcatgtgaggactcctgggaaggcccgaagcctttatgactcatctgtattcagagacgtgccatttctgtgcttcgcgctcgcccagtttttcatattcttgggctacctggtacccattttcttcattccgacatacgcggagatagtcttaaagagtagtaactcatccgctctttacctgctcgtcatatgccaatctgcttctttattcggacgactcactgcgtcaattcccgcgcagtatttcggcgtgatgccagtttggttgttctgttgcacaatatctagtgttctatgcttcacctggatagctagtgttagtctgcctgcattcatcgcattctgcgttttgtacggatacttcagcggtgccttgatagctcttccgcccaccatatttccagtcctctgccctgatccgactaccttggggacccgtatgggggtttcatgggcatcatccgc

SEQ ID NO: 21997 - DNA, 792 bp, Muscodor strobelii
  misc_feature: SGI cDNA ID NO. 567459
  misc_feature: Encodes the peptide sequence at SEQ ID NO 21998
atggtggctactgctgtgcgcgatgaccggcatgcgaattatctgagcatcccgccagacccgcccgcgagcctcgaagcagagtgtcgcgatgtcttcatcgcacatcgcgttatgcgcggcgatggtcccgtagagcaattcacagatatagagcaaggcatcgaaaagctcttcgacgtgtaccgccgggaagtgcctcatccgttgcaccactggggtgttgctgtggggggcatcatccaccatctgcaatcagatgcctttttcgacaccccgaattattacgagaacaagaagctgcccgaagacgaggaatacatcttatatccagttggaacgacgacctttaatgacttggcaatccaggattcgggtattgcaaccatctacgcaatgccaccaacatatgaccctgtcagcaataactgtcagcactttacgaagcaactcatcggcctgattgttcgttctggacgtatcgaagttcgcacactagaagacgttggaaatgacctggacgcgttcattcctggctctgttcaatatttgaagagtctttccagagagcagaagcttccagaacctatcatggcggctgtggtgcaggatccggacgcccaacaacaattgcttgatcgcgtcgaaaccttaatgattgaaaacacgccaattgtcactcctgacaatattgtgtcggagctgaagaatgtggagatagagaagcccgaaaatgtcgtggagataccaggaacgaagatcgtggaggtcaaagcagagactgatgtctag

SEQ ID NO: 21998 - protein, 263 aa, Muscodor strobelii
  misc_feature: SGI Peptide ID NO. 567459
  misc_feature (30)..(235): NCBI GI: 85093626 Blast Desc: NCU05755 [Neurospora crassa OR74A] gi|28921181|gb|EAA30494.1| [Neurospora crassa OR74A]
  misc_feature (52)..(155): NCBI GI: 46118876 Blast Desc: FG04737.1 [Gibberella zeae PH-1]
  misc_feature (54)..(152): NCBI GI: 169606136 Blast Desc: SNOG_06102 [Phaeosphaeria nodorum SN15] gi|111064813|gb|EAT85933.1| SNOG_06102 [Phaeosphaeria nodorum SN15]
  misc_feature (54)..(236): NCBI GI: 256722620 Blast Desc: NECHADRAFT_72124 [Nectria haematococca mpVI 77-13-4]
  misc_feature (67)..(148): NCBI GI: 116204971 Blast Desc: CHGG_10369 [Chaetomium globosum CBS 148.51] gi|88176497|gb|EAQ83965.1| CHGG_10369 [Chaetomium globosum CBS 148.51]
  misc_feature (66)..(165): NCBI GI: 169869506 Blast Desc: [Coprinopsis cinerea okayama7#130] gi|116497594|gb|EAU80489.1| [Coprinopsis cinerea okayama7#130]
MVATAVRDDRHANYLSIPPDPPASLEAECRDVFIAHRVMRGDGPVEQFTDIEQGIEKLFDVYRREVPHPLHHWGVAVGGIIHHLQSDAFFDTPNYYENKKLPEDEEYILYPVGTTTFNDLAIQDSGIATIYAMPPTYDPVSNNCQHFTKQLIGLIVRSGRIEVRTLEDVGNDLDAFIPGSVQYLKSLSREQKLPEPIMAAVVQDPDAQQQLLDRVETLMIENTPIVTPDNIVSELKNVEIEKPENVVEIPGTKIVEVKAETDV

SEQ ID NO: 21999 - DNA, 277 bp, Muscodor strobelii
  misc_feature: SGI EST ID NO. CUFF.51693.0
  misc_feature: Variant of the nucleotide sequence at SEQ ID NO 21997
ccgggaagtgcctcatccgttgcaccactggggtgttgctgtggggggcatcatccaccatctgcaatcagatgcctttttcgacaccccgaattattacgagaacaagaagctgcccgaagacgaggaatacatcttatatccagttggaacgacgacctttaatgacttggcaatccaggattcgggtattgcaaccatctacgcaatgccaccaacatatgaccctgtcagcaataactgtcagcactttacgaagcaactcatcggcctgatt

SEQ ID NO: 22000 - DNA, 1296 bp, Muscodor strobelii
  misc_feature: SGI cDNA ID NO. 567460
  misc_feature: Encodes the peptide sequence at SEQ ID NO 22001
atgcaccttcaactcagaaattttggcttattgggcctctttgctggcgctgaagccggctcggaagcagcatccagaaccatcaaatctgatgctagcaaagttatcctacgtggtccggccattccgacaagtacacttatctctgatttcaaaaagaataatgtctcagcaacctgggctccgggccatcccaaagtctggggatccgaaaaggtcctgtacaaagggatatccgtcgttgatgtgagcgacgatcagaagttcctggctctactgcagggtacgaacgtgactcttcgagacataaacacgcaagagtacgtgtccagcttcaacatcgattatcaaggatctcctcgatcagtcaccatcctcccagccttggaaggaggatataatgtgtttgtatacatgaataattatacaacggaagatgctgtcacacaactcgctgtctctgccgagggagcctttgctgataagcagacggtttaccacggccgcttatcaagttttgacggcaacaagggtccattcagcgctgatcggcaacatctagctgtctatatatcaccaaacaacggcctcatttacaacgagggtcttgtctataatgttaaccagccaaactccaccatcaatctgaccagccacacggactcgatcatgagctcatcatttagtcccgatggcacgctaatctctaccgcagcgtgggatggcttcggcaaagtttggaatgcatcgacgggagaattactacatagcttcggtccgagtggtgggcaaaactggctcaccaacttctcgccggatgggaaatacgtgactgtagccaacgcgggcaagactccggccctcagtatttacctcgtggcaaatatgtcagctgatcccatagctattctcggctggaagaactgggtccgttatgcctcgtggtcatccgacagcaagcttctcgcaataggcagttacgggatcatccaagtctacgatatagcgcagcaaaagcttgtgcagaagtgggagatggaagatcagtcagattacgagtcgtacgaccttacctggattgaagccgactctggcctgaagctggcgtatcgcacgacagctggtttggaggtatatgactttgagtcaaatctgaagtatcgctggggtcctgatgacttcgcgcaatacgataatgggggatctggcgaaggagcttttgtgattaagagtaagggattgattggtggtgcagaccctgattcgtctgtgagattttacgagtttcctgtctag

SEQ ID NO: 22001 - protein, 431 aa, Muscodor strobelii
  misc_feature: SGI Peptide ID NO. 567460
  misc_feature (210)..(248): Pfam Id: PF00400 Pfam Desc: WD domain, G-beta repeat
  misc_feature (58)..(429): NCBI GI: 238508267 Blast Desc: F-box and wd40 domain protein, [Aspergillus flavus NRRL3357] gi|220688850|gb|EED45202.1| F-box and wd40 domain protein, [Aspergillus flavus NRRL3357]
  misc_feature (58)..(429): NCBI GI: 169784564 Blast Desc: [Aspergillus oryzae RIB40] gi|83775490|dbj|BAE65610.1| protein product [Aspergillus oryzae]
  misc_feature (44)..(344): NCBI GI: 115492261 Blast Desc: [Aspergillus terreus NIH2624] gi|114197618|gb|EAU39318.1| [Aspergillus terreus NIH2624]
  misc_feature (167)..(386): NCBI GI: 145239917 Blast Desc: An08g04870 [Aspergillus niger] gi|134077119|emb|CAK45460.1| protein product [Aspergillus niger]
  misc_feature (204)..(428): NCBI GI: 238505894 Blast Desc: WD-repeat protein, [Aspergillus flavus NRRL3357] gi|220690263|gb|EED46613.1| WD-repeat protein, [Aspergillus flavus NRRL3357]
  misc_feature (204)..(431): NCBI GI: 46115428 Blast Desc: FG03556.1 [Gibberella zeae PH-1]
  misc_feature (145)..(327): NCBI GI: 162452828 Blast Desc: protein kinase [Sorangium cellulosum 'So ce 56'] gi|161163410|emb|CAN94715.1| Protein kinase [Sorangium cellulosum 'So ce 56']
  misc_feature (146)..(326): NCBI GI: 171058490 Blast Desc: WD-40 repeat-containing protein [Leptothrix cholodnii SP-6] gi|170775935|gb|ACB34074.1| WD-40 repeat protein [Leptothrix cholodnii SP-6]
  misc_feature (204)..(340): NCBI GI: 17230283 Blast Desc: WD repeat-containing protein [Nostoc sp. PCC 7120] gi|17131884|dbj|BAB74490.1| WD-repeat protein [Nostoc sp. PCC 7120]
  misc_feature (188)..(383): NCBI GI: 59802598 Blast Desc: WD-repeat protein [Gemmata sp. Wa1-1]
MHLQLRNFGLLGLFAGAEAGSEAASRTIKSDASKVILRGPAIPTSTLISDFKKNNVSATWAPGHPKVWGSEKVLYKGISVVDVSDDQKFLALLQGTNVTLRDINTQEYVSSFNIDYQGSPRSVTILPALEGGYNVFVYMNNYTTEDAVTQLAVSAEGAFADKQTVYHGRLSSFDGNKGPFSADRQHLAVYISPNNGLIYNEGLVYNVNQPNSTINLTSHTDSIMSSSFSPDGTLISTAAWDGFGKVWNASTGELLHSFGPSGGQNWLTNFSPDGKYVTVANAGKTPALSIYLVANMSADPIAILGWKNWVRYASWSSDSKLLAIGSYGIIQVYDIAQQKLVQKWEMEDQSDYESYDLTWIEADSGLKLAYRTTAGLEVYDFESNLKYRWGPDDFAQYDNGGSGEGAFVIKSKGLIGGADPDSSVRFYEFPV

SEQ ID NO: 22002 - DNA, 789 bp, Muscodor strobelii
  misc_feature: SGI cDNA ID NO. 567461
  misc_feature: Encodes the peptide sequence at SEQ ID NO 22003
atgcccactttctcccgtttctcctctcaggcagtcctactttcgggaattttcctcgcaagtgtaccgcctgccactggtcactatggatttcccgtcgttctaatcaacgggatcgtgtccgaatggtgggagttcattcgcccgacaacactgaacgaagctggttaccaatggtttccagactacagctgggactcagagccgatggtctgcggatggggtgctacgaagactggctcccagaccggcgttgccaaaatcgaagccggcggcactattggctttcgtgcttttgctgcaaactacaaacaagggtttgtacctacgcgtgacttcgatgccggcatggatggtataggacaccttgggcccgggcaggcgtacatgtcgcttgccccaggcacggttgaggaatatgaaggtgatggcgattggttcaagatcggaaccagcggtgcgagcgatggacagcactgggactcggaccgcgcccccgaattgaatttcaccatccccaaagccactccacctggaaaatacctcgtgagagtcgagcacttcaacatctcgccgaatttcaatatgacacaaatgtttgtcaactgcgctcaagttgaagtcacgggctcaggcacgggcactcccggaccaactgtcaagttgccgggctatgatcccaaagacccaggcatctggcttcctcgcgcattgtacaacccatacaaaccatccgatcttctcaaggcgtacaaagggccaggacccgtgatctggactggagaatag

SEQ ID NO: 22003 - protein, 262 aa, Muscodor strobelii
  misc_feature: SGI Peptide ID NO. 567461
  misc_feature (15)..(260): NCBI GI: 115397335 Blast Desc: conserved [Aspergillus terreus NIH2624] gi|114192450|gb|EAU34150.1| conserved [Aspergillus terreus NIH2624]
  misc_feature (19)..(261): NCBI GI: 70991989 Blast Desc: endoglucanase [Aspergillus fumigatus Af293] gi|66848476|gb|EAL88805.1| endoglucanase, [Aspergillus fumigatus Af293] gi|159124411|gb|EDP49529.1| endoglucanase, [Aspergillus
  misc_feature (11)..(260): NCBI GI: 39944092 Blast Desc: MGG_04057 [Magnaporthe grisea 70-15] gi|145014783|gb|EDJ99351.1| MGG_04057 [Magnaporthe grisea 70-15]
  misc_feature (9)..(261): NCBI GI: 116194372 Blast Desc: CHGG_03784 [Chaetomium globosum CBS 148.51] gi|88179697|gb|EAQ87165.1| CHGG_03784 [Chaetomium globosum CBS 148.51]
  misc_feature (33)..(261): NCBI GI: 116179190 Blast Desc: CHGG_00223 [Chaetomium globosum CBS 148.51] gi|88184520|gb|EAQ91988.1| CHGG_00223 [Chaetomium globosum CBS 148.51]
  misc_feature (13)..(261): NCBI GI: 119470730 Blast Desc: fungal cellulose binding domain protein [Neosartorya fischeri NRRL 181] gi|119406222|gb|EAW16173.1| fungal cellulose binding domain protein [Neosartorya fischeri NRRL 181]
  misc_feature (28)..(262): NCBI GI: 171683706 Blast Desc: protein product [Podospora anserina] gi|170941813|emb|CAP67466.1| protein product [Podospora anserina]
  misc_feature (33)..(261): NCBI GI: 116196738 Blast Desc: CHGG_04967 [Chaetomium globosum CBS 148.51] gi|88180880|gb|EAQ88348.1| CHGG_04967 [Chaetomium globosum CBS 148.51]
  misc_feature (28)..(224): NCBI GI: 115385899 Blast Desc: conserved [Aspergillus terreus NIH2624] gi|114187943|gb|EAU29643.1| conserved [Aspergillus terreus NIH2624]
  misc_feature (25)..(261): NCBI GI: 67540516 Blast Desc: AN6428.2 [Aspergillus nidulans FGSC A4] gi|40739260|gb|EAA58450.1| AN6428.2 [Aspergillus nidulans FGSC A4] gi|259479347|tpe|CBF69492.1| TPA: conserved [Aspergillus FGSC
MPTFSRFSSQAVLLSGIFLASVPPATGHYGFPVVLINGIVSEWWEFIRPTTLNEAGYQWFPDYSWDSEPMVCGWGATKTGSQTGVAKIEAGGTIGFRAFAANYKQGFVPTRDFDAGMDGIGHLGPGQAYMSLAPGTVEEYEGDGDWFKIGTSGASDGQHWDSDRAPELNFTIPKATPPGKYLVRVEHFNISPNFNMTQMFVNCAQVEVTGSGTGTPGPTVKLPGYDPKDPGIWLPRALYNPYKPSDLLKAYKGPGPVIWTGE

SEQ ID NO: 22004 - DNA, 205 bp, Muscodor strobelii
  misc_feature: SGI EST ID NO. CUFF.51708.0
  misc_feature: Variant of the nucleotide sequence at SEQ ID NO 22002
gggcactcccggaccaactgtcaagttgccgggctatgatcccaaagacccaggcatctggcttcctcgcgcattgtacaacccatacaaaccatccgatcttctcaaggcgtacaaagggccaggacccgtgatctggactggagaataggaggggtctcccaaacagtaccgttatcgagatcaagtacagcacacgtgcttc

SEQ ID NO: 22005 - DNA, 996 bp, Muscodor strobelii
  misc_feature: SGI cDNA ID NO. 567462
  misc_feature: Encodes the peptide sequence at SEQ ID NO 22006
atggcgtcattcaccatgaccgagcggccatgctcggatgcattggaaccgattgcaataattggaatgggatgccgctggcccggcgattcagagaccccttccgagctgtgggactaccttgaagcccaaagaaactcatacagcaagtttcctaaagatagaatcaatggtgatgcattctatcaccccgacgggaatcggccgggctcatttaggactgagggcggctgttttatcaagtccgatgttcgaaagtttgactcaaccttctttggcattcatcctaaggaagtgttaacattagatcccgcccaaagaaaatttctagaagtcgtctacgaagcatttgagtctgccggtgtgcctttacaccagctgtctggttccaaaacaggaacatttgtcggaaacttcaactatgaccatcagcttatgcactaccgagatccggaatatgcgcttccatattcagtcactgggagtggaatcaccataataagtaatcgaattaattatgtatttaatctcaaggggccgtcgatgacgctggacacggcctgctctagctctttatacgcacttcatttggcttgctcggcgatacaaactggagattgcgatgcagcgatcgttggcggcaccaaccttattttgactccagaatgtcagattttctcgtcagtcttgggggcagtatctcctacatcagtctgccacacattcgattcgcgtgccgatggatacgcacgcgcagatggcattggcgtactttttgtcaagaggttatcccaagctgttgcagatggcgaccctatcagagctgtgattcgagggacggcatttaacgcgaatggacgtacagggggcatcacgcatcctagctcggaaggccaggaggcctgcatccgccgtgcatacgagcgtgctgggggcctggacatgtcgttgacggggtacttcgaatgccacgggaccggtacccctgtagggtga

SEQ ID NO: 22006 - protein, 331 aa, Muscodor strobelii
  misc_feature: SGI Peptide ID NO. 567462
  misc_feature (16)..(266): Pfam Id: PF00109 Pfam Desc: Beta-ketoacyl synthase, N-terminal domain
  misc_feature (274)..(331): Pfam Id: PF02801 Pfam Desc: Beta-ketoacyl synthase, C-terminal domain
  misc_feature (180)..(215): Pfam Id: PF00108 Pfam Desc: Thiolase, N-terminal domain
  misc_feature (3)..(331): NCBI GI: 242812082 Blast Desc: polyketide synthase, [Talaromyces stipitatus ATCC 10500] gi|218714224|gb|EED13647.1| polyketide synthase, [Talaromyces stipitatus ATCC 10500]
  misc_feature (16)..(331): NCBI GI: 145602522 Blast Desc: MGG_10912 [Magnaporthe grisea 70-15] gi|145010936|gb|EDJ95592.1| MGG_10912 [Magnaporthe grisea 70-15]
  misc_feature (13)..(331): NCBI GI: 85119238 Blast Desc: NCU02918 [Neurospora crassa OR74A] gi|28927411|gb|EAA36364.1| conserved [Neurospora crassa OR74A]
  misc_feature (16)..(331): NCBI GI: 40806925 Blast Desc: polyketide synthase [Gibberella moniliformis]
  misc_feature (8)..(331): NCBI GI: 242823008 Blast Desc: polyketide synthase, [Talaromyces stipitatus ATCC 10500] gi|218712925|gb|EED12350.1| polyketide synthase, [Talaromyces stipitatus ATCC 10500]
  misc_feature (8)..(331): NCBI GI: 240110610 Blast Desc: polyketide synthase, [Coccidioides posadasii C735 delta SOWgp]
  misc_feature (16)..(331): NCBI GI: 154290021 Blast Desc: BC1G_15839 [Botryotinia fuckeliana B05.10] gi|150848488|gb|EDN23681.1| BC1G_15839 [Botryotinia fuckeliana B05.10]
  misc_feature (7)..(331): NCBI GI: 242793230 Blast Desc: polyketide synthase, [Talaromyces stipitatus ATCC 10500] gi|218718708|gb|EED18128.1| polyketide synthase, [Talaromyces stipitatus ATCC 10500]
  misc_feature (13)..(331): NCBI GI: 85089914 Blast Desc: NCU09638 [Neurospora crassa OR74A] gi|28919501|gb|EAA28933.1| conserved [Neurospora crassa OR74A]
  misc_feature (1)..(331): NCBI GI: 171681658 Blast Desc: protein product [Podospora anserina] gi|170940788|emb|CAP66437.1| protein product [Podospora anserina]
  misc_feature (16)..(331): SWISSPROT Homolog: EC 2.3.1.161 Lovastatin nonaketide synthase
  misc_feature: Useful for fungicidal and/or biocontrol applications
MASFTMTERPCSDALEPIAIIGMGCRWPGDSETPSELWDYLEAQRNSYSKFPKDRINGDAFYHPDGNRPGSFRTEGGCFIKSDVRKFDSTFFGIHPKEVLTLDPAQRKFLEVVYEAFESAGVPLHQLSGSKTGTFVGNFNYDHQLMHYRDPEYALPYSVTGSGITIISNRINYVFNLKGPSMTLDTACSSSLYALHLACSAIQTGDCDAAIVGGTNLILTPECQIFSSVLGAVSPTSVCHTFDSRADGYARADGIGVLFVKRLSQAVADGDPIRAVIRGTAFNANGRTGGITHPSSEGQEACIRRAYERAGGLDMSLTGYFECHGTGTPVG

SEQ ID NO: 22007 - DNA, 872 bp, Muscodor strobelii
  misc_feature: SGI EST ID NO. CUFF.51723.0
  misc_feature: Variant of the nucleotide sequence at SEQ ID NO 22005
ttgcaataattggaatgggatgccgctggcccggcgattcagagaccccttccgagctgtgggactaccttgaagcccaaagaaactcatacagcaagtttcctaaagatagaatcaatggtgatgcattctatcaccccgacgggaatcggccgggctcatttaggactgagggcggctgttttatcaagtccgatgttcgaaagtttgactcaaccttctttggcattcatcctaaggaagtgttaacattagatcccgcccaaagaaaatttctagaagtcgtctacgaagcatttgagtctgccggtgtgcctttacaccagctgtctggttccaaaacaggaacatttgtcggaaacttcaactatgaccatcagcttatgcactaccgagatccggaatatgcgcttccatattcagtcactgggagtggaatcaccataataagtaatcgaattaattatgtatttaatctcaaggggccgtcgatgacgctggacacggcctgctctagctctttatacgcacttcatttggcttgctcggcgatacaaactggagattgcgatgcagcgatcgttggcggcaccaaccttattttgactccagaatgtcagattttctcgtcagtcttgggggcagtatctcctacatcagtctgccacacattcgattcgcgtgccgatggatacgcacgcgcagatggcattggcgtactttttgtcaagaggttatcccaagctgttgcagatggcgaccctatcagagctgtgattcgagggacggcatttaacgcgaatggacgtacagggggcatcacgcatcctagctcggaaggccaggaggcctgcatccgccgtgcatacgag

SEQ ID NO: 22008 - DNA, 7044 bp, Muscodor strobelii
  misc_feature: SGI cDNA ID NO. 567463
  misc_feature: Encodes the peptide sequence at SEQ ID NO 22009
atgcttagtgatccaatcgaagtttcggccattggcagagtattcgccgataagaaatccgggtcgaatcccctactaataggatccatcaaaagtaacatgggtcatagcgaacccgccagtggtattgccggcgtcatgaaggccgtgttggctattgagcgtggcattataccgcctactgtagggatagaaacgctaaatccaaacgtgaatcttcaggatggccgactcaagattgttactgagtctatcccctggccagatcttcctatcagacgcgcgagtatcaattcattcgggtatgtattccgcacttggaccctttcaccgcaacttatgcagcttgtcgcattctacggcggatcaaatgcgcatgtatgtatcgtacgagtcctcgaaaccttgttgcccggatacagatctcgttaccagtctagcattcaatcttccaacttggagaaatttgcgatatgcaatggccttcaacgaggttcttctcagcgtagcttatcttcccagtcacctgtgaacgggaatggaagcatcaagtcagtgggaaatggtgtatcaaatggatatataaatggaaacggacatgccaatggtcacaagcacaccaacggtcatggtaatactaatggtagtaacggacatactaatggcaatggccacactaacggtcatgctcgcctcaacggcgatggccacctccggggaaatggggcagcacaccattcgagaaatgggagcctgactagtttgaagaagaagcaatacctactcccgttctcagctcatgacgaaagaacattgaaggctaactatgacaagctagccatatgctgtaacaagtggcccttgactgatctcgcatacacgctaagcgcgagacggagtctgttccagcagcgcagtttcgtcgtctctacagacaatgagagtttggcattgccaaaagagatgccgaaggctgtcaaagcccccgctgctgccgtcacaaacattggctttgttttcacaggccaaggtgctcaatgggcaaagatgggagccaacttgatggaagagtatcctagttgcctcgcaactatccgacgtctcgatcgatatcttgatctcttagacgaacattacgatcgctcatggagcatcgaagatagcttgaaggaggatgcattacacagccaagttcatcaagctgaactttctcagccactggtcaccgccctgcagatcatgatcgtaaatctgttgtcagaatggggcattgagccactggctgtaattggacattcttctggcgagatagccgccggttactccgctgggatgctcactgagcaagaagctattattgtcgcttatctccgagggaaagctgtcgcgttgaataggtatgaaggtctcatgatggccgtgggcggtacgctttcacaaattcagcccctggtcgatttgcatgacgatgcgatcaaggttgcctgccacaactctccggagagctacacgctgagtggtgacgccgatgcgatcaatgcgctaaaggcagtgctagacgagaagaagatattctgccgcgtcctacaaactaataacaacgcttaccactccgaccacatgaagcctcttggggcagcctacgagcatgaccttaacgccttcatacccaagaagtcagcagcgacagtcatgaaaggagccagacgcagtgagcctcccaaggcagtcttcttctcatccgtctacgggcatgcagcaccgtggtcaatactaagttcaaagtactggcgtcaaaatctcgagtcgcccgtactctttcatcaaggtgttgaagagctggtctctcagacgccaattgacgttctcgtcgaaattggtccgcactctgcacttcaagggcccctgcgacagttttcaaatgcaatgggcgctgactttcagtttcctacttatctttctgcaatgaagagagggagtgataatgttaatgatattctcacacttgctggcacactcttcactaagggctaccacgtcaacttggcaagagtaaatgcgatggagggtcgtggtgggaacgagctccaatatggcaagaccatcacagacctgcccagatatcagtggcaatacaacgacgatgtcttgctattcgagaaccgatatacccgcgagtggcgcttacgcatgcacccgcgacatgatatcttgggcagtagaatcccgggtaccaaccatgctgagcccttatggaggaacaagctaatagtgaaaaacgtcccctggctatcggatcatcgacttggcaatgatgttgtgtttccctcgacaggctacttgagcatggtgattgaagcggcgactcaagtggtggaaaccgaaggcttcgaagcttcagctatcgaatattttgacatacacaaagtcagtctcgccaaagctctcatcattccagaggacgacttcggatctgagactctcttcacgttgcgaccagcttctctcaattctgtcgcacgtcacaggtggctttttgacttcgtattgacttctgtatcaaacgacaacgggaaggatgtgttcacggagcactgtcggggacaagtcgaagtcggattcgaacaaatgatagtctccgaaagctcaattgtgaaggacatacagtcgtcgacaacgaagaaatctatcaacgctgcagaatggtacgagagcttcgcgagagcaggattgtgttatggcccgatgtttcagggcctgtccaacatattcgcaattgggagagcggctagaactcaggcaagagtcaatttaaacccaactgcgaaaacaatgaaggcggagtcaaggtatatcattcatcctgcaacactggatgccagcttgcagctctcgattctcgccgcgcacaagaacgctgcaactaaattcaagcgggctttcatgcccacgtctttcgaaagcgtcaaagcgtggccgaagattgcagcacacagtcagaagttcgttgatacctacgccagtgccacactgaagggactacggggcttgtcggcagaaatcgttcttcgtggatatggcgacgaaattctgcttgaagcgaagaatgtcttcctcactgcgtcagatcaatctgcgcccaagcagatcgagcaatccagcccgtacacacgtattgtttggaagccggacatcggctcattgacctcggccactgtcgcccaactttatccgccggttgttctagatgacgatgcagtcatcccatcactcaatcagctcgccatgcatcagttgattcacttcaaagaaacgcacgtggacgtctttgagaggggctctaaggaacctcatcttcaaagattactagattggacgactgaaaagcttgcggtcgctagcgcagacccaacgtcacccgcttcatctatcattgcgtacgaaaataagtttcgcgctcaagagatagagcggctttcgaacatattgcttccacgatcatccgaggctcgccttatgtgccatctttacaacaatctccctgacatctatagcggaaacaagaccggtattcaagtagcgctacagaacaatttgctgctcgacaactacgagactggccaagtataccgggaagggaatcgtcggctagcttcagtagtggcgatgtacgcgcatcaaaacccaggcttaagaattcttgaagtcggtgcaggcacaggaagtgctaccaatgaagtccttcccgcgctcaaaggtgctagtatctggcgtcaatacgcagagtaccgtttcacggacacaacaccgtcattcttagcaaacggagaggagcgtttctcgcgattcggaaggatgacgtttgggacattcgatatggagagaagtggcgagtctcaaggctaccaacaagactgggatcttgtcatcgcttcaaatgtcatacatgctacgtcggacatcctcgctacgctcaagaatgtccgagacttgctcaagcctggaggcaagatgatactgttggagttgacacaagcccagctgagtgccggtctcgtgctcgggaccttcagtgatttttggaaagcggatcacgatccttgctatcctagacacgatggcccatttctgagtaaatcactgtggcaagaggttcttcccgttgcgggcttttcgggcctcgatttctatgttgacgattatgcagacgccaatgtttctgcgaccgtcatatgtgccacggccagggacacttcgctcgtgctaccgccgaagctcgccgaccccgtttatgagggcatcactgtggtttacaggtcgcaaccaccttcgtttctccaatccatgaccgagtatatgtcaaggataagcaccatgcctattgatgctattcgactcacagatgtgaaaacagcccgcttccaaaggttcatcttcgtcgtagaagttggcgaaccattcttcctcgatgtatcagagcaagaatggcaagcgcttcagtttgctatccaggatgctaaatcatcactttgggtgacaagtggcaatctcttagatggagaatggccgctacatggcatgatttccggtctggtcaggggcatcagagcagaaaacagctcgatccgcttcagcacgttggaccttgaccatgttcccgatgcatctgaagagaacatctttgacgtgatcatgcaacttggaaccagagtctcagacatgaccaagatgaatgacgactccgagttccgctacaaggcaggagtgctctatacgagtcgacttgtcgccgatgaacggctttgtgaagaatcaaagagtatagcggatcctgcacacgcattcaagaagatacccttgaaagagctcaaggagacgcctttgaaactcgcgattgagaagcccggcgtactgagtacgatctacttcacgaacgactcagacttctccaaaccactgcctccggatcaagtagagatcgaagttaaatacgcgggtgtgaacgctaaagacctggcggtcttgactgggcgacatcattcagacagtttcagcgatgagtgttccggtatcatcacccgcgtcggcgatgaggtgacggatctggtagttggtgacctggtgtactgtcagtctttcgccaaattcggcaacttcgtcagggagaaagcagcattttgccagaaactcgacagtagcgacaccctcgaagaggctgccacgctgcctattgctttctgcactgcgatctacggcctcttagagctcgcacgattggacaaaggcgatacagtgctgatccagtccgcgacaggcggcgtcggcatagcagcgtgccaaattgctcggatggtcggtgctgagatctacgccactgtaggcaccgagagcaagaagagagagctattagatatgggcttcgggatcaaagacgatcatatcttttactctcgtgagaaattcgctgctaagaagatccttgattacacgggcggaaagggaatcgacgtcatcttaagcaacgcccgtggggagctgatgcacgagtacaccaagatcatagcaagcggcgggaccttcgtcgagattggaagaactgaagtactggacaatgggagtctcggtctcgacttcttcaagcggaatgctacttttacgtccttcgatctagaagtcatgagtcagactaagccgcatctcatcgcgaaactcatgagaaagattcatcaactcaaatcggagggtcacatcaccccactacccttgcggaagcatagtgtttccgaaatcgacaaagctttcctagccttctccaaaggcagccatatcggaaagctgatagttgaatatgacgaccaatccgaagacgggttgaccgtacaacgagattcattcacggccaaatttgacccgaacgctgcatatctgctcgtcggctgtctcggtggtctaggtcgtagcttcagcgaatgggccgtgtcgcgcggggctcgacatctcatctacttgtcgcgatcaggtgctgccagcgatgaagccaaggccttcctcaggaagctaaaggagaacggcgttgatgcgaccgtagtgataggcgacgtaacattgctagcagatgtacagtctgcagtcgactcggcgaattatcctatcaagggcgtcattcaaggcgctctcactttacacgatggtttatttgagtcgatgtcgctcgatcgcttcaaggctacagtccatcctcgtgtcattggtacaatgaacctgcacaaggccacactcaactgtccgcttgacttcttcgagctctggtcgtcatggacagtcatattcggtactgcgacacaaagcaactacctcgcgtcgaatgcattcctcgacgctttcacgcggtatcgccggtctcagggccttccgtgcaccagtctggcactcagccaggtgctgggcattggcatcgtatcttacatgccggagtaccagcaggcgatgatccgcaatggcttctatggcaatgatgaggacgagttcttgcgatattgcgaacaaggcatcctaccaaccccagctgcagataaggagacaagcagtgacccaactttcaagtacgacccacgaacagaaggacacttgctcgtcggcatcgagccagctggtctgaagaacgtggacgagaagtacccactgaaggacatgtcctggtaccgcgacccacgcttccagaatctcatccaagccacgacaaacatctcgtcaacgggcgaaactaagaaggacacttcaggagaaggaggcacagtgctcgagaggatcgtaggcaagatctcacgcctgctttacatacccgccgatgaggtagacacacagagtgcgatcagtcagtatggtattgacagcatggtcgcggccgagttacggaactggttcctcacggcgttcgggaaggagatcagcatgctcaagctgttgagtgctactatgacggtgaagaagctagcggaggaggcggaatctgggactggtaatttcttggatatgaaggtttga

SEQ ID NO: 22009 - protein, 2347 aa, Muscodor strobelii
  misc_feature: SGI Peptide ID NO. 567463
  misc_feature (337)..(680): Pfam Id: PF00698 Pfam Desc: Acyl transferase domain
  misc_feature (1655)..(1730): Pfam Id: PF08240 Pfam Desc: Alcohol dehydrogenase GroES-like domain
  misc_feature (1973)..(2137): Pfam Id: PF00106 Pfam Desc: short chain dehydrogenase
  misc_feature (1761)..(1910): Pfam Id: PF00107 Pfam Desc: Zinc-binding dehydrogenase
  misc_feature (1)..(65): Pfam Id: PF02801 Pfam Desc: Beta-ketoacyl synthase, C-terminal domain
  misc_feature (1973)..(2150): Pfam Id: PF08659 Pfam Desc: KR domain
  misc_feature (1234)..(1338): Pfam Id: PF08242 Pfam Desc: Methyltransferase domain
  misc_feature (338)..(680): Pfam Id: PF00698 Pfam Desc: Acyl transferase domain
  misc_feature (4)..(65): Pfam Id: PF02801 Pfam Desc: Beta-ketoacyl synthase, C-terminal domain
  misc_feature (2)..(2335): NCBI GI: 242812082 Blast Desc: polyketide synthase, [Talaromyces stipitatus ATCC 10500] gi|218714224|gb|EED13647.1| polyketide synthase, [Talaromyces stipitatus ATCC 10500]
  misc_feature (4)..(2333): NCBI GI: 171681658 Blast Desc: protein product [Podospora anserina] gi|170940788|emb|CAP66437.1| protein product [Podospora anserina]
  misc_feature (2)..(2332): NCBI GI: 85089914 Blast Desc: NCU09638 [Neurospora crassa OR74A] gi|28919501|gb|EAA28933.1| conserved [Neurospora crassa OR74A]
  misc_feature (2)..(2333): NCBI GI: 115399290 Blast Desc: ATEG_06056 [Aspergillus terreus NIH2624] gi|114192117|gb|EAU33817.1| ATEG_06056 [Aspergillus terreus NIH2624]
  misc_feature (2)..(2333): NCBI GI: 170940313 Blast Desc: protein product [Podospora anserina]
  misc_feature (4)..(2248): NCBI GI: 116205527 Blast Desc: CHGG_10647 [Chaetomium globosum CBS 148.51] gi|88176775|gb|EAQ84243.1| CHGG_10647 [Chaetomium globosum CBS 148.51]
  misc_feature (4)..(2321): NCBI GI: 29027893 Blast Desc: type I polyketide synthase [Phoma sp. C2932]
  misc_feature (252)..(2332): NCBI GI: 40806925 Blast Desc: polyketide synthase [Gibberella moniliformis]
  misc_feature (2)..(2346): NCBI GI: 40787384 Blast Desc: polyketide synthase [Cochliobolus heterostrophus]
  misc_feature (4)..(2324): NCBI GI: 145241724 Blast Desc: An09g01930 [Aspergillus niger] gi|134078048|emb|CAK40131.1| protein product [Aspergillus niger]
  misc_feature (338)..(2335): SWISSPROT Homolog: EC 2.3.1.74 Naringenin-chalcone synthase
  misc_feature: Useful for fungicidal and/or biocontrol applications
MLSDPIEVSAIGRVFADKKSGSNPLLIGSIKSNMGHSEPASGIAGVMKAVLAIERGIIPPTVGIETLNPNVNLQDGRLKIVTESIPWPDLPIRRASINSFGYVFRTWTLSPQLMQLVAFYGGSNAHVCIVRVLETLLPGYRSRYQSSIQSSNLEKFAICNGLQRGSSQRSLSSQSPVNGNGSIKSVGNGVSNGYINGNGHANGHKHTNGHGNTNGSNGHTNGNGHTNGHARLNGDGHLRGNGAAHHSRNGSLTSLKKKQYLLPFSAHDERTLKANYDKLAICCNKWPLTDLAYTLSARRSLFQQRSFVVSTDNESLALPKEMPKAVKAPAAAVTNIGFVFTGQGAQWAKMGANLMEEYPSCLATIRRLDRYLDLLDEHYDRSWSIEDSLKEDALHSQVHQAELSQPLVTALQIMIVNLLSEWGIEPLAVIGHSSGEIAAGYSAGMLTEQEAIIVAYLRGKAVALNRYEGLMMAVGGTLSQIQPLVDLHDDAIKVACHNSPESYTLSGDADAINALKAVLDEKKIFCRVLQTNNNAYHSDHMKPLGAAYEHDLNAFIPKKSAATVMKGARRSEPPKAVFFSSVYGHAAPWSILSSKYWRQNLESPVLFHQGVEELVSQTPIDVLVEIGPHSALQGPLRQFSNAMGADFQFPTYLSAMKRGSDNVNDILTLAGTLFTKGYHVNLARVNAMEGRGGNELQYGKTITDLPRYQWQYNDDVLLFENRYTREWRLRMHPRHDILGSRIPGTNHAEPLWRNKLIVKNVPWLSDHRLGNDVVFPSTGYLSMVIEAATQVVETEGFEASAIEYFDIHKVSLAKALIIPEDDFGSETLFTLRPASLNSVARHRWLFDFVLTSVSNDNGKDVFTEHCRGQVEVGFEQMIVSESSIVKDIQSSTTKKSINAAEWYESFARAGLCYGPMFQGLSNIFAIGRAARTQARVNLNPTAKTMKAESRYIIHPATLDASLQLSILAAHKNAATKFKRAFMPTSFESVKAWPKIAAHSQKFVDTYASATLKGLRGLSAEIVLRGYGDEILLEAKNVFLTASDQSAPKQIEQSSPYTRIVWKPDIGSLTSATVAQLYPPVVLDDDAVIPSLNQLAMHQLIHFKETHVDVFERGSKEPHLQRLLDWTTEKLAVASADPTSPASSIIAYENKFRAQEIERLSNILLPRSSEARLMCHLYNNLPDIYSGNKTGIQVALQNNLLLDNYETGQVYREGNRRLASVVAMYAHQNPGLRILEVGAGTGSATNEVLPALKGASIWRQYAEYRFTDTTPSFLANGEERFSRFGRMTFGTFDMERSGESQGYQQDWDLVIASNVIHATSDILATLKNVRDLLKPGGKMILLELTQAQLSAGLVLGTFSDFWKADHDPCYPRHDGPFLSKSLWQEVLPVAGFSGLDFYVDDYADANVSATVICATARDTSLVLPPKLADPVYEGITVVYRSQPPSFLQSMTEYMSRISTMPIDAIRLTDVKTARFQRFIFVVEVGEPFFLDVSEQEWQALQFAIQDAKSSLWVTSGNLLDGEWPLHGMISGLVRGIRAENSSIRFSTLDLDHVPDASEENIFDVIMQLGTRVSDMTKMNDDSEFRYKAGVLYTSRLVADERLCEESKSIADPAHAFKKIPLKELKETPLKLAIEKPGVLSTIYFTNDSDFSKPLPPDQVEIEVKYAGVNAKDLAVLTGRHHSDSFSDECSGIITRVGDEVTDLVVGDLVYCQSFAKFGNFVREKAAFCQKLDSSDTLEEAATLPIAFCTAIYGLLELARLDKGDTVLIQSATGGVGIAACQIARMVGAEIYATVGTESKKRELLDMGFGIKDDHIFYSREKFAAKKILDYTGGKGIDVILSNARGELMHEYTKIIASGGTFVEIGRTEVLDNGSLGLDFFKRNATFTSFDLEVMSQTKPHLIAKLMRKIHQLKSEGHITPLPLRKHSVSEIDKAFLAFSKGSHIGKLIVEYDDQSEDGLTVQRDSFTAKFDPNAAYLLVGCLGGLGRSFSEWAVSRGARHLIYLSRSGAASDEAKAFLRKLKENGVDATVVIGDVTLLADVQSAVDSANYPIKGVIQGALTLHDGLFESMSLDRFKATVHPRVIGTMNLHKATLNCPLDFFELWSSWTVIFGTATQSNYLASNAFLDAFTRYRRSQGLPCTSLALSQVLGIGIVSYMPEYQQAMIRNGFYGNDEDEFLRYCEQGILPTPAADKETSSDPTFKYDPRTEGHLLVGIEPAGLKNVDEKYPLKDMSWYRDPRFQNLIQATTNISSTGETKKDTSGEGGTVLERIVGKISRLLYIPADEVDTQSAISQYGIDSMVAAELRNWFLTAFGKEISMLKLLSATMTVKKLAEEAESGTGNFLDMKV

SEQ ID NO: 22010 - DNA, 2708 bp, Muscodor strobelii
  misc_feature: SGI EST ID NO. CUFF.51747.0
  misc_feature: Variant of the nucleotide sequence at SEQ ID NO 22008
gctatccaggatgctaaatcatcactttgggtgacaagtggcaatctcttagatggagaatggccgctacatggcatgatttccggtctggtcaggggcatcagagcagaaaacagctcgatccgcttcagcacgttggaccttgaccatgttcccgatgcatctgaagagaacatctttgacgtgatcatgcaacttggaaccagagtctcagacatgaccaagatgaatgacgactccgagttccgctacaaggcaggagtgctctatacgagtcgacttgtcgccgatgaacggctttgtgaagaatcaaagagtatagcggatcctgcacacgcattcaagaagatacccttgaaagagctcaaggagacgcctttgaaactcgcgattgagaagcccggcgtactgagtacgatctacttcacgaacgactcagacttctccaaaccactgcctccggatcaagtagagatcgaagttaaatacgcgggtgtgaacgctaaagacctggcggtcttgactgggcgacatcattcagacagtttcagcgatgagtgttccggtatcatcacccgcgtcggcgatgaggtgacggatctggtagttggtgacctggtgtactgtcagtctttcgccaaattcggcaacttcgtcagggagaaagcagcattttgccagaaactcgacagtagcgacaccctcgaagaggctgccacgctgcctattgctttctgcactgcgatctacggcctcttagagctcgcacgattggacaaaggcgatacagtgctgatccagtccgcgacaggcggcgtcggcatagcagcgtgccaaattgctcggatggtcggtgctgagatctacgccactgtaggcaccgagagcaagaagagagagctattagatatgggcttcgggatcaaagacgatcatatcttttactctcgtgagaaattcgctgctaagaagatccttgattacacgggcggaaagggaatcgacgtcatcttaagcaacgcccgtggggagctgatgcacgagtacaccaagatcatagcaagcggcgggaccttcgtcgagattggaagaactgaagtactggacaatgggagtctcggtctcgacttcttcaagcggaatgctacttttacgtccttcgatctagaagtcatgagtcagactaagccgcatctcatcgcgaaactcatgagaaagattcatcaactcaaatcggagggtcacatcaccccactacccttgcggaagcatagtgtttccgaaatcgacaaagctttcctagccttctccaaaggcagccatatcggaaagctgatagttgaatatgacgaccaatccgaagacgggttgaccgtacaacgagattcattcacggccaaatttgacccgaacgctgcatatctgctcgtcggctgtctcggtggtctaggtcgtagcttcagcgaatgggccgtgtcgcgcggggctcgacatctcatctacttgtcgcgatcaggtgctgccagcgatgaagccaaggccttcctcaggaagctaaaggagaacggcgttgatgcgaccgtagtgataggcgacgtaacattgctagcagatgtacagtctgcagtcgactcggcgaattatcctatcaagggcgtcattcaaggcgctctcactttacacgatggtttatttgagtcgatgtcgctcgatcgcttcaaggctacagtccatcctcgtgtcattggtacaatgaacctgcacaaggccacactcaactgtccgcttgacttcttcgagctctggtcgtcatggacagtcatattcggtactgcgacacaaagcaactacctcgcgtcgaatgcattcctcgacgctttcacgcggtatcgccggtctcagggccttccgtgcaccagtctggcactcagccaggtgctgggcattggcatcgtatcttacatgccggagtaccagcaggcgatgatccgcaatggcttctatggcaatgatgaggacgagttcttgcgatattgcgaacaaggcatcctaccaaccccagctgcagataaggagacaagcagtgacccaactttcaagtacgacccacgaacagaaggacacttgctcgtcggcatcgagccagctggtctgaagaacgtggacgagaagtacccactgaaggacatgtcctggtaccgcgacccacgcttccagaatctcatccaagccacgacaaacatctcgtcaacgggcgaaactaagaaggacacttcaggagaaggaggcacagtgctcgagaggatcgtaggcaagatctcacgcctgctttacatacccgccgatgaggtagacacacagagtgcgatcagtcagtatggtattgacagcatggtcgcggccgagttacggaactggttcctcacggcgttcgggaaggagatcagcatgctcaagctgttgagtgctactatgacggtgaagaagctagcggaggaggcggaatctgggactggtaatttcttggatatgaaggtttgattggcgtacaggtgggctgggtatagatgtctagatttgaatacgagataacgagattttccttgcgttaattaatgataacgtacatgaactttcttgtcggtgtgtcgcgtcgcgttttgaatgtgaggcgcatttagtgccttggcaggtcagctctgaccgca

SEQ ID NO: 22011 - DNA, 7041 bp, Muscodor strobelii
  misc_feature: SGI cDNA ID NO. 567464
  misc_feature: Encodes the peptide sequence at SEQ ID NO 22012
atgcttagtgatccaatcgaagtttcggccattggcagagtattcgccgataagaaatccgggtcgaatcccctactaataggatccatcaaaagtaacatgggtcatagcgaacccgccagtggtattgccggcgtcatgaaggccgtgttggctattgagcgtggcattataccgcctactgtagggatagaaacgctaaatccaaacgtgaatcttcaggatggccgactcaagattgttactgagtctatcccctggccagatcttcctatcagacgcgcgagtatcaattcattcgggtatgtattccgcacttggaccctttcaccgcaacttatgcagcttgtcgcattctacggcggatcaaatgcgcatgtatgtatcgtacgagtcctcgaaaccttgttgcccggatacagatctcgttaccagtctagcattcaatcttccaacttggagaaatttgcgatatgcaatggccttcaacgaggttcttctcagcgtagcttatcttcccagtcacctgtgaacgggaatggaagcatcaagtcagtgggaaatggtgtatcaaatggatatataaatggaaacggacatgccaatggtcacaagcacaccaacggtcatggtaatactaatggtagtaacggacatactaatggcaatggccacactaacggtcatgctcgcctcaacggcgatggccacctccggggaaatggggcagcacaccattcgagaaatgggagcctgactagtttgaagaagaagcaatacctactcccgttctcagctcatgacgaaagaacattgaaggctaactatgacaagctagccatatgctgtaacaagtggcccttgactgatctcgcatacacgctaagcgcgagacggagtctgttccagcagcgcagtttcgtcgtctctacagacaatgagagtttggcattgccaaaagagatgccgaaggctgtcaaagcccccgctgctgccgtcacaaacattggctttgttttcacaggccaaggtgctcaatgggcaaagatgggagccaacttgatggaagagtatcctagttgcctcgcaactatccgacgtctcgatcgatatcttgatctcttagacgaacattacgatcgctcatggagcatcgaagatagcttgaaggaggatgcattacacagccaagttcatcaagctgaactttctcagccactggtcaccgccctgcagatcatgatcgtaaatctgttgtcagaatggggcattgagccactggctgtaattggacattcttctggcgagatagccgccggttactccgctgggatgctcactgagcaagaagctattattgtcgcttatctccgagggaaagctgtcgcgttgaataggtatgaaggtctcatgatggccgtgggcggtacgctttcacaaattcagcccctggtcgatttgcatgacgatgcgatcaaggttgcctgccacaactctccggagagctacacgctgagtggtgacgccgatgcgatcaatgcgctaaaggcagtgctagacgagaagaagatattctgccgcgtcctacaaactaataacaacgcttaccactccgaccacatgaagcctcttggggcagcctacgagcatgaccttaacgccttcatacccaagaagtcagcagcgacagtcatgaaaggagccagacgcagtgagcctcccaaggcagtcttcttctcatccgtctacgggcatgcagcaccgtggtcaatactaagttcaaagtactggcgtcaaaatctcgagtcgcccgtactctttcatcaaggtgttgaagagctggtctctcagacgccaattgacgttctcgtcgaaattggtccgcactctgcacttcaagggcccctgcgacagttttcaaatgcaatgggcgctgactttcagtttcctacttatctttctgcaatgaagagagggagtgataatgttaatgatattctcacacttgctggcacactcttcactaagggctaccacgtcaacttggcaagagtaaatgcgatggagggtcgtggtgggaacgagctccaatatggcaagaccatcacagacctgcccagatatcagtggcaatacaacgacgatgtcttgctattcgagaaccgatatacccgcgagtggcgcttacgcatgcacccgcgacatgatatcttgggcagtagaatcccgggtaccaaccatgctgagcccttatggaggaacaagctaatagtgaaaaacgtcccctggctatcggatcatcgacttggcaatgatgttgtgtttccctcgacaggctacttgagcatggtgattgaagcggcgactcaagtggtggaaaccgaaggcttcgaagcttcagctatcgaatattttgacatacacaaagtcagtctcgccaaagctctcatcattccagaggacgacttcggatctgagactctcttcacgttgcgaccagcttctctcaattctgtcgcacgtcacaggtggctttttgacttcgtattgacttctgtatcaaacgacaacgggaaggatgtgttcacggagcactgtcggggacaagtcgaagtcggattcgaacaaatgatctccgaaagctcaattgtgaaggacatacagtcgtcgacaacgaagaaatctatcaacgctgcagaatggtacgagagcttcgcgagagcaggattgtgttatggcccgatgtttcagggcctgtccaacatattcgcaattgggagagcggctagaactcaggcaagagtcaatttaaacccaactgcgaaaacaatgaaggcggagtcaaggtatatcattcatcctgcaacactggatgccagcttgcagctctcgattctcgccgcgcacaagaacgctgcaactaaattcaagcgggctttcatgcccacgtctttcgaaagcgtcaaagcgtggccgaagattgcagcacacagtcagaagttcgttgatacctacgccagtgccacactgaagggactacggggcttgtcggcagaaatcgttcttcgtggatatggcgacgaaattctgcttgaagcgaagaatgtcttcctcactgcgtcagatcaatctgcgcccaagcagatcgagcaatccagcccgtacacacgtattgtttggaagccggacatcggctcattgacctcggccactgtcgcccaactttatccgccggttgttctagatgacgatgcagtcatcccatcactcaatcagctcgccatgcatcagttgattcacttcaaagaaacgcacgtggacgtctttgagaggggctctaaggaacctcatcttcaaagattactagattggacgactgaaaagcttgcggtcgctagcgcagacccaacgtcacccgcttcatctatcattgcgtacgaaaataagtttcgcgctcaagagatagagcggctttcgaacatattgcttccacgatcatccgaggctcgccttatgtgccatctttacaacaatctccctgacatctatagcggaaacaagaccggtattcaagtagcgctacagaacaatttgctgctcgacaactacgagactggccaagtataccgggaagggaatcgtcggctagcttcagtagtggcgatgtacgcgcatcaaaacccaggcttaagaattcttgaagtcggtgcaggcacaggaagtgctaccaatgaagtccttcccgcgctcaaaggtgctagtatctggcgtcaatacgcagagtaccgtttcacggacacaacaccgtcattcttagcaaacggagaggagcgtttctcgcgattcggaaggatgacgtttgggacattcgatatggagagaagtggcgagtctcaaggctaccaacaagactgggatcttgtcatcgcttcaaatgtcatacatgctacgtcggacatcctcgctacgctcaagaatgtccgagacttgctcaagcctggaggcaagatgatactgttggagttgacacaagcccagctgagtgccggtctcgtgctcgggaccttcagtgatttttggaaagcggatcacgatccttgctatcctagacacgatggcccatttctgagtaaatcactgtggcaagaggttcttcccgttgcgggcttttcgggcctcgatttctatgttgacgattatgcagacgccaatgtttctgcgaccgtcatatgtgccacggccagggacacttcgctcgtgctaccgccgaagctcgccgaccccgtttatgagggcatcactgtggtttacaggtcgcaaccaccttcgtttctccaatccatgaccgagtatatgtcaaggataagcaccatgcctattgatgctattcgactcacagatgtgaaaacagcccgcttccaaaggttcatcttcgtcgtagaagttggcgaaccattcttcctcgatgtatcagagcaagaatggcaagcgcttcagtttgctatccaggatgctaaatcatcactttgggtgacaagtggcaatctcttagatggagaatggccgctacatggcatgatttccggtctggtcaggggcatcagagcagaaaacagctcgatccgcttcagcacgttggaccttgaccatgttcccgatgcatctgaagagaacatctttgacgtgatcatgcaacttggaaccagagtctcagacatgaccaagatgaatgacgactccgagttccgctacaaggcaggagtgctctatacgagtcgacttgtcgccgatgaacggctttgtgaagaatcaaagagtatagcggatcctgcacacgcattcaagaagatacccttgaaagagctcaaggagacgcctttgaaactcgcgattgagaagcccggcgtactgagtacgatctacttcacgaacgactcagacttctccaaaccactgcctccggatcaagtagagatcgaagttaaatacgcgggtgtgaacgctaaagacctggcggtcttgactgggcgacatcattcagacagtttcagcgatgagtgttccggtatcatcacccgcgtcggcgatgaggtgacggatctggtagttggtgacctggtgtactgtcagtctttcgccaaattcggcaacttcgtcagggagaaagcagcattttgccagaaactcgacagtagcgacaccctcgaagaggctgccacgctgcctattgctttctgcactgcgatctacggcctcttagagctcgcacgattggacaaaggcgatacagtgctgatccagtccgcgacaggcggcgtcggcatagcagcgtgccaaattgctcggatggtcggtgctgagatctacgccactgtaggcaccgagagcaagaagagagagctattagatatgggcttcgggatcaaagacgatcatatcttttactctcgtgagaaattcgctgctaagaagatccttgattacacgggcggaaagggaatcgacgtcatcttaagcaacgcccgtggggagctgatgcacgagtacaccaagatcatagcaagcggcgggaccttcgtcgagattggaagaactgaagtactggacaatgggagtctcggtctcgacttcttcaagcggaatgctacttttacgtccttcgatctagaagtcatgagtcagactaagccgcatctcatcgcgaaactcatgagaaagattcatcaactcaaatcggagggtcacatcaccccactacccttgcggaagcatagtgtttccgaaatcgacaaagctttcctagccttctccaaaggcagccatatcggaaagctgatagttgaatatgacgaccaatccgaagacgggttgaccgtacaacgagattcattcacggccaaatttgacccgaacgctgcatatctgctcgtcggctgtctcggtggtctaggtcgtagcttcagcgaatgggccgtgtcgcgcggggctcgacatctcatctacttgtcgcgatcaggtgctgccagcgatgaagccaaggccttcctcaggaagctaaaggagaacggcgttgatgcgaccgtagtgataggcgacgtaacattgctagcagatgtacagtctgcagtcgactcggcgaattatcctatcaagggcgtcattcaaggcgctctcactttacacgatggtttatttgagtcgatgtcgctcgatcgcttcaaggctacagtccatcctcgtgtcattggtacaatgaacctgcacaaggccacactcaactgtccgcttgacttcttcgagctctggtcgtcatggacagtcatattcggtactgcgacacaaagcaactacctcgcgtcgaatgcattcctcgacgctttcacgcggtatcgccggtctcagggccttccgtgcaccagtctggcactcagccaggtgctgggcattggcatcgtatcttacatgccggagtaccagcaggcgatgatccgcaatggcttctatggcaatgatgaggacgagttcttgcgatattgcgaacaaggcatcctaccaaccccagctgcagataaggagacaagcagtgacccaactttcaagtacgacccacgaacagaaggacacttgctcgtcggcatcgagccagctggtctgaagaacgtggacgagaagtacccactgaaggacatgtcctggtaccgcgacccacgcttccagaatctcatccaagccacgacaaacatctcgtcaacgggcgaaactaagaaggacacttcaggagaaggaggcacagtgctcgagaggatcgtaggcaagatctcacgcctgctttacatacccgccgatgaggtagacacacagagtgcgatcagtcagtatggtattgacagcatggtcgcggccgagttacggaactggttcctcacggcgttcgggaaggagatcagcatgctcaagctgttgagtgctactatgacggtgaagaagctagcggaggaggcggaatctgggactggtaatttcttggatatgaaggtttga

SEQ ID NO: 22012 - protein, 2346 aa, Muscodor strobelii
  misc_feature: SGI Peptide ID NO. 567464
  misc_feature (337)..(680): Pfam Id: PF00698 Pfam Desc: Acyl transferase domain
  misc_feature (1654)..(1729): Pfam Id: PF08240 Pfam Desc: Alcohol dehydrogenase GroES-like domain
  misc_feature (1972)..(2136): Pfam Id: PF00106 Pfam Desc: short chain dehydrogenase
  misc_feature (1760)..(1909): Pfam Id: PF00107 Pfam Desc: Zinc-binding dehydrogenase
  misc_feature (1)..(65): Pfam Id: PF02801 Pfam Desc: Beta-ketoacyl synthase, C-terminal domain
  misc_feature (1972)..(2149): Pfam Id: PF08659 Pfam Desc: KR domain
  misc_feature (1233)..(1337): Pfam Id: PF08242 Pfam Desc: Methyltransferase domain
  misc_feature (338)..(680): Pfam Id: PF00698 Pfam Desc: Acyl transferase domain
  misc_feature (4)..(65): Pfam Id: PF02801 Pfam Desc: Beta-ketoacyl synthase, C-terminal domain
  misc_feature (284)..(2322): NCBI GI: 121704114 Blast Desc: polyketide synthase, [Aspergillus clavatus NRRL 1] gi|119398465|gb|EAW08895.1| polyketide synthase, [Aspergillus clavatus NRRL 1]
  misc_feature (261)..(2322): NCBI GI: 46109816 Blast Desc: FG01790.1 [Gibberella zeae PH-1]
  misc_feature (253)..(2323): NCBI GI: 169612990 Blast Desc: SNOG_09623 [Phaeosphaeria nodorum SN15] gi|160702624|gb|EAT82888.2| SNOG_09623 [Phaeosphaeria nodorum SN15]
  misc_feature (4)..(2324): NCBI GI: 240107410 Blast Desc: polyketide synthase, [Coccidioides posadasii C735 delta SOWgp]
  misc_feature (4)..(2324): NCBI GI: 119191043 Blast Desc: CIMG_05569 [Coccidioides immitis RS]
  misc_feature (4)..(2331): NCBI GI: 238495580 Blast Desc: polyketide synthase, [Aspergillus flavus NRRL3357] gi|220695676|gb|EED52019.1| polyketide synthase, [Aspergillus flavus NRRL3357]
  misc_feature (2)..(2331): NCBI GI: 87083850 Blast Desc: AF155773_1 Fum1p [Gibberella moniliformis]
  misc_feature (222)..(2337): NCBI GI: 119472146 Blast Desc: polyketide synthase, [Neosartorya fischeri NRRL 181] gi|119406436|gb|EAW16387.1| polyketide synthase, [Neosartorya fischeri NRRL 181]
  misc_feature (288)..(2333): NCBI GI: 67541242 Blast Desc: AN6791.2 [Aspergillus nidulans FGSC A4] gi|40739419|gb|EAA58609.1| AN6791.2 [Aspergillus nidulans FGSC A4] gi|259480385|tpe|CBF71467.1| TPA: polyketide synthase, (JCVI)
  misc_feature (2)..(2311): NCBI GI: 256735636 Blast Desc: [Nectria haematococca mpVI 77-13-4]
  misc_feature (338)..(2334): SWISSPROT Homolog: EC 2.3.1.74 Naringenin-chalcone synthase
  misc_feature: Useful for fungicidal and/or biocontrol applications
MLSDPIEVSAIGRVFADKKSGSNPLLIGSIKSNMGHSEPASGIAGVMKAVLAIERGIIPPTVGIETLNPNVNLQDGRLKIVTESIPWPDLPIRRASINSFGYVFRTWTLSPQLMQLVAFYGGSNAHVCIVRVLETLLPGYRSRYQSSIQSSNLEKFAICNGLQRGSSQRSLSSQSPVNGNGSIKSVGNGVSNGYINGNGHANGHKHTNGHGNTNGSNGHTNGNGHTNGHARLNGDGHLRGNGAAHHSRNGSLTSLKKKQYLLPFSAHDERTLKANYDKLAICCNKWPLTDLAYTLSARRSLFQQRSFVVSTDNESLALPKEMPKAVKAPAAAVTNIGFVFTGQGAQWAKMGANLMEEYPSCLATIRRLDRYLDLLDEHYDRSWSIEDSLKEDALHSQVHQAELSQPLVTALQIMIVNLLSEWGIEPLAVIGHSSGEIAAGYSAGMLTEQEAIIVAYLRGKAVALNRYEGLMMAVGGTLSQIQPLVDLHDDAIKVACHNSPESYTLSGDADAINALKAVLDEKKIFCRVLQTNNNAYHSDHMKPLGAAYEHDLNAFIPKKSAATVMKGARRSEPPKAVFFSSVYGHAAPWSILSSKYWRQNLESPVLFHQGVEELVSQTPIDVLVEIGPHSALQGPLRQFSNAMGADFQFPTYLSAMKRGSDNVNDILTLAGTLFTKGYHVNLARVNAMEGRGGNELQYGKTITDLPRYQWQYNDDVLLFENRYTREWRLRMHPRHDILGSRIPGTNHAEPLWRNKLIVKNVPWLSDHRLGNDVVFPSTGYLSMVIEAATQVVETEGFEASAIEYFDIHKVSLAKALIIPEDDFGSETLFTLRPASLNSVARHRWLFDFVLTSVSNDNGKDVFTEHCRGQVEVGFEQMISESSIVKDIQSSTTKKSINAAEWYESFARAGLCYGPMFQGLSNIFAIGRAARTQARVNLNPTAKTMKAESRYIIHPATLDASLQLSILAAHKNAATKFKRAFMPTSFESVKAWPKIAAHSQKFVDTYASATLKGLRGLSAEIVLRGYGDEILLEAKNVFLTASDQSAPKQIEQSSPYTRIVWKPDIGSLTSATVAQLYPPVVLDDDAVIPSLNQLAMHQLIHFKETHVDVFERGSKEPHLQRLLDWTTEKLAVASADPTSPASSIIAYENKFRAQEIERLSNILLPRSSEARLMCHLYNNLPDIYSGNKTGIQVALQNNLLLDNYETGQVYREGNRRLASVVAMYAHQNPGLRILEVGAGTGSATNEVLPALKGASIWRQYAEYRFTDTTPSFLANGEERFSRFGRMTFGTFDMERSGESQGYQQDWDLVIASNVIHATSDILATLKNVRDLLKPGGKMILLELTQAQLSAGLVLGTFSDFWKADHDPCYPRHDGPFLSKSLWQEVLPVAGFSGLDFYVDDYADANVSATVICATARDTSLVLPPKLADPVYEGITVVYRSQPPSFLQSMTEYMSRISTMPIDAIRLTDVKTARFQRFIFVVEVGEPFFLDVSEQEWQALQFAIQDAKSSLWVTSGNLLDGEWPLHGMISGLVRGIRAENSSIRFSTLDLDHVPDASEENIFDVIMQLGTRVSDMTKMNDDSEFRYKAGVLYTSRLVADERLCEESKSIADPAHAFKKIPLKELKETPLKLAIEKPGVLSTIYFTNDSDFSKPLPPDQVEIEVKYAGVNAKDLAVLTGRHHSDSFSDECSGIITRVGDEVTDLVVGDLVYCQSFAKFGNFVREKAAFCQKLDSSDTLEEAATLPIAFCTAIYGLLELARLDKGDTVLIQSATGGVGIAACQIARMVGAEIYATVGTESKKRELLDMGFGIKDDHIFYSREKFAAKKILDYTGGKGIDVILSNARGELMHEYTKIIASGGTFVEIGRTEVLDNGSLGLDFFKRNATFTSFDLEVMSQTKPHLIAKLMRKIHQLKSEGHITPLPLRKHSVSEIDKAFLAFSKGSHIGKLIVEYDDQSEDGLTVQRDSFTAKFDPNAAYLLVGCLGGLGRSFSEWAVSRGARHLIYLSRSGAASDEAKAFLRKLKENGVDATVVIGDVTLLADVQSAVDSANYPIKGVIQGALTLHDGLFESMSLDRFKATVHPRVIGTMNLHKATLNCPLDFFELWSSWTVIFGTATQSNYLASNAFLDAFTRYRRSQGLPCTSLALSQVLGIGIVSYMPEYQQAMIRNGFYGNDEDEFLRYCEQGILPTPAADKETSSDPTFKYDPRTEGHLLVGIEPAGLKNVDEKYPLKDMSWYRDPRFQNLIQATTNISSTGETKKDTSGEGGTVLERIVGKISRLLYIPADEVDTQSAISQYGIDSMVAAELRNWFLTAFGKEISMLKLLSATMTVKKLAEEAESGTGNFLDMKV

SEQ ID NO: 22013 - DNA, 2708 bp, Muscodor strobelii; identical to SEQ ID NO: 22010
  misc_feature: SGI EST ID NO. CUFF.51747.0
  misc_feature: Variant of the nucleotide sequence at SEQ ID NO 22011

SEQ ID NO: 22014 - DNA, 987 bp, Muscodor strobelii
  misc_feature: SGI cDNA ID NO. 567465
  misc_feature: Encodes the peptide sequence at SEQ ID NO 22015
atggcttccgacccgccccattctggcgacgagcacggcgcccctaacattgacgagcccgagggcaaaagctctcccaagaccgacggcgacaccgtcgctcaaatcgacaattcccccagggctgacaccaagctcgcatatgaccccgctgcagaggctcagagcgcccataatgtagctgtggagaccaaccgcgaagccagtgacacgtccaagcccggctccagcgacgtcgctgataccgatgccggctccgaagccgtctcagatgatatcgagcagcctgtcgatctagttgatgacgcgctcaatgctgctctgggccaccaagaatccatcaccgccgacattctctccgagcccaaaccatctaccgctgccgactcttcctccgacgctgtcctcgtcatcaccgaagccaagcccgatggcgaggccgaggcgcaggagtccgacgcagccacagagcaagcggacggttccgactctgaaaccgacactactaaccagcccgcccctcttaacaacgcgatcaaggcacagggacgcaccccgaaccagaggaagcgcaaggccaaatttgttgaagagcatcaggacgacgaatccgatgacgaagccaatgatgaagctaaggaggaagccgagcatgaaggcgagcatgaaactgagcatgaagccgagcatgaagctacggaggaagccgctaacgaagaggtggttgaggagcaaggcgccggggcagagcccgcggcgaaaaagccgcgatttgagcaacctataagcactctgaggaacaaatgccagcaatgcgaccatcccggcgagtatcgtctgatgatgttcaacgtgaggaaatacggcggattcgcctctgacgatctggacttcgacgaagtcatgtgttggtcttgttgcaagcgggaggcagatgatgctccgccctgcaagctgggaaatcaccattgcacgaactcattctga

SEQ ID NO: 22015 - protein, 328 aa, Muscodor strobelii
  misc_feature: SGI Peptide ID NO. 567465
MASDPPHSGDEHGAPNIDEPEGKSSPKTDGDTVAQIDNSPRADTKLAYDPAAEAQSAHNVAVETNREASDTSKPGSSDVADTDAGSEAVSDDIEQPVDLVDDALNAALGHQESITADILSEPKPSTAADSSSDAVLVITEAKPDGEAEAQESDAATEQADGSDSETDTTNQPAPLNNAIKAQGRTPNQRKRKAKFVEEHQDDESDDEANDEAKEEAEHEGEHETEHEAEHEATEEAANEEVVEEQGAGAEPAAKKPRFEQPISTLRNKCQQCDHPGEYRLMMFNVRKYGGFASDDLDFDEVMCWSCCKREADDAPPCKLGNHHCTNSF

SEQ ID NO: 22016 - DNA, 838 bp, Muscodor strobelii
  misc_feature: SGI EST ID NO. CUFF.51762.0
  misc_feature: Variant of the nucleotide sequence at SEQ ID NO 22014
ccagcccgcccctcttaacaacgcgatcaaggcacagggacgcaccccgaaccagaggaagcgcaaggccaaatttgttgaagagcatcaggacgacgaatccgatgacgaagccaatgatgaagctaaggaggaagccgagcatgaaggcgagcatgaaactgagcatgaagccgagcatgaagctacggaggaagccgctaacgaagaggtggttgaggagcaaggcgccggggcagagcccgcggcgaaaaagccgcgatttgagcaacctataagcactctgaggaacaaatgccagcaatgcggtaccatcgtttggcgagtaggactccgtcttcggtaaatgcgcataccatcccggcgagtatcgtctgatgatgttcaacgtgaggaaatacggcggattcgcctctgacgatctggacttcgacgaagtcatgtgttggtcttgttgcaagcgggaggcagatgatgctccgccctgcaagctgggaaatcaccattgcacgaactcattctgagttcgcaagtcctcacatggccatctcgtccagatcggcctagcattgtgttcctctcgaccttaggatggccagactcgtcagacgcttggctgggatcgagacattggatacgtaacgcattcagatgtgttgacgtacaggatgtcattgtctgttggacaagatttaagacagccacttaggttgtaaaaagcacgattgtgtgtgggctgtggtattgagttttcgtttttatgtgatgtgcaatgttcggcacgtgtcacagaggtatttaagataagatacctgagttatccactgtaggaatccgc

SEQ ID NO: 22017 - DNA, 1431 bp, Muscodor strobelii
  misc_feature: SGI cDNA ID NO. 567466
  misc_feature: Reduced expression when VOC is produced
  misc_feature: Encodes the peptide sequence at SEQ ID NO 22018
atgagtagcttgcgcttcctcgacctcgtcaagcccttcgtggcgttcctgcccgaggtgcagcagccggagacgaaggtgccgttcaaccagaagctgatgtggacgggcctcacgctgctcatcttcctcgtcatgagccagatgcccctgtacggcatcgtctcgtccgacacgtccgacccgctctactggctgcgcatgatgatggcctccaaccgcggcaccctcatggagctcggcatcaccccgatcatctcgtctggcatggtcttccagctgctggccggtacccacatgatcgacgtcaacctcgacctcaagtccgatcgcgagctgtaccagaccgcccagaagctgttcgccttcatcctgtccgccggcaccgccaccgtctacgtcttcaccggcctctacgggcccccctcggacctcggcgccggcatcgtcttcctgctcattctgcagctcgtcgtcgctggcatgatcgtcatcctgctcgacgagctgctgcagaagggctacgggctgggcagtggcatctctctcttcatcgccaccaacatctgcgagagcatcatgtggaaggccttctccccgaccagcatcaacaccggccgcggccccgagttcgagggcgccgtcatcgcccttttccacctgctgatgacctggcccaacaagcagcgcgccctgcaggaggccttctaccgccagaacctgcccaacatcatgaacctgctggccaccctcgccgtcttcgccgccgtcatctacctgcagggcttccgcgtcgagatccccgtcaagtcctcccgccagcgcggtgcccgcggctcctaccccatccgcctcttctacacctccaacatgcccatcatgctgcagtccgccctctcctccaacgtcttcctcatcagccagatgctctactcgcgcttctccgacaatctgctcgtccgcatgttcggcgtctgggaggccaaggatggttccgcccagctctcggccatctcgggcctcgtctactacatgtccccgcccctgaacttccgtgatgccctcctcgaccccatccacaccgtcgtctacattgcctacatgctcggcgcgtgcgctctgttctccaagacgtggatcgaggtctcgggatccagccctcgcgacgtcgccaagcagttgaaagaccaggggttggtcatggccggtcaccgtgaccagtccatgtacaaggagttgaaacgcatcatccccacggccgctgccttcggtggagcgtgcatcggcgcgctctctgtcgccagtgacctcatgggcgctcttggctcaggaaccggtactctcctcgctgtcaccatcatctacggttacttcgaaatcgcagccaaggagggcgatcttggtggcatgaagggcatgatcatgggctag

SEQ ID NO: 22018 - protein, 476 aa, Muscodor strobelii
  misc_feature: SGI Peptide ID NO. 567466
  misc_feature (76)..(460): Pfam Id: PF00344 Pfam Desc: eubacterial secY protein
  misc_feature (1)..(476): NCBI GI: 116198839 Blast Desc: protein transport protein SEC61 alpha subunit [Chaetomium globosum CBS 148.51] gi|88178854|gb|EAQ86322.1| protein transport protein SEC61 alpha subunit [Chaetomium CBS
  misc_feature (1)..(476): NCBI GI: 171692999 Blast Desc: protein product [Podospora anserina] gi|170946448|emb|CAP73249.1| protein product [Podospora anserina]
  misc_feature (1)..(476): NCBI GI: 85091301 Blast Desc: protein transport protein SEC61 alpha subunit [Neurospora crassa OR74A] gi|54036423|sp|Q870W0.1|SC61A_NEUCR RecName: Full=Protein transport protein SEC61 subunit alpha SEC61
  misc_feature (1)..(476): NCBI GI: 256727879 Blast Desc: [Nectria haematococca mpVI 77-13-4]
  misc_feature (1)..(476): NCBI GI: 145602502 Blast Desc: protein transport protein SEC61 alpha subunit [Magnaporthe grisea 70-15] gi|145010919|gb|EDJ95575.1| protein transport protein SEC61 alpha subunit [Magnaporthe grisea 70-15]
  misc_feature (9)..(476): NCBI GI: 46132974 Blast Desc: FG09016.1 [Gibberella zeae PH-1]
  misc_feature (1)..(476): NCBI GI: 156065233 Blast Desc: protein transport protein SEC61 alpha subunit [Sclerotinia sclerotiorum 1980] gi|154691486|gb|EDN91224.1| protein transport protein SEC61 alpha subunit [Sclerotinia 1980]
  misc_feature (1)..(476): NCBI GI: 119479689 Blast Desc: protein transport protein Sec61 alpha subunit, [Neosartorya fischeri NRRL 181] gi|119408027|gb|EAW17976.1| protein transport protein Sec61 alpha subunit, [Neosartorya NRRL
  misc_feature (1)..(476): NCBI GI: 70998192 Blast Desc: protein transport protein Sec61 alpha subunit [Aspergillus fumigatus Af293] gi|66851459|gb|EAL91785.1| protein transport protein Sec61 alpha subunit, [Aspergillus fumigatus
  misc_feature (1)..(476): NCBI GI: 115433596 Blast Desc: protein transport protein SEC61 alpha subunit [Aspergillus terreus NIH2624] gi|114189787|gb|EAU31487.1| protein transport protein SEC61 alpha subunit [Aspergillus terreus
  misc_feature: Useful for introducing or modulating the production of volatile compounds
MSSLRFLDLVKPFVAFLPEVQQPETKVPFNQKLMWTGLTLLIFLVMSQMPLYGIVSSDTSDPLYWLRMMMASNRGTLMELGITPIISSGMVFQLLAGTHMIDVNLDLKSDRELYQTAQKLFAFILSAGTATVYVFTGLYGPPSDLGAGIVFLLILQLVVAGMIVILLDELLQKGYGLGSGISLFIATNICESIMWKAFSPTSINTGRGPEFEGAVIALFHLLMTWPNKQRALQEAFYRQNLPNIMNLLATLAVFAAVIYLQGFRVEIPVKSSRQRGARGSYPIRLFYTSNMPIMLQSALSSNVFLISQMLYSRFSDNLLVRMFGVWEAKDGSAQLSAISGLVYYMSPPLNFRDALLDPIHTVVYIAYMLGACALFSKTWIEVSGSSPRDVAKQLKDQGLVMAGHRDQSMYKELKRIIPTAAAFGGACIGALSVASDLMGALGSGTGTLLAVTIIYGYFEIAAKEGDLGGMKGMIMG

SEQ ID NO: 22019 - DNA, 2265 bp, Muscodor strobelii
  misc_feature: SGI EST ID NO. CUFF.52311.0
  misc_feature: Variant of the nucleotide sequence at SEQ ID NO 22017
gaaatgactggggtcaggtcggggctgatgctccaccctttttccataggggacacatctttcaattcggggagatttggctggagacggcctgctttttgatgccagatcttgtctccatcgcccgtcgcccatcgcacttcccttctcttcccattccttccacagcgcgcgcgacgacctcatacaagacgtacttgagctgagggtcttcgtcgctcctcctcttcgccgactctccttccctcttctctcctttttcttttctccatcgtcctctgttttccaccaccaccatcgcccatcatgagtagctgtaagcacaccaaccccaacccccaacccccctgatagcctcttctgtcgctctcacgtctctgctgccattctgtcacatggccacatgccagcgatggatgtggtgagcattgctgggcactggtggtccaattgagcatcacacacgtcgtgacacggtgaaatagttgttgttgctgaccgggcgagcagtgcgcttcctcgacctcgtcaagcccttcgtggcgttcctgcccgaggtgcagcagccggagacgaaggtgccgttcaaccagaagctgatgtggacgggcctcacgctgctcatcttcctcgtcatgagccagatgcccctgtacggcatcgtctcgtccgacacgtccgacccgctctactggctgcgcatgatgatggcctccaaccgcggcaccctcatggagctcggcatcaccccgatcatctcgtctggcatggtcttccagctgctggccggtacccacatgatcgacgtcaacctcgacctcaagtccgatcgcgagctgtaccagaccgcccagaagctgttcgccttcatcctgtccgccggcaccgccaccgtctacgtcttcaccggcctctacgggcccccctcggacctcggcgccggcatcgtcttcctgctcattctgcagctcgtcgtcgctggcatgatcgtcatcctgctcgacgagctgctgcagaagggctacgggctgggcagtggcatctctctcttcatcgccaccaacatctgcgagagcatcatgtggaaggccttctccccgaccagcatcaacaccggccgcggccccgagttcgagggcgccgtcatcgcccttttccacctgctgatgacctggcccaacaagcagcgcgccctgcaggaggccttctaccgccagaacctgcccaacatcatgaacctgctggccaccctcgccgtcttcgccgccgtcatctacctgcagggcttccgcgtcgagatccccgtcaagtcctcccgccagcgcggtgcccgcggctcctaccccatccgcctcttctacacctccaacatgcccatcatgctgcagtccgccctctcctccaacgtcttcctcatcagccagatgctctactcgcgcttctccgacaatctgctcgtccgcatgttcggcgtctgggaggccaaggatggttccgcccagctctcggccatctcgggcctcgtctactacatgtccccgcccctgaacttccgtgatgccctcctcgaccccatccacaccgtcgtctacattgcctacatgctcggcgcgtgcgctctgttctccaagacgtggatcgaggtctcgggatccagccctcgcgacgtcgccaagcagttgaaagaccaggggttggtcatggccggtcaccgtgaccagtccatgtacaaggagttgaaacgcatcatccccacggccgctgccttcggtggagcgtgcatcggcgcgctctctgtcgccagtgacctcatgggcgctcttggctcaggaaccggtactctcctcgctgtcaccatcatctacggttacttcgaaatcgcagccaaggagggcgatcttggtggcatgaagggcatgatcatgggctagacgtgcagtgatccagactcgagtacgacactttgtctctgcacctacgcctcgttcgtacgacagcagcaatgcgacggtgtgctcgtcatatgtaatatcaaacaaaaagggttcataaaatcagcatggggtgtatttacgggaaatatgaacttggatggaaaaaagcatgggcgcctgggaacaaggtagggccggagcctctcgccttctctccaccccgacccatcacaatgcaggcgggaaatgtatttagtcaagtctaccgaaaagcgtaaaatcatgcatgaatgataactctgtgtatacccgaaggccaaggagttttcgc

SEQ ID NO: 22020 - DNA, 639 bp, Muscodor strobelii
  misc_feature: SGI cDNA ID NO. 567467
  misc_feature: Reduced expression when VOC is produced
  misc_feature: Encodes the peptide sequence at SEQ ID NO 22021
atgtctgctgctttcgtcaccaagcccgcgcctggcttcaaggccaccaccgtcttccctggtggtgagttcaaggacatctcgctgtccgactatcttggtcaatgggtcgtccttctcttctaccccctcgacttcaccttcgtctgtcccaccgagatcatccagtacaacgacgccctcccccgtttcgacggcatcaacaccaaggtcttcggcatctcaaccgactctcacttctcccacctcgcctggatcgagcgctcccgcaaggaaggcggtctcggctccgacctgcagcttcctctcatcgccgacaagtccatgaagatctcccgctcctacggtgttctgcttgaggatgagggagttgctctgcgtggtctcttcatcatcgatcccaagggcgtgctccgccagatcaccatcaatgatctgcccgttggtagagatgtcgaggagactattagactcgtccaggctttccaattcaccgacgaattcggtgaggtttgccccgctggctggcagaagggtgccaagaccatgaaggctgatcccaagggctcgcttgagtacttcgccgagaagaatgctgagactaatggccacagcaacaagcgtgctcgcgttgagtga

SEQ ID NO: 22021 - protein, 212 aa, Muscodor strobelii
  misc_feature: SGI Peptide ID NO. 567467
  misc_feature (5)..(162): Pfam Id: PF08534 Pfam Desc: Redoxin
  misc_feature (6)..(141): Pfam Id: PF00578 Pfam Desc: AhpC/TSA family
  misc_feature (1)..(197): NCBI GI: 46114676 Blast Desc: FG03180.1 [Gibberella zeae PH-1]
  misc_feature (4)..(212): NCBI GI: 170104066 Blast Desc: 2-cysteine peroxiredoxin [Laccaria bicolor S238N-H82] gi|164641700|gb|EDR05959.1| 2-cysteine peroxiredoxin [Laccaria bicolor S238N-H82]
  misc_feature (4)..(212): NCBI GI: 40781639 Blast Desc: peroxiredoxin [Taiwanofungus camphoratus]
  misc_feature (4)..(212): NCBI GI: 238582300 Blast Desc: MPER_10926 [Moniliophthora perniciosa FA553] gi|111182669|gb|ABH07702.1| cys 2 peroxiredoxin [Moniliophthora perniciosa] gi|215452642|gb|EEB90821.1| MPER_10926 perniciosa
  misc_feature (4)..(198): NCBI GI: 55584623 Blast Desc: peroxiredoxins [Phanerochaete chrysosporium]
  misc_feature (6)..(198): NCBI GI: 242267000 Blast Desc: peroxiredoxin [Fenneropenaeus indicus]
  misc_feature (1)..(198): NCBI GI: 91085349 Blast Desc: : similar to peroxiredoxins, prx-1, prx-2, prx-3 [Tribolium castaneum] gi|270009216|gb|EFA05664.1| TcasGA2_TC014929 [Tribolium castaneum]
  misc_feature (6)..(198): NCBI GI: 77955972 Blast Desc: thioredoxin peroxidase [Fenneropenaeus chinensis]
  misc_feature (6)..(198): NCBI GI: 126697356 Blast Desc: thioredoxin peroxidase 2 [Haliotis discus discus]
  misc_feature (4)..(198): NCBI GI: 224058052 Blast Desc: : peroxiredoxin 1 variant 3 isoform 1 [Taeniopygia guttata] gi|224058058|ref|XP_002194671.1| : peroxiredoxin 1 variant 3 isoform 2 [Taeniopygia guttata] peroxiredoxin 1 variant
  misc_feature (1)..(199): SWISSPROT Homolog: EC 1.11.1.15 Peroxiredoxin
  misc_feature: Useful for introducing or modulating the production of volatile compounds
MSAAFVTKPAPGFKATTVFPGGEFKDISLSDYLGQWVVLLFYPLDFTFVCPTEIIQYNDALPRFDGINTKVFGISTDSHFSHLAWIERSRKEGGLGSDLQLPLIADKSMKISRSYGVLLEDEGVALRGLFIIDPKGVLRQITINDLPVGRDVEETIRLVQAFQFTDEFGEVCPAGWQKGAKTMKADPKGSLEYFAEKNAETNGHSNKRARVE

SEQ ID NO: 22022 - DNA, 1294 bp, Muscodor strobelii
  misc_feature: SGI EST ID NO. CUFF.51915.1
  misc_feature: Variant of the nucleotide sequence at SEQ ID NO 22020
tggcgattcgcgtttcaagtaccaaatcgaacccgattcccaggtctggagtaataccgcagattattggggtgtcgatacgagtgactcatcgtcgtgccataatctgacgcgtcgggtcatctaattacaatggcaatcgcgtgataacgacgttgaggtccgtggtcggactagcgagataacacgggcgacaattatttttttgctgtggagactaccaagcttcggtctgataatgatttgaaagtactgtaagggtacctgacgaaagagaggcgcgggttgcttagagacgtggtttcccgtcttaattccatcgcaacgactacaacaactacacatacgcgacagataattgtacagtcattcgcgatgtctgctgctttcgtcaccaagcccgcgcctggcttcaaggccaccaccgtcttccctggtggtgagttcaaggacatctcgctgtccgactatcttggtcaatgggtcgtccttctcttctaccccctcgacttcaccttcgtctgtcccaccgagatcatccagtacaacgacgccctcccccgtttcgacggcatcaacaccaaggtcttcggcatctcaaccgactctcacttctcccacctcgcctggatcgagcgctcccgcaaggaaggcggtctcggctccgacctgcagcttcctctcatcgccgacaagtccatgaagatctcccgctcctacggtgttctgcttgaggatgagggagttgctctgcgtggtctcttcatcatcgatcccaagggcgtgctccgccagatcaccatcaatgatctgcccgttggtagagatgtcgaggagactattagactcgtccaggctttccaattcaccgacgaattcggtgaggtttgccccgctggctggcagaagggtgccaagaccatgaaggctgatcccaagggctcgcttgagtacttcgccgagaagaatgctgagactaatggccacagcaacaagcgtgctcgcgttgagtgaagtgcgccgtgatgaggatggtatgagatggggaagcaaaaccggtgtgaaagtgtaaattaatgatcaagctgcgccgctaacatccgcgaggatgagatgacgtgtattaatacgatagacttcgcttcttgcagccgaggcggagagggaatcggcaatggcttagagtgcaggataattcagagctcacacaagatcctaatcatttgatggtcgtcggaataacgattgactgtgaccgttgaataatcaacacgtacctagtatcactgccaaa

SEQ ID NO: 22023 - DNA, 672 bp, Muscodor strobelii
  misc_feature: SGI cDNA ID NO. 567468
  misc_feature: Encodes the peptide sequence at SEQ ID NO 22024
atgtctgctgctttcgtcaccaagcccgcgcctggcttcaaggccaccaccgtcttccctggtggtgagttcaaggacatctcgctgtccgactatcttggtcaatgggtcgtccttctcttctaccccctcgacttcaccttcgtctgtcccaccgagatcatccagtacaacgacgccctcccccgtttcgacggcatcaacaccaaggtcttcggcatctcaaccgactctcacttctcccacctcgcctggatcgagcgctcccgcaaggaaggcggtctcggctccgacctgcagcttcctctcatcgccgacaagtccatgaagatctcccgctcctacggtgttctgcttgaggatgagggagttgctctgcgtggtctcttcatcatcgatcccaagggcgtgctccgccagatcaccatcaatgatctgcccgttggtagagatgtcgaggagactattagactcgtccaggctttccaattcaccgacgaattcggtgaggtttgccccgctggctggcagaagggtgccaagaccatgaaggctgatcccaaggtaagctttggagtgtttcttgccctatactcaggctcgcttgagtacttcgccgagaagaatgctgagactaatggccacagcaacaagcgtgctcgcgttgagtga

SEQ ID NO: 22024 - protein, 223 aa, Muscodor strobelii
  misc_feature: SGI Peptide ID NO. 567468
  misc_feature (5)..(162): Pfam Id: PF08534 Pfam Desc: Redoxin
  misc_feature (6)..(141): Pfam Id: PF00578 Pfam Desc: AhpC/TSA family
  misc_feature (1)..(208): NCBI GI: 46114676 Blast Desc: FG03180.1 [Gibberella zeae PH-1]
  misc_feature (4)..(223): NCBI GI: 170104066 Blast Desc: 2-cysteine peroxiredoxin [Laccaria bicolor S238N-H82] gi|164641700|gb|EDR05959.1| 2-cysteine peroxiredoxin [Laccaria bicolor S238N-H82]
  misc_feature (4)..(223): NCBI GI: 40781639 Blast Desc: peroxiredoxin [Taiwanofungus camphoratus]
  misc_feature (4)..(223): NCBI GI: 238582300 Blast Desc: MPER_10926 [Moniliophthora perniciosa FA553] gi|111182669|gb|ABH07702.1| cys 2 peroxiredoxin [Moniliophthora perniciosa] gi|215452642|gb|EEB90821.1| MPER_10926 perniciosa
  misc_feature (4)..(213): NCBI GI: 55584623 Blast Desc: peroxiredoxins [Phanerochaete chrysosporium]
  misc_feature (6)..(209): NCBI GI: 242267000 Blast Desc: peroxiredoxin [Fenneropenaeus indicus]
  misc_feature (6)..(209): NCBI GI: 77955972 Blast Desc: thioredoxin peroxidase [Fenneropenaeus chinensis]
  misc_feature (1)..(209): NCBI GI: 91085349 Blast Desc: : similar to peroxiredoxins, prx-1, prx-2, prx-3 [Tribolium castaneum] gi|270009216|gb|EFA05664.1| TcasGA2_TC014929 [Tribolium castaneum]
  misc_feature (6)..(209): NCBI GI: 126697356 Blast Desc: thioredoxin peroxidase 2 [Haliotis discus discus]
  misc_feature (6)..(209): NCBI GI: 260875744 Blast Desc: peroxiredoxin [Litopenaeus vannamei]
  misc_feature (1)..(210): SWISSPROT Homolog: EC 1.11.1.15 Peroxiredoxin
MSAAFVTKPAPGFKATTVFPGGEFKDISLSDYLGQWVVLLFYPLDFTFVCPTEIIQYNDALPRFDGINTKVFGISTDSHFSHLAWIERSRKEGGLGSDLQLPLIADKSMKISRSYGVLLEDEGVALRGLFIIDPKGVLRQITINDLPVGRDVEETIRLVQAFQFTDEFGEVCPAGWQKGAKTMKADPKVSFGVFLALYSGSLEYFAEKNAETNGHSNKRARVE

SEQ ID NO: 22025 - DNA, 1294 bp, Muscodor strobelii; identical to SEQ ID NO: 22022
  misc_feature: SGI EST ID NO. CUFF.51915.1
  misc_feature: Variant of the nucleotide sequence at SEQ ID NO 22023

SEQ ID NO: 22026 - DNA, 771 bp, Muscodor strobelii
  misc_feature: SGI cDNA ID NO. 567469
  misc_feature: Encodes the peptide sequence at SEQ ID NO 22027
atggcccaaaaacagccccccgccaaagaatggcacaacgaccccatgtctatgcaacgcggcgactacagcagcagtcccttcccaaagggtctcatgatcctcggccgtctagccacgggccccattcaatactatctcgcaacgcgccacccactctcacgattcggtgtgcctcctccaccaaccggcggattcatccacgtacttgggctcaccgcgcccaagttgccattcctcgcagcacttatgccgaccgttctaagcgcagaacacatcctctgggtctcaacactggcctccgagaaaatgacacttcccttcgctttatttgcgatcttcggcgatttggggtatgaatctatcagcactttactcttcaccacggcgtcaatcaatccgctgtggtccgaacggttgttctacatcggctcgtcaatcttctacgccggcgtcgcagttgaacttctcgctgaattacaacggatatacttcaagtcaaacccggaaaacaaggggaaattgtgcacgagcgggttttgggcagtgacgagacatattaattacacggcgaatgtgatttttggatttggtggtggtttggcgcttggtgggtgggcttatacactgtttagtgcggggatgtatttgtcgaattttatctttaatgctattcctagtattgaggattattgcgcgaggaagtatgggagcgcttggaggaggtatacgcaggagacgcggtggatgttgattcctggggtttattga

SEQ ID NO: 22027 - protein, 256 aa, Muscodor strobelii
  misc_feature: SGI Peptide ID NO. 567469
  misc_feature (45)..(247): Pfam Id: PF06966 Pfam Desc: Domain of function (DUF1295)
  misc_feature (142)..(189): Pfam Id: PF06966 Pfam Desc: Domain of function (DUF1295)
  misc_feature (232)..(256): Pfam Id: PF01222 Pfam Desc: Ergosterol biosynthesis ERG4/ERG24 family
  misc_feature (12)..(256): NCBI GI: 39969119 Blast Desc: MGG_10170 [Magnaporthe grisea 70-15] gi|145015186|gb|EDJ99754.1| MGG_10170 [Magnaporthe grisea 70-15]
  misc_feature (8)..(256): NCBI GI: 169615987 Blast Desc: SNOG_11160 [Phaeosphaeria nodorum SN15] gi|160703090|gb|EAT81659.2| SNOG_11160 [Phaeosphaeria nodorum SN15]
  misc_feature (6)..(256): NCBI GI: 189209918 Blast Desc: conserved [Pyrenophora tritici-repentis Pt-1C-BFP] gi|187977384|gb|EDU44010.1| conserved [Pyrenophora tritici-repentis Pt-1C-BFP]
  misc_feature (18)..(256): NCBI GI: 256727613 Blast Desc: NECHADRAFT_91175 [Nectria haematococca mpVI 77-13-4]
  misc_feature (95)..(256): NCBI GI: 171691340 Blast Desc: protein product [Podospora anserina] gi|170945618|emb|CAP71731.1| protein product [Podospora anserina]
  misc_feature (88)..(256): NCBI GI: 261352342 Blast Desc: conserved [Verticillium albo-atrum VaMs.102]
  misc_feature (143)..(256): NCBI GI: 85083107 Blast Desc: NCU04480 [Neurospora crassa OR74A] gi|28918133|gb|EAA27813.1| [Neurospora crassa OR74A]
  misc_feature (133)..(256): NCBI GI: 242794262 Blast Desc: conserved [Talaromyces stipitatus ATCC 10500] gi|218718922|gb|EED18342.1| conserved [Talaromyces stipitatus ATCC 10500]
  misc_feature (143)..(237): NCBI GI: 254444537 Blast Desc: conserved [Verrucomicrobiae bacterium DG1235] gi|198258845|gb|EDY83153.1| conserved [Verrucomicrobiae bacterium DG1235]
  misc_feature (142)..(256): NCBI GI: 167515820 Blast Desc: [Monosiga brevicollis MX1] gi|163778875|gb|EDQ92489.1| [Monosiga brevicollis MX1]
  misc_feature (146)..(256): SWISSPROT Homolog: EC 1.3.1.70 Delta(14)-sterol reductase
MAQKQPPAKEWHNDPMSMQRGDYSSSPFPKGLMILGRLATGPIQYYLATRHPLSRFGVPPPPTGGFIHVLGLTAPKLPFLAALMPTVLSAEHILWVSTLASEKMTLPFALFAIFGDLGYESISTLLFTTASINPLWSERLFYIGSSIFYAGVAVELLAELQRIYFKSNPENKGKLCTSGFWAVTRHINYTANVIFGFGGGLALGGWAYTLFSAGMYLSNFIFNAIPSIEDYCARKYGSAWRRYTQETRWMLIPGVY

SEQ ID NO: 22028 - DNA, 1329 bp, Muscodor strobelii
  misc_feature: SGI EST ID NO. CUFF.51774.0
  misc_feature: Variant of the nucleotide sequence at SEQ ID NO 22026
tcgctcctttacatcaccaaacggcggcacaacaaaagaatcacgacacccatcgtttttgtttatctgccactcattcacatcgcttccgcttcactcggtacaattcgtctcatcacccatcatggcccaaaaacagccccccgccaaagaatggcacaacgaccccatgtctatgcaacgcggcgactacagcagcagtcccttcccaaagggtctcatgatcctcggccgtctagccacgggccccattcaatactatctcgcaacgcgccacccactctcacgattcggtgtgcctcctccaccaaccggcggattcatccacgtacttgggctcaccgcgcccaagttgccattcctcgcagcacttatgccgaccgttctaagcgcagaacacatcctctgggtctcaacactggcctccgagaaaatgacacttcccttcgctttatttgcgatcttcggcgatttggggtatgaatctatcagcactttactcttcaccacggcgtcaatcaatccgctgtggtccgaacggttgttctacatcggctcgtcaatcttctacgccggcgtcgcagttgaacttctcgctgaattacaacggatatacttcaagtcaaacccggaaaacaaggggaaattgtgcacgagcgggttttgggcagtgacgagacatattaattacacggcgaatgtgatttttggatttggtggtggtttggcgcttggtgggtgggcttatacactgtttagtgcggggatgtatttgtcgaattttatctttaatgctattcctagtattgaggattattgcgcgaggaagtatgggagcgcttggaggaggtatacgcaggagacgcggtggatgttgattcctggggtttattgaggtggataagtggtgaggtggtgaggtagtttataagtgcttcgaatatcttgaaggaaacagtcgtggcagcagattagtcatgcaatgcaggataagtctttcaacgacatctcgtagttggtagttcagatgaacgtaccatctggtcgggtacatgacgactccgttagtgaccccacgtaccccggatcaatacaacctcaaccccagaccgccatcgatgacgtgaggagaagacacaccccacaaccggcgatcgcctgggaataacctgaacatcatcatgaccggcggaaagtacggcctcacatcgataccctggaagtggaaatggagcacataataggcgataatgtctccgcttttggaaagtacataaagtgagacgagaacaatcgtcagttgagataggtagtagatgtgactagttg

SEQ ID NO: 22029 - DNA, 1356 bp, Muscodor strobelii
  misc_feature: SGI cDNA ID NO. 567470
  misc_feature: Encodes the peptide sequence at SEQ ID NO 22030
atggcgacactccaactagcaacttgggcaacaaacctgacctactccaatctacctgccccagtaatagaccaagccataaaatcaatctacaactgggcaggctgcgcaatcggtgggcaggctcagtctgcaccacacatcgcccatctcacctaccaacccttttccggatccgctacgtcttccatcttgggctcaaacggcagcatagaaaactcattcgccgatcctcaacacgccgcgtttatcaacgggatagcgtcacatatcgacgattatgacgacacgcatctcgagaccatcattcacccggcgggacccattgctagtgctctcttcgcagtcgcagaatggaaagcccctgttacggggcatgagttcctgactgcgttcgtagcgggtatagagaccgagtgcaagctgggattaggtgtttggccttaccactacgacataggatggcacattacctctaccaccggctcgatcggtgccgcggtagcagttgggaaattactcgacctgaacaccgagagaatgtgcgccgcgatcgggatagcagcaatgcaggtaataggcatgcaagttgacttcggaagcatgacgaagtccttccacgttggacgagcggcacaaagtgggatgcttgctgcattactcgcaaacaataactacacgatggccctcgattctctcgagggggagtatggatggttggctgtcgtgagtaaggataataatgtgactgattatttcgatcagttgggtgatatctgggagacggagaagaacaccttcaagccctacccgtgtggcattgtgcttcatcctgctattaatgcggcggtgaatctgcataatgagacgattgcgcaggggaaggatattgagagcgtaaagagcattattgttgaaggtaattcggaagtgttggttttgacaggtaagacggatcccaaatcaggcctcgagggcaagttcagcgtttaccatgcggtcggcattgcatatcttgaaggcaagatgacaccgtcgcagttcaccgacgaagcggtcacgaataaaacagttatcgagtatagaaagaaggtcaacttcacagcggacgacgacaagttcagcaaggatcaggctacggttacggtggagtttgaggatggcagcacgctgtctagtcacattgagcatgctcttggtagtatagagaatccgctttcggctgcgcagttgaagactaagtttatggatcaggttacgttgcagattggggagaagagggcggaaagggcttatgctgcgtttacggaggttgggaaattgtcagatgttggggtgctacgaactctttattag

SEQ ID NO: 22030 - protein, 451 aa, Muscodor strobelii
  misc_feature: SGI Peptide ID NO. 567470
  misc_feature (1)..(447): Pfam Id: PF03972 Pfam Desc: MmgE/PrpD family
  misc_feature (1)..(445): NCBI GI: 115386810 Blast Desc: conserved [Aspergillus terreus NIH2624] gi|114190944|gb|EAU32644.1| conserved [Aspergillus terreus NIH2624]
  misc_feature (1)..(451): NCBI GI: 46109818 Blast Desc: FG01791.1 [Gibberella zeae PH-1]
  misc_feature (1)..(451): NCBI GI: 169623789 Blast Desc: SNOG_15138 [Phaeosphaeria nodorum SN15] gi|160705048|gb|EAT77363.2| SNOG_15138 [Phaeosphaeria nodorum SN15]
  misc_feature (1)..(429): NCBI GI: 145234462 Blast Desc: An02g14730 [Aspergillus niger] gi|134057548|emb|CAK48902.1| protein product [Aspergillus niger]
  misc_feature (1)..(429): NCBI GI: 115399114 Blast Desc: [Aspergillus terreus NIH2624] gi|114192029|gb|EAU33729.1| [Aspergillus terreus NIH2624]
  misc_feature (1)..(435): NCBI GI: 154297612 Blast Desc: BC1G_12651 [Botryotinia fuckeliana B05.10] gi|150858474|gb|EDN33666.1| BC1G_12651 [Botryotinia fuckeliana B05.10]
  misc_feature (3)..(415): NCBI GI: 148260271 Blast Desc: MmgE/PrpD family protein [Acidiphilium cryptum JF-5] gi|146401952|gb|ABQ30479.1| MmgE/PrpD family protein [Acidiphilium cryptum JF-5]
  misc_feature (3)..(429): NCBI GI: 89067653 Blast Desc: OG2516_00589 [Oceanicola granulosus HTCC2516] gi|89046623|gb|EAR52678.1| OG2516_00589 [Oceanicola granulosus HTCC2516]
  misc_feature (3)..(445): NCBI GI: 170739212 Blast Desc: MmgE/PrpD family protein [Methylobacterium sp. 4-46] gi|168193486|gb|ACA15433.1| MmgE/PrpD family protein [Methylobacterium sp. 4-46]
  misc_feature (3)..(445): NCBI GI: 220921361 Blast Desc: MmgE/PrpD family protein [Methylobacterium nodulans ORS 2060] gi|219945967|gb|ACL56359.1| MmgE/PrpD family protein [Methylobacterium nodulans ORS 2060]
  misc_feature (77)..(446): SWISSPROT Homolog: EC 4.2.1.79 2-methylcitrate dehydratase
MATLQLATWATNLTYSNLPAPVIDQAIKSIYNWAGCAIGGQAQSAPHIAHLTYQPFSGSATSSILGSNGSIENSFADPQHAAFINGIASHIDDYDDTHLETIIHPAGPIASALFAVAEWKAPVTGHEFLTAFVAGIETECKLGLGVWPYHYDIGWHITSTTGSIGAAVAVGKLLDLNTERMCAAIGIAAMQVIGMQVDFGSMTKSFHVGRAAQSGMLAALLANNNYTMALDSLEGEYGWLAVVSKDNNVTDYFDQLGDIWETEKNTFKPYPCGIVLHPAINAAVNLHNETIAQGKDIESVKSIIVEGNSEVLVLTGKTDPKSGLEGKFSVYHAVGIAYLEGKMTPSQFTDEAVTNKTVIEYRKKVNFTADDDKFSKDQATVTVEFEDGSTLSSHIEHALGSIENPLSAAQLKTKFMDQVTLQIGEKRAERAYAAFTEVGKLSDVGVLRTLY

SEQ ID NO: 22031 - DNA, 1532 bp, Muscodor strobelii
  misc_feature: SGI EST ID NO. CUFF.51777.0
  misc_feature: Variant of the nucleotide sequence at SEQ ID NO 22029
cacatatcgacgattatgacgacacgcatctcgagaccatcattcacccggcgggacccattgctagtgctctcttcgcagtcgcagaatggaaagcccctgttacggggcatgagttcctgactgcgttcgtagcgggtatagagaccgagtgcaagctgggattaggtgtttggccttaccactacgacataggatggcacattacctctaccaccggctcgatcggtgccgcggtagcagttgggaaattactcgacctgaacaccgagagaatgtgcgccgcgatcgggatagcagcaatgcaggtaataggcatgcaagttgacttcggaagcatgacgaagtccttccacgttggacgagcggcacaaagtgggatgcttgctgcattactcgcaaacaataactacacgatggccctcgattctctcgagggggagtatggatggttggctgtcgtgagtaaggataataatgtgactgattatttcgatcagttgggtgatatctgggagacggagaagaacaccttcaagccctacccgtgtggcattgtgcttcatcctgctattaatgcggcggtgaatctgcataatgagacgattgcgcaggggaaggatattgagagcgtaaagagcattattgttgaaggtaattcggaagtgttggttttgacaggtaagacggatcccaaatcaggcctcgagggcaagttcagcgtttaccatgcggtcggcattgcatatcttgaaggcaagatgacaccgtcgcagttcaccgacgaagcggtcacgaataaaacagttatcgagtatagaaagaaggtcaacttcacagcggacgacgacaagttcagcaaggatcaggctacggttacggtggagtttgaggatggcagcacgctgtctagtcacattgagcatgctcttggtagtatagagaatccgctttcggctgcgcagttgaagactaagtttatggatcaggttacgttgcagattggggagaagagggcggaaagggcttatgctgcgtttacggaggttgggaaattgtcagatgttggggtgctacgaactctttattagatttgttagtatgtatattataattacaggttactgggttccacgagacatggttcgaatctcacgaacgtgtgactgacgactatttatgtcttcaatagttttgactgtttccttgatatgataggccgggagcattgctacaaaaacctgtgatgtcgtccaactagagcttagttgcgatcgtctcttattgataccacttgccctcgattggtatggtgatatgatctgcttcgacgccgaacccgagtaagtcatagtcatgtcgatgataccattcaggcggcatgggaaggacaccccatcgcaccttgcttctcgcaatattttgcaactgagtgagctcttcatcctccacgcgatctttcaaatggcgttcaggtgcagctaatgctgacatgacactcaattcgttgaatctctcgtcgtaggcttttg

SEQ ID NO: 22032 - DNA, 762 bp, Muscodor strobelii
  misc_feature: SGI cDNA ID NO. 567471
  misc_feature: Encodes the peptide sequence at SEQ ID NO 22033
atggcgagatcaccgtcaccggctagcgacttctatacctcgcccagtcttggcaacaagttttcttctctttgccattgctctttttctctgcgtttcgctaataatagcgatacaactcgttggaagactgtcccttacaagtacagttcgccactcattaccctctcggcgactctgcattggctagtcgcaaataccctctacgccactgtgtctgaaggcggatatttcctgacaggcttcgaggaccctagccttcccaacacgaatacatccacatttgtcggttattctcccaaatacctagtcgcactaactgccgttgctagtgttgcaatcggtatccctgtggcgttgagtttcaagcgcctttcgccaagcgccattgtggttgggaccaactccttgctgatttcactcgcgtgtcgtgtatcgccttcaatattgcttgatcgaaagcacgattctagtgagcatctcgagccgcctcacaagccaaactctgagacaaaagcctacgacgagagattcaacgaattgagtgtcatgtcagcattagctgcacctgaacgccatttgaaagatcgcgtggaggatgaagagctcactcagttgcaaaatattgcgagaagcaaggtgcgatggggtgtccttcccatgccgcctgaatggtatcatcgacatgactatgacttactcgggttcggcgtcgaagcagatcatatcaccataccaatcgagggcaagtggtatcaataa

SEQ ID NO: 22033 - protein, 253 aa, Muscodor strobelii
  misc_feature: SGI Peptide ID NO. 567471
  misc_feature (45)..(251): NCBI GI: 119174062 Blast Desc: CIMG_09013 [Coccidioides immitis RS]
  misc_feature (45)..(252): NCBI GI: 46139873 Blast Desc: FG11451.1 [Gibberella zeae PH-1]
  misc_feature (45)..(252): NCBI GI: 46115234 Blast Desc: FG03459.1 [Gibberella zeae PH-1]
  misc_feature (45)..(239): NCBI GI: 149210697 Blast Desc: MGCH7_ch7g821 [Magnaporthe grisea 70-15] gi|86196776|gb|EAQ71414.1| MGCH7_ch7g821 [Magnaporthe grisea 70-15]
  misc_feature (45)..(239): NCBI GI: 145609738 Blast Desc: MGG_03033 [Magnaporthe grisea 70-15] gi|145017127|gb|EDK01490.1| MGG_03033 [Magnaporthe grisea 70-15]
  misc_feature (39)..(148): NCBI GI: 169767150 Blast Desc: [Aspergillus oryzae RIB40] gi|83765901|dbj|BAE56044.1| protein product [Aspergillus oryzae]
  misc_feature (13)..(143): NCBI GI: 255938668 Blast Desc: Pc14g01100 [Penicillium chrysogenum Wisconsin 54-1255] gi|211584725|emb|CAP74251.1| Pc14g01100 [Penicillium chrysogenum Wisconsin 54-1255]
  misc_feature (44)..(150): NCBI GI: 255940860 Blast Desc: Pc16g08800 [Penicillium chrysogenum Wisconsin 54-1255] gi|211585822|emb|CAP93550.1| Pc16g08800 [Penicillium chrysogenum Wisconsin 54-1255]
  misc_feature (45)..(252): NCBI GI: 46138143 Blast Desc: FG10586.1 [Gibberella zeae PH-1]
  misc_feature (45)..(217): NCBI GI: 256728368 Blast Desc: NECHADRAFT_54004 [Nectria haematococca mpVI 77-13-4]
MARSPSPASDFYTSPSLGNKFSSLCHCSFSLRFANNSDTTRWKTVPYKYSSPLITLSATLHWLVANTLYATVSEGGYFLTGFEDPSLPNTNTSTFVGYSPKYLVALTAVASVAIGIPVALSFKRLSPSAIVVGTNSLLISLACRVSPSILLDRKHDSSEHLEPPHKPNSETKAYDERFNELSVMSALAAPERHLKDRVEDEELTQLQNIARSKVRWGVLPMPPEWYHRHDYDLLGFGVEADHITIPIEGKWYQ

SEQ ID NO: 22034 - DNA, 251 bp, Muscodor strobelii
  misc_feature: SGI EST ID NO. CUFF.51781.0
  misc_feature: Variant of the nucleotide sequence at SEQ ID NO 22032
cgccactgtgtctgaaggcggatatttcctgacaggcttcgaggaccctagccttcccaacacgaatacatccacatttgtcggttattctcccaaatacctagtcgcactaactgccgttgctagtgttgcaatcggtatccctgtggcgttgagtttcaagcgcctttcgccaagcgccattgtggttgggaccaactccttgctgatttcactcgcgtgtcgtgtatcgccttcaatattgcttgatc

SEQ ID NO: 22035 - DNA, 606 bp, Muscodor strobelii
  misc_feature: SGI cDNA ID NO. 567472
  misc_feature: Reduced expression when VOC is produced
  misc_feature: Encodes the peptide sequence at SEQ ID NO 22036
atggacttggcactagtcactattctctgcggcgaagagggctggtattattatcaagatggacaatatctcaaatttaatagtgacggaacgggtgagctacaatgtcgatgtgagcttgtcctcttcatctgggctagattcaattggaggcaaacaggaccagtgaccaggacacctgaggctccaaagcgcaacgcaccacagctccttggtgagctatcgttagagataacactcgctaaggaattgcctgactgggtgccagcaaaggcaaagaaagactatgcaacagtaaatgataggcagctgtacgacaatgccttcaacccaaaagtgttcaaaatcagagtggaaactgggcacttcatggaacctgcttacctcgattcggttcgagctacacgatattccatgcgtttaatcttcgatacatcgccgtatcctcctcggtcggattggagagagccggctggtggccctgatagcaatagattttggaaccaagttgagttcgtgggtcgcaagacacaagaattagaaagtcaagggagagcaatgaacgatacttcaccgcgacgatgggatgaatgcgttgtatcatag

SEQ ID NO: 22036 - protein, 201 aa, Muscodor strobelii
  misc_feature: SGI Peptide ID NO. 567472
  misc_feature (5)..(162): NCBI GI: 145244162 Blast Desc: An11g05990 [Aspergillus niger] gi|134079273|emb|CAK40755.1| [Aspergillus niger]
  misc_feature (6)..(179): NCBI GI: 169846232 Blast Desc: [Coprinopsis cinerea okayama7#130] gi|116509159|gb|EAU92054.1| [Coprinopsis cinerea okayama7#130]
  misc_feature (6)..(154): NCBI GI: 169846277 Blast Desc: [Coprinopsis cinerea okayama7#130] gi|116509043|gb|EAU91938.1| [Coprinopsis cinerea okayama7#130]
  misc_feature (6)..(179): NCBI GI: 169846196 Blast Desc: [Coprinopsis cinerea okayama7#130] gi|116509141|gb|EAU92036.1| [Coprinopsis cinerea okayama7#130]
  misc_feature (42)..(155): NCBI GI: 238837936 Blast Desc: conserved [Microsporum canis CBS 113480]
  misc_feature (39)..(155): NCBI GI: 238845989 Blast Desc: conserved [Microsporum canis CBS 113480]
  misc_feature: Useful for introducing or modulating the production of volatile compounds
MDLALVTILCGEEGWYYYQDGQYLKFNSDGTGELQCRCELVLFIWARFNWRQTGPVTRTPEAPKRNAPQLLGELSLEITLAKELPDWVPAKAKKDYATVNDRQLYDNAFNPKVFKIRVETGHFMEPAYLDSVRATRYSMRLIFDTSPYPPRSDWREPAGGPDSNRFWNQVEFVGRKTQELESQGRAMNDTSPRRWDECVVS

SEQ ID NO: 22037 - DNA, 1089 bp, Muscodor strobelii
  misc_feature: SGI EST ID NO. CUFF.51808.0
  misc_feature: Variant of the nucleotide sequence at SEQ ID NO 22035
tgccacgttcccgatgtcttcctaggcaccatcttaaacaatgaacagatattctctacgaccgatttttaagcctgtcggaagttattgatcgctttgagttgattcattgtttaatacttattatcctacccttttttcatccatcactcgtcctgagttggcgtcgtattgacagacgactgctgattagttatcttcactccgacatggacttggcactagtcactattctctgcggcgaagagggctggtattattatcaagatggacaatatctcaaatttaatagtgacggaacgggtgagctacaatgtcgatgtgagcttgtcctcttcatctgggctagattcaattggaggcaaacaggaccagtgaccaggacacctgaggctccaaagcgcaacgcaccacagctccttggtgagctatcgttagagataacactcgctaaggaattgcctgactgggtgccagcaaaggcaaagaaagactatgcaacagtaaatgataggcagctgtacgacaatgccttcaacccaaaagtgttcaaaatcagagtggaaactgggcacttcatggaacctgcttacctcgattcggttcgagctacacgatattccatgcgtttaatcttcgatacatcgccgtatcctcctcggtcggattggagagagccggctggtggccctgatagcaatagattttggaaccaagttgagttcgtgggtcgcaagacacaagaattagaaagtcaagggagagcaatgaacgatacttcaccgcgacgatgggatgaatgcgttgtatcatagaatgtacgtatacaggccctgtatcaccggagttttatgaagacctcgcaaaaactaacattgcatgcgcaaggttttcctcgggatcagccacgcttacggacgctgagcaatagccccaacggccgcattttctgtaacattaccattgcaatcgtcactaggtactctaatacacggtcaaagactttgagtgagctcttacacgctatgatctttgctgtgtcgtgaatgacgtgctgtgccttagccagtccaccgcatcgcaatggcg

SEQ ID NO: 22038 - DNA, 1599 bp, Muscodor strobelii
  misc_feature: SGI cDNA ID NO. 567473
  misc_feature: Reduced expression when VOC is produced
  misc_feature: Encodes the peptide sequence at SEQ ID NO 22039
atgggtgccaaccaatcaaataaccatcgccggtgcgacctcatggcctaccaagacggattgcgagacgaacttggagtagcagaacaaatcctcgaagagttcctctcgatgatttgtattgatctgcacgaagccgacgaacaaccgttattccgcttacagcgtgagattgcaagatctcagacccctggatggggcccaatacccggagacgattttaaccacactgatttcccatctgatcctaccgcctggtctgcacaggtgcgactgacagggctgggtgaaatctgccctgatggactggaaatttcgacttctgtcatccccgatcctgccggtgatcatcctaagggagcactacagtatacacgggatatcatcacatcgtacatacgcactatgtggccagttggtagccgaagttcggggccggtatcaaagcctatgggcatagtggtagacggagtcattccgcgccctatcattcacgacttaacctcaaccgccaaccactcgccaaatgactttcttagctttaagcaagtcgcaaatacctggtgcttcaaccctcacaagacttacgagacattttcctttgcaacgatcgcagccatcttaagcctcatggcattgccgaataagtcgccacaggggtcttcggcaatggattgtgatgatcaagatctgacctggacgatcgatacaattcaaacgttctgtcgcacgcaattaccgtcggaagcggtgcgagacttgtcgttctcacttggcacctgctacgatccttggttgtatctgtctttcacttttgttggcatcataccaatcggccaaggaccagaaattccgaaaggagtcaacgacaatcttgggtctgggctactgtgcagtcgtcgcgagtttcatatcccagttttcggtcagttccgagaatatcgaagctccatcatctcacgactttgtgcaggatacgagaatactacgccgactacgccgcagccattcgttgtcaacgtcatacttgtagacgaaggccatcacagattccgacccgaccatgatctctcccagaagttatcaaggtcttgtagcggcagggggatagatggcgttctgctctttcagttcgcgctagtagatcttgttgacgcatgggtagctaattgggatgactgtttgaaaaaggtggaagattgctttgaaggcaggatagttgtcgagtattttgacaaaatgctgaaccaacctgaccatgtcgcaaacatgaaagtcgaggatcgccactcccggttcggtatgctatgcaatatgacacagtttctagacaccttggagaaatacatttcagtggggtcgcaatgtcttcaacgcatgatacagacctggacacgggcatatcatgctaatggcgccgaggaacacgttcgcttcaccagagacgacctgagaacattagaagacaactggaatgaaattgtttggtgggctgaatgccggaaagaacgctttctggaccgtttttcagacgatccagaggtagaggaggcggctcgggctttgatcgatcttggcatcgaggatgataaagaataa

SEQ ID NO: 22039 - protein, 532 aa, Muscodor strobelii
  misc_feature: SGI Peptide ID NO. 567473
  misc_feature: Useful for introducing or modulating the production of volatile compounds
MGANQSNNHRRCDLMAYQDGLRDELGVAEQILEEFLSMICIDLHEADEQPLFRLQREIARSQTPGWGPIPGDDFNHTDFPSDPTAWSAQVRLTGLGEICPDGLEISTSVIPDPAGDHPKGALQYTRDIITSYIRTMWPVGSRSSGPVSKPMGIVVDGVIPRPIIHDLTSTANHSPNDFLSFKQVANTWCFNPHKTYETFSFATIAAILSLMALPNKSPQGSSAMDCDDQDLTWTIDTIQTFCRTQLPSEAVRDLSFSLGTCYDPWLYLSFTFVGIIPIGQGPEIPKGVNDNLGSGLLCSRREFHIPVFGQFREYRSSIISRLCAGYENTTPTTPQPFVVNVILVDEGHHRFRPDHDLSQKLSRSCSGRGIDGVLLFQFALVDLVDAWVANWDDCLKKVEDCFEGRIVVEYFDKMLNQPDHVANMKVEDRHSRFGMLCNMTQFLDTLEKYISVGSQCLQRMIQTWTRAYHANGAEEHVRFTRDDLRTLEDNWNEIVWWAECRKERFLDRFSDDPEVEEAARALIDLGIEDDKE

SEQ ID NO: 22040 - DNA, 7858 bp, Muscodor strobelii
  misc_feature: SGI EST ID NO. CUFF.52708.0
  misc_feature: Variant of the nucleotide sequence at SEQ ID NO 22038
ccggtttgtaagtcgctcgattgagaaccatcctatataaacaagtagtacatattccttgggcatggaatcgcctacaattcacgcttgcacttgaaggaattgtcatgttgcgcttcagtcttgagtcgggggcgagggaggcctggacgccgaaggtgaaaagtgcctaggagaggctgcgcacactgcggtatgacgctgatttagggggcagtgcgtgcttctccgatttgtccttagatttggaacacaatatcgttgtcttcgataatttcccttgacgtcgcgtaagctctcctgcgatcatgatgcctaactacaacctagaaagtttcctttaaggtgcaactgcgtgctgggccaacaccatacttcttgcatgggctgtggtgaccatgggtgcctctgcgacgctctccaatacctacatcagtgatgagatcgctgcacaatcgtacaagtccacacttggcagattgaggacagaattcgcagatgattccaagtcgctcaagatcttaacatcattacagacaactgaagatctccagtttagcctcgaaaatctgaagacggaatgtcaggggacgggcaaaaaacgagatgccgctctgcattggctcaataggatttcaaggggcgtcatctactatgaaagagtcctcgacgcactcgcccagcatcatgcggaatacgtcagtctcgtatggggagccatgaagttcgttctaactggtatcattaattacgccgaactagttgagaagtttggtgcagcatttgtcgagattggtgacatactcaatgacatcaaacaggatgtgcatcttcacgaaacaacgcgcatcttgcatgtctacgctgacctgtactgtcacatcacagagttcattttccgggctgttcggtggtacaagcgccatgggataggcagagctgttcaggccctcgttagtccttgggagctgaaatacagggatgtgttgacgaagatccgggcttgcgccaataccatcaacagcttatctggttccgagtcgcgactggaaatccgacagataaatgaaaatgtgcgcagcttgcaatcggattaccaacaccttagagatgctgtcgatgatatccaaagccgtcttggtgtcaatgcgacggtcatggatgagattatgaaaactgttgcagctaacaagtcgatcacagagcgcgtcaactttcacgttgaagaagtgaagcccagtatctatgcgattgaggcgcggctgcaaagtctaattgagggtggctatgatcagaacctggcgttacagaaggcgcaagcagctactatacggcgacaagcgtgctttccatcgcagcttccaatacgactgatctcaagcatcagcaggtggtttgagagtccaaatcagccgttgctcgttattggatcgtcttcgagagcgcgtgactccgctaaggatctctctgttcacacgatagcacagcttaagaatgcgaagctgaaggtcctctgggtgttccaatatcacgttacaggaagtccatcagattgcgtgatgaacgtcttaaaatcacttatctatcagattgcagcccgtcacccccagactacgatgaaatttccccggccgataaacacgtcagatggatcggcctctactgtacatgaacttcgtgatctcttggcagcgttgctcaaccaatttggcagttcgtttattatcgtcaagtctcagtacgcaaaagatccggagatcgacaagcaaatcctcgaatctctgaaagaaatcacacactctgtcaatcaatatggtactgtcaaagtgaaagttgtgttcctgggcaacggtgatgcatcaacaagtcgtcgggaagaaagtggccgtcgatactcaacaaacgatacattaatattaagacttgggccaccacagccgattccacctcgactgaggcgggcaagacggaacttagccggccctcagatcgtgcggtctgggaagatacgggtataagtcgacgcacccgagtctggagacctattttcgattggccatctcgaacccgggaggagaagtcgcatgctagaaaaagagcatgatttggtcctgtgtcatgatctcggcatgcaacctacggtacttagtgtatcggatggatattgcgactgacgacgtcaagaatgtagcagccactactctctcaacccgataccaatgcagtgaataaaccgcctaagcagcaaactcatttttcttgcttacagtgacagtaagatgaggattacataccgaaatgcagcttgtaaggcacagtatatttcctgttgctagcagtacttccaagcggccccaaccgatatgcactgtacggcacacagccatggagatgacgtcaccctcgccgcgactcgtcacacttccgtggctttcatttccatgattttcattgacaacagaacaactttgcatctctttgtcctactttctgcatatttgcaattgccattgtgcgtttctcaccaaactttgcgctccatctcaatcaccccgatctgtcaaacaaagcaacaatggcacctacagagaccgacaaccaagcacccgcgaacgcccccgacaccgagcagagactgtcaacgcagggagagatgcaggagatttctttgcagcctatggcatcgcagcccatggatcccaaacacccacatgaagattctcagatggggttgcgcggtggtgacagaggcggctgctgcccgggccgtttctgcttctgcatcccgtgcccgttgccttgcgacttctgtattatttagggtcgcatttcttcgattgggtggataacatcatggtgcttcggacggcgtggactagagcggcatatatagtaggatgttcggcgcgggtatccggcgtttcacaatagtacgagcgacgatctacattgatcttttgtgttagatggcagtgcgattttaatcatcttcatatcattatgatattgatattcctgcaactgatgtccctacccgacctgccaacatgaagatctcaactccgacccaatgcaagttcccgtgatgccgaccaagacaagcccaaaatattgcacgcaaccgctatcacttaattcttaaaacggccttaccgaagttatcaccgttcagcataccaacgaagccctccgccgcgttatcgatcccctccgtgaaatgcaaccgaggcttgaaagaaccatctgcaatccacttggacatagtatccagatgctcctggaaatacacatcacggtagccaggccggccttgaatgaatccaataacctcaagagactttgagacgatcatgaacgagttcgtgacaccgtagcgcttttccggaggcaaattgtattggctgatctgtggagagtcagcgcgaccgcaatgaaagtcagggtaaataatgcaaggggtcttaccatgccgcagacagggatacggccatacgtgttcatgttctcgattgcagcttcgaagtgctcgcctccaacattctcaaagtaaatatcaagtccttgcggcgctaggcgcgcaagcgcctctttagggctctccttcttgtaattgaaacccgagtcgaatcctaattcattgatgatgaagtccagcttttcgtcagaaccgacggacccgatgacagtcaacccctcatgtttagcaatttgccccactacctggcctacggcgccagcggccgagctgataaaaatcgtctcgccttttttgggcttgccaatcttgtacagtcctgaccatgctgttataccgggcattcccagaggtccgaggaataggtccgtttccaatttgtgcgggttggggattttctcggcaccaacagcagacgggtccgggatcacggcaaattgggcaatgggggcgtaaagtctaatgaggtccccaggcgcaaatttaggtgactctgatttcaacacgttcgcagtcacgctattggcgattgggccgtcaatctcgaaggccggcgaatagctctgaattttagcatcccgcatcttgcccctcaggtaggggtcataggacgctgagagaatctcgattgtaatgccgccagacggtgcggcggcatcatggtcgaagtcgcggtcctcaactgctaggtgctctccaggcaccggcactcccgccgggacttttttaaatactaaagtcttgtttccaggcatgatggcgatatcctttttggtactgttataagctcctcggttccgttacgcggatattgaatttgaatcggtgtcgattaacgagtgcacaagtgagtggaaggtggaatgtcaaatggccaaaatcattcacaaattgcacctccatgacgttagttcaattacgccaacctcggcagatgctcagctccacagcgccgatgcggttctgcatcggaacgttgaacagtttaggataacgtccgccaaacccaattataaatctctattctcagtccactacgaacctcgaaatccggcattgttaagcgaaaccgaagtcatgaagcctgaaatcttcactaatcactccgagactccgattactgatccgaattaataatcggggttgcgcgatactacctacgcctgactcgaaccaaatggctaaccggacgactatcatgaatcccgtcctatgttgaacccaaccccgttctccatggggagagatcatgttttcgacactcacttgacatatcctcattcaatatcgtcaacgccatcctttcctagggattgggagcattttgctactattaaccaagtctgactgcctaagctaagaaatcataaggcgcgttcgacccgacaacgtttgcattgacacgtgctgcggctgcaaatttatcatcaagaatttgcttcttctaatgggtgaattctcagaagatatggctgaagtacaggaccactattgcacggtacgtaaggatcgtcgcacggtggatttcgtcgactatattgtgtgtcccgcaggcgacaacaaaacaaatggcacaattacgcctacccaccacatctactagccccagcaacatatctctacaacagcatcaatgcgaaactggagctgcgcatgtatatcgagattattcgtgagcggattcggttcttaagtcagaccatcattataagattagtcgattttaattcgttatctccacgtcgttcggttgtgccatttattttgacgcctggctggtagggaatcgcaccggcaaagattcttgcccactattgtagtgcgaataactcccaaatggagtcatgattatgatggtgtcgccttttactgtgttcccttcaatttggaactgcgcagtcaaagaacaatcgagcaagctccaatgaacgacatgaacatatggtatcagtgacaatagatgacggcaggtggccaccgttctctgaccagcctgcctctggcgacttcccttatgagacgtttgagcattccggcttcgaccaaggtcctcaaggccgggcagtatatagaatcggtaaagggctacttgtcataccgtatccgtttcgtagctagtggaaggaacgagacaatggctcgaggtcattaccgccgcagcggtaggtcctacgttcgcgaggcaggggcaactaaatgaatgaaacaaccgtgcgttattatgctcaactcatctacaagcatctaacacaccatgtgttgcccttgttatggcaaataggcatatgttgtgtatgaatcgctttcttattcctgcgcagcattaaaaaggacagacttttgagatatttccatgaagcatcacctgtgttcatcatgggtgccaaccaatcaaataaccatcgccggtgcgacctcatggcctaccaagacggattgcgagacgaacttggagtagcagaacaaatcctcgaagagttcctctcgatgatttgtattgatctgcacgaagccgacgaacaaccgttattccgcttacagcgtgagattgcaagatctcagacccctggatggggcccaatacccggagacgattttaaccacactgatttcccatctgatcctaccgcctggtctgcacaggtgcgactgacagggctgggtgaaatctgccctgatggactggaaatttcgacttctgtcatccccgatcctgccggtgatcatcctaagggagcactacagtatacacgggatatcatcacatcgtacatacgcactatgtggccagttggtagccgaagttcggtttgtcgcgggaccccgtcccacaatcctggagaattcctttggccggaacataggattttgacctctatgctatatgtggtcaatataaatgaagtctgtgtgcaaaaaatgggaggctttagatacaccggcgaccaagggccggtatcaaagcctatgggcatagtggtagacggagtcattccgcgccctatcattcacgacttaacctcaaccgccaaccactcgccaaatgactttcttagctttaagcaagtcgcaaatacctggtgcttcaaccctcacaagacttacgagacattttcctttgcaacgatcgcagccatcttaagcctcatggcattgccgaataagtcgccacaggggtcttcggcaatggattgtgatgatcaagatctgacctggacgatcgatacaattcaaacgttctgtcgcacgcaattaccgtcggaagcggtgcgagacttgtcgttctcacttggcacctgctacgatccttggttgtatctgtctttcacttttgttggcatcataccaatcggccaaggaccagaaattccgaaaggagtcaacgacaatcttgggtctgggctactgtgcagtcgtcgcgagtttcatatcccagttttcggtcagttccgagaatatcgaagctccatcatctcacgactttgtgcaggatacgagaatactacgccgactacgccgcagccattcgttgtcaacgtcatacttgtagacgaaggccatcacagattccgacccgaccatgatctctcccagaagttatcaaggtcttgtagcggcagggggatagatggcgttctgctctttcagttcgcgctagtagatcttgttgacgcatgggtagctaattgggatgactgtttgaaaaaggtggaagattgctttgaaggcaggatagttgtcgaggtatggctaatgtccagctcatcctatgagatatcactgacagtagcagtattttgacaaaatgctgaaccaacctgaccatgtcgcaaacatgaaagtcgaggatcgccactcccggttcggtatgctatgcaatatgacacagtttctagacaccttggagaaatacatttcagtggggtcgcaatgtcttcaacgcatgatacagacctggacacgggcatatcatgctaatggcgccgaggaacacgttcgcttcaccagagacgacctgagaacattagaagacaactggaatgaaattgtttggtgggctgaatgccggaaagaacgctttctggaccgtttgtaggccaaacagcggcaagtccttcgataccggtcagctctacatcaaaaccgtccattgcacagttcagacgatccagaggtagaggaggcggctcgggctttgatcgatcttggcatcgaggatgataaagaataaaatggattagaggtgcgattaaccaacgacatcaactcatcggctattgtgcaataatggttctcacattacatgattaaggacgcggtagatagcctgtaatcatcacgagaggtggaggtagatagaatgcgagaaagaacaaaatcgcg

SEQ ID NO: 22041 - DNA, 1044 bp, Muscodor strobelii
  misc_feature: SGI cDNA ID NO. 567474
  misc_feature: Reduced expression when VOC is produced
  misc_feature: Encodes the peptide sequence at SEQ ID NO 22042
atgcctggaaacaagactttagtatttaaaaaagtcccggcgggagtgccggtgcctggagagcacctagcagttgaggaccgcgacttcgaccatgatgccgccgcaccgtctggcggcattacaatcgagattctctcagcgtcctatgacccctacctgaggggcaagatgcgggatgctaaaattcagagctattcgccggccttcgagattgacggcccaatcgccaatagcgtgactgcgaacgtgttgaaatcagagtcacctaaatttgcgcctggggacctcattagactttacgcccccattgcccaatttgccgtgatcccggacccgtctgctgttggtgccgagaaaatccccaacccgcacaaattggaaacggacctattcctcggacctctgggaatgcccggtataacagcatggtcaggactgtacaagattggcaagcccaaaaaaggcgagacgatttttatcagctcggccgctggcgccgtaggccaggtagtggggcaaattgctaaacatgaggggttgactgtcatcgggtccgtcggttctgacgaaaagctggacttcatcatcaatgaattaggattcgactcgggtttcaattacaagaaggagagccctaaagaggcgcttgcgcgcctagcgccgcaaggacttgatatttactttgagaatgttggaggcgagcacttcgaagctgcaatcgagaacatgaacacgtatggccgtatccctgtctgcggcatgatcagccaatacaatttgcctccggaaaagcgctacggtgtcacgaactcgttcatgatcgtctcaaagtctcttgaggttattggattcattcaaggccggcctggctaccgtgatgtgtatttccaggagcatctggatactatgtccaagtggattgcagatggttctttcaagcctcggttgcatttcacggaggggatcgataacgcggcggagggcttcgttggtatgctgaacggtgataacttcggtaaggccgttttaagaattaagtga

SEQ ID NO: 22042 - protein, 347 aa, Muscodor strobelii
  misc_feature: SGI Peptide ID NO. 567474
  misc_feature (155)..(302): Pfam Id: PF00107 Pfam Desc: Zinc-binding dehydrogenase
  misc_feature (1)..(346): NCBI GI: 256732407 Blast Desc: NECHADRAFT_61516 [Nectria haematococca mpVI 77-13-4]
  misc_feature (1)..(347): NCBI GI: 46105044 Blast Desc: FG00150.1 [Gibberella zeae PH-1]
  misc_feature (4)..(347): NCBI GI: 116179324 Blast Desc: CHGG_00290 [Chaetomium globosum CBS 148.51] gi|88184587|gb|EAQ92055.1| CHGG_00290 [Chaetomium globosum CBS 148.51]
  misc_feature (4)..(347): NCBI GI: 85091612 Blast Desc: NCU09040 [Neurospora crassa OR74A] gi|28920381|gb|EAA29751.1| conserved [Neurospora crassa OR74A]
  misc_feature (4)..(347): NCBI GI: 171678962 Blast Desc: protein product [Podospora anserina] gi|170937552|emb|CAP62209.1| protein product [Podospora anserina]
  misc_feature (4)..(346): NCBI GI: 238844091 Blast Desc: NADP-dependent leukotriene B4 12-hydroxydehydrogenase [Microsporum canis CBS 113480]
  misc_feature (4)..(346): NCBI GI: 119186175 Blast Desc: CIMG_03135 [Coccidioides immitis RS]
  misc_feature (4)..(346): NCBI GI: 240108670 Blast Desc: alcohol dehydrogenase, [Coccidioides posadasii C735 delta SOWgp]
  misc_feature (4)..(347): NCBI GI: 225677591 Blast Desc: NADP-dependent leukotriene B4 12-hydroxydehydrogenase [Paracoccidioides brasiliensis Pb03]
  misc_feature (4)..(347): NCBI GI: 226295266 Blast Desc: NADP-dependent leukotriene B4 12-hydroxydehydrogenase [Paracoccidioides brasiliensis Pb18]
  misc_feature (1)..(346): SWISSPROT Homolog: EC 1.3.1.74 2-alkenal reductase
  misc_feature: Useful for introducing or modulating the production of volatile compounds
MPGNKTLVFKKVPAGVPVPGEHLAVEDRDFDHDAAAPSGGITIEILSASYDPYLRGKMRDAKIQSYSPAFEIDGPIANSVTANVLKSESPKFAPGDLIRLYAPIAQFAVIPDPSAVGAEKIPNPHKLETDLFLGPLGMPGITAWSGLYKIGKPKKGETIFISSAAGAVGQVVGQIAKHEGLTVIGSVGSDEKLDFIINELGFDSGFNYKKESPKEALARLAPQGLDIYFENVGGEHFEAAIENMNTYGRIPVCGMISQYNLPPEKRYGVTNSFMIVSKSLEVIGFIQGRPGYRDVYFQEHLDTMSKWIADGSFKPRLHFTEGIDNAAEGFVGMLNGDNFGKAVLRIK

SEQ ID NO: 22043 - DNA, 6017 bp, Muscodor strobelii
  misc_feature: SGI EST ID NO. CUFF.52707.3
  misc_feature: Variant of the nucleotide sequence at SEQ ID NO 22041
caggattgtgggacggggtcccgcgacaaaccgaacttcggctaccaactggccacatagtgcgtatgtacgatgtgatgatatcccgtgtatactgtagtgctcccttaggatgatcaccggcaggatcggggatgacagaagtcgaaatttccagtccatcagggcagatttcacccagccctgtcagtcgcacctgtgcagaccaggcggtaggatcagatgggaaatcagtgtggttaaaatcgtctccgggtattgggccccatccaggggtctgagatcttgcaatctcacgctgtaagcggaataacggttgttcgtcggcttcgtgcagatcaatacaaatcatcgagaggaactcttcgaggatttgttctgctactccaagttcgtctcgcaatccgtcttggtaggccatgaggtcgcaccggcgatggttatttgattggttggcacccatgatgaacacaggtgatgcttcatggaaatatctcaaaagtctgtcctttttaatgctgcgcaggaataagaaagcgattcatacacaacatatgcctatttgccataacaagggcaacacatggtgtgttagatgcttgtagatgagttgagcataataacgcacggttgtttcattcatttagttgcccctgcctcgcgaacgtaggacctaccgctgcggcggtaatgacctcgagccattgtctcgttccttccactagctacgaaacggatacggtatgacaagtagccctttaccgattctatatactgcccggccttgaggaccttggtcgaagccggaatgctcaaacgtctcataagggaagtcgccagaggcaggctggtcagagaacggtggccacctgccgtcatctattgtcactgataccatatgttcatgtcgttcattggagcttgctcgattgttctttgactgcgcagttccaaattgaagggaacacagtaaaaggcgacaccatcataatcatgactccatttgggagttattcgcactacaatagtgggcaagaatctttgccggtgcgattccctaccagccaggcgtcaaaataaatggcacaaccgaacgacgtggagataacgaattaaaatcgactaatcttataatgatggtctgacttaagaaccgaatccgctcacgaataatctcgatatacatgcgcagctccagtttcgcattgatgctgttgtagagatatgttgctggggctagtagatgtggtgggtaggcgtaattgtgccatttgttttgttgtcgcctgcgggacacacaatatagtcgacgaaatccaccgtgcgacgatccttacgtaccgtgcaatagtggtcctgtacttcagccatatcttctgagaattcacccattagaagaagcaaattcttgatgataaatttgcagccgcagcacgtgtcaatgcaaacgttgtcgggtcgaacgcgccttatgatttcttagcttaggcagtcagacttggttaatagtagcaaaatgctcccaatccctaggaaaggatggcgttgacgatattgaatgaggatatgtcaagtgagtgtcgaaaacatgatctctccccatggagaacggggttgggttcaacataggacgggattcatgatagtcgtccggttagccatttggttcgagtcaggcgtaggtagtatcgcgcaaccccgattattaattcggatcagtaatcggagtctcggagtgattagtgaagatttcaggcttcatgacttcggtttcgcttaacaatgccggatttcgaggttcgtagtggactgagaatagagatttataattgggtttggcggacgttatcctaaactgttcaacgttccgatgcagaaccgcatcggcgctgtggagctgagcatctgccgaggttggcgtaattgaactaacgtcatggaggtgcaatttgtgaatgattttggccatttgactgcatactggcgtcagacggtttaccatcgtcgtcgaagcgttcttgtcgtataaaaacgcgagtggtgaaacataccattccaccttccactcacttgtgcactcgttaatcgacaccgattcaaattcaatatccgcgtaacggaaccgaggagcttataacagtaccaaaaaggatatcgccatcatgcctggaaacaagactttagtatttaaaaaagtcccggcgggagtgccggtgcctggagagcacctagcagttgaggaccgcgacttcgaccatgatgccgccgcaccgtctggcggcattacaatcgagattctctcagcgtcctatgacccctacctgaggggcaagatgcgggatgctaaaattcagagctattcgccggccttcgagattgacggcccaatcgccaatagcgtgactgcgaacgtgttgaaatcagagtcacctaaatttgcgcctggggacctcattagactttacgcccccattgcccaatttgccgtgatcccggacccgtctgctgttggtgccgagaaaatccccaacccgcacaaattggaaacggacctattcctcggacctctgggaatgcccggtataacagcatggtcaggactgtacaagattggcaagcccaaaaaaggcgagacgatttttatcagctcggccgctggcgccgtaggccaggtagtggggcaaattgctaaacatgaggggttgactgtcatcgggtccgtcggttctgacgaaaagctggacttcatcatcaatgaattaggattcgactcgggtttcaattacaagaaggagagccctaaagaggcgcttgcgcgcctagcgccgcaaggacttgatatttactttgagaatgttggaggcgagcacttcgaagctgcaatcgagaacatgaacacgtatggccgtatccctgtctgcggcatgatcagccaatacaatttgcctccggaaaagcgctacggtgtcacgaactcgttcatgatcgtctcaaagtctcttgaggttattggattcattcaaggccggcctggctaccgtgatgtgtatttccaggagcatctggatactatgtccaagtggattgcagatggttctttcaagcctcggttgcatttcacggaggggatcgataacgcggcggagggcttcgttggtatgctgaacggtgataacttcggtaaggccgttttaagaattaagtgatagcggttgcgtgcaatattttgggcttgtcttggtcggcatcacgggaacttgcattgggtcggagttgagatcttcatgttggcaggtcgggtagggacatcagttgcaggaatatcaatatcataatgatatgaagatgattaaaatcgcactgccatctaacacaaaagatcaatgtagatcgtcgctcgtactattgtgaaacgccggatacccgcgccgaacatcctactatatatgccgctctagtccacgccgtccgaagcaccatgatgttatccacccaatcgaagaaatgcgaccctaaataatacagaagtcgcaaggcaacgggcacgggatgcagaagcagaaacggcccgggcagcagccgcctctgtcaccaccgcgcaaccccatctgagaatcttcatgtgggtgtttgggatctgttatactgttagcactaatctgctgctcggtcgcgccgagttttcagtatgcgctgcataagattgcgagttgagtgattagaaacgcaggcttacccatgggctgcgatgccataggctgcaaagaaatctcctgcatctctccctgcgttgacagtctctgctcggtgtcgggggcgttcgcgggtgcttggttgtcggtctctgtaggtgccattgttgctttgtttgacagatcggggtgattgagatggagcgcaaagtttggtgagaaacgcacaatggcaattgcaaatatgcagaaagtaggacaaagagatgcaaagttgttctgttgtcaatgaaaatcatggaaatgaaagccacggaagtgtgacgagtcgcggcgagggtgacgtcatctccatggctgtgtgccgtacagtgcatatcggttggggccgcttggaagtactgctagcaacaggaaatatactgtgccttacaagctgcatttcggtatgtaatcctcatcttactgtcactgtaagcaagaaaaatgagtttgctgcttaggcggtttattcactgcattggtatcgggttgagagagtagtggctgctacattcttgacgtcgtcagtcgcaatatccatccgatacactaagtaccgtaggttgcatgccgagatcatgacacaggaccaaatcatgctctttttctagcatgcgacttctcctcccgggttcgagatggccaatcgaaaataggtctccagactcgggtgcgtcgacttatacccgtatcttcccagaccgcacgatctgagggccggctaagttccgtcttgcccgcctcagtcgaggtggaatcggctgtggtggcccaagtcttaatattaatgtatcgtttgttgagtatcgacggccactttcttcccgacgacttgttgatgcatcaccgttgcccaggaacacaactttcactttgacagtaccatattgattgacagagtgtgtgatttctttcagagattcgaggatttgcttgtcgatctccggatcttttgcgtactgagacttgacgataataaacgaactgccaaattggttgagcaacgctgccaagagatcacgaagttcatgtacagtagaggccgatccatctgacgtgtttatcggccggggaaatttcatcgtagtctgggggtgacgggctgcaatctgatagataagtgattttaagacgttcatcacgcaatctgatggacttcctgtaacgtgatattggaacacccagaggaccttcagcttcgcattcttaagctgtgctatcgtgtgaacagagagatccttagcggagtcacgcgctctcgaagacgatccaataacgagcaacggctgatttggactctcaaaccacctgctgatgcttgagatcagtcgtattggaagctgcgatggaaagcacgcttgtcgccgtatagtagctgcttgcgccttctgtaacgccaggttctgatcatagccaccctcaattagactttgcagccgcgcctcaatcgcatagatactgggcttcacttcttcaacgtgaaagttgacgcgctctgtgatcgacttgttagctgcaacagttttcataatctcatccatgaccgtcgcattgacaccaagacggctttggatatcatcgacagcatctctaaggtgttggtaatccgattgcaagctgcgcacattttcatttatctgtcggatttccagtcgcgactcggaaccagataagctgttgatggtattggcgcaagcccggatcttcgtcaacacatccctgtatttcagctcccaaggactaacgagggcctgaacagctctgcctatcccatggcgcttgtaccaccgaacagcccggaaaatgaactctgtgatgtgacagtacaggtcagcgtagacatgcaagatgcgcgttgtttcgtgaagatgcacatcctgtttgatgtcattgagtatgtcaccaatctcgacaaatgctgcaccaaacttctcaactagttcggcgtaattaatgataccctgaccgacaatgaatcagtgcacgaatcttgaaatgagatgcgataagtaggagtcgtacagttagaacgaacttcatggctccccatacgagactgacgtattccgcatgatgctgggcgagtgcgtcgaggactctttcatagtagatgacgccccttgaaatcctattgagccaatgcagagcggcatctcgttttttgcccgtcccctgacattccgtcttcagattttcgaggctaaactggagatcttcagttgtctgtaatgatgttaagatcttgagcgacttggaatcatctgcgaattctgtcctcaatct

SEQ ID NO: 22044 - DNA, 246 bp, Muscodor strobelii
  misc_feature: SGI cDNA ID NO. 567475
  misc_feature: Reduced expression when VOC is produced
  misc_feature: Encodes the peptide sequence at SEQ ID NO 22045
atggcacctacagagaccgacaaccaagcacccgcgaacgcccccgacaccgagcagagactgtcaacgcagggagagatgcaggagatttctttgcagcctatggcatcgcagcccatggatcccaaacacccacatgaagattctcagatggggttgcgcggtggtgacagaggcggctgctgcccgggccgtttctgcttctgcatcccgtgcccgttgccttgcgacttctgtattatttag

SEQ ID NO: 22045 - protein, 81 aa, Muscodor strobelii
  misc_feature: SGI Peptide ID NO. 567475
  misc_feature (4)..(81): NCBI GI: 164428300 Blast Desc: NCU05141 [Neurospora crassa OR74A] gi|157072093|gb|EAA27403.2| [Neurospora crassa OR74A]
  misc_feature (33)..(81): NCBI GI: 28881430 Blast Desc: [Neurospora crassa]
  misc_feature (26)..(81): NCBI GI: 145608020 Blast Desc: [Magnaporthe grisea 70-15] gi|145015486|gb|EDK00023.1| [Magnaporthe grisea 70-15]
  misc_feature: Useful for introducing or modulating the production of volatile compounds
MAPTETDNQAPANAPDTEQRLSTQGEMQEISLQPMASQPMDPKHPHEDSQMGLRGGDRGGCCPGRFCFCIPCPLPCDFCII

SEQ ID NO: 22046 - DNA, 7858 bp, Muscodor strobelii; identical to SEQ ID NO: 22040
  misc_feature: SGI EST ID NO. CUFF.52708.0
  misc_feature: Variant of the nucleotide sequence at SEQ ID NO 22044

SEQ ID NO: 22047 - DNA, 1620 bp, Muscodor strobelii
  misc_feature: SGI cDNA ID NO. 567476
  misc_feature: Encodes the peptide sequence at SEQ ID NO 22048
atgggtgcctctgcgacgctctccaatacctacatcagtgatgagatcgctgcacaatcgtacaagtccacacttggcagattgaggacagaattcgcagatgattccaagtcgctcaagatcttaacatcattacagacaactgaagatctccagtttagcctcgaaaatctgaagacggaatgtcaggggacgggcaaaaaacgagatgccgctctgcattggctcaataggatttcaaggggcgtcatctactatgaaagagtcctcgacgcactcgcccagcatcatgcggaatacgtcagtctcgtatggggagccatgaagttcgttctaactggtatcattaattacgccgaactagttgagaagtttggtgcagcatttgtcgagattggtgacatactcaatgacatcaaacaggatgtgcatcttcacgaaacaacgcgcatcttgcatgtctacgctgacctgtactgtcacatcacagagttcattttccgggctgttcggtggtacaagcgccatgggataggcagagctgttcaggccctcgttagtccttgggagctgaaatacagggatgtgttgacgaagatccgggcttgcgccaataccatcaacagcttatctggttccgagtcgcgactggaaatccgacagataaatgaaaatgtgcgcagcttgcaatcggattaccaacaccttagagatgctgtcgatgatatccaaagccgtcttggtgtcaatgcgacggtcatggatgagattatgaaaactgttgcagctaacaagtcgatcacagagcgcgtcaactttcacgttgaagaagtgaagcccagtatctatgcgattgaggcgcggctgcaaagtctaattgagggtggctatgatcagaacctggcgttacagaaggcgcaagcagctactatacggcgacaagcgtgctttccatcgcagcttccaatacgactgatctcaagcatcagcaggtggtttgagagtccaaatcagccgttgctcgttattggatcgtcttcgagagcgcgtgactccgctaaggatctctctgttcacacgatagcacagcttaagaatgcgaagctgaaggtcctctgggtgttccaatatcacgttacaggaagtccatcagattgcgtgatgaacgtcttaaaatcacttatctatcagattgcagcccgtcacccccagactacgatgaaatttccccggccgataaacacgtcagatggatcggcctctactgtacatgaacttcgtgatctcttggcagcgttgctcaaccaatttggcagttcgtttattatcgtcaagtctcagtacgcaaaagatccggagatcgacaagcaaatcctcgaatctctgaaagaaatcacacactctgtcaatcaatatggtactgtcaaagtgaaagttgtgttcctgggcaacggtgatgcatcaacaagtcgtcgggaagaaagtggccgtcgatactcaacaaacgatacattaatattaagacttgggccaccacagccgattccacctcgactgaggcgggcaagacggaacttagccggccctcagatcgtgcggtctgggaagatacgggtataa

SEQ ID NO: 22048 - protein, 539 aa, Muscodor strobelii
  misc_feature: SGI Peptide ID NO. 567476
  misc_feature (75)..(520): NCBI GI: 169604254 Blast Desc: SNOG_05138 [Phaeosphaeria nodorum SN15] gi|160706528|gb|EAT87529.2| SNOG_05138 [Phaeosphaeria nodorum SN15]
  misc_feature (84)..(525): NCBI GI: 189205346 Blast Desc: conserved [Pyrenophora tritici-repentis Pt-1C-BFP] gi|187986107|gb|EDU51595.1| conserved [Pyrenophora tritici-repentis Pt-1C-BFP]
  misc_feature (4)..(515): NCBI GI: 115449839 Blast Desc: [Aspergillus terreus NIH2624] gi|114187658|gb|EAU29358.1| [Aspergillus terreus NIH2624]
  misc_feature (90)..(245): NCBI GI: 171685450 Blast Desc: protein product [Podospora anserina] gi|170942686|emb|CAP68339.1| protein product [Podospora anserina]
  misc_feature (29)..(397): NCBI GI: 256726536 Blast Desc: NECHADRAFT_39343 [Nectria haematococca mpVI 77-13-4]
  misc_feature (16)..(229): NCBI GI: 145609736 Blast Desc: MGG_03034 [Magnaporthe grisea 70-15] gi|145017126|gb|EDK01489.1| MGG_03034 [Magnaporthe grisea 70-15]
  misc_feature (16)..(229): NCBI GI: 149210699 Blast Desc: MGCH7_ch7g822 [Magnaporthe grisea 70-15] gi|86196777|gb|EAQ71415.1| MGCH7_ch7g822 [Magnaporthe grisea 70-15]
  misc_feature (86)..(482): NCBI GI: 256725710 Blast Desc: NECHADRAFT_81705 [Nectria haematococca mpVI 77-13-4]
  misc_feature (132)..(414): NCBI GI: 261358383 Blast Desc: [Verticillium albo-atrum VaMs.102]
  misc_feature (45)..(207): NCBI GI: 119482337 Blast Desc: NFIA_092610 [Neosartorya fischeri NRRL 181] gi|119409351|gb|EAW19300.1| conserved [Neosartorya fischeri NRRL 181]
MGASATLSNTYISDEIAAQSYKSTLGRLRTEFADDSKSLKILTSLQTTEDLQFSLENLKTECQGTGKKRDAALHWLNRISRGVIYYERVLDALAQHHAEYVSLVWGAMKFVLTGIINYAELVEKFGAAFVEIGDILNDIKQDVHLHETTRILHVYADLYCHITEFIFRAVRWYKRHGIGRAVQALVSPWELKYRDVLTKIRACANTINSLSGSESRLEIRQINENVRSLQSDYQHLRDAVDDIQSRLGVNATVMDEIMKTVAANKSITERVNFHVEEVKPSIYAIEARLQSLIEGGYDQNLALQKAQAATIRRQACFPSQLPIRLISSISRWFESPNQPLLVIGSSSRARDSAKDLSVHTIAQLKNAKLKVLWVFQYHVTGSPSDCVMNVLKSLIYQIAARHPQTTMKFPRPINTSDGSASTVHELRDLLAALLNQFGSSFIIVKSQYAKDPEIDKQILESLKEITHSVNQYGTVKVKVVFLGNGDASTSRREESGRRYSTNDTLILRLGPPQPIPPRLRRARRNLAGPQIVRSGKIRV

SEQ ID NO: 22049 - DNA, 7858 bp, Muscodor strobelii; identical to SEQ ID NO: 22040
  misc_feature: SGI EST ID NO. CUFF.52708.0
  misc_feature: Variant of the nucleotide sequence at SEQ ID NO 22047

SEQ ID NO: 22050 - DNA, 2178 bp, Muscodor strobelii
  misc_feature: SGI cDNA ID NO. 567477
  misc_feature: Encodes the peptide sequence at SEQ ID NO 22051
atggatcaaaccgacgatcggccaagagtcgcatttctacacaaagtcttttgcgccggaggcaatcatcattccgaacacccgcacgagagttggttttgggacataccccgattatttgcaggtgatagcaaaaagagcgcgctgcgaggcaaaacaccagcagaaagcccatcatcttacattgaccgacattggggtcatagggaggaggaagatgagagtgatgatagtagtctcgcaagtgagagcgaggacgaggaagatcccgttgcagccgaagaagcacgaaaagaagcccgagaagaagcccggcaggcagaagcagttcgacacttgattattgttgtcgtggagcgttcttatgagtgtattaaatatcatgagaaggtgaagaaagatttcaagctgtcggaagctcaaccaattgcgcgcaatgtgcatcgaaaactacggccttatctctacgtattaagtgaagacgcatatgaagcggaacactacggtgagacgatgaccatttcaaatcactccttgctctcaactctccgggacatggtaaccaacacaccttactacttcacccaacctcatctacccgcgacattcatgacaccctacctacctttcttttggctacgggaacccattaagaggaaaattgcagagctggaaaatgtcacattacgagcgcagctcgtagtttttctacagcatgttcttgaagtatgcaagagtaactaccaaaaagccgatgctctattcgcggttggcaaggttaaccaggcccaattctcgaagttattcgcccctaacgagatcttggtatctgagactagtggacatcctgtcgcatacatgaacaactccgtattggtgacagagggagggcctcatcaacttaactgttggtcgtggacttttgacggaaagtttcgaagagagtcagtgaaaatacaggtcgcatggcccgctgcacagcgtggcgcaacaatagacataacaagtttgaagttctaccctttgagatttgcgaagccagagattagggacctgctagtaagacgggatcaccactcccctttggattgtaatacgctgactcgacaggcaaacccgcgatttatggttgacatgaggatgtataacgagctgcatacagaaacagacgagagcaaggccgaagagaagggaaagcatgcgcttgcagcagagttcctggataatgatgacccaccggacgagagctttgtctacctgctaccagacacggttgttggttacgggttccacgataagaaatggaaaactctacaggccgactatattacggatatacaatggcaaacagaggcattcgagcgtcttgttctcgatcagaacaagaaagatatcattcaagcgcttgtcagtgtgcacgccgatactgtcgtcctcaacgaaccaaacgacataatagagggcaaaggaaatggcctcatcctattgttacacggaagtcctggaacaggaaagaccctcaccgccgagtcaattgccgaattgactaggaagcctttatatcgagttacatgtggcgatattggagtcgagcccgagggcgtggagaagtatttggactcagtactgtacataggtacagtttggggctgtgttattcttctcgatgaagctgacgtattcttggaagagcgaacacaggcagacctacagcgtaatgcgctcgtgtctgtctttttgcgtgtcctggagtactacaacggcatcctcattctgacgacgaaccgcgttggcacattcgacgaagcgttcaagtcaagaatccagctctcgatacattatcccccactgaatttgcagagccgtgttgaaatctggctaaatttcttcagcgcgatgaaagatgacggaagtgcagatatcacgggacttaagagaaaagcggaattcctcggacgataccgcatcaatggccgacaaatacgcaatacagtgaagtctgcgaaacaactcgcttattacaagaaagagaagttgaactactctcattttgatcgagtcatcagaatagcggatgaattcgatcggtacatagaaagggctcatggagggaatacggatgaagagtgggcggttgatgcacatatacgtgcaggtgatattacacaggatgactga

SEQ ID NO: 22051 - protein, 725 aa, Muscodor strobelii
  misc_feature: SGI Peptide ID NO. 567477
  misc_feature (494)..(662): Pfam Id: PF00004 Pfam Desc: ATPase family associated with various cellular activities (AAA)
  misc_feature (494)..(616): Pfam Id: PF07728 Pfam Desc: ATPase family associated with various cellular activities (AAA)
  misc_feature (494)..(625): Pfam Id: PF00004 Pfam Desc: ATPase family associated with various cellular activities (AAA)
  misc_feature (230)..(722): NCBI GI: 46105200 Blast Desc: FG00228.1 [Gibberella zeae PH-1]
  misc_feature (370)..(717): NCBI GI: 212545829 Blast Desc: conserved [Penicillium marneffei ATCC 18224] gi|210064588|gb|EEA18683.1| conserved [Penicillium marneffei ATCC 18224]
  misc_feature (206)..(704): NCBI GI: 255932979 Blast Desc: Pc12g11420 [Penicillium chrysogenum Wisconsin 54-1255] gi|211582579|emb|CAP80769.1| Pc12g11420 [Penicillium chrysogenum Wisconsin 54-1255]
  misc_feature (206)..(717): NCBI GI: 171685452 Blast Desc: protein product [Podospora anserina] gi|170942687|emb|CAP68340.1| protein product [Podospora anserina]
  misc_feature (206)..(698): NCBI GI: 46133953 Blast Desc: FG09116.1 [Gibberella zeae PH-1]
  misc_feature (206)..(711): NCBI GI: 169619754 Blast Desc: SNOG_13075 [Phaeosphaeria nodorum SN15] gi|111058282|gb|EAT79402.1| SNOG_13075 [Phaeosphaeria nodorum SN15]
  misc_feature (230)..(717): NCBI GI: 212545270 Blast Desc: conserved [Penicillium marneffei ATCC 18224] gi|210065758|gb|EEA19852.1| conserved [Penicillium marneffei ATCC 18224]
  misc_feature (308)..(717): NCBI GI: 115449835 Blast Desc: [Aspergillus terreus NIH2624] gi|114187657|gb|EAU29357.1| [Aspergillus terreus NIH2624]
  misc_feature (407)..(717): NCBI GI: 169615523 Blast Desc: SNOG_10919 [Phaeosphaeria nodorum SN15] gi|160702979|gb|EAT81418.2| SNOG_10919 [Phaeosphaeria nodorum SN15]
  misc_feature (206)..(711): NCBI GI: 212532637 Blast Desc: conserved [Penicillium marneffei ATCC 18224] gi|210071839|gb|EEA25928.1| conserved [Penicillium marneffei ATCC 18224]
MDQTDDRPRVAFLHKVFCAGGNHHSEHPHESWFWDIPRLFAGDSKKSALRGKTPAESPSSYIDRHWGHREEEDESDDSSLASESEDEEDPVAAEEARKEAREEARQAEAVRHLIIVVVERSYECIKYHEKVKKDFKLSEAQPIARNVHRKLRPYLYVLSEDAYEAEHYGETMTISNHSLLSTLRDMVTNTPYYFTQPHLPATFMTPYLPFFWLREPIKRKIAELENVTLRAQLVVFLQHVLEVCKSNYQKADALFAVGKVNQAQFSKLFAPNEILVSETSGHPVAYMNNSVLVTEGGPHQLNCWSWTFDGKFRRESVKIQVAWPAAQRGATIDITSLKFYPLRFAKPEIRDLLVRRDHHSPLDCNTLTRQANPRFMVDMRMYNELHTETDESKAEEKGKHALAAEFLDNDDPPDESFVYLLPDTVVGYGFHDKKWKTLQADYITDIQWQTEAFERLVLDQNKKDIIQALVSVHADTVVLNEPNDIIEGKGNGLILLLHGSPGTGKTLTAESIAELTRKPLYRVTCGDIGVEPEGVEKYLDSVLYIGTVWGCVILLDEADVFLEERTQADLQRNALVSVFLRVLEYYNGILILTTNRVGTFDEAFKSRIQLSIHYPPLNLQSRVEIWLNFFSAMKDDGSADITGLKRKAEFLGRYRINGRQIRNTVKSAKQLAYYKKEKLNYSHFDRVIRIADEFDRYIERAHGGNTDEEWAVDAHIRAGDITQDD

SEQ ID NO: 22052 - DNA, 5091 bp, Muscodor strobelii
  misc_feature: SGI EST ID NO. CUFF.51878.0
  misc_feature: Variant of the nucleotide sequence at SEQ ID NO 22050
ccgagaccgtcgtgctgctctaagtccagtatcttgtcgagactcccgttcaagtcttcattgaaactttaagggccaaccgccgttatctttggtaccagtttagaattcgcctctcaagctgcccctcccccgccaatcttggggccggaaggaggacgatggatcaaaccgacgatcggccaagagtcgcatttctacacaaagtcttttgcgccggaggcaatcatcattccgaacacccgcacgagagttggttttgggacataccccgattatttgcaggtgatagcaaaaagagcgcgctgcgaggcaaaacaccagcagaaagcccatcatcttacattgaccgacattggggtcatagggaggaggaagatgagagtgatgatagtagtctcgcaagtgagagcgaggacgaggaagatcccgttgcagccgaagaagcacgaaaagaagcccgagaagaagcccggcaggcagaagcagttcgacacttgattattgttgtcgtggagcgttcttatgagtgtattaaatatcatgagaaggtgaagaaagatttcaagctgtcggaagctcaaccaattgcgcgcaatgtgcatcgaaaactacggccttatctctacgtattaagtgaagacgcatatgaagcggaacactacggtgagacgatgaccatttcaaatcactccttgctctcaactctccgggacatggtaaccaacacaccttactacttcacccaacctcatctacccgcgacattcatgacaccctacctacctttcttttggctacgggaacccattaagaggaaaattgcagagctggaaaatgtcacattacgagcgcagctcgtagtttttctacagcatgttcttgaagtatgcaagagtaactaccaaaaagccgatgctctattcgcggttggcaaggttaaccaggcccaattctcgaagttattcgcccctaacgagatcttggtatctgagactagtggacatcctgtcgcatacatgaacaactccgtattggtgacagagggagggcctcatcaacttaactgttggtcgtggacttttgacggaaagtttcgaagagagtcagtgaaaatacaggtcgcatggcccgctgcacagcgtggcgcaacaatagacataacaagtttgaagttctaccctttgagatttgcgaagccagagattagggacctgctagtaagacggggtacgcagatctggggatgtcgtcgacaggcttatgtcagctattgtgcgccgaacttgaattttgacgttcaaatggtgagatcaccactcccctttggattgtaatacgctgactcgacaggcaaacccgcgatttatggttgacatgaggatgtataacgagctgcatacagaaacagacgagagcaaggccgaagagaagggaaagcatgcgcttgcagcagagttcctggataatgatgacccaccggacgagagctttgtctacctgctaccagacacggttgttggttacgggttccacgataagaaatggaaaactctacaggccgactatattacggatatacaatggcaaacagaggcattcgagcgtcttgttctcgatcagaacaagaaagatatcattcaagcgcttgtcagtgtgcacgccgatactgtcgtcctcaacgaaccaaacgacataatagagggcaaaggaaatggcctcatcctattgttacacggaagtcctggaacaggaaagaccctcaccgccgagtcaattgccgaattgactaggaagcctttatatcgagttacatgtggcgatattggagtcgagcccgagggcgtggagaagtatttggactcagtactgtacataggtacagtttggggctgtgttattcttctcgatgaagctgacgtattcttggaagagcgaacacaggcagacctacagcgtaatgcgctcgtgtctgtctttttgcgtgtcctggagtactacaacggcatcctcattctgacgacgaaccgcgttggcacattcgacgaagcgttcaagtcaagaatccagctctcgatacattatcccccactgaatttgcagagccgtgttgaaatctggctaaatttcttcagcgcgatgaaagatgacggaagtgcagatatcacgggacttaagagaaaagcggaattcctcggacgataccgcatcaatggccgacaaatacgcaatacagtgaagtctgcgaaacaactcgcttattacaagaaagagaagttgaactactctcattttgatcgagtcatcagaatagcggatgaattcgatcggtacatagaaagggctcatggagggaatacggatgaagagtgggcggttgatgcacatatacgtgcaggtgatattacacaggatgactgagagtatctaactctgaaatgcagatactatataatctgatgtaatgcacaattctaagctcggaactagatgacgaccgcgacaaatttagctcacatgttacttgaattgttatccaaagatcgttcgctttttgttcgtcggtatatggcatcttaaaggatggtcttctacgattgctatccactacgtgctgctacacagacagctccataattgcattaacaatatcgttgtcgttgttcttcaaggcttcgacagccttccttctgctaacatcggcctgtgtcatgacaagctcgatatcctttccttccaaaccctcctcatcgatcggtccatcgtcaactagttcaccgtcgtcattcgccttcttgacaaatgttttcctctcagtcccatttcttaatgctagtagcttcatatctctgtttcgtgatttctgtcgatcagagcagtcctcagatacggtatatgatacattttgaacatggtctgtgtgttttgattccttgctggaacttgatatgatgagtgactcgacatcaaaaacggagtcgtctagcaaatcgaacgaaggcccgaagccccagcccagcgatgttgtattgtatagactttctctgaatggcgaaaagggcttgatggcgtagtgccgcaacaaatgcgaccctccagcggaaggtggcctaagagatgaaaattgtgaacaaattcccggccagattggaattacgaggtcatggccaaaatcgctgcctagacaccagtcagtaacatcatttgtttaatcatagagcagatcagatggcgtggagctgtccttggtcgttataatcagtgcttcatttgaaaatgggtatcttacgaagatcagcaacctcggggacgtaatctgtgttcatgtcgattgcttcttcggtcccttttgagaacccaaagtctcgtttcttaggcttttgaagtgcctgagtagacatcaacggatttttgggcttctcctttacaggttcaagtgctttcttcacttgactcgattccggtgctttgcgtttttccattgcaaatagattcggtcgccctgcctttggaggcttggataccaccatccttgcggatcattcgaacctcccttcatcaagtgtgtgaatggcaaaccaagccgaatatcaccaacatcggcagcgcagctaaggtgaggggcaagtgcgatgatgaagcgcctgggaagcccggcatgatgcatacccctgttaatatgccttggctaggtcattcagcccaacacactggcggcctcatcgatgcttagcgacaaaacggcgttctcgaactgacgtgctcctaacacaatctactttcaagatgcacgcaaagagaccttaccaagaacaacaccatcagaagacacacagattgggacatttaatagataagaggcagatcagatgggtcgcataggtgtgaggtgttttgtcacgtcgttcacgccagcacctcgcccccgatgcactaaaagtgccagtatgtggacccgtaccagtctgcagctggcgctgagcctgtgctattatgcggcgacattcatacatactggatctctgtgtacgagagatactatgctagagctcttttagctctatacatatcaattcagttgttgagatgagcactaataactgcgcataatctaacgctcaccatgatctggcatacccgctatcgcgcgaatcacctcaggctgggatgtggtgcgacggaaactgttggcagtgtcataataaaggcaagggataactatgtatcgtcgccataaaatccgttcccttacagatccaacagtcggttggcttacctcctaacccgagatgctgccttttacttaaatctctgctttaatttcccttgcgtaaaacaaccagaaactatttatgtccacagttgcttcaatctcgattattagtgtccggggactaacagtgcggtatctaattcgactttgttcttcggtcgtcgacaaactgagttttctccatcatagcgattaatccaaaaacctcgttgtcgaaatttggaaaatgaacccgcgacaaagtgttctcattacaggctgtagcgatggcggcatcggatcttcgctcgttgttgagttcgaacagcgcggcttccatgtttttgccactgcgcgagattgctcccaaatgcgtagtcttaagggcttatcgaacgtaacatttcttacattggacgttgtcaagcccgaagacatccaagctgcagtcgaaatggtgtccagtcattctggtggcacgctcgactacttcataaacaatgcaggacgtaatcatttcatgcccatcttagacgaagacgtaaagaaaacgagagagcttttcgagatcaatttccttgctcccattgcactcacacaagcctttgcgccgttgctcattaaggctaaagggaccgctgtgtatctagcatcgacgtccgggcacctgaacatgccttacatgggtacctactcagcatctaagatgtctctggagattgtcgctgaaacccttcggctcgagttaggcccgtttggtgtccgtgtcgttgtagtcgtcacgggtggagttaagtctttaggccaaacttacttcaatgatttcaagctgcctcccg

SEQ ID NO: 22053 - DNA, 1995 bp, Muscodor strobelii
  misc_feature: SGI cDNA ID NO. 567478
  misc_feature: Encodes the peptide sequence at SEQ ID NO 22054
atggatcaaaccgacgatcggccaagagtcgcatttctacacaaagtcttttgcgccggaggcaatcatcattccgaacacccgcacgagagttggttttgggacataccccgattatttgcaggtgatagcaaaaagagcgcgctgcgaggcaaaacaccagcagaaagcccatcatcttacattgaccgacattggggtcatagggaggaggaagatgagagtgatgatagtagtctcgcaagtgagagcgaggacgaggaagatcccgttgcagccgaagaagcacgaaaagaagcccgagaagaagcccggcaggcagaagcagttcgacacttgattattgttgtcgtggagcgttcttatgagtgtattaaatatcatgagaaggtgaagaaagatttcaagctgtcggaagctcaaccaattgcgcgcaatgtgcatcgaaaactacggccttatctctacgtattaagtgaagacgcatatgaagcggaacactacggtgagacgatgaccatttcaaatcactccttgctctcaactctccgggacatggtaaccaacacaccttactacttcacccaacctcatctacccgcgacattcatgacaccctacctacctttcttttggctacgggaacccattaagaggaaaattgcagagctggaaaatgtcacattacgagcgcagctcgtagtttttctacagcatgttcttgaagtatgcaagagtaactaccaaaaagccgatgctctattcgcggttggcaaggttaaccaggcccaattctcgaagttattcgcccctaacgagatcttgagggagggcctcatcaacttaactgttggtcgtggacttttgacggaaagtttcgaagagaatcaccactcccctttggattgtaatacgctgactcgacaggcaaacccgcgatttatggttgacatgaggatgtataacgagctgcatacagaaacagacgagagcaaggccgaagagaagggaaagcatgcgcttgcagcagagttcctggataatgatgacccaccggacgagagctttgtctacctgctaccagacacggttgttggttacgggttccacgataagaaatggaaaactctacaggccgactatattacggatatacaatggcaaacagaggcattcgagcgtcttgttctcgatcagaacaagaaagatatcattcaagcgcttgtcagtgtgcacgccgatactgtcgtcctcaacgaaccaaacgacataatagagggcaaaggaaatggcctcatcctattgttacacggaagtcctggaacaggaaagaccctcaccgccgagtcaattgccgaattgactaggaagcctttatatcgagttacatgtggcgatattggagtcgagcccgagggcgtggagaagtatttggactcagtactgtacataggtacagtttggggctgtgttattcttctcgatgaagctgacgtattcttggaagagcgaacacaggcagacctacagcgtaatgcgctcgtgtctgtctttttgcgtgtcctggagtactacaacggcatcctcattctgacgacgaaccgcgttggcacattcgacgaagcgttcaagtcaagaatccagctctcgatacattatcccccactgaatttgcagagccgtgttgaaatctggctaaatttcttcagcgcgatgaaagatgacggaagtgcagatatcacgggacttaagagaaaagcggaattcctcggacgataccgcatcaatggccgacaaatacgcaatacagtgaagtctgcgaaacaactcgcttattacaagaaagagaagttgaactactctcattttgatcgagtcatcagaatagcggatgaattcgatcggtacatagaaagggctcatggagggaatacggatgaagagtgggcggttgatgcacatatacgtgcaggtgatattacacaggatgactga

SEQ ID NO: 22054 - protein, 664 aa, Muscodor strobelii
  misc_feature: SGI Peptide ID NO. 567478
  misc_feature (433)..(601): Pfam Id: PF00004 Pfam Desc: ATPase family associated with various cellular activities (AAA)
  misc_feature (433)..(555): Pfam Id: PF07728 Pfam Desc: ATPase family associated with various cellular activities (AAA)
  misc_feature (433)..(564): Pfam Id: PF00004 Pfam Desc: ATPase family associated with various cellular activities (AAA)
  misc_feature (309)..(656): NCBI GI: 212545829 Blast Desc: conserved [Penicillium marneffei ATCC 18224] gi|210064588|gb|EEA18683.1| conserved [Penicillium marneffei ATCC 18224]
  misc_feature (313)..(661): NCBI GI: 46105200 Blast Desc: FG00228.1 [Gibberella zeae PH-1]
  misc_feature (310)..(643): NCBI GI: 255932979 Blast Desc: Pc12g11420 [Penicillium chrysogenum Wisconsin 54-1255] gi|211582579|emb|CAP80769.1| Pc12g11420 [Penicillium chrysogenum Wisconsin 54-1255]
  misc_feature (288)..(650): NCBI GI: 169619754 Blast Desc: SNOG_13075 [Phaeosphaeria nodorum SN15] gi|111058282|gb|EAT79402.1| SNOG_13075 [Phaeosphaeria nodorum SN15]
  misc_feature (313)..(656): NCBI GI: 171685452 Blast Desc: protein product [Podospora anserina] gi|170942687|emb|CAP68340.1| protein product [Podospora anserina]
  misc_feature (298)..(656): NCBI GI: 115449835 Blast Desc: [Aspergillus terreus NIH2624] gi|114187657|gb|EAU29357.1| [Aspergillus terreus NIH2624]
  misc_feature (313)..(656): NCBI GI: 212545270 Blast Desc: conserved [Penicillium marneffei ATCC 18224] gi|210065758|gb|EEA19852.1| conserved [Penicillium marneffei ATCC 18224]
  misc_feature (346)..(656): NCBI GI: 169615523 Blast Desc: SNOG_10919 [Phaeosphaeria nodorum SN15] gi|160702979|gb|EAT81418.2| SNOG_10919 [Phaeosphaeria nodorum SN15]
  misc_feature (313)..(637): NCBI GI: 46133953 Blast Desc: FG09116.1 [Gibberella zeae PH-1]
  misc_feature (352)..(659): NCBI GI: 189205344 Blast Desc: conserved [Pyrenophora tritici-repentis Pt-1C-BFP] gi|187986106|gb|EDU51594.1| conserved [Pyrenophora tritici-repentis Pt-1C-BFP]
MDQTDDRPRVAFLHKVFCAGGNHHSEHPHESWFWDIPRLFAGDSKKSALRGKTPAESPSSYIDRHWGHREEEDESDDSSLASESEDEEDPVAAEEARKEAREEARQAEAVRHLIIVVVERSYECIKYHEKVKKDFKLSEAQPIARNVHRKLRPYLYVLSEDAYEAEHYGETMTISNHSLLSTLRDMVTNTPYYFTQPHLPATFMTPYLPFFWLREPIKRKIAELENVTLRAQLVVFLQHVLEVCKSNYQKADALFAVGKVNQAQFSKLFAPNEILREGLINLTVGRGLLTESFEENHHSPLDCNTLTRQANPRFMVDMRMYNELHTETDESKAEEKGKHALAAEFLDNDDPPDESFVYLLPDTVVGYGFHDKKWKTLQADYITDIQWQTEAFERLVLDQNKKDIIQALVSVHADTVVLNEPNDIIEGKGNGLILLLHGSPGTGKTLTAESIAELTRKPLYRVTCGDIGVEPEGVEKYLDSVLYIGTVWGCVILLDEADVFLEERTQADLQRNALVSVFLRVLEYYNGILILTTNRVGTFDEAFKSRIQLSIHYPPLNLQSRVEIWLNFFSAMKDDGSADITGLKRKAEFLGRYRINGRQIRNTVKSAKQLAYYKKEKLNYSHFDRVIRIADEFDRYIERAHGGNTDEEWAVDAHIRAGDITQDD

SEQ ID NO: 22055 - DNA, 5091 bp, Muscodor strobelii; identical to SEQ ID NO: 22052
  misc_feature: SGI EST ID NO. CUFF.51878.0
  misc_feature: Variant of the nucleotide sequence at SEQ ID NO 22053

SEQ ID NO: 22056 - DNA, 756 bp, Muscodor strobelii
  misc_feature: SGI cDNA ID NO. 567479
  misc_feature: Elevated expression when VOC is produced
  misc_feature: Encodes the peptide sequence at SEQ ID NO 22057
atggaaaaacgcaaagcaccggaatcgagtcaagtgaagaaagcacttgaacctgtaaaggagaagcccaaaaatccgttgatgtctactcaggcacttcaaaagcctaagaaacgagactttgggttctcaaaagggaccgaagaagcaatcgacatgaacacagattacgtccccgaggttgctgatcttcgcagcgattttggccatgacctcgtaattccaatctggccgggaatttgttcacaattttcatctcttaggccaccttccgctggagggtcgcatttgttgcggcactacgccatcaagcccttttcgccattcagagaaagtctatacaatacaacatcgctgggctggggcttcgggccttcgttcgatttgctagacgactccgtttttgatgtcgagtcactcatcatatcaagttccagcaaggaatcaaaacacacagaccatgttcaaaatgtatcatataccgtatctgaggactgctctgatcgacagaaatcacgaaacagagatatgaagctactagcattaagaaatgggactgagaggaaaacatttgtcaagaaggcgaatgacgacggtgaactagttgacgatggaccgatcgatgaggagggtttggaaggaaaggatatcgagcttgtcatgacacaggccgatgttagcagaaggaaggctgtcgaagccttgaagaacaacgacaacgatattgttaatgcaattatggagctgtctgtgtag

SEQ ID NO: 22057 - protein, 251 aa, Muscodor strobelii
  misc_feature: SGI Peptide ID NO. 567479
  misc_feature (211)..(251): NCBI GI: 163965366 Blast Desc: nascent polypeptide-associated complex alpha subunit isoform a [Homo sapiens]
  misc_feature (211)..(251): NCBI GI: 126343760 Blast Desc: : similar to alpha-NAC, muscle-specific form gp220 [Monodelphis domestica]
  misc_feature (211)..(251): NCBI GI: 71151989 Blast Desc: NACAM_MOUSE RecName: Full=Nascent polypeptide-associated complex subunit alpha, muscle-specific form; AltName: Full=Alpha-NAC, muscle-specific form alpha-NAC,
  misc_feature (211)..(251): NCBI GI: 163965357 Blast Desc: nascent polypeptide-associated complex alpha subunit isoform a [Mus musculus]
  misc_feature (211)..(251): NCBI GI: 148692589 Blast Desc: mCG17022, isoform CRA_a [Mus musculus]
  misc_feature (184)..(251): NCBI GI: 21703176 Blast Desc: AF483005_1 alpha-NAC protein [Boltenia villosa]
  misc_feature (207)..(251): NCBI GI: 46128365 Blast Desc: FG08560.1 [Gibberella zeae PH-1] gi|121811824|sp|Q4I2J8.1|NACA_GIBZE RecName: Full=Nascent polypeptide-associated complex subunit alpha; Short=NAC-alpha;
  misc_feature (211)..(251): NCBI GI: 114644223 Blast Desc: : similar to alpha-NAC, muscle-specific form gp220 isoform 5 [Pan troglodytes]
  misc_feature (207)..(251): NCBI GI: 156055864 Blast Desc: SS1G_05284 [Sclerotinia sclerotiorum 1980] gi|160409955|sp|A7EIZ1.1|NACA_SCLS1 RecName: Full=Nascent polypeptide-associated complex subunit alpha; Short=NAC-alpha;
  misc_feature (192)..(251): NCBI GI: 170574396 Blast Desc: NAC domain containing protein [Brugia malayi] gi|158601470|gb|EDP38376.1| NAC domain containing protein [Brugia malayi]
  misc_feature: Useful for introducing or modulating the production of volatile compounds
MEKRKAPESSQVKKALEPVKEKPKNPLMSTQALQKPKKRDFGFSKGTEEAIDMNTDYVPEVADLRSDFGHDLVIPIWPGICSQFSSLRPPSAGGSHLLRHYAIKPFSPFRESLYNTTSLGWGFGPSFDLLDDSVFDVESLIISSSSKESKHTDHVQNVSYTVSEDCSDRQKSRNRDMKLLALRNGTERKTFVKKANDDGELVDDGPIDEEGLEGKDIELVMTQADVSRRKAVEALKNNDNDIVNAIMELSV

SEQ ID NO: 22058 - DNA, 2905 bp, Muscodor strobelii
  misc_feature: SGI EST ID NO. CUFF.51879.1
  misc_feature: Variant of the nucleotide sequence at SEQ ID NO 22056
tgtaaggcatgttcaggtgcccggacgtcgatgctagatacacagcggtccctttagccttaatgagcaacggcgcaaaggcttgtgtgagtgcaatgggagcaaggaaattgatctcgaaaagctctctcgttttctttacgtcttcgtctaagatgggcatgaaatgattacgtcctgcattgtttatgaagtagtcgagcgtgccaccagaatgactggacaccatttcgactgcagcttggatgtcttcgggcttgacaacgtccaatgtaagaaatgttacgttcgataagcccttaagactacgcatttgggagcaatctcgcgcagtggcaaaaacatggaagccgcgctgttcgaactcaacaacgagcgaagatccgatgccgccatcgctacagcctgtaatgagaacactttgtcgcgggttcattttccaaatttcgacaacgaggtttttggattaatcgctatgatggagaaaactcagtttgtcgacgaccgaagaacaaagtcgaattagataccgcactgttagtccccggacactaataatcgagattgaagcaactgtggacataaatagtttctggttgttttacgcaagggaaattaaagcagagatttaagtaaaaggcagcatctcgggttaggaggtaagccaaccgactgttggatctgtaagggaacggattttatggcgacgatacatagttatcccttgcctttattatgacactgccaacagtttccgtcgcaccacatcccagcctgaggtgattcgcgcgatagcgggtatgccagatcatggtgagcgttagattatgcgcagttattagtgctcatctcaacaactgaattgatatgtatagagctaaaagagctctagcatagtatctctcgtacacagagatccagtatgtatgaatgtcgccgcataatagcacaggctcagcgccagctgcagactggtacgggtccacatactggcacttttagtgcatcgggggcgaggtgctggcgtgaacgacgtgacaaaacacctcacacctatgcgacccatctgatctgcctcttatctattaaatgtcccaatctgtgtgtcttctgatggtgttgttcttggtaaggtctctttgcgtgcatcttgaaagtagattgtgttaggagcacgtcagttcgagaacgccgttttgtcgctaagcatcgatgaggccgccagtgtgttgggctgaatgacctagccaaggcatattaacaggggtatgcatcatgccgggcttcccaggcgcttcatcatcgcacttgcccctcaccttagctgcgctgccgatgttggtgatattcggcttggtttgccattcacacacttgatgaagggaggttcgaatgatccgcaaggatggtggtatccaagcctccaaaggcagggcgaccgaatctatttgcaatggaaaaacgcaaagcaccggaatcgagtcaagtgaagaaagcacttgaacctgtaaaggagaagcccaaaaatccgttgatgtctactcaggcacttcaaaagcctaagaaacgagactttgggttctcaaaagggaccgaagaagcaatcgacatgaacacagattacgtccccgaggttgctgatcttcgcagcgattttggccatgacctcgtaattccaatctggccgggaatttgttcacaattttcatctcttaggccaccttccgctggagggtcgcatttgttgcggcactacgccatcaagcccttttcgccattcagagaaagtctatacaatacaacatcgctgggctggggcttcgggccttcgttcgatttgctagacgactccgtttttgatgtcgagtcactcatcatatcaagttccagcaaggaatcaaaacacacagaccatgttcaaaatgtatcatataccgtatctgaggactgctctgatcgacagaaatcacgaaacagagatatgaagctactagcattaagaaatgggactgagaggaaaacatttgtcaagaaggcgaatgacgacggtgaactagttgacgatggaccgatcgatgaggagggtttggaaggaaaggatatcgagcttgtcatgacacaggccgatgttagcagaaggaaggctgtcgaagccttgaagaacaacgacaacgatattgttaatgcaattatggagctgtctgtgtagcagcacgtagtggatagcaatcgtagaagaccatcctttaagatgccatataccgacgaacaaaaagcgaacgatctttggataacaattcaagtaacatgtgagctaaatttgtcgcggtcgtcatctagttccgagcttagaattgtgcattacatcagattatatagtatctgcatttcagagttagatactctcagtcatcctgtgtaatatcacctgcacgtatatgtgcatcaaccgcccactcttcatccgtattccctccatgagccctttctatgtaccgatcgaattcatccgctattctgatgactcgatcaaaatgagagtagttcaacttctctttcttgtaataagcgagttgtttcgcagacttcactgtattgcgtatttgtcggccattgatgcggtatcgtccgaggaattccgcttttctcttaagtcccgtgatatctgcacttccgtcatctttcatcgcgctgaagaaatttagccagatttcaacacggctctgcaaattcagtgggggataatgtatcgagagctggattcttgacttgaacgcttcgtcgaatgtgccaacgcggttcgtcgtcagaatgaggatgccgttgtagtactccaggacacgcaaaaagacagacacgagcgcattacgctgtaggtctgcctgtgttcgctcttccaactata

SEQ ID NO: 22059 - DNA, 2016 bp, Muscodor strobelii
  misc_feature: SGI cDNA ID NO. 567480
  misc_feature: Encodes the peptide sequence at SEQ ID NO 22060
atggagactgaaaaaaaagatcggaaggagcccagagccctgaaagaggggtacagccccagcaaggcctcctttgctagatttcttgtgcgaaagcttatcattaaagatatcgagaagatccctctggccagtttaccagcagagattatagggcaggcttacgatggtctcttgccaaagaggtctgctggcccgagcaaatactccctggaggacatcaagatcggtattgaggccaatccagagcgtattggtggtcgcctctacacgcactatttcaagggaccgaagaatgagaagcaccagtactatgatattggcgcaatgcgctttcctgacacgccaattataacgttcaaactgttggagaagacccacactggtctgggcgaatataagatgaaatcagatgatcgtaatgagcctatgaggtataatgacatcactagtgttaagccaaagcaaggcgaaccgacgagtgacgacccgttcaaggtctcgacactcaacaaaggtcctgttcccttagacacagtgaaatatgccgacgatatcttgaacgatgcgtattacccatatcgacgaaagatcaaaagggctatgaatgcctgcatcgctcatgagcggacgcgcaagaacgagccctcggacgggccctcgggtagatggcttgcgcaagagactaatcttcaagacaatcttgaacgagcatgggactaccttatgcagcacgacaaattctcgctgcgcgattatctcgcatttgttgaaggtcaagacgatgaatccatacactggctcgagacgcgcaactcagcaactggctggttcgatcaagcattttccgagaacgtactcgagtctctagcatttgaatattccaccaagcatgatacaaccaacaaccccaatcttgaaatggaagaaatgaagcttgaagaaacgatgctcgaagaacaggaagttgattggtattatatcgagaacggtagttataatctcgcgatgaacgtcgcgaaacaactcgacaagaagccagagatggggaagctggtaactgccatgaatattattggccgaaaagatgagccaaagaagattgctgtcacgatacgcggagaactccagccgcggcagtatgacacagttttcaataccacaaccttcggggcgttgcagaaaatggatcttacgggactcgagctaccctacgctatgaaatctgccatccggtcgcttcgttatgacaccagtacaaaggtcgcaattcaatttgacaagccatggtggatccagcaaaatcacattccaggcgggcttgatggtatcaagggaggcttagggaagacagatctacctcttcgtacctgcgtttatccatcctacaatctgaaggactataaagcagatgatcctagcacgtggcgcacggtgctgttatgttcatatacttggggctcagactcagaacggatcgcaagtatggtgaaaccagccagtaccaaagggagcgcgaccgcgcctgggttggaagtgtacgcgagccggcaggatgaggaatgcgcagatcccgaagctcttctgaaagagactatgattgacaatctcgcgcgactacacagcactactgaagaagcttatgcggctatgaaaaagctcatctcggagtcatatgtcactcaccatgcgtacgattggtctaaagacccatacacttgtggtggagctttcggtctattctcaccagcccagtttcggtcgatgtaccccaatatcgtgcgtcctgcagcggactcgcgtctgcatattatcggcgaagctgcaagtgcacatcatgcttgggtcgtcggagcattagatagtagtgtccgtggtttgtacctgatgctggaaagattccgattgttcgatctccagaaggagctgatcgagaagtggggggacatcggtgaggtcgacaaggacacagcgcatctacaggtcgcacttggcatgaagggtcgttctatttag

SEQ ID NO: 22060 - protein, 671 aa, Muscodor strobelii
  misc_feature: SGI Peptide ID NO. 567480
  misc_feature (71)..(666): NCBI GI: 189188232 Blast Desc: L-amino acid oxidase [Pyrenophora tritici-repentis Pt-1C-BFP] gi|187972061|gb|EDU39560.1| L-amino acid oxidase [Pyrenophora tritici-repentis Pt-1C-BFP]
  misc_feature (78)..(665): NCBI GI: 116204079 Blast Desc: CHGG_09923 [Chaetomium globosum CBS 148.51] gi|88176051|gb|EAQ83519.1| CHGG_09923 [Chaetomium globosum CBS 148.51]
  misc_feature (71)..(666): NCBI GI: 171690702 Blast Desc: protein product [Podospora anserina] gi|170945299|emb|CAP71411.1| protein product [Podospora anserina]
  misc_feature (83)..(645): NCBI GI: 240105105 Blast Desc: amine oxidase, flavin-containing family protein [Coccidioides posadasii C735 delta SOWgp]
  misc_feature (83)..(645): NCBI GI: 119194915 Blast Desc: CIMG_01832 [Coccidioides immitis RS]
  misc_feature (80)..(632): NCBI GI: 256722602 Blast Desc: NECHADRAFT_49692 [Nectria haematococca mpVI 77-13-4]
  misc_feature (80)..(635): NCBI GI: 46118565 Blast Desc: FG04716.1 [Gibberella zeae PH-1]
  misc_feature (80)..(635): NCBI GI: 258568186 Blast Desc: [Uncinocarpus reesii 1704] gi|237906283|gb|EEP80684.1| [Uncinocarpus reesii 1704]
  misc_feature (38)..(631): NCBI GI: 116181210 Blast Desc: CHGG_01233 [Chaetomium globosum CBS 148.51] gi|88185530|gb|EAQ92998.1| CHGG_01233 [Chaetomium globosum CBS 148.51]
  misc_feature (71)..(608): NCBI GI: 20135733 Blast Desc: L-aminoacid oxidase [Hypocrea lixii]
  misc_feature (46)..(654): SWISSPROT Homolog: EC 1.4.3.2 L-amino-acid oxidase
  misc_feature (46)..(654): SWISSPROT Homolog: EC 1.5.3.1 Sarcosine oxidase
  misc_feature (46)..(654): SWISSPROT Homolog: EC 1.5.3.7 L-pipecolate oxidase
METEKKDRKEPRALKEGYSPSKASFARFLVRKLIIKDIEKIPLASLPAEIIGQAYDGLLPKRSAGPSKYSLEDIKIGIEANPERIGGRLYTHYFKGPKNEKHQYYDIGAMRFPDTPIITFKLLEKTHTGLGEYKMKSDDRNEPMRYNDITSVKPKQGEPTSDDPFKVSTLNKGPVPLDTVKYADDILNDAYYPYRRKIKRAMNACIAHERTRKNEPSDGPSGRWLAQETNLQDNLERAWDYLMQHDKFSLRDYLAFVEGQDDESIHWLETRNSATGWFDQAFSENVLESLAFEYSTKHDTTNNPNLEMEEMKLEETMLEEQEVDWYYIENGSYNLAMNVAKQLDKKPEMGKLVTAMNIIGRKDEPKKIAVTIRGELQPRQYDTVFNTTTFGALQKMDLTGLELPYAMKSAIRSLRYDTSTKVAIQFDKPWWIQQNHIPGGLDGIKGGLGKTDLPLRTCVYPSYNLKDYKADDPSTWRTVLLCSYTWGSDSERIASMVKPASTKGSATAPGLEVYASRQDEECADPEALLKETMIDNLARLHSTTEEAYAAMKKLISESYVTHHAYDWSKDPYTCGGAFGLFSPAQFRSMYPNIVRPAADSRLHIIGEAASAHHAWVVGALDSSVRGLYLMLERFRLFDLQKELIEKWGDIGEVDKDTAHLQVALGMKGRSI

SEQ ID NO: 22061 - DNA, 2426 bp, Muscodor strobelii
  misc_feature: SGI EST ID NO. CUFF.51817.0
  misc_feature: Variant of the nucleotide sequence at SEQ ID NO 22059
tcagaacgttcaaactgttggagaagacccacactggtctgggcgaatataagatgaaatcagatgatcgtaatgagcctatgaggtataatgacatcactagtgttaagccaaagcaaggcgaaccgacgagtgacgacccgttcaaggtctcgacactcaacaaaggtcctgttcccttagacacagtgaaatatgccgacgatatcttgaacgatgcgtattacccatatcgacgaaagatcaaaagggctatgaatgcctgcatcgctcatgagcggacgcgcaagaacgagccctcggacgggccctcgggtagatggcttgcgcaagagactaatcttcaagacaatcttgaacgagcatgggactaccttatgcagcacgacaaattctcgctgcgcgattatctcgcatttgttgaaggtcaagacgatgaatccatacactggctcgagacgcgcaactcagcaactggctggttcgatcaagcattttccgagaacgtactcgagtctctagcatttgaatattccaccaagcatgatacaaccaacaaccccaatcttgaaatggaagaaatgaagcttgaagaaacgatgctcgaagaacaggaagttgattggtattatatcgagaacggtagttataatctcgcgatgaacgtcgcgaaacaactcgacaagaagccagagatggggaagctggtaactgccatgaatattattggccgaaaagatgagccaaagaagattgctgtcacgatacgcggagaactccagccgcggcagtatgacacagttttcaataccacaaccttcggggcgttgcagaaaatggatcttacgggactcgagctaccctacgctatgaaatctgccatccggtcgcttcgttatgacaccagtacaaaggtcgcaattcaatttgacaagccatggtggatccagcaaaatcacattccaggcgggcttgatggtatcaagggaggcttagggaagacagatctacctcttcgtacctgcgtttatccatcctacaatctgaaggactataaagcagatgatcctagcacgtggcgcacggtgctgttatgttcatatacttggggctcagactcagaacggatcgcaagtatggtgaaaccagccagtaccaaagggagcgcgaccgcgcctgggttggaagtgtacgcgagccggcaggatgaggaatgcgcagatcccgaagctcttctgaaagagactatgattgacaatctcgcgcgactacacagcactactgaagaagcttatgcggctatgaaaaagctcatctcggagtcatatgtcactcaccatgcgtacgattggtctaaagacccatacacttgtggtggagctttcggtctattctcaccagcccagtttcggtcgatgtaccccaatatcgtgcgtcctgcagcggactcgcgtctgcatattatcggcgaagctgcaagtgcacatcatgcttgggtcgtcggagcattagatagtagtgtccgtggtttgtacctgatgctggaaagattccgattgttcgatctccagaaggagctgatcgagaagtggggggacatcggtgaggtcgacaaggacacagcgcatctacaggtcgcacttggcatgaagggtcgttctatttagtatgcggtgataattatggcagcacacgcacggaaatatgcagacagcagcgattaaatgagttatttcttcaacgttcttgtttttctgctaacgcagcgagcacgtccaattcatttgcctttatatcacaaatacgaaccgggcagcaggttaaatctttcctatccctgcgtgtgccgttacataactcggcacatcagcaactgacattggcttcaagaggtaagacttataagaagaagcctgcgataagactgccgagttcttaacatcgggccaggaacctgagctgtaggctttgttccactcgcaaatgtagccagtatatgaagagcaagctcctgcttcatccactgtaaccgtcgtatataacgcgcctccattggtcagggaagccgatgtcattggggttgtgacaccctgaaagtagttcccctcgagcagactgtacgtatttttgtcgacgtcgaatgcatggccaccaacattcaagaagtagttattgaaggcatggaaaaactgggtggaagccgtaaccgtcgtgccgtaatggggagcgcgacctgagacgtcatgaatgtagttgtatgcgaaggtgtagtagtcctgcaatccagctaacagtatcgtccaatagtgctttccgttgcagcctgatgagtagctggtcactccgtcaaactcgttgttagatattgtcaccttgcccgcttggccgaagcccgtcactagcatttggcggccgatcagagagaa

SEQ ID NO: 22062 - DNA, 255 bp, Muscodor strobelii
  misc_feature: SGI cDNA ID NO. 567481
  misc_feature: Encodes the peptide sequence at SEQ ID NO 22063
atggagactgaaaaaaaagatcggaaggagcccagagccctgaaagaggggtacagccccagcaaggcctcctttgctagatttcttgtgcgaaagcttatcattaaagatatcgagaagatccctctggccagtttaccagcagagattatagggcaggcttacgatggtctcttgccaaagaggtctgctggcccgagcaaatactccctggaggacatcaagatcggtattgtaagtgatttaacctattaa

SEQ ID NO: 22063 - protein, 84 aa, Muscodor strobelii
  misc_feature: SGI Peptide ID NO. 567481
METEKKDRKEPRALKEGYSPSKASFARFLVRKLIIKDIEKIPLASLPAEIIGQAYDGLLPKRSAGPSKYSLEDIKIGIVSDLTY

SEQ ID NO: 22064 - DNA, 1110 bp, Muscodor strobelii
  misc_feature: SGI cDNA ID NO. 567482
  misc_feature: Encodes the peptide sequence at SEQ ID NO 22065
atgcgccaagtcattctctcacttctcttcggagcattcacttacaatgcaaaagcggtttctgtttccgggacagcatttgggttcgcaaccggcgtaacgggcggcggttctgcggccgcagccacgccaacaagtctagcgcagcaagtttttcagttggcactgcccgcaccattgtcatcgatcgtaaatggagctatattggctctgaggggacaactactgggacttgttgcagcacgagcactacgacgtgttcgggcggtatcttgcacgtatgacacagccggtatcagtcccatcgacgtcggcagcaacaagagcgtcctcggcgtaggcagcgcgggtgtgattgaagggaagggccttcgtgtgcgcgctggcaatagcaatgtcatcattcaaaacatccatattaccaacatcaaccctcgttacgtctggggcggcgatgcgctcactcttgatagcgccgatcggatttggattgatcataacaagttctctctgatcggccgccaaatgctagtgacgggcttcggccaagcgggcaaggtgacaatatctaacaacgagtttgacggagtgaccagctactcatcaggctgcaacggaaagcactattggacgatactgttagctggattgcaggactactacaccttcgcatacaactacattcatgacgtctcaggtcgcgctccccattacggcacgacggttacggcttccacccagtttttccatgccttcaataactacttcttgaatgttggtggccatgcattcgacgtcgacaaaaatacgtacagtctgctcgaggggaactactttcagggtgtcacaaccccaatgacatcggcttccctgaccaatggaggcgcgttatatacgacggttacagtggatgaagcaggagcttgctcttcatatactggctacatttgcgagtggaacaaagcctacagctcaggttcctggcccgatgttaagaactcggcagtcttatcgcaggcttcttcttataagtcttacctcttgaagccaatgtcagttgctgatgtgccgagttatgtaacggcacacgcagggataggaaagatttaa

SEQ ID NO: 22065 - protein, 369 aa, Muscodor strobelii
  misc_feature: SGI Peptide ID NO. 567482
  misc_feature (83)..(279): Pfam Id: PF00544 Pfam Desc: Pectate lyase
  misc_feature (100)..(170): Pfam Id: PF00544 Pfam Desc: Pectate lyase
  misc_feature (1)..(369): NCBI GI: 70997782 Blast Desc: pectin lyase [Aspergillus fumigatus Af293] gi|66851260|gb|EAL91586.1| pectin lyase [Aspergillus fumigatus Af293] gi|159126643|gb|EDP51759.1| pectin lyase [Aspergillus
  misc_feature (1)..(369): NCBI GI: 119479291 Blast Desc: pectate lyase, [Neosartorya fischeri NRRL 181] gi|119407828|gb|EAW17777.1| pectate lyase, [Neosartorya fischeri NRRL 181]
  misc_feature (90)..(369): NCBI GI: 115401220 Blast Desc: conserved [Aspergillus terreus NIH2624] gi|114190139|gb|EAU31839.1| conserved [Aspergillus terreus NIH2624]
  misc_feature (90)..(369): NCBI GI: 256727217 Blast Desc: NECHADRAFT_122319 [Nectria haematococca mpVI 77-13-4]
  misc_feature (19)..(369): NCBI GI: 238507634 Blast Desc: pectin lyase [Aspergillus flavus NRRL3357] gi|220688537|gb|EED44889.1| pectin lyase [Aspergillus flavus NRRL3357]
  misc_feature (19)..(369): NCBI GI: 169785116 Blast Desc: [Aspergillus oryzae RIB40] gi|83775766|dbj|BAE65886.1| protein product [Aspergillus oryzae]
  misc_feature (90)..(369): NCBI GI: 261359950 Blast Desc: pectin lyase [Verticillium albo-atrum VaMs.102]
  misc_feature (7)..(369): NCBI GI: 154298886 Blast Desc: BC1G_11690 [Botryotinia fuckeliana B05.10] gi|150857595|gb|EDN32787.1| BC1G_11690 [Botryotinia fuckeliana B05.10]
  misc_feature (5)..(369): NCBI GI: 156064065 Blast Desc: SS1G_00040 [Sclerotinia sclerotiorum 1980] gi|154690902|gb|EDN90640.1| SS1G_00040 [Sclerotinia sclerotiorum 1980]
  misc_feature (90)..(369): NCBI GI: 115492817 Blast Desc: ATEG_00950 [Aspergillus terreus NIH2624] gi|114197896|gb|EAU39596.1| ATEG_00950 [Aspergillus terreus NIH2624]
  misc_feature (91)..(369): SWISSPROT Homolog: EC 4.2.2.10 Pectin lyase
MRQVILSLLFGAFTYNAKAVSVSGTAFGFATGVTGGGSAAAATPTSLAQQVFQLALPAPLSSIVNGAILALRGQLLGLVAARALRRVRAVSCTYDTAGISPIDVGSNKSVLGVGSAGVIEGKGLRVRAGNSNVIIQNIHITNINPRYVWGGDALTLDSADRIWIDHNKFSLIGRQMLVTGFGQAGKVTISNNEFDGVTSYSSGCNGKHYWTILLAGLQDYYTFAYNYIHDVSGRAPHYGTTVTASTQFFHAFNNYFLNVGGHAFDVDKNTYSLLEGNYFQGVTTPMTSASLTNGGALYTTVTVDEAGACSSYTGYICEWNKAYSSGSWPDVKNSAVLSQASSYKSYLLKPMSVADVPSYVTAHAGIGKI

SEQ ID NO: 22066 - DNA, 2799 bp, Muscodor strobelii
  misc_feature: SGI EST ID NO. CUFF.51818.1
  misc_feature: Variant of the nucleotide sequence at SEQ ID NO 22064
taagtcggtgaagtaactaatagggttaggctcacaacatggttgacggacagcactgcccgcaccattgtcatcgatcgtaaatggagctatattggctctgaggggacaactactgggacttgttgcagcacgagcactacgacgtgttcgggcggtacgtcggcgggtcaactgactatcgcgacttcgtgttcgagtggtacccaggtatcttgcacgtatgacacagccggtatcagtcccatcgacgtcggcagcaacaagagcgtcctcggcgtaggcagcgcgggtgtgattgaagggaagggccttcgtgtgcgcgctggcaatagcaatgtcatcattcaaaacatccatattaccaacatcaaccctcgttacgtctggggcggcgatgcgctcactcttgatagcgccgatcggatttggattgatcataacaagttctctctgatcggccgccaaatgctagtgacgggcttcggccaagcgggcaaggtgacaatatctaacaacgagtttgacggagtgaccagctactcatcaggctgcaacggaaagcactattggacgatactgttagctggattgcaggactactacaccttcgcatacaactacattcatgacgtctcaggtcgcgctccccattacggcacgacggttacggcttccacccagtttttccatgccttcaataactacttcttgaatgttggtggccatgcattcgacgtcgacaaaaatacgtacagtctgctcgaggggaactactttcagggtgtcacaaccccaatgacatcggcttccctgaccaatggaggcgcgttatatacgacggttacagtggatgaagcaggagcttgctcttcatatactggctacatttgcgagtggaacaaagcctacagctcaggttcctggcccgatgttaagaactcggcagtcttatcgcaggcttcttcttataagtcttacctcttgaagccaatgtcagttgctgatgtgccgagttatgtaacggcacacgcagggataggaaagatttaacctgctgcccggttcgtatttgtgatataaaggcaaatgaattggacgtgctcgctgcgttagcagaaaaacaagaacgttgaagaaataactcatttaatcgctgctgtctgcatatttccgtgcgtgtgctgccataattatcaccgcatactaaatagaacgacccttcatgccaagtgcgacctgtagatgcgctgtgtccttgtcgacctcaccgatgtccccccacttctcgatcagctccttctggagatcgaacaatcggaatctttccagcatcaggtacaaaccacggacactactatctaatgctccgacgacccaagcatgatgtgcacttgcagcttcgccgataatatgcagacgcgagtccgctgcaggacgcacgatattggggtacatcgaccgaaactgggctggtgagaatagaccgaaagctccaccacaagtgtatgggtctttagaccaatcgtacgcatggtgagtgacatatgactccgagatgagctttttcatagccgcataagcttcttcagtagtgctgtgtagtcgcgcgagattgtcaatcatagtctctttcagaagagcttcgggatctgcgcattcctcatcctgccggctcgcgtacacttccaacccaggcgcggtcgcgctccctttggtactggctggtttcaccatacttgcgatccgttctgagtctgagccccaagtatatgaacataacagcaccgtgcgccacgtgctaggatcatctgctttatagtccttcagattgtaggatggataaacgcaggtacgaagaggtagatctgtcttccctaagcctcccttgataccatcaagcccgcctggaatgtgattttgctggatccaccatggcttgtcaaattgaattgcgacctttgtactggtgtcataacgaagcgaccggatggcagatttcatagcgtagggtagctcgagtcccgtaagatccattttctgcaacgccccgaaggttgtggtattgaaaactgtgtcatactgccgcggctggagttctccgcgtatcgtgacagcaatcttctttggctcatcttttcggccaataatattcatggcagttaccagcttccccatctctggcttcttgtcgagttgtttcgcgacgttcatcgcgagattataactaccgttctcgatataataccaatcaacttcctgttcttcgagcatcgtttcttcaagcttcatttcttccatttcaagattggggttgttggttgtatcatgcttggtggaatattcaaatgctagagactcgagtacgttctcggaaaatgcttgatcgaaccagccagttgctgagttgcgcgtctcgagccagtgtatggattcatcgtcttgaccttcaacaaatgcgagataatcgcgcagcgagaatttgtcgtgctgcataaggtagtcccatgctcgttcaagattgtcttgaagattagtctcttgcgcaagccatctacccgagggcccgtccgagggctcgttcttgcgcgtccgctcatgagcgatgcaggcattcatagcccttttgatctttcgtcgatatgggtaatacgcatcgttcaagatatcgtcggcatatttcactgtgtctaagggaacaggacctttgttgagtgtcgagaccttgaacgggtcgtcactcgtcggttcgccttgctttggcttaacactagtgatgtcattatacctcataggctc

SEQ ID NO: 22067 - DNA, 2400 bp, Muscodor strobelii
  misc_feature: SGI cDNA ID NO. 567483
  misc_feature: Encodes the peptide sequence at SEQ ID NO 22068
atgaaatgctccgcgtctctttatctggccctcgccctggcgacgtatgctgacgctgcgctagatggtaatcgctttctctggtacaccgagcctgggaggtccaatgtatttgaagacggattaccaatcggcaatggccgggtcgcagcctctatatacgggagtaatcccgaggtcctcggcataaacgagaattcaatatggaccggaccgctccaagaccggatcggagttgatcaaccagcagcagagtcggtcatccgtgatatgttgctcgctggaaatctcacggatgcccaactgtatacttatcagaagttcatccccgcgacctatagcccgcgagcgtacagctattttgggaacattcatctggattttggacactctgcagacgatgtgaccaactatgtgcgatggctagacaccaaagaagggacatcgggcgtgagctatacctacgaaaatgtgaactacacccgtgattatgtagccagttttcctaacggcgtattggccgccagattcacatcgagtagtgataatgcaatcaaccttaatgtttcgattgataggcactcggatttcgcggttacagcatccgtcgccaccgacaacaacactgtgactttgaccggatctagcggtcagtccgcatcagaaaatccgattctatttatcggccaggctcaattcacgtcaccggacggagtctttgccatgtcaggatcgtcgctaatcatatccaacgccacatctgtcgacatgatatttgatgcagaatccaattatagatatcccacgttaactgccgccaaggacgagatgatccataagattaacttggcccacgatcttgggtacgatgcaatcaaggaagcgggtatcgccgatgcaagtgagctcttaaatagagtgacactcgatcttgggaattccactgatggctgggctgagaagtcaaccgatcttcgaattgctcatgcgagaaacacatcgactgatcttcagcttagcaccttagtcttcaattttggccgtcatctgcttgtcgcgtcttctcgagagacagacaatggcacctcgctccctgctaatctgcagggcatctggaacaattcgacctcagcaccatggggaagcaaatacacaatcaacatcaacattcccatgaattactggcctgcggggccgaccaacttgctagaaacagagcagcctttgtttgatctcatggaaatcgcaaggcctctcggagaatcaatggcacaacgcatgtacaactgttctggtacggtttttcatcataatctcgacctttggggagaccccgcgccgactgacaactatacttcatccactgtgtggcctatgggcgcaggatggctcgcatggcatatgatagatcactatcggttctctggcgacaaagtgttcttgaaggacactgttgttccattccttgaagacgtagcagcattctttgaatgttacacctttgaatacgaaggatacaatgtgacaggcccatcactctcgcctgagaacacattcaagattccatctggatatgagacacaaggcagttctcaagcaatcgacatcggcccatcaatggataatcagatcatgactgaggtttttgagggtttggtcgaagctgccaatgttctggggtacgaagatgctgctattacgtcggctaaagagtttttgcccacaatcacctcgccaaagattggttctctaggtcagatccttgagtggcgtaaggagtggccggaaggggcaattggacagaagcatctttccccactatgggcactcatgcctggccgacagttcagtcccatcatcaactcaacgctcgggaaggcagcagaagtgctcaccaatcgtcgcgttgaccatgggtctggtaccaccggctggtcgcgcacatggttgatcaatatgtacgcgcgcttgtatggtggtgacgccgcttgggggcagctgaccgcttggttcgcaacctaccccacgccctacaacttgtacaacaccgattcaggggcaaaagatgactacgtttttcagatcgatggcaattttggctttgtcagtggcgttacagagatgttgttacaaagtcacactggcatcgtacacatccttccagcactgccgtctgccgttcctacgggatctgtcgccggcctccgggcccgtggcggatttgaggttaatatctcctggcaaggtggaagattgacagaagctttactaacgtcgttcaatgggaacgatattgaacttcgttacgaaaatggcacctcgatacttatggacggggaagagtactcgggcaaattgccgactgctgtcggacagtccatagttgtcacaattgcatga

SEQ ID NO: 22068 - protein, 799 aa, Muscodor strobelii
  misc_feature: SGI Peptide ID NO. 567483
  misc_feature (15)..(791): NCBI GI: 67541006 Blast Desc: AN6673.2 [Aspergillus nidulans FGSC A4] gi|40738426|gb|EAA57616.1| AN6673.2 [Aspergillus nidulans FGSC A4] gi|259480257|tpe|CBF71222.1| TPA: alpha-fucosidase (Eurofung)
  misc_feature (1)..(791): NCBI GI: 242815487 Blast Desc: conserved [Talaromyces stipitatus ATCC 10500] gi|218714917|gb|EED14340.1| conserved [Talaromyces stipitatus ATCC 10500]
  misc_feature (7)..(798): NCBI GI: 115443166 Blast Desc: [Aspergillus terreus NIH2624] gi|114188259|gb|EAU29959.1| [Aspergillus terreus NIH2624]
  misc_feature (1)..(798): NCBI GI: 70985434 Blast Desc: conserved [Aspergillus fumigatus Af293] gi|66845851|gb|EAL86185.1| conserved [Aspergillus fumigatus Af293]
  misc_feature (1)..(798): NCBI GI: 159125849 Blast Desc: conserved [Aspergillus fumigatus A1163]
  misc_feature (7)..(791): NCBI GI: 238504526 Blast Desc: alpha-L-fucosidase 2 precursor, [Aspergillus flavus NRRL3357] gi|220690965|gb|EED47314.1| alpha-L-fucosidase 2 precursor, [Aspergillus flavus NRRL3357]
  misc_feature (7)..(791): NCBI GI: 195972741 Blast Desc: secreted protein [Aspergillus oryzae]
  misc_feature (1)..(796): NCBI GI: 121719440 Blast Desc: conserved [Aspergillus clavatus NRRL 1] gi|119404617|gb|EAW14993.1| conserved [Aspergillus clavatus NRRL 1]
  misc_feature (1)..(798): NCBI GI: 119499317 Blast Desc: NFIA_040960 [Neosartorya fischeri NRRL 181] gi|119414580|gb|EAW24519.1| conserved [Neosartorya fischeri NRRL 181]
  misc_feature (10)..(794): NCBI GI: 169624315 Blast Desc: SNOG_15415 [Phaeosphaeria nodorum SN15] gi|160705148|gb|EAT77080.2| SNOG_15415 [Phaeosphaeria nodorum SN15]
  misc_feature (24)..(754): SWISSPROT Homolog: EC 3.2.1.51 Alpha-L-fucosidase
MKCSASLYLALALATYADAALDGNRFLWYTEPGRSNVFEDGLPIGNGRVAASIYGSNPEVLGINENSIWTGPLQDRIGVDQPAAESVIRDMLLAGNLTDAQLYTYQKFIPATYSPRAYSYFGNIHLDFGHSADDVTNYVRWLDTKEGTSGVSYTYENVNYTRDYVASFPNGVLAARFTSSSDNAINLNVSIDRHSDFAVTASVATDNNTVTLTGSSGQSASENPILFIGQAQFTSPDGVFAMSGSSLIISNATSVDMIFDAESNYRYPTLTAAKDEMIHKINLAHDLGYDAIKEAGIADASELLNRVTLDLGNSTDGWAEKSTDLRIAHARNTSTDLQLSTLVFNFGRHLLVASSRETDNGTSLPANLQGIWNNSTSAPWGSKYTININIPMNYWPAGPTNLLETEQPLFDLMEIARPLGESMAQRMYNCSGTVFHHNLDLWGDPAPTDNYTSSTVWPMGAGWLAWHMIDHYRFSGDKVFLKDTVVPFLEDVAAFFECYTFEYEGYNVTGPSLSPENTFKIPSGYETQGSSQAIDIGPSMDNQIMTEVFEGLVEAANVLGYEDAAITSAKEFLPTITSPKIGSLGQILEWRKEWPEGAIGQKHLSPLWALMPGRQFSPIINSTLGKAAEVLTNRRVDHGSGTTGWSRTWLINMYARLYGGDAAWGQLTAWFATYPTPYNLYNTDSGAKDDYVFQIDGNFGFVSGVTEMLLQSHTGIVHILPALPSAVPTGSVAGLRARGGFEVNISWQGGRLTEALLTSFNGNDIELRYENGTSILMDGEEYSGKLPTAVGQSIVVTIA

SEQ ID NO: 22069 - DNA, 5346 bp, Muscodor strobelii
  misc_feature: SGI cDNA ID NO. 567484
  misc_feature: Encodes the peptide sequence at SEQ ID NO 22070
atgccccagtatgcagggagctggcagcgtcgctatccgaatcacgctcagctcatggcctggttcgcctcagtcaatccattgcgcgtcgatattctcagtgactttgctgggaaagaactgttcgccatacatggcgattcgttgatcacttactgccttcacgatggcagtgttgatttcaccgatggattccaacttttgcatgcagtccatgctgtggagtcttttctttcaaagctgaaggctttaggatgcaactaccatattatctggttcgaggacgagaagtccttgtgcgttccgcgccacgccttccggtctcatgtatacaagtacgctctgactagggccatcttggtagagcacttcgctagcacatctatttcatcccaaggcgatccagtcaagagtcgcgtattctcttcgtcggaatcaaccgagtttcgtacttatctcagccaaacccccctccatttcatcatgtgctcacatggtggtgctactgagtcggaacccgaaccgagtgttttgggccaccttgcggtttcatatcggatgtcccacttgggatattgtgtagggttcattgaccaagttgagatccagaactccaaggtctatacttcaatcatcactccatcggccgaattgcaacctaagattggcaggcgttcagactacgattacattgtagatgatctgtcttcacgctcatgtttagaagagacggaacggaattccttgatgaccgcagctaaggataagctagaaatgtttcgagacacgtgggtagtgggatcgctcacggtccgcgacataatcaatctgttcgctctctcgttgctgatctgcaagaagaagacgagtagaaacttctgtcctcgaaaaatcgccgactatttgacccatctatccctgctccgttattgccgactctcagatcgttcgttcgcgacggcagattgtcgtttggactctggggacaatacgttcctccaagaacttttcttcgacgcctgtaacatcatttcggaatggcgtaatcttgcattctcgcgatcgttgcggtgggatgcttatgatctcctcgatggccgattatatgggcatataagacatggatatctcaagacaccatggccgcaagctgtcgaaagccacttcactacactttgttgggtgttgaaagagctgactagtggtctgtactttcggcaccagtttagcccctacggtcggagtctggccttcacagaaccgagtgcggctcatcaattcacaagcaccgccactatgtctagtccaacggttctggcattcagtcacccagtagttgatttacacttgagagaggtacagcttgacacggaaagaagctccactccaaaaagcaatttcatcttcaaagacctcacgcattggcacaatgcaaagaagctggtcgatgccaagatcatcccaaaaccgctcgggttccacgccaaaagacggaatcagatgctgatggcagacactatcacatatgctgcgagtctatcaggagctacagggaaacgcatcaacccagagacgatcattgttcaaacgcacgggaatgctcaacgaaataaacccagctccgaacttccgcgcgagccgcgaccagccctgaagaataagaagcagaatgcgaagtcaggacctgcaagcaagaaaattgaaaagagtgggagagacaaggctctggaggcggcacaggaaatacaagcaaaaaaggctgctggaaaggcatccgacgtattagtcttctggcggaagcagtgtgcggagcttgagaaagagcaggatctcgtaaagagatacttgaaggcggagaaatacttcattaagctaggacccgaaacgcaggatctaaaatcagaggtgtccctatatctttgctacatccttacgcttgtacgaggatctggaggatcggccagaatttatgcagatgaggacatctttgctatgatatggtctagtgtgatgaagactcgagacttcccaatcactcgagagattgcgaaacagctaacgcctctgtcgcgtgcgcttggtattcctttcgacgttccgctggacatgttgcagaggagagagttcccttttcattggacaaagagtgttgcaaaggttgcgcttcccttcaatatgaacccattggagtttcaactccaacactgtggtccctaccttgagcggaccttcgattccgctccagacagccgcgtgccattccatcctgatgcctggcaaagaaaagtcctcgacacaattgatcaagacaagagtttgttcgttgttgcgcctacatcctccgggaaaacatttatatctttctatgccatgaagaaggtcttacaggccaataacgacgatgtcctcgtctacgttgctcctacaaaggccttggtgaatcaggtggcagcagagattcaggcacgcttctccaagagttatcatggagaaggacaagaagatcgatctgtatgggcgattcacacccgagattaccgagtaaaccaccctcataagtgtcagattctcgtgacggtgcctcacattctccaaatcatgttgcttgctccgtcaaactccaatactccgaatggattttcacgaagagtcaagcgtatcatcttcgacgaagttcactgtattggtcaatcagacgaaggcgtgatttgggagcagctcctcctgctagcaccttgtcctatcatcgcgttgtccgcaacagttggtaacccagaggagttcatgacatggctcgaggacgtccaaaaggcaaagggattaaaaatggaaatgattatccacaatgcacgatactctgacttacgtcactttatctacacgccacccacgcgatattcctttactggcctcacgtctgttgaccagttaccgatcccggggttggacgcaaaagacaaccgcttcgcctttattcatccattcggagccacttttggaacgaatacaaattccttagaaggcgtcaatttagagccacgtgattgtctggacctctggcgatctttcgtcaatcatcaaaacaacgagcatcctgtcaaagaaaccctgttgcccaccaagttcatttcagtgccagctaccaaatccgacgtcttggtctgggcgcatgcactcaagaagcaactagagcaatggatcccagatcccacgtcgcccatcgatgttatgcgacaagaatttcgagctcggtgtcataatcatattgcaaatatttgcgataaggattctctctccccagatgatagtcaaaaatcaggaataatgtacaaacattcgacattcgcattgatctttgacctacgctcaaacggaggactaccagcaatcatcttcaactatgatcgacaggcctgtgagagaacagcaagagctcttctgacaattctagcctgggcagaagatgagtacaaagagaacagcttggattggaagaagaagcttgcggacttcgagaagtggcaactgtcgcaatcccgcaaaaaggaacgagcacccaagaagtctaaaacccaggatgatgagggcaataagatgaatcgcctccgcgatgcagcgggtgaagagtctagtcaatgggagaagttcgatcctgaagaggctatacccaaattcagcttcgccgacggcatgaggttatcgagagaagagctcaatgagctgctggcgactttggacgaggaaaaggttcaacccgatctgctcatcgcactccgacgaggtataggcattcatcactctggtatgaatagacgatatcgacaagtggttgagatgctgtttcgccgaggttttcttaccgtggtgattgccactggcactctcgcgctcggcatcaatatgccatgcaagactgtagtcttcatggaggactcaccctttctatctgcactgaattttcgacaggccgcgggtcgcgcaggccgccgaggtttcgatcttctcggcaacgttgttttccacaagatccctccccagcgagcgatggagataatgtcatcgagactacccgatctccgtgggcagttcccgcatttcgtaaccctaattcttcgattgtttgtgctattggacggaaccaacgactccgaatacgcagtaaacgcagttaattccatcttagcgcagacgcagctttacctgggaggccctgaggcgcagatgtcaattcgacatcacttgcgtttctcgatcgactacttacgacgtcaagacctactctcagaaactggcaagtcgctcaatttctcaggactcgtggggcatttgtacttcaccgagaacgcagcgctcgcgtttcattcgctcttgaaaggaggcgtgttccataagttatccttgggcatacgcgacgagtctcgcaaagccgatattcttcgagagatgatgttagtcctatgccatttgttctcacgtatcccattatacaagtacgaggacaaagactggctcaacagcgtggtgcatcggtctccatcgctggtcattttgcctgatcttccagccaaggcggccacagtcctacgcaagcataatgacgacacactcagaatcttccatggctatgtccacagctacaccactcaacatctttctgacgtggtcgataatgaactgcctctgaccaagcacaagattaagcccgctgctctttcgaattgccaagaatcttgtaatgttcgagaagtgctttcttgcctccctgaaaccacggtccactcgccatttgctgccctgtccggatttacagataatttcgactcgatccacgaactctgcaacagtgtacgagcaggagtttttctcgaggaatccgccattccttacatccgagagacgcaaggtatcccgtggaatgcctatatctatgatttctacaagcatggagatctcactgccctcgttcgcgataatggcatcaagcgtggagacgtgtggtttcacctcaaggacttctctttggttcttgcagcgatcgtcacgagtcttgccaacttcttggaaccttctgtattgcagaatgatgatttgagtgatctccaagatgcaggcgatattatggaggagatgactggctctggtgaggtcggttctcgtagcaatgtcggagttaagaaacgagattccggcgatgatgaatttaatcaaacggtcaagcacgggaaggcaggatgtgatggtgacgatcggggctctaataatgaaggaacccttctggatgtgtacaacgccttcaccctactccgagatgacttcgatgagaagttcagaagcatttgggcttga

SEQ ID NO: 22070 - protein, 1781 aa, Muscodor strobelii
  misc_feature: SGI Peptide ID NO. 567484
  misc_feature (757)..(928): Pfam Id: PF00270 Pfam Desc: DEAD/DEAH box helicase
  misc_feature (1254)..(1331): Pfam Id: PF00271 Pfam Desc: Helicase conserved C-terminal domain
  misc_feature (753)..(924): Pfam Id: PF04851 Pfam Desc: Type III restriction enzyme, res subunit
  misc_feature (18)..(1781): NCBI GI: 261352028 Blast Desc: DEAD/DEAH box helicase [Verticillium albo-atrum VaMs.102]
  misc_feature (18)..(1781): NCBI GI: 239615191 Blast Desc: DEAD/DEAH box helicase [Ajellomyces dermatitidis ER-3]
  misc_feature (18)..(1781): NCBI GI: 261192386 Blast Desc: DEAD/DEAH box helicase [Ajellomyces dermatitidis SLH14081] gi|239589475|gb|EEQ72118.1| DEAD/DEAH box helicase [Ajellomyces dermatitidis SLH14081]
  misc_feature (17)..(1781): NCBI GI: 169615567 Blast Desc: SNOG_10942 [Phaeosphaeria nodorum SN15] gi|160702991|gb|EAT81441.2| SNOG_10942 [Phaeosphaeria nodorum SN15]
  misc_feature (17)..(1781): NCBI GI: 189209770 Blast Desc: DEAD/DEAH box helicase [Pyrenophora tritici-repentis Pt-1C-BFP] gi|187977310|gb|EDU43936.1| DEAD/DEAH box helicase [Pyrenophora tritici-repentis Pt-1C-BFP]
  misc_feature (17)..(1781): NCBI GI: 242826326 Blast Desc: DEAD/DEAH box helicase, [Talaromyces stipitatus ATCC 10500] gi|218712436|gb|EED11862.1| DEAD/DEAH box helicase, [Talaromyces stipitatus ATCC 10500]
  misc_feature (17)..(1781): NCBI GI: 145248922 Blast Desc: An14g01730 [Aspergillus niger] gi|134081473|emb|CAK46486.1| protein product [Aspergillus niger]
  misc_feature (18)..(1781): NCBI GI: 225556207 Blast Desc: DEAD/DEAH box helicase [Ajellomyces capsulatus G186AR]
  misc_feature (267)..(1781): NCBI GI: 156044614 Blast Desc: SS1G_10411 [Sclerotinia sclerotiorum 1980] gi|154694799|gb|EDN94537.1| SS1G_10411 [Sclerotinia sclerotiorum 1980]
  misc_feature (191)..(1781): NCBI GI: 240111315 Blast Desc: DEAD/DEAH box helicase domain containing protein [Coccidioides posadasii C735 delta SOWgp]
MPQYAGSWQRRYPNHAQLMAWFASVNPLRVDILSDFAGKELFAIHGDSLITYCLHDGSVDFTDGFQLLHAVHAVESFLSKLKALGCNYHIIWFEDEKSLCVPRHAFRSHVYKYALTRAILVEHFASTSISSQGDPVKSRVFSSSESTEFRTYLSQTPLHFIMCSHGGATESEPEPSVLGHLAVSYRMSHLGYCVGFIDQVEIQNSKVYTSIITPSAELQPKIGRRSDYDYIVDDLSSRSCLEETERNSLMTAAKDKLEMFRDTWVVGSLTVRDIINLFALSLLICKKKTSRNFCPRKIADYLTHLSLLRYCRLSDRSFATADCRLDSGDNTFLQELFFDACNIISEWRNLAFSRSLRWDAYDLLDGRLYGHIRHGYLKTPWPQAVESHFTTLCWVLKELTSGLYFRHQFSPYGRSLAFTEPSAAHQFTSTATMSSPTVLAFSHPVVDLHLREVQLDTERSSTPKSNFIFKDLTHWHNAKKLVDAKIIPKPLGFHAKRRNQMLMADTITYAASLSGATGKRINPETIIVQTHGNAQRNKPSSELPREPRPALKNKKQNAKSGPASKKIEKSGRDKALEAAQEIQAKKAAGKASDVLVFWRKQCAELEKEQDLVKRYLKAEKYFIKLGPETQDLKSEVSLYLCYILTLVRGSGGSARIYADEDIFAMIWSSVMKTRDFPITREIAKQLTPLSRALGIPFDVPLDMLQRREFPFHWTKSVAKVALPFNMNPLEFQLQHCGPYLERTFDSAPDSRVPFHPDAWQRKVLDTIDQDKSLFVVAPTSSGKTFISFYAMKKVLQANNDDVLVYVAPTKALVNQVAAEIQARFSKSYHGEGQEDRSVWAIHTRDYRVNHPHKCQILVTVPHILQIMLLAPSNSNTPNGFSRRVKRIIFDEVHCIGQSDEGVIWEQLLLLAPCPIIALSATVGNPEEFMTWLEDVQKAKGLKMEMIIHNARYSDLRHFIYTPPTRYSFTGLTSVDQLPIPGLDAKDNRFAFIHPFGATFGTNTNSLEGVNLEPRDCLDLWRSFVNHQNNEHPVKETLLPTKFISVPATKSDVLVWAHALKKQLEQWIPDPTSPIDVMRQEFRARCHNHIANICDKDSLSPDDSQKSGIMYKHSTFALIFDLRSNGGLPAIIFNYDRQACERTARALLTILAWAEDEYKENSLDWKKKLADFEKWQLSQSRKKERAPKKSKTQDDEGNKMNRLRDAAGEESSQWEKFDPEEAIPKFSFADGMRLSREELNELLATLDEEKVQPDLLIALRRGIGIHHSGMNRRYRQVVEMLFRRGFLTVVIATGTLALGINMPCKTVVFMEDSPFLSALNFRQAAGRAGRRGFDLLGNVVFHKIPPQRAMEIMSSRLPDLRGQFPHFVTLILRLFVLLDGTNDSEYAVNAVNSILAQTQLYLGGPEAQMSIRHHLRFSIDYLRRQDLLSETGKSLNFSGLVGHLYFTENAALAFHSLLKGGVFHKLSLGIRDESRKADILREMMLVLCHLFSRIPLYKYEDKDWLNSVVHRSPSLVILPDLPAKAATVLRKHNDDTLRIFHGYVHSYTTQHLSDVVDNELPLTKHKIKPAALSNCQESCNVREVLSCLPETTVHSPFAALSGFTDNFDSIHELCNSVRAGVFLEESAIPYIRETQGIPWNAYIYDFYKHGDLTALVRDNGIKRGDVWFHLKDFSLVLAAIVTSLANFLEPSVLQNDDLSDLQDAGDIMEEMTGSGEVGSRSNVGVKKRDSGDDEFNQTVKHGKAGCDGDDRGSNNEGTLLDVYNAFTLLRDDFDEKFRSIWA

SEQ ID NO: 22071 - DNA, 450 bp, Muscodor strobelii
  misc_feature: SGI EST ID NO. CUFF.51848.0
  misc_feature: Variant of the nucleotide sequence at SEQ ID NO 22069
cttgctccgtcaaactccaatactccgaatggattttcacgaagagtcaagcgtatcatcttcgacgaagttcactgtattggtcaatcagacgaaggcgtgatttgggagcagctcctcctgctagcaccttgtcctatcatcgcgttgtccgcaacagttggtaacccagaggagttcatgacatggctcgaggacgtccaaaaggcaaagggattaaaaatggaaatgattatccacaatgcacgatactctgacttacgtcactttatctacacgccacccacgcgatattcctttactggcctcacgtctgttgaccagttaccgatcccggggttggacgcaaaagacaaccgcttcgcctttattcatccattcggagccacttttggaacgtacgaatacaaattccttagaaggcgtcaatttagagccacgtgattgtct

SEQ ID NO: 22072 - DNA, 1722 bp, Muscodor strobelii
  misc_feature: SGI cDNA ID NO. 567485
  misc_feature: Encodes the peptide sequence at SEQ ID NO 22073
atgacgcgcgatatcttcagctgcaatgctgtggcaaagactttcgaacgggaccgagatgcagccaggcactcgttgactatcatatacgagtgggaagagtatcggtttccccaatggcagaccaatctcctgacgaacaaccacctccaacggccgaagccgagcatcccccactcttacccttgccaaggctaccagggtcaatatcgcgaagtattcgacgtcgtaaacctacagagtttcggagcaggaactggcatccaaaaactcgtacaggttgttcggtatgcaaagcttcctgaacaatgtgcgcaactaccgtcgcctcgctatgcactaccatggctgtcaaacaagatcaggagagcatctgaagatgaagagctcttacatccgtttaaagagatggctaactggagtctgtcttcaattctcgagcccttctactggtatgattccatgggaaagggttggctcgtagaaggaagtaaggttatgttggagctagccaatgagtttcaaagtgttcggcattctctctgcgcacttggtgcacttcatacggcatacttacgaggtgagcgctattcacattgcccgcagtcgatggcgctcacatcaagtgggcaattggttctggttcgttataatctagctgtgcaatctatacaagaggagctcggcaaagaagcactgtctccacggccaatactgttatgctgtgctttattcgtgtggttggagtttcttcgaaacaacatcaaggaaggagtcaggcatctcaacagcggactacagttaattcagggctggatgcgacgatcgcaaattggtagcaaaaccgtctctccgctaacatcagaccccgccgacaaaacgattatgcagcttttcacgaagctacacacaaaagcggaggcattcggcgctgccttcaccgagtttccccttgccagctatgagaaactacctgaatatgactctatgcgaagccatcaacagtatcctctgcaattcgaaaacttcaatctgttcgacggcgcaatggtcaaagtctcgcagatcacacgctacaaagcacaggtagaacactcgaggggccctctgattcccaaaacatcggaatacgtcgagttattgcaggcgagagattgtgtactgagcgaaattctggaactacaaaaaagactcgcgcagaataagctctcttcaaaaggtgcgaaggtcgaacgacgtggacttcttctgactaagatctacatcctcatcgccaagactgcattggagaacctttttggagaatcactggcggattctagtaggcatttcgatgactttgccatcatgctcaacatcgcgcaagagattctatgggcgaaaacggagcatgacccagcactggccctgaccctcgaccccgggctgatgtacgtcttgttttacgcatgtctcaaatgccgtgccccttctttacgccttaaagctctgtctcttttgaagataacaccggaacgagaaggaatgtggcatcgtgatgccttgataggcgctgcctcgtggaaaattcgatttgatgaggaatttaagtcagatgctctttgccaaggtattgaacagtctgatgcatcaagcgtcagtggatcttgtcaagcgaaatgtcaggttttggcagacgacatgcctgagcttgtgcgtcaatttggtagcctacagtggtga

SEQ ID NO: 22073 - protein, 573 aa, Muscodor strobelii
  misc_feature: SGI Peptide ID NO. 567485
  misc_feature (151)..(511): NCBI GI: 67525925 Blast Desc: AN3420.2 [Aspergillus nidulans FGSC A4] gi|40744208|gb|EAA63388.1| AN3420.2 [Aspergillus nidulans FGSC A4] gi|259485593|tpe|CBF82745.1| TPA: conserved protein nidulans
  misc_feature (169)..(510): NCBI GI: 169765161 Blast Desc: [Aspergillus oryzae RIB40] gi|83764906|dbj|BAE55050.1| protein product [Aspergillus oryzae]
  misc_feature (126)..(527): NCBI GI: 145608866 Blast Desc: MGG_06312 [Magnaporthe grisea 70-15] gi|145016291|gb|EDK00781.1| MGG_06312 [Magnaporthe grisea 70-15]
  misc_feature (164)..(510): NCBI GI: 169613811 Blast Desc: SNOG_10039 [Phaeosphaeria nodorum SN15] gi|160707224|gb|EAT82374.2| SNOG_10039 [Phaeosphaeria nodorum SN15]
  misc_feature (133)..(519): NCBI GI: 242821979 Blast Desc: conserved [Talaromyces stipitatus ATCC 10500] gi|218712712|gb|EED12137.1| conserved [Talaromyces stipitatus ATCC 10500]
  misc_feature (134)..(523): NCBI GI: 256723710 Blast Desc: NECHADRAFT_3658 [Nectria haematococca mpVI 77-13-4]
  misc_feature (165)..(546): NCBI GI: 212544262 Blast Desc: conserved [Penicillium marneffei ATCC 18224] gi|210065254|gb|EEA19348.1| conserved [Penicillium marneffei ATCC 18224]
  misc_feature (169)..(510): NCBI GI: 119483164 Blast Desc: C6 zinc finger domain protein [Neosartorya fischeri NRRL 181] gi|119409765|gb|EAW19713.1| C6 zinc finger domain protein [Neosartorya fischeri NRRL 181]
  misc_feature (176)..(542): NCBI GI: 238482587 Blast Desc: AFLA_076150 [Aspergillus flavus NRRL3357] gi|220700582|gb|EED56920.1| AFLA_076150 [Aspergillus flavus NRRL3357]
  misc_feature (151)..(542): NCBI GI: 169765970 Blast Desc: [Aspergillus oryzae RIB40] gi|83765311|dbj|BAE55454.1| protein product [Aspergillus oryzae]
MTRDIFSCNAVAKTFERDRDAARHSLTIIYEWEEYRFPQWQTNLLTNNHLQRPKPSIPHSYPCQGYQGQYREVFDVVNLQSFGAGTGIQKLVQVVRYAKLPEQCAQLPSPRYALPWLSNKIRRASEDEELLHPFKEMANWSLSSILEPFYWYDSMGKGWLVEGSKVMLELANEFQSVRHSLCALGALHTAYLRGERYSHCPQSMALTSSGQLVLVRYNLAVQSIQEELGKEALSPRPILLCCALFVWLEFLRNNIKEGVRHLNSGLQLIQGWMRRSQIGSKTVSPLTSDPADKTIMQLFTKLHTKAEAFGAAFTEFPLASYEKLPEYDSMRSHQQYPLQFENFNLFDGAMVKVSQITRYKAQVEHSRGPLIPKTSEYVELLQARDCVLSEILELQKRLAQNKLSSKGAKVERRGLLLTKIYILIAKTALENLFGESLADSSRHFDDFAIMLNIAQEILWAKTEHDPALALTLDPGLMYVLFYACLKCRAPSLRLKALSLLKITPEREGMWHRDALIGAASWKIRFDEEFKSDALCQGIEQSDASSVSGSCQAKCQVLADDMPELVRQFGSLQW

SEQ ID NO: 22074 - DNA, 1272 bp, Muscodor strobelii
  misc_feature: SGI cDNA ID NO. 567486
  misc_feature: Encodes the peptide sequence at SEQ ID NO 22075
atgtctcaagcaactacctcgcagcttcccatcttgattatgggtgcgggtccggcaggtctgactcttgcccagtcactgcgccgacttgatattcccttccggctcttcgagcgagattcacaaaccttctctcgacctcaaggctatcgtatacgcctttcagatggcgcgaaaagtctcaaagcagttgtgcccgaggatgtcgcagctctctttgacgcttcttgcggcgatgccatgaaaggcatgaaaaagattgatgcactgactggcgctgaaatggctggaaaacctggtggtgctccaggtggtccgagaagaccgatgatggggcctgatcccaggacagtggatcgtggagttttacgcaaggtgctgctaaacggcatagaggagatagtcgagtttggaaaaacctttgaccgatacgagattgatgaagagcatgagtgcgttgtggcattctttagcaatgggacgaaagcaaaagggaggttcttggtcggtgccgaaggacgatcatcacgcgtccgacgccaatacgtgccggacatagttcgagtcgatacggagggctgtttgctgttcggcatgtctccaatcacgccagagctatctgagatattggataaagctggcgtcgtgggcatgtgcctgctagaagatcagaagacattaccgacgaaagctgtcactctgatggaacgcatcgagtggagctctgggataagagacaatatggcaaacaacttcgcgactagcggcgttaagttgcctcaggactacgtgtattgggtctatgcaacacgccgctcgagtttgcctccgccattcaattcgcttcctgctggtggggatcaagaagcggcagcgaatgcaataatctccttgaccaaaaacttttcccctgagatacgtgcggtattcgcaggacaagatccttcacagaccaatgtattccatctaatttcaacacaccctgacattaagccttggactgctagcaaatacgtcacagtattaggtgatgcaattacggtcatgcctcccactgcggccagcggcgccaacacagccctgttgaatgcacagcaactctcggggatgattgaagagcatagaaatggaataacacttgaggctgtgagcaagtatgaggaggacttgcgaagaatcgctggggaaaggatcaacttgagtcttggtgcaggcgttcgtgcattcgggcaaaagccacttgaggagtgtgagatcatcaagagtcagtag

SEQ ID NO: 22075 - protein, 423 aa, Muscodor strobelii
  misc_feature: SGI Peptide ID NO. 567486
  misc_feature (8)..(401): Pfam Id: PF01494 Pfam Desc: FAD binding domain
  misc_feature (23)..(420): NCBI GI: 238842571 Blast Desc: cercosporin toxin biosynthesis protein [Microsporum canis CBS 113480]
  misc_feature (28)..(421): NCBI GI: 145258566 Blast Desc: An04g07370 [Aspergillus niger] gi|134074705|emb|CAK44737.1| protein product [Aspergillus niger]
  misc_feature (23)..(420): NCBI GI: 169765924 Blast Desc: [Aspergillus oryzae RIB40] gi|238482537|ref|XP_002372507.1| conserved [Aspergillus flavus NRRL3357] gi|83765288|dbj|BAE55431.1| protein product oryzae]
  misc_feature (6)..(401): NCBI GI: 145611384 Blast Desc: MGG_00427 [Magnaporthe grisea 70-15] gi|145018681|gb|EDK02960.1| MGG_00427 [Magnaporthe grisea 70-15]
  misc_feature (10)..(417): NCBI GI: 90656022 Blast Desc: cercosporin toxin biosynthesis protein [Cercospora nicotianae]
  misc_feature (11)..(416): NCBI GI: 156053664 Blast Desc: SS1G_05679 [Sclerotinia sclerotiorum 1980] gi|154703460|gb|EDO03199.1| SS1G_05679 [Sclerotinia sclerotiorum 1980]
  misc_feature (9)..(419): NCBI GI: 169611006 Blast Desc: SNOG_08612 [Phaeosphaeria nodorum SN15] gi|160702200|gb|EAT83780.2| SNOG_08612 [Phaeosphaeria nodorum SN15]
  misc_feature (21)..(420): NCBI GI: 66807967 Blast Desc: DDB_G0286363 [Dictyostelium discoideum AX4] gi|60466143|gb|EAL64206.1| DDB_G0286363 [Dictyostelium discoideum AX4]
  misc_feature (11)..(391): NCBI GI: 169613591 Blast Desc: SNOG_09926 [Phaeosphaeria nodorum SN15] gi|111061141|gb|EAT82261.1| SNOG_09926 [Phaeosphaeria nodorum SN15]
  misc_feature (4)..(420): NCBI GI: 256666455 Blast Desc: FAD-binding domain protein [Streptomyces sp. AA4]
MSQATTSQLPILIMGAGPAGLTLAQSLRRLDIPFRLFERDSQTFSRPQGYRIRLSDGAKSLKAVVPEDVAALFDASCGDAMKGMKKIDALTGAEMAGKPGGAPGGPRRPMMGPDPRTVDRGVLRKVLLNGIEEIVEFGKTFDRYEIDEEHECVVAFFSNGTKAKGRFLVGAEGRSSRVRRQYVPDIVRVDTEGCLLFGMSPITPELSEILDKAGVVGMCLLEDQKTLPTKAVTLMERIEWSSGIRDNMANNFATSGVKLPQDYVYWVYATRRSSLPPPFNSLPAGGDQEAAANAIISLTKNFSPEIRAVFAGQDPSQTNVFHLISTHPDIKPWTASKYVTVLGDAITVMPPTAASGANTALLNAQQLSGMIEEHRNGITLEAVSKYEEDLRRIAGERINLSLGAGVRAFGQKPLEECEIIKSQ

SEQ ID NO: 22076 - DNA, 1518 bp, Muscodor strobelii
  misc_feature: SGI EST ID NO. CUFF.51866.0
  misc_feature: Variant of the nucleotide sequence at SEQ ID NO 22074
ctcttgcccagtcactgcgccgacttgatattcccttccggctcttcgagcgagattcacaaaccttctctcgacctcaaggctatcgtatacgcctttcagatggcgcgaaaagtctcaaagcagttgtgcccgaggatgtcgcagctctctttgacgcttcttgcggcgatgccatgaaaggcatgaaaaagattgatgcactgactggcgctgaaatggctggaaaacctggtggtgctccaggtggtccgagaagaccgatgatggggcctgatcccaggacagtggatcgtggagttttacgcaaggtgctgctaaacggcatagaggagatagtcgagtttggaaaaacctttgaccgatacgagattgatgaagagcatgagtgcgttgtggcattctttagcaatgggacgaaagcaaaagggaggttcttggtcggtgccgaaggacgatcatcacgcgtccgacgccaatacgtgccggacatagttcgagtcgatacggagggctgtttgctgttcggcatgtctccaatcacgccagagctatctgagatattggataaagctggcgtcgtgggcatgtgcctgctagaagatcagaagacattaccgacgaaagctgtcactctgatggaacgcatcgagtggagctctgggataagagacaatatggcaaacaacttcgcgactagcggcgttaagttgcctcaggactacgtgtattgggtctatgcaacacgccgctcgagtttgcctccgccattcaattcgcttcctgctggtggggatcaagaagcggcagcgaatgcaataatctccttgaccaaaaacttttcccctgagatacgtgcggtattcgcaggacaagatccttcacagaccaatgtattccatctaatttcaacacaccctgacattaagccttggactgctagcaaatacgtcacagtattaggtgatgcaattacggtcatgcctcccactgcggccagcggcgccaacacagccctgttgaatgcacagcaactctcggggatgattgaagagcatagaaatggaataacacttgaggctgtgagcaagtatgaggaggacttgcgaagaatcgctggggaaaggatcaacttgagtcttggtgcaggcgttcgtgcattcgggcaaaagccacttgaggagtgtgagatcatcaagagtcagtaggactcaagcttctgtctaggaatgcatcatgtagcatcataagtcctgtgtagcttttcttatggatcttctgtaccaatactcttttcggaatgtcccgctggctaaatcaatcatttaatgctacaactacaggaagtgatgtcggcgaagattatgttcgattgcatggctctacctaaatgattactcatcggtatgacctcggccgaagctatgccgccgccgatttcttttctagaatatagtcctagaatacctactgtgcctctcagatgtgatcacttcatgttgttgaaatgaacgagcg

SEQ ID NO: 22077 - DNA, 534 bp, Muscodor strobelii
  misc_feature: SGI cDNA ID NO. 567487
  misc_feature: Encodes the peptide sequence at SEQ ID NO 22078
atggaacccttagtcgagttcatggaagtcgtcgcgggagacaaaagacttcgcttgtccctgactcggactgtagcacagctcacagccatgtgtacgggattgtttttgggacaggatagacactcctggcatcactcctattgcatttggttcggtgcctcgtgggagatgtaccgaagaaaacataagcaggacccaagtgcgccaatcataccggctgagcgctttcgcaaccctggcaaaggctggacaggttggttccgcgtcatgagcaacagcttcagccttcttggatgctgtatgatgttggtgacgccaattgtgcgcctgtacgaagggaaggaagttttgaagattatgccgtactttctcatttactgttcgatcatcatcagtgacttagtcggcatagatgagacgccaaagactaagcaagccactaccgatcagagcccggtcgagaaatccaaagttccagcaatgcatacgtctacaaatcccgactccaaagacgttgaggacgataagtga

SEQ ID NO: 22078 - protein, 177 aa, Muscodor strobelii
  misc_feature: SGI Peptide ID NO. 567487
MEPLVEFMEVVAGDKRLRLSLTRTVAQLTAMCTGLFLGQDRHSWHHSYCIWFGASWEMYRRKHKQDPSAPIIPAERFRNPGKGWTGWFRVMSNSFSLLGCCMMLVTPIVRLYEGKEVLKIMPYFLIYCSIIISDLVGIDETPKTKQATTDQSPVEKSKVPAMHTSTNPDSKDVEDDK

SEQ ID NO: 22079 - DNA, 1284 bp, Muscodor strobelii
  misc_feature: SGI EST ID NO. CUFF.51912.0
  misc_feature: Variant of the nucleotide sequence at SEQ ID NO 22077
gctttgtatcacaaaataacttgtaccacccaaccattgattacagtgtgcaaatagccgcgtaataatagctaattcgactctcttttctccagattgaatctcatgatcccatcggagtggttggtgcggctccgtagaagcaaggaattcgaatgaggctacagcataacaagcctcaatcttgactaacccactatcgaccagacactatattgtcaatcaatgtaatgaacaattcagtcttgagcatcaataagccgcaaagaagaaacactaagtcgcagactatgagcttcaatatggaacccttagtcgagttcatggaagtcgtcgcgggagacaaaagacttcgcttgtccctgactcggactgtagcacagctcacagccatgtgtacgggattgtttttgggacaggatagacactcctggcatcactcctattgcatttggttcggtgcctcgtgggagatgtaccgaagaaaacataagcaggacccaagtgcgccaatcataccggctgagcgctttcgcaaccctggcaaaggctggacaggttggttccgcgtcatgagcaacagcttcagccttcttggatgctgtatgatgttggtgacgccaattgtgcgcctgtacgaagggaaggaagttttgaagattatgccgtactttctcatttactgttcgatcatcatcagtgacttagtcggcatagatgagacgccaaagactaagcaagccactaccgatcagagcccggtcgagaaatccaaagttccagcaatgcatacgtctacaaatcccgactccaaagacgttgaggacgataagtgagcatcttacacgcaaagccagagccacttgactgaaacatcattcgggcgatgtggagaagggcactctctgagacgtatggtgtgaccaaatgattctaatgctggagaacgagtaatagtctgtcgagggaaagggaaatttaatttgaaattgcgtgaggagttgggaaggacgacgtcatcgagcggaatatgaaggattcctttaacgtgatcatgattactgaattatatcaactattttagcgggacatttgtttcgctgcctttttcttagtttcgtacgctcattatgagaaaaccttctcgaccgttgatacatagctcttggtgcgaccttatcattatgttaggattctagattacaaatgatagttcaagaagtccaggtctctcagcgtttgcagatcagcagaggcaagaactgaatcgcgattgatcatgct

SEQ ID NO: 22080 - DNA, 558 bp, Muscodor strobelii
  misc_feature: SGI cDNA ID NO. 567488
  misc_feature: Elevated expression when VOC is produced
  misc_feature: Encodes the peptide sequence at SEQ ID NO 22081
atggaacccttagtcgagttcatggaagtcgtcgcgggagacaaaagacttcgcttgtccctgactcggactgtagcacagctcacagccatgtgtacgggattgtttttgggacaggatagacactcctggcatcactccaaatctatcattttcgcaatcagctattgcatttggttcggtgcctcgtgggagatgtaccgaagaaaacataagcaggacccaagtgcgccaatcataccggctgagcgctttcgcaaccctggcaaaggctggacaggttggttccgcgtcatgagcaacagcttcagccttcttggatgctgtatgatgttggtgacgccaattgtgcgcctgtacgaagggaaggaagttttgaagattatgccgtactttctcatttactgttcgatcatcatcagtgacttagtcggcatagatgagacgccaaagactaagcaagccactaccgatcagagcccggtcgagaaatccaaagttccagcaatgcatacgtctacaaatcccgactccaaagacgttgaggacgataagtga

SEQ ID NO: 22081 - protein, 185 aa, Muscodor strobelii
  misc_feature: SGI Peptide ID NO. 567488
  misc_feature: Useful for introducing or modulating the production of volatile compounds
MEPLVEFMEVVAGDKRLRLSLTRTVAQLTAMCTGLFLGQDRHSWHHSKSIIFAISYCIWFGASWEMYRRKHKQDPSAPIIPAERFRNPGKGWTGWFRVMSNSFSLLGCCMMLVTPIVRLYEGKEVLKIMPYFLIYCSIIISDLVGIDETPKTKQATTDQSPVEKSKVPAMHTSTNPDSKDVEDDK

SEQ ID NO: 22082 - DNA, 1284 bp, Muscodor strobelii; identical to SEQ ID NO: 22079
  misc_feature: SGI EST ID NO. CUFF.51912.0
  misc_feature: Variant of the nucleotide sequence at SEQ ID NO 22080

SEQ ID NO: 22083 - DNA, 1629 bp, Muscodor strobelii
  misc_feature: SGI cDNA ID NO. 567489
  misc_feature: Encodes the peptide sequence at SEQ ID NO 22084
atggcgtactcgaaatcgttgcccgagctcgcacacatcatccagtctcgtaccaacagtatatatgacgctttaaacgaagccggcctgcctcaaccatcttttagtctccatggcagtgcgcgctcaccctctccaaggtccgaaggggttatcgaggataaacgagctcaattactcgaggcaattgatgaactacgggccttggtcttaggcccatcgtcccacgtcttctttctctcattcctaggaccggcgtggacagccactctcaatgtcatatacaagttccgtatcgcacaaaatctgccactcagagaaacgatttcttataaggagcttgcggaactatgcggcctgaccgagtttgacaccacaaggtacgtccgagcagctatcacgcttcgcattttcgaggaaccgcgaccaggatacgtccggcataacgcagcgtctgaagcccttgccacgacactcctggatgactggctgggatttgcgactgaagaagttgcaccatcagcgttgaaggttgcagacgtcctcaggaagtaccccggaagcataaatcctgcacaatcaccgttcgcactcgccaacggcagtgatggcgacaaagacttgttcgccatcatcgcgccagaccatgctcgtgtcgagaggctctccaaggccatgtcgttctcaatgaacgtgccggatatgtcacccgaccatgtggtgaaaagcgtgccatggctttctgcagaacctggagacgacactgaaggccccaagatcgtagtcgacgtcggaggttctcagggtactctttgcagagccctactacagtaccacccttcgattgaaaaggcaatcgccatggacctaccagaggtgatagaaaaggctaagaccgagctcaccgacaacctcgatgggcggctcgagctcatgccttacaatttcttcgagaaacagacaatcagcgcagatgtttacttttttcgctgtgtattccatgattgggccgatccgttcgttgtcacaatccttagaaatcagattccggccttgaagcccggcgccacgatcatcatcaatgagagatgccttgagcccccatgcccgtcgaccctcgtcaaggatcaattcgcagccgcatgtaatatccacatgcaacttggtgccaatgcgcacgagcgtactcgagatgactgggcgcggctcgtcgcgcaagctgatgatcgttttgtaatcaagtcaattgtgactccagctcattctgctctttctttgattgaggtcgtctggaatgatgttctgaacaaagatttggacaattatcgcagtcaggaagcaagtatcgcaaatgaagtcctaccacctattgacgcaaccgcggccgatggatccgtcccgcgagaacacaacgccacaagtgagactgatgtgatcaccgaggtagagaatttcaacggcagatatgacaatggagtcgcaaacgattctgcatcgagtagcgatgctttatcaagcgagacgcagatcagcgagttagagaattgtaagggctctgatggagctgagtccgccaggatcaagcctccctcgcctgtgcgcggcgcgttcccttctaccttcggttaa

SEQ ID NO: 22084 - protein, 542 aa, Muscodor strobelii
  misc_feature: SGI Peptide ID NO. 567489
  misc_feature (141)..(405): Pfam Id: PF00891 Pfam Desc: O-methyltransferase
  misc_feature (261)..(405): Pfam Id: PF00891 Pfam Desc: O-methyltransferase
  misc_feature (1)..(432): NCBI GI: 189208266 Blast Desc: sterigmatocystin 8-O-methyltransferase precursor [Pyrenophora tritici-repentis Pt-1C-BFP] gi|187976559|gb|EDU43185.1| sterigmatocystin precursor Pt-1C-BFP]
  misc_feature (1)..(432): NCBI GI: 169613869 Blast Desc: SNOG_10068 [Phaeosphaeria nodorum SN15] gi|111061283|gb|EAT82403.1| SNOG_10068 [Phaeosphaeria nodorum SN15]
  misc_feature (1)..(432): NCBI GI: 116206014 Blast Desc: CHGG_02300 [Chaetomium globosum CBS 148.51] gi|88182897|gb|EAQ90365.1| CHGG_02300 [Chaetomium globosum CBS 148.51]
  misc_feature (1)..(433): NCBI GI: 212536596 Blast Desc: O-methyltransferase, [Penicillium marneffei ATCC 18224] gi|210070853|gb|EEA24943.1| O-methyltransferase, [Penicillium marneffei ATCC 18224]
  misc_feature (1)..(431): NCBI GI: 242800307 Blast Desc: O-methyltransferase, [Talaromyces stipitatus ATCC 10500] gi|218716905|gb|EED16326.1| O-methyltransferase, [Talaromyces stipitatus ATCC 10500]
  misc_feature (1)..(431): NCBI GI: 212534482 Blast Desc: O-methyltransferase, [Penicillium marneffei ATCC 18224] gi|210069796|gb|EEA23886.1| O-methyltransferase, [Penicillium marneffei ATCC 18224]
  misc_feature (6)..(431): NCBI GI: 242813653 Blast Desc: hydroxyindole O-methyltransferase, [Talaromyces stipitatus ATCC 10500] gi|218714548|gb|EED13971.1| hydroxyindole O-methyltransferase, [Talaromyces stipitatus ATCC 10500]
  misc_feature (9)..(432): NCBI GI: 116192635 Blast Desc: CHGG_06035 [Chaetomium globosum CBS 148.51] gi|88181948|gb|EAQ89416.1| CHGG_06035 [Chaetomium globosum CBS 148.51]
  misc_feature (7)..(411): NCBI GI: 212545252 Blast Desc: O-methyltransferase, [Penicillium marneffei ATCC 18224] gi|210065749|gb|EEA19843.1| O-methyltransferase, [Penicillium marneffei ATCC 18224]
  misc_feature (2)..(431): NCBI GI: 238507580 Blast Desc: O-methyltransferase, [Aspergillus flavus NRRL3357] gi|220688510|gb|EED44862.1| O-methyltransferase, [Aspergillus flavus NRRL3357]
  misc_feature (6)..(416): SWISSPROT Homolog: EC 2.1.1.110 Sterigmatocystin 8-O-methyltransferase
MAYSKSLPELAHIIQSRTNSIYDALNEAGLPQPSFSLHGSARSPSPRSEGVIEDKRAQLLEAIDELRALVLGPSSHVFFLSFLGPAWTATLNVIYKFRIAQNLPLRETISYKELAELCGLTEFDTTRYVRAAITLRIFEEPRPGYVRHNAASEALATTLLDDWLGFATEEVAPSALKVADVLRKYPGSINPAQSPFALANGSDGDKDLFAIIAPDHARVERLSKAMSFSMNVPDMSPDHVVKSVPWLSAEPGDDTEGPKIVVDVGGSQGTLCRALLQYHPSIEKAIAMDLPEVIEKAKTELTDNLDGRLELMPYNFFEKQTISADVYFFRCVFHDWADPFVVTILRNQIPALKPGATIIINERCLEPPCPSTLVKDQFAAACNIHMQLGANAHERTRDDWARLVAQADDRFVIKSIVTPAHSALSLIEVVWNDVLNKDLDNYRSQEASIANEVLPPIDATAADGSVPREHNATSETDVITEVENFNGRYDNGVANDSASSSDALSSETQISELENCKGSDGAESARIKPPSPVRGAFPSTFG

SEQ ID NO: 22085 - DNA, 1869 bp, Muscodor strobelii
  misc_feature: SGI cDNA ID NO. 567490
  misc_feature: Encodes the peptide sequence at SEQ ID NO 22086
atgccaaccgccccaagaacatgctgggatctcctaaagcacgatgacccacccccaaagcgccgcgcaacacacttcaaaacgcgggccggctgctttacgtgtaaaaaccggcgcgtgaaatgcgatgagggcaagccgatttgcgctcggtgcgtaaagtctggtcataaatgtcttggatatgacgatgcccggaggaatcctagcatcagcaatggcgactcgccaggttccgagcataaggggggagcccatgaccggtcaaaacatggcaaacagaattcaaagccccctactcttcttcctaggccatcgcaagaacttgcagtcgatttcttggccgcggagtcgcaagagcgccacatagacttggtgcgggcatcaatgacaccgtcatacctagagaccaaagacgttctctattttacacgattccagcaccagctactggccgatctatcaacatggaccgaaggagactactggcttcgacagattctccgcgaagtgctcctcgacgaaaccatacagcatgctgcgctggccgcatctgcaatgctaatggatatcgaggagcaggaaacatgccgtctttcgctacggcgggaactaagtcgcatcgctcttgagaatcacggaactgaagataccgaagagagctcagcgggaataacaacaaatcgtaacgatcaaacagacgacagaaggcccttaatctccctctcaccaacaagtacacacgggaaagcagcattacgccactacacgacagccctccaccaatgcagacaaagcctcctagcatccggcgtaacaccatcaacagcgcgctcatgtctaaccgtaacattcttcttcgccctcttcgagctaatacaaggtaatgtcggtgaagcagaccgtctctgcaccaatggtgtcaccctgctttacgacgccctagcacagcaaaatccagacggcacccctttcctcgtaccagatggtgagcttagggagatcaggctctcgttcgacaagctaagcatatcatggggtctttgtcccttcttcagcacaaaggcagcatcacgcgttctcgaaagtaggaccgccgagctcattccgcaccactacgaactaccatcaccagacacatcaatccacaccaaacaactcttctggaacgcattctcctcttcattctccatctttatgctcaccatccaatctctctctcatcccctaacccaccctcacatcttgacccaacgaacaaactatctctcccaactgaacacctggctcccaatactccgcaatctacacaccgcaaatccaacatcctgcgtcctagcaacaacttattgcactgcacagtcatatataatataccttcactgcatgcttgaccccaccgaattatcctacgatacatactatcccctcttcgaagacataatctctatctacgaatccctcctcccacacttctgcccacaaactgaaaacccctcaccccagccatttaacatatccctcctccgcgtaaccctagacatagacacaacccccttaataaccttcctgctcacaaaatgtcgttcgactcccctgcgcacccgttttttccagatcttccactccctaaccgcccatcaagcatggtggacaaaccccgctctcttctcctctcttcatgcgcacgccgaactcgaagaccttggtcgtgaccccgccaccgattatgttcccccagagtctagatttgtgtttctgcgctcggagtgggactacgaaggcagaagtatgatcgctgttttctgtcctgtgctagataggagagaggatggggaaggaatggtcagggtgcggattgaattttga

SEQ ID NO: 22086 - protein, 622 aa, Muscodor strobelii
  misc_feature: SGI Peptide ID NO. 567490
  misc_feature (30)..(69): Pfam Id: PF00172 Pfam Desc: Fungal Zn(2)-Cys(6) binuclear cluster domain
  misc_feature (22)..(536): NCBI GI: 261353862 Blast Desc: C6 zinc finger domain-containing protein [Verticillium albo-atrum VaMs.102]
  misc_feature (17)..(572): NCBI GI: 171683673 Blast Desc: protein product [Podospora anserina] gi|170941796|emb|CAP67450.1| protein product [Podospora anserina]
  misc_feature (35)..(622): NCBI GI: 46139683 Blast Desc: FG11356.1 [Gibberella zeae PH-1]
  misc_feature (22)..(543): NCBI GI: 156035595 Blast Desc: SS1G_13001 [Sclerotinia sclerotiorum 1980] gi|154698406|gb|EDN98144.1| SS1G_13001 [Sclerotinia sclerotiorum 1980]
  misc_feature (3)..(318): NCBI GI: 261355704 Blast Desc: conserved [Verticillium albo-atrum VaMs.102]
  misc_feature (15)..(551): NCBI GI: 116206476 Blast Desc: CHGG_02531 [Chaetomium globosum CBS 148.51] gi|88183128|gb|EAQ90596.1| CHGG_02531 [Chaetomium globosum CBS 148.51]
  misc_feature (12)..(318): NCBI GI: 154296624 Blast Desc: BC1G_12720 [Botryotinia fuckeliana B05.10] gi|150843303|gb|EDN18496.1| BC1G_12720 [Botryotinia fuckeliana B05.10]
  misc_feature (20)..(594): NCBI GI: 156041026 Blast Desc: SS1G_11491 [Sclerotinia sclerotiorum 1980] gi|154695875|gb|EDN95613.1| SS1G_11491 [Sclerotinia sclerotiorum 1980]
  misc_feature (18)..(126): NCBI GI: 67539864 Blast Desc: AN6102.2 [Aspergillus nidulans FGSC A4] gi|40738887|gb|EAA58077.1| AN6102.2 [Aspergillus nidulans FGSC A4]
  misc_feature (21)..(135): NCBI GI: 121711765 Blast Desc: C6 zinc finger domain protein [Aspergillus clavatus NRRL 1] gi|119401649|gb|EAW12072.1| C6 zinc finger domain protein [Aspergillus clavatus NRRL 1]
MPTAPRTCWDLLKHDDPPPKRRATHFKTRAGCFTCKNRRVKCDEGKPICARCVKSGHKCLGYDDARRNPSISNGDSPGSEHKGGAHDRSKHGKQNSKPPTLLPRPSQELAVDFLAAESQERHIDLVRASMTPSYLETKDVLYFTRFQHQLLADLSTWTEGDYWLRQILREVLLDETIQHAALAASAMLMDIEEQETCRLSLRRELSRIALENHGTEDTEESSAGITTNRNDQTDDRRPLISLSPTSTHGKAALRHYTTALHQCRQSLLASGVTPSTARSCLTVTFFFALFELIQGNVGEADRLCTNGVTLLYDALAQQNPDGTPFLVPDGELREIRLSFDKLSISWGLCPFFSTKAASRVLESRTAELIPHHYELPSPDTSIHTKQLFWNAFSSSFSIFMLTIQSLSHPLTHPHILTQRTNYLSQLNTWLPILRNLHTANPTSCVLATTYCTAQSYIIYLHCMLDPTELSYDTYYPLFEDIISIYESLLPHFCPQTENPSPQPFNISLLRVTLDIDTTPLITFLLTKCRSTPLRTRFFQIFHSLTAHQAWWTNPALFSSLHAHAELEDLGRDPATDYVPPESRFVFLRSEWDYEGRSMIAVFCPVLDRREDGEGMVRVRIEF

SEQ ID NO: 22087 - DNA, 4968 bp, Muscodor strobelii
  misc_feature: SGI cDNA ID NO. 567491
  misc_feature: Encodes the peptide sequence at SEQ ID NO 22088
atgagctttgcctcatgctcatggccgatatggcaggtcgatgacttcagcacctgctttcaatctgactatctccagatcctcttcccattaatcatattaggcttctctgtccttcatctctccgcccagaccatacatcacaaagtcaagataaaacaaccagacggatacgatcacatacccgagcatctcaaccatactgatatacctcccgaggaagaagatccgctagccacagaggaagatgaggatctgtccattgccggaaacggcggtggccgtctgtcgcttgtcagaaccaccaccaagggctccgtcgtccaagccgacaaccctcccgcccagaacctaatcgtggttgtcgaggaagcctcgatctgtgtccttgttgccgcgaatgtcgttgctctcgttactgacacctacgatggccgtggtcgctttgctgccatcgttggcatggtcatttgggcctacgttctaatccttaccactctccgactgttcctcggaaacacgaaatggcgcgtcccccgactgtggaaccatacggccaccatctacggcttccagtggctatttgccctcatcttgttccggtccgttctgatccgcgcctcgtctcgactgacgcagatcctcgtcatcgtcgagttcgccctcaccactttgctgttcggcattgccttgactactaggaaaggaaacaaaacagtcatactggaatgggagggcaatatcgagccatcccgggagcctctggcctcgctcttctcactagccacgtttggttgggttgacccgatcctgtactctggctacaaggaaccgctggagatcgacagggtgtggaatctgatgccccgtgataaagctgcagccgtactctccaattatcgccaagtcaagaagacttccacgttggctttccacttggtcaaacatttcaaggtcatgctgactgtgcagttcgtctgggctatctttggcggtctgttcacgtttgcgccaacacttcttctgcgcgccattctggagtatgtcgagacaccaactatcgcgcccctgaacgtcttgtggttgtatgtcatcttgttgccagtgtcggacattgcccgctctgtagccgacaatcaagcactctggatcggaaggaagatctgcattcacattcgttcgattatcataggagaaatctacgccaaggcacttcgacgcaaggctgtgagcggtggagatactgtcctagggaacacagacgttccgtccgcgaaatcctactggcagaagttcaaagcagttttcagcctgaaccaaaaagacaagaaagactctcaaaaggacaagactgataccgatttcgccaaggcggcgcccgacgaacaagcaaatgtcggaactatcatcaacttgatgtctgtggacagcttcaaagtctccgagtgcaccgcatacttgcatttcttgattgcttccgctcccaccatgctcgtcttgtctgtcgccctactatggcaagtgttgggaatcagtgctgtgccgggactcattgtcatggtactcctgattcctgtcaacatttacatcgcaaagggcttcaattacacacagaagaagatcatggctgctactgacaaacggatccacacgacgaatgagattctccagaacattcgcatcatcaaatatttcgcctgggagacgcgattcggagagattgttggcgagaagcggaacattgagttgagagctctgaggaacaggtacatcatttgggccatggctgttgctatttggaacaccgtcccaattttgattacgtttctctgctttttctcgtataccaaggtcgaagggaagcctctctacccatctgtcgcatttaccgccatttccctgttccttcttctccgagttcccctggaccagttcggagacatgcttgctcatgtgcaagaagccaaggtgtcggtcgatcgtgtcgaggagttcttgatggaggaagagacagataagtatcaccagctgggtgaagataatgtcgacagtgagggtcagcgagtcatcggattccgagatgccgcattcacctggggcaataaaaatgcagtcactgccgatggccctaccgccttccgtcttttggatatgaccgttgatttcaaaatcggaaagctaaacctaatcgctgggcctactggctcgggtaaaacgtccatgttgatggctctcctcggcgagatgtccctcttgaaaggcaaagtctatctcccaggtggacgtagtcgtgaagatgtccaccccgaccctgctacgggtttggctgaaacgtgcgcctatgtcgcacagactgcgtggttggtcaatgctaacatcaaggagaacattctattctcttcccgatatgacgagaaaagatacaaagaagttctagtcgcttgcgccctggagcgcgaccttgagatcctcgacaacggcgacgagactctggttggagagaatggcatcacactatctggaggccagaaacagcggatctctcttgctcgcgctgtgtactccaactcgcgccatgttctactcgacgattgtctgagcgctgttgattcgcataccgcgaagtggatattcacaaattgcatcaatggcccgctgatgaggggtaggacatgcattctcgttacacacaacactaccctgtgcgcgccgtccgccgcgtatgtcgtcttattagataacggcaggattgatgcccagggcgaagctctcgaggtcatcgaatctggaaagctgggcgaagagcttcggaacagatcccggcctgggtctcgccaaatttcgcgcgttccgtcccgtgtccctagtagcgttggcgaagaaagcggtgacacgttgatagatgatgggggagatggccatgctaatggccagccagcagccaagaaagcggctcagaagacggaagcaatgcaagagaccaaagctactggagctgtcaagtggtctgttatcagcctctatcttgcagccatgggcagctggtggttttggatcattgccctcgtggtgttcgccactcaacagcttagcggcgttgtctcaaacgtttggatcaaagaatgggctaaccagtacaccatgggcgttgaacaaatctcgccaattcaattcagcattacctctcagaactctggcagcgcctatgcggagtctgatccggatgttaatgtcgattactatctctacggtctggctcttattgggatcgccggtgccttgcttgctctcgttcgcgatatgtggctctttttcggatcacttactgcctcctggaagatccataatcgattgatggcagccatatgcagagcacagttcaaattttttgatgtcacgccgcttggacaactcatgaatcgattcagcaaggatctcgaggctgtggatcaacaagtagcaggagttgccattggtgtcatgacttgctcaatgggtatcgttatcactattattctgattgcatctgtcacccctggtttcctgatcgctgctttcttcatcaccttgatctacgttttcgtcgcgattttctacctgcgcgcttctcgcgatctgaagcgcttagaatcagtacaccggagtccgcttttccagcagttcggcgaaactctttcaggtgtcacaacgatccgtgcttacggtgatgagcgccgcttcatccgcgacaacctaacgcgtattaatacgcaattgcgtccgttcatcttcctgtggggcgctaacagatggctcgcatttcggactgatgtactgggtgacatggtcgcgttctttgcgggcgtctttgtcattctaagcctaggcaaaattgatcctggctcggctggtctatccttgagctacgccattggcttttcagaaaatattctctggcttattcggctgtatgcgacaaacgaacagaatatgaattcggtggagcgtgtgaaggagtatcttgatgtagaacaggaagctccagccatcgatgagaagaacagaccggcggcaaactggccagctcatggcggtgtcgagtttattggatactccacaagatatcgtaaggagctcgatcccgtcctcaagaatgtgacattcaaaatcgagccgcgacaaaaggttggtatcgttggtcgtaccggtgctggcaaaagttcactcacgcttgccatattccgcgccttagaggctgaatctggcaagatcttaattgacgatatcgatgtcgggctgatcggtctccaagatctccgagaagctataacaattgtccctcaagatccaacgctgtttacaggcacgatccgtactaacttggaccctttcaacttatataccgacgaacaggtcttcgctgcacttagaaaagtgcaacttatcagtgacatggaagagccagtcaagaataactctcaagcagctcaagtgttgctacccgaaccaccgtcgatagcgatagaagatgaacggggagagagcggcgcctcgagcccgaccgctaccaacaggaacattttcctcgacctttcatctcctgtcgctgagtcgggcaccaacctgtcacagggtcagcgacagcttctctgcctcgcacgtgctatgctcaaggacccgaaggtactggtcatggacgaggctacagcatcaatcgactataacaccgattcaaagattcaagagacgattcgtgagttggagactaccatcatcacgattgcacaccgcttggctactatcgtagattacgatagagtccttgtcttggatcacggtgcagttgtcgaatacgaccacccccataagttgctacagaagagcgatggccacttccggagcatgtgcgatatgagtggcgacttggctgtgctagaaaaagcggccaagaaagcatgggaggaccacaggcttgtggacgacgaatag

SEQ ID NO: 22088 - protein, 1655 aa, Muscodor strobelii
  misc_feature: SGI Peptide ID NO. 567491
  misc_feature (1018)..(1310): Pfam Id: PF00664 Pfam Desc: ABC transporter transmembrane region
  misc_feature (321)..(642): Pfam Id: PF00664 Pfam Desc: ABC transporter transmembrane region
  misc_feature (1386)..(1606): Pfam Id: PF00005 Pfam Desc: ABC transporter
  misc_feature (725)..(915): Pfam Id: PF00005 Pfam Desc: ABC transporter
  misc_feature (1050)..(1310): Pfam Id: PF00664 Pfam Desc: ABC transporter transmembrane region
  misc_feature (462)..(642): Pfam Id: PF00664 Pfam Desc: ABC transporter transmembrane region
  misc_feature (1387)..(1606): Pfam Id: PF00005 Pfam Desc: ABC transporter
  misc_feature (6)..(1654): NCBI GI: 258570867 Blast Desc: UREG_03754 [Uncinocarpus reesii 1704] gi|237904507|gb|EEP78908.1| UREG_03754 [Uncinocarpus reesii 1704]
  misc_feature (6)..(1655): NCBI GI: 226287065 Blast Desc: ATP-dependent bile acid permease [Paracoccidioides brasiliensis Pb18]
  misc_feature (6)..(1655): NCBI GI: 226277516 Blast Desc: ATP-dependent bile acid permease [Paracoccidioides brasiliensis Pb01]
  misc_feature (231)..(1655): NCBI GI: 225683442 Blast Desc: ATP-dependent bile acid permease [Paracoccidioides brasiliensis Pb03]
  misc_feature (149)..(1647): NCBI GI: 50553050 Blast Desc: YALI0E14234p [Yarrowia lipolytica] gi|49649804|emb|CAG79528.1| YALI0E14234p [Yarrowia lipolytica]
  misc_feature (1)..(1650): NCBI GI: 199431664 Blast Desc: DEHA2D12056p [Debaryomyces hansenii]
  misc_feature (149)..(1650): NCBI GI: 50420901 Blast Desc: DEHA0D13266g [Debaryomyces hansenii CBS767]
  misc_feature (5)..(1646): NCBI GI: 255726772 Blast Desc: ATP-dependent bile acid permease [Candida tropicalis MYA-3404] gi|240134236|gb|EER33791.1| ATP-dependent bile acid permease [Candida tropicalis MYA-3404]
  misc_feature (6)..(1650): NCBI GI: 254565521 Blast Desc: Transporter of the ATP-binding cassette (ABC) family involved in bile acid transport [Pichia pastoris GS115] gi|238029667|emb|CAY67590.1| Transporter of the ATP-binding (ABC)
  misc_feature (153)..(1650): NCBI GI: 126275291 Blast Desc: PICST_69625 [Pichia stipitis CBS 6054]
  misc_feature (245)..(1633): SWISSPROT Homolog: EC 3.6.3.44 Xenobiotic-transporting ATPase
MSFASCSWPIWQVDDFSTCFQSDYLQILFPLIILGFSVLHLSAQTIHHKVKIKQPDGYDHIPEHLNHTDIPPEEEDPLATEEDEDLSIAGNGGGRLSLVRTTTKGSVVQADNPPAQNLIVVVEEASICVLVAANVVALVTDTYDGRGRFAAIVGMVIWAYVLILTTLRLFLGNTKWRVPRLWNHTATIYGFQWLFALILFRSVLIRASSRLTQILVIVEFALTTLLFGIALTTRKGNKTVILEWEGNIEPSREPLASLFSLATFGWVDPILYSGYKEPLEIDRVWNLMPRDKAAAVLSNYRQVKKTSTLAFHLVKHFKVMLTVQFVWAIFGGLFTFAPTLLLRAILEYVETPTIAPLNVLWLYVILLPVSDIARSVADNQALWIGRKICIHIRSIIIGEIYAKALRRKAVSGGDTVLGNTDVPSAKSYWQKFKAVFSLNQKDKKDSQKDKTDTDFAKAAPDEQANVGTIINLMSVDSFKVSECTAYLHFLIASAPTMLVLSVALLWQVLGISAVPGLIVMVLLIPVNIYIAKGFNYTQKKIMAATDKRIHTTNEILQNIRIIKYFAWETRFGEIVGEKRNIELRALRNRYIIWAMAVAIWNTVPILITFLCFFSYTKVEGKPLYPSVAFTAISLFLLLRVPLDQFGDMLAHVQEAKVSVDRVEEFLMEEETDKYHQLGEDNVDSEGQRVIGFRDAAFTWGNKNAVTADGPTAFRLLDMTVDFKIGKLNLIAGPTGSGKTSMLMALLGEMSLLKGKVYLPGGRSREDVHPDPATGLAETCAYVAQTAWLVNANIKENILFSSRYDEKRYKEVLVACALERDLEILDNGDETLVGENGITLSGGQKQRISLARAVYSNSRHVLLDDCLSAVDSHTAKWIFTNCINGPLMRGRTCILVTHNTTLCAPSAAYVVLLDNGRIDAQGEALEVIESGKLGEELRNRSRPGSRQISRVPSRVPSSVGEESGDTLIDDGGDGHANGQPAAKKAAQKTEAMQETKATGAVKWSVISLYLAAMGSWWFWIIALVVFATQQLSGVVSNVWIKEWANQYTMGVEQISPIQFSITSQNSGSAYAESDPDVNVDYYLYGLALIGIAGALLALVRDMWLFFGSLTASWKIHNRLMAAICRAQFKFFDVTPLGQLMNRFSKDLEAVDQQVAGVAIGVMTCSMGIVITIILIASVTPGFLIAAFFITLIYVFVAIFYLRASRDLKRLESVHRSPLFQQFGETLSGVTTIRAYGDERRFIRDNLTRINTQLRPFIFLWGANRWLAFRTDVLGDMVAFFAGVFVILSLGKIDPGSAGLSLSYAIGFSENILWLIRLYATNEQNMNSVERVKEYLDVEQEAPAIDEKNRPAANWPAHGGVEFIGYSTRYRKELDPVLKNVTFKIEPRQKVGIVGRTGAGKSSLTLAIFRALEAESGKILIDDIDVGLIGLQDLREAITIVPQDPTLFTGTIRTNLDPFNLYTDEQVFAALRKVQLISDMEEPVKNNSQAAQVLLPEPPSIAIEDERGESGASSPTATNRNIFLDLSSPVAESGTNLSQGQRQLLCLARAMLKDPKVLVMDEATASIDYNTDSKIQETIRELETTIITIAHRLATIVDYDRVLVLDHGAVVEYDHPHKLLQKSDGHFRSMCDMSGDLAVLEKAAKKAWEDHRLVDDE

SEQ ID NO: 22089 - DNA, 10790 bp, Muscodor strobelii
  misc_feature: SGI EST ID NO. CUFF.52232.0
  misc_feature: Variant of the nucleotide sequence at SEQ ID NO 22087
gttctatgaagcgccctagcggcgcatggatgtgtcaccctggtaagcctgtctgatgcgctaatgtgcgagcgacgcaggtcgtacttgacgggcaaccgacgtcgcaggtcacgcttgtcttactcggtctggcccggccatttgccatttctttctcgtctgcgttcagacgccgataacttcttctaccttcaccgccgtcgcatcatcacgccctgaatgctctgcacgcctgcgcggctgccaactgtcaatgccccgagacactcgcatgcttataccataagtatcctgtatgtccccaggcggtcgatcatcttttcttttcgcgtcatacgccggccaattgcgtatatacataccccggcgcggctgatatcatcactcaaattgcacactagcggggtctcggtctgtctgcgcgcggttggaaaaatcctcctctctttgtcgccccaaggccactgggctgtcagtcgagtaaggcgacgccagcctgtctcacttcacatctccccttcgcttctgacatgccaacatgagctttgcctcatgctcatggccgatatggcaggtcgatgacttcagcacctgctttcaatctgactatctccagatcctcttcccattaatcatattaggcttctctgtccttcatctctccgcccagaccatacatcacaaagtcaagataaaacaaccagacggatacgatcacatacccgagcatctcaaccatactgatatacctcccgaggaagaagatccgctagccacagaggaagatgaggatctgtccattgccggaaacggcggtggccgtctgtcgcttgtcagaaccaccaccaagggctccgtcgtccaagccgacaaccctcccgcccagaacctaatcgtggttgtcgaggaagcctcgatctgtgtccttgttgccgcgaatgtcgttgctctcgttactgacacctacgatggccgtggtcgctttgctgccatcgttggcatggtcatttgggcctacgttctaatccttaccactctccgactgttcctcggaaacacgaaatggcgcgtcccccgactgtggaaccatacggccaccatctacggcttccagtggctatttgccctcatcttgttccggtccgttctgatccgcgcctcgtctcgactgacgcagatcctcgtcatcgtcgagttcgccctcaccactttgctgttcggcattgccttgactactaggaaaggaaacaaaacagtcatactggaatgggagggcaatatcgagccatcccgggagcctctggcctcgctcttctcactagccacgtttggttgggttgacccgatcctgtactctggctacaaggaaccgctggagatcgacagggtgtggaatctgatgccccgtgataaagctgcagccgtactctccaattatcgccaagtcaagaagacttccacgttggctttccacttggtcaaacatttcaaggtcatgctgactgtgcagttcgtctgggctatctttggcggtctgttcacgtttgcgccaacacttcttctgcgcgccattctggagtatgtcgagacaccaactatcgcgcccctgaacgtcttgtggttgtatgtcatcttgttgccagtgtcggacattgcccgctctgtagccgacaatcaagcactctggatcggaaggaagatctgcattcacattcgttcgattatcataggagaaatctacgccaaggcacttcgacgcaaggctgtgagcggtggagatactgtcctagggaacacagacgttccgtccgcgaaatcctactggcagaagttcaaagcagttttcagcctgaaccaaaaagacaagaaagactctcaaaaggacaagactgataccgatttcgccaaggcggcgcccgacgaacaagcaaatgtcggaactatcatcaacttgatgtctgtggacagcttcaaagtctccgagtgcaccgcatacttgcatttcttgattgcttccgctcccaccatgctcgtcttgtctgtcgccctactatggcaagtgttgggaatcagtgctgtgccgggactcattgtcatggtactcctgattcctgtcaacatttacatcgcaaagggcttcaattacacacagaagaagatcatggctgctactgacaaacggatccacacgacgaatgagattctccagaacattcgcatcatcaaatatttcgcctgggagacgcgattcggagagattgttggcgagaagcggaacattgagttgagagctctgaggaacaggtacatcatttgggccatggctgttgctatttggaacaccgtcccaattttgattacgtttctctgctttttctcgtataccaaggtcgaagggaagcctctctacccatctgtcgcatttaccgccatttccctgttccttcttctccgagttcccctggaccagttcggagacatgcttgctcatgtgcaagaagccaaggtgtcggtcgatcgtgtcgaggagttcttgatggaggaagagacagataagtatcaccagctgggtgaagataatgtcgacagtgagggtcagcgagtcatcggattccgagatgccgcattcacctggggcaataaaaatgcagtcactgccgatggccctaccgccttccgtcttttggatatgaccgttgatttcaaaatcggaaagctaaacctaatcgctgggcctactggctcgggtaaaacgtccatgttgatggctctcctcggcgagatgtccctcttgaaaggcaaagtctatctcccaggtggacgtagtcgtgaagatgtccaccccgaccctgctacgggtttggctgaaacgtgcgcctatgtcgcacagactgcgtggttggtcaatgctaacatcaaggagaacattctattctcttcccgatatgacgagaaaagatacaaagaagttctagtcgcttgcgccctggagcgcgaccttgagatcctcgacaacggcgacgagactctggttggagagaatggcatcacactatctggaggccagaaacagcggatctctcttgctcgcgctgtgtactccaactcgcgccatgttctactcgacgattgtctgagcgctgttgattcgcataccgcgaagtggatattcacaaattgcatcaatggcccgctgatgaggggtaggacatgcattctcgttacacacaacactaccctgtgcgcgccgtccgccgcgtatgtcgtcttattagataacggcaggattgatgcccagggcgaagctctcgaggtcatcgaatctggaaagctgggcgaagagcttcggaacagatcccggcctgggtctcgccaaatttcgcgcgttccgtcccgtgtccctagtagcgttggcgaagaaagcggtgacacgttgatagatgatgggggagatggccatgctaatggccagccagcagccaagaaagcggctcagaagacggaagcaatgcaagagaccaaagctactggagctgtcaagtggtctgttatcagcctctatcttgcagccatgggcagctggtggttttggatcattgccctcgtggtgttcgccactcaacagcttagcggcgttgtctcaaacgtttggatcaaagaatgggctaaccagtacaccatgggcgttgaacaaatctcgccaattcaattcagcattacctctcagaactctggcagcgcgtctctatctccctcgtactttgcttccattgcgcagtacgctgaaactcggtttctagctatgcggagtctgatccggatgttaatgtcgattactatctctacggtctggctcttattgggatcgccggtgccttgcttgctctcgttcgcgatatgtggctctttttcggatcacttactgcctcctggaagatccataatcgattgatggcagccatatgcagagcacagttcaaattttttgatgtcacgccgcttggacaactcatgaatcgattcagcaaggatctcgaggctgtggatcaacaagtagcaggagttgccattggtgtcatgacttgctcaatgggtatcgttatcactattattctgattgcatctgtcacccctggtttcctgatcgctgctttcttcatcaccttgatctacgttttcgtcgcgattttctacctgcgcgcttctcgcgatctgaagcgcttagaatcagtacaccggagtccgcttttccagcagttcggcgaaactctttcaggtgtcacaacgatccgtgcttacggtgatgagcgccgcttcatccgcgacaacctaacgcgtattaatacgcaattgcgtccgttcatcttcctgtggggcgctaacagatggctcgcatttcggactgatgtactgggtgacatggtcgcgttctttgcgggcgtctttgtcattctaagcctaggcaaaattgatcctggctcggctggtctatccttgagctacgccattggcttttcagaaaatattctctggcttattcggctgtatgcgacaaacgaacagaatatgaattcggtggagcgtgtgaaggagtatcttgatgtagaacaggaagctccagccatcgatgagaagaacagaccggcggcaaactggccagctcatggcggtgtcgagtttattggatactccacaagatatcgtaaggagctcgatcccgtcctcaagaatgtgacattcaaaatcgagccgcgacaaaaggttggtatcgttggtcgtaccggtgctggcaaaagttcactcacgcttgccatattccgcgccttagaggctgaatctggcaagatcttaattgacgatatcgatgtcgggctgatcggtctccaagatctccgagaagctataacaattgtccctcaagatccaacgctgtttacaggcacgatccgtactaacttggaccctttcaacttatataccgacgaacaggtcttcgctgcacttagaaaagtgcaacttatcagtgacatggaagagccagtcaagaataactctcaagcagctcaagtgttgctacccgaaccaccgtcgatagcgatagaagatgaacggggagagagcggcgcctcgagcccgaccgctaccaacaggaacattttcctcgacctttcatctcctgtcgctgagtcgggcaccaacctgtcacagggtcagcgacagcttctctgcctcgcacgtgctatgctcaaggacccgaaggtactggtcatggacgaggctacagcatcaatcgactataacaccgattcaaagattcaagagacgattcgtgagttggagactaccatcatcacgattgcacaccgcttggctactatcgtagattacgatagagtccttgtcttggatcacggtgcagttgtcgaatacgaccacccccataagttgctacagaagagcgatggccacttccggagcatgtgcgatatgagtggcgacttggctgtgctagaaaaagcggccaagaaagcatgggaggaccacaggcttgtggacgacgaatagaaaaacgtcgacctacaacgaagctcttcacatgacgaagaaaagagtgataatgaagagctccacgactgagctgcttaatactgcacatattttctaattatacatactgcctacattgagcctgcgttttaagcaattttggcttagcacaggactgcgcctttcactggtctagacttgtcttgtctgttgtatggcactgtaccacagttgcataatttgtaaaatgattctgctacttggggcgttcgataggaaataaataagtatatgctaaggttgaagtcttctgcatggttgtgatttgcgtgtattgtcgcttggaatgcacagggaacgcagattgtagtttaagagtgggtggtattacatgttaggtatacatcaagtcgagatttagccataagagtacattggtcgttatcgtatcgtcgtagattgtctccgttgagccgtgaacctcttcgttcctctctacgtcacacaattttgcccgccctgacattcgctttagaatcaaaattcaatccgcaccctgaccattccttccccatcctctctcctatctagcacaggacagaaaacagcgatcatacttctgccttcgtagtcccactccgagcgcagaaacacaaatctagactctgggggaacataatcggtggcggggtcacgaccaaggtcttcgagttcggcgtgcgcatgaagagaggagaagagagcggggtttgtccaccatgcttgatgggcggttagggagtggaagatctggaaaaaacgggtgcgcaggggagtcgaacgacattttgtgagcaggaaggttattaagggggttgtgtctatgtctagggttacgcggaggagggatatgttaaatggctggggtgaggggttttcagtttgtgggcagaagtgtgggaggagggattcgtagatagagattatgtcttcgaagaggggatagtatgtatcgtaggataattcggtggggtcaagcatgcagtgaaggtatattatatatgactgtgcagtgcaataagttgttgctaggacgcaggatgttggatttgcggtgtgtagattgcggagtattgggagccaggtgttcagttgggagagatagtttgttcgttgggtcaagatgtgagggtgggttaggggatgagagagagattggatggtgagcataaagatggagaatgaagaggagaatgcgttccagaagagttgtttggtgtggattgatgtgtctggtgatggtagttcgtagtggtgcggaatgagctcggcggtcctactttcgagaacgcgtgatgctgcctttgtgctgaagaagggacaaagaccccatgatatgcttagcttgtcgaacgagagcctgatctccctaagctcaccatctggtacgaggaaaggggtgccgtctggattttgctgtgctagggcgtcgtaaagcagggtgacaccattggtgcagagacggtctgcttcaccgacattaccttgtattagctcgaagagggcgaagaagaatgttacggttagacatgagcgcgctgttgatggtgttacgccggatgctaggaggctttgtctgcattggtggagggctgtcgtgtagtggcgtaatgctgctttcccgtgtgtacttgttggtgagagggagattaagggccttctgtcgtctgtttgatcgttacgatttgttgttattcccgctgagctctcttcggtatcttcagttccgtgattctcaagagcgatgcgacttagttcccgccgtagcgaaagacggcatgtttcctgctcctcgatatccattagcattgcagatgcggccagcgcagcatgctgtatggtttcgtcgaggagcacttcgcggagaatctgtcgaagccagtagtctccttcggtccatgttgatagatcggccagtagctggtgctggaatcgtgtaaaatagagaacgtctttggtctctaggtatgacggtgtcattgatgcccgcaccaagtctatgtggcgctcttgcgactccgcggccaagaaatcgactgcaagttcttgcgatggcctaggaagaagagtagggggctttgaattctgtttgccatgttttgaccggtcatgggctccccccttatgctcggaacctggcgagtcgccattgctgatgctaggattcctccgggcatcgtcatatccaagacatttatgaccagactttacgcaccgagcgcaaatcggcttgccctcatcgcatttcacgcgccggtttttacacgtaaagcagccggcccgcgttttgaagtgtgttgcgcggcgctttgggggtgggtcatcgtgctttaggagatcccagcatgttcttggggcggttggcatgctcttgtgccttatctccttcaaaagtcttcagcttggaatgacgaatggcgaacgctagactatgtcgacatattacgatgcgatagtttcgcaaggaattgtgccgaggctgcaaacttgattggtgacctggctacgaggagccaaagtgcgatgtggagggcgcgttgtcactcccaatgacgccgtttcatgaaccgatatgcttattataagaaaacgtcgatattgtccgcatcttttatgacatctctttcttcatcacttttaactcgactgcgagttccatgctcaggaaatctcgttgcggtattatgccttcaatgtgtcgaggactcattctaagatgagatggggctagactgagtcagagtgcggaaaaaaccggagaggagcgccttagatctctattacgaccacgacaatcatttcatacatgtcagccagacataaattttctcagagttatcggcgagactttgttaatttcactgcgttctgagacaaaatcatatctatcgctatctgctcctaagacgtacagtgatgggatggaatgaaagcctgggaagccgggtttaaccgaaggtagaagggaacgcgccgcgcacaggcgagggaggcttgatcctggcggactcagctccatcagagcccttacaattctctaactcgctgatctgcgtctcgcttgataaagcatcgctactcgatgcagaatcgtttgcgactccattgtcatatctgccgttgaaattctctacctcggtgatcacatcagtctcacttgtggcgttgtgttctcgcgggacggatccatcggccgcggttgcgtcaataggtggtaggacttcatttgcgatacttgcttcctgactgcgataattgtccaaatctttgttcagaacatcattccagacgacctcaatcaaagaaagagcagaatgagctggagtcacaattgacttgattacaaaacgatcatcagcttgcgcgacgagccgcgcccagtcatctcgagtacgctcgtgcgcattggcaccaagttgcatgtggatattacatgcgctaggagaatgtgagtctcgtcatgaagctaaaagtaatatctgtgcgactcacgctgcgaattgatccttgacgagggtcgacgggcatgggggctcaaggcatctctcattgatgatgatcgtggcgccgggcttcaaggccggaatctgatttctaaggattgtgacaacgaacggatcggcccaatcatggaatacacagcgaaaaaagtaaacatctgcgctgattgtctgtttctcgaagaaattgtaaggcatgagctcgagccgcccatcgaggttgtcggtgagctcggtcttagccttttctatcacctctggtaggtccatggcgattgccttttcaatcgaagggtggtactgtagtagggctctgcaaagagtaccctgagaacctccgacgtcgactacgatcttggggccttcagtgtcgtctccaggttctgcagaaagccatggcacgcttttcaccacatggtcgggtgacatatccggcacgttcattgagaacgacatggccttggagagcctctcgacacgagcatggtctggcgcgatgatggcgaacaagtctttgtcgccatcactgccgttggcgagtgcgaacggtgattgtgcaggatttatgcttccggggtacttcctgaggacgtctgcaaccttcaacgctgatggtgcaacttcttcagtcgcaaatcccagccagtcatccaggagtgtcgtggcaagggcttcagacgctgcgttatgccggacgtatcctggtcgcggttcctcgaaaatgcgaagcgtgatagctgctcggacgtaccttgtggtgtcaaactcggtcaggccgcatagttccgcaagctccttataagaaatcgtttctctgagtggcagattttgtgcgatacggaacttgtatatgacattgagagtggctgtccacgccggctagaagaccaacaaatgcgttagccgatataagaagttgttccaagggattcgatcttactcctaggaatgagagaaagaagacgtgggacgatgggcctaagaccaaggcccgtagttcatcaattgcctcgagtaattgagctcgtttatcctcgataaccccttcggaccttggagagggtgagcgcgcactgccatggagactaaaagatggttgaggcaggccggcttcgtttaaagcgtcatatatactgttggtacgagactggatgatgtgtgcgagctcgggcaacgatttcgagtacgccatagttgcagaggagtgatggccgcggaggacttgaaatgtacgagtgcctgagtagtcggatacggaggatcgagtaatttttatggaaaacgatcaatatcactgtaaggtgacacatcgttcctaagccggcctctccctcgattccttgcggacgaagacgaaaacgactctgtcttgtgaccaaggatacctgcgtgcttcgagtctgttccgcgaccgtcctcaagatgtggccttgttcaacctagcatacgcaagctgtgctatgccctgtagccgtgtacaacgggcacctcggagtgaatctcgtgcaccatcttatgataccattcaggaagagataagagaaactgaggcttggaggtggtcagctgaaagaagtccacattctgtgctcggccgtaaccaatgagatatcgtgatttttacgcatattggtctcaactaccattagtcatgaaactatcgatcaaaagtccgtaggatcaattgatagagtacctcca

SEQ ID NO: 22090 - DNA, 648 bp, Muscodor strobelii
  misc_feature: SGI cDNA ID NO. 567492
  misc_feature: Elevated expression when VOC is produced
  misc_feature: Encodes the peptide sequence at SEQ ID NO 22091
atgacatcagaagcgggcaaaagtatgcgcctcaaatacactgtctcggttatactctggggtggtgagaatcaaggcgtggaccccgccggtcacatcgccgttgctatacacaaaacaacaggtcaacccccaacatgctatctgcaccacgcacgctgtccagaccagattcgctttatctctgagtcgcgtcctcagcagcactttgacgccgacccagccccacgcggtcgctgcaacatccgcaccgatctctcgcccgaggaagcaaagagagcaaatgacgtgttattacagttcggcgcggatagtacccaccttcccttcttcggcgagggcaactgtcataattgggccgcggccgcgatcgaggccctcgagagagctggcctagcagaaacaggcgatggggctcgctgggcttctatgatcgggatgggaccgctcaacatgcagacaaagtgggtgacgcgtgagggaagagaatgggtacgctgtgagacgttccatttgaatcgacctgtcgttgttgatgccaaatggggtgaagatgcctcaaatttgaccgcgatcaggagctcggtagatttcaagggccgtgttagcagcctacaacgattattccaggggcgaaaagtcgcctag

SEQ ID NO: 22091 - protein, 215 aa, Muscodor strobelii
  misc_feature: SGI Peptide ID NO. 567492
  misc_feature (13)..(165): NCBI GI: 238498096 Blast Desc: conserved [Aspergillus flavus NRRL3357] gi|220693557|gb|EED49902.1| conserved [Aspergillus flavus NRRL3357]
  misc_feature (13)..(205): NCBI GI: 145248089 Blast Desc: An13g01540 [Aspergillus niger] gi|134081042|emb|CAK41554.1| protein product [Aspergillus niger]
  misc_feature (13)..(165): NCBI GI: 255941566 Blast Desc: Pc16g12530 [Penicillium chrysogenum Wisconsin 54-1255] gi|211586175|emb|CAP93923.1| Pc16g12530 [Penicillium chrysogenum Wisconsin 54-1255]
  misc_feature (13)..(139): NCBI GI: 238841214 Blast Desc: conserved [Microsporum canis CBS 113480]
  misc_feature (48)..(165): NCBI GI: 115386576 Blast Desc: [Aspergillus terreus NIH2624] gi|114190827|gb|EAU32527.1| [Aspergillus terreus NIH2624]
  misc_feature (78)..(165): NCBI GI: 145248091 Blast Desc: An13g01550 [Aspergillus niger] gi|134081043|emb|CAK41555.1| protein product [Aspergillus niger]
  misc_feature: Useful for introducing or modulating the production of volatile compounds
MTSEAGKSMRLKYTVSVILWGGENQGVDPAGHIAVAIHKTTGQPPTCYLHHARCPDQIRFISESRPQQHFDADPAPRGRCNIRTDLSPEEAKRANDVLLQFGADSTHLPFFGEGNCHNWAAAAIEALERAGLAETGDGARWASMIGMGPLNMQTKWVTREGREWVRCETFHLNRPVVVDAKWGEDASNLTAIRSSVDFKGRVSSLQRLFQGRKVA

SEQ ID NO: 22092 - DNA, 1585 bp, Muscodor strobelii
  misc_feature: SGI EST ID NO. CUFF.51903.0
  misc_feature: Variant of the nucleotide sequence at SEQ ID NO 22090
cctggcccggtcatgaccgaacgcgtctagtcaatgaatcgacaaacttacaactgtcatacagttcgtagattgatatacgttgaaagccatgcaaacctacagtgtcactaagatccactattcacgttcgttggatatttttggttcgcaacaaccgatggtcgtctttgtgcgtagccaagcccagctgtcatcatttcaagtacctcatccacaccagactcggtctatacataagcaccaccatcatgacgaagtcgacatagacgttagctatattcgccaaagccataggcacacttcgaacttggattcggcacattgtctatattagtgaactctcttttctttctgtactttttctactttttctctcagtacatgtacttcagtcatggtgacaaacaagtgcgatcgaggcgcgcgagccaatagctaacaaacaggcaactactaacgtccgtcgcaagcgctaacatcagttcttctcacttctattgcgtgctacgactactatacaaatcttatataaggtagtaacagaagtctaacgatgcaggattccgtcaaaggtcagattgctgatcacgtcgcatcaacacaattaccatcacccaaccacccctcgcggattagacttcagaacaccttcgaatacggtggtaaggcgccaccctttggaccaatatgacatcagaagcgggcaaaagtatgcgcctcaaatacactgtctcggttatactctggggtggtgagaatcaaggcgtggaccccgccggtcacatcgccgttgctatacacaaaacaacaggtcaacccccaacatgctatctgcaccacgcacgctgtccagaccagattcgctttatctctgagtcgcgtcctcagcagcactttgacgccgacccagccccacgcggtcgctgcaacatccgcaccgatctctcgcccgaggaagcaaagagagcaaatgacgtgttattacagttcggcgcggatagtacccaccttcccttcttcggcgagggcaactgtcataattgggccgcggccgcgatcgaggccctcgagagagctggcctagcagaaacaggcgatggggctcgctgggcttctatgatcgggatgggaccgctcaacatgcagacaaagtgggtgacgcgtgagggaagagaatgggtacgctgtgagacgttccatttgaatcgacctgtcgttgttgatgccaaatggggtgaagatgcctcaaatttgaccgcgatcaggagctcggtagatttcaagggccgtgttagcagcctacaacgattattccaggggcgaaaagtcgcctagctgggtgatgctcaaaattccacctcgccgatccaaagtggaacagaagaacgcgagacttactattatcttcaagctagaagtgacaacacaatgtggttgaccaattcctccaaatcttaggtcacatccatgttagcctcccttcctcttctgtaccctcaatacattctgttgacattatttcttgcactatcccatacatttgtcttgtcgccttaaaagcaagcatttccgttgaaactgc

SEQ ID NO: 22093 - DNA, 243 bp, Muscodor strobelii
  misc_feature: SGI cDNA ID NO. 567493
  misc_feature: Encodes the peptide sequence at SEQ ID NO 22094
atgaagaccgtctttgccactattgcgctcttcgccgcttcggctgtcgctggtccgtctggtcatgcagcgaggtccgacattcacccgttcgaccctcgcgacatcacggccgagggcttatggaagcgtgattgccctggctctcctgttgagaaccccgtctgcccctacggctcgttctggtgcggaactgcagacggtaaaggccagtgcttcggctgtggctctgtctgcgcttag

SEQ ID NO: 22094 - protein, 80 aa, Muscodor strobelii
  misc_feature: SGI Peptide ID NO. 567493
MKTVFATIALFAASAVAGPSGHAARSDIHPFDPRDITAEGLWKRDCPGSPVENPVCPYGSFWCGTADGKGQCFGCGSVCA

SEQ ID NO: 22095 - DNA, 1941 bp, Muscodor strobelii
  misc_feature: SGI cDNA ID NO. 567494
  misc_feature: Encodes the peptide sequence at SEQ ID NO 22096
atggagaaggaaattcaatatcaccaagtttgggaggtttctcccccagaccaaatccacgacgcagccggtccacaatttcagagcccgggccaggactcttctgtcggtcatgggcacggcgtcgactatgtgccaagtccagactcatcaagacgtacggttggctcttttttacatctttttctcaatggcgtattcgttctgctcccgatcattggccttgccgtttggctcgtgtaccatgcccgtgagggcggcccgatcagcattagctctgctgtgattggtggtcgtctcactcaagagcaggcgaaagcaatcgacttcgtggccagtgcacttttggcaccgtttttactcattattttcgactatgtttggttttcaggcgcgagggtcacggcgtacaacgagcgtgactcatcgttaccactggctacacttgttgagattagccacacgaacagcggttcatacgacgtcctaaaagtctcgagcatactgcgcggctgcacactcaatactttcctattcgcggttctggtcgtaatttccgccgttacgaggattgctttctccaacatcattgcctacgaggcatacgagcgagaataccctggcacatcagcgcctatggcttcactcgtgcagaaaggatgggcaatcacgaacaacactttctcgggatactcggactataacctcaccaactcacagctagcagacttcgggagtgaagctatttctattttaacagcagtatcttatcgaaatgcttctgataagttgactgatggcgcttatgttgccattaacgctaccaagacaacgctcaatggcctttcatcggatattgtggacatgcaaggagtaccagggtaccgcatgacaatggattgtaaagcacaaaagccaacgttactaagcctcataaactccggtgcgagtgccgttcagatgtctgtatctgacggttggggtctatactttggacagtaccctgggcagctagatgtgcttatcaacgctcatacgatgaacttgtcattcgttggattctacactgacaagaaatcgctgtatatcgtcaacgtagcagaaggaaatgcgaccaagccttgttcctacgcgaacggaacagcgatacacggacctgggtgtgaagcttgggcacccataatctccccttacggagaaatggactatggagtattcaatctaacgggcttcacgaagagcgtcagatcggcatggggcatgaactgcacaatgtatcgtgagaccggctctcacaacctggcgcgacagtcggatctttcgtggagcattagatctagtgcttggtccggtacgaaagagccagcactacttatgatctccgactggcagacaatccttaatttccattcgccgagctcccagatacccggcctaggaggcgcgttctatccgagctcgtggagtaacaccaccatggatacggactataagacatacgtcgacaccttgctttatgccgcggcggagatggagcacacgatgtatcaagtcaagaatgcagatgctaaggcagatggaagtgacaatgcggacacgttccacgtgccgactgtcatgaccgagctcgtctatcgcataacctacgtgcccttaattttgttagtcgggctgctcgctctgtttattgcagccctcgttcccttcgcccaacttattcgcagtatgcatttgcccagcatgaccttgtggcgcgagatcaatactctccgcctagttatggatagcttagctgttcatccaagcgagacagatgttcataatacccggggttcgagcaacggggagataagaagtgtggccggtgatactaaggtcgcctatgtgccgacaacgccagagccgggatgggcgctgcatcttcgtcgtaagatgcgatga

SEQ ID NO: 22096 - protein, 646 aa, Muscodor strobelii
  misc_feature: SGI Peptide ID NO. 567494
  misc_feature (65)..(595): NCBI GI: 46122781 Blast Desc: FG05768.1 [Gibberella zeae PH-1]
  misc_feature (57)..(200): NCBI GI: 256727203 Blast Desc: NECHADRAFT_66006 [Nectria haematococca mpVI 77-13-4]
MEKEIQYHQVWEVSPPDQIHDAAGPQFQSPGQDSSVGHGHGVDYVPSPDSSRRTVGSFLHLFLNGVFVLLPIIGLAVWLVYHAREGGPISISSAVIGGRLTQEQAKAIDFVASALLAPFLLIIFDYVWFSGARVTAYNERDSSLPLATLVEISHTNSGSYDVLKVSSILRGCTLNTFLFAVLVVISAVTRIAFSNIIAYEAYEREYPGTSAPMASLVQKGWAITNNTFSGYSDYNLTNSQLADFGSEAISILTAVSYRNASDKLTDGAYVAINATKTTLNGLSSDIVDMQGVPGYRMTMDCKAQKPTLLSLINSGASAVQMSVSDGWGLYFGQYPGQLDVLINAHTMNLSFVGFYTDKKSLYIVNVAEGNATKPCSYANGTAIHGPGCEAWAPIISPYGEMDYGVFNLTGFTKSVRSAWGMNCTMYRETGSHNLARQSDLSWSIRSSAWSGTKEPALLMISDWQTILNFHSPSSQIPGLGGAFYPSSWSNTTMDTDYKTYVDTLLYAAAEMEHTMYQVKNADAKADGSDNADTFHVPTVMTELVYRITYVPLILLVGLLALFIAALVPFAQLIRSMHLPSMTLWREINTLRLVMDSLAVHPSETDVHNTRGSSNGEIRSVAGDTKVAYVPTTPEPGWALHLRRKMR

SEQ ID NO: 22097 - DNA, 2317 bp, Muscodor strobelii
  misc_feature: SGI EST ID NO. CUFF.51909.0
  misc_feature: Variant of the nucleotide sequence at SEQ ID NO 22095
gccgcctctcgcctttgctagcaccgccaattacttactttcatttcttcctagggcttggttgcaggagagacgatggagaaggaaattcaatatcaccaagtttgggaggtttctcccccagaccaaatccacgacgcagccggtccacaatttcagagcccgggccaggactcttctgtcggtcatgggcacggcgtcgactatgtgccaagtccagactcatcaagacgtacggttggctcttttttacatctttttctcaatggcgtattcgttctgctcccgatcattggccttgccgtttggctcgtgtaccatgcccgtgagggcggcccgatcagcattagctctgctgtgattggtggtcgtctcactcaagagcaggcgaaagcaatcgacttcgtggccagtgcacttttggcaccgtttttactcattattttcgactatgtttggttttcaggcgcgagggtcacggcgtacaacgagcgtgactcatcgttaccactggctacacttgttgagattagccacacgaacagcggttcatacgacgtcctaaaagtctcgagcatactgcgcggctgcacactcaatactttcctattcgcggttctggtcgtaatttccgccgttacgaggattgctttctccaacatcattgcctacgaggcatacgagcgagaataccctggcacatcagcgcctatggcttcactcgtgcagaaaggatgggcaatcacgaacaacactttctcgggatactcggactataacctcaccaactcacagctagcagacttcgggagtgaagctatttctattttaacagcagtatcttatcgaaatgcttctgataagttgactgatggcgcttatgttgccattaacgctaccaagacaacgctcaatggcctttcatcggatattgtggacatgcaaggagtaccagggtaccgcatgacaatggattgtaaagcacaaaagccaacgttactaagcctcataaactccggtgcgagtgccgttcagatgtctgtatctgacggttggggtctatactttggacagtaccctgggcagctagatgtgcttatcaacgctcatacgatgaacttgtcattcgttggattctacactgacaagaaatcgctgtatatcgtcaacgtagcagaaggaaatgcgaccaagccttgttcctacgcgaacggaacagcgatacacggacctgggtgtgaagcttgggcacccataatctccccttacggagaaatggactatggagtattcaatctaacgggcttcacgaagagcgtcagatcggcatggggcatgaactgcacaatgtatcgtgagaccggctctcacaacctggcgcgacagtcggatctttcgtggagcattagatctagtgcttggtccggtacgaaagagccagcactacttatgatctccgactggcagacaatccttaatttccattcgccgagctcccagatacccggcctaggaggcgcgttctatccgagctcgtggagtaacaccaccatggatacggactataagacatacgtcgacaccttgctttatgccgcggcggagatggagcacacgatgtatcaagtcaagaatgcagatgctaaggcagatggaagtgacaatgcggacacgttccacgtgccgactgtcatgaccgagctcgtctatcgcataacctacgtgcccttaattttgttagtcgggctgctcgctctgtttattgcagccctcgttcccttcgcccaacttattcgcagtatgcatttgcccagcatgaccttgtggcgcgagatcaatactctccgcctagttatggatagcttagctgttcatccaagcgagacagatgttcataatacccggggttcgagcaacggggagataagaagtgtggccggtgatactaaggtcgcctatgtgccgacaacgccagagccgggatgggcgctgcatcttcgtcgtaagatgcgatgaaaagagcaagttgacgattatcgtgcttcttcgaagtgcccaagagtatgcataatatgatttatctgttacataaagaaacggtccacaaaagcttccacgccccttaattgatattgatttatagctaagtccgtgacctataaagtttgaagtggtctgaacaaacagatactatcagagaccagcacagtcatcatcgtcctgaaatgatatcgagcaaccacctaaggtaatgcagtacgctctaagtagcatgaaacggggtttaggtgtatatatatacgagtcttattcgccg

SEQ ID NO: 22098 - DNA, 546 bp, Muscodor strobelii
  misc_feature: SGI cDNA ID NO. 567495
  misc_feature: Encodes the peptide sequence at SEQ ID NO 22099
atgggtgccgagaagtccagcaggagaaggcgttctagcagcatccttcagatctaccaggagcctctggagcccatagaacagctgagcgaccagtccgcgctgcccaacctcaacgcaaactgggtcaacgccaaaggggcgtggacgatccacgttgtcttgatagtcgccctcaagatcctctgggatgtcataccgggcgtgtcccaggagacgtcgtggactctgaccaacatatcctacatgttcggctcgtatatcatgttccactgggtccgtggcgtgccctttgacttcaatagcggcgcctacgacaacctgaacatgtgggagcagatcgacgacggggcccagtacacgccagccaagaagttcctgctcagtgtgcccattgtcctcttcttattgagcacgcactacacccactacgaccttgcgtactttaccatcaatttcttggctgtgctcgcagtggttataccgaagctaccctttagtcaccgtatgagagtaggtttgttttctggcgtgccagaggattga

SEQ ID NO: 22099 - protein, 181 aa, Muscodor strobelii
  misc_feature: SGI Peptide ID NO. 567495
  misc_feature (36)..(181): Pfam Id: PF04061 Pfam Desc: ORMDL family
  misc_feature (3)..(181): NCBI GI: 171691677 Blast Desc: protein product [Podospora anserina] gi|170945787|emb|CAP72587.1| protein product [Podospora anserina]
  misc_feature (3)..(181): NCBI GI: 164425336 Blast Desc: protein ORM1 [Neurospora crassa OR74A] gi|157070887|gb|EDO65135.1| protein ORM1 [Neurospora crassa OR74A]
  misc_feature (5)..(181): NCBI GI: 39958445 Blast Desc: MGG_09257 [Magnaporthe grisea 70-15] gi|145013296|gb|EDJ97937.1| MGG_09257 [Magnaporthe grisea 70-15]
  misc_feature (3)..(181): NCBI GI: 116179764 Blast Desc: conserved [Chaetomium globosum CBS 148.51] gi|88184807|gb|EAQ92275.1| conserved [Chaetomium globosum CBS 148.51]
  misc_feature (1)..(181): NCBI GI: 145230021 Blast Desc: An01g08980 [Aspergillus niger] gi|134055433|emb|CAK37142.1| protein product [Aspergillus niger]
  misc_feature (1)..(181): NCBI GI: 154305376 Blast Desc: conserved [Botryotinia fuckeliana B05.10] gi|150853244|gb|EDN28436.1| conserved [Botryotinia fuckeliana B05.10]
  misc_feature (5)..(181): NCBI GI: 255947208 Blast Desc: Pc22g03280 [Penicillium chrysogenum Wisconsin 54-1255] gi|211591388|emb|CAP97616.1| Pc22g03280 [Penicillium chrysogenum Wisconsin 54-1255]
  misc_feature (1)..(181): NCBI GI: 238504202 Blast Desc: unfolded protein response protein Orm1, [Aspergillus flavus NRRL3357] gi|220690804|gb|EED47153.1| unfolded protein response protein Orm1, [Aspergillus flavus NRRL3357]
  misc_feature (1)..(181): NCBI GI: 261205562 Blast Desc: ORM1 [Ajellomyces dermatitidis SLH14081] gi|239592577|gb|EEQ75158.1| ORM1 [Ajellomyces dermatitidis SLH14081] gi|239611271|gb|EEQ88258.1| ORM1 [Ajellomyces ER-3]
  misc_feature (1)..(181): NCBI GI: 119499924 Blast Desc: unfolded protein response Orm1, [Neosartorya fischeri NRRL 181] gi|119414884|gb|EAW24822.1| unfolded protein response Orm1, [Neosartorya fischeri NRRL 181]
MGAEKSSRRRRSSSILQIYQEPLEPIEQLSDQSALPNLNANWVNAKGAWTIHVVLIVALKILWDVIPGVSQETSWTLTNISYMFGSYIMFHWVRGVPFDFNSGAYDNLNMWEQIDDGAQYTPAKKFLLSVPIVLFLLSTHYTHYDLAYFTINFLAVLAVVIPKLPFSHRMRVGLFSGVPED

SEQ ID NO: 22100 - DNA, 3195 bp, Muscodor strobelii
  misc_feature: SGI EST ID NO. CUFF.52021.0
  misc_feature: Variant of the nucleotide sequence at SEQ ID NO 22098
gtaaacttgaggatacgaggtctccaatgtcaagaatgtagtgacgcaggtaggcatctgcaaaaggaagtatatttcggcggcttcgtgctgcctcctgcaagtaattcgatccacacgacaacgtaatggagatggtgcctgcaagaccagtacctgaagaattaggcagatcacgtacaaccgcgagattccgggccaatgtataacccatctacaatgagtgactggcccaatgtcatatatataaaggtgtcaaaatgtaacagtgtctttaagaggcacccaagcaagtgaattgccaggcggagaactcaacatttgcgtcgctagttgggagccccacgcaagatttaggcagtgtccagaacaccgaacgaaggctgttgcatacatgggagacccattgcgattggctgtagacgaccttttgacaggtcttttggctgctagggtggtgctagggggtcggatgccaaccgcccggcgatcgcatgcagttccaggcagctgtacacaccccagctcgggccccaggagcagcccccagcacatgcagctgaccagccaaaggctttgatgccaagacattacagaccggggccagctctctgccagctagtaaatggccccccctcggagcatctgctgctggtgctggggtgctgttgctggcgctgcagcatgtccacttcgattgggacaggctctggtgacagattgggacgtccccgaacagcttcatccccaaaaaaggcaccacttctcgaaacctgtccagtacatatccattcgagaaaaaaatattttgccgctacacacacgtccatagctcctacgaactcactctccttcagcatctttcgttgttatcgccgacgactttgaaggtcgacctgtaattgctgcgctggctggctgttggcgatgctctgatctgctcgtgttgaatcttgcattttactggcatcataaggtccccttcgtttcccatatctgccttgacagcaccaccaccacggccagatacacgtgcgcctcatcgcccagctgcggccgactcctcgcggaaacaccggcaccgacagcgccggtcccgtacgacacggttctcgccactggccctgccgacgtcgcgacccctcccgtctctcccctatttgtcccgtcatccaagcttcgaatcgtcaggaccactgtcttgcgagtccagtgccgacgtgcatagctcgccccgctcttgattccctcgactgcagcctgcaataccgccaaagtgtcttccccaatcctcatcccgcgcaccgtctcttacgacgccggtgcaaatcctccacgccggggaagcacctatctcaacgccaacatgggtgccgagaagtccagcaggagaaggcgttctagcagcatccttcagatctaccaggagcctctggagcccatagaacagctgagcgaccagtccgcgctgcccaacctcaacgcaaactgggtcaacgccaaaggggcgtggacgatccacgttgtcttgatagtcgccctcaagatcctctgggatgtcataccgggcgtgtcccaggagacgtcgtggactctgaccaacatatcctacatgttcggctcgtatatcatgttccactgggtccgtggcgtgccctttgacttcaatagcggcgcctacgacaacctgaacatgtgggagcagatcgacgacggggcccagtacacgccagccaagaagttcctgctcagtgtgcccattgtcctcttcttattgagcacgcactacacccactacgaccttgcgtactttaccatcaatttcttggctgtgctcgcagtggttataccgaagctaccctttgtatgtgcccatgacgtcgttgattggcgtggcgcaaagtcaccgtatgagagtaggtttgttttctggcgtgccagaggattgaggatggaagtttgagagttgaagaggaacggagtcgcttaccctagctacaatagcctctaggcctatggatgaatccacgcgaagaagatgggcaacatcgatctcgaaaagatgaggttatgctgggacgagccatagtgggtagacagaagcagagccatgcatactacaggcagtcaggaaaagaaaattgccacatctcaggacccatcttctagccaatcttgataccacttattgttgactgttagatgacccattgcaaccatattcccttgatatggtcctcgcagctcgtctatcgccacattcggctatcagcaagctcgacctcctcagctcgatgtgtatgccctcttgattagccacagcgtcatgggctcctctggatttggattgttccatcaggtctcggctcatctcacaacatgggcaagtcgctcaacaacttgaatgcgatgcgactgacttccttctcgtatgcgcagtgccactaacaatgatcactagactcgatgcagacgatacctcattggctgtgcccaggcaatgatagacccagaggctgcctctgtcagcagggctcggagctaagaagtgccaccgaagtttgatatcctacagtctaattgactttgcgagcttgtagctctcactctggaaggcttagccggcttcaccactgcaagtatggcaatctgatgatgagtatgtgtagattgccatagccgagcatggcatctactcacaactccttcgagggctatatcattcccatttgcgacttgccttagatgactttggtcttgtcttctcctcattccttcgcttctacagctcgctaccagtctctcgtttagaaatacattgtagcataagtcgcccggtatgaaggtcaacgggctgctcgtcgccgttgctttggcggctcctgtcttggggcaggctgacactccgtgcacgactactgctgcgactactccctgcaccaccgcagtcaccaccgctccatgcaccactgagtcgactacaccttgcacgacggcgtcaactactccgtcaactactccctgcaccacagcgtccaccacgccgtgtacaactgagagcactactccatgcacgactgccagtaccactgccagcaccacgccgtgtactactgagtctactactccatgcacaactgagaccaccactgctccatgcagcaccactaccagcagtactccatgcagcaccac

SEQ ID NO: 22101 - DNA, 2307 bp, Muscodor strobelii
  misc_feature: SGI cDNA ID NO. 567496
  misc_feature: Encodes the peptide sequence at SEQ ID NO 22102
atggacgaggctactcaagggacggaacctgaaagctctgtcatggagccttcagctcctgaggaaactactccccaaccacagaagcgtgctcgcgactacggagcagagctgaaaggcttgagttcaggagaagaaagtgattcagacgtggaatcgcagatgccgaacaacaagaggcttaaaagagactatggacaggatgctaatggcggcagcgattctgatggactggacgatggtgagatagtggactcacctctacctccatctcatcctgtccagccagccgaggaggttcctgaacctgaacatcacgccaatgtgcagctcgacactctcaacagcattgatcttgcctctgacgctggtaatgatgctgttacagcgtccgcttccacattgattctagagcagtcgggatatggcgaacaagacacatccctaccagtaatggacgagaatcatggaccaagtgatacacaaggcgagcttgcaactattgacaactcgcaagactccgagcagcatcatacggcacattctcctgcaacaacagcagttgctgacgatgagagttcaaacgtctctttacccgcaagttcaggctttaataaaggcgtgctgctgggaacgcggaccagttttggaaagaagaaccctacttctttcttcgctcaagactctactactggagtagacatggaagagacacaaggtgaaccggcttccaatacttccaatactgacaatcaggcacgcaaaaggtcgaagaataagataaagaaagaaagaaaggagagaagtggagagacaaagggtgaaccggctccgacttttgaagcagccaagctcatctggaaattccctctggacatgcgcctcgaagtcaagctcccatccgagaatgcggaacacgctgcctacttcaattcccttctgaaaacctttgtgtcccacttaatcaaagcaaattcacgcctggttgatgatatttcatataaagtagttcgtgccggctgggatgtcctatttcttcgcaaacaaggcttcattcccggcacaaaaaaggagatatatgccacaagatctgaggcagtgaagtattttgcaaggctctttccaattgacgtggcacgagttacatcaaacgcacgaagagatatcgttgaccagccgactcctcccgccgtcgcgcaatctgtcgcgcaatctgccccgcaacctattgctcgaccagatcctcagtctgccgctcagtctgccgctcagtctgccgctcagccggtgtatgcggatagctttggggctgacgatgatcacatcagcatcagcagctcttcatcggaagaagataacaacaatactgaacagtcgcctctgactcctaccgacgagctgagtctccagagaagatatttttccagtgccgaagatccatctcagtactgcctatcatgctcaagccagaaacataccacagatgcttgccctgaaatgggatgtagcttttgcgatgacgttggccacacttcatttggttgtccgacaacacagagatgtgaaaagtgccgtcaagccggccacaatgccagatcctgtcaagagaagctctcattggcccccgaagagcttggcggctgtgctttctgcaatgcggaacatcaagacaacgactgtactgaaatttggcgaagcttcaaaccttccgaagcggacattcagcaagtcaagttcctccccatcttctgttacacttgtggcgagcgcggccattacggcccagagtgcgcacttccagatatgggcggcaaggtctcgggtcgcacaacatggtccaaatccaaccatgcactgtatgtcaaccctgagagtgagggtgtagcaattgcatgggctgaggtcgatcccgctgcgctgaccaacgaagacggagaatttcacattcgcggacaggccaaaagaaagggccatacgtacttcgtctccagtgacgagtcggatgaggatctcatccacccgcctattgcaaagcgtcaagcacatggtgatatcaggattgctagcagtatcggaggcggaggtcacaggatgaataacagtcagccaccactgccacccggtccaccgcctcccgatggcccacgaggttctttccatcctccacctcctggaagcttaccgccgagaccgcagacatttgttaatggcagaccacctccgggcggtaacaacgccagaggtggtcggggtggtcgtcgtggcggacgtggtcgctggagtaaaaaaccccgagaaacacattga

SEQ ID NO: 22102 - protein, 768 aa, Muscodor strobelii
  misc_feature: SGI Peptide ID NO. 567496
  misc_feature (462)..(691): NCBI GI: 46137275 Blast Desc: FG10153.1 [Gibberella zeae PH-1]
  misc_feature (445)..(714): NCBI GI: 256732161 Blast Desc: NECHADRAFT_93654 [Nectria haematococca mpVI 77-13-4]
  misc_feature (460)..(631): NCBI GI: 85089923 Blast Desc: NCU04617 [Neurospora crassa OR74A] gi|21622510|emb|CAD37057.1| conserved [Neurospora crassa] gi|28919506|gb|EAA28937.1| [Neurospora crassa OR74A]
  misc_feature (453)..(708): NCBI GI: 171691679 Blast Desc: protein product [Podospora anserina] gi|170945788|emb|CAP72588.1| protein product [Podospora anserina]
  misc_feature (461)..(702): NCBI GI: 39958432 Blast Desc: MGG_09256 [Magnaporthe grisea 70-15] gi|145013297|gb|EDJ97938.1| MGG_09256 [Magnaporthe grisea 70-15]
  misc_feature (470)..(691): NCBI GI: 261351739 Blast Desc: zinc knuckle domain-containing protein [Verticillium albo-atrum VaMs.102]
  misc_feature (462)..(705): NCBI GI: 156044332 Blast Desc: SS1G_10269 [Sclerotinia sclerotiorum 1980] gi|154694658|gb|EDN94396.1| SS1G_10269 [Sclerotinia sclerotiorum 1980]
  misc_feature (460)..(705): NCBI GI: 154305372 Blast Desc: BC1G_08455 [Botryotinia fuckeliana B05.10] gi|150853242|gb|EDN28434.1| BC1G_08455 [Botryotinia fuckeliana B05.10]
  misc_feature (470)..(597): NCBI GI: 50290839 Blast Desc: protein product [Candida glabrata] gi|49527163|emb|CAG60801.1| protein product [Candida glabrata]
  misc_feature (466)..(597): NCBI GI: 50310651 Blast Desc: protein product [Kluyveromyces lactis] gi|49644483|emb|CAG98055.1| KLLA0F05896p [Kluyveromyces lactis]
MDEATQGTEPESSVMEPSAPEETTPQPQKRARDYGAELKGLSSGEESDSDVESQMPNNKRLKRDYGQDANGGSDSDGLDDGEIVDSPLPPSHPVQPAEEVPEPEHHANVQLDTLNSIDLASDAGNDAVTASASTLILEQSGYGEQDTSLPVMDENHGPSDTQGELATIDNSQDSEQHHTAHSPATTAVADDESSNVSLPASSGFNKGVLLGTRTSFGKKNPTSFFAQDSTTGVDMEETQGEPASNTSNTDNQARKRSKNKIKKERKERSGETKGEPAPTFEAAKLIWKFPLDMRLEVKLPSENAEHAAYFNSLLKTFVSHLIKANSRLVDDISYKVVRAGWDVLFLRKQGFIPGTKKEIYATRSEAVKYFARLFPIDVARVTSNARRDIVDQPTPPAVAQSVAQSAPQPIARPDPQSAAQSAAQSAAQPVYADSFGADDDHISISSSSSEEDNNNTEQSPLTPTDELSLQRRYFSSAEDPSQYCLSCSSQKHTTDACPEMGCSFCDDVGHTSFGCPTTQRCEKCRQAGHNARSCQEKLSLAPEELGGCAFCNAEHQDNDCTEIWRSFKPSEADIQQVKFLPIFCYTCGERGHYGPECALPDMGGKVSGRTTWSKSNHALYVNPESEGVAIAWAEVDPAALTNEDGEFHIRGQAKRKGHTYFVSSDESDEDLIHPPIAKRQAHGDIRIASSIGGGGHRMNNSQPPLPPGPPPPDGPRGSFHPPPPGSLPPRPQTFVNGRPPPGGNNARGGRGGRRGGRGRWSKKPRETH

SEQ ID NO: 22103 - DNA, 3143 bp, Muscodor strobelii
  misc_feature: SGI EST ID NO. CUFF.52059.0
  misc_feature: Variant of the nucleotide sequence at SEQ ID NO 22101
ctgaaagaagttttacagtacagtgattaggcggagctaacgctggatgagactacctaggttttgaggcaagagccgcagtatcagatggatgaaggccgttactgctattcaagacggcgaaacaaatcccaagtcgagtcatccatcacaaatcattgaatctcttcttctcagagtcgacagttccaattcccactgttcccgcaaaagcaaaaaacattgcacgtcatattttgtgtgcatcacctttggctctcccttccattgcggttgtctctgcagtttaatgtgctccctcacgcgtcgcaaccatgatggacgaggctactcaagggacggaacctgaaagctctgtcatggagccttcagctcctgaggaaactactccccaaccacagaagcgtgctcgcgactacggagcagagctgaaaggcttgagttcaggagaagaaagtgattcagacgtggaatcgcagatgccgaacaacaagaggcttaaaagagactatggacaggatgctaatggcggcagcgattctgatggactggacgatggtgagatagtggactcacctctacctccatctcatcctgtccagccagccgaggaggttcctgaacctgaacatcacgccaatgtgcagctcgacactctcaacagcattgatcttgcctctgacgctggtaatgatgctgttacagcgtccgcttccacattgattctagagcagtcgggatatggcgaacaagacacatccctaccagtaatggacgagaatcatggaccaagtgatacacaaggcgagcttgcaactattgacaactcgcaagactccgagcagcatcatacggcacattctcctgcaacaacagcagttgctgacgatgagagttcaaacgtctctttacccgcaagttcaggctttaataaaggcgtgctgctgggaacgcggaccagttttggaaagaagaaccctacttctttcttcgctcaagactctactactggagtagacatggaagagacacaaggtgaaccggcttccaatacttccaatactgacaatcaggcacgcaaaaggtcgaagaataagataaagaaagaaagaaaggagagaagtggagagacaaagggtgaaccggctccgacttttgaagcagccaagctcatctggaaattccctctggacatgcgcctcgaagtcaagctcccatccgagaatgcggaacacgctgcctacttcaattcccttctgaaaacctttgtgtcccacttaatcaaagcaaattcacgcctggttgatgatatttcatataaagtagttcgtgccggctgggatgtcctatttcttcgcaaacaaggcttcattcccggcacaaaaaaggagatatatgccacaagatctgaggcagtgaagtattttgcaaggctctttccaattgacgtggcacgagttacatcaaacgcacgaagagatatcgttgaccagccgactcctcccgccgtcgcgcaatctgtcgcgcaatctgccccgcaacctattgctcgaccagatcctcagtctgccgctcagtctgccgctcagtctgccgctcagccggtgtatgcggatagctttggggctgacgatgatcacatcagcatcagcagctcttcatcggaagaagataacaacaatactgaacagtcgcctctgactcctaccgacgagctgagtctccagagaagatatttttccagtgccgaagatccatctcagtactgcctatcatgctcaagccagaaacataccacagatgcttgccctgaaatgggatgtagcttttgcgatgacgttggccacacttcatttggttgtccgacaacacagagatgtgaaaagtgccgtcaagccggccacaatgccagatcctgtcaagagaagctctcattggcccccgaagagcttggcggctgtgctttctgcaatgcggaacatcaagacaacgactgtactgaaatttggcgaagcttcaaaccttccgaagcggacattcagcaagtcaagttcctccccatcttctgttacacttgtggcgagcgcggccattacggcccagagtgcgcacttccagatatgggcggcaaggtctcgggtcgcacaacatggtccaaatccaaccatgcactgtatgtcaaccctgagagtgagggtgtagcaattgcatgggctgaggtcgatcccgctgcgctgaccaacgaagacggagaatttcacattcgcggacaggccaaaagaaagggccatacgtacttcgtctccagtgacgagtcggatgaggatctcatccacccgcctattgcaaagcgtcaagcacatggtgatatcaggattgctagcagtatcggaggcggaggtcacaggatgaataacagtcagccaccactgccacccggtccaccgcctcccgatggcccacgaggttctttccatcctccacctcctggaagcttaccgccgagaccgcagacatttgttaatggcagaccacctccgggcggtaacaacgccagaggtggtcggggtggtcgtcgtggcggacgtggtcgctggagtaaaaaaccccgagaaacacattgagcatcgcattcaaggatagaatggctggcagcattgtcaaaagtgagtggcgtacaattgctatctatttgcacaattgagcttaggcttaggatgcctctagctaagcccatgcatgaggctaggggtgaggctctcgtgcacacgatgcattgtgggaatccatgaggcattggctgttaggctacctattgcctaaatcgggacgaaataatgagtgacgaattgcttcgattgaagctgcattcatcagatacaggatccatcagcgggaatgcatatcggtccgtgctgcgtaaaagatgcataattcgaccccgcgggatattgttctctaagaaaacgggaaagcaggaaaggactatatagttgctttttctcgtagtcaatgaagaacgctagtctcaacgaagattcatccaatcgagcagcgcagttcgccagcagcctggcgatcaagaaaatgcacaatgcgtgagtacttcttcgaaggcgttgtcgatcaattctagatttctg

SEQ ID NO: 22104 - DNA, 2310 bp, Muscodor strobelii
  misc_feature: SGI cDNA ID NO. 567497
  misc_feature: Encodes the peptide sequence at SEQ ID NO 22105
atgatggacgaggctactcaagggacggaacctgaaagctctgtcatggagccttcagctcctgaggaaactactccccaaccacagaagcgtgctcgcgactacggagcagagctgaaaggcttgagttcaggagaagaaagtgattcagacgtggaatcgcagatgccgaacaacaagaggcttaaaagagactatggacaggatgctaatggcggcagcgattctgatggactggacgatggtgagatagtggactcacctctacctccatctcatcctgtccagccagccgaggaggttcctgaacctgaacatcacgccaatgtgcagctcgacactctcaacagcattgatcttgcctctgacgctggtaatgatgctgttacagcgtccgcttccacattgattctagagcagtcgggatatggcgaacaagacacatccctaccagtaatggacgagaatcatggaccaagtgatacacaaggcgagcttgcaactattgacaactcgcaagactccgagcagcatcatacggcacattctcctgcaacaacagcagttgctgacgatgagagttcaaacgtctctttacccgcaagttcaggctttaataaaggcgtgctgctgggaacgcggaccagttttggaaagaagaaccctacttctttcttcgctcaagactctactactggagtagacatggaagagacacaaggtgaaccggcttccaatacttccaatactgacaatcaggcacgcaaaaggtcgaagaataagataaagaaagaaagaaaggagagaagtggagagacaaagggtgaaccggctccgacttttgaagcagccaagctcatctggaaattccctctggacatgcgcctcgaagtcaagctcccatccgagaatgcggaacacgctgcctacttcaattcccttctgaaaacctttgtgtcccacttaatcaaagcaaattcacgcctggttgatgatatttcatataaagtagttcgtgccggctgggatgtcctatttcttcgcaaacaaggcttcattcccggcacaaaaaaggagatatatgccacaagatctgaggcagtgaagtattttgcaaggctctttccaattgacgtggcacgagttacatcaaacgcacgaagagatatcgttgaccagccgactcctcccgccgtcgcgcaatctgtcgcgcaatctgccccgcaacctattgctcgaccagatcctcagtctgccgctcagtctgccgctcagtctgccgctcagccggtgtatgcggatagctttggggctgacgatgatcacatcagcatcagcagctcttcatcggaagaagataacaacaatactgaacagtcgcctctgactcctaccgacgagctgagtctccagagaagatatttttccagtgccgaagatccatctcagtactgcctatcatgctcaagccagaaacataccacagatgcttgccctgaaatgggatgtagcttttgcgatgacgttggccacacttcatttggttgtccgacaacacagagatgtgaaaagtgccgtcaagccggccacaatgccagatcctgtcaagagaagctctcattggcccccgaagagcttggcggctgtgctttctgcaatgcggaacatcaagacaacgactgtactgaaatttggcgaagcttcaaaccttccgaagcggacattcagcaagtcaagttcctccccatcttctgttacacttgtggcgagcgcggccattacggcccagagtgcgcacttccagatatgggcggcaaggtctcgggtcgcacaacatggtccaaatccaaccatgcactgtatgtcaaccctgagagtgagggtgtagcaattgcatgggctgaggtcgatcccgctgcgctgaccaacgaagacggagaatttcacattcgcggacaggccaaaagaaagggccatacgtacttcgtctccagtgacgagtcggatgaggatctcatccacccgcctattgcaaagcgtcaagcacatggtgatatcaggattgctagcagtatcggaggcggaggtcacaggatgaataacagtcagccaccactgccacccggtccaccgcctcccgatggcccacgaggttctttccatcctccacctcctggaagcttaccgccgagaccgcagacatttgttaatggcagaccacctccgggcggtaacaacgccagaggtggtcggggtggtcgtcgtggcggacgtggtcgctggagtaaaaaaccccgagaaacacattga

SEQ ID NO: 22105 - protein, 769 aa, Muscodor strobelii
  misc_feature: SGI Peptide ID NO. 567497
  misc_feature (463)..(692): NCBI GI: 46137275 Blast Desc: FG10153.1 [Gibberella zeae PH-1]
  misc_feature (446)..(715): NCBI GI: 256732161 Blast Desc: NECHADRAFT_93654 [Nectria haematococca mpVI 77-13-4]
  misc_feature (461)..(632): NCBI GI: 85089923 Blast Desc: NCU04617 [Neurospora crassa OR74A] gi|21622510|emb|CAD37057.1| conserved [Neurospora crassa] gi|28919506|gb|EAA28937.1| [Neurospora crassa OR74A]
  misc_feature (454)..(709): NCBI GI: 171691679 Blast Desc: protein product [Podospora anserina] gi|170945788|emb|CAP72588.1| protein product [Podospora anserina]
  misc_feature (462)..(703): NCBI GI: 39958432 Blast Desc: MGG_09256 [Magnaporthe grisea 70-15] gi|145013297|gb|EDJ97938.1| MGG_09256 [Magnaporthe grisea 70-15]
  misc_feature (471)..(692): NCBI GI: 261351739 Blast Desc: zinc knuckle domain-containing protein [Verticillium albo-atrum VaMs.102]
  misc_feature (463)..(706): NCBI GI: 156044332 Blast Desc: SS1G_10269 [Sclerotinia sclerotiorum 1980] gi|154694658|gb|EDN94396.1| SS1G_10269 [Sclerotinia sclerotiorum 1980]
  misc_feature (461)..(706): NCBI GI: 154305372 Blast Desc: BC1G_08455 [Botryotinia fuckeliana B05.10] gi|150853242|gb|EDN28434.1| BC1G_08455 [Botryotinia fuckeliana B05.10]
  misc_feature (471)..(598): NCBI GI: 50290839 Blast Desc: protein product [Candida glabrata] gi|49527163|emb|CAG60801.1| protein product [Candida glabrata]
  misc_feature (467)..(598): NCBI GI: 50310651 Blast Desc: protein product [Kluyveromyces lactis] gi|49644483|emb|CAG98055.1| KLLA0F05896p [Kluyveromyces lactis]
MMDEATQGTEPESSVMEPSAPEETTPQPQKRARDYGAELKGLSSGEESDSDVESQMPNNKRLKRDYGQDANGGSDSDGLDDGEIVDSPLPPSHPVQPAEEVPEPEHHANVQLDTLNSIDLASDAGNDAVTASASTLILEQSGYGEQDTSLPVMDENHGPSDTQGELATIDNSQDSEQHHTAHSPATTAVADDESSNVSLPASSGFNKGVLLGTRTSFGKKNPTSFFAQDSTTGVDMEETQGEPASNTSNTDNQARKRSKNKIKKERKERSGETKGEPAPTFEAAKLIWKFPLDMRLEVKLPSENAEHAAYFNSLLKTFVSHLIKANSRLVDDISYKVVRAGWDVLFLRKQGFIPGTKKEIYATRSEAVKYFARLFPIDVARVTSNARRDIVDQPTPPAVAQSVAQSAPQPIARPDPQSAAQSAAQSAAQPVYADSFGADDDHISISSSSSEEDNNNTEQSPLTPTDELSLQRRYFSSAEDPSQYCLSCSSQKHTTDACPEMGCSFCDDVGHTSFGCPTTQRCEKCRQAGHNARSCQEKLSLAPEELGGCAFCNAEHQDNDCTEIWRSFKPSEADIQQVKFLPIFCYTCGERGHYGPECALPDMGGKVSGRTTWSKSNHALYVNPESEGVAIAWAEVDPAALTNEDGEFHIRGQAKRKGHTYFVSSDESDEDLIHPPIAKRQAHGDIRIASSIGGGGHRMNNSQPPLPPGPPPPDGPRGSFHPPPPGSLPPRPQTFVNGRPPPGGNNARGGRGGRRGGRGRWSKKPRETH

SEQ ID NO: 22106 - DNA, 3143 bp, Muscodor strobelii; identical to SEQ ID NO: 22103
  misc_feature: SGI EST ID NO. CUFF.52059.0
  misc_feature: Variant of the nucleotide sequence at SEQ ID NO 22104

SEQ ID NO: 22107 - DNA, 1656 bp, Muscodor strobelii
  misc_feature: SGI cDNA ID NO. 567498
  misc_feature: Reduced expression when VOC is produced
  misc_feature: Encodes the peptide sequence at SEQ ID NO 22108
atggcttcccctctgctcgaaggggacgataagttcccaaagcagatcgaggcaaacaccgattcactagatgatacgaggacacacgatgaagaaaatccttcagcgtctccagctagtcgaaatgctcctcctgccgtcgaatatgatgttgcgcgcatcgagaaagtgtacagaaaactggatttgcgcatcatcccagctttttgggtgctatacttcctctgctctgccatccgttccaacatcggattggcgcagactatgaaccaggacgttggtcatgatctccttcagatcttacacttgactcccaaggatacctcgacggcgttggcgcttttttatgtatcctatgtcatattcgactgcccttccaacctcatcatgagtcgactgagtccacgcgtttggatggctaggatcgtactcgctgttggtatcattgggacattattcacgaccgtgaaggctgcctggagcttgaagctccttcgtttcattctcggagtcgtcatcgctgggatgtggcctggtatggcatattacttgacacttttctatccaccgtcgcgaacaggcaagcgagttggatattatttcactgcttctcaagtctcggcagcggtcgtgggtctggtgtctgctgggttccagctcattgatactcgtggtgggctctatggattccagtggatgttcctcatctatggccttgtcgctattctcgtgggtttctcgcttctatggtggctgccagacagaccagtcccgcctggggagacgcgtgtacgtacgggtctcacaaagtggcttcctgctacaccagaagctctgactggcgaggatgctcttatccattaccaagacctcaggcgtgtctaccacccccggccatggaccctgaaagatctctggcgagtgctcattgattggcgcctgtggcctttgattgtgatgtattttggcgttgtcggttgtggtattggtacccaactctacgcgaatcttattatccagtcgatcaatcctcaattcagtagcatcgacttgagtttattgactgcgcccatctggatttttgacttgattgccatactgctcgtgacgcccctatccgatcgtttccatcggctgcgcccatttttcttctcggtggctactagcattcaaattgccggtctactagtaacgacttttgcgccacgttcaaacgcatgggcccgctacggcggacttctactcgttggttttgggctgggtccaacagtaccaatttgcatgacctggacaagcgagatcttccaaaagcgccacggtgaagtcggtgttgcagctgcggcagctcttgtttctgggctgggcaatttgggcagtatcacgaccacatatgcgctttacaccggctggcccgaagatgccaagaagggaccttatcaataccgtaacagcaatctcgtcatgatcgcaatccttgccgctagtatcttgagcagctttgtcatgtggggtcttctcaagctcaccgacaagaaggctggtccgaagatcaacagcagcgacagttcggtggtcgatggataccaagacggcgctgcgcgccgcgaaattgagcaacgtgggttcagccgcatgtggtggaccaagaaatcatag

SEQ ID NO: 22108 - protein, 551 aa, Muscodor strobelii
  misc_feature: SGI Peptide ID NO. 567498
  misc_feature (69)..(459): Pfam Id: PF07690 Pfam Desc: Major Facilitator Superfamily
  misc_feature (14)..(549): NCBI GI: 154305392 Blast Desc: BC1G_08465 [Botryotinia fuckeliana B05.10] gi|150853252|gb|EDN28444.1| BC1G_08465 [Botryotinia fuckeliana B05.10]
  misc_feature (40)..(551): NCBI GI: 116206750 Blast Desc: CHGG_02668 [Chaetomium globosum CBS 148.51] gi|88183265|gb|EAQ90733.1| CHGG_02668 [Chaetomium globosum CBS 148.51]
  misc_feature (40)..(551): NCBI GI: 145606194 Blast Desc: MGG_02475 [Magnaporthe grisea 70-15] gi|145013916|gb|EDJ98557.1| MGG_02475 [Magnaporthe grisea 70-15]
  misc_feature (54)..(551): NCBI GI: 256732258 Blast Desc: NECHADRAFT_61399 [Nectria haematococca mpVI 77-13-4]
  misc_feature (44)..(551): NCBI GI: 85092044 Blast Desc: NCU04656 [Neurospora crassa OR74A] gi|21622323|emb|CAD37026.1| conserved [Neurospora crassa] gi|28920601|gb|EAA29963.1| conserved [Neurospora crassa OR74A]
  misc_feature (36)..(545): NCBI GI: 171692255 Blast Desc: protein product [Podospora anserina] gi|170946076|emb|CAP72877.1| protein product [Podospora anserina]
  misc_feature (11)..(542): NCBI GI: 115389734 Blast Desc: conserved [Aspergillus terreus NIH2624] gi|114194768|gb|EAU36468.1| conserved [Aspergillus terreus NIH2624]
  misc_feature (7)..(545): NCBI GI: 261352106 Blast Desc: vitamin H transporter 1 [Verticillium albo-atrum VaMs.102]
  misc_feature (25)..(542): NCBI GI: 145229985 Blast Desc: An01g08790 [Aspergillus niger] gi|134055415|emb|CAK37124.1| protein product [Aspergillus niger]
  misc_feature (31)..(542): NCBI GI: 255947164 Blast Desc: Pc22g03060 [Penicillium chrysogenum Wisconsin 54-1255] gi|211591366|emb|CAP97594.1| Pc22g03060 [Penicillium chrysogenum Wisconsin 54-1255]
  misc_feature: Useful for introducing or modulating the production of volatile compounds
MASPLLEGDDKFPKQIEANTDSLDDTRTHDEENPSASPASRNAPPAVEYDVARIEKVYRKLDLRIIPAFWVLYFLCSAIRSNIGLAQTMNQDVGHDLLQILHLTPKDTSTALALFYVSYVIFDCPSNLIMSRLSPRVWMARIVLAVGIIGTLFTTVKAAWSLKLLRFILGVVIAGMWPGMAYYLTLFYPPSRTGKRVGYYFTASQVSAAVVGLVSAGFQLIDTRGGLYGFQWMFLIYGLVAILVGFSLLWWLPDRPVPPGETRVRTGLTKWLPATPEALTGEDALIHYQDLRRVYHPRPWTLKDLWRVLIDWRLWPLIVMYFGVVGCGIGTQLYANLIIQSINPQFSSIDLSLLTAPIWIFDLIAILLVTPLSDRFHRLRPFFFSVATSIQIAGLLVTTFAPRSNAWARYGGLLLVGFGLGPTVPICMTWTSEIFQKRHGEVGVAAAAALVSGLGNLGSITTTYALYTGWPEDAKKGPYQYRNSNLVMIAILAASILSSFVMWGLLKLTDKKAGPKINSSDSSVVDGYQDGAARREIEQRGFSRMWWTKKS

SEQ ID NO: 22109 - DNA, 3009 bp, Muscodor strobelii
  misc_feature: SGI EST ID NO. CUFF.52062.0
  misc_feature: Variant of the nucleotide sequence at SEQ ID NO 22107
tgagggcataataaggagatagctcctaacaacttacgccgggccgttccatctcatttcaagttgaaaattgttgagtagacattttgagagagacaggcaatgagtaaagtgcaggctttcagtacgaatgtacccatgtagggtgggaattctttgactttcgcatgtcattaggaatgcgatatcgactcttttttttcgaccgcatcctcactatgcagctgagctttccacgactctaaccgagctaaaatacctgtacaaataaccattatacatagcgccacacggctgcgcaagtagataaattttaacgtgatcttaatctcaaccttctttcctctactcaaacctattcacatatctcatgcgaacattaccttaatatttagctggttatcctacccttattttatttccttcctctcttcatagtcattggtctttccggagtggctcgcttatccgatggcttcccctctgctcgaaggggacgataagttcccaaagcagatcgaggcaaacaccgattcactagatgatacgaggacacacgatgaagaaaatccttcagcgtctccagctagtcgaaatgctcctcctgccgtcgaatatgatgttgcgcgcatcgagaaagtgtacagaaaactggatttgcgcatcatcccagctttttgggtgctatacttcctctgctctgccatccgttccaacatcggattggcgcagactatgaaccaggacgttggtcatgatctccttcagatcttacacttgactcccaaggatacctcgacggcgttggcgcttttttatgtatcctatgtcatattcgactgcccttccaacctcatcatgagtcgactgagtccacgcgtttggatggctaggatcgtactcgctgttggtatcattgggacattattcacgaccgtgaaggctgcctggagcttgaagctccttcgtttcattctcggagtcgtcatcgctgggatgtggcctggtatggcatattacttgacacttttctatccaccgtcgcgaacaggcaagcgagttggatattatttcactgcttctcaagtctcggcagcggtcgtgggtctggtgtctgctgggttccagctcattgatactcgtggtgggctctatggattccagtggatgttcctcatctatggccttgtcgctattctcgtgggtttctcgcttctatggtggctgccagacagaccagtcccgcctggggagacgcgtgtacgtacgggtctcacaaagtggcttcctgctacaccagaagctctgactggcgaggatgctcttatccattaccaagacctcaggcgtgtctaccacccccggccatggaccctgaaagatctctggcgagtgctcattgattggcgcctgtggcctttgattgtgatgtattttggcgttgtcggttgtggtattggtacccaactctacgcgaatcttattatccagtcgatcaatcctcaattcagtagcatcgacttgagtttattgactgcgcccatctggatttttgacttgattgccatactgctcgtgacgcccctatccgatcgtttccatcggctgcgcccatttttcttctcggtggctactagcattcaaattgccggtctactagtaacgacttttgcgccacgttcaaacgcatgggcccgctacggcggacttctactcgttggttttgggctgggtccaacagtaccaatttgcatgacctggacaagcgagatcttccaaaagcgccacggtgaagtcggtgttgcagctgcggcagctcttgtttctgggctgggcaatttgggcagtatcacgaccacatatgcgctttacaccggctggcccgaagatgccaagaagggaccttatcaataccgtaacagcaatctcgtcatgatcgcaatccttgccgctagtatcttgagcagctttgtcatgtggggtcttctcaagctcaccgacaagaaggctggtccgaagatcaacagcagcgacagttcggtggtcgatggataccaagacggcgctgcgcgccgcgaaattgagcaacgtgggttcagccgcatgtggtggaccaagaaatcatagattaacactaagacattcggacatggctggcaacacttcacagtcttcaacaatcgagccatccagtcatgcacgctaatttaatggcccacgcctgccacgcagctcaacctgtcgatggtctcactcgttttgtacatgcaacatcacaatcactttttcttcctttcaagaagctccatgactctggtttatgggtttcgggtgacagtgctgttacgccattaccttcatccgcaagcttgagcctggagctggtgcgacttacagcgaaaatgccctacgctatcgtctgtacttcgtaccttatttctgcactgttattcattttctgtctgggtttcgatttggtggactttttggaaagtcctgggttcggtctggcgttggcatatgatacccccatttgttgtttggatacgctgtcttttcgaggaatacccacatatgagtcttctcgcggtcgaaagtgctgttacgccatcgaccgagacggcgtgttgcagccgaggcgggaccgacgacaatgccgtatgcgctatcgtatgggaactcgtctcgtgggctttgcatatatcacccgtcgagaattacttgttttattttattcttcctcaagcagacaatgcttcactggctcaggatagagcaattacacgagggatacagtgaggatgtgtacttaggtagacatctttgtcttgtatggacttggctgtacgttcgttagtatacggtttgaaatacacttctggccttgccatgtttcccgttatactttttatctgttctttgatgctgttgccacacgttattgatcaactctgctgtcatcgtgcccattaaagatacgcagcatcatgctacattggaatatccatc

SEQ ID NO: 22110 - DNA, 1824 bp, Muscodor strobelii
  misc_feature: SGI cDNA ID NO. 567499
  misc_feature: Encodes the peptide sequence at SEQ ID NO 22111
atgacttcggtacaggggcggcaaccaaccaatggtgataagcagccaccaaccgaacgcataatcgtcgacgatccaaagcttcgacttcagaggctcgtagacaaactcaaagccgagggcaaagttatcacaaaggatgttctcatcgtcggatctggtcccatcggagcggtatatgcacgtactctcaaggatgcagaggccggtctcaaagtcatgatgatagacatgggatcacaagggtccttcaatattggagatcatcacaaaaacagtgttgccgtgcagaaagatatcaatctcttcaccaatgtcatccgtggccaactcagtccactttcagtacctgctggcacagacatacttgcacttcccccaggggcatggtccgcagattcagatttcgtcctcaacggcctgaacccctgccaaaatatcaaatacaatctagcggccagtgctgctacacgtgccgtcggcgggatgtcgacgcactggacctgctgtacaccacgtcagcatccaatcgagcgctcgaaactcttcaccgaaacagagtgggacgagctctacaataaatgtgaacgattgttcaatacaaatgacgcagtagacaagttcgacgactcggtacgccagcgactcgtgaagaagaccctacaagatttcttcgcaggccaagcaacaaatagcgacactcctcgggaggtgagaacgatgcccctggcggcgcaaccaggcggtggaaacaagcaatacatcaaatggtcctgcacgtcgaccatcctcggcgatctcgcagatatctgcacaaaagacccagaatttgacttcaaatctcagtggcaatgtgaatctttatacataaacaccggcaacgacgcaaacacaggaactgttgaagctgccatcgtcacggatcttgtccacaatgagtactggctagttgaggccaagaaatacgtcgtttgcggtggtacagtattgactggaggtatatttgcgaagtcatgttttcaaagcggtttagatctcaagaccttcactcctgcattgggtaaatacctaactgaacaaccaatgaccttctgccaaatcatcctcaaacaggcactcgtcgaaaaagttgaaacaaacccaagcttcctagacgatggcagctcaaccatgatccgcgatagagtccgtggctaccgcgagaagcatccggacgatccagtaccattcccttacggtgatccagacccgaatgtgtacactccattctgtgacggctacccatggcacactcagatccaccgtgatgcctttggatacggcgagttgccttcagggctagatcaacgcttggtcgtcgatttacgctttttcggctatgcggatgcaatcgagacaaacaatgtgacttgggacagacatagaaaagacggattcggaatgcctcagcccacgttccatttccagatgtctcaagaggattgtgaccgtgctgcggatatgatgcaggacatgatagaagtcgctggtgctctaggtccctttgtgcctggttccgagccgagatacctggctccaggtctagcgctgcacgtctgcggtatataccgagctggcgaaaaattgactgaagacgataatatcgaaaacattaagaagacgagtgtggttaatcgtgaaggactcgtctggggtttgaacaacctctatcttggcggctgtggcatcattccccagggcaatgcttccaacccaacgctgactgcagcatgccatgctctagcaagcgctagagtcatcattagtgagctaaaagcaaaataa

SEQ ID NO: 22111 - protein, 607 aa, Muscodor strobelii
  misc_feature: SGI Peptide ID NO. 567499
  misc_feature (50)..(604): NCBI GI: 256720405 Blast Desc: NECHADRAFT_2320 [Nectria haematococca mpVI 77-13-4]
  misc_feature (47)..(607): NCBI GI: 259485286 Blast Desc: TPA: conserved [Aspergillus nidulans FGSC A4]
  misc_feature (50)..(601): NCBI GI: 169768478 Blast Desc: [Aspergillus oryzae RIB40] gi|83766567|dbj|BAE56707.1| protein product [Aspergillus oryzae]
  misc_feature (50)..(607): NCBI GI: 67538222 Blast Desc: AN5281.2 [Aspergillus nidulans FGSC A4] gi|67460729|sp|Q5B2E9.1|P2OX_EMENI RecName: Full=Pyranose 2-oxidase; Short=P2Ox; Short=Pyranose oxidase; Short=PROD; FGSC
  misc_feature (47)..(605): NCBI GI: 67460911 Blast Desc: P2OX_LYOSH RecName: Full=Pyranose 2-oxidase; Short=P2Ox; Short=Pyranose oxidase; Short=PROD; Short=POD; Short=POx; AltName: Full=Pyranose:oxygen 2-oxidoreductase;
  misc_feature (47)..(601): NCBI GI: 238497782 Blast Desc: pyranose 2-oxidase, [Aspergillus flavus NRRL3357] gi|220693400|gb|EED49745.1| pyranose 2-oxidase, [Aspergillus flavus NRRL3357]
  misc_feature (50)..(606): NCBI GI: 171691628 Blast Desc: protein product [Podospora anserina] gi|170945762|emb|CAP71875.1| protein product [Podospora anserina]
  misc_feature (47)..(604): NCBI GI: 67460956 Blast Desc: P2OX_TRIMT RecName: Full=Pyranose 2-oxidase; Short=P2Ox; Short=Pyranose oxidase; Short=PROD; Short=POD; Short=POx; AltName: Full=Pyranose:oxygen 2-oxidoreductase; Flags:
  misc_feature (38)..(600): NCBI GI: 67460739 Blast Desc: P2OX_TRAPU RecName: Full=Pyranose 2-oxidase; Short=P2Ox; Short=Pyranose oxidase; Short=PROD; Short=POD; Short=POx; AltName: Full=Pyranose:oxygen 2-oxidoreductase; Flags:
  misc_feature (38)..(600): NCBI GI: 25091018 Blast Desc: P2OX_TRAVE RecName: Full=Pyranose 2-oxidase; Short=P2Ox; Short=Pyranose oxidase; Short=PROD; Short=POD; Short=POx; AltName: Full=Pyranose:oxygen 2-oxidoreductase; Flags:
  misc_feature (50)..(607): SWISSPROT Homolog: EC 1.1.3.10 Pyranose oxidase
MTSVQGRQPTNGDKQPPTERIIVDDPKLRLQRLVDKLKAEGKVITKDVLIVGSGPIGAVYARTLKDAEAGLKVMMIDMGSQGSFNIGDHHKNSVAVQKDINLFTNVIRGQLSPLSVPAGTDILALPPGAWSADSDFVLNGLNPCQNIKYNLAASAATRAVGGMSTHWTCCTPRQHPIERSKLFTETEWDELYNKCERLFNTNDAVDKFDDSVRQRLVKKTLQDFFAGQATNSDTPREVRTMPLAAQPGGGNKQYIKWSCTSTILGDLADICTKDPEFDFKSQWQCESLYINTGNDANTGTVEAAIVTDLVHNEYWLVEAKKYVVCGGTVLTGGIFAKSCFQSGLDLKTFTPALGKYLTEQPMTFCQIILKQALVEKVETNPSFLDDGSSTMIRDRVRGYREKHPDDPVPFPYGDPDPNVYTPFCDGYPWHTQIHRDAFGYGELPSGLDQRLVVDLRFFGYADAIETNNVTWDRHRKDGFGMPQPTFHFQMSQEDCDRAADMMQDMIEVAGALGPFVPGSEPRYLAPGLALHVCGIYRAGEKLTEDDNIENIKKTSVVNREGLVWGLNNLYLGGCGIIPQGNASNPTLTAACHALASARVIISELKAK

SEQ ID NO: 22112 - DNA, 2373 bp, Muscodor strobelii
  misc_feature: SGI cDNA ID NO. 567500
  misc_feature: Encodes the peptide sequence at SEQ ID NO 22113
atgacccctcaggttattgaaccgtctttctccgcttctatcatccaagataagcgatctgatggctattggatcgagaaattctatttccatgacgatgataaggtcccaggtctgatcgtgtccttaaggtccgggttgaactctgggaaagttcagtttcttggaaatcctttgaacacaaaggggaaaggctccaagaaggtcaatgagccatggacagtctacgccattgcagagttcgacactcctgttgctgtcatcgcagctccaatccgacctcgaagcgggctgatggacgttgttctctgccacgattacggccccaatatgatagagtgtaacctcgacggtggttgggttagttggcttgagaatcccggacgcgataaactgggcagcccttggacgaaaagaacgattgggagatggccagccatgcatcgattgaaatgtggctactttacttcaaagtccatatttgaaatcatcggagcccctgtggtacatcgtcaacacgacaaaataacaccagtgcctatattccgattccaagctcccgaaaagccacatgaagtgactggatggcgacgagacgttgttgacgacgagaatttcacgatcgttcacgagctcgtggtgaaaacattccacggtcctaccggtatagactccttgcttgttggttctcgtgaaggtgtcagctggctatactatgagagaggcgtttggaagaccgaacggttaggcattggcgaaccataccatgtcggacaatcatggacctctgaagtccctggatcgggtgatcattggggtactggtacccttgatgctggcagaatcggcgatgacccgttcgcgtacattgctacaatgaaccctttccatggaggcgctgtgtgcgtatacaccaagacgaacacgggcctcaatacggctacgtggactcgccatgacttggacatgtatggtacaccaaatcaggccatgaaatatggtgatggacccggacactttcttgtttgcggcgattttgacggagatggcgatgacgagtttctgaactctctcatgggatcacttgatcgagacccaaatccaccttatgatgcgattccgccgcaaggaggtccgaacccaaataagggcattgtttactataaagctatcgatctagagaatggcatatttgctaaatggaaaattgccgaagaatcatcgggtcgcgtggccgttgggttagtttgctctgaaagcttttcccatcttgacttaaagggggctgacggggcattctatagcaatttcaatggtgaggacaagcttgatgtggcatccatcaagtatcatgtcgaacaatactatgaagagcctaaccctactgtcaatttgcacgttaatcagacggagcgatccgagtctaccttcagaagtagactcattgtgccctcactatggaatggagaagccatgatctatgtttctgagccaagcaatatcgtcgaggtagcatctctttccctcgtcgagatcgctgactacactatcagcgtggcggtttaccccaaagagagtaaggtgtctgtgaaacccggcgaaggcatcaaggtcttgtatggaagtcttcaggatagcagtggtacaattcgcagaccactcggcggtgccccattcccatgcagtgcctccacgctctgccaagaaggctctctcaccaccggcggtgtcggtgcgatcgcacttctcctgactcctatatcagatgaagcagaatgggaagactttgaaataaatcttaatggttctagagaacaatggtcgaacgcggctgatgtcccagtacatactacacttgacctcagtgaggttggtctcaagatgccaacactgaacttcaagaaagtggaagatctgtggtggggagtgaaattcaagggtgtcgagttctacaatctgactggtttccactttgcgttcctggagtcgaagaccaaaattgctcatatgcagttttggatcgctgggcccggagtcagcgctggtgcacacaaccacagcaacgacatgttcgaagagatacatataggtctatctctcggcacagagagcggtggcatgtccaggatccgaccccagtatgaagataagactgcagaagaagcagaagccctaccttcatctgcatggtctcacgtcgaaatgccgcctctggtcgagcacggggcgatttggcaccaagactcgtatggcaaagccgtccgtgggcataatcgggtcgtttcatatccgtggcacaagtggcaagctggcaatgggaagaacctggatatctggcttgctttggaattcaatcttgacgtagaactatga

SEQ ID NO: 22113 - protein, 790 aa, Muscodor strobelii
  misc_feature: SGI Peptide ID NO. 567500
  misc_feature (4)..(786): NCBI GI: 67538220 Blast Desc: AN5280.2 [Aspergillus nidulans FGSC A4] gi|40743250|gb|EAA62440.1| AN5280.2 [Aspergillus nidulans FGSC A4] gi|259485287|tpe|CBF82185.1| TPA: conserved [Aspergillus FGSC
  misc_feature (45)..(414): NCBI GI: 238497780 Blast Desc: AFLA_065660 [Aspergillus flavus NRRL3357] gi|220693399|gb|EED49744.1| AFLA_065660 [Aspergillus flavus NRRL3357]
  misc_feature (436)..(788): NCBI GI: 171691632 Blast Desc: protein product [Podospora anserina] gi|170945764|emb|CAP71877.1| protein product [Podospora anserina]
  misc_feature (8)..(470): NCBI GI: 260907550 Blast Desc: FG-GAP repeat-containing protein [Brevibacterium linens BL2]
  misc_feature (95)..(322): NCBI GI: 171691630 Blast Desc: protein product [Podospora anserina] gi|170945763|emb|CAP71876.1| protein product [Podospora anserina]
  misc_feature (505)..(786): NCBI GI: 169768472 Blast Desc: [Aspergillus oryzae RIB40] gi|83766564|dbj|BAE56704.1| protein product [Aspergillus oryzae]
  misc_feature (505)..(790): NCBI GI: 238497778 Blast Desc: conserved [Aspergillus flavus NRRL3357] gi|220693398|gb|EED49743.1| conserved [Aspergillus flavus NRRL3357]
  misc_feature (8)..(158): NCBI GI: 169768476 Blast Desc: [Aspergillus oryzae RIB40] gi|83766566|dbj|BAE56706.1| protein product [Aspergillus oryzae]
  misc_feature (7)..(461): NCBI GI: 283777842 Blast Desc: FG-GAP repeat protein [Pirellula staleyi DSM 6068] gi|283436295|gb|ADB14737.1| FG-GAP repeat protein [Pirellula staleyi DSM 6068]
  misc_feature (96)..(403): NCBI GI: 87308957 Blast Desc: DSM3645_19408 [Blastopirellula marina DSM 3645] gi|87288300|gb|EAQ80196.1| DSM3645_19408 [Blastopirellula marina DSM 3645]
MTPQVIEPSFSASIIQDKRSDGYWIEKFYFHDDDKVPGLIVSLRSGLNSGKVQFLGNPLNTKGKGSKKVNEPWTVYAIAEFDTPVAVIAAPIRPRSGLMDVVLCHDYGPNMIECNLDGGWVSWLENPGRDKLGSPWTKRTIGRWPAMHRLKCGYFTSKSIFEIIGAPVVHRQHDKITPVPIFRFQAPEKPHEVTGWRRDVVDDENFTIVHELVVKTFHGPTGIDSLLVGSREGVSWLYYERGVWKTERLGIGEPYHVGQSWTSEVPGSGDHWGTGTLDAGRIGDDPFAYIATMNPFHGGAVCVYTKTNTGLNTATWTRHDLDMYGTPNQAMKYGDGPGHFLVCGDFDGDGDDEFLNSLMGSLDRDPNPPYDAIPPQGGPNPNKGIVYYKAIDLENGIFAKWKIAEESSGRVAVGLVCSESFSHLDLKGADGAFYSNFNGEDKLDVASIKYHVEQYYEEPNPTVNLHVNQTERSESTFRSRLIVPSLWNGEAMIYVSEPSNIVEVASLSLVEIADYTISVAVYPKESKVSVKPGEGIKVLYGSLQDSSGTIRRPLGGAPFPCSASTLCQEGSLTTGGVGAIALLLTPISDEAEWEDFEINLNGSREQWSNAADVPVHTTLDLSEVGLKMPTLNFKKVEDLWWGVKFKGVEFYNLTGFHFAFLESKTKIAHMQFWIAGPGVSAGAHNHSNDMFEEIHIGLSLGTESGGMSRIRPQYEDKTAEEAEALPSSAWSHVEMPPLVEHGAIWHQDSYGKAVRGHNRVVSYPWHKWQAGNGKNLDIWLALEFNLDVEL

SEQ ID NO: 22114 - DNA, 816 bp, Muscodor strobelii
  misc_feature: SGI cDNA ID NO. 567501
  misc_feature: Encodes the peptide sequence at SEQ ID NO 22115
atgaagtctgtatctgttgctgctgccgctgtcttggccggcgttgctgtcgcccaaccgcacgggcaccaccttcaccagcgcctccacgcaaagcgtgatattgtcaccgaatgggaaactgtttgggagactgtgacagtagtcgttgatgatgaaaccactcagacacttcttcccacaactacctctggcgcgccaggcgaattcttccagcccagcgctgctaccagcaccagcacatccgaggttgttgttgctgagactcctactagcacgaagaaggccgcgccaacaacacccacgacgacttacacgcctccgccgccacctagccctacatcaacctcgactcccgtagtggagccaaccaccaccagcgttgcgcctcctccgccatcaacaacatcctcagagcccgcagccacgaccactgcttcctcaggcggctcaggaggctccggaggcggcaagcactactccggcgacatcacttactacgatgtcggtctcggcgcttgtggattcaacgaccaagaccagggcgactctatggccatcgtcgccatcgccgtcggtgactgggcagactacggtaccatggccacgaacgccggcctcaaccagcctctcaacccctggtgcaacaaaaagctaagtatcacggccaatggcaagactgtcgagggtgtggcccgtgaccaatgtcctggctgcgagcccggcagcatcgatgtctccgagaagatcttcctggagctcttcggcgatcttggtgtcggccgctcagccgtctcttggaccgtatctagctaa

SEQ ID NO: 22115 - protein, 271 aa, Muscodor strobelii
  misc_feature: SGI Peptide ID NO. 567501
  misc_feature (1)..(270): NCBI GI: 85091324 Blast Desc: NCU04603 [Neurospora crassa OR74A] gi|28920234|gb|EAA29610.1| [Neurospora crassa OR74A] gi|28950043|emb|CAD70798.1| related to rasp f 7 allergen crassa]
  misc_feature (19)..(267): NCBI GI: 46137439 Blast Desc: FG10235.1 [Gibberella zeae PH-1]
  misc_feature (18)..(267): NCBI GI: 212276059 Blast Desc: LOC100191867 [Zea mays] gi|194690052|gb|ACF79110.1| [Zea mays] gi|223973371|gb|ACN30873.1| [Zea mays]
  misc_feature (1)..(267): NCBI GI: 256731812 Blast Desc: NECHADRAFT_123159 [Nectria haematococca mpVI 77-13-4]
  misc_feature (160)..(271): NCBI GI: 171691703 Blast Desc: protein product [Podospora anserina] gi|170945800|emb|CAP72600.1| protein product [Podospora anserina]
  misc_feature (156)..(270): NCBI GI: 145613804 Blast Desc: MGG_11224 [Magnaporthe grisea 70-15] gi|145020828|gb|EDK04957.1| MGG_11224 [Magnaporthe grisea 70-15]
  misc_feature (130)..(269): NCBI GI: 261357799 Blast Desc: riboflavin aldehyde-forming enzyme [Verticillium albo-atrum VaMs.102]
  misc_feature (162)..(268): NCBI GI: 171680896 Blast Desc: protein product [Podospora anserina] gi|170940406|emb|CAP65632.1| protein product [Podospora anserina]
  misc_feature (58)..(267): NCBI GI: 156059582 Blast Desc: SS1G_03803 [Sclerotinia sclerotiorum 1980] gi|154701590|gb|EDO01329.1| SS1G_03803 [Sclerotinia sclerotiorum 1980]
  misc_feature (1)..(236): NCBI GI: 209570430 Blast Desc: [Glomerella graminicola]
MKSVSVAAAAVLAGVAVAQPHGHHLHQRLHAKRDIVTEWETVWETVTVVVDDETTQTLLPTTTSGAPGEFFQPSAATSTSTSEVVVAETPTSTKKAAPTTPTTTYTPPPPPSPTSTSTPVVEPTTTSVAPPPPSTTSSEPAATTTASSGGSGGSGGGKHYSGDITYYDVGLGACGFNDQDQGDSMAIVAIAVGDWADYGTMATNAGLNQPLNPWCNKKLSITANGKTVEGVARDQCPGCEPGSIDVSEKIFLELFGDLGVGRSAVSWTVSS

SEQ ID NO: 22116 - DNA, 1735 bp, Muscodor strobelii
  misc_feature: SGI EST ID NO. CUFF.51939.0
  misc_feature: Variant of the nucleotide sequence at SEQ ID NO 22114
tcggatcagggctggcttgtcgacgcatgtcttttgtgccccgttccatttccccgtcattcaggcctcttccctgctcgtctcggtgccaattgaggcttgctctgtgacctcctcactccccatgtggtgtgttcccgttggctaggctttcgaggttttcttagtccacctatgtgataaagagacatcctttcacctccaacctcgccctctccctcctcctttcccacctcacacttttcgtgactcaacccctactcgtacattctttcacttgagcagtgctcactgtatacattcatttatctgacactgctcgcaacactcattcgtggaacgaattcaagagatctggggaaacacagcaagccactaaaactgaaagtcgaatcatcatccagtcctaggccaacagacactccttgccaaacaaagacagacacatttaagagtccaacataacggcagcacgcagtcctttctgattgttttgaactaagataccctggctggacctctcgcgcaaatatctatcaagaaatagcaaaccaagaaacacgatgaagtctgtatctgttgctgctgccgctgtcttggccggcgttgctgtcgcccaaccgcacgggcaccaccttcaccagcgcctccacgcaaagcgtgatattgtcaccgaatgggaaactgtttgggagactgtgacagtagtcgttgatgatgaaaccactcagacacttcttcccacaactacctctggcgcgccaggcgaattcttccagcccagcgctgctaccagcaccagcacatccgaggttgttgttgctgagactcctactagcacgaagaaggccgcgccaacaacacccacgacgacttacacgcctccgccgccacctagccctacatcaacctcgactcccgtagtggagccaaccaccaccagcgttgcgcctcctccgccatcaacaacatcctcagagcccgcagccacgaccactgcttcctcaggcggctcaggaggctccggaggcggcaagcactactccggcgacatcacttactacgatgtcggtctcggcgcttgtggattcaacgaccaagaccagggcgactctatggccatcgtcgccatcgccgtcggtgactgggcagactacggtaccatggccacgaacgccggcctcaaccagcctctcaacccctggtgcaacaaaaagctaagtatcacggccaatggcaagactgtcgagggtgtggcccgtgaccaatgtcctggctgcgagcccggcagcatcgatgtctccgagaagatcttcctggagctcttcggcgatcttggtgtcggccgctcagccgtctcttggaccgtatctagctaagccaccgttacgaattgaaagttgaaatgaggcagatccgatgagacaattgggtgaaaagcactctggcgatagggtttggaaaagggactggatgtcccaattgagttttttacgttgcgccacgctacgctaccattaatcccgcgctactaagcgacctatctgtacgggactaagagcagcgtgttcgggcgtcggggtatttactgccaatgttatgatatcttagacttcaattcttgtatatacctagagactcaatctcgcctgctatatcacattgcgtatatgcagggagatggatagatggaatgttatcatctacgataccattgaattctggccacttcgtg

SEQ ID NO: 22117 - DNA, 1071 bp, Muscodor strobelii
  misc_feature: SGI cDNA ID NO. 567502
  misc_feature: Encodes the peptide sequence at SEQ ID NO 22118
atggctcgtcagtggatcttgaacaaacaagacggctttgaaaactcattagagtatcaaaatgtgccaattccttcaccaagcggccttggtcctaaagacgtgcttgtcaaaatgtacgccgccagtctgaactaccgcgaactcatgattgctactccaggaacacttgctggcaaactggagtcacctgttatccccggctgtgatggtgcaggagtagtagaggccgtcggccctgccgttcaagattttcaacctggcgatcgcgtagtcacacaccttgcaccgaaactcgtcgaagcacgtggtaacgatgcaccacctacactagaagatgtcactgcaatgctaggcatgggaacgtccggcactctggcgtcccacgccgtgttctcggaagctgcactggtccctgcacccaagtctcttgactgggtctcggcctcaacgctaacatgtacatggactactgcttggaatgccctgtacggactcaaaggcaagcaagttgagcccgattcttgggttctcatccagggaacgggaggtgtaagtattgccactctgcagcttgccgtcgcggctggggctcacgtcattggcacgagttcaacaagcgacagagaagctagactcactgcacttggagccgaacacaccgttaactatcgctctaacccggagtcctggggtgtggaagcacgaaagcacactccagacgaaagaggattcgatatcgtagtggatgtgggaggaaacgagactttcgctcaatccttggccgccgtgcgagccgatggtttgatcatggttgttggaggcttaggcaatgcatctgcggagtcggttcctctattttcggccctggtccatacgtgcgttgtccgtgggattcttggcggaacccgagctcaattctacgaccttgtgaagtacatcgaccagaaaggaatcaagccagcggtggatgacgtcgtgttcgaactggcagagacgaaagaagcctatcggcgcttgagtgagcagaaacacttttctaaggtcgtgatcagggtcgatcatgaataa

SEQ ID NO: 22118 - protein, 356 aa, Muscodor strobelii
  misc_feature: SGI Peptide ID NO. 567502
  misc_feature (32)..(140): Pfam Id: PF08240 Pfam Desc: Alcohol dehydrogenase GroES-like domain
  misc_feature (173)..(316): Pfam Id: PF00107 Pfam Desc: Zinc-binding dehydrogenase
  misc_feature (1)..(355): NCBI GI: 256721548 Blast Desc: NECHADRAFT_92328 [Nectria haematococca mpVI 77-13-4]
  misc_feature (1)..(355): NCBI GI: 67540538 Blast Desc: AN6439.2 [Aspergillus nidulans FGSC A4] gi|40739271|gb|EAA58461.1| AN6439.2 [Aspergillus nidulans FGSC A4] gi|259479334|tpe|CBF69470.1| TPA: conserved [Aspergillus FGSC
  misc_feature (1)..(355): NCBI GI: 242820275 Blast Desc: alcohol dehydrogenase, [Talaromyces stipitatus ATCC 10500] gi|218713946|gb|EED13370.1| alcohol dehydrogenase, [Talaromyces stipitatus ATCC 10500]
  misc_feature (1)..(356): NCBI GI: 212538821 Blast Desc: zinc-containing alcohol dehydrogenase, [Penicillium marneffei ATCC 18224] gi|210069308|gb|EEA23399.1| zinc-containing alcohol dehydrogenase, [Penicillium marneffei ATCC 18224]
  misc_feature (3)..(356): NCBI GI: 189206043 Blast Desc: alcohol dehydrogenase [Pyrenophora tritici-repentis Pt-1C-BFP] gi|187975449|gb|EDU42075.1| alcohol dehydrogenase [Pyrenophora tritici-repentis Pt-1C-BFP]
  misc_feature (74)..(355): NCBI GI: 171693161 Blast Desc: protein product [Podospora anserina] gi|170946529|emb|CAP73330.1| protein product [Podospora anserina]
  misc_feature (3)..(353): NCBI GI: 169610812 Blast Desc: SNOG_08513 [Phaeosphaeria nodorum SN15] gi|111062561|gb|EAT83681.1| SNOG_08513 [Phaeosphaeria nodorum SN15]
  misc_feature (3)..(354): NCBI GI: 115397933 Blast Desc: conserved [Aspergillus terreus NIH2624] gi|114192749|gb|EAU34449.1| conserved [Aspergillus terreus NIH2624]
  misc_feature (3)..(354): NCBI GI: 156049283 Blast Desc: SS1G_08348 [Sclerotinia sclerotiorum 1980] gi|154692747|gb|EDN92485.1| SS1G_08348 [Sclerotinia sclerotiorum 1980]
  misc_feature (3)..(354): NCBI GI: 169773569 Blast Desc: [Aspergillus oryzae RIB40] gi|83769114|dbj|BAE59251.1| protein product [Aspergillus oryzae]
  misc_feature (13)..(356): SWISSPROT Homolog: EC 1.1.1.1 Alcohol dehydrogenase
MARQWILNKQDGFENSLEYQNVPIPSPSGLGPKDVLVKMYAASLNYRELMIATPGTLAGKLESPVIPGCDGAGVVEAVGPAVQDFQPGDRVVTHLAPKLVEARGNDAPPTLEDVTAMLGMGTSGTLASHAVFSEAALVPAPKSLDWVSASTLTCTWTTAWNALYGLKGKQVEPDSWVLIQGTGGVSIATLQLAVAAGAHVIGTSSTSDREARLTALGAEHTVNYRSNPESWGVEARKHTPDERGFDIVVDVGGNETFAQSLAAVRADGLIMVVGGLGNASAESVPLFSALVHTCVVRGILGGTRAQFYDLVKYIDQKGIKPAVDDVVFELAETKEAYRRLSEQKHFSKVVIRVDHE

SEQ ID NO: 22119 - DNA, 534 bp, Muscodor strobelii
  misc_feature: SGI EST ID NO. CUFF.51964.0
  misc_feature: Variant of the nucleotide sequence at SEQ ID NO 22117
cgggggtttcctgggaagcacttcccaatgacactattccaagatagtagattcattcgagcggtgagctacaattgatctgacttcggcttagaaatatagactgtcccaagtttcagagactatcaagaatcacaacggacatgaatcgtgattacaaattcgcagctttatggtgcatttgaatgactacaaatacaacgcttcttgaagatgaattgtatgtcagatctcgagcccagggtattacaacagcataagaacgtcacattacctgaactcgcgccctcatagctagcaccagcaaaatggctcgtcagtggatcttgaacaaacaagacggctttgaaaactcattagagtatcaaaatgtgccaattccttcaccaagcggccttggtcctaaagacgtgcttgtcaaaatgtacgccgccagtctgaactaccgcgaactcatgattgctactccaggaacacttgctggcaaactggagtcacctgttatccccggctgtgatggtgcaggagtagtag

SEQ ID NO: 22120 - DNA, 1293 bp, Muscodor strobelii
  misc_feature: SGI cDNA ID NO. 567503
  misc_feature: Encodes the peptide sequence at SEQ ID NO 22121
atgatcgcgccaagctttacctttgtgaccactgtcggccagtcggggttaactgatgtcgccgccagacaagtgaaatcacacgtcacaaagtccaacttcgcgaaaaggcgagcaaagctaggcaagactagaaaagcactacattgttctgctcgaccagtctgggaagcgccacaggcagggactgaagccgcgatcgagcctgaatcagaggtcagcactaaaacccctggccaactaacccgtgaagatgggtttttgcaacttgtgtcatcgaaatggtctctactttttctagatggaagctcgtatcccaacaatggcgacgaggcagcttggatcagtcttcttatttccgaaccagctctagtcgaatctacgatggcaattggttttcggcattggtccccggatcgatactatcaagaaatagcttgcgagcactcgtgtaaggctacggagaccattatacaacgaattggtgccgggcgaggtgccacagacgctgttcttgcatccgtgttcacaatggcatttggggaacgtttattaagcaatgaacctgcctgggagattcatatcaacggcgcggtcgagttattgaatgagagaaaagcacagggtgtatttgtcttgccatgctggacagaggatcttcttgccaaagacatcatcaatgacatatttggatttccgcgattttatcataagaggctgatcgatgctataggtgcatctagcgacgctaaagactcattgctgaatcgtatcgcgaatttgcgcgagaagttagttgattggatgttggcattagaaacatcacaagaaaatcccaaaacctccgatttcatcatgcgcaagttgattcaaccgatgcaggagatagtctgcgagtcacaggcaatccgtctactgggtcgacctactttgcaagcttcgtgcgtcacgattcaattgattgtctatctgttatgggcctgccctttcggggatcttactaccatcgcagatgagttaaaagaatcaatttgcgcaacacagtttcgaccctgctgctattccgatttgacctcttgcgaattcatgataggcgccttagcggctcaagagggctcaactacaagagcttggttcatcaacaggttaaaaagtccgtgggaaatggtcaaatcccgtggctgtgatgatatcactggcatgctcgagaagaacatgaggttcaagacaagattagcagaacaattcagatctttgtgggcggagctggacagtctgcaatcgagtgaataa

SEQ ID NO: 22121 - protein, 430 aa, Muscodor strobelii
  misc_feature: SGI Peptide ID NO. 567503
  misc_feature (6)..(397): NCBI GI: 212538819 Blast Desc: conserved [Penicillium marneffei ATCC 18224] gi|210069307|gb|EEA23398.1| conserved [Penicillium marneffei ATCC 18224]
  misc_feature (6)..(419): NCBI GI: 242820284 Blast Desc: TSTA_058600 [Talaromyces stipitatus ATCC 10500] gi|218713947|gb|EED13371.1| TSTA_058600 [Talaromyces stipitatus ATCC 10500]
  misc_feature (6)..(423): NCBI GI: 256723369 Blast Desc: NECHADRAFT_51893 [Nectria haematococca mpVI 77-13-4]
  misc_feature (1)..(223): NCBI GI: 67540540 Blast Desc: AN6440.2 [Aspergillus nidulans FGSC A4] gi|40739272|gb|EAA58462.1| [Aspergillus nidulans FGSC A4] gi|259479333|tpe|CBF69468.1| TPA: conserved [Aspergillus nidulans
  misc_feature (6)..(423): NCBI GI: 46114510 Blast Desc: FG03097.1 [Gibberella zeae PH-1]
  misc_feature (2)..(428): NCBI GI: 212535900 Blast Desc: conserved [Penicillium marneffei ATCC 18224] gi|210070505|gb|EEA24595.1| conserved [Penicillium marneffei ATCC 18224]
MIAPSFTFVTTVGQSGLTDVAARQVKSHVTKSNFAKRRAKLGKTRKALHCSARPVWEAPQAGTEAAIEPESEVSTKTPGQLTREDGFLQLVSSKWSLLFLDGSSYPNNGDEAAWISLLISEPALVESTMAIGFRHWSPDRYYQEIACEHSCKATETIIQRIGAGRGATDAVLASVFTMAFGERLLSNEPAWEIHINGAVELLNERKAQGVFVLPCWTEDLLAKDIINDIFGFPRFYHKRLIDAIGASSDAKDSLLNRIANLREKLVDWMLALETSQENPKTSDFIMRKLIQPMQEIVCESQAIRLLGRPTLQASCVTIQLIVYLLWACPFGDLTTIADELKESICATQFRPCCYSDLTSCEFMIGALAAQEGSTTRAWFINRLKSPWEMVKSRGCDDITGMLEKNMRFKTRLAEQFRSLWAELDSLQSSE

SEQ ID NO: 22122 - DNA, 919 bp, Muscodor strobelii
  misc_feature: SGI EST ID NO. CUFF.51969.0
  misc_feature: Variant of the nucleotide sequence at SEQ ID NO 22120
gtcgaatctacgatggcaattggttttcggcattggtccccggatcgatactatcaagaaatagcttgcgagcactcgtgtaaggctacggagaccattatacaacgaattggtgccgggcgaggtgccacagacgctgttcttgcatccgtgttcacaatggcatttggggaacgtttattaagcaatgaacctgcctgggagattcatatcaacggcgcggtcgagttattgaatgagagaaaagcacagggtgtatttgtcttgccatgctggacagaggatcttcttgccaaagacatcatcaatgacatatttggatttccgcgattttatcataagaggctgatcgatgctataggtgcatctagcgacgctaaagactcattgctgaatcgtatcgcgaatttgcgcgagaagttagttgattggatgttggcattagaaacatcacaagaaaatcccaaaacctccgatttcatcatgcgcaagttgattcaaccgatgcaggagatagtctgcgagtcacaggcaatccgtctactgggtcgacctactttgcaagcttcgtgcgtcacgattcaattgattgtctatctgttatgggcctgccctttcggggatcttactaccatcgcagatgagttaaaagaatcaatttgcgcaacacagtttcgaccctgctgctattccgatttgacctcttgcgaattcatgataggcgccttagcggctcaagagggctcaactacaagagcttggttcatcaacaggttaaaaagtccgtgggaaatggtcaaatcccgtggctgtgatgatatcactggcatgctcgagaagaacatgaggttcaagacaagattagcagaacaattcagatctttgtgggcggagctggacagtctgcaatcgagtgaat

SEQ ID NO: 22123 - DNA, 1236 bp, Muscodor strobelii
  misc_feature: SGI cDNA ID NO. 567504
  misc_feature: Encodes the peptide sequence at SEQ ID NO 22124
atgggtagaggaaacttgtttattgcgcttgtcacacaatacgtgcttctaatatcgtatacaacagcttttcagtcattgaaaacatgcaatgtccaagctaagggtgatggctctgacgacgggccaacaatccaggccgcttttgacgagtgtagcagcaacgctaccattgttttcgataaaacaacatattacatcaacaccactttgaatacgacagctttatcaaatgtcgatatcgacctgcccggataccttctgtggagcgacgacaccagattctggctggatcactccatgccagtgggctatcaaaatcaatcaacagtctggtttttcggcggccaaaatgtcactctcaatggacacggtactggaacacttgatggaaatgggcaagcgtggtatgatctcgtgaaaggacagtctaactaccctaagcgcccaatggggttcacaatatggaaggcaatgaatgcctcatttacaggattaaacttcgtgcagagtcagatgtggaccatggccatcatgcattccgaggatgtcctcatggaagacatttatgttaactcaacaagtcggaatggaaacccagcgcgtaataccgatggcgccgacactattttcagcaataacatcatcatgcgacgatggctcgtcgacaatggtgatgatgcaataagtctcaaagccaattcaacaaatgttatcgtcgaggactgtgttttcaagacaggccaaggctttgcgcttggtagcattgggcaataccccggcgaatttgaaacgatcgaaaatgtgacggtacgcaacattactggaagtggcactaagtatgcagcgtacgtcaagacatggacaggagaccaagtaggctatcctccaaatggaggtggaggcgggcttggattcattcgcaacatcaccatttcggattttgtgcttgaaggagtccgtgacgctgctgtcaacatcggacagtgcacaacattctccggaaccccaggtgattgcaacagttcgctctttcatgttggtgacattacgttttcaaattttagcggaaccactgcaagctcttatgttggcaaaatgcaatgtagttcggcagccggcggatgcactggaattgactacaagggcatggacttgactggatccgcaacaggtacgactgtatcggactacaagtgtagcaacgtagtagacccgatcgggttcaaatgttga

SEQ ID NO: 22124 - protein, 411 aa, Muscodor strobelii
  misc_feature: SGI Peptide ID NO. 567504
  misc_feature (52)..(411): Pfam Id: PF00295 Pfam Desc: Glycosyl hydrolases family 28
  misc_feature (124)..(411): Pfam Id: PF00295 Pfam Desc: Glycosyl hydrolases family 28
  misc_feature (6)..(411): NCBI GI: 154294159 Blast Desc: BC1G_13970 [Botryotinia fuckeliana B05.10] gi|150845017|gb|EDN20210.1| BC1G_13970 [Botryotinia fuckeliana B05.10]
  misc_feature (6)..(411): NCBI GI: 159123360 Blast Desc: exo-polygalacturonase, [Aspergillus fumigatus A1163]
  misc_feature (6)..(411): NCBI GI: 156059056 Blast Desc: SS1G_03540 [Sclerotinia sclerotiorum 1980] gi|154701327|gb|EDO01066.1| SS1G_03540 [Sclerotinia sclerotiorum 1980]
  misc_feature (23)..(411): NCBI GI: 261358727 Blast Desc: exo-rhamnogalacturonase B [Verticillium albo-atrum VaMs.102]
  misc_feature (6)..(411): NCBI GI: 70986760 Blast Desc: exo-polygalacturonase [Aspergillus fumigatus Af293] gi|66846499|gb|EAL86831.1| exo-polygalacturonase, [Aspergillus fumigatus Af293]
  misc_feature (45)..(411): NCBI GI: 261358117 Blast Desc: polygalacturonase [Verticillium albo-atrum VaMs.102]
  misc_feature (6)..(411): NCBI GI: 145234917 Blast Desc: An03g02080 [Aspergillus niger] gi|89113912|gb|ABD61567.1| exo-rhamnogalacturonase B [Aspergillus niger] gi|134057783|emb|CAK38178.1| protein product [Aspergillus
  misc_feature (6)..(411): NCBI GI: 119483130 Blast Desc: polygalacturonase (pectinase), [Neosartorya fischeri NRRL 181] gi|119409748|gb|EAW19696.1| polygalacturonase (pectinase), [Neosartorya fischeri NRRL 181]
  misc_feature (28)..(411): NCBI GI: 259487591 Blast Desc: TPA: exo-polygalacturonase, (AFU_orthologue; AFUA_7G06410) [Aspergillus nidulans FGSC A4]
  misc_feature (22)..(298): NCBI GI: 154322174 Blast Desc: BC1G_01234 [Botryotinia fuckeliana B05.10] gi|150850481|gb|EDN25674.1| BC1G_01234 [Botryotinia fuckeliana B05.10]
  misc_feature (28)..(402): SWISSPROT Homolog: EC 3.2.1.67 Galacturan 1,4-alpha-galacturonidase
MGRGNLFIALVTQYVLLISYTTAFQSLKTCNVQAKGDGSDDGPTIQAAFDECSSNATIVFDKTTYYINTTLNTTALSNVDIDLPGYLLWSDDTRFWLDHSMPVGYQNQSTVWFFGGQNVTLNGHGTGTLDGNGQAWYDLVKGQSNYPKRPMGFTIWKAMNASFTGLNFVQSQMWTMAIMHSEDVLMEDIYVNSTSRNGNPARNTDGADTIFSNNIIMRRWLVDNGDDAISLKANSTNVIVEDCVFKTGQGFALGSIGQYPGEFETIENVTVRNITGSGTKYAAYVKTWTGDQVGYPPNGGGGGLGFIRNITISDFVLEGVRDAAVNIGQCTTFSGTPGDCNSSLFHVGDITFSNFSGTTASSYVGKMQCSSAAGGCTGIDYKGMDLTGSATGTTVSDYKCSNVVDPIGFKC

SEQ ID NO: 22125 - DNA, 1872 bp, Muscodor strobelii
  misc_feature: SGI cDNA ID NO. 567505
  misc_feature: Encodes the peptide sequence at SEQ ID NO 22126
atggagtccatagtttctagtcgtgacgaccagaccgaggatggatcatcatcttccgaaagaggcagcctcccacatcatgatctagacaaacacgccgatggcgtcgtttgcaacctatatcgtcacttatgccgaggagattgccccgtccgctggtcggagcatgcggacgtgcaactggaacagaaagagctgttagaccgcacgtctaattggccggttcttcatcgctgggaaaagaacggcaagcattgggtatctcgaagtttctctgtccaggacatgtcaatgcgtactgttctcgatgaagttctccaggactatgatcttcttacatattcctacgacacaccttacaagcccctttgtcaccgatgggaagcactagcgaagtatcatgacgaggtacagagctctgaactcaagtctgctgcctctaatctgcgcagattcttgtcgccgatcttgcaaaagacactcgattcgatgaaacgcctacgcgaaacaggaaaaatatatttcgaagagctttggcagatcttcgataagggtatactggttgtcacttgcgtcgacgatgttgaaactatctgccaagtgacgtcttatgaaggcgatgataagtcatactttctggctacggttcaatacctggactcggacggcacacgagttgggttcaaaacccttgatattcacatcgactacttttgtgggcttcagcgtgtgaagtctctttctgtattcccactccctttccacaatgatgagtctagtttccggaagtctatgacatacgttaaattccacgtaacaatcggattgattgctgacggggtcaaacgcacgctggaaacagagtggcctgaggcgcagcccgttcgtggaatggtgtgcatcgaccctcatgcgtattacacttcttgcaaaattgtcaagcctttcctagcaactgtttctagcaatagcactacagaggccggtccaatgcaacttactgaggaacagtgtcttctcacatctccatgggtcaaaggcttcgatttgaaagcgaaggatttctgcgagtttcgagtagatcagctgacaaatatggacttcaccgacgaagcataccgaaaccttgtgcttccaaatggcgacaaagagctaatgtgggaattctgcgaggccaagaagattacaagcgcgacaaccttcgacgactttgttgttgacaagggacgtggattcatcacactcatgtacgggcctccgggatgtggtaagacactcactgctgaggcgatggcgcataaatcacgcgtgcctctttacatgatgggggcaggcgatctgggaacacaagcatctgccatcaccgcatccctttcacgcgcactatggctctgcacccgttggaatgggatcctacttcttgacgaagctgatgtttatcttgctgcacggaaccgcatgaccctccagcagaacgaactagtttccttgtttctccgtgagttagaatattaccccggaatcatgattctgactacaaaccgcatcgaaagcattgacgcagcctttcaatctcgtgtcgacctctttttgccatactataatctttccaaagaagctcgacggcaagtttgggacagcttcatcaatcgcgctggaggtgacaaatatgacgtcacagacgaagggttggacaaattgtctgaatttgcgcttaatggtagagagattaagaacttggtcaaatcagcaatgatgttatctgttgtcaaagacgataacaaaatatctacggaacagctttccatgcttgcagcgaagcgtctcaaagctcttgaggctatggagtccagcgcacaagggattaaatga

SEQ ID NO: 22126 - protein, 623 aa, Muscodor strobelii
  misc_feature: SGI Peptide ID NO. 567505
  misc_feature (413)..(590): Pfam Id: PF00004 Pfam Desc: ATPase family associated with various cellular activities (AAA)
  misc_feature (122)..(589): NCBI GI: 256730109 Blast Desc: NECHADRAFT_45060 [Nectria haematococca mpVI 77-13-4]
  misc_feature (19)..(615): NCBI GI: 171685198 Blast Desc: protein product [Podospora anserina] gi|170942560|emb|CAP68212.1| protein product [Podospora anserina]
  misc_feature (14)..(608): NCBI GI: 255947784 Blast Desc: Pc22g06290 [Penicillium chrysogenum Wisconsin 54-1255] gi|211591676|emb|CAP97917.1| Pc22g06290 [Penicillium chrysogenum Wisconsin 54-1255]
  misc_feature (90)..(592): NCBI GI: 169766984 Blast Desc: [Aspergillus oryzae RIB40] gi|83765818|dbj|BAE55961.1| protein product [Aspergillus oryzae]
  misc_feature (3)..(622): NCBI GI: 119483180 Blast Desc: AAA family ATPase, [Neosartorya fischeri NRRL 181] gi|119409773|gb|EAW19721.1| AAA family ATPase, [Neosartorya fischeri NRRL 181]
  misc_feature (90)..(622): NCBI GI: 159123389 Blast Desc: AAA family ATPase, [Aspergillus fumigatus A1163]
  misc_feature (90)..(592): NCBI GI: 238483793 Blast Desc: AAA family ATPase, [Aspergillus flavus NRRL3357] gi|220701185|gb|EED57523.1| AAA family ATPase, [Aspergillus flavus NRRL3357]
  misc_feature (15)..(592): NCBI GI: 115397169 Blast Desc: [Aspergillus terreus NIH2624] gi|114192367|gb|EAU34067.1| [Aspergillus terreus NIH2624]
  misc_feature (90)..(622): NCBI GI: 146324886 Blast Desc: AAA family ATPase [Aspergillus fumigatus Af293] gi|129556610|gb|EAL86805.2| AAA family ATPase, [Aspergillus fumigatus Af293]
  misc_feature (88)..(591): NCBI GI: 261357186 Blast Desc: conserved [Verticillium albo-atrum VaMs.102]
MESIVSSRDDQTEDGSSSSERGSLPHHDLDKHADGVVCNLYRHLCRGDCPVRWSEHADVQLEQKELLDRTSNWPVLHRWEKNGKHWVSRSFSVQDMSMRTVLDEVLQDYDLLTYSYDTPYKPLCHRWEALAKYHDEVQSSELKSAASNLRRFLSPILQKTLDSMKRLRETGKIYFEELWQIFDKGILVVTCVDDVETICQVTSYEGDDKSYFLATVQYLDSDGTRVGFKTLDIHIDYFCGLQRVKSLSVFPLPFHNDESSFRKSMTYVKFHVTIGLIADGVKRTLETEWPEAQPVRGMVCIDPHAYYTSCKIVKPFLATVSSNSTTEAGPMQLTEEQCLLTSPWVKGFDLKAKDFCEFRVDQLTNMDFTDEAYRNLVLPNGDKELMWEFCEAKKITSATTFDDFVVDKGRGFITLMYGPPGCGKTLTAEAMAHKSRVPLYMMGAGDLGTQASAITASLSRALWLCTRWNGILLLDEADVYLAARNRMTLQQNELVSLFLRELEYYPGIMILTTNRIESIDAAFQSRVDLFLPYYNLSKEARRQVWDSFINRAGGDKYDVTDEGLDKLSEFALNGREIKNLVKSAMMLSVVKDDNKISTEQLSMLAAKRLKALEAMESSAQGIK

SEQ ID NO: 22127 - DNA, 1497 bp, Muscodor strobelii
  misc_feature: SGI cDNA ID NO. 567506
  misc_feature: Encodes the peptide sequence at SEQ ID NO 22128
atgaagttgcttccattggttcttgggctcctttgccaggtggttggagtagctccagccaagaccttgccgccaagattccggggtggcagaggtcttcacgctcgcgctactgctgtgactggcaatcacacagcgtattattttgagcagaagatcgaccatttccctcacagttcgcgctatccctctcacaccaaggagacattccagcagcggtactatgtcgacacttcgcattataagccaggcggaccagtcttcctctatttagccggcgagggcccgattgatggtgattctcatctcgataacagcctcattacccattttatgcagcaattcaatggaattggcgttgtcttagagaaccgtttctacggtacaagcattccgtttggcaacgctacgacagatgacctattgtatcttgccactgagcaggtgattgcagatcacgatgtgttcgcgagagaagtcaaacttccaggagttagtggtattaacgcgcctaatacaccttggatcacgtatggtggtagctaccctggtgctttgtcggcgttcacaatcaagacataccccgataccttcgtcggcggtattagcagcagtggtgtgatccacggtacactcggctatcccgagtggtacgcccccattcagttgctagcccctcaagattgtgtcgccagcatcaacgacattgtggataagattgactcattgatcgattctaagaatcacgctgccatcaaggaattgaaggcaatttttgggctgagcgagctggaggatattcgagatttcgcgcaaactattgctttcccaatcggtggtcctttctactacccgacagcaacatggcaggaaatcaactggaatcccaactacggtcaccaggatttcttcaacttctgtacaaacgtgaccaacgtcgatgcccctgcaaacgtgacagcagtagataacgcgctcgccaagtacaccaagggaaaagcatggaagaatctgggcaactatgctgactacgtcaaacgcgttgtgttgccactctgcacgaatggcgatatcaacagcccggaatgcttcggtacgcaacatccggactggtgggccgatcctacccctggtgctgagagaagttatctgtacacaacttgtacagagttcggcgcatatcaggctgcctacccgaagggccagaaatcattgatctctcgcgttatcgacactgattacacgcaagagtggtgtaactgggccttccccaagggcaagtacaacaagatccccgaaacccctgatcttgaccggtggaacgtctacggagatttcaacttcactgcggacagactcttgttcctcgatggcactggggatccatggagggatctgtgttaccattcgacgcaagctcctcagcgatactggaccgatgagcgtgagtaccacttgtttcgattcaaagacctggcaacggccgggaaattctaa

SEQ ID NO: 22128 - protein, 498 aa, Muscodor strobelii
  misc_feature: SGI Peptide ID NO. 567506
  misc_feature (51)..(491): Pfam Id: PF05577 Pfam Desc: Serine carboxypeptidase S28
  misc_feature (51)..(206): Pfam Id: PF05577 Pfam Desc: Serine carboxypeptidase S28
  misc_feature (9)..(487): NCBI GI: 189202432 Blast Desc: conserved [Pyrenophora tritici-repentis Pt-1C-BFP] gi|187984651|gb|EDU50139.1| conserved [Pyrenophora tritici-repentis Pt-1C-BFP]
  misc_feature (51)..(475): NCBI GI: 154299105 Blast Desc: BC1G_11865 [Botryotinia fuckeliana B05.10] gi|150857568|gb|EDN32760.1| BC1G_11865 [Botryotinia fuckeliana B05.10]
  misc_feature (44)..(394): NCBI GI: 156058175 Blast Desc: SS1G_04819 [Sclerotinia sclerotiorum 1980] gi|154702604|gb|EDO02343.1| SS1G_04819 [Sclerotinia sclerotiorum 1980]
  misc_feature (7)..(339): NCBI GI: 169603686 Blast Desc: SNOG_04851 [Phaeosphaeria nodorum SN15] gi|111066122|gb|EAT87242.1| SNOG_04851 [Phaeosphaeria nodorum SN15]
  misc_feature (1)..(487): NCBI GI: 238839726 Blast Desc: conserved [Microsporum canis CBS 113480]
  misc_feature (37)..(490): NCBI GI: 67900488 Blast Desc: AN7231.2 [Aspergillus nidulans FGSC A4] gi|40742088|gb|EAA61278.1| AN7231.2 [Aspergillus nidulans FGSC A4] gi|259483425|tpe|CBF78805.1| TPA: serine carboxypeptidase A4]
  misc_feature (6)..(475): NCBI GI: 242794965 Blast Desc: extracelular serine carboxypeptidase, [Talaromyces stipitatus ATCC 10500] gi|218719071|gb|EED18491.1| extracelular serine carboxypeptidase, [Talaromyces stipitatus ATCC 10500]
  misc_feature (17)..(487): NCBI GI: 240111066 Blast Desc: Serine carboxypeptidase S28 family protein [Coccidioides posadasii C735 delta SOWgp]
  misc_feature (12)..(487): NCBI GI: 258565711 Blast Desc: conserved [Uncinocarpus reesii 1704] gi|237907301|gb|EEP81702.1| conserved [Uncinocarpus reesii 1704]
  misc_feature (30)..(474): NCBI GI: 212536138 Blast Desc: extracelular serine carboxypeptidase, [Penicillium marneffei ATCC 18224] gi|210070624|gb|EEA24714.1| extracelular serine carboxypeptidase, [Penicillium marneffei ATCC 18224]
MKLLPLVLGLLCQVVGVAPAKTLPPRFRGGRGLHARATAVTGNHTAYYFEQKIDHFPHSSRYPSHTKETFQQRYYVDTSHYKPGGPVFLYLAGEGPIDGDSHLDNSLITHFMQQFNGIGVVLENRFYGTSIPFGNATTDDLLYLATEQVIADHDVFAREVKLPGVSGINAPNTPWITYGGSYPGALSAFTIKTYPDTFVGGISSSGVIHGTLGYPEWYAPIQLLAPQDCVASINDIVDKIDSLIDSKNHAAIKELKAIFGLSELEDIRDFAQTIAFPIGGPFYYPTATWQEINWNPNYGHQDFFNFCTNVTNVDAPANVTAVDNALAKYTKGKAWKNLGNYADYVKRVVLPLCTNGDINSPECFGTQHPDWWADPTPGAERSYLYTTCTEFGAYQAAYPKGQKSLISRVIDTDYTQEWCNWAFPKGKYNKIPETPDLDRWNVYGDFNFTADRLLFLDGTGDPWRDLCYHSTQAPQRYWTDEREYHLFRFKDLATAGKF

SEQ ID NO: 22129 - DNA, 1512 bp, Muscodor strobelii
  misc_feature: SGI EST ID NO. CUFF.51990.0
  misc_feature: Variant of the nucleotide sequence at SEQ ID NO 22127
aggctctcgttcttttcccaatttcttgctttcgcttgtcagcaattggtgttgctggtcattggaaaagatgaagttgcttccattggttcttgggctcctttgccaggtggttggagtagctccagccaagaccttgccgccaagattccggggtggcagaggtcttcacgctcgcgctactgctgtgactggcaatcacacagcgtattattttgagcagaagatcgaccatttccctcacagttcgcgctatccctctcacaccaaggagacattccagcagcggtactatgtcgacacttcgcattataagccaggcggaccagtcttcctctatttagccggcgagggcccgattgatggtgattctcatctcgataacagcctcattacccattttatgcagcaattcaatggaattggcgttgtcttagagaaccgtttctacggtacaagcattccgtttggcaacgctacgacagatgacctattgtatcttgccactgagcaggtgattgcagatcacgatgtgttcgcgagagaagtcaaacttccaggagttagtggtattaacgcgcctaatacaccttggatcacgtatggtggtagctaccctggtgctttgtcggcgttcacaatcaagacataccccgataccttcgtcggcggtattagcagcagtggtgtgatccacggtacactcggctatcccgagtggtacgcccccattcagttgctagcccctcaagattgtgtcgccagcatcaacgacattgtggataagattgactcattgatcgattctaagaatcacgctgccatcaaggaattgaaggcaatttttgggctgagcgagctggaggatattcgagatttcgcgcaaactattgctttcccaatcggtggtcctttctactacccgacagcaacatggcaggaaatcaactggaatcccaactacggtcaccaggatttcttcaacttctgtacaaacgtgaccaacgtcgatgcccctgcaaacgtgacagcagtagataacgcgctcgccaagtacaccaagggaaaagcatggaagaatctgggcaactatgctgactacgtcaaacgcgttgtgttgccactctgcacgaatggcgatatcaacagcccggaatgcttcggtacgcaacatccggactggtgggccgatcctacccctggtgctgagagaagttatctgtacacaacttgtacagagttcggcgcatatcaggctgcctacccgaagggccagaaatcattgatctctcgcgttatcgacactgattacacgcaagagtggtgtaactgggccttccccaagggcaagtacaacaagatccccgaaacccctgatcttgaccggtggaacgtctacggagatttcaacttcactgcggacagactcttgttcctcgatggcactggggatccatggagggatctgtgttaccattcgacgcaagctcctcagcgatactggaccgatga

SEQ ID NO: 22130 - DNA, 1608 bp, Muscodor strobelii
  misc_feature: SGI cDNA ID NO. 567507
  misc_feature: Encodes the peptide sequence at SEQ ID NO 22131
atggcagactcaccgtcaagagtacctcccccggagacgaaggaggacatggaggagattgaacacaagaaacaggtcgtggaagaagcatcgaagaaacgaggtatcgacgacgagcaaatcgaacaatttcgacgattcatggacgccgacacagaatggcaccgactgatgaagaaaaagctcatgcggaaagtggactggcatctgcttcccttgctggtgttgatgtatctcctgaacttccttgatcgaaataatctgtcgcaagctcgtctcggtactctcgaatccgatctgaacatgactggcacagacttcaatctggcaactagcatcttattcgtcggatacctcataatgcagctcccatcgaatctgctactaacacgagcgcggccgtctctgtacttaggtatcgctatgacaatatggggagtgatttcagcgtctcaagcggcaacacaatcctttgccggactagttgtagcgcggttcttcttggggttcgcggaggcaccattctttccgggcgctatttttcttatgtcttcttggtatacccgtgcagagatggcacacaggatcgcatggttttattctgggagctctttggcgaacgcattcggtggcctcataggcgcaggtgtcctcgctaatctgagcggggctcatggcatagcaggatggcaagtctggcatatgaaagctagtatagtatttacattggctaatcaaactaggcgctggcttttcatcatcgaaggcagcataacagttggagtcgcgctgctatcgaccctaatactaccgaattaccccgcgacgacgaaatggcttacgcccgaagaacaagcgtatgcgcaatggcgattaatcgacgacaccggagaagctgatcttgctgagtctatctctgtcaaagagggcgccatgctggctttcagagatcctcgattatggctgtttgcacttttccagcatgtctctctattatcgcagaccttccagtacttctttcccactattgttaaaactctggggtatggtagcatcgagactttgcttctcactgcgcccgtttggatcgccacctttttcgtatcacttgtggttacttatacttcaggtcgttttaacgacagaagcattcatatcatctgcttgatgctagtgtcggtggttggtaatgtcattgtggtgtcgacgctgactactggaccccggttcttcgctatatttctcttgccaattggggcagttacagcgtaccagatcatcgtcgcatgggtcgcaaatagcttcccacggccgctagtgaagaggagcgcctgcatctctattgcgaatctaattggtaactctgcaaacatctacgggtcctatctgtaccctgcatcgactggaccccgatatacacctggaatcgcgacaacagcgggggtagcattccttgtcgcagtgttggcattcattatcagacttgtattgcagagacagaacaagaagcttgccgagcgcgaagttgtggaatctaatgggaggatcgtcaatttacacgccgacaatcaggaagcgggcgcagtagggttccgctatatcctatag

SEQ ID NO: 22131 - protein, 535 aa, Muscodor strobelii
  misc_feature: SGI Peptide ID NO. 567507
  misc_feature (74)..(461): Pfam Id: PF07690 Pfam Desc: Major Facilitator Superfamily
  misc_feature (74)..(227): Pfam Id: PF07690 Pfam Desc: Major Facilitator Superfamily
  misc_feature (28)..(535): NCBI GI: 145243666 Blast Desc: An11g03530 [Aspergillus niger] gi|134079033|emb|CAK48342.1| protein product [Aspergillus niger]
  misc_feature (18)..(535): NCBI GI: 115383678 Blast Desc: conserved [Aspergillus terreus NIH2624] gi|114196078|gb|EAU37778.1| conserved [Aspergillus terreus NIH2624]
  misc_feature (7)..(535): NCBI GI: 238497520 Blast Desc: MFS transporter, [Aspergillus flavus NRRL3357] gi|220693269|gb|EED49614.1| MFS transporter, [Aspergillus flavus NRRL3357]
  misc_feature (7)..(535): NCBI GI: 169768232 Blast Desc: [Aspergillus oryzae RIB40] gi|83766444|dbj|BAE56584.1| protein product [Aspergillus oryzae]
  misc_feature (17)..(535): NCBI GI: 67904026 Blast Desc: AN9000.2 [Aspergillus nidulans FGSC A4] gi|40745176|gb|EAA64332.1| AN9000.2 [Aspergillus nidulans FGSC A4] gi|259486549|tpe|CBF84486.1| TPA: MFS transporter, nidulans
  misc_feature (13)..(535): NCBI GI: 119490162 Blast Desc: MFS transporter, [Neosartorya fischeri NRRL 181] gi|119411154|gb|EAW21097.1| MFS transporter, [Neosartorya fischeri NRRL 181]
  misc_feature (27)..(534): NCBI GI: 46124181 Blast Desc: FG06468.1 [Gibberella zeae PH-1]
  misc_feature (38)..(534): NCBI GI: 171677055 Blast Desc: protein product [Podospora anserina] gi|170936595|emb|CAP61254.1| protein product [Podospora anserina]
  misc_feature (16)..(534): NCBI GI: 256725447 Blast Desc: [Nectria haematococca mpVI 77-13-4]
  misc_feature (17)..(534): NCBI GI: 39943436 Blast Desc: MGG_10938 [Magnaporthe grisea 70-15] gi|145022915|gb|EDK06620.1| MGG_10938 [Magnaporthe grisea 70-15]
MADSPSRVPPPETKEDMEEIEHKKQVVEEASKKRGIDDEQIEQFRRFMDADTEWHRLMKKKLMRKVDWHLLPLLVLMYLLNFLDRNNLSQARLGTLESDLNMTGTDFNLATSILFVGYLIMQLPSNLLLTRARPSLYLGIAMTIWGVISASQAATQSFAGLVVARFFLGFAEAPFFPGAIFLMSSWYTRAEMAHRIAWFYSGSSLANAFGGLIGAGVLANLSGAHGIAGWQVWHMKASIVFTLANQTRRWLFIIEGSITVGVALLSTLILPNYPATTKWLTPEEQAYAQWRLIDDTGEADLAESISVKEGAMLAFRDPRLWLFALFQHVSLLSQTFQYFFPTIVKTLGYGSIETLLLTAPVWIATFFVSLVVTYTSGRFNDRSIHIICLMLVSVVGNVIVVSTLTTGPRFFAIFLLPIGAVTAYQIIVAWVANSFPRPLVKRSACISIANLIGNSANIYGSYLYPASTGPRYTPGIATTAGVAFLVAVLAFIIRLVLQRQNKKLAEREVVESNGRIVNLHADNQEAGAVGFRYIL

SEQ ID NO: 22132 - DNA, 2134 bp, Muscodor strobelii
  misc_feature: SGI EST ID NO. CUFF.51994.0
  misc_feature: Variant of the nucleotide sequence at SEQ ID NO 22130
ctcgtcacctaggccaagttgggaatgccgaaggcaatgccggacgatgcgtaagttcattgttaggtggggggcacatatgtaaagacgcctccccacgcaatgtgctgtttacgtattcctctcttgatgaaatatcattgccaaacgccagcggaccgggtgtgaggattctttcaagagaagagcgatggcagactcaccgtcaagagtacctcccccggagacgaaggaggacatggaggagattgaacacaagaaacaggtcgtggaagaagcatcgaagaaacgaggtatcgacgacgagcaaatcgaacaatttcgacgattcatggacgccgacacagaatggcaccgactgatgaagaaaaagctcatgcggaaagtggactggcatctgcttcccttgctggtgttgatgtatctcctgaacttccttgatcgaaataatctgtcgcaagctcgtctcggtactctcgaatccgatctgaacatgactggcacagacttcaatctggcaactagcatcttattcgtcggatacctcataatgcagctcccatcgaatctgctactaacacgagcgcggccgtctctgtacttaggtatcgctatgacaatatggggagtgatttcagcgtctcaagcggcaacacaatcctttgccggactagttgtagcgcggttcttcttggggttcgcggaggcaccattctttccgggcgctatttttcttatgtcttcttggtatacccgtgcagagatggcacacaggatcgcatggttttattctgggagctctttggcgaacgcattcggtggcctcataggcgcaggtgtcctcgctaatctgagcggggctcatggcatagcaggatggcgctggcttttcatcatcgaaggcagcataacagttggagtcgcgctgctatcgaccctaatactaccgaattaccccgcgacgacgaaatggcttacgcccgaagaacaagcgtatgcgcaatggcgattaatcgacgacaccggagaagctgatcttgctgagtctatctctgtcaaagagggcgccatgctggctttcagagatcctcgattatggctgtttgcacttttccagcatgtctctctattatcgcagaccttccagtacttctttcccactattgttaaaactctggggtatggtagcatcgagactttgcttctcactgcgcccgtttggatcgccacctttttcgtatcacttgtggttacttatacttcaggtcgttttaacgacagaagcattcatatcatctgcttgatgctagtgtcggtggttggtaatgtcattgtggtgtcgacgctgactactggaccccggttcttcgctatatttctcttgccaattggggcagttacagcgtaccagatcatcgtcgcatgggtcgcaaatagcttcccacggccgctagtgaagaggagcgcctgcatctctattgcgaatctaattggtaactctgcaaacatctacgggtcctatctgtaccctgcatcgactggaccccgatatacacctggaatcgcgacaacagcgggggtagcattccttgtcgcagtgttggcattcattatcagacttgtattgcagagacagaacaagaagcttgccgagcgcgaagttgtggaatctaatgggaggatcgtcaatttacacgccgacaatcaggaagcgggcgcagtagggttccgctatatcctatagattcgaagcatcatcaatagagcaagtctcacatggccgaaagcatcagacgcgagtaaacccataacgtcgcttatcataaccaggtatacttttctaggcctttgagtacataaaacattaaattttctatgtatgaattggattacaattaaaacattgcgattgtatgattattgaactcctttagccacgtctcaacggtgcgcagttcgagcttagtagtagcccggacaaattgcggctcgtcatcgatgtttggatatgttcttaagtcccagacgtggtgggcgccgctgatcaaatgttggggatctagtgtatgaaaacatattagtcctttcttttattcggtaaagtatggagtacaatggtttgtcttagaatttc

SEQ ID NO: 22133 - DNA, 1554 bp, Muscodor strobelii
  misc_feature: SGI cDNA ID NO. 567508
  misc_feature: Elevated expression when VOC is produced
  misc_feature: Encodes the peptide sequence at SEQ ID NO 22134
atggcagactcaccgtcaagagtacctcccccggagacgaaggaggacatggaggagattgaacacaagaaacaggtcgtggaagaagcatcgaagaaacgaggtatcgacgacgagcaaatcgaacaatttcgacgattcatggacgccgacacagaatggcaccgactgatgaagaaaaagctcatgcggaaagtggactggcatctgcttcccttgctggtgttgatgtatctcctgaacttccttgatcgaaataatctgtcgcaagctcgtctcggtactctcgaatccgatctgaacatgactggcacagacttcaatctggcaactagcatcttattcgtcggatacctcataatgcagctcccatcgaatctgctactaacacgagcgcggccgtctctgtacttaggtatcgctatgacaatatggggagtgatttcagcgtctcaagcggcaacacaatcctttgccggactagttgtagcgcggttcttcttggggttcgcggaggcaccattctttccgggcgctatttttcttatgtcttcttggtatacccgtgcagagatggcacacaggatcgcatggttttattctgggagctctttggcgaacgcattcggtggcctcataggcgcaggtgtcctcgctaatctgagcggggctcatggcatagcaggatggcgctggcttttcatcatcgaaggcagcataacagttggagtcgcgctgctatcgaccctaatactaccgaattaccccgcgacgacgaaatggcttacgcccgaagaacaagcgtatgcgcaatggcgattaatcgacgacaccggagaagctgatcttgctgagtctatctctgtcaaagagggcgccatgctggctttcagagatcctcgattatggctgtttgcacttttccagcatgtctctctattatcgcagaccttccagtacttctttcccactattgttaaaactctggggtatggtagcatcgagactttgcttctcactgcgcccgtttggatcgccacctttttcgtatcacttgtggttacttatacttcaggtcgttttaacgacagaagcattcatatcatctgcttgatgctagtgtcggtggttggtaatgtcattgtggtgtcgacgctgactactggaccccggttcttcgctatatttctcttgccaattggggcagttacagcgtaccagatcatcgtcgcatgggtcgcaaatagcttcccacggccgctagtgaagaggagcgcctgcatctctattgcgaatctaattggtaactctgcaaacatctacgggtcctatctgtaccctgcatcgactggaccccgatatacacctggaatcgcgacaacagcgggggtagcattccttgtcgcagtgttggcattcattatcagacttgtattgcagagacagaacaagaagcttgccgagcgcgaagttgtggaatctaatgggaggatcgtcaatttacacgccgacaatcaggaagcgggcgcagtagggttccgctatatcctatag

SEQ ID NO: 22134 - protein, 517 aa, Muscodor strobelii
  misc_feature: SGI Peptide ID NO. 567508
  misc_feature (74)..(443): Pfam Id: PF07690 Pfam Desc: Major Facilitator Superfamily
  misc_feature (28)..(517): NCBI GI: 145243666 Blast Desc: An11g03530 [Aspergillus niger] gi|134079033|emb|CAK48342.1| protein product [Aspergillus niger]
  misc_feature (18)..(517): NCBI GI: 115383678 Blast Desc: conserved [Aspergillus terreus NIH2624] gi|114196078|gb|EAU37778.1| conserved [Aspergillus terreus NIH2624]
  misc_feature (7)..(517): NCBI GI: 238497520 Blast Desc: MFS transporter, [Aspergillus flavus NRRL3357] gi|220693269|gb|EED49614.1| MFS transporter, [Aspergillus flavus NRRL3357]
  misc_feature (7)..(517): NCBI GI: 169768232 Blast Desc: [Aspergillus oryzae RIB40] gi|83766444|dbj|BAE56584.1| protein product [Aspergillus oryzae]
  misc_feature (17)..(517): NCBI GI: 67904026 Blast Desc: AN9000.2 [Aspergillus nidulans FGSC A4] gi|40745176|gb|EAA64332.1| AN9000.2 [Aspergillus nidulans FGSC A4] gi|259486549|tpe|CBF84486.1| TPA: MFS transporter, nidulans
  misc_feature (13)..(517): NCBI GI: 119490162 Blast Desc: MFS transporter, [Neosartorya fischeri NRRL 181] gi|119411154|gb|EAW21097.1| MFS transporter, [Neosartorya fischeri NRRL 181]
  misc_feature (27)..(516): NCBI GI: 46124181 Blast Desc: FG06468.1 [Gibberella zeae PH-1]
  misc_feature (38)..(516): NCBI GI: 171677055 Blast Desc: protein product [Podospora anserina] gi|170936595|emb|CAP61254.1| protein product [Podospora anserina]
  misc_feature (16)..(516): NCBI GI: 256725447 Blast Desc: [Nectria haematococca mpVI 77-13-4]
  misc_feature (17)..(516): NCBI GI: 39943436 Blast Desc: MGG_10938 [Magnaporthe grisea 70-15] gi|145022915|gb|EDK06620.1| MGG_10938 [Magnaporthe grisea 70-15]
  misc_feature: Useful for introducing or modulating the production of volatile compounds
MADSPSRVPPPETKEDMEEIEHKKQVVEEASKKRGIDDEQIEQFRRFMDADTEWHRLMKKKLMRKVDWHLLPLLVLMYLLNFLDRNNLSQARLGTLESDLNMTGTDFNLATSILFVGYLIMQLPSNLLLTRARPSLYLGIAMTIWGVISASQAATQSFAGLVVARFFLGFAEAPFFPGAIFLMSSWYTRAEMAHRIAWFYSGSSLANAFGGLIGAGVLANLSGAHGIAGWRWLFIIEGSITVGVALLSTLILPNYPATTKWLTPEEQAYAQWRLIDDTGEADLAESISVKEGAMLAFRDPRLWLFALFQHVSLLSQTFQYFFPTIVKTLGYGSIETLLLTAPVWIATFFVSLVVTYTSGRFNDRSIHIICLMLVSVVGNVIVVSTLTTGPRFFAIFLLPIGAVTAYQIIVAWVANSFPRPLVKRSACISIANLIGNSANIYGSYLYPASTGPRYTPGIATTAGVAFLVAVLAFIIRLVLQRQNKKLAEREVVESNGRIVNLHADNQEAGAVGFRYIL

SEQ ID NO: 22135 - DNA, 2134 bp, Muscodor strobelii; identical to SEQ ID NO: 22132
  misc_feature: SGI EST ID NO. CUFF.51994.0
  misc_feature: Variant of the nucleotide sequence at SEQ ID NO 22133

SEQ ID NO: 22136 - DNA, 1527 bp, Muscodor strobelii
  misc_feature: SGI cDNA ID NO. 567509
  misc_feature: Encodes the peptide sequence at SEQ ID NO 22137
atgcagcagcattcattacgaaccttatttgttgcggccgcgttgacgcatagcgctgtcgctggcccttgcgatatctacgcatcaggtggcacgccttgcgttgcagcgcatagcacaactcgtgctctctatacttcctatagtggttctctttatcaggtcacacgtggttctgatagcgctaccactgatataaaaccgctttcagccggcggagtcgccaacgccgctgcccaagatacgttctgcgccgggacgacttgtcttatatccatcatctacgaccagtccggccaaggtaaccatcttacccaggctccgccgggcggcgccgcatctggaccagaggccggtggatatgattacctggcgagcgccatcggtgcccctgtgaccttaaacggcaaaaaggcatatggcgttttcattccacctaagactggctaccgcaacgactcacctcacggcacagccactggtgacggtgcagaaggaatgtacgccgtttttgacggcactcattacaacaatgggtgttgtttcgattatggaaacgccgaaacgaataatctcgataccggcaatggaaaaatggaagcgctgtttttcggggaccgcactgctcacggttatggcacgggctcaggtccatgggtcttagcggatcttgagaacggcctgtatacctcgggaggcgacactggttacggcgtcaattcaaacaaccctacggcaaactatcggtttgttacagcggtgcttaaaggcaattctggaaatcactgggctttgaggggtggaaactcaaagtcagggggtctgtcgacgtactgggacggtgcccgtccaacgccagattacaaccccatgagaaaagagggagcaatcgttctcgggattggaggcgacaacagcaattccggtcaaggcaccttctatgagggagtgatgacgtctggatatccctctgacgccaccgagaattctgttcaagctaacattgtagcggcgaaatacgcagctgggacgctccagaatggtcccgccatcagtgctggcgctacggtcacgttcaaggcaaccacggcgccctgctgtaccaccaagtatataagccactcaggtgcaaatgtgcaacttcaagttgttacttcgtcaagcactactgcgcaccaaaactctgccagctggatcgtccatgtcggtctcgggaacagtgcctgtctgtcgttcgaatcagctgatagcccggggagcttcattcgccattccgctaacaagcttcaagttaatgcaaatgacggcagcagattgtttgcacaagacgctaccttctgctcacaggaagcattgaactctgccggaaccaacgctttgcgctcatggagctttcccgctcgttatatacgtcattatagcggtactctgtatatcggcagcaatggcggaccgaatgcattcgatagcaaggcgactttcaacgatgatgttagctttgttgctggtactggatttcaggcgtaa

SEQ ID NO: 22137 - protein, 508 aa, Muscodor strobelii
  misc_feature: SGI Peptide ID NO. 567509
  misc_feature (357)..(503): Pfam Id: PF05270 Pfam Desc: Alpha-L-arabinofuranosidase B (ABFB)
  misc_feature (23)..(344): Pfam Id: PF09206 Pfam Desc: Alpha-L-arabinofuranosidase B, catalytic
  misc_feature (2)..(506): NCBI GI: 212530228 Blast Desc: alpha-N-arabinofuranosidase precursor, [Penicillium marneffei ATCC 18224] gi|210074669|gb|EEA28756.1| alpha-N-arabinofuranosidase precursor, [Penicillium marneffei
  misc_feature (6)..(506): NCBI GI: 284504810 Blast Desc: arabinofuranosidase [Penicillium funiculosum]
  misc_feature (21)..(506): NCBI GI: 3023257 Blast Desc: ABF1_TRIRE RecName: Full=Alpha-N-arabinofuranosidase; Short=Arabinosidase; Flags: Precursor gi|1580814|emb|CAA93243.1| alpha-L-arabinofuranosidase [Hypocrea jecorina]
  misc_feature (21)..(506): NCBI GI: 1351443 Blast Desc: XYL1_TRIKO RecName: Full=Arabinofuranosidase/B-xylosidase; Includes: RecName: Full=Alpha-N-arabinofuranosidase; Short=Arabinosidase; Includes:
  misc_feature (7)..(506): NCBI GI: 169772253 Blast Desc: [Aspergillus oryzae RIB40] gi|83768456|dbj|BAE58593.1| protein product [Aspergillus oryzae]
  misc_feature (21)..(506): NCBI GI: 13991905 Blast Desc: AF367026_1 alpha-L-arabinofuranosidase [Penicillium purpurogenum]
  misc_feature (7)..(506): NCBI GI: 16754883 Blast Desc: alpha-L-arabinofuranosidase B [Aspergillus oryzae]
  misc_feature (7)..(506): NCBI GI: 238490130 Blast Desc: fungal alpha-L-arabinofuranosidase, [Aspergillus flavus NRRL3357] gi|220696715|gb|EED53056.1| fungal alpha-L-arabinofuranosidase, [Aspergillus flavus NRRL3357]
  misc_feature (7)..(506): NCBI GI: 16754881 Blast Desc: alpha-L-arabinofuranosidase B [Aspergillus oryzae]
  misc_feature (2)..(506): NCBI GI: 121709492 Blast Desc: alpha-L-arabinofuranosidase B domain protein [Aspergillus clavatus NRRL 1] gi|119400586|gb|EAW11011.1| alpha-L-arabinofuranosidase B domain protein [Aspergillus NRRL 1]
  misc_feature (21)..(506): SWISSPROT Homolog: EC 3.2.1.55 Alpha-N-arabinofuranosidase
MQQHSLRTLFVAAALTHSAVAGPCDIYASGGTPCVAAHSTTRALYTSYSGSLYQVTRGSDSATTDIKPLSAGGVANAAAQDTFCAGTTCLISIIYDQSGQGNHLTQAPPGGAASGPEAGGYDYLASAIGAPVTLNGKKAYGVFIPPKTGYRNDSPHGTATGDGAEGMYAVFDGTHYNNGCCFDYGNAETNNLDTGNGKMEALFFGDRTAHGYGTGSGPWVLADLENGLYTSGGDTGYGVNSNNPTANYRFVTAVLKGNSGNHWALRGGNSKSGGLSTYWDGARPTPDYNPMRKEGAIVLGIGGDNSNSGQGTFYEGVMTSGYPSDATENSVQANIVAAKYAAGTLQNGPAISAGATVTFKATTAPCCTTKYISHSGANVQLQVVTSSSTTAHQNSASWIVHVGLGNSACLSFESADSPGSFIRHSANKLQVNANDGSRLFAQDATFCSQEALNSAGTNALRSWSFPARYIRHYSGTLYIGSNGGPNAFDSKATFNDDVSFVAGTGFQA

SEQ ID NO: 22138 - DNA, 954 bp, Muscodor strobelii
  misc_feature: SGI cDNA ID NO. 567510
  misc_feature: Encodes the peptide sequence at SEQ ID NO 22139
atggcaccggcacgcattatactagacactgacctttcaatgggcgcaggcgccgatgttgatgatgggtttgcgctcgcactggctcatgcagatccagacattcagattgaccttgtaaccacggtcaatggtaatactgatgtcgatagtgctacgatattgacaggtatccttctcgaccatcttgacatacgcgcgcctctcgtcaagggctcggcgacacccattgttcacccagaccagatacgcacaccagcagatcacgttgccgcaatgcgagacaaggcacgggcgccgactccagggtacgcgcccgtcgcaattattgagcatatcctggcgaaccctggcgagatcacgctcgtcgctattgggcccttaaccaacatagccttggctttacttcttgagccccggatcaagtccgcgcttaaagagctggtgatcatgggcggcatctttctagggaccatgtacgcacgcacaaagccgggcgagttcaatgtcttctcagaccccgaagcagcacgaacggtattgcgctccggagtttcacaacgctggattggactcgattgcacattacgggtccggatgaacatggctgatgccgaagaactcaagaaggccccgacaaagttcgccgcctttgcaggcgaggccactgtcgagtatattgaatatcaggctacccggtttccgggtcggccgaagacagactctgtaccaatgcacgatccactagctgtggcagtggtgtcgaagccagagctgtgcacatatagagatatggctgtctcaatcattactggcgatggtgaagcgcgtgggatcatgattgcagatcgattagaattgcataatccgcccgttccgaattgtcgcgttgctgttgatgtcgatagtgagggttttaggaagcattttctaagcttaatcggccagctttag

SEQ ID NO: 22139 - protein, 317 aa, Muscodor strobelii
  misc_feature: SGI Peptide ID NO. 567510
  misc_feature (3)..(315): Pfam Id: PF01156 Pfam Desc: Inosine-uridine preferring nucleoside hydrolase
  misc_feature (108)..(306): Pfam Id: PF01156 Pfam Desc: Inosine-uridine preferring nucleoside hydrolase
  misc_feature (1)..(317): NCBI GI: 256733320 Blast Desc: NECHADRAFT_79488 [Nectria haematococca mpVI 77-13-4]
  misc_feature (5)..(314): NCBI GI: 229818776 Blast Desc: Inosine/uridine-preferring nucleoside hydrolase [Beutenbergia cavernae DSM 12333] gi|229564689|gb|ACQ78540.1| Inosine/uridine-preferring nucleoside hydrolase [Beutenbergia DSM
  misc_feature (3)..(316): NCBI GI: 227993601 Blast Desc: Inosine-uridine nucleoside N-ribohydrolase [Meiothermus ruber DSM 1279] gi|227947604|gb|EEJ84632.1| Inosine-uridine nucleoside N-ribohydrolase [Meiothermus ruber DSM
  misc_feature (5)..(312): NCBI GI: 226315274 Blast Desc: nucleosidase [Brevibacillus brevis NBRC 100599] gi|226098224|dbj|BAH46666.1| nucleosidase [Brevibacillus brevis NBRC 100599]
  misc_feature (5)..(314): NCBI GI: 56964969 Blast Desc: inosine-uridine preferring nucleoside hydrolase [Bacillus clausii KSM-K16] gi|56911212|dbj|BAD65739.1| inosine-uridine preferring nucleoside hydrolase [Bacillus clausii
  misc_feature (6)..(317): NCBI GI: 15805430 Blast Desc: inosine-uridine preferring nucleoside hydrolase [Deinococcus radiodurans R1] gi|6458083|gb|AAF09982.1|AE001900_4 inosine-uridine preferring nucleoside hydrolase [Deinococcus R1]
  misc_feature (5)..(315): NCBI GI: 156742455 Blast Desc: inosine/uridine-preferring nucleoside hydrolase [Roseiflexus castenholzii DSM 13941] gi|156233783|gb|ABU58566.1| Inosine/uridine-preferring nucleoside hydrolase [Roseiflexus DSM
  misc_feature (1)..(312): NCBI GI: 269839340 Blast Desc: Inosine/uridine-preferring nucleoside hydrolase [Thermobaculum terrenum ATCC BAA-798] gi|269791070|gb|ACZ43210.1| Inosine/uridine-preferring nucleoside hydrolase [Thermobaculum
  misc_feature (6)..(317): NCBI GI: 226356473 Blast Desc: Purine nucleosidase (Nucleoside hydrolase) (Inosine-uridine preferring nucleoside hydrolase) [Deinococcus deserti VCD115] gi|226318463|gb|ACO46459.1| Purine nucleosidase
  misc_feature (5)..(314): NCBI GI: 261410019 Blast Desc: Inosine/uridine-preferring nucleoside hydrolase [Geobacillus sp. Y412MC10] gi|261286482|gb|ACX68453.1| Inosine/uridine-preferring nucleoside hydrolase [Geobacillus sp.
  misc_feature (1)..(306): SWISSPROT Homolog: EC 3.2.2.8 Ribosylpyrimidine nucleosidase
MAPARIILDTDLSMGAGADVDDGFALALAHADPDIQIDLVTTVNGNTDVDSATILTGILLDHLDIRAPLVKGSATPIVHPDQIRTPADHVAAMRDKARAPTPGYAPVAIIEHILANPGEITLVAIGPLTNIALALLLEPRIKSALKELVIMGGIFLGTMYARTKPGEFNVFSDPEAARTVLRSGVSQRWIGLDCTLRVRMNMADAEELKKAPTKFAAFAGEATVEYIEYQATRFPGRPKTDSVPMHDPLAVAVVSKPELCTYRDMAVSIITGDGEARGIMIADRLELHNPPVPNCRVAVDVDSEGFRKHFLSLIGQL

SEQ ID NO: 22140 - DNA, 1384 bp, Muscodor strobelii
  misc_feature: SGI EST ID NO. CUFF.52002.0
  misc_feature: Variant of the nucleotide sequence at SEQ ID NO 22138
cacttatcgctttcgacatatgagcaagtgataaattgtctcgtcaaagagctagttgtgcaacttgaagtgtgcagccaagaaacgttatcttgaaacgcactatacaattttccatcggtgccgaagtattgggaggacaacagcaaaagttgttttggaagattactgagcataacacattaaagatggcaccggcacgcattatactagacactgacctttcaatgggcgcaggcgccgatgttgatgatgggtttgcgctcgcactggctcatgcagatccagacattcagattgaccttgtaaccacggtcaatggtaatactgatgtcgatagtgctacgatattgacaggtatccttctcgaccatcttgacatacgcgcgcctctcgtcaagggctcggcgacacccattgttcacccagaccagatacgcacaccagcagatcacgttgccgcaatgcgagacaaggcacgggcgccgactccagggtacgcgcccgtcgcaattattgagcatatcctggcgaaccctggcgagatcacgctcgtcgctattgggcccttaaccaacatagccttggctttacttcttgagccccggatcaagtccgcgcttaaagagctggtgatcatgggcggcatctttctagggaccatgtacgcacgcacaaagccgggcgagttcaatgtcttctcagaccccgaagcagcacgaacggtattgcgctccggagtttcacaacgctggattggactcgattgcacattacgggtccggatgaacatggctgatgccgaagaactcaagaaggccccgacaaagttcgccgcctttgcaggcgaggccactgtcgagtatattgaatatcaggctacccggtttccgggtcggccgaagacagactctgtaccaatgcacgatccactagctgtggcagtggtgtcgaagccagagctgtgcacatatagagatatggctgtctcaatcattactggcgatggtgaagcgcgtgggatcatgattgcagatcgattagaattgcataatccgcccgttccgaattgtcgcgttgctgttgatgtcgatagtgagggttttaggaagcattttctaagcttaatcggccagctttagaagcgaagctcgctgcaaacttcgcgaaatagatcagcaagttaaagcattgcatgttgtgaagggcatatgttattctggtccggggttgtgttgcgattgtcggtgtgttgacggcgatcacgccagtctatgctgatcacttccccaggcatggagtcctggcatgtcaccgcactggagaacgaccatcattactcatcaatgtaggttaatcaattggaaagataatttcactcgct

SEQ ID NO: 22141 - DNA, 1707 bp, Muscodor strobelii
  misc_feature: SGI cDNA ID NO. 567511
  misc_feature: Encodes the peptide sequence at SEQ ID NO 22142
atgaatccgcacgattcgagcgaacagaacgaatcgggtcctgctggccatgtagacaatgctcccaataacgatgggtcgagagcaattggcggagcagatatcactatccacgacgttcctagagatggaagtggcaatgacgtatcaaaggcggtcgatcaggcgcttgattccggagaagttgtgcaaatgagatccgaacttgatgaactgccaattctcagagcatttcgtttatactggcgaatagctttagtgtgctcgttggcggcctttgtgtcggctcttgaaggctaccaatacaccctcacgtcatctatcgtcgcgaacaaaggctttatccgacaattctcgaacggtgggacgaagctcagcgcaaaccatgtctccctctggggcggtggtctatcaacgggccagttcattggtgttcttggccttcaggcagttgtcgagtatattggccgtaaatgggcgatgcatctaacatggcttacgcttgtcatttctgtaactgttgagtctgttgcaacgaactgggctcactggtttgtcgccaagttgatcgctggcgctgggctgggaatgatgcaagctgtgtatcctatctatatttcggaactttctccaactcagatgcgtggttttctcacaactgcatatcagttttggaatgttatttcacatatcttttctcctttggctcttcgtgagctcgccaagaccgacccttataacttcaagatacccatttacacacagtggcccttgctcggagctatgctattcatcaatctgtacattccacagagtccttggtggcttgtgcaaaagtctaaattcgaccaggcagagaaggtcctgaaaaaatcataccgtggtgttgagggctacgactcgggagagcagctttccattatgatcgccaccgtcgaagctcacaggcgcgcgaatgaagaatcagaatcgaaggacgaactacgtgagatcttcaagaatatcaatcggtggcggctcttaattgcattctggcccaagggcatgcaacaactagttgggcagagcttaactaataactatgcaacatacttcttccaattggcgggaaactcggatgcttttggcgtaacagtcatcctcgccgccttgcagttggtcggcgttctcacgtgctccctcctatctgatagattcggtcgacggtggctcactctaggaatgtttgggtctgctgccgccgcagtcctcgccattggcatcgtcggctcattcgattaccaaagtcgctctttgggaagtctcctcgtgttcctcgctgctgtctccaattttgggtgtataggcggagctggtatcgcctacaattacgtggccgagatcccaacacagcgacttcgtgcacgaacgggctcagtggcgctattggggtcgtttgcgctcggcatccttttcaactacactgtgcctttcatgctagctagatggagcgttaaaaccggctacttctttggagttgtcggtattatatctgttctcataggatggcagattctccccgagatggcccgccgaactcctgctgagatcgacgagatgttccaggattgcatcccgccacgcaaattcaagaaacatgtcacacaagtccaaatgaacctccaagagaagacagaaaaacagcaaggtttgaaagaggagctttga

SEQ ID NO: 22142 - protein, 568 aa, Muscodor strobelii
  misc_feature: SGI Peptide ID NO. 567511
  misc_feature (87)..(486): Pfam Id: PF07690 Pfam Desc: Major Facilitator Superfamily
  misc_feature (87)..(534): Pfam Id: PF00083 Pfam Desc: Sugar (and other) transporter
  misc_feature (4)..(567): NCBI GI: 256732858 Blast Desc: NECHADRAFT_79489 [Nectria haematococca mpVI 77-13-4]
  misc_feature (48)..(559): NCBI GI: 58264312 Blast Desc: sugar transporter [Cryptococcus neoformans var. neoformans JEC21] gi|134107646|ref|XP_777434.1| CNBB0080 [Cryptococcus neoformans var. neoformans B-3501A] CNBB0080 var.
  misc_feature (42)..(553): NCBI GI: 115396492 Blast Desc: ATEG_04707 [Aspergillus terreus NIH2624] gi|114193454|gb|EAU35154.1| ATEG_04707 [Aspergillus terreus NIH2624]
  misc_feature (65)..(563): NCBI GI: 256721871 Blast Desc: NECHADRAFT_54550 [Nectria haematococca mpVI 77-13-4]
  misc_feature (65)..(562): NCBI GI: 255936443 Blast Desc: Pc13g08230 [Penicillium chrysogenum Wisconsin 54-1255] gi|211583868|emb|CAP91892.1| Pc13g08230 [Penicillium chrysogenum Wisconsin 54-1255]
  misc_feature (47)..(562): NCBI GI: 159130215 Blast Desc: MFS alpha-glucoside transporter, [Aspergillus fumigatus A1163]
  misc_feature (47)..(562): NCBI GI: 70992969 Blast Desc: MFS alpha-glucoside transporter [Aspergillus fumigatus Af293] gi|66848966|gb|EAL89295.1| MFS alpha-glucoside transporter, [Aspergillus fumigatus Af293]
  misc_feature (194)..(561): NCBI GI: 238488215 Blast Desc: maltose permease, [Aspergillus flavus NRRL3357] gi|220697733|gb|EED54073.1| maltose permease, [Aspergillus flavus NRRL3357]
  misc_feature (45)..(562): NCBI GI: 119473395 Blast Desc: Hexose transporter, [Neosartorya fischeri NRRL 181] gi|119406747|gb|EAW16698.1| Hexose transporter, [Neosartorya fischeri NRRL 181]
  misc_feature (57)..(551): NCBI GI: 256728263 Blast Desc: NECHADRAFT_87876 [Nectria haematococca mpVI 77-13-4]
MNPHDSSEQNESGPAGHVDNAPNNDGSRAIGGADITIHDVPRDGSGNDVSKAVDQALDSGEVVQMRSELDELPILRAFRLYWRIALVCSLAAFVSALEGYQYTLTSSIVANKGFIRQFSNGGTKLSANHVSLWGGGLSTGQFIGVLGLQAVVEYIGRKWAMHLTWLTLVISVTVESVATNWAHWFVAKLIAGAGLGMMQAVYPIYISELSPTQMRGFLTTAYQFWNVISHIFSPLALRELAKTDPYNFKIPIYTQWPLLGAMLFINLYIPQSPWWLVQKSKFDQAEKVLKKSYRGVEGYDSGEQLSIMIATVEAHRRANEESESKDELREIFKNINRWRLLIAFWPKGMQQLVGQSLTNNYATYFFQLAGNSDAFGVTVILAALQLVGVLTCSLLSDRFGRRWLTLGMFGSAAAAVLAIGIVGSFDYQSRSLGSLLVFLAAVSNFGCIGGAGIAYNYVAEIPTQRLRARTGSVALLGSFALGILFNYTVPFMLARWSVKTGYFFGVVGIISVLIGWQILPEMARRTPAEIDEMFQDCIPPRKFKKHVTQVQMNLQEKTEKQQGLKEEL

SEQ ID NO: 22143 - DNA, 813 bp, Muscodor strobelii
  misc_feature: SGI EST ID NO. CUFF.52014.0
  misc_feature: Variant of the nucleotide sequence at SEQ ID NO 22141
gcgggaaactcggatgcttttggcgtaacagtcatcctcgccgccttgcagttggtcggcgttctcacgtgctccctcctatctgatagattcggtcgacggtggctcactctaggaatgtttgggtctgctgccgccgcagtcctcgccattggcatcgtcggctcattcgattaccaaagtcgctctttgggaagtctcctcgtgttcctcgctgctgtctccaattttgggtgtataggcggagctggtatcgcctacaattacgtggccgagatcccaacacagcgacttcgtgcacgaacgggctcagtggcgctattggggtcgtttgcgctcggcatccttttcaactacactgtgcctttcatgctagctagatggagcgttaaaaccggctacttctttggagttgtcggtattatatctgttctcataggatggcagattctccccgagatggcccgccgaactcctgctgagatcgacgagatgttccaggattgcatcccgccacgcaaattcaagaaacatgtcacacaagtccaaatgaacctccaagagaagacagaaaaacagcaaggtttgaaagaggagctttgattagatgaaacaagtgtaaaatagattcagctgcgctggcttagcgggcaacagatgctcaaacgttcatttataagactatggtccattgaacgctttaggcatcttcaagcaaagagtattcgctaccaactgctgccgacatactccacgtcgaagaccaattcagtgtgcgaatgaacttgtagtgcaatagctcatgatagtaac

SEQ ID NO: 22144 - DNA, 2040 bp, Muscodor strobelii
  misc_feature: SGI cDNA ID NO. 567512
  misc_feature: Encodes the peptide sequence at SEQ ID NO 22145
atgagcgaatcgactgaggagtgcccaacgctcaagggcttcgagtatgtcatcattggctccggtcctggtgggggacctttggccgcgaacctggcacgccgaggtcacagagttctcctgcttgaagcaggcgatgaccaaggacagaaccttaatcagaaagtcccgttcttctggactgctgcgtcggaagatccctcgatgagatgggacttctttgtgaagaacttctcagacgacaagcaagcagccaaaagctccaagatggtctgggagacacccagcggcgctcaatacattggcttggatcctcccaagggatccacgcagaagggtatctggtatcctcgggctggtactctgggcggctgtggcagtcatgatggcgttgctgccgttctaccccatgactcggattggcagtacatcgtggacatcacaaaagacgagtcgtgggcacccgagaatatgagaaagtacttcgaacgtatcgagcgttgccattatctttccaaggacactcgaggtcatggattcaacggctggctggaaactgatgttccggacccggtaattgtgtctgccaatgagccaattgtgtcagcggcaatagaagtagccggtactgccccaggcgcggcaactcagggtctttataagggtatcgtgacggacataaatgcggtcggtggccaaagcgctgacggggtatacaacttcacgctgtccacgagcaaagatgcacgccgaagtgggccacgaaactacctcgtcgcaacctcgatcgctcgtaaccccgatgggacgaagaagtacccactatatataaaaactcgctgcttcgcaactaagctactcttcgcgccacaacatgagggccataagccacgagtaattggcgtcgagttccaggaaggcgagagtctctataaggcagacccgcgatatgacgaccgtcgcgttggtgtgcgaaaacgtgtgcttgcatcgagagaagtcgttgttgctggcggcgcattcaacacgccgcagctcctcatgttaagcggcatcgggcctcgaaaggaattagagaagtttgacatccccatcgttgttgagatgcccggtgttggatctaacctccaagacaattacgagatgtctgttgtagcacgtagtccggaagcattttccattttgaaagagagtggcgccggcggtccgggagacttctttctggcacaatgggtcaagggtttcgggccgtataagggcaatggcagcgcgatttgtgtgctcaagaagactgagaggtctggcgaggaagatctcttcctattcggcactcccagtgtttttaccggcttcttccccggattctcaaaggtgatccaaggagactaccatgaatggacttgggacgtgcttaaattccgccctcacaactcttccggtaccgtgagactcctgtctcgcagccccttcgatgtacctgagatcaactttgagtacttcgccatacaagacgacgcacacgaatgcaacgatcccgagcgcgatcttaacgcgatagttgaaggcgtacagctagcgcgagatattctcaagagcgttgaggcgcctataggcccgtttgcagacgtgacgccggcatcatcagttaacaccagcggcgaaattaaagcggcgatcaaggccgagtcatttggccatcacgcagcttcgacgtgccggataggaggtgatgacgaccctatggcctgtctcgactcgcaattccgtgtgcgaggtgtcgactgtctccgcgttgttgacgcgtccgtcttccctcgtgccgtaggtacattcccagccctgccgctttacatggtcagcgaaaaggcgtgtgatgctatactcgacgacgtggcacgcgatgatgctgtacttgacggcatccgggatcgcgaggtgctagtcgaggatagctgggcgaatgagatcgtcaatgatcaagtcgagcagaatgggctgaccgggattagaagcacgggcaccgtacaggcacggcgttaa

SEQ ID NO: 22145 - protein, 679 aa, Muscodor strobelii
  misc_feature: SGI Peptide ID NO. 567512
  misc_feature (468)..(623): Pfam Id: PF05199 Pfam Desc: GMC oxidoreductase
  misc_feature (116)..(394): Pfam Id: PF00732 Pfam Desc: GMC oxidoreductase
  misc_feature (571)..(623): Pfam Id: PF05199 Pfam Desc: GMC oxidoreductase
  misc_feature (279)..(394): Pfam Id: PF00732 Pfam Desc: GMC oxidoreductase
  misc_feature (3)..(628): NCBI GI: 225561900 Blast Desc: glucose-methanol-choline oxidoreductase [Ajellomyces capsulatus G186AR]
  misc_feature (3)..(628): NCBI GI: 240275508 Blast Desc: GMC oxidoreductase [Ajellomyces capsulatus H143]
  misc_feature (10)..(629): NCBI GI: 261197980 Blast Desc: choline dehydrogenase [Ajellomyces dermatitidis SLH14081] gi|239595355|gb|EEQ77936.1| choline dehydrogenase [Ajellomyces dermatitidis SLH14081]
  misc_feature (10)..(629): NCBI GI: 239607795 Blast Desc: choline dehydrogenase [Ajellomyces dermatitidis ER-3]
  misc_feature (11)..(635): NCBI GI: 115492519 Blast Desc: conserved [Aspergillus terreus NIH2624] gi|114197747|gb|EAU39447.1| conserved [Aspergillus terreus NIH2624]
  misc_feature (10)..(631): NCBI GI: 261354183 Blast Desc: choline dehydrogenase [Verticillium albo-atrum VaMs.102]
  misc_feature (11)..(628): NCBI GI: 171676836 Blast Desc: protein product [Podospora anserina] gi|170936485|emb|CAP61145.1| protein product [Podospora anserina]
  misc_feature (11)..(629): NCBI GI: 255937515 Blast Desc: Pc13g13730 [Penicillium chrysogenum Wisconsin 54-1255] gi|211584404|emb|CAP92442.1| Pc13g13730 [Penicillium chrysogenum Wisconsin 54-1255]
  misc_feature (11)..(631): NCBI GI: 119480809 Blast Desc: GMC oxidoreductase, [Neosartorya fischeri NRRL 181] gi|119408587|gb|EAW18536.1| GMC oxidoreductase, [Neosartorya fischeri NRRL 181]
  misc_feature (14)..(628): NCBI GI: 256732331 Blast Desc: [Nectria haematococca mpVI 77-13-4]
  misc_feature (37)..(623): SWISSPROT Homolog: EC 1.1.99.1 Choline dehydrogenase
MSESTEECPTLKGFEYVIIGSGPGGGPLAANLARRGHRVLLLEAGDDQGQNLNQKVPFFWTAASEDPSMRWDFFVKNFSDDKQAAKSSKMVWETPSGAQYIGLDPPKGSTQKGIWYPRAGTLGGCGSHDGVAAVLPHDSDWQYIVDITKDESWAPENMRKYFERIERCHYLSKDTRGHGFNGWLETDVPDPVIVSANEPIVSAAIEVAGTAPGAATQGLYKGIVTDINAVGGQSADGVYNFTLSTSKDARRSGPRNYLVATSIARNPDGTKKYPLYIKTRCFATKLLFAPQHEGHKPRVIGVEFQEGESLYKADPRYDDRRVGVRKRVLASREVVVAGGAFNTPQLLMLSGIGPRKELEKFDIPIVVEMPGVGSNLQDNYEMSVVARSPEAFSILKESGAGGPGDFFLAQWVKGFGPYKGNGSAICVLKKTERSGEEDLFLFGTPSVFTGFFPGFSKVIQGDYHEWTWDVLKFRPHNSSGTVRLLSRSPFDVPEINFEYFAIQDDAHECNDPERDLNAIVEGVQLARDILKSVEAPIGPFADVTPASSVNTSGEIKAAIKAESFGHHAASTCRIGGDDDPMACLDSQFRVRGVDCLRVVDASVFPRAVGTFPALPLYMVSEKACDAILDDVARDDAVLDGIRDREVLVEDSWANEIVNDQVEQNGLTGIRSTGTVQARR

SEQ ID NO: 22146 - DNA, 2340 bp, Muscodor strobelii
  misc_feature: SGI EST ID NO. CUFF.52089.0
  misc_feature: Variant of the nucleotide sequence at SEQ ID NO 22144
aagggcagcagtctaagcacataaatcctattgaaaaaacgattatgatgagcgaatcgactgaggagtgcccaacgctcaagggcttcgagtatgtcatcattggctccggtcctggtgggggacctttggccgcgaacctggcacgccgaggtcacagagttctcctgcttgaagcaggcgatgaccaaggacagaaccttaatcagaaagtcccgttcttctggactgctgcgtcggaagatccctcgatgagatgggacttctttgtgaagaacttctcagacgacaagcaagcagccaaaagctccaagatggtctgggagacacccagcggcgctcaatacattggcttggatcctcccaagggatccacgcagaagggtatctggtatcctcgggctggtactctgggcggctgtggcagtcatgatggcgttgctgccgttctaccccatgactcggattggcagtacatcgtggacatcacaaaagacgagtcgtgggcacccgagaatatgagaaagtacttcgaacgtatcgagcgttgccattatctttccaaggacactcgaggtcatggattcaacggctggctggaaactgatgttccggacccggtaattgtgtctgccaatgagccaattgtgtcagcggcaatagaagtagccggtactgccccaggcgcggcaactcagggtctttataagggtatcgtgacggacataaatgcggtcggtggccaaagcgctgacggggtatacaacttcacgctgtccacgagcaaagatgcacgccgaagtgggccacgaaactacctcgtcgcaacctcgatcgctcgtaaccccgatgggacgaagaagtacccactatatataaaaactcgctgcttcgcaactaagctactcttcgcgccacaacatgagggccataagccacgagtaattggcgtcgagttccaggaaggcgagagtctctataaggcagacccgcgatatgacgaccgtcgcgttggtgtgcgaaaacgtgtgcttgcatcgagagaagtcgttgttgctggcggcgcattcaacacgccgcagctcctcatgttaagcggcatcgggcctcgaaaggaattagagaagtttgacatccccatcgttgttgagatgcccggtgttggatctaacctccaagacaattacgagatgtctgttgtagcacgtagtccggaagcattttccattttgaaagagagtggcgccggcggtccgggagacttctttctggcacaatgggtcaagggtttcgggccgtataagggcaatggcagcgcgatttgtgtgctcaagaagactgagaggtctggcgaggaagatctcttcctattcggcactcccagtgtttttaccggcttcttccccggattctcaaaggtgatccaaggagactaccatgaatggacttgggacgtgcttaaattccgccctcacaactcttccggtaccgtgagactcctgtctcgcagccccttcgatgtacctgagatcaactttgagtacttcgccatacaagacgacgcacacgaatgcaacgatcccgagcgcgatcttaacgcgatagttgaaggcgtacagctagcgcgagatattctcaagagcgttgaggcgcctataggcccgtttgcagacgtgacgccggcatcatcagttaacaccagcggcgaaattaaagcggcgatcaaggccgagtcatttggccatcacgcagcttcgacgtgccggataggaggtgatgacgaccctatggcctgtctcgactcgcaattccgtgtgcgaggtgtcgactgtctccgcgttgttgacgcgtccgtcttccctcgtgccgtaggtacattcccagccctgccgctttacatggtcagcgaaaaggcgtgtgatgctatactcgacgacgtggcacgcgatgatgctgtacttgacggcatccgggatcgcgaggtgctagtcgaggatagctgggcgaatgagatcgtcaatgatcaagtcgagcagaatgggctgaccgggattagaagcacgggcaccgtacaggcacggcgttaaggagatcattggcggtgatcgcactgtatcgaggtacccaacacagtcgccctcactggggccgcgtccttagatctgatttcattcatgttcgctccctccactgttgtccatttttctcttttggtttgattgtttataagctagattaaaatctcagtcgtttttgaatgaattatacgtatcatagagctcccaccggcttatacgtctttggccttgcaagatctgaagtctggaccctgggttatga

SEQ ID NO: 22147 - DNA, 1080 bp, Muscodor strobelii
  misc_feature: SGI cDNA ID NO. 567513
  misc_feature: Encodes the peptide sequence at SEQ ID NO 22148
atgttgttgtcgcgctctcaggtgtatcttggtattttcagcctgggagaacttgctgttgccgcgccgagaaatcactctggagtacctgaatggtcaacgcttgccagacttccacgtcctcgccaagagcatgggatagccgctattgatgacaacacaattgctattgtcggtggcgtgtttagctccagtggagtactgcagactaccccctcgctgcagttatacgatattccttccaacacctggcgaaatgcgacctcagccccatttagtgtcaatcatcccaatgtcgtggctgtcgatggcttgttatatgtgctaggagggctcgttgatgccgctgtgctgccacaagggttcacatttgactggattgcatccggcgaaagtcatgtctacgacccgacgaccgactcatgggcacagctcgcatccatgcctcccggaactgaacggggtagtgcaattgtgggagtgtttgacgacctcatttatcttgccggcggaatgacagtattgaacctcgagggccaagactcagtgaccgtcgtgacggcttacaatattacttcgaacgagtggttgagactcccagctcttgccgctaacattcctgagggccgtcaacatggtgtcggtggagttgtcggtgacaagttctatgtaatcgggggccgatggttcgggcaaaggaatgtgcgcgacaccgtcttcgtgcttaacttgaacgagctcgaaaagggttggacgacgaatgaagggcgcatgccaactgctcgtggaggcctttccggggcagtagtcaagggtcggttctacactttcggcggcgagggcgacccgaacactgtgactggcgttttcccagagactgaggttttggacattagcaaaggagtgtgggccaagcttgctccaatggccgtacctcgtcatggcacacaagccgtcgcagttggtaacgggatctacattccaggaggtgggctgcagcaagatggattagcagttaccgtcgatggtgtcaccacttacggcaacacgacagacacatttgacgttttgatagtataa

SEQ ID NO: 22148 - protein, 359 aa, Muscodor strobelii
  misc_feature: SGI Peptide ID NO. 567513
  misc_feature (93)..(149): Pfam Id: PF01344 Pfam Desc: Kelch motif
  misc_feature (261)..(310): Pfam Id: PF01344 Pfam Desc: Kelch motif
  misc_feature (153)..(203): Pfam Id: PF01344 Pfam Desc: Kelch motif
  misc_feature (18)..(359): NCBI GI: 256730178 Blast Desc: NECHADRAFT_45187 [Nectria haematococca mpVI 77-13-4]
  misc_feature (27)..(339): NCBI GI: 46134005 Blast Desc: FG09142.1 [Gibberella zeae PH-1]
  misc_feature (12)..(341): NCBI GI: 256720646 Blast Desc: NECHADRAFT_50289 [Nectria haematococca mpVI 77-13-4]
  misc_feature (18)..(339): NCBI GI: 169606123 Blast Desc: SNOG_06096 [Phaeosphaeria nodorum SN15] gi|111066040|gb|EAT87160.1| SNOG_06096 [Phaeosphaeria nodorum SN15]
  misc_feature (12)..(318): NCBI GI: 171688816 Blast Desc: protein product [Podospora anserina] gi|170944370|emb|CAP70480.1| protein product [Podospora anserina]
  misc_feature (18)..(339): NCBI GI: 39943630 Blast Desc: MGG_03826 [Magnaporthe grisea 70-15] gi|145014514|gb|EDJ99082.1| MGG_03826 [Magnaporthe grisea 70-15]
  misc_feature (32)..(334): NCBI GI: 261204783 Blast Desc: kelch repeat-containing protein [Ajellomyces dermatitidis SLH14081] gi|239587390|gb|EEQ70033.1| kelch repeat-containing protein [Ajellomyces dermatitidis SLH14081]
  misc_feature (32)..(334): NCBI GI: 239614065 Blast Desc: kelch repeat-containing protein [Ajellomyces dermatitidis ER-3]
  misc_feature (12)..(336): NCBI GI: 154318626 Blast Desc: BC1G_02702 [Botryotinia fuckeliana B05.10] gi|150857832|gb|EDN33024.1| BC1G_02702 [Botryotinia fuckeliana B05.10]
  misc_feature (1)..(329): NCBI GI: 39944150 Blast Desc: MGG_04086 [Magnaporthe grisea 70-15] gi|145014812|gb|EDJ99380.1| MGG_04086 [Magnaporthe grisea 70-15]
MLLSRSQVYLGIFSLGELAVAAPRNHSGVPEWSTLARLPRPRQEHGIAAIDDNTIAIVGGVFSSSGVLQTTPSLQLYDIPSNTWRNATSAPFSVNHPNVVAVDGLLYVLGGLVDAAVLPQGFTFDWIASGESHVYDPTTDSWAQLASMPPGTERGSAIVGVFDDLIYLAGGMTVLNLEGQDSVTVVTAYNITSNEWLRLPALAANIPEGRQHGVGGVVGDKFYVIGGRWFGQRNVRDTVFVLNLNELEKGWTTNEGRMPTARGGLSGAVVKGRFYTFGGEGDPNTVTGVFPETEVLDISKGVWAKLAPMAVPRHGTQAVAVGNGIYIPGGGLQQDGLAVTVDGVTTYGNTTDTFDVLIV

SEQ ID NO: 22149 - DNA, 2354 bp, Muscodor strobelii
  misc_feature: SGI EST ID NO. CUFF.52032.0
  misc_feature: Variant of the nucleotide sequence at SEQ ID NO 22147
gtaatttaattccttgcacttcataattcccgatctacaaggcgcagttgcaacaccgatcgtcatggccatgaagactacggatgtcatgcgagaaagcccgggaaagccggtaacacagctgtgtgctcaatgacgatgcattctatgatataaagcttgctgttttgtcctatgttcgttgcagcgatcatcctctactcctctagctacaagtagatccacgatactatatcaatttaccaattcctacactcgccagcatgttgttgtcgcgctctcaggtgtatcttggtattttcagcctgggagaacttgctgttgccgcgccgagaaatcactctggagtacctgaatggtcaacgcttgccagacttccacgtcctcgccaagagcatgggatagccgctattgatgacaacacaattgctattgtcggtggcgtgtttagctccagtggagtactgcagactaccccctcgctgcagttatacgatattccttccaacacctggcgaaatgcgacctcagccccatttagtgtcaatcatcccaatgtcgtggctgtcgatggcttgttatatgtgctaggagggctcgttgatgccgctgtgctgccacaagggttcacatttgactggattgcatccggcgaaagtcatgtctacgacccgacgaccgactcatgggcacagctcgcatccatgcctcccggaactgaacggggtagtgcaattgtgggagtgtttgacgacctcatttatcttgccggcggaatgacagtattgaacctcgagggccaagactcagtgaccgtcgtgacggcttacaatattacttcgaacgagtggttgagactcccagctcttgccgctaacattcctgagggccgtcaacatggtgtcggtggagttgtcggtgacaagttctatgtaatcgggggccgatggttcgggcaaaggaatgtgcgcgacaccgtcttcgtgcttaacttgaacgagctcgaaaagggttggacgacgaatgaagggcgcatgccaactgctcgtggaggcctttccggggcagtagtcaagggtcggttctacactttcggcggcgagggcgacccgaacactgtgactggcgttttcccagagactgaggttttggacattagcaaaggagtgtgggccaagcttgctccaatggccgtacctcgtcatggcacacaagccgtcgcagttggtaacgggatctacattccaggaggtgggctgcagcaagatggattagcagttaccgtcgatggtgtcaccacttacggcaacacgacagacacatttgacgttttgatagtataatgcccaactcgtgcgttgatatatggattgatgttgaacgggaggcttcgcaacattgagtagctgcgaatccgagcaagcaatgtcctgccactttgaacaaagtcatatgaagtgcttgtgccaactccatttgatatagtaaaatgtgaagtatgtgtagcttggaaaataacgcgagttctatgccgatgaaagtaatcgttcgtctcttctccattgagttgatacgcgtatcggtgtaatcttgagtcgcccaagatggcttcaagtgaaaataggttccgatctgtatgcgttaatcagaaagctccgagtgccgctccatttttgggcgaatgttttcccgttatgggagatacagcgacggtctcaactgaggcaagccgatccaaaacgaaaatccaaccctttcccctgttgtcaacgattcaccagctgaattgcccactaagaaagcccagagcccaaagtctctccccccgttgttagaccttcaaccctttgggcgagcctaacgcagggccggtctcttctgagccgcatacctgtgcatgtatcaaaccaatatcatctcagtgttgctcagactctctccatttcgggaggtcgcacgcaacaccgggctcaaatgagctatacacgaacaatagttccttcccgacttgttcagactctcgctagtttcggagtcaagcgtaatacggtctctttgagccataaacgcaaaagccaacatctatctctgccttttttctagcttgcgttgtctcagtacgtagacatagcaacgatctctgcggggcctacatcaagaatctggagcctcgaaacaccgcgactgcatttcatccccgctagtctgggtctgggaatcagatgttgcaatggtctcaattgagccttgtggactgttgaacaagctgtcagtgatgcagtgctttcgacgctcaagcgctcaagctgttcggaagtgtcgtcaatagcgtcctggagtaagataattaagat

SEQ ID NO: 22150 - DNA, 9402 bp, Muscodor strobelii
  misc_feature: SGI cDNA ID NO. 567514
  misc_feature: Encodes the peptide sequence at SEQ ID NO 22151
atggcgctcagcaggaccgagctgctttacatctgcaaccatgtttttcttcccccgaaactcccccagagcgatgattgggaccccgctttggagaatgctattctatccgccgcaatcgacgcactgatgaaatggaagaacatagctcgaccaggatggcatgaacaggctcatgccgcaatatgcactcttcttagcatgcagtctgtacatcaagtagaggatggtactctgagtgaacgacatactctcgacatgcttctaaacctcaatggagctatcccactttacattcgcaaacagaatgcctgtgtcgttattactcgacttaatgatgttatcgctttcgaggcattcgaagcatcgcccacaaacgaggcaactatgacgacccaaggtagactcctgcgctcattcccaggtacttccgtggctatatcatgggagaccttcgcagaaaaacaacttcaaaagactgttgcaggcgtcctgaccgagatgagcaagcatgaagtcatcgacatgttgcccaaagtaacgaagagcggtagcgaactcgtggaagatcgcgataccaatcatcctggcatgatcacggaggtcttcatcagttttctcaaatccatggggaagcctgtaagctgtccaaccatagtgaaaaagatgcgcgatgatgtgctgtggaacaatgctcgttcaccctggcgacgctccccattttggttgctcattcgcgttgccctacaccttggatttcagcgcaaagggagcacccaagcctccactgtgatgtacaaggaggcaatgctcttcatactctgcggaatcttgaagcaatcgtcagatatgaaacttcctagcgagctgctgtactgtatgaacgcaaaaatctcgaggcgacttctgaaactgggtacttatctcgacgataaggttctgtcttacgtcaaagagttgatggacggcgcttcacttacgaacaaaacacattggtcggtaatacaaacgaacgatgctcgatcgatcgatcttttgaagttgtcaatgcttaacttcgaggatgaccgtcaaacgtctcttccgaagctggatgaatacatcaagtcttgtgccaatagacagcaaggagctaactccaaatgcttcaatccagtctctccattcattatcaccttgcctgatagcttgccacagctgccagtgagatttcaacatactgaaaggagtcacgctacgatcgacctcgaagctttcgaaacctgggtttccatgtactgtctttcttggagcagaacgaaacgccgtgttgcatgcaaagagctcgcgtcgctaatttccaggtatcacgcattggccaagactcattatgcgaacatgcccgaaggggtctccatgatgattattacaatttttgagatgtggattgcgatagacaagtccgctatcaaattaagcccccttcttcgagattatagccctgaaatcttaggcatggatgttcgaaatctcgtcctgccatccgcagctgcgatgcggagactgaaaatcatacaaagttacttcagcagtcgcatagcttcatcaaaatacccgcctactaagctttacactgatttttgcagtacggaatctttcccagtccgatcattttgcgcttcggacgatatgaaaagcaaacataaagacattatcaaggctgccgaagaggcgaagagcgcgaagatgagagaactcggtcagctacagacgagatataacgaactgcttgagaagtctgattcgatgagctgcgagtatgaggactatactacaactaatgattggggtactgtcacttctgagcaaaggcacaaaagcacctgtatgaaatgcaggcttgatgctcaggcaaaaaatatgcggattggcatccatgagtggcccctaccacaacatgaaaggaaagcccaagctatagtttttgagctgtgtataccggatcatttacaagcctggcgtcaagcaacattctacgttcggtgcaatgtgctgggttggatcagcactggtgaagagttcaaccatgcaacatatatcttggaaaacgacccacatctccggacttactcatcacactctctttccagaattggtctaatgtcaagaacgaaggcgcaggttaagacacatcgacacgaagtacctgtctcgacggcagaagagagttcagtttgcgtcaacaatggtctcaattatcaatactttgaccacgaagcaaagcgctttaatgctctatttacacgttcatcttccatgcaggaggagcttcataggacgtgtacgtatcaactcccagcaccttccaaagggctacaaaagtatctgtatcgacccaaggaattccccaatggccctcggccaaatgatgtattcgaaaatcacacagactttccggatcatatgagtgttagggaagcaagagacctagcaatattgccgtgtggccagcatatccactggcacaacattctcgcacagctgggttgtccctgcattgactttaggaaacaagagtcagccattttcatatttcaggccatttatcagtctgggactccgtcaaacacatggcgtggggtcagtaatcgaatcttgaacgatgaaagcttcagcaacaagttactcgacaatgtggatgccgcttggcatcggatgtgcgataactgggactctgcccaggctttaattgtatttatcgcgattataacacggctattgtcgctttcaacttcagaggaaatacgaagacgttgcatgtggctcctcgaaactcttcgcaatggagcgtatcagtggcagcagcagatcacagacaaggcgctgagaactgtcgatcacgatgactacacaaaattcagagctaaaagtgctgacatggccttgatatgcggtttatcatttgacatcgaaaatgaaagccttcaggaggtcttgagctcaaccccggaggcctccatgttcgtccgatgctccattctaattcacgaaggacgtcgagtgtacaagccttctcacgagcccattttggcatcgctggctgatcggttccagagactcttgtatcgtgcatcatcgattatgcgcaatacacagccagggttgtccgatgcagtgagacaaacatggcccgacctcagtcatagccaggaatggaaagttgagaataatgctacccattggttgacaacaacaacgttgaggaataacaatactagcttcaagatacactatgacgttttcactggtgaactcctagtgaacggcctttcatcaagtagtccccctacagcatatacatctcatccatcttggtcaacgttcttcgggcaaactagaatagagacgatgccgacttcggtccccggtctgcagttttcagtcaatagagagcttcatgactacaaagtcaatatcggcttgggtagaactacaaatccacggggtggaatttccgacctaatcatacaggcatctgattcgagaaccaagtacgagacagttccggctcatcttttcgaggatgtatttccgagacatttcatttctgactatgtctgctggtatcaacacgagaccggtagtttagagttccggcctatgtctacgccgtggaaaccagatgatacaaagtgggtcttgtcaaagtctggtgcaggatggactctcgccaaagatatgcggactgtccttagcttgaacagcgcgacgtctcttgctctaactgacattctctctcctctcgtgggcccagccgactcgattgtgtatctgcattcctcgagtatcccattcgtcgagattgagatccctgcgctccagcacggcttcttccttacccagggagagtcgagcctgcggtcaagagagtacgacggaatgatactggacaaggaccaatatatagggacactaattggactcaagaacaaactaatgcttcgagacggcaaaagtcgtttgcttctcgtccctgaaggagatctgaaatggggcataacggagcatcatgtccaaatctcgatttctgcgaagtcaatgactcgagtgcacgagtttcgagtagacgacatacttgggcgtttaattgataacggtgatatgcatggcaagttatacttgtcatatttacatgctttgacatctcactgtctatctgatccactcacaagcatgactggcgttgagcaagcattggaaattctcaactccgctgccgtcaaatctttcgatcgattgcggcaagaagacatcaaattgcttgcagatattgcacgcctgactccaacaaggaaatattatcccgaaaatgagcaagtcatgcaatctgtgtgctgggcaccgggtcttcgtcagctgccacagcatgatggactgtatgctgcagtcgatgccattttcgaacatgccagacgaatgtgcgtcttttacccgagcaatgatccaacacaactgaaaatgtgcacacacatagacacaaacagattccttttagagcgttgccgcattcagtcatcggccttcagagtctcagaatatggcgccgagaagcatacaactaaatatgatacgccatacagtagccgcgaccaagaccagacctcgcagcgcgcaaacaatgcatatgtcctttcaagcatcatcttccatgggcgcgtcactttacactgggaagctcttcgaaacggtcagctatggtataatatgctggccgtaactgagctattgccacccacggaagtcttgcacatttcagaattgaggtacactgcagccgctgccaaccaagggttaagtctttatttgtggctagttatacgccaagttctctcgaagcaatctggggaggctaacagattcgatataatgatgtggctgtcggctctgggtgcaaagacacaggccgatgtgagacttctgcaaatattagcactctcgttcacaactccggcactgaaatgcatcagaaggcccgaattaacttcttcttgtaaacctcctgcagggtacagagtcacacctcagcttgtgacgccagctgttgagtccaacttacattcacaacagtcctcgcccgaagggcaattgaccgcacatgttgatgagagcatcagcgatttcaagagacggcgcgatcaacaatatcaggccaacaaagatgaagcggtcaaagagacagtgaaggcaatatgcaacttgtggccacgcagatctgtctcactcgagactatcaaacacaaaatagctgactacatcaagattgccgagaccgaagctctcgcaacgaaattgtttcaggaacgcttcaagaaccacttaattttcgagtatctaaagaaaattgagaactgcctttctcagctcagtcgccaccatatttcttcccctgtagctaccccaatgatcccagtaatggcaccatcgaggacgcctgcatttgtctccatgagaaatcttttcattgcctcggcacccgctattgaagtgacagcaagcataaacttgtccaattcgcccgatgaggttgtctcaacacaagctcgttccttaggaaatctcatccacgctttgagagcgaaggctccccaatcctcgtatgagcggtcatacattgacgaactagaaaatagcttgagatcattgaacaaccatcagagcgcgttgctcacatactccacgagcaaggatcactcagtggagaggttcgaaaatcttttagttgagacgaagaccattgtcaacggtatttatgccagtattgctttggcgatgcgtgctgcacaggacagaataccacaggaacacgggccacgattgtctccaattacacttttaagccacttacgacatcaacaatgggacttcctagatgagagttggaagaaatgcattgtccaatatgcacttgcaatagttgctcttcagaaagctgaaagacttgttcgaatggctggttctgacgatgttgatgatctgatcaaagagatggcaaatattggccacgaaaactggcaacctttcgatcatccagaatggttactcctcgaagtagaaaattcaatcataattcgtgatgcgcaagcagacatagcatgcgagatgatcaggccaagctctgggcgcaatgcggtaatgcagctcaatatgggcgagggcaaaagctccgtcatcattccgatggcagcgacagaactttctgatgggtctgtactcgtgcgtgtcattgttgcaaagccacagtcgaagcaaatggcacaaatgctagtgtccaaattgggcggtctcctgaataggagagtataccacttgcccttttcgagagcccttaacgttagatcagaatcaatcactacggcgatcgacagtctcattaaagaatgtcgggtgaatcgaggcgttcttctagtgcagcctgagcatcttctttccttgcatctgatgggtgtcgagtatagttgtccaggagatacgggcaagcagataattgccaaagccctcgtcaatattcaagatttctttgacagccattctcgagatatcatcgacgaaagcgatgagaactttagtcccaagttcgagctagtctatacgaaaggatcgcaaaagcccattgaattgagccctacaagatggatctgcatgcagcaggtattagatcgcgttcgatctttggctactgacatcaagaccgagttcgccgggtctatagatgtagaggttcggaacgagggagggtttccaagaatccgagttctcaaagcagatgcaggcaaggccatttccgagatcgtagcgaaagatatctgcaaaaatggattcgaaggatttccgattgccagacagtcaaagcatgtccgcgaagctgtattcagatatatttctcagcccaccctaaccgcggaagaaatcaacgccgtcgaaggagccgaacgtcaaggattctggtctgaaagcactaagcctctggtgcaactcctgcgcggtatattgggtagaggtgtactgtcgttcgcgctgtgccagaaacgctggcgagtcaattttggacttgcgccaacacgggtaccccccacaaagattgcagtgccattccgtgcaaaggataacccgagtcttcggtccgaatttagccaaccggaagtagtgattttgctcacttgcttggcgtattattatggaggcctgttggataaagatctcttcgtcacaatggaccatcttatgaactccgaccaggcgtgcattgagtatgatgcttggatccgggatgcgccaacaatgccattgtccttccgacagcttgaaggcgtgaacatcaaggaccatcctcaatgtattcatgacgtgtttccgcatcttaggtatgcaaaagctgtcgtcgactattttttggctcacgttgtcttccccagagcagtaagggagtttccccataagctatctgcttctgggtgggatatcggcaagaagaaagcacatgttacgaccggattcagtggtaccaatgactccaaaagacttcttcctctggatatcaatcatatcgatctgcagtcgcaaaatcacacaaatgcactggttctggattatctcttgcaggaagagaatactgtcctcgttttaccagatgaggcatgcccatacaaggatgcggaacgttttctggatacagtggtaagactcgacaacgacagaccggtcagagtgattcttgatgttggtgcccaaatcttggagttggacaacaaaggagtggcaaagagctggttagaggcagagacagatggggaaactaaagcagttgtgtacgtcaatgatgatgatgagctatgcgtcattgatcgtcaaggacgaatcgagcctctccagacctcctcgtatgcaagtcgaatgcagtcctgtcttgtcttcctggatgaagcacataccagaggtattgatctcagattacccacacactatcgagccgcagtcacgcttggcgcgaatctcacaaaagacagattggtacaagcgtgcatgaggctaagaaagcttggtaaaggtcaatctgttgtgttctgcgtcaactcggagatacgatccaggatactagaatgcacaggtatatcaagtaatggtcccatccgtgtccaggacatacttcattggaccatgaaggagacgattagagagcatcagaggcatgtccctctttgggcgatgcaaggaaaacgtttcatcaatcaggaaagtctttggcagtcgtgctcgatagatggaaaaacgactgtaacaaccgacatagcccgccagttcctagagaaagagtctcgatctatcgagaccctatatagccctcttcgggcggaagttgtgtcaggtgctcagccacatctatcagaaagagacctgaggcggctccatgagatcgacacgcgctgcaaggagatcggcacgtttgatctgagtttcggcacatttgaagaggaacaagaacgcgaactggctcctgagatcgaacaagagcggcaaacagagctgaaagcatcggcaaagccagttgatcatcatttccatccagatattcaaaagttccttgacactggttgtgtgttgccgaattcaaaagcctacgtcccagcttttgaagcattacgaaatacgactgcggccgagcatttcgacgttggccatctacgtgatgatcatgttctcgtgacaacggagttcacgaagaccgtggtcgaggctcgcggacatgcttcagatctgtttcagcgccctgtgcaatggatcctttcccgccggccacctgacagtcttgatattaacttactgatgattatcagtccctatgaggctgaagtaataatgccaaagctccaggtgacgaagtctggaatcatcacgctacatatatataagccgagaaaccaactcagccacaaaccatttgaccgcctcgactttttgaatacccccaccagaactgtatcattgagagttccagagctcctcgttgtacagttgaacctattcgctggtcaactctacttcacgacgtatgatgactacctaaatacttgcagctatctaggactggccacggatgtgccaaaggagggtgaagtggtggctgcagatgggtacatactgcgtgacaaggaaggaaaatcgaagtttgacaaaagcccggtcaagttctttcaggtgctgatgtcaaagattcgccatcatgggcagaccatctcgaagactcacgtgggtggcatgctagaggggaaactacttcagagatcagacattgagggaaccagtgaagcttggttcacgtgtagtgagggaagcagtgagacgtcatcaactcagaagggctgttga

SEQ ID NO: 22151 - protein, 3133 aa, Muscodor strobelii
  misc_feature: SGI Peptide ID NO. 567514
  misc_feature (1)..(3109): NCBI GI: 225558178 Blast Desc: conserved [Ajellomyces capsulatus G186AR]
  misc_feature (3)..(3110): NCBI GI: 261189069 Blast Desc: conserved [Ajellomyces dermatitidis SLH14081] gi|239591951|gb|EEQ74532.1| conserved [Ajellomyces dermatitidis SLH14081]
  misc_feature (1)..(3109): NCBI GI: 240273418 Blast Desc: conserved [Ajellomyces capsulatus H143]
  misc_feature (9)..(3114): NCBI GI: 70981748 Blast Desc: conserved [Aspergillus fumigatus Af293] gi|66844025|gb|EAL84365.1| conserved [Aspergillus fumigatus Af293]
  misc_feature (2)..(3115): NCBI GI: 255946019 Blast Desc: Pc20g12930 [Penicillium chrysogenum Wisconsin 54-1255] gi|211588512|emb|CAP86622.1| Pc20g12930 [Penicillium chrysogenum Wisconsin 54-1255]
  misc_feature (3)..(3110): NCBI GI: 145241339 Blast Desc: An08g12160 [Aspergillus niger] gi|134077850|emb|CAK40092.1| protein product [Aspergillus niger]
  misc_feature (9)..(3111): NCBI GI: 67904426 Blast Desc: AN9200.2 [Aspergillus nidulans FGSC A4] gi|40742301|gb|EAA61491.1| AN9200.2 [Aspergillus nidulans FGSC A4] gi|259485371|tpe|CBF82339.1| TPA: conserved [Aspergillus FGSC
  misc_feature (9)..(3114): NCBI GI: 159121990 Blast Desc: conserved [Aspergillus fumigatus A1163]
  misc_feature (3)..(3114): NCBI GI: 119489886 Blast Desc: NFIA_061670 [Neosartorya fischeri NRRL 181] gi|119411063|gb|EAW21006.1| conserved [Neosartorya fischeri NRRL 181]
  misc_feature (3)..(3111): NCBI GI: 189191128 Blast Desc: conserved [Pyrenophora tritici-repentis Pt-1C-BFP] gi|187973509|gb|EDU41008.1| conserved [Pyrenophora tritici-repentis Pt-1C-BFP]
MALSRTELLYICNHVFLPPKLPQSDDWDPALENAILSAAIDALMKWKNIARPGWHEQAHAAICTLLSMQSVHQVEDGTLSERHTLDMLLNLNGAIPLYIRKQNACVVITRLNDVIAFEAFEASPTNEATMTTQGRLLRSFPGTSVAISWETFAEKQLQKTVAGVLTEMSKHEVIDMLPKVTKSGSELVEDRDTNHPGMITEVFISFLKSMGKPVSCPTIVKKMRDDVLWNNARSPWRRSPFWLLIRVALHLGFQRKGSTQASTVMYKEAMLFILCGILKQSSDMKLPSELLYCMNAKISRRLLKLGTYLDDKVLSYVKELMDGASLTNKTHWSVIQTNDARSIDLLKLSMLNFEDDRQTSLPKLDEYIKSCANRQQGANSKCFNPVSPFIITLPDSLPQLPVRFQHTERSHATIDLEAFETWVSMYCLSWSRTKRRVACKELASLISRYHALAKTHYANMPEGVSMMIITIFEMWIAIDKSAIKLSPLLRDYSPEILGMDVRNLVLPSAAAMRRLKIIQSYFSSRIASSKYPPTKLYTDFCSTESFPVRSFCASDDMKSKHKDIIKAAEEAKSAKMRELGQLQTRYNELLEKSDSMSCEYEDYTTTNDWGTVTSEQRHKSTCMKCRLDAQAKNMRIGIHEWPLPQHERKAQAIVFELCIPDHLQAWRQATFYVRCNVLGWISTGEEFNHATYILENDPHLRTYSSHSLSRIGLMSRTKAQVKTHRHEVPVSTAEESSVCVNNGLNYQYFDHEAKRFNALFTRSSSMQEELHRTCTYQLPAPSKGLQKYLYRPKEFPNGPRPNDVFENHTDFPDHMSVREARDLAILPCGQHIHWHNILAQLGCPCIDFRKQESAIFIFQAIYQSGTPSNTWRGVSNRILNDESFSNKLLDNVDAAWHRMCDNWDSAQALIVFIAIITRLLSLSTSEEIRRRCMWLLETLRNGAYQWQQQITDKALRTVDHDDYTKFRAKSADMALICGLSFDIENESLQEVLSSTPEASMFVRCSILIHEGRRVYKPSHEPILASLADRFQRLLYRASSIMRNTQPGLSDAVRQTWPDLSHSQEWKVENNATHWLTTTTLRNNNTSFKIHYDVFTGELLVNGLSSSSPPTAYTSHPSWSTFFGQTRIETMPTSVPGLQFSVNRELHDYKVNIGLGRTTNPRGGISDLIIQASDSRTKYETVPAHLFEDVFPRHFISDYVCWYQHETGSLEFRPMSTPWKPDDTKWVLSKSGAGWTLAKDMRTVLSLNSATSLALTDILSPLVGPADSIVYLHSSSIPFVEIEIPALQHGFFLTQGESSLRSREYDGMILDKDQYIGTLIGLKNKLMLRDGKSRLLLVPEGDLKWGITEHHVQISISAKSMTRVHEFRVDDILGRLIDNGDMHGKLYLSYLHALTSHCLSDPLTSMTGVEQALEILNSAAVKSFDRLRQEDIKLLADIARLTPTRKYYPENEQVMQSVCWAPGLRQLPQHDGLYAAVDAIFEHARRMCVFYPSNDPTQLKMCTHIDTNRFLLERCRIQSSAFRVSEYGAEKHTTKYDTPYSSRDQDQTSQRANNAYVLSSIIFHGRVTLHWEALRNGQLWYNMLAVTELLPPTEVLHISELRYTAAAANQGLSLYLWLVIRQVLSKQSGEANRFDIMMWLSALGAKTQADVRLLQILALSFTTPALKCIRRPELTSSCKPPAGYRVTPQLVTPAVESNLHSQQSSPEGQLTAHVDESISDFKRRRDQQYQANKDEAVKETVKAICNLWPRRSVSLETIKHKIADYIKIAETEALATKLFQERFKNHLIFEYLKKIENCLSQLSRHHISSPVATPMIPVMAPSRTPAFVSMRNLFIASAPAIEVTASINLSNSPDEVVSTQARSLGNLIHALRAKAPQSSYERSYIDELENSLRSLNNHQSALLTYSTSKDHSVERFENLLVETKTIVNGIYASIALAMRAAQDRIPQEHGPRLSPITLLSHLRHQQWDFLDESWKKCIVQYALAIVALQKAERLVRMAGSDDVDDLIKEMANIGHENWQPFDHPEWLLLEVENSIIIRDAQADIACEMIRPSSGRNAVMQLNMGEGKSSVIIPMAATELSDGSVLVRVIVAKPQSKQMAQMLVSKLGGLLNRRVYHLPFSRALNVRSESITTAIDSLIKECRVNRGVLLVQPEHLLSLHLMGVEYSCPGDTGKQIIAKALVNIQDFFDSHSRDIIDESDENFSPKFELVYTKGSQKPIELSPTRWICMQQVLDRVRSLATDIKTEFAGSIDVEVRNEGGFPRIRVLKADAGKAISEIVAKDICKNGFEGFPIARQSKHVREAVFRYISQPTLTAEEINAVEGAERQGFWSESTKPLVQLLRGILGRGVLSFALCQKRWRVNFGLAPTRVPPTKIAVPFRAKDNPSLRSEFSQPEVVILLTCLAYYYGGLLDKDLFVTMDHLMNSDQACIEYDAWIRDAPTMPLSFRQLEGVNIKDHPQCIHDVFPHLRYAKAVVDYFLAHVVFPRAVREFPHKLSASGWDIGKKKAHVTTGFSGTNDSKRLLPLDINHIDLQSQNHTNALVLDYLLQEENTVLVLPDEACPYKDAERFLDTVVRLDNDRPVRVILDVGAQILELDNKGVAKSWLEAETDGETKAVVYVNDDDELCVIDRQGRIEPLQTSSYASRMQSCLVFLDEAHTRGIDLRLPTHYRAAVTLGANLTKDRLVQACMRLRKLGKGQSVVFCVNSEIRSRILECTGISSNGPIRVQDILHWTMKETIREHQRHVPLWAMQGKRFINQESLWQSCSIDGKTTVTTDIARQFLEKESRSIETLYSPLRAEVVSGAQPHLSERDLRRLHEIDTRCKEIGTFDLSFGTFEEEQERELAPEIEQERQTELKASAKPVDHHFHPDIQKFLDTGCVLPNSKAYVPAFEALRNTTAAEHFDVGHLRDDHVLVTTEFTKTVVEARGHASDLFQRPVQWILSRRPPDSLDINLLMIISPYEAEVIMPKLQVTKSGIITLHIYKPRNQLSHKPFDRLDFLNTPTRTVSLRVPELLVVQLNLFAGQLYFTTYDDYLNTCSYLGLATDVPKEGEVVAADGYILRDKEGKSKFDKSPVKFFQVLMSKIRHHGQTISKTHVGGMLEGKLLQRSDIEGTSEAWFTCSEGSSETSSTQKGC

SEQ ID NO: 22152 - DNA, 2706 bp, Muscodor strobelii
  misc_feature: SGI cDNA ID NO. 567515
  misc_feature: Encodes the peptide sequence at SEQ ID NO 22153
atggtaacacaaaaacacgctccgcaaaacgctgccaacggaaacaacacctccgaacccccgcgcatcgaactatggtcagcaacagattccgaagtagactcagaccgaatatgggatgagcagctacccccagccatggatcagtcgacagacggtagcgcgaacggccatgcagcttcaacagtgccggaccctctacggcccggtgctggccccagcaactccagctacggacaggaagagcagaacccatgggacgacggcgggaaggcgggagatgtatcaacgagacgagaatcgccagtgaaacgagaggaggtaccgaaagcgctggtgcctggtctttcgagatcagagactaatcccttcaagcggaaagctgtcccatcgacatcgccaacccctcctcagcctcagccacaacccgcttcgcaaccaccaaccgacccattctctttgctccagatcgatgagtcctcggaccagagcacgaatccgtggcagcctgcgcttgacatgaacagggcagaaggtcaacctcagcccacatcctcaataccagatcaagactctggcagtgatatatgggggctctgccctcaatccacgggaaactctgcgccttgggacgatgtaccgctaccggtgccgtcccacccggtactcacgaaaccgggcgaagtgggggatcttctaggcaacgagaatgcgtgggacgaggttgaaacaagcaataagggcaaacaagtagcagtgtctcaatcgcagtcacctctcgtcgatgactggaacgtcattgatcgtgagtctgcaactgaacctagacccggaacactttccagacaaagcacgtgggagaatttcgtggatgcagatgatggtagagcaaaggagaacatgaaacccgaatctgtccccgaagctatcactaacaccgagccggaagcgccttctctgccgcctagaaatgcagccgaagcagcccctccgcaacctccacggccgtccgtgacaggcactgaggagcagccagagccaaagccctataaaataaagaatatcacatggtttgatgcaaaagcatctaataacccaagggaatcacctatactactgcagaacgccaatggtccttgcccgttgcttgcgttggtcaacgcgctaacattgacaacgtcgcccgacaatcaaaacgaggctaagctcgttagtgccttgaggagggctggggatgcgatcttcctccacgaactcctcccagttgtcgtagatgagttaatgacaaggcgactcgataggagagcaccacaagacaatggctcgacgccccaagacgatgactggctcaataggctaggtgatctttacaagtttctcgaagggctacatactggaatgaacgtcaacccgcgctttgtacctacccgtgaagctatcgcagcccatactcgagcctctccgtcgaaccgcgatgttggcattcccggcacatttgaagacacccctgacatgacattgtattctctattcgacatcccgcttattcatggttggctgcctcctatgggtgatccagtatatggggctctcgagaggcacgctacctcatatgaagatacccagactctcctgtttcgagaagaagagctcgaagaaaaatttagtacttcagaggcaggactcacagaagacgagcaacaattatatcaagacatcatttccatcaaatcctttctttcctttacagcaacacagctcacgccattcggcctcgaggtgatcacgaaagcactgaaaccgggagaagtagcgattcttttccggaatgaccatttctctaccctttaccggcatccgcagagctcgcggcttttcacactccttacagatttcagctatgaaaatcgtaatgaatttatatgggaatcgctggtggatgttacaggaggacagacccagcatttctctggtgactttcgtatagtcagcggtgataatgaccatcacgagtggtacgacagtccggaggcaagcacttccaatggtaactcctggcagacggtgcaaaatcgtcgaccgcgtaataatcaacagaacgaaccagcagcagacgccatgccagtatcaccacacgaacaagaggaccgagatctggctctagcgttacagctacaggaggaagaggacgagcggcatcggaacgaacaggccgcacgacgccgtgagagtcaactctcagagcaattgcttgagcagcaaggcagggatagcaacagccaaacaggcagaacccgacccggctcagtcagcaattccgcacgagctggctcgtctactaccagcttgccaccgccgaggggtagttccgttcgacgtggtcctccagctcagacccagcaggttaggagtctcatcccgccacgaactaggagaccagcagatgatgaggccgaggacgccccgccgtcctatgaacaggctgcgaagtcgacgccatatgtaccgcccgctggccacccgagtcatcccgagagcagccctaggagctcggcgagacggtcaacgggcccgtcgcaaagtgggccatcagtcgctgggccgagcacgcttagacgcgacagacaaagtatgtctgcgtcttcgggccaggcaggagggagtggaaacgggaatgggaaagagagggattgcgtcattatgtag

SEQ ID NO: 22153 - protein, 901 aa, Muscodor strobelii
  misc_feature: SGI Peptide ID NO. 567515
  misc_feature (386)..(548): Pfam Id: PF04424 Pfam Desc: Domain of function (DUF544)
  misc_feature (498)..(521): Pfam Id: PF04424 Pfam Desc: Domain of function (DUF544)
  misc_feature (1)..(901): NCBI GI: 39943790 Blast Desc: MGG_03906 [Magnaporthe grisea 70-15] gi|145014607|gb|EDJ99175.1| MGG_03906 [Magnaporthe grisea 70-15]
  misc_feature (56)..(865): NCBI GI: 171688862 Blast Desc: protein product [Podospora anserina] gi|170944393|emb|CAP70503.1| protein product [Podospora anserina]
  misc_feature (56)..(901): NCBI GI: 46109474 Blast Desc: FG01619.1 [Gibberella zeae PH-1]
  misc_feature (1)..(848): NCBI GI: 85079926 Blast Desc: NCU03336 [Neurospora crassa OR74A] gi|28881174|emb|CAD70356.1| conserved [Neurospora crassa] gi|28917510|gb|EAA27209.1| [Neurospora crassa OR74A]
  misc_feature (49)..(848): NCBI GI: 25465804 Blast Desc: NCU03336 [Neurospora crassa OR74A] gi|28881174|emb|CAD70356.1| conserved [Neurospora crassa] gi|28917510|gb|EAA27209.1| [Neurospora crassa OR74A]
  misc_feature (63)..(901): NCBI GI: 261357273 Blast Desc: DUF544 domain-containing protein [Verticillium albo-atrum VaMs.102]
  misc_feature (54)..(901): NCBI GI: 256730708 Blast Desc: NECHADRAFT_102933 [Nectria haematococca mpVI 77-13-4]
  misc_feature (159)..(901): NCBI GI: 156063432 Blast Desc: SS1G_01834 [Sclerotinia sclerotiorum 1980] gi|154697168|gb|EDN96906.1| SS1G_01834 [Sclerotinia sclerotiorum 1980]
  misc_feature (63)..(854): NCBI GI: 116199779 Blast Desc: CHGG_08045 [Chaetomium globosum CBS 148.51] gi|88179324|gb|EAQ86792.1| CHGG_08045 [Chaetomium globosum CBS 148.51]
  misc_feature (149)..(901): NCBI GI: 154319185 Blast Desc: BC1G_02544 [Botryotinia fuckeliana B05.10] gi|150856975|gb|EDN32167.1| BC1G_02544 [Botryotinia fuckeliana B05.10]
MVTQKHAPQNAANGNNTSEPPRIELWSATDSEVDSDRIWDEQLPPAMDQSTDGSANGHAASTVPDPLRPGAGPSNSSYGQEEQNPWDDGGKAGDVSTRRESPVKREEVPKALVPGLSRSETNPFKRKAVPSTSPTPPQPQPQPASQPPTDPFSLLQIDESSDQSTNPWQPALDMNRAEGQPQPTSSIPDQDSGSDIWGLCPQSTGNSAPWDDVPLPVPSHPVLTKPGEVGDLLGNENAWDEVETSNKGKQVAVSQSQSPLVDDWNVIDRESATEPRPGTLSRQSTWENFVDADDGRAKENMKPESVPEAITNTEPEAPSLPPRNAAEAAPPQPPRPSVTGTEEQPEPKPYKIKNITWFDAKASNNPRESPILLQNANGPCPLLALVNALTLTTSPDNQNEAKLVSALRRAGDAIFLHELLPVVVDELMTRRLDRRAPQDNGSTPQDDDWLNRLGDLYKFLEGLHTGMNVNPRFVPTREAIAAHTRASPSNRDVGIPGTFEDTPDMTLYSLFDIPLIHGWLPPMGDPVYGALERHATSYEDTQTLLFREEELEEKFSTSEAGLTEDEQQLYQDIISIKSFLSFTATQLTPFGLEVITKALKPGEVAILFRNDHFSTLYRHPQSSRLFTLLTDFSYENRNEFIWESLVDVTGGQTQHFSGDFRIVSGDNDHHEWYDSPEASTSNGNSWQTVQNRRPRNNQQNEPAADAMPVSPHEQEDRDLALALQLQEEEDERHRNEQAARRRESQLSEQLLEQQGRDSNSQTGRTRPGSVSNSARAGSSTTSLPPPRGSSVRRGPPAQTQQVRSLIPPRTRRPADDEAEDAPPSYEQAAKSTPYVPPAGHPSHPESSPRSSARRSTGPSQSGPSVAGPSTLRRDRQSMSASSGQAGGSGNGNGKERDCVIM

SEQ ID NO: 22154 - DNA, 858 bp, Muscodor strobelii
  misc_feature: SGI cDNA ID NO. 567516
  misc_feature: Encodes the peptide sequence at SEQ ID NO 22155
atggcaatcgtccagggttggctccccgcgagccaggagaattgggagtttttgatgtactggtggcgtctttacttcctttatggctcaatgcaatggttctcctcgtggtatgcgatgggcaagacgtcggttgagagcaagctcaacatcccggggcgcatcgcctggttcacgatggaaatcccgggcttcatgacgctgctctacatcatgaggacactgccggctgagcatggcatcgaagacctcccatggcagaacaaggtcctcgcttcactgtttgtcatgcactacatctaccgcgctgtcctctttcccttcctccagccctccatgtctcccatccacgtcgtgatctgggcatcggccatcttcttccaggtatgcaatggcaccgctatcggaggctggttggcagcatatggccctacttctcaagccgagtgggaggctcaaggatactctgatgctcggttcgcaatcggcctggttgtcttcttcgtcggactgtgcggcaactacttctcggacgaggaactacgtgagatccgacggggcgagctggcacgacaggcaaaactcaagtctcaaggaaagactgtcgacaagcactatgaggtacctcagaacggtctcttcaagtacatgctgttccctcactacttcatggagtggattgagtggactggatactggattgccggtggttttgctttcactcctgccatgtgcttcctcttaaatgaggtctctgctatgttgcctcgtgctgtttctggtggccagtggtacaaggagaagtttggagaggagaagatcaaggggaagtgggtcatcattcctggcgtttactaa

SEQ ID NO: 22155 - protein, 285 aa, Muscodor strobelii
  misc_feature: SGI Peptide ID NO. 567516
  misc_feature (114)..(285): Pfam Id: PF02544 Pfam Desc: 3-oxo-5-alpha-steroid 4-dehydrogenase
  misc_feature (1)..(285): NCBI GI: 261357272 Blast Desc: steroid 5 alpha-reductase [Verticillium albo-atrum VaMs.102]
  misc_feature (1)..(285): NCBI GI: 171688864 Blast Desc: protein product [Podospora anserina] gi|170944394|emb|CAP70504.1| protein product [Podospora anserina]
  misc_feature (1)..(283): NCBI GI: 164427342 Blast Desc: NCU03337 [Neurospora crassa OR74A] gi|157071703|gb|EAA27210.2| conserved [Neurospora crassa OR74A]
  misc_feature (1)..(283): NCBI GI: 25465807 Blast Desc: NCU03337 [Neurospora crassa OR74A] gi|157071703|gb|EAA27210.2| conserved [Neurospora crassa OR74A]
  misc_feature (1)..(285): NCBI GI: 256730503 Blast Desc: NECHADRAFT_89636 [Nectria haematococca mpVI 77-13-4]
  misc_feature (1)..(284): NCBI GI: 39943788 Blast Desc: MGG_03905 [Magnaporthe grisea 70-15] gi|145014606|gb|EDJ99174.1| MGG_03905 [Magnaporthe grisea 70-15]
  misc_feature (1)..(284): NCBI GI: 154297747 Blast Desc: steroid 5 alpha-reductase [Botryotinia fuckeliana B05.10] gi|150858414|gb|EDN33606.1| steroid 5 alpha-reductase [Botryotinia fuckeliana B05.10]
  misc_feature (1)..(284): NCBI GI: 169604292 Blast Desc: SNOG_05157 [Phaeosphaeria nodorum SN15] gi|111066428|gb|EAT87548.1| SNOG_05157 [Phaeosphaeria nodorum SN15]
  misc_feature (2)..(285): NCBI GI: 116199777 Blast Desc: CHGG_08044 [Chaetomium globosum CBS 148.51] gi|88179323|gb|EAQ86791.1| CHGG_08044 [Chaetomium globosum CBS 148.51]
  misc_feature (1)..(215): NCBI GI: 46109472 Blast Desc: FG01618.1 [Gibberella zeae PH-1]
  misc_feature (41)..(235): SWISSPROT Homolog: EC 1.3.99.5 3-oxo-5-alpha-steroid 4-dehydrogenase
MAIVQGWLPASQENWEFLMYWWRLYFLYGSMQWFSSWYAMGKTSVESKLNIPGRIAWFTMEIPGFMTLLYIMRTLPAEHGIEDLPWQNKVLASLFVMHYIYRAVLFPFLQPSMSPIHVVIWASAIFFQVCNGTAIGGWLAAYGPTSQAEWEAQGYSDARFAIGLVVFFVGLCGNYFSDEELREIRRGELARQAKLKSQGKTVDKHYEVPQNGLFKYMLFPHYFMEWIEWTGYWIAGGFAFTPAMCFLLNEVSAMLPRAVSGGQWYKEKFGEEKIKGKWVIIPGVY

SEQ ID NO: 22156 - DNA, 1891 bp, Muscodor strobelii
  misc_feature: SGI EST ID NO. CUFF.52077.0
  misc_feature: Variant of the nucleotide sequence at SEQ ID NO 22154
cggcgccgtgcatgaacggatcaccggtctctattttctttactcagcactctgttctttaagatcctttactcacttgttgctttccgcgctctctcgctctggtgttacgaattctctttcctgaaattttcgcgcgaaatacacattgcctcatttcatttcttttgctgtcatggcaatcgtccagggttggctccccgcgagccaggagaattgggagtttttgatgtactggtggcgtctttacttcctttatggctcaatgcaatggttctcctcgtggtatgcgatgggcaagacgtcggttgagagcaagctcaacatcccggggcgcatcgcctggttcacgatggaaatcccgggcttcatgacgctgctctacatcatgaggacactgccggctgagcatggcatcgaagacctcccatggcagaacaaggtcctcgcttcactgtttgtcatgcactacatctaccgcgctgtcctctttcccttcctccagccctccatgtctcccatccacgtcgtgatctgggcatcggccatcttcttccaggtatgcaatggcaccgctatcggaggctggttggcagcatatggccctacttctcaagccgagtgggaggctcaaggatactctgatgctcggttcgcaatcggcctggttgtcttcttcgtcggactgtgcggcaactacttctcggacgaggaactacgtgagatccgacggggcgagctggcacgacaggcaaaactcaagtctcaaggaaagactgtcgacaagcactatgaggtacctcagaacggtctcttcaagtacatgctgttccctcactacttcatggagtggattgagtggactggatactggattgccggtggttttgctttcactcctgccatgtgcttcctcttaaatgaggtctctgctatgttgcctcgtgctgtttctggtggccagtggtacaaggagaagtttggagaggagaagatcaaggggaagtgggtcatcattcctggcgtttactaagtgtaccattcgcgcatcatgtatatacctgatacatcagttgccgacaagtcggattccctatgatcgtacccatctcaatcggcagccaagaactcgatcaacacggatcatctgactcacatcatgtatagtattttcaccaattgtcaaccctgtcgtttactcgcgtccgctaacatcatcctcaaatgtttacttaccacgcgcacatatcgagtcacgatcgcacgtaatggtttatcccacttgccacttgtgtcactgcttcgtgcgttcgtattatctcgcgatttactctgcagcgtgtcaatatcgtgttgcatggtttgctgccatagcaaagctttcgtacgacactgtcaaccttgctagcgctaagtgcccccagtaacgatatgtaggaacacacggacgctgttctgtacagacaccttcgtggcacatatgtaaatatgtgctatatgaccccgcactgtgttaaggcccaggggctagcgataccaactattcatgtgttggttgtgtctgcatgaagcgcattggagcgggccttaggagaggagtgttcgctagtgacttacgacacgcgagacttcaacgtccgcatcgtatcttgcttcatttgtgcatttcaataggaatggttggtttttcttcgtttcatttacaaggggtggacatcatcgaccgcaatggaaataccctctcgactatgcgataagtgtaaagccatccagttcaacgataccgagtggggaggctttgcacaggagacgcatgatggaaggacagtcctcgcactacccaaagcaagccacttcccacggacttttcatgttgatattggtatcgggg

SEQ ID NO: 22157 - DNA, 2688 bp, Muscodor strobelii
  misc_feature: SGI cDNA ID NO. 567517
  misc_feature: Elevated expression when VOC is produced
  misc_feature: Encodes the peptide sequence at SEQ ID NO 22158
atggttcacttttttcaagcatggtcctttgctctcctcgcaattcttgcagtccaagtccagtccaacctccagtataatgtaacaacgacgattcctggtgtgcctgaccagacctctgcgcccaactaccgttcaggaggagatactacagaatcggatgttgtcaaagacgcttatatcattcttttcgacgacagcagcaaatttaatgagactttcttgcaggatgtccaacaagtcacaggtagtaaagctactcttcgagtaaacctccttggcgacttgctcaatgctgtgtctatccagttggagaccactccaacacgggtagatgccgcggaggcgattaagaagttagctggtgtcctcgcagtagaccccatccgaatccaccgccagccggcgatccagtttcagccagtcaaagattctagttccaacttatttaaacgtcaaaaacctgtcgatggcaatttgacgagcccggacatgatgactcaagttgatcagctacgggcgatggggtataatggctcaggcattcggattgctatcattgacgcgccaatcgattacactcatccagctcttggcggctgctacgggcctggttgtcttgtgtcatttggcagaagctggctcgagcccgtggatgccgacgatcccacccctgaatgcaaaagccatgctactgcgctcgctggtgtcattgcggctcaacccaatactgtgggattcactggcgtcgctccgggggtacagctcggtagttatgctatttttggctgtacctacggggggaatgatgaaaaacttctccaagccctgcaacagggtcttgacgacaacgtcgacatccttgtgtacagcgccggatataacaatggatggacaacacttactctcaatcttgccttcaatgcaattattgaaaagggtataatgatcgtaggacccgctggcaattcgggtgaaaacggcatcttcaactcaattcatccggcagacgcacttgacgtgttaggcgtcggggccgttgatcctctgctaaaaactgatctagccaacgtctcattgtccacaattgatggcaaagtctctgagtttgcttggcgcgatggcacagctggatcgcccaatactattggctggggcaatactgttctgcctctttacatcaatcccaacaagacacaccctggaggtggatgcctcactctcccaagcaatgccccagatctatctagtcacatcgttcttatgctacggccaggatgttccgaccaagacattgctaccaatgcaaagagtgctaagtacgtaatcatcggaaataacaacaaagatcaagtcatagaggttccccgtgtcacgcaaccctccatacaagccattgcgatggtagacaatcagacggcatggaattgggttcgagccctgactgctggaaaacaagtcacattgaacatgacctttgatcctttcaaacgacgtcaacttgtcgaaaatagtcataatacaggtcgcgtgagctctttcacaggttggggcccgagttttgatggttatataacttccagccttgtagccccgggctcccaacttctcactaccacgcctgtgggaccagggcaacagggatatgccttggtatcaggcacatccgtggcaggcccgtacgctgctgccgttgccgcgcttgttgctcaaaagcgcaagatcaaggactggaagatcctcagtagtctcctagcaaccactgctcagccgctcaagcgagcgactgacaccagtgtgtgggacgacccgggcgtcgagcttgcttcagtcgcgcaacaaggaggaggtttagtacaagcgtacaatgcagcaatggccccatgtgttcttagcgtaaagtccctcaacttcaatgatacgggacatcgcaagaacttaaccttctccattaccaacacctcgcctaagagcataacattcgatctgcacaacatccctgcaggctcagtctacaccttcaaggaggatgacttagagaacccgggtgattacgatgagattcgagacaaactatatgtcaaggacgccccaggagtgctcatttttactccggcgaaagttactatacccccgaacggcggtgtcaccgaggtcgaagttgttgcgaaagcgccaaagttgaatcagacgcgactcggcgtattctcgggctgggtcgcactcaacggctcaacagggttcaactacacgctcccatatttgggtatagcaggaagcctgagcaacacgcctgccattaagtcattgatgtggcgcttggcggatcccaacgcattgccaggtgaagacccccggccaatcatcccagcaggccgtatcgttcatcttccaagcgaagttccacttctacagatcaatatcggcatgggtctacgcagcgtccagtgggacgtgaaggacgtgacaacaggagcagtgcttggcacagcagggctacctggatttgaacggctttcgcgcgtcagccttttgatctcctggagctgcactttcgccaatggaacaaggttgccgtcggggaagttcaagcttgtggcgaggtcgcttaagacttttggtatcgcctcgcattctgctgattacttggctctggagtctcctgaattggatattgcttgggagtaa

SEQ ID NO: 22158 - protein, 895 aa, Muscodor strobelii
  misc_feature: SGI Peptide ID NO. 567517
  misc_feature (162)..(617): Pfam Id: PF00082 Pfam Desc: Subtilase family
  misc_feature (162)..(600): Pfam Id: PF00082 Pfam Desc: Subtilase family
  misc_feature (55)..(874): NCBI GI: 85086707 Blast Desc: NCU00263 [Neurospora crassa OR74A] gi|28918829|gb|EAA28498.1| conserved [Neurospora crassa OR74A]
  misc_feature (83)..(894): NCBI GI: 116208730 Blast Desc: CHGG_03658 [Chaetomium globosum CBS 148.51] gi|88184255|gb|EAQ91723.1| CHGG_03658 [Chaetomium globosum CBS 148.51]
  misc_feature (55)..(895): NCBI GI: 115443408 Blast Desc: [Aspergillus terreus NIH2624] gi|114188380|gb|EAU30080.1| [Aspergillus terreus NIH2624]
  misc_feature (59)..(894): NCBI GI: 46139915 Blast Desc: FG11472.1 [Gibberella zeae PH-1]
  misc_feature (52)..(894): NCBI GI: 145608997 Blast Desc: MGG_09073 [Magnaporthe grisea 70-15] gi|145016463|gb|EDK00893.1| MGG_09073 [Magnaporthe grisea 70-15]
  misc_feature (95)..(895): NCBI GI: 16973362 Blast Desc: subtilisin-like serine protease PR1C [Metarhizium anisopliae var. anisopliae]
  misc_feature (45)..(894): NCBI GI: 145583581 Blast Desc: serin endopeptidase [Hypocrea lixii]
  misc_feature (52)..(894): NCBI GI: 256729014 Blast Desc: NECHADRAFT_39895 [Nectria haematococca mpVI 77-13-4]
  misc_feature (54)..(894): NCBI GI: 171685226 Blast Desc: protein product [Podospora anserina] gi|170942574|emb|CAP68226.1| protein product [Podospora anserina]
  misc_feature (40)..(894): NCBI GI: 256726389 Blast Desc: NECHADRAFT_39203 [Nectria haematococca mpVI 77-13-4]
  misc_feature: Useful for introducing or modulating the production of volatile compounds
MVHFFQAWSFALLAILAVQVQSNLQYNVTTTIPGVPDQTSAPNYRSGGDTTESDVVKDAYIILFDDSSKFNETFLQDVQQVTGSKATLRVNLLGDLLNAVSIQLETTPTRVDAAEAIKKLAGVLAVDPIRIHRQPAIQFQPVKDSSSNLFKRQKPVDGNLTSPDMMTQVDQLRAMGYNGSGIRIAIIDAPIDYTHPALGGCYGPGCLVSFGRSWLEPVDADDPTPECKSHATALAGVIAAQPNTVGFTGVAPGVQLGSYAIFGCTYGGNDEKLLQALQQGLDDNVDILVYSAGYNNGWTTLTLNLAFNAIIEKGIMIVGPAGNSGENGIFNSIHPADALDVLGVGAVDPLLKTDLANVSLSTIDGKVSEFAWRDGTAGSPNTIGWGNTVLPLYINPNKTHPGGGCLTLPSNAPDLSSHIVLMLRPGCSDQDIATNAKSAKYVIIGNNNKDQVIEVPRVTQPSIQAIAMVDNQTAWNWVRALTAGKQVTLNMTFDPFKRRQLVENSHNTGRVSSFTGWGPSFDGYITSSLVAPGSQLLTTTPVGPGQQGYALVSGTSVAGPYAAAVAALVAQKRKIKDWKILSSLLATTAQPLKRATDTSVWDDPGVELASVAQQGGGLVQAYNAAMAPCVLSVKSLNFNDTGHRKNLTFSITNTSPKSITFDLHNIPAGSVYTFKEDDLENPGDYDEIRDKLYVKDAPGVLIFTPAKVTIPPNGGVTEVEVVAKAPKLNQTRLGVFSGWVALNGSTGFNYTLPYLGIAGSLSNTPAIKSLMWRLADPNALPGEDPRPIIPAGRIVHLPSEVPLLQINIGMGLRSVQWDVKDVTTGAVLGTAGLPGFERLSRVSLLISWSCTFANGTRLPSGKFKLVARSLKTFGIASHSADYLALESPELDIAWE

SEQ ID NO: 22159 - DNA, 3638 bp, Muscodor strobelii
  misc_feature: SGI EST ID NO. CUFF.52072.0
  misc_feature: Variant of the nucleotide sequence at SEQ ID NO 22157
agggtatcggtgcctcgacaaatttgctccaatcttgttggacaggtctcccttcgccggcatgaggtgcttgcatgagcctttcaaaattcgtcaggaggcacaaaaccatttgccaactacaaaataaacggcctttctcaaaaactggaacagaaagattctcgtcaatgccttttacattcgtttattgatcctgatatctgaaattactcactttagtcgctctttctatcgggctagtagtcatggttcacttttttcaagcatggtcctttgctctcctcgcaattcttgcagtccaagtccagtccaacctccagtataatgtaacaacgacgattcctggtgtgcctgaccagacctctgcgcccaactaccgttcaggaggagatactacagaatcggatgttgtcaaagacgcttatatcattcttttcgacgacagcagcaaatttaatgagactttcttgcaggatgtccaacaagtcacaggtagtaaagctactcttcgagtaaacctccttggcgacttgctcaatgctgtgtctatccagttggagaccactccaacacgggtagatgccgcggaggcgattaagaagttagctggtgtcctcgcagtagaccccatccgaatccaccgccagccggcgatccagtttcagccagtcaaagattctagttccaacttatttaaacgtcaaaaacctgtcgatggcaatttgacgagcccggacatgatgactcaagttgatcagctacgggcgatggggtataatggctcaggcattcggattgctatcattgacgcgccaatcgattacactcatccagctcttggcggctgctacgggcctggttgtcttgtgtcatttggcagaagctggctcgagcccgtggatgccgacgatcccacccctgaatgcaaaagccatgctactgcgctcgctggtgtcattgcggctcaacccaatactgtgggattcactggcgtcgctccgggggtacagctcggtagttatgctatttttggctgtacctacggggggaatgatgaaaaacttctccaagccctgcaacagggtcttgacgacaacgtcgacatccttgtgtacagcgccggatataacaatggatggacaacacttactctcaatcttgccttcaatgcaattattgaaaagggtataatgatcgtaggacccgctggcaattcgggtgaaaacggcatcttcaactcaattcatccggcagacgcacttgacgtgttaggcgtcggggccgttgatcctctgctaaaaactgatctagccaacgtctcattgtccacaattgatggcaaagtctctgagtttgcttggcgcgatggcacagctggatcgcccaatactattggctggggcaatactgttctgcctctttacatcaatcccaacaagacacaccctggaggtggatgcctcactctcccaagcaatgccccagatctatctagtcacatcgttcttatgctacggccaggatgttccgaccaagacattgctaccaatgcaaagagtgctaagtacgtaatcatcggaaataacaacaaagatcaagtcatagaggttccccgtgtcacgcaaccctccatacaagccattgcgatggtagacaatcagacggcatggaattgggttcgagccctgactgctggaaaacaagtcacattgaacatgacctttgatcctttcaaacgacgtcaacttgtcgaaaatagtcataatacaggtcgcgtgagctctttcacaggttggggcccgagttttgatggttatataacttccagccttgtagccccgggctcccaacttctcactaccacgcctgtgggaccagggcaacagggatatgccttggtatcaggcacatccgtggcaggcccgtacgctgctgccgttgccgcgcttgttgctcaaaagcgcaagatcaaggactggaagatcctcagtagtctcctagcaaccactgctcagccgctcaagcgagcgactgacaccagtgtgtgggacgacccgggcgtcgagcttgcttcagtcgcgcaacaaggaggaggtttagtacaagcgtacaatgcagcaatggccccatgtgttcttagcgtaaagtccctcaacttcaatgatacgggacatcgcaagaacttaaccttctccattaccaacacctcgcctaagagcataacattcgatctgcacaacatccctgcaggctcagtctacaccttcaaggaggatgacttagagaacccgggtgattacgatgagattcgagacaaactatatgtcaaggacgccccaggagtgctcatttttactccggcgaaagttactatacccccgaacggcggtgtcaccgaggtcgaagttgttgcgaaagcgccaaagttgaatcagacgcgactcggcgtattctcgggctgggtcgcactcaacggctcaacagggttcaactacacgctcccatatttgggtatagcaggaagcctgagcaacacgcctgccattaagtcattgatgtggcgcttggcggatcccaacgcattgccaggtgaagacccccggccaatcatcccagcaggccgtatcgttcatcttccaagcgaagttccacttctacagatcaatatcggcatgggtctacgcagcgtccagtgggacgtgaaggacgtgacaacaggagcagtgcttggcacagcagggctacctggatttgaacggctttcgcgcgtcagccttttgatctcctggagctgcactttcgccaatggaacaaggttgccgtcggggaagttcaagcttgtggcgaggtcgcttaagacttttggtatcgcctcgcattctgctgattacttggctctggagtctcctgaattggatattgcttgggagtaatgactgactgcagtgttttgcgtattactctgtcacatgttgcaaaaatgtacaagcgagagactaattatctacacaatgagtttcatcttctctgaaagctcttcacctcgaatatcactgtggcaaagaagactcggctttttgtacttcgaaacatgacacatctccatcctctggaaacccaaagtcgaaatttgatcaattagtcattgatcctttcaccgaatttttattcacaacaggccgcctattctcacgacaaatggttcattagtgagctggccccacaggcaagagtgactgcagtcgacggagcagctcggcattcgaagggcttccgaaagtgcaggtggaatacaattgacaaatttttcaagttgattttgagttgtgctttgaatatgagatactaaacaaagtgaagtcaagatcttttcgaatccgcagacacgcgaaactacctataaatcgtatgcccagaggtccagctcgtgggcacttcaaggtctggaacgttttagagtgtgatgggcttgctatgctttcgttgggaatgacttcattcttatagttttagacaagttccaaagtcactatttcggagcaatcaaagacttttagtccgccatcttcatggatagacgaataaaagacgcctaccctaacgtattgttttgtgctagggaggctgtagatgac

SEQ ID NO: 22160 - DNA, 1824 bp, Muscodor strobelii
  misc_feature: SGI cDNA ID NO. 567518
  misc_feature: Encodes the peptide sequence at SEQ ID NO 22161
atgtggtgggacgcatcacggatcgaaaccactgtcacgcgacagttcgtgtgctcacatctcatccccgccgagatcgaacgacttgacagaccgttgggatttggagacggactcactgacggcacatggtatgtagcaatatactcgcagcgccaactttattatacttcatatacttatactaatcgtctctcaaagaaagactgggaatgggtcgatgagaaagcaaagcgcatcttcctgatcctattagatctaggtataccagatcagatcttcggcatcatcgacgatagctgggatgacacagatctacccatcgcactggacgaagtagaacgactgggtcttaccgctggaaaagaccaaagaacggtcaagaagttctacgcgcggcaatatcactatcttgtacggtatatcgagaaaggcgaccatgttatctatcaagacgacgatgtggtcccggcttgccttgccgacaagcggcctgggttgaccactagcagcaatacgactgaccgaattgagctacccaacaaacccgaccaaatattctctcgccgccgtattcctataggggacggcccgggcatgatccccaacgatgctctcatgatcgagataaatagtacgagaaatctacagcacgagcatgtctcatcatattacgcctcatatacccaccaaggcgccgcctatgtcattttctcacacactagcgagttgacagtcaagtcccttttgtcgaccacccccggtcctctcaaatcattagcaaagcaagagcgaagacgcatggtcatgaactgggtgcactgcctggcggacacattatgctatatacataagagaggtcgatcgcacggcaatatcaagccctcaacgatactcctcagcgccaaccacgacatattctacgctagtacatcccgcctaggtgccgaggcatccgtcgccgcctcggagaaatccaccttcgaccgagagtcctacgactacgcagcaccagaacagtggtaccgaccctccaacatccaccggcgtgccacaccgacgtcatcgtcctggttcagcaactcatccgacagcaacacattccacattaaccgtggcgcgaccgagcacactccgtcctcggccatgcatacaccgaccccgcacctcgatcctcaagccgccgacgtcttctcccttggctgtgtcatcctcgaacttctaggcctgcaactcaaacgcacatcccggtccttcgcttcccaccgcgctgccaaacacaagtcggcaggtcgcggcggcgcagtgctcgactcgtctttccacaagaacctcggccaagtcgagtcctggatgggcggcttagcaaaagacgcgactaaaaaagacgaccctgttttcctcgggtttgcaccgctcctgcacgtcgtagcgcgaatgctatccgtgctcccgcacgagcggccttctgctttagaggtagagcaggccatgtacaagatcctacgcgagaaatgcggaatcactgagccgcactgcgtacatcaatatgatgctggttttgacttgggggtcgcgggattgagcattgatgagaaaggtgacaatttcagcattgctacaaaacgacatagcagtagcccggggagtcctcgccccgggtcaagactaagcattcatcgacggagtttccaggatagggactcgcaattcacgagttcttcgggaagtgcggcaagcttgagggcccctgggcaacgaccggcgtggcaggagaatctgttcaatggcggattttcgaactatgtcatggggactaactaa

SEQ ID NO: 22161 - protein, 607 aa, Muscodor strobelii
  misc_feature: SGI Peptide ID NO. 567518
  misc_feature (1)..(535): NCBI GI: 171689196 Blast Desc: protein product [Podospora anserina] gi|170944560|emb|CAP70671.1| protein product [Podospora anserina]
  misc_feature (2)..(563): NCBI GI: 256730831 Blast Desc: NECHADRAFT_74303 [Nectria haematococca mpVI 77-13-4]
  misc_feature (2)..(535): NCBI GI: 46109144 Blast Desc: FG01454.1 [Gibberella zeae PH-1]
  misc_feature (1)..(522): NCBI GI: 154321341 Blast Desc: BC1G_01545 [Botryotinia fuckeliana B05.10] gi|150852083|gb|EDN27275.1| BC1G_01545 [Botryotinia fuckeliana B05.10]
  misc_feature (111)..(537): NCBI GI: 261356857 Blast Desc: protein kinase domain-containing protein [Verticillium albo-atrum VaMs.102]
  misc_feature (1)..(525): NCBI GI: 116204643 Blast Desc: CHGG_10205 [Chaetomium globosum CBS 148.51] gi|88176333|gb|EAQ83801.1| CHGG_10205 [Chaetomium globosum CBS 148.51]
  misc_feature (1)..(519): NCBI GI: 39942254 Blast Desc: MGG_03207 [Magnaporthe grisea 70-15] gi|145015803|gb|EDK00293.1| MGG_03207 [Magnaporthe grisea 70-15]
  misc_feature (1)..(529): NCBI GI: 169605407 Blast Desc: SNOG_05728 [Phaeosphaeria nodorum SN15] gi|160706759|gb|EAT86792.2| SNOG_05728 [Phaeosphaeria nodorum SN15]
  misc_feature (1)..(521): NCBI GI: 189192633 Blast Desc: protein kinase domain-containing protein [Pyrenophora tritici-repentis Pt-1C-BFP] gi|187978219|gb|EDU44845.1| protein kinase domain-containing protein [Pyrenophora tritici-repentis
  misc_feature (234)..(522): NCBI GI: 156053772 Blast Desc: SS1G_05733 [Sclerotinia sclerotiorum 1980] gi|154703514|gb|EDO03253.1| SS1G_05733 [Sclerotinia sclerotiorum 1980]
MWWDASRIETTVTRQFVCSHLIPAEIERLDRPLGFGDGLTDGTWYVAIYSQRQLYYTSYTYTNRLSKKDWEWVDEKAKRIFLILLDLGIPDQIFGIIDDSWDDTDLPIALDEVERLGLTAGKDQRTVKKFYARQYHYLVRYIEKGDHVIYQDDDVVPACLADKRPGLTTSSNTTDRIELPNKPDQIFSRRRIPIGDGPGMIPNDALMIEINSTRNLQHEHVSSYYASYTHQGAAYVIFSHTSELTVKSLLSTTPGPLKSLAKQERRRMVMNWVHCLADTLCYIHKRGRSHGNIKPSTILLSANHDIFYASTSRLGAEASVAASEKSTFDRESYDYAAPEQWYRPSNIHRRATPTSSSWFSNSSDSNTFHINRGATEHTPSSAMHTPTPHLDPQAADVFSLGCVILELLGLQLKRTSRSFASHRAAKHKSAGRGGAVLDSSFHKNLGQVESWMGGLAKDATKKDDPVFLGFAPLLHVVARMLSVLPHERPSALEVEQAMYKILREKCGITEPHCVHQYDAGFDLGVAGLSIDEKGDNFSIATKRHSSSPGSPRPGSRLSIHRRSFQDRDSQFTSSSGSAASLRAPGQRPAWQENLFNGGFSNYVMGTN

SEQ ID NO: 22162 - DNA, 1269 bp, Muscodor strobelii
  misc_feature: SGI cDNA ID NO. 567519
  misc_feature: Encodes the peptide sequence at SEQ ID NO 22163
atggccgctgacaagtcctctgtcgcggaggcccagtcgatagccgccacggacccgcgaaaggcggaagcaatctacaaagacatcatctccaagcccccgtctgtcacctcggatgccgccatcaaagagtacgagagcgccttgatcagcttaggcgagctgtacagagacgaaaagaagccaaatgagcttgttgagctcgtcaccacgagcagaacagtgctctccagctttgcgaaggccaagacagccaagttggtccgccagctcctcgacctcttcgacgccatccccaacaccaccgacattcagatcgccgtcaccaagtcctgcatagaatgggccacctccgagcgccgctccttcctgcgccagaacctcgagacccgcctcgtcaccctgctcatggccaagcagtcctactatgatgccctcactctcatcaacggcctgctgcgcgagctgaaacgtctcgacgacaagctggtattggtggaggtccagctcctcgagtcccgcgtctaccatgccctcggcaacatcagcaaggctcgcgctgccttgacgtccgcccgcacatccgccgccagcgtgtacaccccgccgctcctccaggccaacctcgacatgcagtccggcatgctgcacaccatggaccaggacttcaacaccgcctactcctacttcatcgaggcccttgacggctaccactcccaagaagctacccctcgcgccaccgccgccctccagtacatgttgctctgcaagatcatgctcaatctcggggacgacgtcaacaacctcatggcctccaagcaagccgccaagtacgccggccagaatctagaagctatgaaagccatcgctcgtgcacactccaaccgctccctcgaggagtacgagcgagcgctctccgcttacagatacgagttgggcagcgacgcatttatccgcaaccacttgcgccgactctacgacgccatgttggagcagaatctgatcaaggtgattgagccgttcagtcgggtcgagattgagcacatcgccaagatggtcggattagaccgccagcaggtcgagaggaagctaagccagatgattctcgacaaggttatcatcggggtgctggaccagggtgccggctgtctgatcattttcgacgagacagagagggacgtgagctatgatgcggcgctaaacacgattgacaagttgagtaccgttgtggatgtgctttataccaaccaggcgagtatgcttgagtag

SEQ ID NO: 22163 - protein, 422 aa, Muscodor strobelii
  misc_feature: SGI Peptide ID NO. 567519
  misc_feature (284)..(388): Pfam Id: PF01399 Pfam Desc: PCI domain
  misc_feature (3)..(422): NCBI GI: 116204649 Blast Desc: CHGG_10208 [Chaetomium globosum CBS 148.51] gi|88176336|gb|EAQ83804.1| CHGG_10208 [Chaetomium globosum CBS 148.51]
  misc_feature (8)..(422): NCBI GI: 85080254 Blast Desc: NCU01596 [Neurospora crassa OR74A] gi|16416024|emb|CAD01126.1| 26s proteasome p44.5 protein [Neurospora crassa] gi|28917574|gb|EAA27271.1| NCU01596 crassa
  misc_feature (2)..(422): NCBI GI: 39942262 Blast Desc: MGG_03211 [Magnaporthe grisea 70-15] gi|145015798|gb|EDK00288.1| MGG_03211 [Magnaporthe grisea 70-15]
  misc_feature (3)..(422): NCBI GI: 154321359 Blast Desc: BC1G_01554 [Botryotinia fuckeliana B05.10] gi|150852092|gb|EDN27284.1| BC1G_01554 [Botryotinia fuckeliana B05.10]
  misc_feature (3)..(422): NCBI GI: 156053794 Blast Desc: SS1G_05745 [Sclerotinia sclerotiorum 1980] gi|154703525|gb|EDO03264.1| SS1G_05745 [Sclerotinia sclerotiorum 1980]
  misc_feature (2)..(422): NCBI GI: 256735353 Blast Desc: [Nectria haematococca mpVI 77-13-4]
  misc_feature (2)..(422): NCBI GI: 46105356 Blast Desc: FG00306.1 [Gibberella zeae PH-1]
  misc_feature (3)..(422): NCBI GI: 171689334 Blast Desc: protein product [Podospora anserina] gi|170944629|emb|CAP70740.1| protein product [Podospora anserina]
  misc_feature (3)..(422): NCBI GI: 261356850 Blast Desc: 26S proteasome non-ATPase regulatory subunit 11 [Verticillium albo-atrum VaMs.102]
  misc_feature (4)..(422): NCBI GI: 226278894 Blast Desc: 26S proteasome non-ATPase regulatory subunit 11 [Paracoccidioides brasiliensis Pb01]
MAADKSSVAEAQSIAATDPRKAEAIYKDIISKPPSVTSDAAIKEYESALISLGELYRDEKKPNELVELVTTSRTVLSSFAKAKTAKLVRQLLDLFDAIPNTTDIQIAVTKSCIEWATSERRSFLRQNLETRLVTLLMAKQSYYDALTLINGLLRELKRLDDKLVLVEVQLLESRVYHALGNISKARAALTSARTSAASVYTPPLLQANLDMQSGMLHTMDQDFNTAYSYFIEALDGYHSQEATPRATAALQYMLLCKIMLNLGDDVNNLMASKQAAKYAGQNLEAMKAIARAHSNRSLEEYERALSAYRYELGSDAFIRNHLRRLYDAMLEQNLIKVIEPFSRVEIEHIAKMVGLDRQQVERKLSQMILDKVIIGVLDQGAGCLIIFDETERDVSYDAALNTIDKLSTVVDVLYTNQASMLE

SEQ ID NO: 22164 - DNA, 1987 bp, Muscodor strobelii
  misc_feature: SGI EST ID NO. CUFF.52357.0
  misc_feature: Variant of the nucleotide sequence at SEQ ID NO 22162
ttccaacccagcgcactgtaattgtggcggagacatgccacttatttagacgagacggagtcttggcagctcagctccggttacgtatcgacattcgtgcctgccgcacttcgatgaccttcgacttctcaagctaaacacgacgaaacaagcaccaacaacaccagaacaacgctgtcgcaaacaacttcccacaccgtatttccagccaaacacaccttcgctaccatatatcacagcctcaactggagtaccgacaatggccgctgacaagtcctctgtcgcggaggcccagtcgatagccgccacggacccgcgaaaggcggaagcaatctacaaagacatcatctccaagcccccgtctgtcacctcggatgccgccatcaaagagtacgagagcgccttgatcagcttaggcgagctgtacagagacgaaaagaagccaaatgagcttgttgagctcgtcaccacgagcagaacagtgctctccagctttgcgaaggccaagacagccaagttgggtacgcaatccgcctacctatcactgttctctctttgcagtctgtcagaagctttgtctaatgcttgagcaacacaatagtccgccagctcctcgacctcttcgacgccatccccaacaccaccgacattcagatcgccgtcaccaagtcctgcatagaatgggccacctccgagcgccgctccttcctgcgccagaacctcgagacccgcctcgtcaccctgctcatggccaagcagtcctactatgatgccctcactctcatcaacggcctgctgcgcgagctgaaacgtctcgacgacaagctggtattggtggaggtccagctcctcgagtcccgcgtctaccatgccctcggcaacatcagcaaggctcgcgctgccttgacgtccgcccgcacatccgccgccagcgtgtacaccccgccgctcctccaggccaacctcgacatgcagtccggcatgctgcacaccatggaccaggacttcaacaccgcctactcctacttcatcgaggcccttgacggctaccactcccaagaagctacccctcgcgccaccgccgccctccagtacatgttgctctgcaagatcatgctcaatctcggggacgacgtcaacaacctcatggcctccaagcaagccgccaagtacgccggccagaatctagaagctatgaaagccatcgctcgtgcacactccaaccgctccctcgaggagtacgagcgagcgctctccgcttacagatacgagttgggcagcgacgcatttatccgcaaccacttgcgccgactctacgacgccatgttggagcagaatctgatcaaggtgattgagccgttcagtcgggtcgagattgagcacatcgccaagatggtcggattagaccgccagcaggtcgagaggaagctaagccagatgattctcgacaaggttatcatcggggtgctggaccagggtgccggctgtctgatcattttcgacgagacagagagggacgtgagctatgatgcggcgctaaacacgattgacaagttgagtaccgttgtggatgtgctttataccaaccaggcgagtatgcttgagtagatgagcatgcatgctaataggaagaataactcagaaaatgggcagggtgagagcaaagagcttcggacacgggtatttccgaggcttagagaataaatctttctcatgagaagtgacgaagtagctacgttctctggttaggcatggatgggtgtctcctgtaacactaagtagagcacagaaaatgagttgaggagctcgcggatgaatagacgctctgagtgcggcagagatatctccatttatcgcatgcaactggagatgccctactcatagtcgatgctaaaaatgtaaaatcaagcaaaatgtaaggcaatagacagtcggtacgtaccgagcacatttattgtcttgcgagaactcagacctttgcgccggc

SEQ ID NO: 22165 - DNA, 447 bp, Muscodor strobelii
  misc_feature: SGI cDNA ID NO. 567520
  misc_feature: Elevated expression when VOC is produced
  misc_feature: Encodes the peptide sequence at SEQ ID NO 22166
atggcagaaacaccaacacccatgttcaagatttcagtcctccattaccgcgaccaatcccgcaacgaagaagaatggacaaaatggtatctcgaagagcaaatccccagattcatccccatagcccacaaacacggtattgaccgctgtgaactctacataacaccaacaacattcaaacaaaaattccaaatcgacctcgacaccctgaaaggcggacgtgcagaaggctggaacatggcgccgtacgacgccgcgacaatctactgggttgacgacccacagaaactgcgcaatatgttgaatgaccctctctggaatgagaaagtaattccgtttgagaaaggctggatcgatcagaataaagttgatgtgcaggttgggacccagactactttcattgaggaagggaggattgtcaatgttgttcctaaggaatatgactga

SEQ ID NO: 22166 - protein, 148 aa, Muscodor strobelii
  misc_feature: SGI Peptide ID NO. 567520
  misc_feature (9)..(142): NCBI GI: 212534228 Blast Desc: conserved [Penicillium marneffei ATCC 18224] gi|212534230|ref|XP_002147271.1| conserved [Penicillium marneffei ATCC 18224] gi|210069669|gb|EEA23759.1| conserved [Penicillium
  misc_feature (10)..(142): NCBI GI: 255930915 Blast Desc: Pc12g01150 [Penicillium chrysogenum Wisconsin 54-1255] gi|211581633|emb|CAP79742.1| Pc12g01150 [Penicillium chrysogenum Wisconsin 54-1255]
  misc_feature (1)..(142): NCBI GI: 115491575 Blast Desc: [Aspergillus terreus NIH2624] gi|114197275|gb|EAU38975.1| [Aspergillus terreus NIH2624]
  misc_feature (9)..(142): NCBI GI: 242789576 Blast Desc: conserved [Talaromyces stipitatus ATCC 10500] gi|218717977|gb|EED17397.1| conserved [Talaromyces stipitatus ATCC 10500]
  misc_feature (1)..(142): NCBI GI: 70983267 Blast Desc: conserved [Aspergillus fumigatus Af293] gi|66844786|gb|EAL85123.1| conserved [Aspergillus fumigatus Af293] gi|159124047|gb|EDP49166.1| conserved [Aspergillus A1163]
  misc_feature (4)..(143): NCBI GI: 255941832 Blast Desc: Pc16g13860 [Penicillium chrysogenum Wisconsin 54-1255] gi|211586308|emb|CAP94056.1| Pc16g13860 [Penicillium chrysogenum Wisconsin 54-1255]
  misc_feature (3)..(108): NCBI GI: 171695610 Blast Desc: protein product [Podospora anserina] gi|170948047|emb|CAP60211.1| protein product [Podospora anserina]
  misc_feature (4)..(146): NCBI GI: 212542755 Blast Desc: conserved [Penicillium marneffei ATCC 18224] gi|210066439|gb|EEA20532.1| conserved [Penicillium marneffei ATCC 18224]
  misc_feature (1)..(142): NCBI GI: 145233179 Blast Desc: An02g08300 [Aspergillus niger] gi|134056889|emb|CAK37792.1| protein product [Aspergillus niger]
  misc_feature (8)..(142): NCBI GI: 115491577 Blast Desc: [Aspergillus terreus NIH2624] gi|114197276|gb|EAU38976.1| [Aspergillus terreus NIH2624]
  misc_feature: Useful for introducing or modulating the production of volatile compounds
MAETPTPMFKISVLHYRDQSRNEEEWTKWYLEEQIPRFIPIAHKHGIDRCELYITPTTFKQKFQIDLDTLKGGRAEGWNMAPYDAATIYWVDDPQKLRNMLNDPLWNEKVIPFEKGWIDQNKVDVQVGTQTTFIEEGRIVNVVPKEYD

SEQ ID NO: 22167 - DNA, 857 bp, Muscodor strobelii
  misc_feature: SGI EST ID NO. CUFF.52093.0
  misc_feature: Variant of the nucleotide sequence at SEQ ID NO 22165
tgcgcaccgacatacacttatatcttgtgactgctttcatacttgctatctctgctccgtttctactagaaatcaccatatacccgcgtccattttttcttcccttccacacgatcacccagacgacacagaagtcccttagaaactgcgcagtatggcagaaacaccaacacccatgttcaagatttcagtcctccattaccgcgaccaatcccgcaacgaagaagaatggacaaaatggtatctcgaagagcaaatccccagattcatccccatagcccacaaacacggtattgaccgctgtgaactctacataacaccaacaacattcaaacaaaaattccaaatcgacctcgacaccctgaaaggcggacgtgcagaaggctggaacatggcgccgtacgacgccgcgacaatctactgggttgacgacccacagaaactgcgcaatatgttgaatgaccctctctggaatgagaaagtaattccgtttgagaaaggctggatcgatcagaataaagttgatgtgcaggttgggacccagactactttcattgaggaagggaggattgtcaatgttgttcctaaggaatatgactgagcatgacgacgcagggtaaacttatgggtagggttgtttgggtgggcagctggtagaggctgaaatgagtgctggatttgcgttgctttttagatgtagtttaggcctgcattaatataagggctacattgagttgaccttttgtcttaaccagagctagcgagttgtagatgtattaaaagttaaatgcagaactctatctctgagttgtaaactccggcccagccgctagaacgtctatatcggagttagcaac

SEQ ID NO: 22168 - DNA, 801 bp, Muscodor strobelii
  misc_feature: SGI cDNA ID NO. 567521
  misc_feature: Encodes the peptide sequence at SEQ ID NO 22169
atggcgcccccccgcacctggcgtgacgctgagaatcgcgaacttgtccgcctggccctggaacatggcgggcttcctcgcggggggacattccctggtggactgctcaggagctccgctcgcattgccgatattttgaatgcccagaatgtctcaacgaccaaaaatggggtgcaatcgcaatggagtcgcctcaccaagaggggggtcaatgggaagggagaacttattgtcgccattgaggcactggatagcagcgaaaacgatttcgagaaggttgagcggctcctccgccgtcccggcgtcttcctcgatggtatagttcaaaccaacaaagatagaagcaacgaaaagaccgcttcgtctgctgctccaggccctcaaaccacttcgcagcacaaaaatcagcctacaacacaccttcctcagcaagaatatgcaacaagatacggccaacctatcctttaccatcctaatagcctcgacaaccgcacgacggttccgtatagcgtgtaccagtccccgatccaccccctgaacgccatccgctacgaagacaacaatttgcctatttccagcggagcccctactgccggagaactccaacaggatcctcagcaactcttcgggtatcagccgctgtatactcagtatccgcagtcgcaaggtcatgagcagtacaatgtctatgccgaccagaaagacgagcatcagcatcagcacggagaccatgctcactacgaccccgaggatgacatctatccgctccacccgcactatcccgatcctccccaatactag

SEQ ID NO: 22169 - protein, 266 aa, Muscodor strobelii
  misc_feature: SGI Peptide ID NO. 567521
MAPPRTWRDAENRELVRLALEHGGLPRGGTFPGGLLRSSARIADILNAQNVSTTKNGVQSQWSRLTKRGVNGKGELIVAIEALDSSENDFEKVERLLRRPGVFLDGIVQTNKDRSNEKTASSAAPGPQTTSQHKNQPTTHLPQQEYATRYGQPILYHPNSLDNRTTVPYSVYQSPIHPLNAIRYEDNNLPISSGAPTAGELQQDPQQLFGYQPLYTQYPQSQGHEQYNVYADQKDEHQHQHGDHAHYDPEDDIYPLHPHYPDPPQY

SEQ ID NO: 22170 - DNA, 591 bp, Muscodor strobelii
  misc_feature: SGI cDNA ID NO. 567522
  misc_feature: Encodes the peptide sequence at SEQ ID NO 22171
atggcgattggaacagtgcgagacgtcgcacgcaaattattccaggagtttagagacaagcgagaagaccctgatgttcccatcgtctttattgcgcacagcctcggcggaatcgtagttaaacaggccttggtgcttgcagagcaaagcccaatggatttcccaggcatggctaaacaaacgaaaggcatcgtcttcttcgggactccgcatcgaggggctgacgctgcagcctggggcaagaaagtaacgaagatcgtaaaatgtactgttcctttggcacgcattcggttcatgagtctcctcaagagaaactctgaagagctattcaaggtttccgaagacttcaaccacttggcttcccactatgctatcgttagcttctatgaggagcacgtatataatcgcatttggaatcaagtgattgtggacaaagattctgctattatggctttacaacacgaagattacatgatgctcagtggtacacatacttccatgtgccgcttctcaaaagacgacgatcggttcgatgcagtctggagacgaattcggcgggctgccaatggcccagttcatccatctgactga

SEQ ID NO: 22171 - protein, 196 aa, Muscodor strobelii
  misc_feature: SGI Peptide ID NO. 567522
  misc_feature (1)..(188): NCBI GI: 116208262 Blast Desc: CHGG_03424 [Chaetomium globosum CBS 148.51] gi|88184021|gb|EAQ91489.1| CHGG_03424 [Chaetomium globosum CBS 148.51]
  misc_feature (6)..(190): NCBI GI: 171685326 Blast Desc: protein product [Podospora anserina] gi|170942624|emb|CAP68276.1| protein product [Podospora anserina]
  misc_feature (5)..(191): NCBI GI: 116208264 Blast Desc: CHGG_03425 [Chaetomium globosum CBS 148.51] gi|88184022|gb|EAQ91490.1| CHGG_03425 [Chaetomium globosum CBS 148.51]
  misc_feature (6)..(188): NCBI GI: 255956955 Blast Desc: Pc21g22620 [Penicillium chrysogenum Wisconsin 54-1255] gi|211590941|emb|CAP97159.1| Pc21g22620 [Penicillium chrysogenum Wisconsin 54-1255]
  misc_feature (57)..(167): NCBI GI: 116198797 Blast Desc: CHGG_07554 [Chaetomium globosum CBS 148.51] gi|88178833|gb|EAQ86301.1| CHGG_07554 [Chaetomium globosum CBS 148.51]
  misc_feature (6)..(176): NCBI GI: 240107044 Blast Desc: CPC735_018350 [Coccidioides posadasii C735 delta SOWgp]
  misc_feature (2)..(175): NCBI GI: 116198499 Blast Desc: CHGG_07405 [Chaetomium globosum CBS 148.51] gi|88178684|gb|EAQ86152.1| CHGG_07405 [Chaetomium globosum CBS 148.51]
  misc_feature (6)..(185): NCBI GI: 119488147 Blast Desc: NFIA_112440 [Neosartorya fischeri NRRL 181] gi|119410775|gb|EAW20720.1| NFIA_112440 [Neosartorya fischeri NRRL 181]
  misc_feature (6)..(196): NCBI GI: 116191309 Blast Desc: CHGG_05372 [Chaetomium globosum CBS 148.51] gi|88181285|gb|EAQ88753.1| CHGG_05372 [Chaetomium globosum CBS 148.51]
  misc_feature (1)..(181): NCBI GI: 171685330 Blast Desc: protein product [Podospora anserina] gi|170942626|emb|CAP68278.1| protein product [Podospora anserina]
MAIGTVRDVARKLFQEFRDKREDPDVPIVFIAHSLGGIVVKQALVLAEQSPMDFPGMAKQTKGIVFFGTPHRGADAAAWGKKVTKIVKCTVPLARIRFMSLLKRNSEELFKVSEDFNHLASHYAIVSFYEEHVYNRIWNQVIVDKDSAIMALQHEDYMMLSGTHTSMCRFSKDDDRFDAVWRRIRRAANGPVHPSD

SEQ ID NO: 22172 - DNA, 1200 bp, Muscodor strobelii
  misc_feature: SGI cDNA ID NO. 567523
  misc_feature: Encodes the peptide sequence at SEQ ID NO 22173
atggcactagcttacttcgctcgccgccagccgcccaagagtcctgcccaagtgcaggaactacagcttcgtgtgatttacgacccagagactcatggggatgctgttgcaaatatcgatcttgtgcttgttcacggatttggtggccactacatggacacttggacctctaaacaggatgactatgttatcttttggccgaaagatctactactcaagcaatcaaatcagccgccgacgagaatcttgtcgtttggatatgatgcaggggagttggtagtggccagcattcgcagctacgcccgaagcatgctgacttatttgaacgatctgcgggagggaaatgagagtaggcctatagtgtttctaggccactgcctcggaggccttattgtcaagcaggctatgcgtttcgctgcgaacgagccaccgctcaactcaatcatcttggccactaaatctattatgttttttgggaccccacatggtggtgggcggaaaaaagagtggctgaagcttgctacttgctacaaagaacttggacctaaatgcaagatgattgccgttctagggaagtgtacagatgatcttactgaactcgatgaggatttctcccgtttgcaggagaagtttactgtcaacaatttcttagagcaacgtaaaatgccgggttcaagaaggctcattgtagatcagacctccgcggcgaaatttcccggggctggggtcactgaagtagatggcgatcatatcaccatgtgtcagttcaaagacggggaaaataacgcatttctcaaggtgtgccggatcatcagagatgccgcccccgacaaatcagccatcaatcgctcagctactatccaaacgcccacttcaggccacgagcagatgttcaccaacgaccaggtggttctcaatcagcagctaatatttcacgatcaggtgattggtgaacagcagctgcttattaacagaccatcagtcacgcggacgaatcaccaaatgacaacaacgacaggagtaaatggtgtgccaaatctccacgctccaattgaactccgtgaagcgcagccgactgcgaatgggagactactggagcaaagtacagaaagtgacaccgttgaggagattttcgggagtgaaagtcgaggtcacagagaacaagtcagagcatccaccagatttggaatacagctctga

SEQ ID NO: 22173 - protein, 399 aa, Muscodor strobelii
  misc_feature: SGI Peptide ID NO. 567523
  misc_feature (21)..(277): NCBI GI: 116208264 Blast Desc: CHGG_03425 [Chaetomium globosum CBS 148.51] gi|88184022|gb|EAQ91490.1| CHGG_03425 [Chaetomium globosum CBS 148.51]
  misc_feature (23)..(285): NCBI GI: 171681405 Blast Desc: protein product [Podospora anserina] gi|170940661|emb|CAP65889.1| protein product [Podospora anserina]
  misc_feature (41)..(274): NCBI GI: 171685328 Blast Desc: protein product [Podospora anserina] gi|170942625|emb|CAP68277.1| protein product [Podospora anserina]
  misc_feature (23)..(271): NCBI GI: 116198499 Blast Desc: CHGG_07405 [Chaetomium globosum CBS 148.51] gi|88178684|gb|EAQ86152.1| CHGG_07405 [Chaetomium globosum CBS 148.51]
  misc_feature (37)..(359): NCBI GI: 212526792 Blast Desc: ribonuclease p/mrp subunit, [Penicillium marneffei ATCC 18224] gi|210072951|gb|EEA27038.1| ribonuclease p/mrp subunit, [Penicillium marneffei ATCC 18224]
  misc_feature (39)..(276): NCBI GI: 242781812 Blast Desc: LipA and NB-ARC domain protein [Talaromyces stipitatus ATCC 10500] gi|242781817|ref|XP_002479877.1| LipA and NB-ARC domain protein [Talaromyces stipitatus ATCC 10500] LipA and ATCC
  misc_feature (17)..(274): NCBI GI: 121705776 Blast Desc: LipA and NB-ARC domain protein [Aspergillus clavatus NRRL 1] gi|119399297|gb|EAW09725.1| LipA and NB-ARC domain protein [Aspergillus clavatus NRRL 1]
  misc_feature (39)..(274): NCBI GI: 159127486 Blast Desc: LipA and NB-ARC domain protein [Aspergillus fumigatus A1163]
  misc_feature (39)..(274): NCBI GI: 70999500 Blast Desc: LipA and NB-ARC domain protein [Aspergillus fumigatus Af293] gi|66852106|gb|EAL92431.1| LipA and NB-ARC domain protein [Aspergillus fumigatus Af293]
  misc_feature (15)..(271): NCBI GI: 255936757 Blast Desc: Pc13g09820 [Penicillium chrysogenum Wisconsin 54-1255] gi|211584025|emb|CAP92051.1| Pc13g09820 [Penicillium chrysogenum Wisconsin 54-1255]
MALAYFARRQPPKSPAQVQELQLRVIYDPETHGDAVANIDLVLVHGFGGHYMDTWTSKQDDYVIFWPKDLLLKQSNQPPTRILSFGYDAGELVVASIRSYARSMLTYLNDLREGNESRPIVFLGHCLGGLIVKQAMRFAANEPPLNSIILATKSIMFFGTPHGGGRKKEWLKLATCYKELGPKCKMIAVLGKCTDDLTELDEDFSRLQEKFTVNNFLEQRKMPGSRRLIVDQTSAAKFPGAGVTEVDGDHITMCQFKDGENNAFLKVCRIIRDAAPDKSAINRSATIQTPTSGHEQMFTNDQVVLNQQLIFHDQVIGEQQLLINRPSVTRTNHQMTTTTGVNGVPNLHAPIELREAQPTANGRLLEQSTESDTVEEIFGSESRGHREQVRASTRFGIQL

SEQ ID NO: 22174 - DNA, 2514 bp, Muscodor strobelii
  misc_feature: SGI cDNA ID NO. 567524
  misc_feature: Encodes the peptide sequence at SEQ ID NO 22175
atgcttcacgagcttgtaccagatttagaccctggcatgttcagggtcatcgatgccgatattgtactagttcacggcttaatgggaggttatgtcgatacttggaaggccgaagacgatacagtctggccaagagacctcctgccgcaagctttgcacaaagacggactacatattcgagccttgtcgtttgagtatggcggatcaattctaggtaccagtagtcgagcgggaatcgacgacactgcgcagaccttgctgcagaatctgttagacaagcgagaggaccagtgcgataagtccagacctatcatcttcgtaggacatagcctcggaggtgtcatcatcaaaagggcaatccgagttgcatacaacgacgatagattcaaatctatcaagagatcaatacttggtgtaatgttctttgcgactatacacagaggcaccagacaagagtacacaaattttttgcgggacgtgttgaagtgcaacagccagatcaagagagagaagtggccaatactaatgaaatctccctctgaagccatgtatcaagagatcacgaaaactcctgaggtattcgagccgttctcgaaggacttcattccgctattccgtaaattaggaatcgagacttttcgagagtctcagattagaagaccacagctcaacgcattagtcgtcaatcaaacgcttggatcaatcggtgagtccgtagaaaggcacctcgaggagaccgatttgttgtgttccgacacgctttgccaatctatgatgacaaagaaactgacaaatggtaccggaaaatggatttttgaacgactgcagtaccaggagtggttgaacacgaacttgcaaacgccaaaactttggatcacgggtgagccgggctgtgggaaaagctacgtcgccaagaatgttgttgataagctacgtgatcaagacgagcctgtcatctgtgcttttctgcgtggcgcagacttaacagttgatctacgaagcgtgatgtccggaattatccagcaagctctagaaattgagcctaggctatccctcccccagtcattgactcaaccaggtcgtaacttacgaagtttgttgcgcactgctcaggaccaagttcttggcaatggtttgcaatgggacgaagagtcacatccaacggagaacaacttgcatggcctactggcttcaattgttcggcaagttctggtagagatgataccagagtctattgagaattaccttccattcatactggggccgcagaattcgccacacaattctattattgaacgcctacgaacattctgcccgcacatcatggctaaagcattacgcaagtgcctcgcattaacagtcgtagtagatggattcgacaagatcaacaggcaagatcaacaggcatttctgagcatcctcgaaaagtttcaaaacgagtcacatacaacgggcaaatttcggctcctttttttgtccagcgattatcctgacattgactcagacgtaatgcagtacgggtttacccagtatccaattgataaagtcgaagataccggatcagacattagagcgaacgtgaaacagcacatagatctcctcaccagaattcatgggtatactccaaagacccagaaaatgatagaggaaggagtacctaaagcggcagatggcatgcatcttcgggcagatgtgatacttggtagtttgaaacgcacgaagtacgacgaaagctccttgaacgagctgctagaagccccgcaacagacaactccgctgcagagcattgctgtcctatatgatcagatactggggaaaatatgggcagatacgtctacaagaagatctgctaagcaagttcttacttggatcacatttcagttagaaggattgaaccctgctgagctgggcatcgcacgagctcttgcaaaagcaagagacaacaccaccgggcgtgttcactacgaccaggtatgcaacatgcgtgacgacgacaccgagctttgggtaaacagatttcttggtcatttggtcaagtttcaaaatggacagtttcaattaatacaccctagtctgatgaagtaccttatcactaagccagagcagctcgacgagaattatggaaacagtgctctgccttaccatgcagaatcgtatctggacccggcagcaagccacgcattactagggaatctttgcgctacctatcttgcgcgactatgcttcgatcaatctgtccgtattcgacccggatgtgagacctggtttggctggcagacggcagtcaaggggaggatgacagagcacaagtttttccgatatgcagcactacattggatggtccgcttcggctttgccctgctagaggtagggttctgcaccgaccatatgcgacgaagcagcgcgctacagatgggatccaaacgcagaatgacatggcagtgccaagcccacagccagcaattcgacccttcgagcggccgatcccacacacagggcattcaaccccagtag

SEQ ID NO: 22175 - protein, 837 aa, Muscodor strobelii
  misc_feature: SGI Peptide ID NO. 567524
  misc_feature (1)..(779): NCBI GI: 116198801 Blast Desc: CHGG_07556 [Chaetomium globosum CBS 148.51] gi|88178835|gb|EAQ86303.1| CHGG_07556 [Chaetomium globosum CBS 148.51]
  misc_feature (59)..(813): NCBI GI: 171685330 Blast Desc: protein product [Podospora anserina] gi|170942626|emb|CAP68278.1| protein product [Podospora anserina]
  misc_feature (21)..(779): NCBI GI: 171681397 Blast Desc: protein product [Podospora anserina] gi|170940657|emb|CAP65885.1| protein product [Podospora anserina]
  misc_feature (34)..(779): NCBI GI: 116208266 Blast Desc: CHGG_03426 [Chaetomium globosum CBS 148.51] gi|88184023|gb|EAQ91491.1| CHGG_03426 [Chaetomium globosum CBS 148.51]
  misc_feature (2)..(339): NCBI GI: 261353938 Blast Desc: ankyrin repeat protein [Verticillium albo-atrum VaMs.102]
  misc_feature (20)..(342): NCBI GI: 46136249 Blast Desc: FG09640.1 [Gibberella zeae PH-1]
  misc_feature (21)..(230): NCBI GI: 171685326 Blast Desc: protein product [Podospora anserina] gi|170942624|emb|CAP68276.1| protein product [Podospora anserina]
  misc_feature (20)..(215): NCBI GI: 116208264 Blast Desc: CHGG_03425 [Chaetomium globosum CBS 148.51] gi|88184022|gb|EAQ91490.1| CHGG_03425 [Chaetomium globosum CBS 148.51]
  misc_feature (20)..(150): NCBI GI: 121706306 Blast Desc: F-box domain protein [Aspergillus clavatus NRRL 1] gi|119399562|gb|EAW09990.1| F-box domain protein [Aspergillus clavatus NRRL 1]
  misc_feature (16)..(230): NCBI GI: 255956955 Blast Desc: Pc21g22620 [Penicillium chrysogenum Wisconsin 54-1255] gi|211590941|emb|CAP97159.1| Pc21g22620 [Penicillium chrysogenum Wisconsin 54-1255]
MLHELVPDLDPGMFRVIDADIVLVHGLMGGYVDTWKAEDDTVWPRDLLPQALHKDGLHIRALSFEYGGSILGTSSRAGIDDTAQTLLQNLLDKREDQCDKSRPIIFVGHSLGGVIIKRAIRVAYNDDRFKSIKRSILGVMFFATIHRGTRQEYTNFLRDVLKCNSQIKREKWPILMKSPSEAMYQEITKTPEVFEPFSKDFIPLFRKLGIETFRESQIRRPQLNALVVNQTLGSIGESVERHLEETDLLCSDTLCQSMMTKKLTNGTGKWIFERLQYQEWLNTNLQTPKLWITGEPGCGKSYVAKNVVDKLRDQDEPVICAFLRGADLTVDLRSVMSGIIQQALEIEPRLSLPQSLTQPGRNLRSLLRTAQDQVLGNGLQWDEESHPTENNLHGLLASIVRQVLVEMIPESIENYLPFILGPQNSPHNSIIERLRTFCPHIMAKALRKCLALTVVVDGFDKINRQDQQAFLSILEKFQNESHTTGKFRLLFLSSDYPDIDSDVMQYGFTQYPIDKVEDTGSDIRANVKQHIDLLTRIHGYTPKTQKMIEEGVPKAADGMHLRADVILGSLKRTKYDESSLNELLEAPQQTTPLQSIAVLYDQILGKIWADTSTRRSAKQVLTWITFQLEGLNPAELGIARALAKARDNTTGRVHYDQVCNMRDDDTELWVNRFLGHLVKFQNGQFQLIHPSLMKYLITKPEQLDENYGNSALPYHAESYLDPAASHALLGNLCATYLARLCFDQSVRIRPGCETWFGWQTAVKGRMTEHKFFRYAALHWMVRFGFALLEVGFCTDHMRRSSALQMGSKRRMTWQCQAHSQQFDPSSGRSHTQGIQPQ

SEQ ID NO: 22176 - DNA, 543 bp, Muscodor strobelii
  misc_feature: SGI cDNA ID NO. 567525
  misc_feature: Encodes the peptide sequence at SEQ ID NO 22177
atgtttatcaaaggcatctttacctcgcgacttcacggctgtaacaagaacccttgcaacgatccaaacgttccatacgagggagaatcttgtgacgagagtccctttgctagcgtcaaggaagggggcgcagatgcctctctacgctgtgttccacaatctgatcaggactccgagggtggtcagctccaaactttctacaacaatcttaagaaaggcgatcaatatactatcattgtggagaattatgatgaagccgagtactgcaaggatgctagcgactgtaagaacgacggtgaacagttcgtctacaagaatggcaactttgtggacaaccatcgcatgcgcagtagagccactacacgtcgcgactttcaactcagtcagggcacaccgaacagctccccgttcagaaagttccgaggtgaagatggatctgagcggctgtggctctcgaacgatgaggaatacgccttggttaatcaaaccgtttggagtaatactaagggcgaggttaagatcgttgaagaggtttttgattga

SEQ ID NO: 22177 - protein, 180 aa, Muscodor strobelii
  misc_feature: SGI Peptide ID NO. 567525
  misc_feature (13)..(176): NCBI GI: 115387721 Blast Desc: conserved [Aspergillus terreus NIH2624] gi|114195450|gb|EAU37150.1| conserved [Aspergillus terreus NIH2624]
  misc_feature (13)..(179): NCBI GI: 240109901 Blast Desc: CPC735_034060 [Coccidioides posadasii C735 delta SOWgp]
  misc_feature (13)..(177): NCBI GI: 121711032 Blast Desc: ACLA_094050 [Aspergillus clavatus NRRL 1] gi|119401282|gb|EAW11706.1| ACLA_094050 [Aspergillus clavatus NRRL 1]
  misc_feature (10)..(176): NCBI GI: 67901728 Blast Desc: AN7851.2 [Aspergillus nidulans FGSC A4] gi|40739706|gb|EAA58896.1| [Aspergillus nidulans FGSC A4] gi|259480595|tpe|CBF73384.1| TPA: conserved [Aspergillus nidulans
  misc_feature (13)..(178): NCBI GI: 115399644 Blast Desc: [Aspergillus terreus NIH2624] gi|114191102|gb|EAU32802.1| [Aspergillus terreus NIH2624]
  misc_feature (13)..(179): NCBI GI: 119184556 Blast Desc: CIMG_07064 [Coccidioides immitis RS]
  misc_feature (16)..(106): NCBI GI: 71016530 Blast Desc: UM02761.1 [Ustilago maydis 521] gi|46098339|gb|EAK83572.1| UM02761.1 [Ustilago maydis 521]
  misc_feature (13)..(91): NCBI GI: 212539015 Blast Desc: PMAA_100830 [Penicillium marneffei ATCC 18224] gi|210069405|gb|EEA23496.1| PMAA_100830 [Penicillium marneffei ATCC 18224]
  misc_feature (18)..(93): NCBI GI: 189196684 Blast Desc: [Pyrenophora tritici-repentis Pt-1C-BFP] gi|187980559|gb|EDU47185.1| [Pyrenophora tritici-repentis Pt-1C-BFP]
MFIKGIFTSRLHGCNKNPCNDPNVPYEGESCDESPFASVKEGGADASLRCVPQSDQDSEGGQLQTFYNNLKKGDQYTIIVENYDEAEYCKDASDCKNDGEQFVYKNGNFVDNHRMRSRATTRRDFQLSQGTPNSSPFRKFRGEDGSERLWLSNDEEYALVNQTVWSNTKGEVKIVEEVFD

SEQ ID NO: 22178 - DNA, 567 bp, Muscodor strobelii
  misc_feature: SGI cDNA ID NO. 567526
  misc_feature: Encodes the peptide sequence at SEQ ID NO 22179
atgccgttgacactgttccccgtattttgtacatcaacagttgcagctgaggcactctctgagattctagaaaaggcatacgcagaaggaccagactcacccgatagtctcctcctcattcatgacaagcacgcaattccatctgcaaaggacaaaagcatgccggccaccgtccctgctatctcaacagctcctagctctgacttctacgatgcgagtgacgaaagtcttgcggcctatgtgcaggagactgctgggagcacgcaaatttcaaagtcttactttttagttatggaccaacgaaccagcgatgacatgacgcttctcctcataaaaggttcaaaacaaagagcggataaagatagccaacaagccaatactggaagtatagagacccttagggttgctgccgattatgcaaacgccccagtcgtagccatgcaagtagggtcaggaagtctagcggagctgaaagataatgcgggggaagatggcgtgtatagaggcggtaatggtccgccgccgaagaaaggacaaccggctccgagaaagcaactgggtagttaa

SEQ ID NO: 22179 - protein, 188 aa, Muscodor strobelii
  misc_feature: SGI Peptide ID NO. 567526
  misc_feature (3)..(186): NCBI GI: 119499770 Blast Desc: NFIA_102290 [Neosartorya fischeri NRRL 181] gi|119414807|gb|EAW24745.1| conserved [Neosartorya fischeri NRRL 181]
  misc_feature (3)..(170): NCBI GI: 240109902 Blast Desc: CPC735_034070 [Coccidioides posadasii C735 delta SOWgp]
  misc_feature (19)..(186): NCBI GI: 238501314 Blast Desc: conserved [Aspergillus flavus NRRL3357] gi|220692128|gb|EED48475.1| conserved [Aspergillus flavus NRRL3357]
  misc_feature (6)..(186): NCBI GI: 169768890 Blast Desc: [Aspergillus oryzae RIB40] gi|83766773|dbj|BAE56913.1| protein product [Aspergillus oryzae]
  misc_feature (3)..(169): NCBI GI: 67901726 Blast Desc: AN7850.2 [Aspergillus nidulans FGSC A4] gi|40739705|gb|EAA58895.1| [Aspergillus nidulans FGSC A4] gi|259480594|tpe|CBF73382.1| TPA: conserved [Aspergillus nidulans
  misc_feature (3)..(186): NCBI GI: 159125637 Blast Desc: conserved [Aspergillus fumigatus A1163]
  misc_feature (3)..(186): NCBI GI: 70993162 Blast Desc: conserved [Aspergillus fumigatus Af293] gi|66849063|gb|EAL89391.1| conserved [Aspergillus fumigatus Af293]
  misc_feature (1)..(179): NCBI GI: 119184558 Blast Desc: CIMG_07065 [Coccidioides immitis RS]
  misc_feature (77)..(186): NCBI GI: 115387719 Blast Desc: conserved [Aspergillus terreus NIH2624] gi|114195449|gb|EAU37149.1| conserved [Aspergillus terreus NIH2624]
MPLTLFPVFCTSTVAAEALSEILEKAYAEGPDSPDSLLLIHDKHAIPSAKDKSMPATVPAISTAPSSDFYDASDESLAAYVQETAGSTQISKSYFLVMDQRTSDDMTLLLIKGSKQRADKDSQQANTGSIETLRVAADYANAPVVAMQVGSGSLAELKDNAGEDGVYRGGNGPPPKKGQPAPRKQLGS

SEQ ID NO: 22180 - DNA, 956 bp, Muscodor strobelii
  misc_feature: SGI EST ID NO. CUFF.52149.0
  misc_feature: Variant of the nucleotide sequence at SEQ ID NO 22178
gcgcgattggccattcctttattgtagctggctgaaaactgcattcatgctggtcttagttccacttttgatctgccggaagccggtacttggtagccaatgatatttatcccgtcagcggcaccgagatcctagtttcaggcacctgtgtctctgtaacgcagcaagctgctagacccgaaacgcatttcttgttcctttccccaacacctactgccccacgttgaggtaactattaagctataaatcgtgcactagggcattattcgaacaccttactgcttcatactcaaacgcacaaacacgatgccgttgacactgttccccgtattttgtacatcaacagttgcagctgaggcactctctgagattctagaaaaggcatacgcagaaggaccagactcacccgatagtctcctcctcattcatgacaagcacgcaattccatctgcaaaggacaaaagcatgccggccaccgtccctgctatctcaacagctcctagctctgacttctacgatgcgagtgacgaaagtcttgcggcctatgtgcaggagactgctgggagcacgcaaatttcaaagtcttactttttagttatggaccaacgaaccagcgatgacatgacgcttctcctcataaaaggttcaaaacaaagagcggataaagatagccaacaagccaatactggaagtatagagacccttagggttgctgccgattatgcaaacgccccagtcgtagccatgcaagtagggtcaggaagtctagcggagctgaaagataatgcgggggaagatggcgtgtatagaggcggtaatggtccgccgccgaagaaaggacaaccggctccgagaaagcaactgggtagttaaatctgttcaaacgatgatttcagtcccaatatcaaggcttcatgacagtaataacaagattctgcgacaagcagtgcctgcct

SEQ ID NO: 22181 - DNA, 5127 bp, Muscodor strobelii
  misc_feature: SGI cDNA ID NO. 567527
  misc_feature: Encodes the peptide sequence at SEQ ID NO 22182
atggccgactacttcctcgacctcccctcgtctcccgacccgctcaccgacgatatcccgcctagctctgcgcgtccgccctcacgtcgcaccaccaaacctcagactgacaccccgctattatctataccccagagcagtgcctccagaagagcgcgcgcatcgtcgccgaggaaacggactttcgagctggatgtgggcgacgagcgatcaccccagaaaatacttgtcaccgtcgaggccgaggagcacctgagacatgggaatgtcagtcgccaactattctcctcctcgccgacgcgcaagccacgaaagagtaacgccgctgccaccacaacaaccacaaccgtgcctctgaatgacgagccggggaacatggatggtgaaaacacgcctcggaagcgcggcagaccgcgtcgcattagcaatgggacgccgttgcccaaggtccgcaagagagctgcaacccccgtgcagaggaaatccaagcatccccggttggatggcgagccaccgtccgaggccagtattatgagcgatgcgccgacggatatgggagcggaagacggacaggacacactgcagccgaaacccaggacaaggacacgcaaaacgccaaagaagactactgcggccggtacggtgccctcgtcccagctctcaaccactgcgaccggaaggaagcgcggacggccgaggaaagcactcatgcctgaagaagtagccgtgctggccgaggcggccgccgagatgtctgccatacctccatcggaatcagacatgcatccggagattgagtcggaagcaggacgggatctggatatggccagaggtggaatgtcaagctacggcatggcccacgacgatactacgcatattgacccggacctacctcaaagagagaacagtgctacaccaacaccatcaaactacaattactcactccaggcacatgagagcatagagagagtatctacttcgcctagagagtcgcaccaggagctgggtggagacgacaatgacctgatgacctttgatgactatccggctatggaacagcgcagtgacacagaatcggaacacgatggtggcgacgatatgacatacaatcggcaggataccattgctaatgcctcagattttagcatgattgcagtcgaatctcttccctcgttccaaaactcctttcgagcatcgcagcgctcgggcgcgggagcagccgcttccgatgcgcctgagtatggcgaagagacaagtcgcatcattaatgagactctcgagtcacttagacgaagcatgcaagatggcacgagcgggccgccacgcaacactaacaccgagcatgaaaatgtggacgaactctctttagaccagggcaatacggaaacgatacatcagtcgatgcatgcgacgagtagtcacaggaagagagcattttccaagagtcccaggagaccgaggggaacgccgctcagtcgtcaggtgtttgcgggcaaagctacgcatgacgactcgttctcaagtcttcccgacagtgtgctacatgcagctacccccggacgtctgccgatgaaacagactgtagctgagcagtatgacgataaccacgacgaatatgaggattcattctcggaggtaccagatgaaattttagaagccgcgaccccaagaccaccgagacggccgcgatcgattaataatagctcacccattaggactggagggcagcactcatcatctcgtctggcggctaggaggacaagcgccgagttcggctcaagtaggctgcctacgccggatgaaacatcatcgtcaaattctggatcaaaacaagcgaccgaagaaaacaatgcagttgctctcgcatctcatgcgcagtcccgctccacaaaccacgtggatgtgccatcatctccacccaacatgactcgacctcgttccctggactacggaccctcggaactccagaatgaactaactggcaatggcctgcacggcaagcaatcgccctcgactcgggtgcagccgcccgcaaaatctgcagcgatccccttccaatcattggaggcgccgcttccgaccgcaagaccgtctctctcaccaattgtgcgagccggtaggaccctgcagaatgtgatgtcagataggtcatcgccggaagtaagggaaggtagtttgggtagtcctttcagaggatccgcggagagtcagagatatcgacaatcttctgtcggtagatcaccatctccacaaaggaatcgggagatcgagtcacaacccccgtctacgccaacgcccatggatcgaagcttccgttccaatatgagccgcaattatgggcgtgtttctcttggaactaatgaggctaggagctctttcggcccagggaggctgcctcatctgaatgcggacacattgaagacgactgttgagactacaaacgaaggtctagatatcgagaaacaaccttatgcgcaatctacgataagttctacgaaagcagcacctccaagccaggaggaattgagcgaggctgcgcaggacagtatcccacaacgaatgaacaacgagcgacttgaatacgaggtggaaagccctgcgaatcagagtcttattgcacaacaaggcacgactcggagccaattggctgcaacacgcgacgacgaggatgaggaatcagatagtgaccagcatgaagaacccattgacgatcaagaaacacagagtaacgagccggaagagatggatgacttggatgtatgggatatcgaggcatcgcgcccatcgcctgtgaagcagacgcagccgcagccagactctgttcaaattgcaccgagggctgatgctcagccttcgagaaggaggaaaattcctagtccgtggagaaagactagtcggaggctgatctaccaggatgagattgcaagctcatctcagatagaaatcgaagatgaagcgcagagcgaagccgaggaggcctatgtcccagaacctgtcctagagccggttgctcctactcgccagcagcgctctgcgtctcggcccgagcctggtagccagagtgaggtatcgcgtgttgtacccgaaagtccccagccggagaaacttgctcagacttcggcacatgcctcttacatggctgcacgagaccacatggaagagcacactggccgttccgacccgataggttctgacgagcctgaggagtaccaaggggatgccgagtattttgacgatctcgctgggctcgcagatcaagactcctcagaacccgaaaatcaagagatggtcggcgacatcacagaagacgaggacatgacaggcccacaggaagagcatcaagaatcaaatgatcttgaaccacctcaaaagcctgagaatactgcagctccagtagtcgcagatgagtccggatactcattactgaaagagaaggaaacgcccaagcctcaagagaagccggcccccccaaaatctcgattctttagcggctttgacttcttaaacttcttctcgtcaccagctaatctacctggcaagaagactgccgatacaacgcctgctgaaacgagcaagaagcctccaggtcccgagccagtattgccgaccatagagcgaccacgggagccgccaagggctgtcttctcaaccgggctatttccctcaattccccagaagcaaaacttccagcctagcccgaaacgaagacaggatttgttttctccgggccgtacgctgcgatcgaatgatacgatacccgacacctatgcacctacctcttcgacgcgtggtcgctctacatcgcctccccaatctgcggcgccgtcaacgcctgagaggcaggttttccctcccatcgaacagaagcgaaactttacgcctcagcttgaacagtctcggggctcgttgtttgtctcttctaataaggaaaagttggcccccaggattacagtcgaggaagatgcggatgaatcagagcaggagagtgaggaacaagactcctccggcgtaacggatggttcggaatacgagcgtgtgccgcctcgtccaaagccttcgcaatgggatcggaacgcatcaccgatcaaatctagtttccgatcgccgttgaaacctacgacaccaggacgtgtggtcgctttcacgaacaacacaagtgatgttgtgtcaccctcgcctctggcccaagtccaagggtctactttaggcaatacaaataacctgaatgtcttcaatatgagaagcagtgtaaatggcgatcgacgtactgctggtatggatggcgggaatgttgtgatgcaaggcccacttctacaacggccgggcctcgagggtaaggagaacttgttgccgacccctttgccttactctaaatcgagtgaaaatgagattatcaagaacgacgccaactatcgtctagatcatgatgtttcgaatcgcaacgcaaatagaggcttcggggcgagtgtcacagggaatgccaacgcgcaagccaatagaaaaccgccatcatccctccccgcgcagaacaacccgcaacctcaactcatgcataatagaagccaaatccgaaccacgccaccgacaactgccggcacacacccaatatccttcggacctctaagcccacctcagaatactcaacctcgccatggccgcctaacatccaacagacccttcaatccgcctcaacctatctcccaatcccagcctcagccccaatcgcgaccccaacctcaacctcaaccacagtcccaatctcatcctcagcttcaactccaggcagcatcgcagaaatggctcaaatcgcactggatactcctcgatgagatcctgaaacttcgtcgttcagaccccgagaggtttcaagagatctacgcccatcttccgcagctatccgaaaggaagagcaagaacttgctgggcaaagaggttgttgcgaatggcgagagaatgctgcttagggagtggcatctagatattgttgaagcgttcatgggcgagatggagatgatgaggaatgcgggcatgacactagcacaaggtggtagtgggtggagtgagaaagatgttgcgaagcgggtattttgtttgcttgttggggaggagaggagggggattaggtag

SEQ ID NO: 22182 - protein, 1708 aa, Muscodor strobelii
  misc_feature: SGI Peptide ID NO. 567527
  misc_feature (6)..(734): NCBI GI: 116204651 Blast Desc: CHGG_10209 [Chaetomium globosum CBS 148.51] gi|88176337|gb|EAQ83805.1| CHGG_10209 [Chaetomium globosum CBS 148.51]
  misc_feature (6)..(561): NCBI GI: 256734625 Blast Desc: NECHADRAFT_31392 [Nectria haematococca mpVI 77-13-4]
  misc_feature (7)..(560): NCBI GI: 46105358 Blast Desc: FG00307.1 [Gibberella zeae PH-1]
  misc_feature (6)..(255): NCBI GI: 145608306 Blast Desc: MGG_12750 [Magnaporthe grisea 70-15] gi|145015797|gb|EDK00287.1| MGG_12750 [Magnaporthe grisea 70-15]
  misc_feature (6)..(449): NCBI GI: 171689336 Blast Desc: protein product [Podospora anserina] gi|170944630|emb|CAP70741.1| protein product [Podospora anserina]
  misc_feature (1599)..(1707): NCBI GI: 116204651 Blast Desc: CHGG_10209 [Chaetomium globosum CBS 148.51] gi|88176337|gb|EAQ83805.1| CHGG_10209 [Chaetomium globosum CBS 148.51]
  misc_feature (1566)..(1705): NCBI GI: 256734625 Blast Desc: NECHADRAFT_31392 [Nectria haematococca mpVI 77-13-4]
  misc_feature (1599)..(1705): NCBI GI: 145608306 Blast Desc: MGG_12750 [Magnaporthe grisea 70-15] gi|145015797|gb|EDK00287.1| MGG_12750 [Magnaporthe grisea 70-15]
  misc_feature (1578)..(1705): NCBI GI: 46105358 Blast Desc: FG00307.1 [Gibberella zeae PH-1]
  misc_feature (1129)..(1391): NCBI GI: 256734625 Blast Desc: NECHADRAFT_31392 [Nectria haematococca mpVI 77-13-4]
MADYFLDLPSSPDPLTDDIPPSSARPPSRRTTKPQTDTPLLSIPQSSASRRARASSPRKRTFELDVGDERSPQKILVTVEAEEHLRHGNVSRQLFSSSPTRKPRKSNAAATTTTTTVPLNDEPGNMDGENTPRKRGRPRRISNGTPLPKVRKRAATPVQRKSKHPRLDGEPPSEASIMSDAPTDMGAEDGQDTLQPKPRTRTRKTPKKTTAAGTVPSSQLSTTATGRKRGRPRKALMPEEVAVLAEAAAEMSAIPPSESDMHPEIESEAGRDLDMARGGMSSYGMAHDDTTHIDPDLPQRENSATPTPSNYNYSLQAHESIERVSTSPRESHQELGGDDNDLMTFDDYPAMEQRSDTESEHDGGDDMTYNRQDTIANASDFSMIAVESLPSFQNSFRASQRSGAGAAASDAPEYGEETSRIINETLESLRRSMQDGTSGPPRNTNTEHENVDELSLDQGNTETIHQSMHATSSHRKRAFSKSPRRPRGTPLSRQVFAGKATHDDSFSSLPDSVLHAATPGRLPMKQTVAEQYDDNHDEYEDSFSEVPDEILEAATPRPPRRPRSINNSSPIRTGGQHSSSRLAARRTSAEFGSSRLPTPDETSSSNSGSKQATEENNAVALASHAQSRSTNHVDVPSSPPNMTRPRSLDYGPSELQNELTGNGLHGKQSPSTRVQPPAKSAAIPFQSLEAPLPTARPSLSPIVRAGRTLQNVMSDRSSPEVREGSLGSPFRGSAESQRYRQSSVGRSPSPQRNREIESQPPSTPTPMDRSFRSNMSRNYGRVSLGTNEARSSFGPGRLPHLNADTLKTTVETTNEGLDIEKQPYAQSTISSTKAAPPSQEELSEAAQDSIPQRMNNERLEYEVESPANQSLIAQQGTTRSQLAATRDDEDEESDSDQHEEPIDDQETQSNEPEEMDDLDVWDIEASRPSPVKQTQPQPDSVQIAPRADAQPSRRRKIPSPWRKTSRRLIYQDEIASSSQIEIEDEAQSEAEEAYVPEPVLEPVAPTRQQRSASRPEPGSQSEVSRVVPESPQPEKLAQTSAHASYMAARDHMEEHTGRSDPIGSDEPEEYQGDAEYFDDLAGLADQDSSEPENQEMVGDITEDEDMTGPQEEHQESNDLEPPQKPENTAAPVVADESGYSLLKEKETPKPQEKPAPPKSRFFSGFDFLNFFSSPANLPGKKTADTTPAETSKKPPGPEPVLPTIERPREPPRAVFSTGLFPSIPQKQNFQPSPKRRQDLFSPGRTLRSNDTIPDTYAPTSSTRGRSTSPPQSAAPSTPERQVFPPIEQKRNFTPQLEQSRGSLFVSSNKEKLAPRITVEEDADESEQESEEQDSSGVTDGSEYERVPPRPKPSQWDRNASPIKSSFRSPLKPTTPGRVVAFTNNTSDVVSPSPLAQVQGSTLGNTNNLNVFNMRSSVNGDRRTAGMDGGNVVMQGPLLQRPGLEGKENLLPTPLPYSKSSENEIIKNDANYRLDHDVSNRNANRGFGASVTGNANAQANRKPPSSLPAQNNPQPQLMHNRSQIRTTPPTTAGTHPISFGPLSPPQNTQPRHGRLTSNRPFNPPQPISQSQPQPQSRPQPQPQPQSQSHPQLQLQAASQKWLKSHWILLDEILKLRRSDPERFQEIYAHLPQLSERKSKNLLGKEVVANGERMLLREWHLDIVEAFMGEMEMMRNAGMTLAQGGSGWSEKDVAKRVFCLLVGEERRGIR

SEQ ID NO: 22183 - DNA, 5722 bp, Muscodor strobelii
  misc_feature: SGI EST ID NO. CUFF.52304.0
  misc_feature: Variant of the nucleotide sequence at SEQ ID NO 22181
aaaagtcacccccaagctcggggctagaggcccaactgggcgctaggcggcagaggtggcggtgtgtgggtggccggaaagtgtcaaagtaaacaaacggcgccaggtcagagtggcatcctccaccaaaacttagctgcccgcactgtccaattgcttcgaccgcgacggttacgagttatcgaccagcggcgcgacacacgatgtataccactatacatagatagatagctctacaccatcgcttgtagcttaccggcctgtattcgggttcgcgacgcgcctccgtcgtcgccgccgtccgccatggccgactacttcctcgacctcccctcgtctcccgacccgctcaccgacgatatcccgcctagctctgcgcgtccgccctcacgtcgcaccaccaaacctcagactgacaccccgctattatctataccccagagcagtgcctccagaagagcgcgcgcatcgtcgccgaggaaacggactttcgagctggatgtgggcgacgagcgatcaccccagaaaatacttgtcaccgtcgaggccgaggagcacctgagacatgggaatgtcagtcgccaactattctcctcctcgccgacgcgcaagccacgaaagagtaacgccgctgccaccacaacaaccacaaccgtgcctctgaatgacgagccggggaacatggatggtgaaaacacgcctcggaagcgcggcagaccgcgtcgcattagcaatgggacgccgttgcccaaggtccgcaagagagctgcaacccccgtgcagaggaaatccaagcatccccggttggatggcgagccaccgtccgaggccagtattatgagcgatgcgccgacggatatgggagcggaagacggacaggacacactgcagccgaaacccaggacaaggacacgcaaaacgccaaagaagactactgcggccggtacggtgccctcgtcccagctctcaaccactgcgaccggaaggaagcgcggacggccgaggaaagcactcatgcctgaagaagtagccgtgctggccgaggcggccgccgagatgtctgccatacctccatcggaatcagacatgcatccggagattgagtcggaagcaggacgggatctggatatggccagaggtggaatgtcaagctacggcatggcccacgacgatactacgcatattgacccggacctacctcaaagagagaacagtgctacaccaacaccatcaaactacaattactcactccaggcacatgagagcatagagagagtatctacttcgcctagagagtcgcaccaggagctgggtggagacgacaatgacctgatgacctttgatgactatccggctatggaacagcgcagtgacacagaatcggaacacgatggtggcgacgatatgacatacaatcggcaggataccattgctaatgcctcagattttagcatgattgcagtcgaatctcttccctcgttccaaaactcctttcgagcatcgcagcgctcgggcgcgggagcagccgcttccgatgcgcctgagtatggcgaagagacaagtcgcatcattaatgagactctcgagtcacttagacgaagcatgcaagatggcacgagcgggccgccacgcaacactaacaccgagcatgaaaatgtggacgaactctctttagaccagggcaatacggaaacgatacatcagtcgatgcatgcgacgagtagtcacaggaagagagcattttccaagagtcccaggagaccgaggggaacgccgctcagtcgtcaggtgtttgcgggcaaagctacgcatgacgactcgttctcaagtcttcccgacagtgtgctacatgcagctacccccggacgtctgccgatgaaacagactgtagctgagcagtatgacgataaccacgacgaatatgaggattcattctcggaggtaccagatgaaattttagaagccgcgaccccaagaccaccgagacggccgcgatcgattaataatagctcacccattaggactggagggcagcactcatcatctcgtctggcggctaggaggacaagcgccgagttcggctcaagtaggctgcctacgccggatgaaacatcatcgtcaaattctggatcaaaacaagcgaccgaagaaaacaatgcagttgctctcgcatctcatgcgcagtcccgctccacaaaccacgtggatgtgccatcatctccacccaacatgactcgacctcgttccctggactacggaccctcggaactccagaatgaactaactggcaatggcctgcacggcaagcaatcgccctcgactcgggtgcagccgcccgcaaaatctgcagcgatccccttccaatcattggaggcgccgcttccgaccgcaagaccgtctctctcaccaattgtgcgagccggtaggaccctgcagaatgtgatgtcagataggtcatcgccggaagtaagggaaggtagtttgggtagtcctttcagaggatccgcggagagtcagagatatcgacaatcttctgtcggtagatcaccatctccacaaaggaatcgggagatcgagtcacaacccccgtctacgccaacgcccatggatcgaagcttccgttccaatatgagccgcaattatgggcgtgtttctcttggaactaatgaggctaggagctctttcggcccagggaggctgcctcatctgaatgcggacacattgaagacgactgttgagactacaaacgaaggtctagatatcgagaaacaaccttatgcgcaatctacgataagttctacgaaagcagcacctccaagccaggaggaattgagcgaggctgcgcaggacagtatcccacaacgaatgaacaacgagcgacttgaatacgaggtggaaagccctgcgaatcagagtcttattgcacaacaaggcacgactcggagccaattggctgcaacacgcgacgacgaggatgaggaatcagatagtgaccagcatgaagaacccattgacgatcaagaaacacagagtaacgagccggaagagatggatgacttggatgtatgggatatcgaggcatcgcgcccatcgcctgtgaagcagacgcagccgcagccagactctgttcaaattgcaccgagggctgatgctcagccttcgagaaggaggaaaattcctagtccgtggagaaagactagtcggaggctgatctaccaggatgagattgcaagctcatctcagatagaaatcgaagatgaagcgcagagcgaagccgaggaggcctatgtcccagaacctgtcctagagccggttgctcctactcgccagcagcgctctgcgtctcggcccgagcctggtagccagagtgaggtatcgcgtgttgtacccgaaagtccccagccggagaaacttgctcagacttcggcacatgcctcttacatggctgcacgagaccacatggaagagcacactggccgttccgacccgataggttctgacgagcctgaggagtaccaaggggatgccgagtattttgacgatctcgctgggctcgcagatcaagactcctcagaacccgaaaatcaagagatggtcggcgacatcacagaagacgaggacatgacaggcccacaggaagagcatcaagaatcaaatgatcttgaaccacctcaaaagcctgagaatactgcagctccagtagtcgcagatgagtccggatactcattactgaaagagaaggaaacgcccaagcctcaagagaagccggcccccccaaaatctcgattctttagcggctttgacttcttaaacttcttctcgtcaccagctaatctacctggcaagaagactgccgatacaacgcctgctgaaacgagcaagaagcctccaggtcccgagccagtattgccgaccatagagcgaccacgggagccgccaagggctgtcttctcaaccgggctatttccctcaattccccagaagcaaaacttccagcctagcccgaaacgaagacaggatttgttttctccgggccgtacgctgcgatcgaatgatacgatacccgacacctatgcacctacctcttcgacgcgtggtcgctctacatcgcctccccaatctgcggcgccgtcaacgcctgagaggcaggttttccctcccatcgaacagaagcgaaactttacgcctcagcttgaacagtctcggggctcgttgtttgtctcttctaataaggaaaagttggcccccaggattacagtcgaggaagatgcggatgaatcagagcaggagagtgaggaacaagactcctccggcgtaacggatggttcggaatacgagcgtgtgccgcctcgtccaaagccttcgcaatgggatcggaacgcatcaccgatcaaatctagtttccgatcgccgttgaaacctacgacaccaggacgtgtggtcgctttcacgaacaacacaagtgatgttgtgtcaccctcgcctctggcccaagtccaagggtctactttaggcaatacaaataacctgaatgtcttcaatatgagaagcagtgtaaatggcgatcgacgtactgctggtatggatggcgggaatgttgtgatgcaaggcccacttctacaacggccgggcctcgagggtaaggagaacttgttgccgacccctttgccttactctaaatcgagtgaaaatgagattatcaagaacgacgccaactatcgtctagatcatgatgtttcgaatcgcaacgcaaatagaggcttcggggcgagtgtcacagggaatgccaacgcgcaagccaatagaaaaccgccatcatccctccccgcgcagaacaacccgcaacctcaactcatgcataatagaagccaaatccgaaccacgccaccgacaactgccggcacacacccaatatccttcggacctctaagcccacctcagaatactcaacctcgccatggccgcctaacatccaacagacccttcaatccgcctcaacctatctcccaatcccagcctcagccccaatcgcgaccccaacctcaacctcaaccacagtcccaatctcatcctcagcttcaactccaggcagcatcgcagaaatggctcaaatcgcactggatactcctcgatgagatcctgaaacttcgtcgttcagaccccgagaggtttcaagagatctacgcccatcttccgcagctatccgaaaggaagagcaagaacttgctgggcaaagaggttgttgcgaatggcgagagaatgctgcttagggagtggcatctagatattgttgaagcgttcatgggcgagatggagatgatgaggaatgcgggcatgacactagcacaaggtggtagtgggtggagtgagaaagatgttgcgaagcgggtattttgtttgcttgttggggaggagaggagggggattaggtaggagaggggatgttgtgctctgttgatggtgatgtgctagatgtctcgagaaagatagatggatgaaggagggggattgtatagcatattggtaagcgttgatggttgatttgcttggtccggttggcttggttcggttgcttaggatgtgttagctcaaggttggcaaaggggcgtttgggaatggatagcatgagtagggtgacatatgcagggcaaaggctgtgtcggtagcatgaatatagtattgcacatggcgcgacattgtcgcacattagcttgagttgcat

SEQ ID NO: 22184 - DNA, 1491 bp, Muscodor strobelii
  misc_feature: SGI cDNA ID NO. 567528
  misc_feature: Encodes the peptide sequence at SEQ ID NO 22185
atgactctatccgtcgagttgaagacgccgatcactggctcttacagccagccaaccggattattcatcaacaacgagtgggtagaaggagtcgacaagaagacctttgaggttatcaaccctgctaccgaggaggtcatctgctccgtcgccgaagccacagagaaggatgtcgatatcgccgtagcagctgcacgcaaagcgtttgagggagactggaagacgacgacgccacagcagcgtggcatctacttgacgaagctcgccgacctcatagagaagaaccttgacctgcttgcgtcagtcgagtccttagacaatggcaagtccattaccatggcgcgaggtgacgtcggtgctgtcgccaactgcacgcgatactacggtggttgggcggacaagatccacggcaagacagtcgacgtcaactccgagtccttccactacaccaagtctgagcctattggcgtctgtggccaaatcatcccctggaacttccctctgttgatgctggcgtggaagatcggccccgctctagccacaggtaacaccgtcgtcctcaagaccgctgagcagactcctctgtccgctctggtctttgccaacctggtcaaggaagctggcttccccgccggcgtcctcaacatcatctctggcttcgggaaggtggctggtgccgccatctcggctcacatggacgttgacaaggtcgctttcactggttccaccgtcgttggccgtgccattatgaaggcagccgcctcttccaacctgaagaaggtcaccctcgagctcggtggcaagtcgcccaacattgtgttcaacgacgccgacattgagcaggccatctcatgggttaacttcggtatctactacaaccacggccaatgctgctgtgccggctctcgtatctacgtgcaagacggcatctacgacaagttcgtcgaggcattcaaggcgcgcgccgtcaagaacactgttggcgacccattcgacgaaaagaccttccagggaccccaggtcagccagcttcagtacgaccgcatcatgggctacatcgaggagggaaagaaggccggtgccaaaattgagaccggtggcgagagacacggcgacaagggctacttcatccagcccaccatcttcagcaacgtcactgccgacatgaagatcatgcgggaggagatcttcggccccgtctgcaccattgccaagttctcgagcgaggaggaagtcatcaagtcagccaacgacagcacatatggtctcgccgccgccgtacacaccaacgacctcaacacgtcgatccgcgtcagcaacgctctcaaggccggtactgtctgggtcaactgctacaacctgatccaccaccaggtgcccttcggtggttacaaggagtccggtatcggccgtgagttgggagaggccgcgctggccaactacacacagaacaagtctgttgccatccgcctgactggtgctctgttctaa

SEQ ID NO: 22185 - protein, 496 aa, Muscodor strobelii
  misc_feature: SGI Peptide ID NO. 567528
  misc_feature (27)..(487): Pfam Id: PF00171 Pfam Desc: Aldehyde dehydrogenase family
  misc_feature (1)..(496): NCBI GI: 39943778 Blast Desc: conserved [Magnaporthe grisea 70-15] gi|145014600|gb|EDJ99168.1| conserved [Magnaporthe grisea 70-15]
  misc_feature (1)..(496): NCBI GI: 261353005 Blast Desc: aldehyde dehydrogenase [Verticillium albo-atrum VaMs.102]
  misc_feature (5)..(491): NCBI GI: 85082154 Blast Desc: aldehyde dehydrogenase [Neurospora crassa OR74A] gi|18376350|emb|CAD21128.1| aldehyde dehydrogenase [Neurospora crassa] gi|28917941|gb|EAA27626.1| aldehyde dehydrogenase crassa
  misc_feature (5)..(496): NCBI GI: 116199967 Blast Desc: CHGG_08139 [Chaetomium globosum CBS 148.51] gi|88179418|gb|EAQ86886.1| CHGG_08139 [Chaetomium globosum CBS 148.51]
  misc_feature (6)..(496): NCBI GI: 171690144 Blast Desc: protein product [Podospora anserina] gi|170945020|emb|CAP71131.1| protein product [Podospora anserina]
  misc_feature (4)..(496): NCBI GI: 154310767 Blast Desc: BC1G_06362 [Botryotinia fuckeliana B05.10] gi|150851161|gb|EDN26354.1| BC1G_06362 [Botryotinia fuckeliana B05.10]
  misc_feature (1)..(496): NCBI GI: 110592121 Blast Desc: aldehyde dehydrogenase [Beauveria bassiana]
  misc_feature (1)..(496): NCBI GI: 145698455 Blast Desc: aldehyde dehydrogenase [Aciculosporium take]
  misc_feature (3)..(491): NCBI GI: 256734672 Blast Desc: [Nectria haematococca mpVI 77-13-4]
  misc_feature (1)..(491): NCBI GI: 46108194 Blast Desc: FG00979.1 [Gibberella zeae PH-1]
  misc_feature (4)..(496): SWISSPROT Homolog: EC 1.2.1.3 Aldehyde dehydrogenase (NAD(+))
  misc_feature: Useful for introducing or modulating the production of volatile compounds
  misc_feature: Useful for fungicidal and/or biocontrol applications
MTLSVELKTPITGSYSQPTGLFINNEWVEGVDKKTFEVINPATEEVICSVAEATEKDVDIAVAAARKAFEGDWKTTTPQQRGIYLTKLADLIEKNLDLLASVESLDNGKSITMARGDVGAVANCTRYYGGWADKIHGKTVDVNSESFHYTKSEPIGVCGQIIPWNFPLLMLAWKIGPALATGNTVVLKTAEQTPLSALVFANLVKEAGFPAGVLNIISGFGKVAGAAISAHMDVDKVAFTGSTVVGRAIMKAAASSNLKKVTLELGGKSPNIVFNDADIEQAISWVNFGIYYNHGQCCCAGSRIYVQDGIYDKFVEAFKARAVKNTVGDPFDEKTFQGPQVSQLQYDRIMGYIEEGKKAGAKIETGGERHGDKGYFIQPTIFSNVTADMKIMREEIFGPVCTIAKFSSEEEVIKSANDSTYGLAAAVHTNDLNTSIRVSNALKAGTVWVNCYNLIHHQVPFGGYKESGIGRELGEAALANYTQNKSVAIRLTGALF

SEQ ID NO: 22186 - DNA, 1887 bp, Muscodor strobelii
  misc_feature: SGI EST ID NO. CUFF.52175.0
  misc_feature: Variant of the nucleotide sequence at SEQ ID NO 22184
ctccgtcgccccttgccgcacataaaagtagctttgttcccattcacttcgccgaggagagaaacatacgagtctaatttgtatacccctctcgaacaattctcatctgcactgctctgtaaaatccgactaaaacaaataatcctttcatcactgttcaatctcatattttaacgccaaaatgactctatccgtcgagttgaagacgccgatcactggctcttacagccagccaaccggattattcatcaacaacgagtgggtagaaggagtcgacaagaagacctttgaggttatcaaccctgctaccgaggaggtcatctgctccgtcgccgaagccacagagaaggatgtcgatatcgccgtagcagctgcacgcaaagcgtttgagggagactggaagacgacgacgccacagcagcgtggcatctacttgacgaagctcgccgacctcatagagaagaaccttgacctgcttgcgtcagtcgagtccttagacaatggcaagtccattaccatggcgcgaggtgacgtcggtgctgtcgccaactgcacgcgatactacggtggttgggcggacaagatccacggcaagacagtcgacgtcaactccgagtccttccactacaccaagtctgagcctattggcgtctgtggccaaatcatcccctggaacttccctctgttgatgctggcgtggaagatcggccccgctctagccacaggtaacaccgtcgtcctcaagaccgctgagcagactcctctgtccgctctggtctttgccaacctggtcaaggaagctggcttccccgccggcgtcctcaacatcatctctggcttcgggaaggtggctggtgccgccatctcggctcacatggacgttgacaaggtcgctttcactggttccaccgtcgttggccgtgccattatgaaggcagccgcctcttccaacctgaagaaggtcaccctcgagctcggtggcaagtcgcccaacattgtgttcaacgacgccgacattgagcaggccatctcatgggttaacttcggtatctactacaaccacggccaatgctgctgtgccggctctcgtatctacgtgcaagacggcatctacgacaagttcgtcgaggcattcaaggcgcgcgccgtcaagaacactgttggcgacccattcgacgaaaagaccttccagggaccccaggtcagccagcttcagtacgaccgcatcatgggctacatcgaggagggaaagaaggccggtgccaaaattgagaccggtggcgagagacacggcgacaagggctacttcatccagcccaccatcttcagcaacgtcactgccgacatgaagatcatgcgggaggagatcttcggccccgtctgcaccattgccaagttctcgagcgaggaggaagtcatcaagtcagccaacgacagcacatatggtctcgccgccgccgtacacaccaacgacctcaacacgtcgatccgcgtcagcaacgctctcaaggccggtactgtctgggtcaactgctacaacctgatccaccaccaggtgcccttcggtggttacaaggagtccggtatcggccgtgagttgggagaggccgcgctggccaactacacacagaacaagtctgttgccatccgcctgactggtgctctgttctaagcgtaacgatgataatgacgatgatgaaaaaagcataagattgatactcaccagatggacaggtggtgttctaattttgggaccatgaacatatggaattgagggatggcatactatctgccgggcttgtatatcagcttatttttcgtcttcacgggcttgtctagacgtaattacgatagttaaatgagtaaaaacattcatgaaatctccac

SEQ ID NO: 22187 - DNA, 2907 bp, Muscodor strobelii
  misc_feature: SGI cDNA ID NO. 567529
  misc_feature: Encodes the peptide sequence at SEQ ID NO 22188
atggccgatgttgctgaggccattgccgccgctcttgcggctgcaggtatccctcctgccccgcctctcagtcccgatatcaaaacagagcccgccaacagcgatgctatgatgatcgattccgaaccactgcccattacccaattccctccatcgcctccccagcagaaacgatcacggtcgcctgatggtcatgctcgaacgaatggtgacgaacaacgagaagagaagcgcctcaaggtcgagccgagcgcttgggatgatgatttggatgagatagcgagaatggtccaggctgcctccgaaaatgcgatgcgcagttttcagtcgccttctgaatccgagattgaacctgcaccactgccgcagccacagcctcacccacaaccacaaccacaatcccagtcgcaaccgcaggctgcatataaacccgatgaatataagcccgacccagtacccgaacaccatgcagaagcgccaacccacggtcttgagatagcggatcaggagcacgttgagagcagcattgaaaaccccctggatggtatctttgacgaagtcgactcaccactcaaggactctgatgaatccaggccggacacgttgtggagtaaccatcgagactacacccgcaggaagcacgttatcccagctctgggtgcacttgcggttgacatcctgattgcactgtcagagcagacgttggaggataccctggaaaagctttgcgaccagaagactgacattgctaaagagtatgaggttctacgaaagttctttgattttcatcggagacagctttccaacggcaaagatgggttcctcaatgcagacgaacttgggtgccaggacgaaacaagggaagtaatcagaattgccaatctcgcagcggcctgttcaactatttttggagcgaatgatattactctcgaggaagtcaataagcactttttggaaatctttctacccgaaggcggagagctgacctatgatactgctgagctgtatcttggactcaagacacagctctttcttgccgtccttgaaggtgatatggaaaagtccaaggtagaattcctccaggagttgttcgtgaccggagtggaagaatcgctccgggcccagcacccaaatattccactgaacacgaccgagacagattttctggcaaatactaagacaaggaaactcatgctgctcacggcatcgcaacccgcagatagtattcaagtcttaattaaacagtttacctacgaagctttcttggacagtctcagcacttatctaaatgataatatcgagaacattcaggcagagggctcttcgaagtccgaggcgaaaattacgaccaatagcccagctccggctgacgatgcccacgacggccttgatgacttcgatctgagcgctatgattgcagaagcctcaaaatcagcagctgaaagtgcgatgcacccggctaacaacgacctaaataacttcgatgatctttccgctttcctgtctctggcggtcgagcagtcaagacagatggcttcaagttccgaattaccggccaccattgcttcagctacggaaagcgcttcgagggcaacggctttagcactcgagagcatggccaaaaaccaatggcacccagccgggtcatctcaaaatacaagccagatgcagacgtcagtgcagcaaaatggttatcacactcaacaagcgcagacacaacaggcgcagtatccgtaccagcggcaaccacagccatcgacgtctacagatgtgcatggatctcaacagacttcgggaggtgcactccctccaaaccagactgattcgacacccgctctatatgagcgcgcacgacaggcagcggcagcacgatcatcaacccacgctcgcagagaaggctctcattctacccgtcggccttggagcccagaagaggagaaagcgctgatgatgggtctcgacatggtcaagggccctcattggtcacagattttgtccctttttggtcctgctggcactatgagtcgcatacttgcagacaggacgcaggtgcaattaaaagacaaggcgaggaacttgaagctattcttcttgaaaacaaattcagaaatgccctactaccttcagtgcgttacgggcgagcttaagacccgagcaccaactcaagcagcgcggaaggaggctgaggagaaagcaagactcaactcagaggaacatcaagcccatatgaatgggatcttaaccttggccggaggtcttcagaataacaatgccccgagaccgactccctctgccgccgctcctagaagctcattatctcaacaacactcggcgaactcacatgcacaccaaagcatctctgtgtcatcgcagcaatcggcgccgcctttaatttccacgcccgcagcgccccgtccatcaatacctgcaccgcaaccagtgagcttgccaacgttcacttccatcaaccgtagcacgcagaatcacccaacaccaatgcccacgcctacagcttcggcttcggccccggccgcccctccttctccgccaccacctcaacacccaaccccgatgcctaatacccctgcaccacatccgctgtacaaggtgcaggagcacttagaagaattgagccgacagacaactccgacgactccggtctctgagaacacgcccgctacgcatgcaccagtagaacacgatggtatgagcagtgtcgacgcggcggttcttggtctcaaagctgctatagagggagagcccctggcggcagcggttgcctcgtcgtccactccagccacaccagtgccccaagccacaacacctcatccccaacctcctccagctatcaaacaggaatccatcaaacaggaggaagacactcgcgtcaatggcacaagtcactaa

SEQ ID NO: 22188 - protein, 968 aa, Muscodor strobelii
  misc_feature: SGI Peptide ID NO. 567529
  misc_feature (638)..(694): Pfam Id: PF00249 Pfam Desc: Myb-like DNA-binding domain
  misc_feature (209)..(767): NCBI GI: 116199969 Blast Desc: CHGG_08140 [Chaetomium globosum CBS 148.51] gi|88179419|gb|EAQ86887.1| CHGG_08140 [Chaetomium globosum CBS 148.51]
  misc_feature (204)..(759): NCBI GI: 85082158 Blast Desc: NCU03416 [Neurospora crassa OR74A] gi|18376351|emb|CAD21129.1| conserved [Neurospora crassa] gi|28917942|gb|EAA27627.1| [Neurospora crassa OR74A]
  misc_feature (203)..(771): NCBI GI: 171690142 Blast Desc: protein product [Podospora anserina] gi|170945019|emb|CAP71130.1| protein product [Podospora anserina]
  misc_feature (209)..(750): NCBI GI: 39943776 Blast Desc: MGG_03899 [Magnaporthe grisea 70-15] gi|145014599|gb|EDJ99167.1| MGG_03899 [Magnaporthe grisea 70-15]
  misc_feature (216)..(751): NCBI GI: 242762713 Blast Desc: MYB DNA binding protein (Tbf1), [Talaromyces stipitatus ATCC 10500] gi|218723629|gb|EED23046.1| MYB DNA binding protein (Tbf1), [Talaromyces stipitatus ATCC 10500]
  misc_feature (599)..(774): NCBI GI: 256730829 Blast Desc: NECHADRAFT_65268 [Nectria haematococca mpVI 77-13-4]
  misc_feature (599)..(755): NCBI GI: 46109150 Blast Desc: FG01457.1 [Gibberella zeae PH-1]
  misc_feature (557)..(757): NCBI GI: 156033318 Blast Desc: SS1G_13379 [Sclerotinia sclerotiorum 1980] gi|154698782|gb|EDN98520.1| SS1G_13379 [Sclerotinia sclerotiorum 1980]
  misc_feature (606)..(751): NCBI GI: 212529592 Blast Desc: MYB DNA binding protein (Tbf1), [Penicillium marneffei ATCC 18224] gi|210074351|gb|EEA28438.1| MYB DNA binding protein (Tbf1), [Penicillium marneffei ATCC 18224]
  misc_feature (605)..(752): NCBI GI: 238841206 Blast Desc: telomeric DNA-binding factor trf1 [Microsporum canis CBS 113480]
MADVAEAIAAALAAAGIPPAPPLSPDIKTEPANSDAMMIDSEPLPITQFPPSPPQQKRSRSPDGHARTNGDEQREEKRLKVEPSAWDDDLDEIARMVQAASENAMRSFQSPSESEIEPAPLPQPQPHPQPQPQSQSQPQAAYKPDEYKPDPVPEHHAEAPTHGLEIADQEHVESSIENPLDGIFDEVDSPLKDSDESRPDTLWSNHRDYTRRKHVIPALGALAVDILIALSEQTLEDTLEKLCDQKTDIAKEYEVLRKFFDFHRRQLSNGKDGFLNADELGCQDETREVIRIANLAAACSTIFGANDITLEEVNKHFLEIFLPEGGELTYDTAELYLGLKTQLFLAVLEGDMEKSKVEFLQELFVTGVEESLRAQHPNIPLNTTETDFLANTKTRKLMLLTASQPADSIQVLIKQFTYEAFLDSLSTYLNDNIENIQAEGSSKSEAKITTNSPAPADDAHDGLDDFDLSAMIAEASKSAAESAMHPANNDLNNFDDLSAFLSLAVEQSRQMASSSELPATIASATESASRATALALESMAKNQWHPAGSSQNTSQMQTSVQQNGYHTQQAQTQQAQYPYQRQPQPSTSTDVHGSQQTSGGALPPNQTDSTPALYERARQAAAARSSTHARREGSHSTRRPWSPEEEKALMMGLDMVKGPHWSQILSLFGPAGTMSRILADRTQVQLKDKARNLKLFFLKTNSEMPYYLQCVTGELKTRAPTQAARKEAEEKARLNSEEHQAHMNGILTLAGGLQNNNAPRPTPSAAAPRSSLSQQHSANSHAHQSISVSSQQSAPPLISTPAAPRPSIPAPQPVSLPTFTSINRSTQNHPTPMPTPTASASAPAAPPSPPPPQHPTPMPNTPAPHPLYKVQEHLEELSRQTTPTTPVSENTPATHAPVEHDGMSSVDAAVLGLKAAIEGEPLAAAVASSSTPATPVPQATTPHPQPPPAIKQESIKQEEDTRVNGTSH

SEQ ID NO: 22189 - DNA, 4087 bp, Muscodor strobelii
  misc_feature: SGI EST ID NO. CUFF.52162.2
  misc_feature: Variant of the nucleotide sequence at SEQ ID NO 22187
gaaaagtgaaacatgctaaatcaggtgacgaccgagtagtcgtggatgtaattcttacaggctattcattggtctttctgtcattgagcacatgcataggtatacctgtgccgatcattcagcctcattctcatggcaattgcgctggggtttgtgatagacgataagctagatcgattaagcatcgacgatggaaatttaaacaaatcgggggagaatatgaggtgttgtgtatcgtatcgataagaggtgtcggggctcgatttaagggcatggagggtcggcagctcccccaaaatttgcccgacatcatcgtcgcccgcttgcatcgacagctgcccgctcgaatggcatcgaattgagagactacggctattttgacagatgagattgtgtcgcatgttctacgacgacacatggccgatgttgctgaggccattgccgccgctcttgcggctgcaggtatccctcctgccccgcctctcagtcccgatatcaaaacagagcccgccaacagcgatgctatgatgatcgattccgaaccactgcccattacccaattccctccatcgcctccccagcagaaacgatcacggtcgcctgatggtcatgctcgaacgaatggtgacgaacaacgagaagagaagcgcctcaaggtcgagccgagcgcttgggatgatgatttggatgagatagcgagaatggtccaggctgcctccgaaaatgcgatgcgcagttttcagtcgccttctgaatccgagattgaacctgcaccactgccgcagccacagcctcacccacaaccacaaccacaatcccagtcgcaaccgcaggctgcatataaacccgatgaatataagcccgacccagtacccgaacaccatgcagaagcgccaacccacggtcttgagatagcggatcaggagcacgttgagagcagcattgaaaaccccctggatggtatctttgacgaagtcgactcaccactcaaggactctgatgaatccaggccggacacgttgtggagtaaccatcgagactacacccgcaggaagcacgttatcccagctctgggtgcacttgcggttgacatcctgattgcactgtcagagcagacgttggaggataccctggaaaagctttgcgaccagaagactgacattgctaaagagtatgaggttctacgaaagttctttgattttcatcggagacagctttccaacggcaaagatgggttcctcaatgcagacgaacttgggtgccaggacgaaacaagggaagtaatcagaattgccaatctcgcagcggcctgttcaactatttttggagcgaatgatattactctcgaggaagtcaataagcactttttggaaatctttctacccgaaggcggagagctgacctatgatactgctgagctgtatcttggactcaagacacagctctttcttgccgtccttgaaggtgatatggaaaagtccaaggtagaattcctccaggagttgttcgtgaccggagtggaagaatcgctccgggcccagcacccaaatattccactgaacacgaccgagacagattttctggcaaatactaagacaaggaaactcatgctgctcacggcatcgcaacccgcagatagtattcaagtcttaattaaacagtttacctacgaagctttcttggacagtctcagcacttatctaaatgataatatcgagaacattcaggcagagggctcttcgaagtccgaggcgaaaattacgaccaatagcccagctccggctgacgatgcccacgacggccttgatgacttcgatctgagcgctatgattgcagaagcctcaaaatcagcagctgaaagtgcgatgcacccggctaacaacgacctaaataacttcgatgatctttccgctttcctgtctctggcggtcgagcagtcaagacagatggcttcaagttccgaattaccggccaccattgcttcagctacggaaagcgcttcgagggcaacggctttagcactcgagagcatggccaaaaaccaatggcacccagccgggtcatctcaaaatacaagccagatgcagacgtcagtgcagcaaaatggttatcacactcaacaagcgcagacacaacaggcgcagtatccgtaccagcggcaaccacagccatcgacgtctacagatgtgcatggatctcaacagacttcgggaggtgcactccctccaaaccagactgattcgacacccgctctatatgagcgcgcacgacaggcagcggcagcacgatcatcaacccacgctcgcagagaaggctctcattctacccgtcggccttggagcccagaagaggagaaagcgctgatgatgggtctcgacatggtcaagggccctcattggtcacagattttgtccctttttggtcctgctggcactatgagtcgcatacttgcagacaggacgcaggtgcaattaaaagacaaggcgaggaacttgaagctattcttcttgaaaacaaattcagaaatgccctactaccttcagtgcgttacgggcgagcttaagacccgagcaccaactcaagcagcgcggaaggaggctgaggagaaagcaagactcaactcagaggaacatcaagcccatatgaatgggatcttaaccttggccggaggtcttcagaataacaatgccccgagaccgactccctctgccgccgctcctagaagctcattatctcaacaacactcggcgaactcacatgcacaccaaagcatctctgtgtcatcgcagcaatcggcgccgcctttaatttccacgcccgcagcgccccgtccatcaatacctgcaccgcaaccagtgagcttgccaacgttcacttccatcaaccgtagcacgcagaatcacccaacaccaatgcccacgcctacagcttcggcttcggccccggccgcccctccttctccgccaccacctcaacacccaaccccgatgcctaatacccctgcaccacatccgctgtacaaggtgcaggagcacttagaagaattgagccgacagacaactccgacgactccggtctctgagaacacgcccgctacgcatgcaccagtagaacacgatggtatgagcagtgtcgacgcggcggttcttggtctcaaagctgctatagagggagagcccctggcggcagcggttgcctcgtcgtccactccagccacaccagtgccccaagccacaacacctcatccccaacctcctccagctatcaaacaggaatccatcaaacaggaggaagacactcgcgtcaatggcacaagtcactaaattcttcattgttttactcggtctgaaaactgtctgccttttcctatttatatatgataactttagtaagtcacggttgatacccggaggtcaggggaattgtggacaggctaagttcactcgggcgttagaacggtgggcggaaatgatagcaagcagctgcgcttttacgacagcaaatgactcatgcatgggcgttgaccctttacctcatctgtctgatttcattgtgacaaacgtcgtaccactagtccgccctgctggatctcgggcggctgtgacctatggatctctctgatgtaaccgatgatacactttgtgtcaaatggacattcgtttgtgcttgactcggcatattggtgcttccatcattccggggcgccggaatctatcatgtttgatgatgcctgagtggtttagaagtatggcagtgcctcgcaagtcttggactttgctcctatcagctaaacctacgaccatgccttcaagcactctgttggggtgccccgaataacaatttcacgggcgggacagcgccagtttgccattgaacacataaatgaggcgatatgtcatagtcatatgaattttgtgctaggcgcactaacatcgtgatgatcaaatgtggcgttcattcgtgtaccatattcagtaagaatatggaagccggagtgagtcaaaaccccaaagcaaaccttctcgatatattacatgtacaacttcacggcagtgttttgatgcgacacccgctcataccataccca

SEQ ID NO: 22190 - DNA, 1050 bp, Muscodor strobelii
  misc_feature: SGI cDNA ID NO. 567530
  misc_feature: Encodes the peptide sequence at SEQ ID NO 22191
atgttcttcccactctcaaccgacagcaagatcgtcctccaggccgcgcataagatcattgccgaagcactcaatcaaaagctggacatcgtccaaccgcagatgtttgatggaatcaaatacgccatcgacacgtgtcttggcgccgacccggatgagggatggaagaagctgcctctcatggatacgctgtcaacagccttagacagcagtgtgagtcgtgtcatattcggacgcaagctgagccgcgatgctggctttctacgcatgatgcggctgttcatagttggtggaggtgtcctcaccgagctcgttgggcagctacccgtcgggctgtttcgacctgctgttggagttccattcaatctgttcactatggctgtaaagaagatgtgcgcagcatactatttgcgaccagaaatcctgaagcgcatggcagagattgattctggtaaagatagtgaggatggagaattcgatttcatgacccagtgcattcgatctgtcaggaagctcaaattcccgatcaagacagatgaagtcactttcgtgacagatatgctgttattcctggcattagctggagttgtttcaacacgaaccacgactgtgaataccttcatggacatcctggggccccagggtacaaagcaagatacatacgcgatgctacgtcgtgaggcagaagccacttttaaatcggaggccgactatgcttctgcggaaaacctcaaacagagcgtcgtcattgatagctgcgtgcgtgaaagcgcccgcaaaaatcccttgcagacacgcggtcttgtgaaacaagtcatgcccagagacgggataacacttcctgacggcgttcgggtcccacaaggagcatggctaggtatacctgttgaagccatacatagggacgaaacgatatatcccgatgcgcgtgcatttgacgctctccgatttgcccgtatgcgggtggagggcgagtataacaagagcttggacgcatctgagccgagtgatacgtacatgttttttagttacgggcgatccgcatggtga

SEQ ID NO: 22191 - protein, 349 aa, Muscodor strobelii
  misc_feature: SGI Peptide ID NO. 567530
  misc_feature (18)..(348): NCBI GI: 238505663 Blast Desc: ferulate-5-hydroxylase, [Aspergillus flavus NRRL3357] gi|220690159|gb|EED46509.1| ferulate-5-hydroxylase, [Aspergillus flavus NRRL3357]
  misc_feature (37)..(349): NCBI GI: 189211678 Blast Desc: cytochrome P450 [Pyrenophora tritici-repentis Pt-1C-BFP] gi|187979367|gb|EDU45993.1| cytochrome P450 [Pyrenophora tritici-repentis Pt-1C-BFP]
  misc_feature (37)..(349): NCBI GI: 189211638 Blast Desc: cytochrome P450 [Pyrenophora tritici-repentis Pt-1C-BFP] gi|187979347|gb|EDU45973.1| cytochrome P450 [Pyrenophora tritici-repentis Pt-1C-BFP]
  misc_feature (13)..(348): NCBI GI: 169780248 Blast Desc: [Aspergillus oryzae RIB40] gi|83773328|dbj|BAE63455.1| protein product [Aspergillus oryzae]
  misc_feature (13)..(348): NCBI GI: 238505661 Blast Desc: cytochrome P450, [Aspergillus flavus NRRL3357] gi|220690158|gb|EED46508.1| cytochrome P450, [Aspergillus flavus NRRL3357]
  misc_feature (8)..(348): NCBI GI: 145609640 Blast Desc: MGG_03104 [Magnaporthe grisea 70-15] gi|149210871|ref|XP_001522810.1| MGCH7_ch7g908 [Magnaporthe grisea 70-15] gi|86196863|gb|EAQ71501.1| MGCH7_ch7g908 grisea
  misc_feature (19)..(348): NCBI GI: 238497544 Blast Desc: cytochrome P450, [Aspergillus flavus NRRL3357] gi|220693281|gb|EED49626.1| cytochrome P450, [Aspergillus flavus NRRL3357]
  misc_feature (18)..(348): NCBI GI: 39974563 Blast Desc: MGG_00572 [Magnaporthe grisea 70-15] gi|145018527|gb|EDK02806.1| MGG_00572 [Magnaporthe grisea 70-15]
  misc_feature (17)..(317): NCBI GI: 62318473 Blast Desc: cytochrome P450 [Phanerochaete chrysosporium]
  misc_feature (19)..(348): NCBI GI: 170113475 Blast Desc: [Laccaria bicolor S238N-H82] gi|164637104|gb|EDR01392.1| [Laccaria bicolor S238N-H82]
MFFPLSTDSKIVLQAAHKIIAEALNQKLDIVQPQMFDGIKYAIDTCLGADPDEGWKKLPLMDTLSTALDSSVSRVIFGRKLSRDAGFLRMMRLFIVGGGVLTELVGQLPVGLFRPAVGVPFNLFTMAVKKMCAAYYLRPEILKRMAEIDSGKDSEDGEFDFMTQCIRSVRKLKFPIKTDEVTFVTDMLLFLALAGVVSTRTTTVNTFMDILGPQGTKQDTYAMLRREAEATFKSEADYASAENLKQSVVIDSCVRESARKNPLQTRGLVKQVMPRDGITLPDGVRVPQGAWLGIPVEAIHRDETIYPDARAFDALRFARMRVEGEYNKSLDASEPSDTYMFFSYGRSAW

SEQ ID NO: 22192 - DNA, 2292 bp, Muscodor strobelii
  misc_feature: SGI cDNA ID NO. 567531
  misc_feature: Encodes the peptide sequence at SEQ ID NO 22193
atgtctatagtatctacgaccaccgccgtcatcgcaagtggcgattcgaactccgcgcatacgaggaagaagcatggcgcactggatgaaacggaatgccgaacagaccttcggcgttggcggctacatgccaataaaggacgacatacgtggacatatcttgaagaacaagaactatcacatgtcgagcagggccaaacattctatgaaaagtactggctaggcgtacaaacaggaagcggccgtgaagatggatcaaaggattccctagcccgcaatacatgcaagtcgcatgtcgagttgtacgaacaagcaccaaagacattggataacggttgcaacttcttgcgacagcttcaaatggaagatgggagctggggttcgaactgcgatggcccaatgttcctcacggccggcatcgtctttgcctgttacgtagtaggtattcctcttccacggtcgacgaaacaagagatgtgccggtacctcattgaaactagaaatgccgacggcggctggggagtgtatctcaccggtccgtcgacggtttttggaaccgcaatcaactatgttatgttaagacttttggggctggggcctgaacaacctgtttgtgagagagcccgcaacttgttagcatccatgggtggagtgttaggcataccgacctggggacgattctggctttgtgttctgaatctctatgattgggacggcattgttcctttacctgcagagcttctcctgacgccaaatgtatttccacttagtcccgcaaactggtggatgccaattcgcaacatctatatgggcatgtgctacctatatggtcatcggtttcaagcgcctgaagatgagctgattttagcaatccggaacgagctatacgttcaacgatcctacagtaacatcacagattggacgtcgttgagatcgtacgtcaacagtgtcgatttggtcaagtcaaaatctaccgcgcaatccctcatgatatctgccatgagtatatgggagcgatgggcaagaccatgtgccaccagtggaattcgtagtagtggcttgaaagaggctctgtttcaagtcgaggcagacgtacaaagtaccgaatactgcagttattcccctgcttactggtctgtcgatatcatcgttcttcgccacgcccacgggcatgccagtcattgggttcaaggcatgattccgcattatagtgatggcctatggatgtgtcgagaaggtctggcagcctcgggtacagatgggaatgctgtgtgggaaacgtcgctttcaatgcaggctatatgccaatccgcccagtcgtcgcctcgcaacgatcttggcgaagattatctcaattgcttgaattctggcatggaccttctagagaaatcacaacttctccataacccaattgcaatccatcgaacaaatcacatagtatctgacgtgactgctgagaccctgttggccattctccagtgtcacaaaatccagtccatttccaagaagattccactggaacgtcttcacctagccgtcgactcgctaattggactagaaagtggaaacggatttggagcttatgagcatgtccgtggttggggatttcttgagctttgcaacatcacagacacatatgaagactgtatgatcgagcataggtatgccgaaacaacgggctctgtcctcatggcgctgacggagttcaactctgagtatcctacctaccggcaagccgatatcaaacggtgcatcacgggaggtacgaaatatcttctcagctcgcagtttcctcatggcggatggatcggtacttggggagtttgcttcacttttggaaccatgttcgcgctccaagggctagcctgcgcaggatatatagagagaaactcgtcagctgtcggtaaagcctgtgcctttctcttgcgataccaaaacccggatgatggtggctggggagaagcactcgatagctatcgcgccaaggactatgttgctgagccagaaggcagccaagtgcacaacacggctttcgcattaattggccttcttgcggcacactgcacagatcgcgtagccattgaccgcggagttcgtttccttgttcagagtcagcaacctggcggggactggcttcctggaacgctcgagggcatttatacaccaccatgcggctatagataccctatgtataagtttcatttcactctcaaggcactgggaatgtatatcagacgttatggtcttagtccttacttgctaacaaggaacatggagaagagggcgttgtag

SEQ ID NO: 22193 - protein, 763 aa, Muscodor strobelii
  misc_feature: SGI Peptide ID NO. 567531
  misc_feature (154)..(197): Pfam Id: PF00432 Pfam Desc: Prenyltransferase and squalene oxidase repeat
  misc_feature (583)..(625): Pfam Id: PF00432 Pfam Desc: Prenyltransferase and squalene oxidase repeat
  misc_feature (591)..(625): Pfam Id: PF00432 Pfam Desc: Prenyltransferase and squalene oxidase repeat
  misc_feature (632)..(690): Pfam Id: PF00432 Pfam Desc: Prenyltransferase and squalene oxidase repeat
  misc_feature (31)..(748): NCBI GI: 70993016 Blast Desc: squalene-hopene-cyclase [Aspergillus fumigatus Af293] gi|66848990|gb|EAL89318.1| squalene-hopene-cyclase, [Aspergillus fumigatus Af293] gi|159125746|gb|EDP50863.1| [Aspergillus A1163]
  misc_feature (31)..(748): NCBI GI: 119499584 Blast Desc: squalene-hopene-cyclase, [Neosartorya fischeri NRRL 181] gi|119414714|gb|EAW24652.1| squalene-hopene-cyclase, [Neosartorya fischeri NRRL 181]
  misc_feature (25)..(748): NCBI GI: 30913110 Blast Desc: ERG7_PNECA RecName: Full=Lanosterol synthase; AltName: Full=Oxidosqualene--lanosterol cyclase; Short=OSC; AltName: Full=2,3-epoxysqualene--lanosterol cyclase lanosterol synthase
  misc_feature (18)..(750): NCBI GI: 213402251 Blast Desc: lanosterol synthase [Schizosaccharomyces japonicus yFS275] gi|211999945|gb|EEB05605.1| lanosterol synthase [Schizosaccharomyces japonicus yFS275]
  misc_feature (35)..(743): NCBI GI: 196001813 Blast Desc: TRIADDRAFT_22852 [Trichoplax adhaerens] gi|190586725|gb|EDV26778.1| TRIADDRAFT_22852 [Trichoplax adhaerens]
  misc_feature (28)..(748): NCBI GI: 63054562 Blast Desc: lanosterol synthase Erg7 () [Schizosaccharomyces pombe 972h-] gi|1706694|sp|Q10231.1|ERG7_SCHPO RecName: Full=Lanosterol synthase; AltName: Full=Oxidosqualene--lanosterol cyclase; pombe]
  misc_feature (32)..(747): NCBI GI: 194400547 Blast Desc: oxidosqualene clavarinone cyclase [Hypholoma sublateritium]
  misc_feature (34)..(761): NCBI GI: 71010409 Blast Desc: UM02240.1 [Ustilago maydis 521] gi|46098129|gb|EAK83362.1| UM02240.1 [Ustilago maydis 521]
  misc_feature (34)..(743): NCBI GI: 115443164 Blast Desc: conserved [Aspergillus terreus NIH2624] gi|114188258|gb|EAU29958.1| conserved [Aspergillus terreus NIH2624]
  misc_feature (23)..(747): NCBI GI: 169153752 Blast Desc: novel protein similar to vertebrate lanosterol synthase (2,3-oxidosqualene-lanosterol cyclase) (LSS) [Danio rerio]
  misc_feature (25)..(748): SWISSPROT Homolog: EC 5.4.99.7 Lanosterol synthase
MSIVSTTTAVIASGDSNSAHTRKKHGALDETECRTDLRRWRLHANKGRHTWTYLEEQELSHVEQGQTFYEKYWLGVQTGSGREDGSKDSLARNTCKSHVELYEQAPKTLDNGCNFLRQLQMEDGSWGSNCDGPMFLTAGIVFACYVVGIPLPRSTKQEMCRYLIETRNADGGWGVYLTGPSTVFGTAINYVMLRLLGLGPEQPVCERARNLLASMGGVLGIPTWGRFWLCVLNLYDWDGIVPLPAELLLTPNVFPLSPANWWMPIRNIYMGMCYLYGHRFQAPEDELILAIRNELYVQRSYSNITDWTSLRSYVNSVDLVKSKSTAQSLMISAMSIWERWARPCATSGIRSSGLKEALFQVEADVQSTEYCSYSPAYWSVDIIVLRHAHGHASHWVQGMIPHYSDGLWMCREGLAASGTDGNAVWETSLSMQAICQSAQSSPRNDLGEDYLNCLNSGMDLLEKSQLLHNPIAIHRTNHIVSDVTAETLLAILQCHKIQSISKKIPLERLHLAVDSLIGLESGNGFGAYEHVRGWGFLELCNITDTYEDCMIEHRYAETTGSVLMALTEFNSEYPTYRQADIKRCITGGTKYLLSSQFPHGGWIGTWGVCFTFGTMFALQGLACAGYIERNSSAVGKACAFLLRYQNPDDGGWGEALDSYRAKDYVAEPEGSQVHNTAFALIGLLAAHCTDRVAIDRGVRFLVQSQQPGGDWLPGTLEGIYTPPCGYRYPMYKFHFTLKALGMYIRRYGLSPYLLTRNMEKRAL

SEQ ID NO: 22194 - DNA, 1662 bp, Muscodor strobelii
  misc_feature: SGI cDNA ID NO. 567532
  misc_feature: Encodes the peptide sequence at SEQ ID NO 22195
atgcaattctcaagccaatatgtgcttttggccctcgccagcctcctggccacgggctgctcttttcagacaacgccggtgatgggatataactcatacaaccaagtagcctgtagcccctcggagtcgttgatgactaacgccataaactcaatggtttcacagggatttgttgcggctggttataaatactttcaggttgattgtggctggtcgtcaagagaccaaaaacgaaatgcaacatcaggcgcgctagcaatcgatacagggagatttccgaatgggctgttgcctttgagcaatttagcaagatcgaagggaatgatatggagcatgtactcggatgcaggcctgcgcatgtgtgatacgacagtcgtgagtcctgtactcggctctctcggttatgaggcggttgatgcggcgtttttcaagagcctgggcaccgagtatctcaaatacgataattgttacgtcgatggagcaacttctgcagccaatgcgccgaaggacgctcgatcggacttcgtcacgcgatattcagctatgtcgaacgctttaaagaatcaaggtatcactggcatgctgatctgtcagtggggcgtaccatataccacatcgtccggtctccaaggaccctcccagtggacgacaggaatttccacctcatttcggctttctgatgatattgccacgggatggagtaacgtgtaccgcatatataatcaagcggttcatatcgcaaaatccggcaatatcaagcctgggcacgttgcagatgctgatctactcgaggtgggaaacacaggcatgactttcgacgaacaagcaacacacttcgcattctgggcaatgatcaaatccgccttgatgatctcaacgaatccctccgccttaaacagtcagacagtagcgctgctcaaaaacgcagatctgatcgccattaaccaagatacggccgtccagccaatccaacttgtccaacgctggaccaacaaccgtgatatctgggcaggcagccttgcaaatggtgacatggccgtgctcatggtagatcttactaacacggctcgaacgcttacactaccgctgtctgctcttggcattagttctgccactgtcaaggacttgtggaccggtacaaccacttcaggcgcgacaagctactcaaaagcggttcaggcacatgggtctatagcacttcgtctgtcttctatcaagaaatcaacggcagctacacctagctacacttatatctctgcgacaacaggatcggtctccggcggagcaaacgtccagtcgtgctctggctgctcgaatggccagaaggttggcaatttgggaggatcgtctaacggtaaagtagtactttccggtattaagacttcgcaggcaactcagaatgttctttttgaatacatcaactgtgatattggttatctaggaggaagcaacaatgagaggctagcgtcgatcagtgtcaacggcggaaccgcagtgaccgtcagctttccgctcacgggctacaactgggtaacggacatcacaaagggatatgctgttgagttatcaggcttcagcaccagtgggacgaacaccattacgatctcgggcgtgagcagtggctgggcaccggatgttgatcgcattggtgttatttcttga

SEQ ID NO: 22195 - protein, 553 aa, Muscodor strobelii
  misc_feature: SGI Peptide ID NO. 567532
  misc_feature (2)..(355): Pfam Id: PF02065 Pfam Desc: Melibiase
  misc_feature (9)..(553): NCBI GI: 219842115 Blast Desc: alfa-D-galactopyranosidase/beta-L- arabinopyranosidase [Fusarium oxysporum]
  misc_feature (36)..(553): NCBI GI: 189195686 Blast Desc: alpha-galactosidase 5 precursor [Pyrenophora tritici-repentis Pt-1C-BFP] gi|187980060|gb|EDU46686.1| alpha-galactosidase 5 precursor [Pyrenophora tritici-repentis
  misc_feature (25)..(553): NCBI GI: 71020839 Blast Desc: UM04503.1 [Ustilago maydis 521] gi|46100152|gb|EAK85385.1| UM04503.1 [Ustilago maydis 521]
  misc_feature (10)..(545): NCBI GI: 256723284 Blast Desc: NECHADRAFT_102022 [Nectria haematococca mpVI 77-13-4]
  misc_feature (25)..(546): NCBI GI: 219842113 Blast Desc: beta-L-arabinopyranosidase/alfa-D- galactopyranosidase [Fusarium oxysporum]
  misc_feature (9)..(546): NCBI GI: 169623138 Blast Desc: SNOG_14799 [Phaeosphaeria nodorum SN15] gi|160704923|gb|EAT77991.2| SNOG_14799 [Phaeosphaeria nodorum SN15]
  misc_feature (10)..(553): NCBI GI: 46139309 Blast Desc: FG11169.1 [Gibberella zeae PH-1]
  misc_feature (9)..(551): NCBI GI: 145615478 Blast Desc: MGG_05620 [Magnaporthe grisea 70-15] gi|145022302|gb|EDK06322.1| MGG_05620 [Magnaporthe grisea 70-15]
  misc_feature (25)..(402): NCBI GI: 212538145 Blast Desc: alpha-galactosidase, [Penicillium marneffei ATCC 18224] gi|210068970|gb|EEA23061.1| alpha-galactosidase, [Penicillium marneffei ATCC 18224]
  misc_feature (4)..(553): NCBI GI: 189201571 Blast Desc: alpha-galactosidase precursor [Pyrenophora tritici-repentis Pt-1C-BFP] gi|187984221|gb|EDU49709.1| alpha-galactosidase precursor [Pyrenophora tritici-repentis
  misc_feature (14)..(397): SWISSPROT Homolog: EC 3.2.1.22 Alpha-galactosidase
MQFSSQYVLLALASLLATGCSFQTTPVMGYNSYNQVACSPSESLMTNAINSMVSQGFVAAGYKYFQVDCGWSSRDQKRNATSGALAIDTGRFPNGLLPLSNLARSKGMIWSMYSDAGLRMCDTTVVSPVLGSLGYEAVDAAFFKSLGTEYLKYDNCYVDGATSAANAPKDARSDFVTRYSAMSNALKNQGITGMLICQWGVPYTTSSGLQGPSQWTTGISTSFRLSDDIATGWSNVYRIYNQAVHIAKSGNIKPGHVADADLLEVGNTGMTFDEQATHFAFWAMIKSALMISTNPSALNSQTVALLKNADLIAINQDTAVQPIQLVQRWTNNRDIWAGSLANGDMAVLMVDLTNTARTLTLPLSALGISSATVKDLWTGTTTSGATSYSKAVQAHGSIALRLSSIKKSTAATPSYTYISATTGSVSGGANVQSCSGCSNGQKVGNLGGSSNGKVVLSGIKTSQATQNVLFEYINCDIGYLGGSNNERLASISVNGGTAVTVSFPLTGYNWVTDITKGYAVELSGFSTSGTNTITISGVSSGWAPDVDRIGVIS

SEQ ID NO: 22196 - DNA, 1033 bp, Muscodor strobelii
  misc_feature: SGI EST ID NO. CUFF.52205.0
  misc_feature: Variant of the nucleotide sequence at SEQ ID NO 22194
ccgcatatataatcaagcggttcatatcgcaaaatccggcaatatcaagcctgggcacgttgcagatgctgatctactcgaggtgggaaacacaggcatgactttcgacgaacaagcaacacacttcgcattctgggcaatgatcaaatccgccttgatgatctcaacgaatccctccgccttaaacagtcagacagtagcgctgctcaaaaacgcagatctgatcgccattaaccaagatacggccgtccagccaatccaacttgtccaacgctggaccaacaaccgtgatatctgggcaggcagccttgcaaatggtgacatggccgtgctcatggtagatcttactaacacggctcgaacgcttacactaccgctgtctgctcttggcattagttctgccactgtcaaggacttgtggaccggtacaaccacttcaggcgcgacaagctactcaaaagcggttcaggcacatgggtctatagcacttcgtctgtcttctatcaagaaatcaacggcagctacacctagctacacttatatctctgcgacaacaggatcggtctccggcggagcaaacgtccagtcgtgctctggctgctcgaatggccagaaggttggcaatttgggaggatcgtctaacggtaaagtagtactttccggtattaagacttcgcaggcaactcagaatgttctttttgaatacatcaactgtgatattggttatctaggaggaagcaacaatgagaggctagcgtcgatcagtgtcaacggcggaaccgcagtgaccgtcagctttccgctcacgggctacaactgggtaacggacatcacaaagggatatgctgttgagttatcaggcttcagcaccagtgggacgaacaccattacgatctcgggcgtgagcagtggctgggcaccggatgttgatcgcattggtgttatttcttgagagactgcggttagtatgccgccaggtaatttcttagctaatgtaccgcttcaaatttcaagtcgccaggcttagtcaaat

SEQ ID NO: 22197 - DNA, 480 bp, Muscodor strobelii
  misc_feature: SGI cDNA ID NO. 567533
  misc_feature: Elevated expression when VOC is produced
  misc_feature: Encodes the peptide sequence at SEQ ID NO 22198
atggctacactaccagtccttctacgcctagtcccggtgatgtcaagcacgtcatctttgtggtatgcttgggatcagtacgaacagatgactctcttccgccaagccgagctgaagacgctcggaaaccagatcctgcctcgttacttcacatctttcttcgctcgaggagtgccgcgggtgctcggacttctagccacgacgacgatatcgtgcggaacaatcattagatcctctcatagcctgtctactaataacgatgcatatacgtggtacattggaggactttgcctcgccgtggctcatctagcatgggttcctttcatcgtcggacccgtgaacgctatcgaaaaagacgcaaaggataagaacgttgttcatctcgacaattggctgcgcgtgcatgtctggcgaacccttacggtggatttgtgtgcttggatgtgttgcatcatgggcgccattgcttcattctcctga

SEQ ID NO: 22198 - protein, 159 aa, Muscodor strobelii
  misc_feature: SGI Peptide ID NO. 567533
  misc_feature (7)..(153): NCBI GI: 145228559 Blast Desc: An01g01475 [Aspergillus niger] gi|134054679|emb|CAK43520.1| [Aspergillus niger]
  misc_feature (8)..(149): NCBI GI: 212534222 Blast Desc: conserved [Penicillium marneffei ATCC 18224] gi|210069666|gb|EEA23756.1| conserved [Penicillium marneffei ATCC 18224]
  misc_feature (8)..(149): NCBI GI: 212544170 Blast Desc: integral membrane protein, [Penicillium marneffei ATCC 18224] gi|210065208|gb|EEA19302.1| integral membrane protein, [Penicillium marneffei ATCC 18224]
  misc_feature (8)..(157): NCBI GI: 242811669 Blast Desc: integral membrane protein, [Talaromyces stipitatus ATCC 10500] gi|218714136|gb|EED13559.1| integral membrane protein, [Talaromyces stipitatus ATCC 10500]
  misc_feature (7)..(159): NCBI GI: 85094936 Blast Desc: NCU06120 [Neurospora crassa OR74A] gi|28921440|gb|EAA30746.1| [Neurospora crassa OR74A]
  misc_feature (6)..(154): NCBI GI: 241864948 Blast Desc: [Metarhizium anisopliae]
  misc_feature (6)..(144): NCBI GI: 256730046 Blast Desc: NECHADRAFT_102747 [Nectria haematococca mpVI 77-13-4]
  misc_feature (7)..(153): NCBI GI: 256731043 Blast Desc: NECHADRAFT_102832 [Nectria haematococca mpVI 77-13-4]
  misc_feature (6)..(155): NCBI GI: 255948138 Blast Desc: Pc22g08220 [Penicillium chrysogenum Wisconsin 54-1255] gi|211591853|emb|CAP98110.1| Pc22g08220 [Penicillium chrysogenum Wisconsin 54-1255]
  misc_feature (6)..(152): NCBI GI: 46123481 Blast Desc: FG06118.1 [Gibberella zeae PH-1]
  misc_feature: Useful for introducing or modulating the production of volatile compounds
MATLPVLLRLVPVMSSTSSLWYAWDQYEQMTLFRQAELKTLGNQILPRYFTSFFARGVPRVLGLLATTTISCGTIIRSSHSLSTNNDAYTWYIGGLCLAVAHLAWVPFIVGPVNAIEKDAKDKNVVHLDNWLRVHVWRTLTVDLCAWMCCIMGAIASFS

SEQ ID NO: 22199 - DNA, 1060 bp, Muscodor strobelii
  misc_feature: SGI EST ID NO. CUFF.52222.0
  misc_feature: Variant of the nucleotide sequence at SEQ ID NO 22197
aaacgtgggtgcgccaggttctaataattggccttacaagaccttcattactttctagacgaaatatgaacagttccacatctttctctcattctaagcactatcacgacgtttcccgtattagaagaccgccacaatggctacactaccagtccttctacgcctagtcccggtgatgtcaagcacgtcatctttgtggtatgcttgggatcagtacgaacagatgactctcttccgccaagccgagctgaagacgctcggaaaccagatcctgcctcgttacttcacatctttcttcgctcgaggagtgccgcgggtgctcggacttctagccacgacgacgatatcgtgcggaacaatcattagatcctctcatagcctgtctactaataacgatgcatatacgtggtacattggaggactttgcctcgccgtggctcatctagcatgggttcctttcatcgtcggacccgtgaacgctatcgaaaaagacgcaaaggataagaacgttgttcatctcgacaattggctgcgcgtgcatgtctggcgaacccttacggtggatttgtgtgcttggatgtgttgcatcatgggcgccattgcttcattctcctgatgagagaggttccggtgaatctttttgagaacactgggtgtggcaagcgggttgcgacctgcgccctactattggcctcatgtcaaataccgggcagtcggagtaaaggatcagatccgttgcggagtagagactttgtcatgctaagtatggaaagtctattatcttcgttacggtctctttatctacccctgggcatatattccgtagccgtgtacagggcatcacgcgggtccaacgcgggcccctgacttgcattggttcctggcaccgttgctctgcagaatctaagaatcatagttacgttaatgaacgcactttaaagtactgcagaccgagctaggagagtaagaaagacatgtaaagcctacctgataaaaagttgtccacacactatgttacagtcatctcgtccctagacatattccacatgcttgtctgcgt

SEQ ID NO: 22200 - DNA, 2013 bp, Muscodor strobelii
  misc_feature: SGI cDNA ID NO. 567534
  misc_feature: Encodes the peptide sequence at SEQ ID NO 22201
atgcaagccgatgcttccactactgtcgctcctgttgcgcccgccgtagatttgaagcccgtccctcccatcccggcgcgcaaccttccgcaccaatgtacggggtgcggtgcgctgtcgcaaacatcccgctccaaccagcctggctactacgatctaagtcgcaaggctgtccgcaagtacatgggcgtcgataccatctcacaccagtccagagacgaggacgaccttctcaccgatgccctgaagaatctggatccagacgaccttgggaagcagggcgttgacttgaaagagctgaaggccctggctctttccatgccttccatcgacaccaaaccacaggcgttgctcaagaagcctctttgcgaccgatgccactatctgatccacaacaactctgccgaatccatctatcaccccagcgtcgattccattcgcgacaccttgctcgagtctccctacaagtacaaccacgtctaccatgtgcttgacgctgcagacttccccatgtctctggtgcccagaatcggcgaattcctcgatgctatgcctttgcgctctagaaatcgcagatctaagacaggccgcttctaccatggccagaagactgaagtgagcttcatcatcacgcgcgccgacttgctagcccctacaaagccacaagtcgacaacctcttcccttacctgagggaggtcttgcgcgatgctttggggcggtcaggaagagatgtgcggctcggcaatttgcgggctgtcagcgctaagcgtgactggtggacaaaagagctcaaagaagacatttggaagagaggtggagccggctggatgctgggcaaggccaatgtcggaaagagccagctgttcgaaaaggtgtttcccaagggaagaatggactggaagccatcccagcatcagatcaccattgacatgacagctagttctaagcacgagctatcttcagggtcggacgacttgaaggcagcctttggcaaccaggagagcttcgacaatcaagtcattgatgaggatctacaggacgaattttcgctcctaccgcctgcccccgaagagacgcaattccctgaaatgccagtggtgtccgatttaccaggtacaaccgcatcgcctattcgagttcctttcggaaacggtcgtggcgagctgatcgatttgcccggactagagcggacaggtctcgaagagcacgtaaaaaaggagcacagggcctctctcctcatgcgcagtcgtatgagtccggagcagatgacagtgaaaccaggacagtcattgttgcttggcggaatgatccgtattactccccgcgagccttccccaatcatgctgacctacaattttacgcccatcgaaccccatgtgtcccgtacagataaggcaatagggatccaggctcagataggtgaagtgtcggttgaaaacatagcagaacctgggactggagataatactaagttggctggttcttatgagctcaaatgggatgtcacgaaacaacggactgggccattaatgcggaagagcgccgtgaatctcgatattgagcgcctgccctaccgagttgtttctacagatattctcatcgaaggagtcggttgggttgaaatggtcgcccaagttcgcaccaaagctctatacgcgcctcgcctggagactgaggaagcacagattatgactgatccggagcttgacgagaagctgtcggcaatggaacgtcttgaggctgttgcgacagacaagaggggaaagagaatcatacccaagtcgactgaaccgattcagcacaagccttcgactgagccaaactggccaattgtcgatgtttacagccctgagggaaagttcatatctgcgcgcaagccaatgaatggctggatgctaaacaagcccagggtcactgctgcatcgaagaagtcgaggcccaagaagagtatgaaggggcagaagaaactggcgaaggtgcgggctaggcaggctaagcagactgaggcttag

SEQ ID NO: 22201 - protein, 670 aa, Muscodor strobelii
  misc_feature: SGI Peptide ID NO. 567534
  misc_feature (4)..(653): NCBI GI: 39973473 Blast Desc: MGG_01117 [Magnaporthe grisea 70-15] gi|145017917|gb|EDK02196.1| MGG_01117 [Magnaporthe grisea 70-15]
  misc_feature (13)..(666): NCBI GI: 256732944 Blast Desc: [Nectria haematococca mpVI 77-13-4]
  misc_feature (22)..(665): NCBI GI: 46123793 Blast Desc: FG06274.1 [Gibberella zeae PH-1]
  misc_feature (25)..(552): NCBI GI: 171689098 Blast Desc: protein product [Podospora anserina] gi|170944511|emb|CAP70622.1| protein product [Podospora anserina]
  misc_feature (25)..(554): NCBI GI: 85079014 Blast Desc: NCU01651 [Neurospora crassa OR74A] gi|9368948|emb|CAB99178.1| conserved [Neurospora crassa] gi|28917329|gb|EAA27037.1| conserved [Neurospora crassa OR74A]
  misc_feature (74)..(665): NCBI GI: 156044824 Blast Desc: SS1G_10516 [Sclerotinia sclerotiorum 1980] gi|154694904|gb|EDN94642.1| SS1G_10516 [Sclerotinia sclerotiorum 1980]
  misc_feature (27)..(659): NCBI GI: 189200160 Blast Desc: conserved [Pyrenophora tritici-repentis Pt-1C-BFP] gi|187983516|gb|EDU49004.1| conserved [Pyrenophora tritici-repentis Pt-1C-BFP]
  misc_feature (22)..(628): NCBI GI: 169608862 Blast Desc: SNOG_07516 [Phaeosphaeria nodorum SN15] gi|160701731|gb|EAT84982.2| SNOG_07516 [Phaeosphaeria nodorum SN15]
  misc_feature (29)..(655): NCBI GI: 261203659 Blast Desc: conserved [Ajellomyces dermatitidis SLH14081] gi|239586828|gb|EEQ69471.1| conserved [Ajellomyces dermatitidis SLH14081]
  misc_feature (29)..(655): NCBI GI: 239608138 Blast Desc: conserved [Ajellomyces dermatitidis ER-3]
MQADASTTVAPVAPAVDLKPVPPIPARNLPHQCTGCGALSQTSRSNQPGYYDLSRKAVRKYMGVDTISHQSRDEDDLLTDALKNLDPDDLGKQGVDLKELKALALSMPSIDTKPQALLKKPLCDRCHYLIHNNSAESIYHPSVDSIRDTLLESPYKYNHVYHVLDAADFPMSLVPRIGEFLDAMPLRSRNRRSKTGRFYHGQKTEVSFIITRADLLAPTKPQVDNLFPYLREVLRDALGRSGRDVRLGNLRAVSAKRDWWTKELKEDIWKRGGAGWMLGKANVGKSQLFEKVFPKGRMDWKPSQHQITIDMTASSKHELSSGSDDLKAAFGNQESFDNQVIDEDLQDEFSLLPPAPEETQFPEMPVVSDLPGTTASPIRVPFGNGRGELIDLPGLERTGLEEHVKKEHRASLLMRSRMSPEQMTVKPGQSLLLGGMIRITPREPSPIMLTYNFTPIEPHVSRTDKAIGIQAQIGEVSVENIAEPGTGDNTKLAGSYELKWDVTKQRTGPLMRKSAVNLDIERLPYRVVSTDILIEGVGWVEMVAQVRTKALYAPRLETEEAQIMTDPELDEKLSAMERLEAVATDKRGKRIIPKSTEPIQHKPSTEPNWPIVDVYSPEGKFISARKPMNGWMLNKPRVTAASKKSRPKKSMKGQKKLAKVRARQAKQTEA

SEQ ID NO: 22202 - DNA, 3301 bp, Muscodor strobelii
  misc_feature: SGI EST ID NO. CUFF.52225.0
  misc_feature: Variant of the nucleotide sequence at SEQ ID NO 22200
ttgccatcccgctggaaattttagactctgtaaagaaacatcgtctctcgtttaatcccctctttacactttctgattgctcattctggcgcatctatcccggctgcattgtgtttctctaagagcaatgcaccgcgcctgtacttcgagatggctcaataatgctcttcatctggctgaacggccttcgaagctcgagctgccagtctttctttgtccttctgtgaggacgacactatctccgtcaaggagacaacgcgctatcgcaacctctcctccagcctcgcgacgatgtctgcatatgcaagccgatgcttccactactgtcgctcctgttgcgcccgccgtagatttgaagcccgtccctcccatcccggcgcgcaaccttccgcaccaatgtacggggtgcggtgcgctgtcgcaaacatcccgctccaaccagcctggctactacgatctaagtcgcaaggctgtccgcaagtacatgggcgtcgataccatctcacaccagtccagagacgaggacgaccttctcaccgatgccctgaagaatctggatccagacgaccttgggaagcagggcgttgacttgaaagagctgaaggccctggctctttccatgccttccatcgacaccaaaccacaggcgttgctcaagaagcctctttgcgaccgatgccactatctgatccacaacaactctgccgaatccatctatcaccccagcgtcgattccattcgcgacaccttgctcgagtctccctacaagtacaaccacgtctaccatgtgcttgacgctgcagacttccccatgtctctggtgcccagaatcggcgaattcctcgatgctatgcctttgcgctctagaaatcgcagatctaagacaggccgcttctaccatggccagaagactgaagtgagcttcatcatcacgcgcgccgacttgctagcccctacaaagccacaagtcgacaacctcttcccttacctgagggaggtcttgcgcgatgctttggggcggtcaggaagagatgtgcggctcggcaatttgcgggctgtcagcgctaagcgtgactggtggacaaaagagctcaaagaagacatttggaagagaggtggagccggctggatgctgggcaaggccaatgtcggaaagagccagctgttcgaaaaggtgtttcccaagggaagaatggactggaagccatcccagcatcagatcaccattgacatgacagctagttctaagcacgagctatcttcagggtcggacgacttgaaggcagcctttggcaaccaggagagcttcgacaatcaagtcattgatgaggatctacaggacgaattttcgctcctaccgcctgcccccgaagagacgcaattccctgaaatgccagtggtgtccgatttaccaggtacaaccgcatcgcctattcgagttcctttcggaaacggtcgtggcgagctgatcgatttgcccggactagagcggacaggtctcgaagagcacgtaaaaaaggagcacagggcctctctcctcatgcgcagtcgtatgagtccggagcagatgacagtgaaaccaggacagtcattgttgcttggcggaatgatccgtattactccccgcgagccttccccaatcatgctgacctacaattttacgcccatcgaaccccatgtgtcccgtacagataaggcaatagggatccaggctcagataggtgaagtgtcggttgaaaacatagcagaacctgggactggagataatactaagttggctggttcttatgagctcaaatgggatgtcacgaaacaacggactgggccattaatgcggaagagcgccgtgaatctcgatattgagcgcctgccctaccgagttgtttctacagatattctcatcgaaggagtcggttgggttgaaatggtcgcccaagttcgcaccaaagctctatacgcgcctcgcctggagactgaggaagcacagattatgactgatccggagcttgacgagaagctgtcggcaatggaacgtcttgaggctgttgcgacagacaagaggggaaagagaatcatacccaagtcgactgaaccgattcagcacaagccttcgactgagccaaactggccaattgtcgatgtttacagccctgagggaaagttcatatctgcgcgcaagccaatgaatggctggatgctaaacaagcccagggtcactgctgcatcgaagaagtcgaggcccaagaagagtatgaaggggcagaagaaactggcgaaggtgcgggctaggcaggctaagcagactgaggcttaggccgttgcttgatctctttcacgtacccgccagacaaggacacctagccaagtcgggtacattctgccctttttcttataacactgatactacttcttctccggaccatccccaaataccgtgattcgcgagccattagacgtctaatcctagaccgaagacagtcggacataggacacggaatactaaactgtcaaacattagacatcagacaagatactgataagttcccggaagcacttccaacaaggcgcaaatgataatgcgccgtagacagcaccttccttgacatctcaccaaaagacgaccgtcttcctcatctacctcgggtcacatacattcccgaccacgttaattcactggagctacctatttcaattcagtatcatagttatctaacgcaaagcacatattgggttgatacattgaaactcatcagaccttgggaaacctggtttcgctctcatgtctgagtaacgacttcgctcttctttccaccagtctacgcggtagagttgctcttcattgcgtgagctcgttggcaattatcttgctgctgatgtggctgatctactaccataggatacactatatcaggaagtgagcaccattgtacgtatagtgtaacaactagatattaatatgtttccattttgtagaaatgtatagtactgtatataaaatagacgtgtgaatacacaacaactgcctttaaatcaaattgggttgttgtactttatctcgggtgcaacatggatatcaaatccagtgatcgcactgagatcaaacccgtatacccagtctatatcgatcccaatgtttattcgggtctctgttctataggtaataacattattagctgacataatgaactttcaaccaatcttgatgcgtgacctctagggcccatgagtcccacatggcaaaaaaaggaatattacctccgaatatctatgtgcggaatgaaggttcatcgcgagaaattcg

SEQ ID NO: 22203 - DNA, 1050 bp, Muscodor strobelii
  misc_feature: SGI cDNA ID NO. 567535
  misc_feature: Reduced expression when VOC is produced
  misc_feature: Encodes the peptide sequence at SEQ ID NO 22204
atgtcggacggcgtctctgccgatgcggcagcccgcgccagtgaacaggcccgtcggcgcaaagaacgtcgcgaagccaagatcaaggccggaggcgcatcgcgactcgacaggatcactggtctcggaggcggtattcccaaagatgccccatcacaaccaccagacagcggtgcttccacaccctcccagtccgccactcccgcacccacagccgctccctcctcctccgaacatcatgccgaccccgaagaagtcgatatctcccagcacttctaccaacctcagaccaccaaccgcgtccctccacctgatccagccaacatgtccgaagcacaactgcgccagatgatgctcggcttcgaccgcccctcccccgccggcacccctccagctggccgtaaccccttcggtccaccgctgcctcccggaatggaagggatggagggcatgggtcaggaccctatgatgcagatgctgcagaagatgatgggcggcgctggtggcatgccaggtatgggtatgcccggtgcaccagacgctgcaagtggaaaccccctggctggcctcgaatccctcttccccggcggcatccccggtatgcctggttccacccccacgcaagcgcctcaggccgaagtaaacaagagcgcaaacctctggcgcatcctccacgccatacttgccctcggactcggcatctacgttgcgttcacgaccaccttcaccggcaccaagctggagcgagacacggacgagctacgtgctacaggagtcttgggacagcagggtatcgatcaagcccggcagtggttcttctatgtattcacaagtgtcgaggctgtcctgttgacgagtcggttcatgatgcagaagtcaagtgggtttcaacccaccggctggacttggagtgtctcgggcatgctgccaaatccatatcagggctatgtcaggcatatgttgcggtatgccgagattttcagcactgtacgaaatgatgcattgttttgtgtgtttgtcatgggtgtttgctccttgctgagaggttga

SEQ ID NO: 22204 - protein, 349 aa, Muscodor strobelii
  misc_feature: SGI Peptide ID NO. 567535
  misc_feature (1)..(349): NCBI GI: 261356651 Blast Desc: conserved [Verticillium albo-atrum VaMs.102]
  misc_feature (18)..(349): NCBI GI: 256732493 Blast Desc: NECHADRAFT_99937 [Nectria haematococca mpVI 77-13-4]
  misc_feature (1)..(348): NCBI GI: 85110557 Blast Desc: NCU06746 [Neurospora crassa OR74A] gi|28881358|emb|CAD70400.1| [Neurospora crassa] gi|28925201|gb|EAA34282.1| [Neurospora crassa OR74A]
  misc_feature (20)..(349): NCBI GI: 46123773 Blast Desc: FG06264.1 [Gibberella zeae PH-1]
  misc_feature (13)..(349): NCBI GI: 156044764 Blast Desc: SS1G_10486 [Sclerotinia sclerotiorum 1980] gi|154694874|gb|EDN94612.1| SS1G_10486 [Sclerotinia sclerotiorum 1980]
  misc_feature (14)..(335): NCBI GI: 39973521 Blast Desc: MGG_01093 [Magnaporthe grisea 70-15] gi|145017944|gb|EDK02223.1| MGG_01093 [Magnaporthe grisea 70-15]
  misc_feature (1)..(349): NCBI GI: 154291159 Blast Desc: BC1G_15351 [Botryotinia fuckeliana B05.10] gi|150847067|gb|EDN22260.1| BC1G_15351 [Botryotinia fuckeliana B05.10]
  misc_feature (21)..(349): NCBI GI: 116199519 Blast Desc: [Chaetomium globosum CBS 148.51] gi|88179194|gb|EAQ86662.1| [Chaetomium globosum CBS 148.51]
  misc_feature (13)..(349): NCBI GI: 189200172 Blast Desc: conserved [Pyrenophora tritici-repentis Pt-1C-BFP] gi|187983522|gb|EDU49010.1| conserved [Pyrenophora tritici-repentis Pt-1C-BFP]
  misc_feature (16)..(349): NCBI GI: 169608818 Blast Desc: SNOG_07494 [Phaeosphaeria nodorum SN15] gi|160701723|gb|EAT84960.2| SNOG_07494 [Phaeosphaeria nodorum SN15]
  misc_feature: Useful for introducing or modulating the production of volatile compounds
MSDGVSADAAARASEQARRRKERREAKIKAGGASRLDRITGLGGGIPKDAPSQPPDSGASTPSQSATPAPTAAPSSSEHHADPEEVDISQHFYQPQTTNRVPPPDPANMSEAQLRQMMLGFDRPSPAGTPPAGRNPFGPPLPPGMEGMEGMGQDPMMQMLQKMMGGAGGMPGMGMPGAPDAASGNPLAGLESLFPGGIPGMPGSTPTQAPQAEVNKSANLWRILHAILALGLGIYVAFTTTFTGTKLERDTDELRATGVLGQQGIDQARQWFFYVFTSVEAVLLTSRFMMQKSSGFQPTGWTWSVSGMLPNPYQGYVRHMLRYAEIFSTVRNDALFCVFVMGVCSLLRG

SEQ ID NO: 22205 - DNA, 1463 bp, Muscodor strobelii
  misc_feature: SGI EST ID NO. CUFF.52243.0
  misc_feature: Variant of the nucleotide sequence at SEQ ID NO 22203
cgctaacctaacccacccaaccgctagacgctaaaccgttcatcccaccatgctgtcatctccaaacccaatatcccatttatagatctagattgtcctcctcttgtcggatttctcaccagaggcttctctgctctcgatgcacccccaggttcttctttcttgacatcctgtaagcttccacctacccgagtcatgtcggacggcgtctctgccgatgcggcagcccgcgccagtgaacaggcccgtcggcgcaaagaacgtcgcgaagccaagatcaaggccggaggcgcatcgcgactcgacaggatcactggtctcggaggcggtattcccaaagatgccccatcacaaccaccagacagcggtgcttccacaccctcccagtccgccactcccgcacccacagccgctccctcctcctccgaacatcatgccgaccccgaagaagtcgatatctcccagcacttctaccaacctcagaccaccaaccgcgtccctccacctgatccagccaacatgtccgaagcacaactgcgccagatgatgctcggcttcgaccgcccctcccccgccggcacccctccagctggccgtaaccccttcggtccaccgctgcctcccggaatggaagggatggagggcatgggtcaggaccctatgatgcagatgctgcagaagatgatgggcggcgctggtggcatgccaggtatgggtatgcccggtgcaccagacgctgcaagtggaaaccccctggctggcctcgaatccctcttccccggcggcatccccggtatgcctggttccacccccacgcaagcgcctcaggccgaagtaaacaagagcgcaaacctctggcgcatcctccacgccatacttgccctcggactcggcatctacgttgcgttcacgaccaccttcaccggcaccaagctggagcgagacacggacgagctacgtgctacaggagtcttgggacagcagggtatcgatcaagcccggcagtggttcttctatgtattcacaagtgtcgaggctgtcctgttgacgagtcggttcatgatgcagaagtcaagtgggtttcaacccaccggctggacttggagtgtctcgggcatgctgccaaatccatatcagggctatgtcaggcatatgttgcggtatgccgagattttcagcactgtacgaaatgatgcattgttttgtgtgtttgtcatgggtgtttgctccttgctgagaggttgagcattggagattggggtttgttgatgacatagtaaatgcattgttgtctcatgattcccgatcttttttccgtgactacgatgactatcgctctatgtctactcagctgaacctcgcagtactacactaagtacttctgcttatcgaccctatttagactcattcggccaaagcgttacgctttgttagagatgctatcgaaatgctattaatactcc

SEQ ID NO: 22206 - DNA, 246 bp, Muscodor strobelii
  misc_feature: SGI cDNA ID NO. 567536
  misc_feature: Elevated expression when VOC is produced
  misc_feature: Encodes the peptide sequence at SEQ ID NO 22207
atgattaaaaaggagcagattaacgccaatgtactccaagacaccctcgctatcaaagatgtagaaggtgctttggaatcagcctcgcaaagatggaacaattcgcagaggccggcaaaacgtcttgagggctgcaaggctcgtcttaccaatttctcctctgtgttcgatccacttgcaaagtatcatccggagcgtgtgtccgtcatctggggcatgttgagttttccattaacggttagataa

SEQ ID NO: 22207 - protein, 81 aa, Muscodor strobelii
  misc_feature: SGI Peptide ID NO. 567536
  misc_feature: Useful for introducing or modulating the production of volatile compounds
MIKKEQINANVLQDTLAIKDVEGALESASQRWNNSQRPAKRLEGCKARLTNFSSVFDPLAKYHPERVSVIWGMLSFPLTVR

SEQ ID NO: 22208 - DNA, 1095 bp, Muscodor strobelii
  misc_feature: SGI EST ID NO. CUFF.52257.0
  misc_feature: Variant of the nucleotide sequence at SEQ ID NO 22206
ctcgcaaagatggaacaattcgcagaggccggcaaaacgtcttgagggctgcaaggctcgtcttaccaatttctcctctgtgttcgatccacttgcaaagtatcatccggagcgtgtgtccgtcatctggggcatgttgagttttccattaacggaatccttgaatcacgaacgggtattgactgagttctgcgacctgctgtggggagttgcagatgcccttccccggacgcaagtcttgatcttagatgactcgatatttctatcatacgacagcgacaacagtgaaacataaagatttgtcggcgtttcgttatggtcggctcgtacccatgatagaggagattgctcgggagtcgcgtgatatcgactggctcatcaacgcgacagcaagaagcgaaatgctggggccgaataggatggttcatgcaatggacgctcagaaacccgtgattcgtgccacgggagctcatatctccgtgccagagaccgcaattaggcgcgtcgctcctgatcatctggattcgacttcctcggcaatggccgatggggaaaggagcacaacgagccaccggccagcacccacccataatgaccctgtcgagccccgaatacagcgagtgcagtctcaggaagacaatgtagtttctagctatcatcgtcccacgattgtgttagttatgacccggccgtgctatatcatggtcttcatctacctattggtcattgtcggtagcggtgcactaggggtttattattgggttgttaaagacaggatgggcgatggattcacggcagcgagttggtttgtcggtgttgccacgctggtaatggcgcttcctgtagccttgcattatccgcgctgtggatgctggcggtcgtggagcaaaggagtttatacgaagcttacgacaagggcgatggaactgcgggacttgaacgtgtaactcactttgctagatgggtacggcgtaggacgagaagagggggtctggttccgagggatgactctgatatcctcattataatagagctgtctagacgtattctggcacaagctgagtttgcgtaaaacataaacaataccgaaactta

SEQ ID NO: 22209 - DNA, 723 bp, Muscodor strobelii
  misc_feature: SGI cDNA ID NO. 567537
  misc_feature: Encodes the peptide sequence at SEQ ID NO 22210
atgccattccaactgagctgcgtcgaaccccaaactgactttcctgctttggcagcggttttagtcgaagcatttcacaacccaccccaaggtggcgcatacatcttcgatgcaccactcggcgaaggcggtatatttggacaaatagaagaaagggcttcaagaatcgccgcattgcacgcaaaggatccgagcagtcactggtataaggtggtcgacacggatacagacagcatcattggcggcgctctctggaatattcattcaagtaacccttttgccaatcagcgcgacttcattatctcctggtttccggacaacggcaggcgaaaattcgccgagagctttttagcacaatatagcgcgcctcgagccatcgtaggccaaaggcctcaagtgtatctctctgcaatgtttacctcgcctaagtatcggcggaagggagtggcgcagcgactgttgtcctggggcatcaagaaagccgatgaaatgggtgtcgaaatgttcctagatgctggaatcatgggaaagccactctatgaagctaacggtttcgtggttgttaaagaaaatgtcatagtcccgacggcggaggtaagagatgaggcgtgggatgagttggaacgtagggtgaaaccaccagtcactttgtacctcatgtggcgcccagcaggagggaaatttgattacgacaagatggcactacctaccttgggagagtga

SEQ ID NO: 22210 - protein, 240 aa, Muscodor strobelii
  misc_feature: SGI Peptide ID NO. 567537
  misc_feature (71)..(186): Pfam Id: PF00583 Pfam Desc: Acetyltransferase (GNAT) family
  misc_feature (1)..(234): NCBI GI: 156055888 Blast Desc: SS1G_05296 [Sclerotinia sclerotiorum 1980] gi|154703080|gb|EDO02819.1| SS1G_05296 [Sclerotinia sclerotiorum 1980]
  misc_feature (1)..(227): NCBI GI: 154302378 Blast Desc: BC1G_09973 [Botryotinia fuckeliana B05.10] gi|150855461|gb|EDN30653.1| BC1G_09973 [Botryotinia fuckeliana B05.10]
  misc_feature (1)..(236): NCBI GI: 256720567 Blast Desc: NECHADRAFT_55801 [Nectria haematococca mpVI 77-13-4]
  misc_feature (1)..(222): NCBI GI: 154298180 Blast Desc: BC1G_12055 [Botryotinia fuckeliana B05.10] gi|150858241|gb|EDN33433.1| BC1G_12055 [Botryotinia fuckeliana B05.10]
  misc_feature (1)..(236): NCBI GI: 256728132 Blast Desc: NECHADRAFT_102153 [Nectria haematococca mpVI 77-13-4]
  misc_feature (8)..(229): NCBI GI: 119181255 Blast Desc: CIMG_05757 [Coccidioides immitis RS]
  misc_feature (55)..(228): NCBI GI: 240108921 Blast Desc: GNAT family acetyltransferase, [Coccidioides posadasii C735 delta SOWgp]
  misc_feature (13)..(240): NCBI GI: 70985522 Blast Desc: GNAT family acetyltransferase [Aspergillus fumigatus Af293] gi|66845895|gb|EAL86229.1| GNAT family acetyltransferase, [Aspergillus fumigatus Af293] gi|159125802|gb|EDP50918.1| GNAT
  misc_feature (13)..(236): NCBI GI: 242796234 Blast Desc: conserved [Talaromyces stipitatus ATCC 10500] gi|218719344|gb|EED18764.1| conserved [Talaromyces stipitatus ATCC 10500]
  misc_feature (13)..(240): NCBI GI: 119499411 Blast Desc: GNAT family acetyltransferase, [Neosartorya fischeri NRRL 181] gi|119414627|gb|EAW24566.1| GNAT family acetyltransferase, [Neosartorya fischeri NRRL 181]
MPFQLSCVEPQTDFPALAAVLVEAFHNPPQGGAYIFDAPLGEGGIFGQIEERASRIAALHAKDPSSHWYKVVDTDTDSIIGGALWNIHSSNPFANQRDFIISWFPDNGRRKFAESFLAQYSAPRAIVGQRPQVYLSAMFTSPKYRRKGVAQRLLSWGIKKADEMGVEMFLDAGIMGKPLYEANGFVVVKENVIVPTAEVRDEAWDELERRVKPPVTLYLMWRPAGGKFDYDKMALPTLGE

SEQ ID NO: 22211 - DNA, 1126 bp, Muscodor strobelii
  misc_feature: SGI EST ID NO. CUFF.52250.1
  misc_feature: Variant of the nucleotide sequence at SEQ ID NO 22209
acttgcttcttcagaaatcctgtcgattcatggaaaggtgaatcgttgaagcgtcaataatatttctattcacgtatcatggcgatgtctttatatccgtctcggtcggacccaatggccatcgggattggcacgttgctgtttttcaattcttaaaagctacgtacagggactgggacttcaatgttatggactaagtacagacaagaaactcacggcacggcctacctcttatatccaaccacagcaaaaatgccattccaactgagctgcgtcgaaccccaaactgactttcctgctttggcagcggttttagtcgaagcatttcacaacccaccccaaggtggcgcatacatcttcgatgcaccactcggcgaaggcggtatatttggacaaatagaagaaagggcttcaagaatcgccgcattgcacgcaaaggatccgagcagtcactggtataaggtggtcgacacggatacagacagcatcattggcggcgctctctggaatattcattcaagtaacccttttgccaatcagcgcgacttcattatctcctggtttccggacaacggcaggcgaaaattcgccgagagctttttagcacaatatagcgcgcctcgagccatcgtaggccaaaggcctcaagtgtatctctctgcaatgtttacctcgcctaagtatcggcggaagggagtggcgcagcgactgttgtcctggggcatcaagaaagccgatgaaatgggtgtcgaaatgttcctagatgctggaatcatgggaaagccactctatgaagctaacggtttcgtggttgttaaagaaaatgtcatagtcccgacggcggaggtaagagatgaggcgtgggatgagttggaacgtagggtgaaaccaccagtcactttgtacctcatgtggcgcccagcaggagggaaatttgattacgacaagatggcactacctaccttgggagagtgattgactacggcatatggattaaggctcgcggatctgttactgcggaactatcattgggtgtgtctgttcagtgctatgtcatcagttttctactttagcagatatgccacaaaacataattataggagaatcgcggatgagtctcaagaca

SEQ ID NO: 22212 - DNA, 946 bp, Muscodor strobelii
  misc_feature: SGI cDNA ID NO. 567538
  misc_feature: Reduced expression when VOC is produced
  misc_feature: Encodes the peptide sequence at SEQ ID NO 22213
atgccggtcacggtcgtaagggctgctgcagtgaagtcgatcccgcgccggcgcctggtccccttgtttgcgactgcacattctccgtcgccgttgctgccactgtcatcttcgcctttctcaacttcacacacagctccatatagacacgctcgagacgaccgacgcagatccaccgctcaacgtcacggccgctacgaccccgggaccatcaagacagcgttccctcccgagaccactcggttcacgcgagctgggctcaagcagggcggcgccgtgtctctgttccgggcggcccctcgcgcgctgcgaagcaccaacgtccgctacatcctcttccagccggggccccctccgccgctgcagcgaggctaccggggcgaccggaccgacaaccccgtctacagctccggggtcgccgagaggatgatcatccacctcgagttcgtgacgacgccgacggcggactcggacgggacgagcctggtgctgtggttcgacgacaacagctacgtcttcggccgccagcacgagggcttccagcgcaccgccgcccagcgccgcttcggcttcggcaaggtccagaatatcttcctcacagggcccaccgactggcgcggcgtcggcggcctgctcggcagcatcctcaccatcgccgacgtccacggcggcgcgagagcctcggccctgctggagacgaaccagaagcggcgcgaccacctgctggcgacgatccccaacaagctcaacatccacggcggccgcaacctcacccacatgctggccaccgcccgccagttcatcttccgcaagggcctgcccctgcgcccccacgaggtccgcgccgacccccatccccgccgcgtcgctgccaccgataccacggctgcccctgctgctgctgctcccgagcccgactggaaggaccacaacatcaacgtctggc

SEQ ID NO: 22213 - protein, 315 aa, Muscodor strobelii
  misc_feature: SGI Peptide ID NO. 567538
  misc_feature (143)..(315): NCBI GI: 116208200 Blast Desc: CHGG_03393 [Chaetomium globosum CBS 148.51] gi|88183990|gb|EAQ91458.1| CHGG_03393 [Chaetomium globosum CBS 148.51]
  misc_feature (146)..(315): NCBI GI: 156037628 Blast Desc: SS1G_12528 [Sclerotinia sclerotiorum 1980] gi|154697936|gb|EDN97674.1| SS1G_12528 [Sclerotinia sclerotiorum 1980]
  misc_feature (143)..(315): NCBI GI: 85086579 Blast Desc: NCU00232 [Neurospora crassa OR74A] gi|28918798|gb|EAA28467.1| [Neurospora crassa OR74A]
  misc_feature (133)..(315): NCBI GI: 171685606 Blast Desc: protein product [Podospora anserina] gi|170942764|emb|CAP68417.1| protein product [Podospora anserina]
  misc_feature (143)..(315): NCBI GI: 121700737 Blast Desc: tRNA processing endoribonuclease Trz1, [Aspergillus clavatus NRRL 1] gi|119396776|gb|EAW07207.1| tRNA processing endoribonuclease Trz1, [Aspergillus clavatus NRRL 1]
  misc_feature (143)..(315): NCBI GI: 70996516 Blast Desc: tRNA processing endoribonuclease Trz1 [Aspergillus fumigatus Af293] gi|66850648|gb|EAL90975.1| tRNA processing endoribonuclease Trz1, [Aspergillus fumigatus Af293] tRNA Trz1,
  misc_feature (143)..(315): NCBI GI: 119494441 Blast Desc: tRNA processing endoribonuclease Trz1, [Neosartorya fischeri NRRL 181] gi|119412278|gb|EAW22219.1| tRNA processing endoribonuclease Trz1, [Neosartorya fischeri NRRL 181]
  misc_feature (121)..(315): NCBI GI: 169599006 Blast Desc: SNOG_02316 [Phaeosphaeria nodorum SN15] gi|160704518|gb|EAT90528.2| SNOG_02316 [Phaeosphaeria nodorum SN15]
  misc_feature (143)..(315): NCBI GI: 225561350 Blast Desc: ribonuclease Z [Ajellomyces capsulatus G186AR]
  misc_feature (143)..(315): NCBI GI: 226283239 Blast Desc: ribonuclease Z [Paracoccidioides brasiliensis Pb01]
  misc_feature: Useful for introducing or modulating the production of volatile compounds
MPVTVVRAAAVKSIPRRRLVPLFATAHSPSPLLPLSSSPFSTSHTAPYRHARDDRRRSTAQRHGRYDPGTIKTAFPPETTRFTRAGLKQGGAVSLFRAAPRALRSTNVRYILFQPGPPPPLQRGYRGDRTDNPVYSSGVAERMIIHLEFVTTPTADSDGTSLVLWFDDNSYVFGRQHEGFQRTAAQRRFGFGKVQNIFLTGPTDWRGVGGLLGSILTIADVHGGARASALLETNQKRRDHLLATIPNKLNIHGGRNLTHMLATARQFIFRKGLPLRPHEVRADPHPRRVAATDTTAAPAAAAPEPDWKDHNINVW

SEQ ID NO: 22214 - DNA, 750 bp, Muscodor strobelii
  misc_feature: SGI cDNA ID NO. 567539
  misc_feature: Encodes the peptide sequence at SEQ ID NO 22215
atgttgatgcctcaaaccattaccactctcctcgccctcgcggcggggacccaggcagtccgcaccatgattcctaagacatcctttaactcccaatctgacttcgacacggattggaactacaactacccctggggaaccgatcacaacggcggcgcccgcatggcccagtcacaagtcgccttctcctcgggccagctaacccttacagcccataaagtctcaggacaacccgacgccacccacggcggccaacagattaagatcaactacctatcaggcgccattcacgccaaggagcacttcaacgtgtccaagggcgggggctatgatttcaccggtgaattcaaggcgacgacgaccaagggaacatggcccgcgttttggctgacggctgttgatgggtggcctccggagatcgacatggcggagtggaagggcagtggcaagatcagtttcaatacctttaacacttcgagtgtgttgagttggaaggacgtcacctacccgagccccgatcagtttcactctatcaagtgtgaggtcagggatgtcaatcagaaagatgtctctgtcaaattttacatggacggggctctccaagcgacacagatcggagggggattcttcggaaaaccgatgtatctaattatcaacctacaaatggaaggctcgtcaggatcacccgggcctacgagtgatacgttatatcaagtgcgaaatctcgaggtgttgtcttataacccctga

SEQ ID NO: 22215 - protein, 249 aa, Muscodor strobelii
  misc_feature: SGI Peptide ID NO. 567539
  misc_feature (11)..(249): NCBI GI: 39972841 Blast Desc: MGG_07715 [Magnaporthe grisea 70-15] gi|145012482|gb|EDJ97136.1| MGG_07715 [Magnaporthe grisea 70-15]
  misc_feature (19)..(216): NCBI GI: 116208206 Blast Desc: CHGG_03396 [Chaetomium globosum CBS 148.51] gi|88183993|gb|EAQ91461.1| CHGG_03396 [Chaetomium globosum CBS 148.51]
  misc_feature (22)..(245): NCBI GI: 119477552 Blast Desc: glycoside hydrolase, [Neosartorya fischeri NRRL 181] gi|119407436|gb|EAW17385.1| glycoside hydrolase, [Neosartorya fischeri NRRL 181]
  misc_feature (2)..(247): NCBI GI: 85086584 Blast Desc: NCU00233 [Neurospora crassa OR74A] gi|28918799|gb|EAA28468.1| [Neurospora crassa OR74A]
  misc_feature (22)..(248): NCBI GI: 256732287 Blast Desc: NECHADRAFT_80733 [Nectria haematococca mpVI 77-13-4]
  misc_feature (22)..(245): NCBI GI: 146324217 Blast Desc: glycoside hydrolase [Aspergillus fumigatus Af293] gi|129558010|gb|EBA27426.1| glycoside hydrolase, [Aspergillus fumigatus Af293]
  misc_feature (21)..(242): NCBI GI: 238500329 Blast Desc: glycoside hydrolase, [Aspergillus flavus NRRL3357] gi|220693152|gb|EED49498.1| glycoside hydrolase, [Aspergillus flavus NRRL3357]
  misc_feature (22)..(245): NCBI GI: 159127014 Blast Desc: conserved [Aspergillus fumigatus A1163]
  misc_feature (17)..(236): NCBI GI: 115399438 Blast Desc: conserved [Aspergillus terreus NIH2624] gi|114192191|gb|EAU33891.1| conserved [Aspergillus terreus NIH2624]
  misc_feature (21)..(216): NCBI GI: 169779653 Blast Desc: [Aspergillus oryzae RIB40] gi|83773030|dbj|BAE63158.1| protein product [Aspergillus oryzae]
MLMPQTITTLLALAAGTQAVRTMIPKTSFNSQSDFDTDWNYNYPWGTDHNGGARMAQSQVAFSSGQLTLTAHKVSGQPDATHGGQQIKINYLSGAIHAKEHFNVSKGGGYDFTGEFKATTTKGTWPAFWLTAVDGWPPEIDMAEWKGSGKISFNTFNTSSVLSWKDVTYPSPDQFHSIKCEVRDVNQKDVSVKFYMDGALQATQIGGGFFGKPMYLIINLQMEGSSGSPGPTSDTLYQVRNLEVLSYNP

SEQ ID NO: 22216 - DNA, 2754 bp, Muscodor strobelii
  misc_feature: SGI EST ID NO. CUFF.52246.0
  misc_feature: Variant of the nucleotide sequence at SEQ ID NO 22214
gccagacgttgatgttgtggtccttccagtcgggctcgggagcagcagcagcaggggcagccgtggtatcggtggcagcgacgcggcggggatgggggtcggcgcggacctcgtgggggcgcaggggcaggcccttgcggaagatgaactggcgggcggtggccagcatgtgggtgaggttgcggccgccgtggatgttgagcttgttggggatcgtcgccagcaggtggtcgcgccgcttctggttcgtctccagcagggccgaggctctcgcgccgccgtggacgtcggcgatggtgaggatgctgccgagcaggccgccgacgccgcgccagtcggtgggccctgtgaggaagatattctggaccttgccgaagccgaagcggcgctgggcggcggtgcgctggaagccctcgtgctggcggccgaagacgtagctgttgtcgtcgaaccacagcaccaggctcgtcccgtccgagtccgccgtcggcgtcgtcacgaactcgaggtggatgatcatcctctcggcgaccccggagctgtagacggggttgtcggtccggtcgccccggtagcctcgctgcagcggcggagggggccccggctggaagaggatgtagcggacgttggtgcttcgcagcgcgcgaggggccgcccggaacagagacacggcgccgccctgcttgagcccagctcgcgtgaaccgagtggtctcgggagggaacgctgtcttgatggtcccggggtcgtagcggccgtgacgttgagcggtggatctgcgtcggtcgtctcgagcgtgtctatatggagctgtgtgtgaagttgagaaaggcgaagatgacagtggcagcaacggcgacggagaatgtgcagtcgcaaacaaggggaccaggcgccggcgcgggatcgacttcactgcagcagcccttacgaccgtgaccggcatctgtctgttgggaggaggaggaggaggtgctgcggatcggaagccctagtgtgactcattgccgaatcaatccaaagtccacacgtgtttgaatgcaggtcaaatgcaaaaacatgtctaggtataggtagttacctaacttttctgtttttcctccaggttgcggtccaatcaacgtcacacattctagaacatttagtcttcagggtcctcccctactagtaagtcgtaaagtttctggccaatcttatcttatcgattgacaagagaagctgagcaggttgcatcgcctcggcattcactgaacgccatcccctgacacaagcgtgacaacctagcgcatgcgccgcgcatccaagctctccttccctgcctcgcctatttcaattctcatccgtgccgacgtctagaatgccaattcaacaaacccgcagatcgaacaagtgtcctagcttaagagttatagtcgcctagcaaaataacaaaactgtctgattaatagctaccatccatggccttcctaccttctaccttgctttattgcatcacttagacgcagttgacggcaatttcgtagagcggcgggcgcactagaccaccgaccaggtgaacaagacggcgtttcaacagctgtgtactgcaacctcgcccaccctccgctgcccggtggacagctaattcccacgaaacatccattccggcttgttgctccaacctggtattgagctctactggttatttctgctatgccacctgcgcttttaaccggcggagccttcacggccgtggagtgccttgccattagtcactataactatgccctcgtctcacgatgttgatgcctcaaaccattaccactctcctcgccctcgcggcggggacccaggcagtccgcaccatgattcctaagacatcctttaactcccaatctgacttcgacacggattggaactacaactacccctggggaaccgatcacaacggcggcgcccgcatggcccagtcacaagtcgccttctcctcgggccagctaacccttacagcccataaagtctcaggacaacccgacgccacccacggcggccaacagattaagatcaactacctatcaggcgccattcacgccaaggagcacttcaacgtgtccaagggcgggggctatgatttcaccggtgaattcaaggcgacgacgaccaagggaacatggcccgcgttttggctgacggctgttgatgggtggcctccggagatcgacatggcggagtggaagggcagtggcaagatcagtttcaatacctttaacacttcgagtgtgttgagttggaaggacgtcacctacccgagccccgatcagtttcactctatcaagtgtgaggtcagggatgtcaatcagaaagatgtctctgtcaaattttacatggacggggctctccaagcgacacagatcggagggggattcttcggaaaaccgatgtatctaattatcaacctacaaatggaaggctcgtcaggatcacccgggcctacgagtgatacgttatatcaagtgcgaaatctcgaggtgttgtcttataacccctgaaggccacaacattgtgtcgcgtcctgagagacagccgaagagagtgaatgtttcactagttttggtctctctagataacttcttgtacggaagccggacctgagaacagcgtcagtgtgaatatacaggatcgcagacgcacggtcgactacgtaatgtagagaagcatcaggataacaaggttcataccacaagttttcagatataattgatgcatatgtgcatg

SEQ ID NO: 22217 - DNA, 741 bp, Muscodor strobelii
  misc_feature: SGI cDNA ID NO. 567540
  misc_feature: Encodes the peptide sequence at SEQ ID NO 22218
atgggggcagcacaagtttatcgatcattcacagagtgcataaacgaggagcgatgggaggacctcctctcatgtgtcgcatcgcccgtagaactcaacggcaaagcagtcgatcccatagcgtcgttcagggaagccatcgaagcctttggccggctcgagatgatcatcgactccatcacttgcgagggaggctctcgtctagcggccacagtactatgcaatgtccgtctcgccaactgccaaaccatacagttgatggagcatcatttcatatgggtcgaagacagcaagataaccaagatgggcacgatgcctgattccgacgctatcgcagcgcaagtagctgatccggattacgtccatgcaccggacgtcgtgggcgattatgggggaataatcggtaggaaactaccgtcgagggacctagcgagaatgatccgcggagcgtcactggacgagtactgcgccatgatcgaggcgatgttcgcggccattgcgggtcttgtcattaagcttgacaggccatcactcaatgccgacgaagagtcacagcgcattgctgtcaagctggagttctcgggcacgccgattaagaagttccttggtgttgagccaacgaatcgcagtgtcaaattttatcagtatgctacgtactatgtaagagatggtaagatagatcggatctggattatcgacgacgtaaagacgtatcgcaagcagttggcaggggagatatag

SEQ ID NO: 22218 - protein, 246 aa, Muscodor strobelii
  misc_feature: SGI Peptide ID NO. 567540
  misc_feature (141)..(242): Pfam Id: PF07366 Pfam Desc: SnoaL-like polyketide cyclase
  misc_feature (186)..(242): Pfam Id: PF07366 Pfam Desc: SnoaL-like polyketide cyclase
  misc_feature (82)..(244): NCBI GI: 39944412 Blast Desc: MGG_04217 [Magnaporthe grisea 70-15] gi|145014963|gb|EDJ99531.1| MGG_04217 [Magnaporthe grisea 70-15]
  misc_feature (16)..(241): NCBI GI: 46139593 Blast Desc: FG11311.1 [Gibberella zeae PH-1]
  misc_feature (7)..(243): NCBI GI: 116182988 Blast Desc: CHGG_02122 [Chaetomium globosum CBS 148.51] gi|88186419|gb|EAQ93887.1| CHGG_02122 [Chaetomium globosum CBS 148.51]
  misc_feature (7)..(242): NCBI GI: 85114908 Blast Desc: NCU00856 [Neurospora crassa OR74A] gi|28926566|gb|EAA35536.1| [Neurospora crassa OR74A]
  misc_feature (6)..(244): NCBI GI: 256722328 Blast Desc: NECHADRAFT_64789 [Nectria haematococca mpVI 77-13-4]
  misc_feature (7)..(244): NCBI GI: 256721516 Blast Desc: NECHADRAFT_93182 [Nectria haematococca mpVI 77-13-4]
  misc_feature (151)..(243): NCBI GI: 171694508 Blast Desc: protein product [Podospora anserina] gi|170947496|emb|CAP59657.1| protein product [Podospora anserina]
  misc_feature (136)..(244): NCBI GI: 116252916 Blast Desc: RL3174 [Rhizobium leguminosarum bv. viciae 3841] gi|115257564|emb|CAK08661.1| conserved [Rhizobium leguminosarum bv. viciae 3841]
  misc_feature (1)..(111): NCBI GI: 257487277 Blast Desc: PsyrptA_28658 [Pseudomonas syringae pv. tabaci ATCC 11528]
  misc_feature (151)..(245): NCBI GI: 28868572 Blast Desc: PSPTO_1364 [Pseudomonas syringae pv. tomato str. DC3000] gi|213968293|ref|ZP_03396437.1| conserved [Pseudomonas syringae pv. tomato T1] gi|8037804|gb|AAF71511.1|AF232006_14 pv.
  misc_feature: Useful for fungicidal and/or biocontrol applications
MGAAQVYRSFTECINEERWEDLLSCVASPVELNGKAVDPIASFREAIEAFGRLEMIIDSITCEGGSRLAATVLCNVRLANCQTIQLMEHHFIWVEDSKITKMGTMPDSDAIAAQVADPDYVHAPDVVGDYGGIIGRKLPSRDLARMIRGASLDEYCAMIEAMFAAIAGLVIKLDRPSLNADEESQRIAVKLEFSGTPIKKFLGVEPTNRSVKFYQYATYYVRDGKIDRIWIIDDVKTYRKQLAGEI

SEQ ID NO: 22219 - DNA, 1075 bp, Muscodor strobelii
  misc_feature: SGI EST ID NO. CUFF.52298.1
  misc_feature: Variant of the nucleotide sequence at SEQ ID NO 22217
gttaggcaatcatggtagtacaaaacttataatctcacatcatcaaaagttcagtcacgggagttacatagtcaattattcgctttacaaccttcaatagatcatatcatttcccgatgggggcagcacaagtttatcgatcattcacagagtgcataaacgaggagcgatgggaggacctcctctcatgtgtcgcatcgcccgtagaactcaacggcaaagcagtcgatcccatagcgtcgttcagggaagccatcgaagcctttggccggctcgagatgatcatcgactccatcacttgcgagggaggctctcgtctagcggccacagtactatgcaatgtccgtctcgccaactgccaaaccatacagttgatggagcatcatttcatatgggtcgaagacagcaagataaccaagatgggcacgatgcctgattccgacgctatcgcagcgcaagtagctgatccggattacgtccatgcaccggacgtcgtgggcgattatgggggaataatcggtaggaaactaccgtcgagggacctagcgagaatgatccgcgggtatgagatgtgtttaggaaggcagatagtgagggaagaactgcccaagttttgccatgaacaaatagttgtcacgggtcacagagcgtcactggacgagtactgcgccatgatcgaggcgatgttcgcggccattgcgggtcttgtcattaagcttgacaggccatcactcaatgccgacgaagagtcacagcgcattgctgtcaagctggagttctcgggcacgccgattaagaagttccttggtgttgagccaacgaatcgcagtggtgagttgaatatgcgcgatcccatccgttctatttagctgtctcacgttctgctgtagtcaaattttatcagtatgctacgtactatgtaagagatggtaagatagatcggatctggattatcgacgacgtaaagacgtatcgcaagcagttggcaggggagatatagctgtcgtggctatgagagaaatagatgggacgccaaaaccacgtttgtttttagtggagcttccactaatgtaac

SEQ ID NO: 22220 - DNA, 1881 bp, Muscodor strobelii
  misc_feature: SGI cDNA ID NO. 567541
  misc_feature: Elevated expression when VOC is produced
  misc_feature: Encodes the peptide sequence at SEQ ID NO 22221
atgtaccgagttttcggatgcgaagggagtgcggccaacgatgtcttgatcgatgcatacttgcaagcctttgacgccggtgcaaacatcattactgcttcaattggcggatcttcagggtggtccgaagacccgtgggctgttgtcgtatcacgtatcgttcagtctggcgtgccttgtacggtctcagctggcaacgatggtgtggctggcttattctacgcaagcacagcagccaatggcaagcgagtaactgctgttgcctctgttgacaacgtggtcacgcccttactcctaacggagtccttctaccttgtcgacgaatccgataacaagacctttggctattccgcaggagagccagcagactgggctggtgtcgatctccctctctggacaccaagctttaataccagtgatcccgcaatgggctgtgatgactatcctgacgacacaccagatttgtcaggaaacattgtgcttgttcgacgcggtacctgtaccttcgtccttaaagctcagaatgcggtcgcaaagggagcaaaatacgtgatgttttacaataacgtcccaggagtcatcagtcccgacgcttctggtgtggaaggacttgaagctgcaggcatggttgagccagccgtgggtgaagcttgggtcgcgtctctcgaagccggatccgaagtcactctcgatatgctggatcctttgacggcgcctcaatctttgagtttcgtcgacaacacggtaaccggcggctacgccagtacatacacatcatggggaccaacctttgaggcggacgtcaagccccaggtagcatccccaggcggcaacattctctctacgtggccgcaaacactcggctcctacgctgtgatatctggtacttcgatggcgtgccctctcgtagcagctatctatgctctcattgcagatgtccgtggcacctttgacccaaccactctcgagacacttgttgcttcaaacgcaaacccgacgctactcaatgatggaactgcaacatacgatgtgcttacttccgtggctcaaattggcgctggtatcgtccaagcatatgatgccgcttactccgagactttgattagcacgtcgtctctcgcattcaacgacaccgataatctcgtcgatacactcaacttcaccgtgacaaacacaggttcttcggacgtgacctatgaactagcatcagtcggtgcagcaaccgggtatacattctctacatccatctaccccgatgagttccctgggctcggactttcggatgaattcgcaacgataacactgagcgacagcaaaatcacagtcgcagcaggcggcgaggaaacgatctctgtcactgtcactccgccggctctcgacggatcgctcctacccgtctattccggatatatcacattgaatggtacaaacggcgagagtctcagcctgccttatcaaggtatcgtcggtagtctacatgacacgcaggtcttagacacgggctacctatcctcctccgctgatccaaacttgaaccccatagccgccaacacgtcattcgttctctccaaggatcctaccgctaatgtcacgattccagttgccgttgcactcatggcattcggatcccccaagctcagcgtaaagctcctctcagctagcggaaatggcacgctcggtgacattcttgattcgccgtatgactatgcctcgcgtgattttttcccattcggtttcgatggccgtcttgctgatggtagctacgcacccgccgggagctacaagttcagcgttgaggcgctgcatatcttcggggacgccagtgacgccgctgactacgatgcagctgtcacgtcgcccttcagcattagttatgcatga

SEQ ID NO: 22221 - protein, 626 aa, Muscodor strobelii
  misc_feature: SGI Peptide ID NO. 567541
  misc_feature (109)..(222): Pfam Id: PF02225 Pfam Desc: PA domain
  misc_feature (380)..(493): Pfam Id: PF06280 Pfam Desc: Domain of Function (DUF1034)
  misc_feature (269)..(354): Pfam Id: PF00082 Pfam Desc: Subtilase family
  misc_feature (2)..(626): NCBI GI: 85086707 Blast Desc: NCU00263 [Neurospora crassa OR74A] gi|28918829|gb|EAA28498.1| conserved [Neurospora crassa OR74A]
  misc_feature (2)..(625): NCBI GI: 171685226 Blast Desc: protein product [Podospora anserina] gi|170942574|emb|CAP68226.1| protein product [Podospora anserina]
  misc_feature (2)..(625): NCBI GI: 116208730 Blast Desc: CHGG_03658 [Chaetomium globosum CBS 148.51] gi|88184255|gb|EAQ91723.1| CHGG_03658 [Chaetomium globosum CBS 148.51]
  misc_feature (2)..(625): NCBI GI: 145608997 Blast Desc: MGG_09073 [Magnaporthe grisea 70-15] gi|145016463|gb|EDK00893.1| MGG_09073 [Magnaporthe grisea 70-15]
  misc_feature (2)..(626): NCBI GI: 145583581 Blast Desc: serin endopeptidase [Hypocrea lixii]
  misc_feature (2)..(625): NCBI GI: 16973362 Blast Desc: subtilisin-like serine protease PR1C [Metarhizium anisopliae var. anisopliae]
  misc_feature (2)..(625): NCBI GI: 46124389 Blast Desc: FG06572.1 [Gibberella zeae PH-1]
  misc_feature (2)..(625): NCBI GI: 46139915 Blast Desc: FG11472.1 [Gibberella zeae PH-1]
  misc_feature (2)..(626): NCBI GI: 256726389 Blast Desc: NECHADRAFT_39203 [Nectria haematococca mpVI 77-13-4]
  misc_feature (1)..(625): NCBI GI: 170674476 Blast Desc: subtilisin-like protease [Epichloe festucae]
  misc_feature (16)..(500): SWISSPROT Homolog: EC 3.4.21.96 Lactocepin
  misc_feature: Useful for introducing or modulating the production of volatile compounds
MYRVFGCEGSAANDVLIDAYLQAFDAGANIITASIGGSSGWSEDPWAVVVSRIVQSGVPCTVSAGNDGVAGLFYASTAANGKRVTAVASVDNVVTPLLLTESFYLVDESDNKTFGYSAGEPADWAGVDLPLWTPSFNTSDPAMGCDDYPDDTPDLSGNIVLVRRGTCTFVLKAQNAVAKGAKYVMFYNNVPGVISPDASGVEGLEAAGMVEPAVGEAWVASLEAGSEVTLDMLDPLTAPQSLSFVDNTVTGGYASTYTSWGPTFEADVKPQVASPGGNILSTWPQTLGSYAVISGTSMACPLVAAIYALIADVRGTFDPTTLETLVASNANPTLLNDGTATYDVLTSVAQIGAGIVQAYDAAYSETLISTSSLAFNDTDNLVDTLNFTVTNTGSSDVTYELASVGAATGYTFSTSIYPDEFPGLGLSDEFATITLSDSKITVAAGGEETISVTVTPPALDGSLLPVYSGYITLNGTNGESLSLPYQGIVGSLHDTQVLDTGYLSSSADPNLNPIAANTSFVLSKDPTANVTIPVAVALMAFGSPKLSVKLLSASGNGTLGDILDSPYDYASRDFFPFGFDGRLADGSYAPAGSYKFSVEALHIFGDASDAADYDAAVTSPFSISYA

SEQ ID NO: 22222 - DNA, 4777 bp, Muscodor strobelii
  misc_feature: SGI EST ID NO. CUFF.52329.0
  misc_feature: Variant of the nucleotide sequence at SEQ ID NO 22220
cgggtacggataaggcagttgatgagtgggagtttgacagggaagatctcgcaaccttgcgccttcattgcgtacatgctaggatatacggtgttgaccgatataattgaatgcctaattacaacgatactaatcaccctcgacaacagcttgggctgtgtcgcatacaaacaaggccacatgggctgtcttttgtgcctcaatgctgtgacacggttcccatgagtgctcaactccgttcataaccaagatactgatgactgacatcttgatcatctggcatagcagcacgacgactctgtggtgctgtacgctcaggcacaatgcaggtcggcatctgttatcgcgagctagataagctggggaactgtccggccgctgctgtatccgggtgaggatcatcgccatcccagcctatttcatctcataggccattgctccgtcttggctggtaacatttattcctcttgccaagcacgcatctatcaccaacttgccatcaccatgtcatcgattccctgctcctgggctctcctcgttcccaaactggaagctccagagtcgcatcagagtggcctagattcgacgacctgtaaaatcgctctctgcgctctatcatcacggtcgcgtggttatcagctcgtcatggagtcacatacgtacgcgacctcatgcttccgtggtggtattgcagcatcccgacgcgggttcgcttggcgagttcaatatactcagcgcatgatataagtatcatggctcatttcgccataccttagtgatgcggcgaactccctcgttcccgctctcttgctttgagttcctcgctgttcctcggaatctcaggcacatagctcactgaggcatcatggttcgttacagcttcgcgttgtccctgctcgctagcgccggaagcttccttccaactagtgcagcgagacctagtcttaggtcgaagttcgttcccggtagctatgttgtcgaattcgaggattcgaaggatacgtccgagttcttcgagcagatcagctcaaaggccgaaacgcgaatgaactatgactctcctcttttcaaaggcgcatccgtgaaattccacgatgttgcatcagccgaggaggaggcagcgaagcttcaggagatggcaagtgtcaagaaagtctgggcaaaccgactttactctctacctgaagacaaagttgtctggacagccaagggtaacagcgctgagagcccaaacacagtcaagagacaggctaccaccgaagacaccttctcaccgcatattatgacgcaagttgacaagttgcgcgccaatggcatcgtcggagaaggcattaagattgctgtcatcgacactggtgttgactacacacaccctgccctgggagggtgcttcggtcctggttgtctcgttgcgttcggtacggatcttgtgggcgataattacacaggctcgaatactcccgttcccgacgacgacccatatgatggttgcgccggtcacggatcacacgtcagtggaatcatcgcagcgcaggcaaacgaatacaacttcactggagcagccccaggggtgacactcggtatgtaccgagttttcggatgcgaagggagtgcggccaacgatgtcttgatcgatgcatacttgcaagcctttgacgccggtgcaaacatcattactgcttcaattggcggatcttcagggtggtccgaagacccgtgggctgttgtcgtatcacgtatcgttcagtctggcgtgccttgtacggtctcagctggcaacgatggtgtggctggcttattctacgcaagcacagcagccaatggcaagcgagtaactgctgttgcctctgttgacaacgtggtcacgcccttactcctaacggagtccttctaccttgtcgacgaatccgataacaagacctttggctattccgcaggagagccagcagactgggctggtgtcgatctccctctctggacaccaagctttaataccagtgatcccgcaatgggctgtgatgactatcctgacgacacaccagatttgtcaggaaacattgtgcttgttcgacgcggtacctgtaccttcgtccttaaagctcagaatgcggtcgcaaagggagcaaaatacgtgatgttttacaataacgtcccaggagtcatcagtcccgacgcttctggtgtggaaggacttgaagctgcaggcatggttgagccagccgtgggtgaagcttgggtcgcgtctctcgaagccggatccgaagtcactctcgatatgctggatcctttgacggcgcctcaatctttgagtttcgtcgacaacacggtaaccggcggctacgccagtacatacacatcatggggaccaacctttgaggcggacgtcaagccccaggtagcatccccaggcggcaacattctctctacgtggccgcaaacactcggctcctacgctgtgatatctggtacttcgatggcgtgccctctcgtagcagctatctatgctctcattgcagatgtccgtggcacctttgacccaaccactctcgagacacttgttgcttcaaacgcaaacccgacgctactcaatgatggaactgcaacatacgatgtgcttacttccgtggctcaaattggcgctggtatcgtccaagcatatgatgccgcttactccgagactttgattagcacgtcgtctctcgcattcaacgacaccgataatctcgtcgatacactcaacttcaccgtgacaaacacaggttcttcggacgtgacctatgaactagcatcagtcggtgcagcaaccgggtatacattctctacatccatctaccccgatgagttccctgggctcggactttcggatgaattcgcaacgataacactgagcgacagcaaaatcacagtcgcagcaggcggcgaggaaacgatctctgtcactgtcactccgccggctctcgacggatcgctcctacccgtctattccggatatatcacattgaatggtacaaacggcgagagtctcagcctgccttatcaaggtatcgtcggtagtctacatgacacgcaggtcttagacacgggctacctatcctcctccgctgatccaaacttgaaccccatagccgccaacacgtcattcgttctctccaaggatcctaccgctaatgtcacgattccagttgccgttgcactcatggcattcggatcccccaagctcagcgtaaagctcctctcagctagcggaaatggcacgctcggtgacattcttgattcgccgtatgactatgcctcgcgtgattttttcccattcggtttcgatggccgtcttgctgatggtagctacgcacccgccgggagctacaagttcagcgttgaggcgctgcatatcttcggggacgccagtgacgccgctgactacgatgcagctgtcacgtcgcccttcagcattagttatgcatgatcacgacatcgaggcgataggatttagagatacataaggatatttcggggagccagcctgtacattaacaatcgctttgacatacatatacgaaggaaacctaattggagaatttccccgatgcatatcgtctattagcttcaggattacgcgctattattagcttcacttcggtgtggcacatctcctcgacgacacttgagtgtatttttctcagtaatatgtgtactaagatcctatatagctattgtcatcgcctgattatttctgatatgtctacgtagaataatgattgttcgaaagcaaagtaacacggcgtacgccgccaccacctatacgagaaaattctagtttggcgagcacaaatttctcctagctttctcatcctgatgcaggcttttcaacagagtgcgattctgagcccagcgcctgcacaagatcaaaatctctgtaacccacagctgagtaattggcgacataggcatcaccccacggttgttgccatatatctgcacatggtccacgttgttagcggtcaatcttgcaccggaaagcgtcgagagacaggaaatctaaacaattgacataccgtaggtagtatttggcttagtagtacatagccaaatcaaagttgcattaaacccagatgcgagatcatcattcgggaactcatctactaccttctggtagcccgcagtagaaactccatacgccggtcccttgaaatccatgatgattcctcgccccgcaaccttcaccacaggctctttgtaatcgcttatacttggcgtcgaatgcagagcaattgagtcccagagcagttgcagccgatgctcatcccaatctccgttgtcgcgcacaaactggcgggctgcttccgcgccatccacctcgaagcggcgatccgcagttacgtagggcgagccgggcgtctggtcccaccccagatcatgaagaagcgccgcaacggcgtggacctccaaatctacggctggacctgcagtagagttatcactggcagcctggatgataagactcccgtagagccaagatcgtactaggtgcttgtacacatagtcgctgcttgtttcacgggcgaacgtatgcgcagctcgcacaaggggcgtgtcgatcaccgtcacaccggctatcaccttcgttgggtagtcgcctgcacctgttcgaagataaaatttatttcgattaaagggtgtagctgctgcgagagtggacgcgatgagtgtcaaggacgcgagaacacttgagatacgcattttggatcgcgagttcgagcagaccgtcgttaagttatgg

SEQ ID NO: 22223 - DNA, 2559 bp, Muscodor strobelii
  misc_feature: SGI cDNA ID NO. 567542
  misc_feature: Encodes the peptide sequence at SEQ ID NO 22224
atggttcgttacagcttcgcgttgtccctgctcgctagcgccggaagcttccttccaactagtgcagcgagacctagtcttaggtcgaagttcgttcccggtagctatgttgtcgaattcgaggattcgaaggatacgtccgagttcttcgagcagatcagctcaaaggccgaaacgcgaatgaactatgactctcctcttttcaaaggcgcatccgtgaaattccacgatgttgcatcagccgaggaggaggcagcgaagcttcaggagatggcaagtgtcaagaaagtctgggcaaaccgactttactctctacctgaagacaaagttgtctggacagccaagggtaacagcgctgagagcccaaacacagtcaagagacaggctaccaccgaagacaccttctcaccgcatattatgacgcaagttgacaagttgcgcgccaatggcatcgtcggagaaggcattaagattgctgtcatcgacactggtgttgactacacacaccctgccctgggagggtgcttcggtcctggttgtctcgttgcgttcggtacggatcttgtgggcgataattacacaggctcgaatactcccgttcccgacgacgatggaatcatcgcagcgcaggcaaacgaatacaacttcactggagcagccccaggggtgacactcggtatgtaccgagttttcggatgcgaagggagtgcggccaacgatgtcttgatcgatgcatacttgcaagcctttgacgccggtgcaaacatcattactgcttcaattggcggatcttcagggtggtccgaagacccgtgggctgttgtcgtatcacgtatcgttcagtctggcgtgccttgtacggtctcagctggcaacgatggtgtggctggcttattctacgcaagcacagcagccaatggcaagcgagtaactgctgttgcctctgttgacaacgtggtcacgcccttactcctaacggagtccttctaccttgtcgacgaatccgataacaagacctttggctattccgcaggagagccagcagactgggctggtgtcgatctccctctctggacaccaagctttaataccagtgatcccgcaatgggctgtgatgactatcctgacgacacaccagatttgtcaggaaacattgtgcttgttcgacgcggtacctgtaccttcgtccttaaagctcagaatgcggtcgcaaagggagcaaaatacgtgatgttttacaataacgtcccaggagtcatcagtcccgacgcttctggtgtggaaggacttgaagctgcaggcatggttgagccagccgtgggtgaagcttgggtcgcgtctctcgaagccggatccgaagtcactctcgatatgctggatcctttgacggcgcctcaatctttgagtttcgtcgacaacacggtaaccggcggctacgccagtacatacacatcatggggaccaacctttgaggcggacgtcaagccccaggtagcatccccaggcggcaacattctctctacgtggccgcaaacactcggctcctacgctgtgatatctggtacttcgatggcgtgccctctcgtagcagctatctatgctctcattgcagatgtccgtggcacctttgacccaaccactctcgagacacttgttgcttcaaacgcaaacccgacgctactcaatgatggaactgcaacatacgatgtgcttacttccgtggctcaaattggcgctggtatcgtccaagcatatgatgccgcttactccgagactttgattagcacgtcgtctctcgcattcaacgacaccgataatctcgtcgatacactcaacttcaccgtgacaaacacaggttcttcggacgtgacctatgaactagcatcagtcggtgcagcaaccgggtatacattctctacatccatctaccccgatgagttccctgggctcggactttcggatgaattcgcaacgataacactgagcgacagcaaaatcacagtcgcagcaggcggcgaggaaacgatctctgtcactgtcactccgccggctctcgacggatcgctcctacccgtctattccggatatatcacattgaatggtacaaacggcgagagtctcagcctgccttatcaaggtatcgtcggtagtctacatgacacgcaggtcttagacacgggctacctatcctcctccgctgatccaaacttgaaccccatagccgccaacacgtcattcgttctctccaaggatcctaccgctaatgtcacgattccagttgccgttgcactcatggcattcggatcccccaagctcagcgtaaagctcctctcagctagcggaaatggcacgctcggtgacattcttgattcgccgtatgactatgcctcgcgtgattttttcccattcggtttcgatggccgtcttgctgatggtagctacgcacccgccgggagctacaagttcagcgttgaggcgctgcatatcttcggggacgccagtgacgccgctgactacgatgcagctgtcacgtcgcccttcagcattagttatgcatga

SEQ ID NO: 22224 - protein, 852 aa, Muscodor strobelii
  misc_feature: SGI Peptide ID NO. 567542
  misc_feature (335)..(448): Pfam Id: PF02225 Pfam Desc: PA domain
  misc_feature (606)..(719): Pfam Id: PF06280 Pfam Desc: Domain of Function (DUF1034)
  misc_feature (136)..(580): Pfam Id: PF00082 Pfam Desc: Subtilase family
  misc_feature (136)..(321): Pfam Id: PF00082 Pfam Desc: Subtilase family
  misc_feature (495)..(580): Pfam Id: PF00082 Pfam Desc: Subtilase family
  misc_feature (1)..(852): NCBI GI: 85086707 Blast Desc: NCU00263 [Neurospora crassa OR74A] gi|28918829|gb|EAA28498.1| conserved [Neurospora crassa OR74A]
  misc_feature (1)..(851): NCBI GI: 145608997 Blast Desc: MGG_09073 [Magnaporthe grisea 70-15] gi|145016463|gb|EDK00893.1| MGG_09073 [Magnaporthe grisea 70-15]
  misc_feature (1)..(852): NCBI GI: 145583581 Blast Desc: serin endopeptidase [Hypocrea lixii]
  misc_feature (1)..(851): NCBI GI: 46139915 Blast Desc: FG11472.1 [Gibberella zeae PH-1]
  misc_feature (43)..(851): NCBI GI: 116208730 Blast Desc: CHGG_03658 [Chaetomium globosum CBS 148.51] gi|88184255|gb|EAQ91723.1| CHGG_03658 [Chaetomium globosum CBS 148.51]
  misc_feature (30)..(851): NCBI GI: 171685226 Blast Desc: protein product [Podospora anserina] gi|170942574|emb|CAP68226.1| protein product [Podospora anserina]
  misc_feature (1)..(852): NCBI GI: 256726389 Blast Desc: NECHADRAFT_39203 [Nectria haematococca mpVI 77-13-4]
  misc_feature (61)..(851): NCBI GI: 16973362 Blast Desc: subtilisin-like serine protease PR1C [Metarhizium anisopliae var. anisopliae]
  misc_feature (32)..(851): NCBI GI: 46124389 Blast Desc: FG06572.1 [Gibberella zeae PH-1]
  misc_feature (32)..(851): NCBI GI: 170674476 Blast Desc: subtilisin-like protease [Epichloe festucae]
  misc_feature (87)..(726): SWISSPROT Homolog: EC 3.4.21.96 Lactocepin
MVRYSFALSLLASAGSFLPTSAARPSLRSKFVPGSYVVEFEDSKDTSEFFEQISSKAETRMNYDSPLFKGASVKFHDVASAEEEAAKLQEMASVKKVWANRLYSLPEDKVVWTAKGNSAESPNTVKRQATTEDTFSPHIMTQVDKLRANGIVGEGIKIAVIDTGVDYTHPALGGCFGPGCLVAFGTDLVGDNYTGSNTPVPDDDGIIAAQANEYNFTGAAPGVTLGMYRVFGCEGSAANDVLIDAYLQAFDAGANIITASIGGSSGWSEDPWAVVVSRIVQSGVPCTVSAGNDGVAGLFYASTAANGKRVTAVASVDNVVTPLLLTESFYLVDESDNKTFGYSAGEPADWAGVDLPLWTPSFNTSDPAMGCDDYPDDTPDLSGNIVLVRRGTCTFVLKAQNAVAKGAKYVMFYNNVPGVISPDASGVEGLEAAGMVEPAVGEAWVASLEAGSEVTLDMLDPLTAPQSLSFVDNTVTGGYASTYTSWGPTFEADVKPQVASPGGNILSTWPQTLGSYAVISGTSMACPLVAAIYALIADVRGTFDPTTLETLVASNANPTLLNDGTATYDVLTSVAQIGAGIVQAYDAAYSETLISTSSLAFNDTDNLVDTLNFTVTNTGSSDVTYELASVGAATGYTFSTSIYPDEFPGLGLSDEFATITLSDSKITVAAGGEETISVTVTPPALDGSLLPVYSGYITLNGTNGESLSLPYQGIVGSLHDTQVLDTGYLSSSADPNLNPIAANTSFVLSKDPTANVTIPVAVALMAFGSPKLSVKLLSASGNGTLGDILDSPYDYASRDFFPFGFDGRLADGSYAPAGSYKFSVEALHIFGDASDAADYDAAVTSPFSISYA

SEQ ID NO: 22225 - DNA, 4777 bp, Muscodor strobelii; identical to SEQ ID NO: 22222
  misc_feature: SGI EST ID NO. CUFF.52329.0
  misc_feature: Variant of the nucleotide sequence at SEQ ID NO 22223

SEQ ID NO: 22226 - DNA, 813 bp, Muscodor strobelii
  misc_feature: SGI cDNA ID NO. 567543
  misc_feature: Encodes the peptide sequence at SEQ ID NO 22227
atgcgtatctcaagtgttctcgcgtccttgacactcatcgcgtccactctcgcagcagctacaccctttaatcgaaataaattttatcttcgaacaggtgcaggcgactacccaacgaaggtgatagccggtgtgacggtgatcgacacgccccttgtgcgagctgcgcatacgttcgcccgtgaaacaagcagcgactatgtgtacaagcacctagtacgatcttggctctacgggagtcttatcatccaggctgccagtgataactctactgcaggtccagccgtagatttggaggtccacgccgttgcggcgcttcttcatgatctggggtgggaccagacgcccggctcgccctacgtaactgcggatcgccgcttcgaggtggatggcgcggaagcagcccgccagtttgtgcgcgacaacggagattgggatgagcatcggctgcaactgctctgggactcaattgctctgcattcgacgccaagtataagcgattacaaagagcctgtggtgaaggttgcggggcgaggaatcatcatggatttcaagggaccggcgtatggagtttctactgcgggctaccagaaggtagtagatgagttcccgaatgatgatctcgcatctgggtttaatgcaactttgatttggctatgtactactaagccaaatactacctacgatatatggcaacaaccgtggggtgatgcctatgtcgccaattactcagctgtgggttacagagattttgatcttgtgcaggcgctgggctcagaatcgcactctgttgaaaagcctgcatcaggatga

SEQ ID NO: 22227 - protein, 270 aa, Muscodor strobelii
  misc_feature: SGI Peptide ID NO. 567543
  misc_feature (3)..(252): NCBI GI: 116200323 Blast Desc: CHGG_08317 [Chaetomium globosum CBS 148.51] gi|88179596|gb|EAQ87064.1| CHGG_08317 [Chaetomium globosum CBS 148.51]
  misc_feature (38)..(252): NCBI GI: 256721693 Blast Desc: NECHADRAFT_44823 [Nectria haematococca mpVI 77-13-4]
  misc_feature (9)..(254): NCBI GI: 171681192 Blast Desc: protein product [Podospora anserina] gi|170940554|emb|CAP65782.1| protein product [Podospora anserina]
  misc_feature (41)..(254): NCBI GI: 116202473 Blast Desc: CHGG_09121 [Chaetomium globosum CBS 148.51] gi|88177639|gb|EAQ85107.1| CHGG_09121 [Chaetomium globosum CBS 148.51]
  misc_feature (39)..(229): NCBI GI: 242795716 Blast Desc: conserved [Talaromyces stipitatus ATCC 10500] gi|218719237|gb|EED18657.1| conserved [Talaromyces stipitatus ATCC 10500]
  misc_feature (37)..(252): NCBI GI: 171693093 Blast Desc: protein product [Podospora anserina] gi|170946495|emb|CAP73296.1| protein product [Podospora anserina]
  misc_feature (40)..(251): NCBI GI: 260460254 Blast Desc: conserved [Mesorhizobium opportunistum WSM2075] gi|259033899|gb|EEW35158.1| conserved [Mesorhizobium opportunistum WSM2075]
  misc_feature (40)..(231): NCBI GI: 116204295 Blast Desc: CHGG_10031 [Chaetomium globosum CBS 148.51] gi|88176159|gb|EAQ83627.1| CHGG_10031 [Chaetomium globosum CBS 148.51]
  misc_feature (39)..(245): NCBI GI: 13471098 Blast Desc: mlr0982 [Mesorhizobium loti MAFF303099] gi|14021842|dbj|BAB48453.1| mlr0982 [Mesorhizobium loti MAFF303099]
  misc_feature (40)..(228): NCBI GI: 228943517 Blast Desc: bthur0008_60850 [Bacillus thuringiensis serovar berliner ATCC 10792] gi|228975796|ref|ZP_04136330.1| bthur0003_55280 [Bacillus thuringiensis serovar thuringiensis
MRISSVLASLTLIASTLAAATPFNRNKFYLRTGAGDYPTKVIAGVTVIDTPLVRAAHTFARETSSDYVYKHLVRSWLYGSLIIQAASDNSTAGPAVDLEVHAVAALLHDLGWDQTPGSPYVTADRRFEVDGAEAARQFVRDNGDWDEHRLQLLWDSIALHSTPSISDYKEPVVKVAGRGIIMDFKGPAYGVSTAGYQKVVDEFPNDDLASGFNATLIWLCTTKPNTTYDIWQQPWGDAYVANYSAVGYRDFDLVQALGSESHSVEKPASG

SEQ ID NO: 22228 - DNA, 3309 bp, Muscodor strobelii
  misc_feature: SGI EST ID NO. CUFF.52330.1
  misc_feature: Variant of the nucleotide sequence at SEQ ID NO 22226
cgacggtctgctcgaactcgcgatccaaaatgcgtatctcaagtgttctcgcgtccttgacactcatcgcgtccactctcgcagcagctacaccctttaatcgaaataaattttatcttcgaacaggtgcaggcgactacccaacgaaggtgatagccggtgtgacggtgatcgacacgccccttgtgcgagctgcgcatacgttcgcccgtgaaacaagcagcgactatgtgtacaagcacctagtacgatcttggctctacgggagtcttatcatccaggctgccagtgataactctactgcaggtccagccgtagatttggaggtccacgccgttgcggcgcttcttcatgatctggggtgggaccagacgcccggctcgccctacgtaactgcggatcgccgcttcgaggtggatggcgcggaagcagcccgccagtttgtgcgcgacaacggagattgggatgagcatcggctgcaactgctctgggactcaattgctctgcattcgacgccaagtataagcgattacaaagagcctgtggtgaaggttgcggggcgaggaatcatcatggatttcaagggaccggcgtatggagtttctactgcgggctaccagaaggtagtagatgagttcccgaatgatgatctcgcatctgggtttaatgcaactttgatttggctatgtactactaagccaaatactacctacgatatatggcaacaaccgtggggtgatgcctatgtcgccaattactcagctgtgggttacagagattttgatcttgtgcaggcgctgggctcagaatcgcactctgttgaaaagcctgcatcaggatgagaaagctaggagaaatttgtgctcgccaaactagaattttctcgtataggtggtggcggcgtacgccgtgttactttgctttcgaacaatcattattctacgtagacatatcagaaataatcaggcgatgacaatagctatataggatcttagtacacatattactgagaaaaatacactcaagtgtcgtcgaggagatgtgccacaccgaagtgaagctaataatagcgcgtaatcctgaagctaatagacgatatgcatcggggaaattctccaattaggtttccttcgtatatgtatgtcaaagcgattgttaatgtacaggctggctccccgaaatatccttatgtatctctaaatcctatcgcctcgatgtcgtgatcatgcataactaatgctgaagggcgacgtgacagctgcatcgtagtcagcggcgtcactggcgtccccgaagatatgcagcgcctcaacgctgaacttgtagctcccggcgggtgcgtagctaccatcagcaagacggccatcgaaaccgaatgggaaaaaatcacgcgaggcatagtcatacggcgaatcaagaatgtcaccgagcgtgccatttccgctagctgagaggagctttacgctgagcttgggggatccgaatgccatgagtgcaacggcaactggaatcgtgacattagcggtaggatccttggagagaacgaatgacgtgttggcggctatggggttcaagtttggatcagcggaggaggataggtagcccgtgtctaagacctgcgtgtcatgtagactaccgacgataccttgataaggcaggctgagactctcgccgtttgtaccattcaatgtgatatatccggaatagacgggtaggagcgatccgtcgagagccggcggagtgacagtgacagagatcgtttcctcgccgcctgctgcgactgtgattttgctgtcgctcagtgttatcgttgcgaattcatccgaaagtccgagcccagggaactcatcggggtagatggatgtagagaatgtatacccggttgctgcaccgactgatgctagttcataggtcacgtccgaagaacctgtgtttgtcacggtgaagttgagtgtatcgacgagattatcggtgtcgttgaatgcgagagacgacgtgctaatcaaagtctcggagtaagcggcatcatatgcttggacgataccagcgccaatttgagccacggaagtaagcacatcgtatgttgcagttccatcattgagtagcgtcgggtttgcgtttgaagcaacaagtgtctcgagagtggttgggtcaaaggtgccacggacatctgcaatgagagcatagatagctgctacgagagggcacgccatcgaagtaccagatatcacagcgtaggagccgagtgtttgcggccacgtagagagaatgttgccgcctggggatgctacctggggcttgacgtccgcctcaaaggttggtccccatgatgtgtatgtactggcgtagccgccggttaccgtgttgtcgacgaaactcaaacttccaatcgttagtcagatgatcggagcagagaaggagagattgcttacgattgaggcgccgtcaaaggatccagcatatcgagagtgacttcggatccggcttcgagagacgcgacccaagcttcacccacggctggctcaaccttcaagagatgttagtgagaggatagtgagattggaaaacactgttttgacactcaccatgcctgcagcttcaagtccttccacaccagaagcgtcgggactgatgactcctgggacgttattgtaaaacatcacgtattttgctccctttgcgaccgcattctgagctttaaggacgaaggtacaggtaccgcgtcgaacaagcacaatgtttcctgacaaatctggtgtgtcgtcaggatagtcatcacagcccattgcgggatcactggtattaaagcttggtgtccagagagggagatcgacaccagcccagtctgctggctctcctgcggaatagccaaaggtcttgttatcggattcgtcgacaaggtagaaggactccgttaggagtaagggcgtgaccacgttgtcaacagaggcaacagcagttactcgcttgccattggctgctgtgcttgcgtagaataagccagccacaccatcgttgccagctgagaccgtacaaggcacgccagactgaacgatacgtgatacgacaacagcccacgggtcttcggaccaccctgaagatccgccaattgaagcagtaatgatgtttgcaccggcgtcaaaggcttgcaagtatgcatcgatcaagacatcgttggccgcactcccttcgcatccgaaaactcggtacataccgagtgtcacccctggggctgctccagtgaagttgtattcgtttgcctgcgctgcgatgattccactgacgtgtgatccgtgaccggcgcaacca

SEQ ID NO: 22229 - DNA, 1119 bp, Muscodor strobelii
  misc_feature: SGI cDNA ID NO. 567544
  misc_feature: Encodes the peptide sequence at SEQ ID NO 22230
atggcgcgattcgcatttacactctttttcctttcgacactcttttccagtcttgttagagcggcgtttgacatcacctcaaaaaataacgttgcagtgtactatggccaaggacccaatcagaaatcgattacgacttactgcgccgacccaacaattgacgttattattctttctttcgtgaacctctttccgcaacaagccaatggctatccgggcaccaacttcggcaaccagtgctgggccacagcatgcaaagatgctctcttgatgtgccctcaattggcacaggacctgtacacctgccgacagaccagcgacaaaaagattttactttctctaggtggtgacccagcagccgcggcctaccaacttacggacgcctcaaacggcacggcattcgccgatttgctttggggcattttcggtccgcgagacagcgcttgggttgcagcaggcaagcctcgaccttttgattacacgaactcgactgctggcgatggtattgtccgccaattcagtgttgatggattcgacttggatattgagcgcgctccaacggatagctcagccggctacatcgctcttgcgaagcgactccgggctctttatgccaccaatagtgataagaactggtacttgacggcgtcgccgcaatgcgtggtgcctgacgccaacgtcggagctaccattcaatctgtcaaattcgatatgcttttcgtccagttctacaataccgcggcctgctctgctcggaactgggtgactgccaacaagaactacgtacctggaggaacagaagtatcatcggggttttcctacaataattgggactcgtggctatcatcatccacctacaacaaggcaacgccaatccttatcacacttccaggctctaactctgctgccagctctggggcatatatttcggtcgctaataccgtccagctggcaagcgcgtactactgtaactcgcgatttgccggaattggtgtttgggatgcgacgcgggctgaggagagcatagcaaacagcagatattacttccagaatgcaaaagtcaccctcaaggctgctggactcgatacccgtctttcatgtgttactgtcacggcctaa

SEQ ID NO: 22230 - protein, 372 aa, Muscodor strobelii
  misc_feature: SGI Peptide ID NO. 567544
  misc_feature (29)..(338): Pfam Id: PF00704 Pfam Desc: Glycosyl hydrolases family 18
  misc_feature (169)..(338): Pfam Id: PF00704 Pfam Desc: Glycosyl hydrolases family 18
  misc_feature (28)..(364): NCBI GI: 39943038 Blast Desc: MGG_03599 [Magnaporthe grisea 70-15] gi|145009830|gb|EDJ94486.1| MGG_03599 [Magnaporthe grisea 70-15] gi|260279099|dbj|BAI44120.1| chitinase [Magnaporthe oryzae]
  misc_feature (36)..(340): NCBI GI: 156035901 Blast Desc: SS1G_13155 [Sclerotinia sclerotiorum 1980] gi|154698559|gb|EDN98297.1| SS1G_13155 [Sclerotinia sclerotiorum 1980]
  misc_feature (2)..(358): NCBI GI: 121718263 Blast Desc: glycosyl hydrolase, family 18, [Aspergillus clavatus NRRL 1] gi|119404350|gb|EAW14726.1| glycosyl hydrolase, family 18, [Aspergillus clavatus NRRL 1]
  misc_feature (1)..(356): NCBI GI: 67902508 Blast Desc: AN8241.2 [Aspergillus nidulans FGSC A4] gi|4063766|dbj|BAA36223.1| chitinase [Emericella nidulans] gi|40739789|gb|EAA58979.1| AN8241.2 [Aspergillus nidulans FGSC ;
  misc_feature (23)..(356): NCBI GI: 239614107 Blast Desc: chitinase [Ajellomyces dermatitidis ER-3]
  misc_feature (22)..(356): NCBI GI: 169776541 Blast Desc: [Aspergillus oryzae RIB40] gi|83771472|dbj|BAE61604.1| protein product [Aspergillus oryzae]
  misc_feature (12)..(356): NCBI GI: 225559312 Blast Desc: endochitinase [Ajellomyces capsulatus G186AR]
  misc_feature (11)..(358): NCBI GI: 115433036 Blast Desc: [Aspergillus terreus NIH2624] gi|114189507|gb|EAU31207.1| [Aspergillus terreus NIH2624]
  misc_feature (11)..(339): NCBI GI: 240106285 Blast Desc: chitinase [Coccidioides posadasii C735 delta SOWgp]
  misc_feature (11)..(339): NCBI GI: 115502371 Blast Desc: chitinase [Coccidioides posadasii C735 delta SOWgp]
  misc_feature (22)..(339): SWISSPROT Homolog: EC 3.2.1.14 Chitinase
MARFAFTLFFLSTLFSSLVRAAFDITSKNNVAVYYGQGPNQKSITTYCADPTIDVIILSFVNLFPQQANGYPGTNFGNQCWATACKDALLMCPQLAQDLYTCRQTSDKKILLSLGGDPAAAAYQLTDASNGTAFADLLWGIFGPRDSAWVAAGKPRPFDYTNSTAGDGIVRQFSVDGFDLDIERAPTDSSAGYIALAKRLRALYATNSDKNWYLTASPQCVVPDANVGATIQSVKFDMLFVQFYNTAACSARNWVTANKNYVPGGTEVSSGFSYNNWDSWLSSSTYNKATPILITLPGSNSAASSGAYISVANTVQLASAYYCNSRFAGIGVWDATRAEESIANSRYYFQNAKVTLKAAGLDTRLSCVTVTA

SEQ ID NO: 22231 - DNA, 725 bp, Muscodor strobelii
  misc_feature: SGI EST ID NO. CUFF.52337.0
  misc_feature: Variant of the nucleotide sequence at SEQ ID NO 22229
acgacctttcggtctaattttattgatgctagctctcccaagactactgtcgcgacctaccactttagtcgtacgcgagtgacctcctgggcatggttgaggaactagaacgcgaatagccggctatcccatccgcttcaagtggccgctttggatgacattcgctaggcaatataggcatccagctaggagtagcgacaggggcgcgtttaaagattgccaagcatcgttacatgactgctttcgtaaattctagatcgggagtggtggattgacttgatcattgaaaaggcggcgtgcgccgccggcacggtttatcaaaatggcatcttcgtcagtctctccttttccctatgctcgggtagttagtaagtaatttgaagctattgtagtcactcttttatactttcacaatggcgcgattcgcatttacactctttttcctttcgacactcttttccagtcttgttagagcggcgtttgacatcacctcaaaaaataacgttgcagtgtactatggccaaggacccaatcagaaatcgattacgacttactgcgccgacccaacaattgacgttattattctttctttcgtgaacctctttccgcaacaagccaatggctatccgggcaccaacttcggcaaccagtgctgggccacagcatggtacgtgtaaaaagatcccgggcgaattattttttgattgtattcataaaacacggta

SEQ ID NO: 22232 - DNA, 1689 bp, Muscodor strobelii
  misc_feature: SGI cDNA ID NO. 567545
  misc_feature: Encodes the peptide sequence at SEQ ID NO 22233
atgaagtgcaggacattaatcgccctgctctcaggtctcaatgcggttgtgtcaaccacatcttttagcaactcgacgggaccgacagccgagactctcaatggcacttacgaaggacgctatgaatgggagcaggatgtatttttgggcattccgtatgctcaaccgccgataggacccttgagataccgatggccccagcacattaacgagtcatttgatggaactcgaaacgcaacccagtacggttacagttgtatgcagtatgtcactggccttgagctgtcggaagactgcttgactatcaatgtggtccggccgacgagaacagataatgagccactgccggttctcgtatggatctatggcggtggtctttatactggcagtactgcggatcctcaatataatttgtctgggatcgtgaaagttagccaagatatgggccagcccgtcgtagctgttagcatgaactatcgccttggtcaatggggatttttgcagacgcttcaaatcctcgcagaagggtccagcaatgcaggcttacttgatcaacgtctcgcattacactggatacaagaaaacattgctgcttttggtggcgatcccgacaaagtggttgtatggggggagagcgccggcgcgcagagcattgcatatcagatgtttgcgtacaacggacgagacgatcacctatggcgtggtactatccttgagagcggtggacccacgggagctcaagtcgagtctctctcttggtatggtaagtgcagaaagatcccgcgcgagtcaaacagcgctgttgcgaatctctctcaggctgtaggctgcgggagctcctcggaccaacttgcatgtctgcgcggtgttgactcagccacacttttcaatgcgcatccatctgtcgtctggaacccgttgcttgatggcgatttcttgacagcctatccgagccagctgatgctacaaggcaagtacaactccaaacctttgatcacaggcgcaaacacggacgaaggttttgcgatctcaggtatcaccccaaacaccgaagaagatatcttcaattcgatattcagctggcgcagctactccctcaccccgccgacggttcgtaaacttctggagttgtatccagatgatccgtgctacgagccgccttatgctatcacaaattgtactcgtaatttgtcgcgcggtagtcaatggagacgcgcggctgctattggctcggatcttgtcatgatctctgggcgacgtcgtatggctgaattattcacgaacgcaggtcagacggtctatagttaccgatttgatcaacggccttggaacggagccgaatgggatggagttaaacacttccaaaacgtcgcattcagttttcagaacatttcgggcttgctgggaccaagtccagaatatgatagccatagggctttatcgcgtgcagttggtcaggcgtacgtcaacttcgtcaataatttgaacccgaacgatgtggaaatatcgaaacaagcgatgggaaaacgaaaggagatgctactgccgccgtggccggaatatgatctgtctaaacccaaaaacatggtgttgaatgcgacgaaaaactgggtcgaagatgacacatggagaaaggaagggattgaattcatgatgacggctgatgtagctaaggaattgttgtcttga

SEQ ID NO: 22233 - protein, 562 aa, Muscodor strobelii
  misc_feature: SGI Peptide ID NO. 567545
  misc_feature (4)..(543): Pfam Id: PF00135 Pfam Desc: Carboxylesterase
  misc_feature (4)..(340): Pfam Id: PF00135 Pfam Desc: Carboxylesterase
  misc_feature (411)..(543): Pfam Id: PF00135 Pfam Desc: Carboxylesterase
  misc_feature (1)..(562): NCBI GI: 261354230 Blast Desc: lipase [Verticillium albo-atrum VaMs.102]
  misc_feature (7)..(496): NCBI GI: 46136615 Blast Desc: FG09823.1 [Gibberella zeae PH-1]
  misc_feature (4)..(562): NCBI GI: 154317491 Blast Desc: BC1G_03097 [Botryotinia fuckeliana B05.10] gi|150844271|gb|EDN19464.1| BC1G_03097 [Botryotinia fuckeliana B05.10]
  misc_feature (6)..(551): NCBI GI: 115391431 Blast Desc: cholinesterase [Aspergillus terreus NIH2624] gi|114194144|gb|EAU35844.1| cholinesterase [Aspergillus terreus NIH2624]
  misc_feature (6)..(551): NCBI GI: 145233451 Blast Desc: An02g09690 [Aspergillus niger] gi|134057029|emb|CAK37838.1| protein product [Aspergillus niger]
  misc_feature (5)..(551): NCBI GI: 67538302 Blast Desc: AN5321.2 [Aspergillus nidulans FGSC A4] gi|40743291|gb|EAA62481.1| AN5321.2 [Aspergillus nidulans FGSC A4] gi|259485238|tpe|CBF82104.1| TPA: extracellular lipase, FGSC
  misc_feature (5)..(550): NCBI GI: 256721590 Blast Desc: NECHADRAFT_37358 [Nectria haematococca mpVI 77-13-4]
  misc_feature (7)..(551): NCBI GI: 39968075 Blast Desc: MGG_02130 [Magnaporthe grisea 70-15] gi|145013018|gb|EDJ97659.1| MGG_02130 [Magnaporthe grisea 70-15]
  misc_feature (28)..(551): NCBI GI: 242770282 Blast Desc: extracellular lipase, [Talaromyces stipitatus ATCC 10500] gi|218725143|gb|EED24560.1| extracellular lipase, [Talaromyces stipitatus ATCC 10500]
  misc_feature (16)..(556): NCBI GI: 119490705 Blast Desc: carboxylesterase family protein [Neosartorya fischeri NRRL 181] gi|119411235|gb|EAW21178.1| carboxylesterase family protein [Neosartorya fischeri NRRL 181]
  misc_feature (15)..(553): SWISSPROT Homolog: EC 3.1.1.3 Triacylglycerol lipase
MKCRTLIALLSGLNAVVSTTSFSNSTGPTAETLNGTYEGRYEWEQDVFLGIPYAQPPIGPLRYRWPQHINESFDGTRNATQYGYSCMQYVTGLELSEDCLTINVVRPTRTDNEPLPVLVWIYGGGLYTGSTADPQYNLSGIVKVSQDMGQPVVAVSMNYRLGQWGFLQTLQILAEGSSNAGLLDQRLALHWIQENIAAFGGDPDKVVVWGESAGAQSIAYQMFAYNGRDDHLWRGTILESGGPTGAQVESLSWYGKCRKIPRESNSAVANLSQAVGCGSSSDQLACLRGVDSATLFNAHPSVVWNPLLDGDFLTAYPSQLMLQGKYNSKPLITGANTDEGFAISGITPNTEEDIFNSIFSWRSYSLTPPTVRKLLELYPDDPCYEPPYAITNCTRNLSRGSQWRRAAAIGSDLVMISGRRRMAELFTNAGQTVYSYRFDQRPWNGAEWDGVKHFQNVAFSFQNISGLLGPSPEYDSHRALSRAVGQAYVNFVNNLNPNDVEISKQAMGKRKEMLLPPWPEYDLSKPKNMVLNATKNWVEDDTWRKEGIEFMMTADVAKELLS

SEQ ID NO: 22234 - DNA, 1044 bp, Muscodor strobelii
  misc_feature: SGI cDNA ID NO. 567546
  misc_feature: Encodes the peptide sequence at SEQ ID NO 22235
atgagcaacttgtcccgtcacatagcctgcaaactttgtcgcgacagaaaagtccgatgtgatggaggacagccatcttgcgaaaagtgtacgagatcaggagagagctgtgtttatgtgccgacacacaaacccacaaaggccgacctagcacaaacaattgagacgttgcaggaaagattagataaagctgaagcatatatcttaaaaaatagcccgtcaagacaacctgggactagcgaaccaccaccgatagcaaatcctgctgggtcgataggcatggattacacagagtgctctccattcaatttgcatatgtcaacctccataccaacgggcgatccatatatacctgctagtatgcatatgataccatcgacgccattctcgccacataactcacttcccatgtccccggaaggcatcgacaatgagttcttaacctatatccatagccctcaagccggagttcacgacctctcgcaatttcacctggaagatctatccggtcccagtacaacttcttcatcatttcgacggggcagtatatactctcatagacagatgccaagtttacaagaagtccgagctttgaacggatcatcgacatcaactacaccaccaccatcctcaccggcagggaacttcggtggaggtgacgccaaccacattctagccgagcttacggccttcggcatggtggttttcaatacacaggcagaaattgcgggtatatcctccgttgttgcggagtatcttgaatggatgaggaaagcgccaccaggacaaggatcgccaaaagagaatccggcggtactagaagcactcgaaagacgcatacgcgagctaaatgccttagcaaatgcgaaacatatggaggcctggagacgatctgtgcaaagattagagagactaccaggtgtgggcgccatgctaaatatttttgacggcgagatgcagcgccgcagtgctgaaactgccgaattctttcatacgaactacgacatttgctcaccactcgcggaacaaactcgaaaagactaa

SEQ ID NO: 22235 - protein, 347 aa, Muscodor strobelii
  misc_feature: SGI Peptide ID NO. 567546
  misc_feature (8)..(47): Pfam Id: PF00172 Pfam Desc: Fungal Zn(2)-Cys(6) binuclear cluster domain
  misc_feature (3)..(343): NCBI GI: 255953381 Blast Desc: Pc21g03950 [Penicillium chrysogenum Wisconsin 54-1255] gi|211589154|emb|CAP95292.1| Pc21g03950 [Penicillium chrysogenum Wisconsin 54-1255]
  misc_feature (1)..(345): NCBI GI: 115387147 Blast Desc: [Aspergillus terreus NIH2624] gi|114195163|gb|EAU36863.1| [Aspergillus terreus NIH2624]
  misc_feature (30)..(345): NCBI GI: 116179228 Blast Desc: [Chaetomium globosum CBS 148.51] gi|88184539|gb|EAQ92007.1| [Chaetomium globosum CBS 148.51]
  misc_feature (1)..(68): NCBI GI: 119483522 Blast Desc: C6 zinc finger domain protein [Neosartorya fischeri NRRL 181] gi|119409820|gb|EAW19767.1| C6 zinc finger domain protein [Neosartorya fischeri NRRL 181]
  misc_feature (184)..(343): NCBI GI: 189211630 Blast Desc: [Pyrenophora tritici-repentis Pt-1C-BFP] gi|187979343|gb|EDU45969.1| [Pyrenophora tritici-repentis Pt-1C-BFP]
  misc_feature (1)..(79): NCBI GI: 238846161 Blast Desc: fungal specific transcription factor domain-containing protein [Microsporum canis CBS 113480]
  misc_feature (5)..(100): NCBI GI: 242793279 Blast Desc: conserved [Talaromyces stipitatus ATCC 10500] gi|218718717|gb|EED18137.1| conserved [Talaromyces stipitatus ATCC 10500]
  misc_feature (8)..(74): NCBI GI: 255938632 Blast Desc: Pc14g00920 [Penicillium chrysogenum Wisconsin 54-1255] gi|211584707|emb|CAP74233.1| Pc14g00920 [Penicillium chrysogenum Wisconsin 54-1255]
  misc_feature (5)..(121): NCBI GI: 212546553 Blast Desc: conserved [Penicillium marneffei ATCC 18224] gi|210064950|gb|EEA19045.1| conserved [Penicillium marneffei ATCC 18224]
  misc_feature (9)..(65): NCBI GI: 256724191 Blast Desc: NECHADRAFT_87420 [Nectria haematococca mpVI 77-13-4]
MSNLSRHIACKLCRDRKVRCDGGQPSCEKCTRSGESCVYVPTHKPTKADLAQTIETLQERLDKAEAYILKNSPSRQPGTSEPPPIANPAGSIGMDYTECSPFNLHMSTSIPTGDPYIPASMHMIPSTPFSPHNSLPMSPEGIDNEFLTYIHSPQAGVHDLSQFHLEDLSGPSTTSSSFRRGSIYSHRQMPSLQEVRALNGSSTSTTPPPSSPAGNFGGGDANHILAELTAFGMVVFNTQAEIAGISSVVAEYLEWMRKAPPGQGSPKENPAVLEALERRIRELNALANAKHMEAWRRSVQRLERLPGVGAMLNIFDGEMQRRSAETAEFFHTNYDICSPLAEQTRKD

SEQ ID NO: 22236 - DNA, 2979 bp, Muscodor strobelii
  misc_feature: SGI EST ID NO. CUFF.52281.0
  misc_feature: Variant of the nucleotide sequence at SEQ ID NO 22234
gggctttcagcaggggtctttcatatctttagtgttccgctccacttgacgcgaacccccactgtaagtcataaagtcagaacgtagtctcaatctcaaggccaagcagcatatgagcacaggacatgatctgacagaattattggctactgtatacttggagcggccctgtagccagtcccggtagtttaggaattagatccgttactcagtccttaccttgcgtgtcaaaagcttggcaacgatccaataccttatacattcagctgtgccccaacctactgttcacgcagcctaaagctcgatcattacaagattcatgtagaacgacgccgggatctacaaacatagcatcgtgtgccgagaacacagaggcccgtcgaagccacacctgccataaagcactgtcccaccctcgcattcactacagatgaccatgagcaacttgtcccgtcacatagcctgcaaactttgtcgcgacagaaaagtccgatgtgatggaggacagccatcttgcgaaaagtgtacgagatcaggagagagctgtgtttatgtgccgacacacaaacccacaaaggccgacctagcacaaacaattgagacgttgcaggaaagattagataaagctgaagcatatatcttaaaaaatagcccgtcaagacaacctgggactagcgaaccaccaccgatagcaaatcctgctgggtcgataggcatggattacacagagtgctctccattcaatttgcatatgtcaacctccataccaacgggcgatccatatatacctgctagtatgcatatgataccatcgacgccattctcgccacataactcacttcccatgtccccggaaggcatcgacaatgagttcttaacctatatccatagccctcaagccggagttcacgacctctcgcaatttcacctggaagatctatccggtcccagtacaacttcttcatcatttcgacggggcagtatatactctcatagacagatgccaagtttacaagaagtccgagctttgaacggatcatcgacatcaactacaccaccaccatcctcaccggcagggaacttcggtggaggtgacgccaaccacattctagccgagcttacggccttcggcatggtggttttcaatacacaggcagaaattgcgggtatatcctccgttgttgcggagtatcttgaatggatgaggaaagcgccaccaggacaaggatcgccaaaagagaatccggcggtactagaagcactcgaaagacgcatacgcgagctaaatgccttagcaaatgcgaaacatatggaggcctggagacgatctgtgcaaagattagagagactaccaggtgtgggcgccatgctaaatatttttgacggcgagatgcagcgccgcagtgctgaaactgccgaattctttcatacgaactacgacatttgctcaccactcgcggaacaaactcgaaaagactaagatgtgtctgattaagaaggtgacgatggtttacacctaatcttcactcctaaaagaagatttcattgttgaaccccaatcgcgcgtcgcatcagagtcacagctgagctatatgatgtattatacaatctagagcatttcgcgttgtacatagcatttgcaggagtctctcatcaaaactgtttgggtgctgcatgaacctggaagttggtaaggaatttagcatatatttcgatatagaagcaactcagaccgcatctgatagttttcaggggctcagatccaacggacgtcctgtccaggtgacgtgtcacctgtaacggtaaaaaatacaaaaggcggtcacatgttaccagtcgactactgcgtaatatggatatgacctgcacaatgcggtattactcgtatatcccacattattcaaaaaggcggggacggtcggtgtgccggcggcgcggctgtacctaagagaggcacagccgtattagcggtgaagatttcgtccatgtctttttgtcgctgatgaactcctcgtcccttcgtatagttcaccaatctgcatcttcctgtgggatcgcaactctgcgatctctcattctcgagggttctctgagctttgatttccacctatgagactcacagatgcggcactgtgtgcaggctgccgagctgcgtgcatggtcactgccgacgtttcatgcaccgggatccgagtcctgcatatgtcgtgccacgtgaaaaatgaggtctttcgtcttcatacgacgtatcagaatggtatacgatgcctcagatatcagctgacattctctttctcatatccgtccacctcgatctcgtctttcttctgcggcatgatggttttcggggacgttttgttgtaagggacgcgcagattacaggaagttacgccgaatccttaccacggagattcagtatttcagagcgggtcagttggacatcagatcatttcgacactggatcaaatgattcgcccagtttaaagtaaatcagtaaagggcattagactcaacattcaggataaaacgtgcaagcgtatgtaagagatgtctgtctatcatcagcatattcttttatcagtcagccattagtatcaaatgatatgctgcatataacatgtgaaatgtctgactgacgcgcggattatgcacaaattcagaatgcttacggcattggcaaaccaagttcgtagacctatatttggaaacactcaacatccattgtccgatcaagtggaaagcgactttgcgtaaatgctgtgttgtcgtggttgctgtcagattatgctgaggatctcgtctcaacaaccgttcctagctgttaagtatacggaaatgtatcaggtgatttcttatgctcggttctcgggtagttttgtcctttgctcgaatgatgattcttatttcatagagtgattggtcaacataaacagggtttgttgagtatagatcactccttcaatgggaagtgtgtgtcgg

SEQ ID NO: 22237 - DNA, 1449 bp, Muscodor strobelii
  misc_feature: SGI cDNA ID NO. 567547
  misc_feature: Encodes the peptide sequence at SEQ ID NO 22238
atgtcgctgccttcagactttctatggggctttgccacagctgcttattctcttcactacagcttccagattgaaggcgccagcgacaaagacggacggggtccgacaatttgggacaaattctgtgcgatcccggggaaaatcgccgataaaagcgacggctcggtagcctgcgactcctacaacagaacagcagaagatatcgcgcttctaaaaagcgtcggtgccaaagcttaccgtttctctctttcatgggcacgtatcattcccctgggcgggagaaacgacccaatcaaccaagctggtatcgatcattacgtcaaattcgttgacgacctactggaagctgaaattgtaccattcattacgttgctccattgggacgtaccagatggaatcgaacagcggtatggcggcttactgaacaaggtcgagttcccactagactttgagcattacgcacgtgtggtattcaaggcaatccccaagtgcaaggattggatcacattcaatgagccattctgcagttcaatcctaggctacaacacgggtctctttgcccctggccacacctcagatcgcaccaaatctccagttggcgattcaagccgtgagccatggattgtgggacacaatatcttaatcgcacacgccaaagcagttaaggtgtaccgtgaagagttcaagcctaaagacaaaggccagatcggtatcaccctgaacggtgactgggcctacccttgggacccggaggaccccgaggacatcgcagccgcggaccgtaagatcgagtttgcgatatcgtggtttgccgatccagtgtacttcgggaaatacccagattcaatgcgcgcgcaacttggtgacagactaccagagttcaccccggaggaatctgctctcatcaagggctcgaacgacttctatggcatgaatcactataccgcggactacattaagcacggaacgggcgacccagcgccagaggatttcttgggaaacttaacgacccacgcttacaacaaattgggtgaatgcatcggccctgagacccaatccttctggctccgtcccaaccctcagggtttccgaaacttgatcaattggttaagcaagcgatatgggtatcccgcaatctacgtcacagagaatggaaccagcatcaagggagagaacgatttacccaaagaagagattcttgaagaccaattccgagttgactattttaaaggctatgtggatgcactagcgaaggcagtgaaagaggacgggtgcaacgtaaaggggtacatggcttggagtctcatggacaattttgagtgggcagaaggatatgaaacccgatttggcgtgacgtttgtggattatgagaatgggcagactcgcacacctaagaagagcgccaaagagatgaaaggcattttcgaggccgtcatggaaaatcagtga

SEQ ID NO: 22238 - protein, 482 aa, Muscodor strobelii
  misc_feature: SGI Peptide ID NO. 567547
  misc_feature (2)..(474): Pfam Id: PF00232 Pfam Desc: Glycosyl hydrolase family 1
  misc_feature (2)..(469): Pfam Id: PF00232 Pfam Desc: Glycosyl hydrolase family 1
  misc_feature (1)..(480): NCBI GI: 85078541 Blast Desc: beta-glucosidase [Neurospora crassa OR74A] gi|28917235|gb|EAA26947.1| beta-glucosidase [Neurospora crassa OR74A]
  misc_feature (1)..(482): NCBI GI: 4249560 Blast Desc: beta-glucosidase [Humicola grisea var. thermoidea]
  misc_feature (1)..(482): NCBI GI: 171686958 Blast Desc: protein product [Podospora anserina] gi|170943440|emb|CAP69093.1| protein product [Podospora anserina]
  misc_feature (1)..(480): NCBI GI: 261360134 Blast Desc: beta-glucosidase A [Verticillium albo-atrum VaMs.102]
  misc_feature (1)..(480): NCBI GI: 39969157 Blast Desc: MGG_10189 [Magnaporthe grisea 70-15] gi|59803064|gb|AAX07701.1| lactase-phlorizin hydrolase-like protein [Magnaporthe grisea] gi|145021265|gb|EDK05394.1| grisea
  misc_feature (1)..(482): NCBI GI: 116191849 Blast Desc: CHGG_05642 [Chaetomium globosum CBS 148.51] gi|88181555|gb|EAQ89023.1| CHGG_05642 [Chaetomium globosum CBS 148.51]
  misc_feature (1)..(482): NCBI GI: 46125793 Blast Desc: FG07274.1 [Gibberella zeae PH-1]
  misc_feature (1)..(482): NCBI GI: 256732780 Blast Desc: glycoside hydrolase family 1 [Nectria haematococca mpVI 77-13-4]
  misc_feature (3)..(482): NCBI GI: 154315304 Blast Desc: BC1G_04691 [Botryotinia fuckeliana B05.10] gi|150847654|gb|EDN22847.1| BC1G_04691 [Botryotinia fuckeliana B05.10]
  misc_feature (2)..(480): NCBI GI: 119494976 Blast Desc: beta-glucosidase, [Neosartorya fischeri NRRL 181] gi|119412447|gb|EAW22388.1| beta-glucosidase, [Neosartorya fischeri NRRL 181]
  misc_feature (3)..(477): SWISSPROT Homolog: EC 3.2.1.21 Beta-glucosidase
MSLPSDFLWGFATAAYSLHYSFQIEGASDKDGRGPTIWDKFCAIPGKIADKSDGSVACDSYNRTAEDIALLKSVGAKAYRFSLSWARIIPLGGRNDPINQAGIDHYVKFVDDLLEAEIVPFITLLHWDVPDGIEQRYGGLLNKVEFPLDFEHYARVVFKAIPKCKDWITFNEPFCSSILGYNTGLFAPGHTSDRTKSPVGDSSREPWIVGHNILIAHAKAVKVYREEFKPKDKGQIGITLNGDWAYPWDPEDPEDIAAADRKIEFAISWFADPVYFGKYPDSMRAQLGDRLPEFTPEESALIKGSNDFYGMNHYTADYIKHGTGDPAPEDFLGNLTTHAYNKLGECIGPETQSFWLRPNPQGFRNLINWLSKRYGYPAIYVTENGTSIKGENDLPKEEILEDQFRVDYFKGYVDALAKAVKEDGCNVKGYMAWSLMDNFEWAEGYETRFGVTFVDYENGQTRTPKKSAKEMKGIFEAVMENQ

SEQ ID NO: 22239 - DNA, 3657 bp, Muscodor strobelii
  misc_feature: SGI cDNA ID NO. 567548
  misc_feature: Encodes the peptide sequence at SEQ ID NO 22240
atgcaggcctcctctggcatgttgaccaagttcgagtccaagtcctcgagggccaagggcctggccttccacccgaaaagaccatggatcctcgtctcgctccactcctcgaccatccagctgtgggactaccgcatgggcaccctgatagaccgcttcgaggagcacgacgggcccgtccgcggtatcgacttccacaagacccagcccctcttcgtctcgggcggcgacgactacaagatcaaggtctggtcctaccagacgcggcgctgtctcttcaccctcaacggccatctcgactatgtccgcaccgtcttcttccaccacgagctgccctggatcatctcgtgctccgatgaccagaccatccgcatatggaactggcagaaccgctccctcatttgcaccatgaccggccacaaccactatgtcatgtgcgcccagttccaccccaaggacgacctcgtcgtgtccgcctccctcgaccagtccgtgcgcgtctgggacatctcgggcctgcgcaagaagcactcggccccgacttccatgtccttcgaagaccaggtcgcgcggtccaacgcccagcagaccgacatgttcggaaacaccgacgccatggtcaagttcgtcctcgagggccacgaccgcggcgtcaactgggtcgccttccatcccaccaacccgcacatcgtctccggcggcgacgaccgtctcgtcaagctgtggcgatacagcgagaccaaggcgtgggaggtagacacgtgtcgtggccatttccagaactccaccggctgtcttttccacccacatcaagacctcatcctgtcctgcggcgaggacaagaccatacgagtgtgggattcgtcaaagcgcacggccgtacagtcattcaagcgcgagaacgacagattctgggtcatcgccgcccatcccgagatcaacctgttcgcagccggccacgataacggtgtcatggtcttcaagctggagcgggagcgcccggcgtctaccgttcaccagaacaacctcttcttcatcaccaaggagaagcatgtccgctcctatgacttccagaagaacgtggagagcccgactctactttcgctgaagcggctgggaagcgcatgggtccctccacggactctatcctataatccggctgagcgctctgtcctggttacgtcacctgcggacggcggctcctacgagctcattaatctccctcgagacgggtcgggtgccattgaagccaccgactccaaacggggaccgggaaactccgctatcttcgttgctcggaatcgcttcgctgttctaaacacgtctacccagacggtagatatcaaagacttatcaaacaatacagcgcgatctttcaaacccccaattggaacgaccgacatatactttggcggcaccggcaatcttctcatcatcactcctacggccgttcacctctatgatatccaacagaagaaaagcatcgcggagcttgccgtgaatggagtcaagtatgtggtttggtcgaacgatggcctccatgccgctcttttgagcaagcataacgtaaccattgtgacgaaggctttggagcaggtcagcacgttgcacgagacgatcaggatcaagagcgccgcttgggacgatgccggtgttcttctttactctacattaaaccacgtcaagtacactttgatgaacggcgataacggtattgttcgcacgcttgaccaaactgtctatcttgtccgggtcaagggaaggaatgtctattgtctcgatcgtgcagcgaagcccaatgtgctgaacatcgaccctaccgagtatcgcttcaagctgtctctggtgaagcgaaactacgaggaaatgcttcacatcattcgcacctctagcctggtgggccagtctatcatttcttatctccagaagaagggctatcccgagattgcgttgcaattcgttcaggacccgagtacccggtttgaactggctatagaatgcggaaatcttgacgtcgcgctcgagatggccaaagacctggaccgacccaagctatggacaaggctaggaactgaggcgttggctcatggtaaccatcaaatcgtggagatggcatatcagaaactcaagcaattcgataagctctccttcctgtatctgtcgactggtgatcactttaagcttgccagaatggctaagattgctgagcaccggggcgacttcactgcacggttccagaatgctcttttcctaggtgaggtagaggacaggatacaaatgttcaaggaagttgatctttatccccttgcttacatgaccgccaaagcacacggcctggaagaagaatgccagtctatcttggaagcgaccggggttactgaggatcagctcacaacaccaaagttcggagaggcattctccactcccaagccagtagttcctacatacaaggctaactggccgacgaaggccacttcacaatcattcttcgaaaaggctttggctggccagttggaggatatgaccctcgaagatgagcctgcggcagccgaggcagccgatctcatggatgaagatgtgcctgcgaagcgcgctggtacattggaagtcgatgatgacgaagatgcagccggctgggatatgggcgacgacattgtgccagaggccgagagtgacttcgtgaacgtcgaaagcacggatgccggaggtgcaggcagcagcgaggctgacatgtgggctcggaactctcccattgcggcggatcacattgcggcaggatcattcgaatcggccatgaatctccttaaccgtcaagtcggcgccgtcaacttcgcgcccctcaaacctcgattcatggaaatctacaccgccactaaaacctacctcccagcatcggccaacttgccgccgcttgtcaactatgtgcgtcgcacattggacgagacagctcccagaaaagtgctgccgatcatccctcgagacctagagcatcttgcgtcgaacgacctacaacaaggttatgacgccatgcggtccaacaggttggatgatgggttggccatcttccgtggcatcctccacgcgatcctggccaacgccgtctctagcgacagtgaagtgggcgaggccaagaagttgatcacttcggccggtgagtacgccgtggccatgagcatcgagctcgctcggaggaccctgggtacgcccgacgtagtcaacaacaatcccgagctcctcaagcggagcttggagctctcggcctacttcaccatccccaagatcgaagtgccccatcgccagttagcacttctgaatgccatgaatctggccttccgcagcaagaacctgagctccgctctcagctttgccaaccgcatcctggcgaacggcggcgctcctagaatactggaaagtgccaagaagatgaagacgcagtgcgagcggaacccgcatgacgctgtggagattgagtatgaccagtttgccgagttcgacatctgcgcggccagccacacgcccatctacagcggcacgtcgtttgaggaatgcgcatttgacgggtccaaatatcactcgaaatacaagggaacggtgtgcgtggtgtgccaggtctgcgaggtgggtaaacatggaagcgggctcaggttatttgcgtag

SEQ ID NO: 22240 - protein, 1218 aa, Muscodor strobelii
  misc_feature: SGI Peptide ID NO. 567548
  misc_feature (89)..(127): Pfam Id: PF00400 Pfam Desc: WD domain, G-beta repeat
  misc_feature (205)..(243): Pfam Id: PF00400 Pfam Desc: WD domain, G-beta repeat
  misc_feature (131)..(169): Pfam Id: PF00400 Pfam Desc: WD domain, G-beta repeat
  misc_feature (47)..(85): Pfam Id: PF00400 Pfam Desc: WD domain, G-beta repeat
  misc_feature (249)..(287): Pfam Id: PF00400 Pfam Desc: WD domain, G-beta repeat
  misc_feature (349)..(795): Pfam Id: PF04053 Pfam Desc: Coatomer WD associated region
  misc_feature (819)..(1218): Pfam Id: PF06957 Pfam Desc: Coatomer (COPI) alpha subunit C-terminus
  misc_feature (905)..(1215): Pfam Id: PF06957 Pfam Desc: Coatomer (COPI) alpha subunit C-terminus
  misc_feature (1)..(1218): NCBI GI: 46127123 Blast Desc: FG07939.1 [Gibberella zeae PH-1]
  misc_feature (1)..(1218): NCBI GI: 256721632 Blast Desc: [Nectria haematococca mpVI 77-13-4]
  misc_feature (1)..(1218): NCBI GI: 116179498 Blast Desc: conserved [Chaetomium globosum CBS 148.51] gi|88184674|gb|EAQ92142.1| conserved [Chaetomium globosum CBS 148.51]
  misc_feature (1)..(1218): NCBI GI: 39942862 Blast Desc: conserved [Magnaporthe grisea 70-15] gi|145009930|gb|EDJ94586.1| conserved [Magnaporthe grisea 70-15]
  misc_feature (1)..(1218): NCBI GI: 85088976 Blast Desc: NCU10066 [Neurospora crassa OR74A] gi|28919142|gb|EAA28645.1| NCU10066 [Neurospora crassa OR74A]
  misc_feature (3)..(1218): NCBI GI: 156042664 Blast Desc: conserved [Sclerotinia sclerotiorum 1980] gi|154695516|gb|EDN95254.1| conserved [Sclerotinia sclerotiorum 1980]
  misc_feature (3)..(1218): NCBI GI: 154304752 Blast Desc: BC1G_08115 [Botryotinia fuckeliana B05.10] gi|150854015|gb|EDN29207.1| BC1G_08115 [Botryotinia fuckeliana B05.10]
  misc_feature (1)..(1218): NCBI GI: 189091944 Blast Desc: [Podospora anserina] gi|27803081|emb|CAD60784.1| protein product [Podospora anserina] gi|188219325|emb|CAP49305.1| protein product [Podospora anserina]
  misc_feature (1)..(1217): NCBI GI: 119492234 Blast Desc: Coatomer subunit alpha, [Neosartorya fischeri NRRL 181] gi|119411716|gb|EAW21659.1| Coatomer subunit alpha, [Neosartorya fischeri NRRL 181]
  misc_feature (1)..(1217): NCBI GI: 159127740 Blast Desc: Coatomer subunit alpha, [Aspergillus fumigatus A1163]
MQASSGMLTKFESKSSRAKGLAFHPKRPWILVSLHSSTIQLWDYRMGTLIDRFEEHDGPVRGIDFHKTQPLFVSGGDDYKIKVWSYQTRRCLFTLNGHLDYVRTVFFHHELPWIISCSDDQTIRIWNWQNRSLICTMTGHNHYVMCAQFHPKDDLVVSASLDQSVRVWDISGLRKKHSAPTSMSFEDQVARSNAQQTDMFGNTDAMVKFVLEGHDRGVNWVAFHPTNPHIVSGGDDRLVKLWRYSETKAWEVDTCRGHFQNSTGCLFHPHQDLILSCGEDKTIRVWDSSKRTAVQSFKRENDRFWVIAAHPEINLFAAGHDNGVMVFKLERERPASTVHQNNLFFITKEKHVRSYDFQKNVESPTLLSLKRLGSAWVPPRTLSYNPAERSVLVTSPADGGSYELINLPRDGSGAIEATDSKRGPGNSAIFVARNRFAVLNTSTQTVDIKDLSNNTARSFKPPIGTTDIYFGGTGNLLIITPTAVHLYDIQQKKSIAELAVNGVKYVVWSNDGLHAALLSKHNVTIVTKALEQVSTLHETIRIKSAAWDDAGVLLYSTLNHVKYTLMNGDNGIVRTLDQTVYLVRVKGRNVYCLDRAAKPNVLNIDPTEYRFKLSLVKRNYEEMLHIIRTSSLVGQSIISYLQKKGYPEIALQFVQDPSTRFELAIECGNLDVALEMAKDLDRPKLWTRLGTEALAHGNHQIVEMAYQKLKQFDKLSFLYLSTGDHFKLARMAKIAEHRGDFTARFQNALFLGEVEDRIQMFKEVDLYPLAYMTAKAHGLEEECQSILEATGVTEDQLTTPKFGEAFSTPKPVVPTYKANWPTKATSQSFFEKALAGQLEDMTLEDEPAAAEAADLMDEDVPAKRAGTLEVDDDEDAAGWDMGDDIVPEAESDFVNVESTDAGGAGSSEADMWARNSPIAADHIAAGSFESAMNLLNRQVGAVNFAPLKPRFMEIYTATKTYLPASANLPPLVNYVRRTLDETAPRKVLPIIPRDLEHLASNDLQQGYDAMRSNRLDDGLAIFRGILHAILANAVSSDSEVGEAKKLITSAGEYAVAMSIELARRTLGTPDVVNNNPELLKRSLELSAYFTIPKIEVPHRQLALLNAMNLAFRSKNLSSALSFANRILANGGAPRILESAKKMKTQCERNPHDAVEIEYDQFAEFDICAASHTPIYSGTSFEECAFDGSKYHSKYKGTVCVVCQVCEVGKHGSGLRLFA

SEQ ID NO: 22241 - DNA, 4332 bp, Muscodor strobelii
  misc_feature: SGI EST ID NO. CUFF.52352.0
  misc_feature: Variant of the nucleotide sequence at SEQ ID NO 22239
cccgtgtgctgccaaagaacatcggggagctgggaggtactgcagcctactactcccctgttacatgacacgatagcctacaattaaccccgtccaccttgggagcctcgctggaaaataggcggcgacatcatcaacccaacgaccggccacgacaatcacttctcccctctttcccaagctcttctctcccctcctcccccatccggctccgcaaggaggtctctcttcttcggcctcgttcattctatcggcgagctacggtcgatgacccagtcctaggggctccccctgtgtgcctcccaccatcgtcacaatgcaggcctcctctggcatgttgaccaagttcgagtccaagtcctcgagggccaagggcctggccttccacccgaaaagaccatggatcctcgtctcgctccactcctcgaccatccagctgtgggactaccgcatgggcaccctgatagaccgcttcgaggagcacgacgggcccgtccgcggtatcgacttccacaagacccagcccctcttcgtctcgggcggcgacgactacaagatcaaggtctggtcctaccagacgcggcgctgtctcttcaccctcaacggccatctcgactatgtccgcaccgtcttcttccaccacgagctgccctggatcatctcgtgctccgatgaccagaccatccgcatatggaactggcagaaccgctccctcatttgcaccatgaccggccacaaccactatgtcatgtgcgcccagttccaccccaaggacgacctcgtcgtgtccgcctccctcgaccagtccgtgcgcgtctgggacatctcgggcctgcgcaagaagcactcggccccgacttccatgtccttcgaagaccaggtcgcgcggtccaacgcccagcagaccgacatgttcggaaacaccgacgccatggtcaagttcgtcctcgagggccacgaccgcggcgtcaactgggtcgccttccatcccaccaacccgcacatcgtctccggcggcgacgaccgtctcgtcaagctgtggcgatacagcgagaccaaggcgtgggaggtagacacgtgtcgtggccatttccagaactccaccggctgtcttttccacccacatcaagacctcatcctgtcctgcggcgaggacaagaccatacgagtgtgggattcgtcaaagcgcacggccgtacagtcattcaagcgcgagaacgacagattctgggtcatcgccgcccatcccgagatcaacctgttcgcagccggccacgataacggtgtcatggtcttcaagctggagcgggagcgcccggcgtctaccgttcaccagaacaacctcttcttcatcaccaaggagaagcatgtccgctcctatgacttccagaagaacgtggagagcccgactctactttcgctgaagcggctgggaagcgcatgggtccctccacggactctatcctataatccggctgagcgctctgtcctggttacgtcacctgcggacggcggctcctacgagctcattaatctccctcgagacgggtcgggtgccattgaagccaccgactccaaacggggaccgggaaactccgctatcttcgttgctcggaatcgcttcgctgttctaaacacgtctacccagacggtagatatcaaagacttatcaaacaatacagcgcgatctttcaaacccccaattggaacgaccgacatatactttggcggcaccggcaatcttctcatcatcactcctacggccgttcacctctatgatatccaacagaagaaaagcatcgcggagcttgccgtgaatggagtcaagtatgtggtttggtcgaacgatggcctccatgccgctcttttgagcaagcataacgtaaccattgtgacgaaggctttggagcaggtcagcacgttgcacgagacgatcaggatcaagagcgccgcttgggacgatgccggtgttcttctttactctacattaaaccacgtcaagtacactttgatgaacggcgataacggtattgttcgcacgcttgaccaaactgtctatcttgtccgggtcaagggaaggaatgtctattgtctcgatcgtgcagcgaagcccaatgtgctgaacatcgaccctaccgagtatcgcttcaagctgtctctggtgaagcgaaactacgaggaaatgcttcacatcattcgcacctctagcctggtgggccagtctatcatttcttatctccagaagaagggctatcccgagattgcgttgcaattcgttcaggacccgagtacccggtttgaactggctatagaatgcggaaatcttgacgtcgcgctcgagatggccaaagacctggaccgacccaagctatggacaaggctaggaactgaggcgttggctcatggtaaccatcaaatcgtggagatggcatatcagaaactcaagcaattcgataagctctccttcctgtatctgtcgactggtgatcactttaagcttgccagaatggctaagattgctgagcaccggggcgacttcactgcacggttccagaatgctcttttcctaggtgaggtagaggacaggatacaaatgttcaaggaagttgatctttatccccttgcttacatgaccgccaaagcacacggcctggaagaagaatgccagtctatcttggaagcgaccggggttactgaggatcagctcacaacaccaaagttcggagaggcattctccactcccaagccagtagttcctacatacaaggctaactggccgacgaaggccacttcacaatcattcttcgaaaaggctttggctggccagttggaggatatgaccctcgaagatgagcctgcggcagccgaggcagccgatctcatggatgaagatgtgcctgcgaagcgcgctggtacattggaagtcgatgatgacgaagatgcagccggctgggatatgggcgacgacattgtgccagaggccgagagtgacttcgtgaacgtcgaaagcacggatgccggaggtgcaggcagcagcgaggctgacatgtgggctcggaactctcccattgcggcggatcacattgcggcaggatcattcgaatcggccatgaatctccttaaccgtcaagtcggcgccgtcaacttcgcgcccctcaaacctcgattcatggaaatctacaccgccactaaaacctacctcccagcatcggccaacttgccgccgcttgtcaactatgtgcgtcgcacattggacgagacagctcccagaaaagtgctgccgatcatccctcgagacctagagcatcttgcgtcgaacgacctacaacaaggttatgacgccatgcggtccaacaggttggatgatgggttggccatcttccgtggcatcctccacgcgatcctggccaacgccgtctctagcgacagtgaagtgggcgaggccaagaagttgatcacttcggccggtgagtacgccgtggccatgagcatcgagctcgctcggaggaccctgggtacgcccgacgtagtcaacaacaatcccgagctcctcaagcggagcttggagctctcggcctacttcaccatccccaagatcgaagtgccccatcgccagttagcacttctgaatgccatgaatctggccttccgcagcaagaacctgagctccgctctcagctttgccaaccgcatcctggcgaacggcggcgctcctagaatactggaaagtgccaagaagatgaagacgcagtgcgagcggaacccgcatgacgctgtggagattgagtatgaccagtttgccgagttcgacatctgcgcggccagccacacgcccatctacagcggcacgtcgtttgaggaatgcgcatttgacgggtccaaatatcactcgaaatacaagggaacggtgtgcgtggtgtgccaggtctgcgaggtgggtaaacatggaagcgggctcaggttatttgcgtagacaaaagggccagggcaatgtagacagcgtcggcagatccatccaacgtatcaagcggtgatggatcaggaataggtgttggagtgtcaaaaatgtcaagacttaacgagagcagtgagttgagatatataatcccggcattatagagcctaaagcatattgccagtcgagtattgagagtatcgagcatgaagtgtggttggcaggatagcgtaagcctgaggagcccttgaacacatctatggcggtgcgtgagaacgatccgagggttcatcgttcaacaacctttgaaaccttcctcagctcctcttgcaaaactcgtttctggctcgccacatgtgagatgagatatatgccat

SEQ ID NO: 22242 - DNA, 3633 bp, Muscodor strobelii
  misc_feature: SGI cDNA ID NO. 567549
  misc_feature: Encodes the peptide sequence at SEQ ID NO 22243
atgcagttcgagtccaagtcctcgagggccaagggcctggccttccacccgaaaagaccatggatcctcgtctcgctccactcctcgaccatccagctgtgggactaccgcatgggcaccctgatagaccgcttcgaggagcacgacgggcccgtccgcggtatcgacttccacaagacccagcccctcttcgtctcgggcggcgacgactacaagatcaaggtctggtcctaccagacgcggcgctgtctcttcaccctcaacggccatctcgactatgtccgcaccgtcttcttccaccacgagctgccctggatcatctcgtgctccgatgaccagaccatccgcatatggaactggcagaaccgctccctcatttgcaccatgaccggccacaaccactatgtcatgtgcgcccagttccaccccaaggacgacctcgtcgtgtccgcctccctcgaccagtccgtgcgcgtctgggacatctcgggcctgcgcaagaagcactcggccccgacttccatgtccttcgaagaccaggtcgcgcggtccaacgcccagcagaccgacatgttcggaaacaccgacgccatggtcaagttcgtcctcgagggccacgaccgcggcgtcaactgggtcgccttccatcccaccaacccgcacatcgtctccggcggcgacgaccgtctcgtcaagctgtggcgatacagcgagaccaaggcgtgggaggtagacacgtgtcgtggccatttccagaactccaccggctgtcttttccacccacatcaagacctcatcctgtcctgcggcgaggacaagaccatacgagtgtgggattcgtcaaagcgcacggccgtacagtcattcaagcgcgagaacgacagattctgggtcatcgccgcccatcccgagatcaacctgttcgcagccggccacgataacggtgtcatggtcttcaagctggagcgggagcgcccggcgtctaccgttcaccagaacaacctcttcttcatcaccaaggagaagcatgtccgctcctatgacttccagaagaacgtggagagcccgactctactttcgctgaagcggctgggaagcgcatgggtccctccacggactctatcctataatccggctgagcgctctgtcctggttacgtcacctgcggacggcggctcctacgagctcattaatctccctcgagacgggtcgggtgccattgaagccaccgactccaaacggggaccgggaaactccgctatcttcgttgctcggaatcgcttcgctgttctaaacacgtctacccagacggtagatatcaaagacttatcaaacaatacagcgcgatctttcaaacccccaattggaacgaccgacatatactttggcggcaccggcaatcttctcatcatcactcctacggccgttcacctctatgatatccaacagaagaaaagcatcgcggagcttgccgtgaatggagtcaagtatgtggtttggtcgaacgatggcctccatgccgctcttttgagcaagcataacgtaaccattgtgacgaaggctttggagcaggtcagcacgttgcacgagacgatcaggatcaagagcgccgcttgggacgatgccggtgttcttctttactctacattaaaccacgtcaagtacactttgatgaacggcgataacggtattgttcgcacgcttgaccaaactgtctatcttgtccgggtcaagggaaggaatgtctattgtctcgatcgtgcagcgaagcccaatgtgctgaacatcgaccctaccgagtatcgcttcaagctgtctctggtgaagcgaaactacgaggaaatgcttcacatcattcgcacctctagcctggtgggccagtctatcatttcttatctccagaagaagggctatcccgagattgcgttgcaattcgttcaggacccgagtacccggtttgaactggctatagaatgcggaaatcttgacgtcgcgctcgagatggccaaagacctggaccgacccaagctatggacaaggctaggaactgaggcgttggctcatggtaaccatcaaatcgtggagatggcatatcagaaactcaagcaattcgataagctctccttcctgtatctgtcgactggtgatcactttaagcttgccagaatggctaagattgctgagcaccggggcgacttcactgcacggttccagaatgctcttttcctaggtgaggtagaggacaggatacaaatgttcaaggaagttgatctttatccccttgcttacatgaccgccaaagcacacggcctggaagaagaatgccagtctatcttggaagcgaccggggttactgaggatcagctcacaacaccaaagttcggagaggcattctccactcccaagccagtagttcctacatacaaggctaactggccgacgaaggccacttcacaatcattcttcgaaaaggctttggctggccagttggaggatatgaccctcgaagatgagcctgcggcagccgaggcagccgatctcatggatgaagatgtgcctgcgaagcgcgctggtacattggaagtcgatgatgacgaagatgcagccggctgggatatgggcgacgacattgtgccagaggccgagagtgacttcgtgaacgtcgaaagcacggatgccggaggtgcaggcagcagcgaggctgacatgtgggctcggaactctcccattgcggcggatcacattgcggcaggatcattcgaatcggccatgaatctccttaaccgtcaagtcggcgccgtcaacttcgcgcccctcaaacctcgattcatggaaatctacaccgccactaaaacctacctcccagcatcggccaacttgccgccgcttgtcaactatgtgcgtcgcacattggacgagacagctcccagaaaagtgctgccgatcatccctcgagacctagagcatcttgcgtcgaacgacctacaacaaggttatgacgccatgcggtccaacaggttggatgatgggttggccatcttccgtggcatcctccacgcgatcctggccaacgccgtctctagcgacagtgaagtgggcgaggccaagaagttgatcacttcggccggtgagtacgccgtggccatgagcatcgagctcgctcggaggaccctgggtacgcccgacgtagtcaacaacaatcccgagctcctcaagcggagcttggagctctcggcctacttcaccatccccaagatcgaagtgccccatcgccagttagcacttctgaatgccatgaatctggccttccgcagcaagaacctgagctccgctctcagctttgccaaccgcatcctggcgaacggcggcgctcctagaatactggaaagtgccaagaagatgaagacgcagtgcgagcggaacccgcatgacgctgtggagattgagtatgaccagtttgccgagttcgacatctgcgcggccagccacacgcccatctacagcggcacgtcgtttgaggaatgcgcatttgacgggtccaaatatcactcgaaatacaagggaacggtgtgcgtggtgtgccaggtctgcgaggtgggtaaacatggaagcgggctcaggttatttgcgtag

SEQ ID NO: 22243 - protein, 1210 aa, Muscodor strobelii
  misc_feature: SGI Peptide ID NO. 567549
  misc_feature (81)..(119): Pfam Id: PF00400 Pfam Desc: WD domain, G-beta repeat
  misc_feature (197)..(235): Pfam Id: PF00400 Pfam Desc: WD domain, G-beta repeat
  misc_feature (123)..(161): Pfam Id: PF00400 Pfam Desc: WD domain, G-beta repeat
  misc_feature (39)..(77): Pfam Id: PF00400 Pfam Desc: WD domain, G-beta repeat
  misc_feature (241)..(279): Pfam Id: PF00400 Pfam Desc: WD domain, G-beta repeat
  misc_feature (341)..(787): Pfam Id: PF04053 Pfam Desc: Coatomer WD associated region
  misc_feature (811)..(1210): Pfam Id: PF06957 Pfam Desc: Coatomer (COPI) alpha subunit C-terminus
  misc_feature (897)..(1207): Pfam Id: PF06957 Pfam Desc: Coatomer (COPI) alpha subunit C-terminus
  misc_feature (2)..(1210): NCBI GI: 46127123 Blast Desc: FG07939.1 [Gibberella zeae PH-1]
  misc_feature (2)..(1210): NCBI GI: 256721632 Blast Desc: [Nectria haematococca mpVI 77-13-4]
  misc_feature (2)..(1210): NCBI GI: 116179498 Blast Desc: conserved [Chaetomium globosum CBS 148.51] gi|88184674|gb|EAQ92142.1| conserved [Chaetomium globosum CBS 148.51]
  misc_feature (2)..(1210): NCBI GI: 39942862 Blast Desc: conserved [Magnaporthe grisea 70-15] gi|145009930|gb|EDJ94586.1| conserved [Magnaporthe grisea 70-15]
  misc_feature (2)..(1210): NCBI GI: 85088976 Blast Desc: NCU10066 [Neurospora crassa OR74A] gi|28919142|gb|EAA28645.1| NCU10066 [Neurospora crassa OR74A]
  misc_feature (2)..(1210): NCBI GI: 156042664 Blast Desc: conserved [Sclerotinia sclerotiorum 1980] gi|154695516|gb|EDN95254.1| conserved [Sclerotinia sclerotiorum 1980]
  misc_feature (2)..(1210): NCBI GI: 154304752 Blast Desc: BC1G_08115 [Botryotinia fuckeliana B05.10] gi|150854015|gb|EDN29207.1| BC1G_08115 [Botryotinia fuckeliana B05.10]
  misc_feature (2)..(1210): NCBI GI: 189091944 Blast Desc: [Podospora anserina] gi|27803081|emb|CAD60784.1| protein product [Podospora anserina] gi|188219325|emb|CAP49305.1| protein product [Podospora anserina]
  misc_feature (2)..(1209): NCBI GI: 145252092 Blast Desc: An16g02460 [Aspergillus niger] gi|134083102|emb|CAL00470.1| protein product [Aspergillus niger]
  misc_feature (2)..(1209): NCBI GI: 119492234 Blast Desc: Coatomer subunit alpha, [Neosartorya fischeri NRRL 181] gi|119411716|gb|EAW21659.1| Coatomer subunit alpha, [Neosartorya fischeri NRRL 181]
MQFESKSSRAKGLAFHPKRPWILVSLHSSTIQLWDYRMGTLIDRFEEHDGPVRGIDFHKTQPLFVSGGDDYKIKVWSYQTRRCLFTLNGHLDYVRTVFFHHELPWIISCSDDQTIRIWNWQNRSLICTMTGHNHYVMCAQFHPKDDLVVSASLDQSVRVWDISGLRKKHSAPTSMSFEDQVARSNAQQTDMFGNTDAMVKFVLEGHDRGVNWVAFHPTNPHIVSGGDDRLVKLWRYSETKAWEVDTCRGHFQNSTGCLFHPHQDLILSCGEDKTIRVWDSSKRTAVQSFKRENDRFWVIAAHPEINLFAAGHDNGVMVFKLERERPASTVHQNNLFFITKEKHVRSYDFQKNVESPTLLSLKRLGSAWVPPRTLSYNPAERSVLVTSPADGGSYELINLPRDGSGAIEATDSKRGPGNSAIFVARNRFAVLNTSTQTVDIKDLSNNTARSFKPPIGTTDIYFGGTGNLLIITPTAVHLYDIQQKKSIAELAVNGVKYVVWSNDGLHAALLSKHNVTIVTKALEQVSTLHETIRIKSAAWDDAGVLLYSTLNHVKYTLMNGDNGIVRTLDQTVYLVRVKGRNVYCLDRAAKPNVLNIDPTEYRFKLSLVKRNYEEMLHIIRTSSLVGQSIISYLQKKGYPEIALQFVQDPSTRFELAIECGNLDVALEMAKDLDRPKLWTRLGTEALAHGNHQIVEMAYQKLKQFDKLSFLYLSTGDHFKLARMAKIAEHRGDFTARFQNALFLGEVEDRIQMFKEVDLYPLAYMTAKAHGLEEECQSILEATGVTEDQLTTPKFGEAFSTPKPVVPTYKANWPTKATSQSFFEKALAGQLEDMTLEDEPAAAEAADLMDEDVPAKRAGTLEVDDDEDAAGWDMGDDIVPEAESDFVNVESTDAGGAGSSEADMWARNSPIAADHIAAGSFESAMNLLNRQVGAVNFAPLKPRFMEIYTATKTYLPASANLPPLVNYVRRTLDETAPRKVLPIIPRDLEHLASNDLQQGYDAMRSNRLDDGLAIFRGILHAILANAVSSDSEVGEAKKLITSAGEYAVAMSIELARRTLGTPDVVNNNPELLKRSLELSAYFTIPKIEVPHRQLALLNAMNLAFRSKNLSSALSFANRILANGGAPRILESAKKMKTQCERNPHDAVEIEYDQFAEFDICAASHTPIYSGTSFEECAFDGSKYHSKYKGTVCVVCQVCEVGKHGSGLRLFA

SEQ ID NO: 22244 - DNA, 4332 bp, Muscodor strobelii; identical to SEQ ID NO: 22241
  misc_feature: SGI EST ID NO. CUFF.52352.0
  misc_feature: Variant of the nucleotide sequence at SEQ ID NO 22242

SEQ ID NO: 22245 - DNA, 4473 bp, Muscodor strobelii
  misc_feature: SGI cDNA ID NO. 567550
  misc_feature: Encodes the peptide sequence at SEQ ID NO 22246
atgatacgaatatggtgtctgccatgtggcctggctgccactttgctggcatctctcagcctcgttcccagtcgcgttgctgctgggccctcggtcaatgtcgctatgaaagctgccttcccagctcctccgtatcttgttgagcttcttgagacggctgccggagaaaatgcaacagcatatttccctttgctcgatcgcattgccgacggttctttcgctgcaactactactgatcaagctctttataccaagtttctacaagttcttcaggacgatcgccacattacgagccctcaagccctatccacttttaagctggctctctctttgaggactgctgctccaaggattgaggcccattatcaatactatgatacagctgtgactcccacactgggtaatgcgagagctgattgtgatgagtggatttttctcagccagaaacaatactgctcttcaactctagcccagcctgatggccaattttcgtcagacttactactcaggaatcttccatttgatcggtttttgggtagcggccctgaggccgttctgtatgcagacataactaaaccggagtttggctcgttccacaagacgctcgctaccatggcgcgtaagggtgagatttcctaccggctgagataccgcatttctcaccgcgatgaactcgaggcactgcctatcagcggttacggcgtggaacttcagctgaagcgaaccgactatatcgttatcgatgaccgtgaagctgaagaaactgttaccgagaatgatgagaatgctgcctctcttgaatcagttttggatcaagaagatgacttcaccgacctcaagccactgtctaccaaagaacttgcgaatcttggcctcaaggctggatcgttcattatggaaagtgaatatcccctcgaatcattgatcaggttaacccaagattttcccaaattctcaacttcggtggcgtctcgtaatgcttctgaagacttcgtaaaagagcacaggtggaatcgagccattgccgcccccgccggcattaacgtgctttggatgaacggtgtgcaactaatggaacgccaaatcgaccccttcacccttgtagacagtattcgacgagaaagagctttcataaagggtgtgacgaatctaggactattaccaaaagaggctatttctcttctaggtaaccaggaggtaacgatggccaaagctaccgatgaggctccgcgttttgattggacggaccgccttgaagacggtcgtgtcatcatctggctaaacgacatcgaaaaagacaagcgctacgtcgatttccctccagatctaacatcgctcttaaaacccacatttccaggccagatccctcagatccggaagaatctcttcaacattgtcatccctattgattttagtaaactagaagacatgcgaattgtggcagaacaattgcagggattggtcaaacgtgtactacccttgcactttggtttggtaccattgactcctacaaaggaagccgaggatcaagccaaagtagtttattatttgatacaaaactacggacttgcaagttttatgtcgtatctcgaatccttcggcactgctgatggcatcgcccaagccgatcacagcttgtttgcaaaggcaatcgaggagcgcaaactcaaagaagaagcaacgatgatccctttcgaccaaatcccgacttcagaagcttacatcgaacaactgagcctcgcgaagcaatggactaagaggcttgaggccaacggacaggagccacctgtatttatcaacgggttcgctattcctagggataacaactggctagccgtgttaagtcaaagggtttcggttgacctacaggagactcaaagagcagtttacatggggctgctcgacgacactatgtgggcacctaaccttttcctacaagacgctctacctcgtcggaaccactatctatttcccgacgaggaacatgccctgagggttctcaacgttcacaagatctactcagagaatgctcaacttctcgatcaaatcccaattatcgaggcagatgacggcacagatcgggaaaattgggctctgctcactgttgttgtagatttggacacatcttcgggtcttcaactcctattatccgctctagcatttcgccgaaatcatccaggtgtccgagttgacatcatccataacccagcatctccagagaagggccaacagatcaacgatgtccttgtccgacactcaagtgaactactggagttgacaaacctagagggtttggcagctcttttaaacggtagttctgaaacgcaaaatagtgcctacggtttgcacctggctcagttcagtgcggatacgggcatacctcaaggcgcacaagctttattgcttaacggccgagtcatcgggccaatcaattctcttgatttcttccaagaagatgactttaaacaattgttaggaatagagcagacgacaaggatcctaccagtatatagggctctcacagatttggatttgatagacaaggtctccagcccagttgccgcggcgaagctcacttctatcacagcattgtcgactatctcggatctaccggaggggatttttgaatcggctcaaaccttacgatcaacggtgtacgacacatggaattcatcacatactgcaattgatattggtgattcggaaactgcagacattcatttggttgcccttctaaaccctaccagcgagcaaggtcaaagatgggcaccaattctcaaagttttgtctgagctagatggtgtgtttgtacgcatgttcatcaacccgagagaaaaactggaagaacttccaatcaaacggttttaccggagtgtattacaatcagaaccctcattcgacgcgaatggcggccttcgctcccaaggtgctacattcaagggtctaccaactgaagcactccttaacttaggcatggatatgcccccggcgtggcttgtggcagcaaaggattctgttcatgatttagataacctgaaattgagttcgatgaagtcggatgttgaggctatctacgagttggaacacatcgtaatagaggggcactcacgagaacaaagtggaaagcctcctcgaggtgtacagctacttcttggcaccgaacgtgatccccatttcgctgacacaatcatcatggccaacattggctatttccaattcaaggcaaatcctggctactacaacatcagtctacaagaaggcagaagctcggagatattcgacattgtcagtgttggatcgcgaggctacgatgctgttccaggcgatgaaggtactgaagtcgcgctcatggactttcaggggacgacattgtaccctcgtctacagcgtaaagatgagatggcgaacctcgatgtcctagatgatggtacattggatcttcaaaatgacatcctctcaagaggcttgaaatttgctgaaggtattttgggtggatccaaatctaaatccaaatcgctctcaaaccagatccacgccgagatcaacattttctctgttgcaagcggtcatctctacgagcgtatgcttaagatcatgatcgtctcagtcatgaagaacaccaaacatacagtcaaattctggttcatcgaacagttcctgtcgccgtcatttaaagaatccatcccccacctagctgaggagtacaaattcaggtacgaaatggtgacttacaagtggccacactggcttcgcgcgcagaaagagaagcagcgtgagatttggggctacaaaatcctctttttggacgtcctctttcctctttctctcgataaggtcatcttcgtagacgcggaccagattgttcgcacggatatgatcgacctcatcaaccatgacctgaagggagctccatacggcttcacgcccatgtgcgactcccgcactgagatggagggattccgcttctggaagcaagggtattgggagacgtatcttcgaggacaaccctaccacatctcggcgttgtacgttgttgatctccgtcgtttccggcaaatggccgcaggtgatcgcctccgacagcaatatcaagcactcagcgccgatcctgcatcactttctaacctggatcaagatttacctaaccacatgcaattccaaatccctattcacagtttgccgcaagagtggctgtggtgtgagacatggtgcagcgacgagagtcagaagcaagctcggactatcgacctatgcaataatccgcagaccaaggagcctaaacttgaccgtgcgcgcagacaggtacctgagtggacggtgtatgatgaagaaatcgcggctgtggagaagaagcgcaaaaatctgcatgatgatgatggcacgcaaaaggtcatcgttggagatgaaggcaccaacaccaagactagacgagtggaagagacgccagcccagagcaaaaaggatgagttgtga

SEQ ID NO: 22246 - protein, 1490 aa, Muscodor strobelii
  misc_feature: SGI Peptide ID NO. 567550
  misc_feature (862)..(1067): Pfam Id: PF06427 Pfam Desc: UDP-glucose:Glycoprotein Glucosyltransferase
  misc_feature (899)..(1067): Pfam Id: PF06427 Pfam Desc: UDP-glucose:Glycoprotein Glucosyltransferase
  misc_feature (1)..(1490): NCBI GI: 256721604 Blast Desc: NECHADRAFT_37444 [Nectria haematococca mpVI 77-13-4]
  misc_feature (1)..(1490): NCBI GI: 261358919 Blast Desc: UDP-glucose:glycoprotein glucosyltransferase [Verticillium albo-atrum VaMs.102]
  misc_feature (32)..(1490): NCBI GI: 46127125 Blast Desc: FG07940.1 [Gibberella zeae PH-1]
  misc_feature (1)..(1451): NCBI GI: 85092590 Blast Desc: NCU02349 [Neurospora crassa OR74A] gi|28920900|gb|EAA30235.1| NCU02349 [Neurospora crassa OR74A]
  misc_feature (1)..(1490): NCBI GI: 189091946 Blast Desc: [Podospora anserina] gi|27803082|emb|CAD60785.1| protein product [Podospora anserina] gi|188219326|emb|CAP49306.1| protein product [Podospora anserina]
  misc_feature (7)..(1490): NCBI GI: 156042662 Blast Desc: SS1G_11129 [Sclerotinia sclerotiorum 1980] gi|154695515|gb|EDN95253.1| SS1G_11129 [Sclerotinia sclerotiorum 1980]
  misc_feature (5)..(1490): NCBI GI: 154304750 Blast Desc: conserved [Botryotinia fuckeliana B05.10] gi|150854014|gb|EDN29206.1| conserved [Botryotinia fuckeliana B05.10]
  misc_feature (1)..(1455): NCBI GI: 145616180 Blast Desc: MGG_03510 [Magnaporthe grisea 70-15] gi|145009931|gb|EDJ94587.1| MGG_03510 [Magnaporthe grisea 70-15]
  misc_feature (28)..(1490): NCBI GI: 115386186 Blast Desc: ATEG_06948 [Aspergillus terreus NIH2624] gi|114190632|gb|EAU32332.1| ATEG_06948 [Aspergillus terreus NIH2624]
  misc_feature (28)..(1454): NCBI GI: 189192544 Blast Desc: UDP-glucose:glycoprotein glucosyltransferase precursor [Pyrenophora tritici-repentis Pt-1C-BFP] gi|187974217|gb|EDU41716.1| UDP-glucose:glycoprotein precursor
MIRIWCLPCGLAATLLASLSLVPSRVAAGPSVNVAMKAAFPAPPYLVELLETAAGENATAYFPLLDRIADGSFAATTTDQALYTKFLQVLQDDRHITSPQALSTFKLALSLRTAAPRIEAHYQYYDTAVTPTLGNARADCDEWIFLSQKQYCSSTLAQPDGQFSSDLLLRNLPFDRFLGSGPEAVLYADITKPEFGSFHKTLATMARKGEISYRLRYRISHRDELEALPISGYGVELQLKRTDYIVIDDREAEETVTENDENAASLESVLDQEDDFTDLKPLSTKELANLGLKAGSFIMESEYPLESLIRLTQDFPKFSTSVASRNASEDFVKEHRWNRAIAAPAGINVLWMNGVQLMERQIDPFTLVDSIRRERAFIKGVTNLGLLPKEAISLLGNQEVTMAKATDEAPRFDWTDRLEDGRVIIWLNDIEKDKRYVDFPPDLTSLLKPTFPGQIPQIRKNLFNIVIPIDFSKLEDMRIVAEQLQGLVKRVLPLHFGLVPLTPTKEAEDQAKVVYYLIQNYGLASFMSYLESFGTADGIAQADHSLFAKAIEERKLKEEATMIPFDQIPTSEAYIEQLSLAKQWTKRLEANGQEPPVFINGFAIPRDNNWLAVLSQRVSVDLQETQRAVYMGLLDDTMWAPNLFLQDALPRRNHYLFPDEEHALRVLNVHKIYSENAQLLDQIPIIEADDGTDRENWALLTVVVDLDTSSGLQLLLSALAFRRNHPGVRVDIIHNPASPEKGQQINDVLVRHSSELLELTNLEGLAALLNGSSETQNSAYGLHLAQFSADTGIPQGAQALLLNGRVIGPINSLDFFQEDDFKQLLGIEQTTRILPVYRALTDLDLIDKVSSPVAAAKLTSITALSTISDLPEGIFESAQTLRSTVYDTWNSSHTAIDIGDSETADIHLVALLNPTSEQGQRWAPILKVLSELDGVFVRMFINPREKLEELPIKRFYRSVLQSEPSFDANGGLRSQGATFKGLPTEALLNLGMDMPPAWLVAAKDSVHDLDNLKLSSMKSDVEAIYELEHIVIEGHSREQSGKPPRGVQLLLGTERDPHFADTIIMANIGYFQFKANPGYYNISLQEGRSSEIFDIVSVGSRGYDAVPGDEGTEVALMDFQGTTLYPRLQRKDEMANLDVLDDGTLDLQNDILSRGLKFAEGILGGSKSKSKSLSNQIHAEINIFSVASGHLYERMLKIMIVSVMKNTKHTVKFWFIEQFLSPSFKESIPHLAEEYKFRYEMVTYKWPHWLRAQKEKQREIWGYKILFLDVLFPLSLDKVIFVDADQIVRTDMIDLINHDLKGAPYGFTPMCDSRTEMEGFRFWKQGYWETYLRGQPYHISALYVVDLRRFRQMAAGDRLRQQYQALSADPASLSNLDQDLPNHMQFQIPIHSLPQEWLWCETWCSDESQKQARTIDLCNNPQTKEPKLDRARRQVPEWTVYDEEIAAVEKKRKNLHDDDGTQKVIVGDEGTNTKTRRVEETPAQSKKDEL

SEQ ID NO: 22247 - DNA, 4952 bp, Muscodor strobelii
  misc_feature: SGI EST ID NO. CUFF.52301.0
  misc_feature: Variant of the nucleotide sequence at SEQ ID NO 22245
tcctagctcatcctacctcttcgtaaatcgagttaccttgttcacaactagcagaaatactattcaagaagtctcttacagtggcagactaggcaccgactgcaatttatgatatgtccatttgattactaccctagatggtaaaggtgtctggtgatcttcatcttccatcgcatactctctggccgtctttctctcctcacatgccacgctacatttgatacctcagactaaggcgtagagggagatagtaggtactgtatgttcgcgggtctcgacagtcacctcggagtcaaaagtcatctatcctgcaccaaaaggtagctcagagtgaatgggcttcctccatcaccctataccatcatgatacgaatatggtgtctgccatgtggcctggctgccactttgctggcatctctcagcctcgttcccagtcgcgttgctgctgggccctcggtcaatgtcgctatgaaagctgccttcccagctcctccgtatcttgttgagcttcttgagacggctgccggagaaaatgcaacagcatatttccctttgctcgatcgcattgccgacggttctttcgctgcaactactactgatcaagctctttataccaagtttctacaagttcttcaggacgatcgccacattacgagccctcaagccctatccacttttaagctggctctctctttgaggactgctgctccaaggattgaggcccattatcaatactatgatacagctgtgactcccacactgggtaatgcgagagctgattgtgatgagtggatttttctcagccagaaacaatactgctcttcaactctagcccagcctgatggccaattttcgtcagacttactactcaggaatcttccatttgatcggtttttgggtagcggccctgaggccgttctgtatgcagacataactaaaccggagtttggctcgttccacaagacgctcgctaccatggcgcgtaagggtgagatttcctaccggctgagataccgcatttctcaccgcgatgaactcgaggcactgcctatcagcggttacggcgtggaacttcagctgaagcgaaccgactatatcgttatcgatgaccgtgaagctgaagaaactgttaccgagaatgatgagaatgctgcctctcttgaatcagttttggatcaagaagatgacttcaccgacctcaagccactgtctaccaaagaacttgcgaatcttggcctcaaggctggatcgttcattatggaaagtgaatatcccctcgaatcattgatcaggttaacccaagattttcccaaattctcaacttcggtggcgtctcgtaatgcttctgaagacttcgtaaaagagcacaggtggaatcgagccattgccgcccccgccggcattaacgtgctttggatgaacggtgtgcaactaatggaacgccaaatcgaccccttcacccttgtagacagtattcgacgagaaagagctttcataaagggtgtgacgaatctaggactattaccaaaagaggctatttctcttctaggtaaccaggaggtaacgatggccaaagctaccgatgaggctccgcgttttgattggacggaccgccttgaagacggtcgtgtcatcatctggctaaacgacatcgaaaaagacaagcgctacgtcgatttccctccagatctaacatcgctcttaaaacccacatttccaggccagatccctcagatccggaagaatctcttcaacattgtcatccctattgattttagtaaactagaagacatgcgaattgtggcagaacaattgcagggattggtcaaacgtgtactacccttgcactttggtttggtaccattgactcctacaaaggaagccgaggatcaagccaaagtagtttattatttgatacaaaactacggacttgcaagttttatgtcgtatctcgaatccttcggcactgctgatggcatcgcccaagccgatcacagcttgtttgcaaaggcaatcgaggagcgcaaactcaaagaagaagcaacgatgatccctttcgaccaaatcccgacttcagaagcttacatcgaacaactgagcctcgcgaagcaatggactaagaggcttgaggccaacggacaggagccacctgtatttatcaacgggttcgctattcctagggataacaactggctagccgtgttaagtcaaagggtttcggttgacctacaggagactcaaagagcagtttacatggggctgctcgacgacactatgtgggcacctaaccttttcctacaagacgctctacctcgtcggaaccactatctatttcccgacgaggaacatgccctgagggttctcaacgttcacaagatctactcagagaatgctcaacttctcgatcaaatcccaattatcgaggcagatgacggcacagatcgggaaaattgggctctgctcactgttgttgtagatttggacacatcttcgggtcttcaactcctattatccgctctagcatttcgccgaaatcatccaggtgtccgagttgacatcatccataacccagcatctccagagaagggccaacagatcaacgatgtccttgtccgacactcaagtgaactactggagttgacaaacctagagggtttggcagctcttttaaacggtagttctgaaacgcaaaatagtgcctacggtttgcacctggctcagttcagtgcggatacgggcatacctcaaggcgcacaagctttattgcttaacggccgagtcatcgggccaatcaattctcttgatttcttccaagaagatgactttaaacaattgttaggaatagagcagacgacaaggatcctaccagtatatagggctctcacagatttggatttgatagacaaggtctccagcccagttgccgcggcgaagctcacttctatcacagcattgtcgactatctcggatctaccggaggggatttttgaatcggctcaaaccttacgatcaacggtgtacgacacatggaattcatcacatactgcaattgatattggtgattcggaaactgcagacattcatttggttgcccttctaaaccctaccagcgagcaaggtcaaagatgggcaccaattctcaaagttttgtctgagctagatggtgtgtttgtacgcatgttcatcaacccgagagaaaaactggaagaacttccaatcaaacggttttaccggagtgtattacaatcagaaccctcattcgacgcgaatggcggccttcgctcccaaggtgctacattcaagggtctaccaactgaagcactccttaacttaggcatggatatgcccccggcgtggcttgtggcagcaaaggattctgttcatgatttagataacctgaaattgagttcgatgaagtcggatgttgaggctatctacgagttggaacacatcgtaatagaggggcactcacgagaacaaagtggaaagcctcctcgaggtgtacagctacttcttggcaccgaacgtgatccccatttcgctgacacaatcatcatggccaacattggctatttccaattcaaggcaaatcctggctactacaacatcagtctacaagaaggcagaagctcggagatattcgacattgtcagtgttggatcgcgaggctacgatgctgttccaggcgatgaaggtactgaagtcgcgctcatggactttcaggggacgacattgtaccctcgtctacagcgtaaagatgagatggcgaacctcgatgtcctagatgatggtacattggatcttcaaaatgacatcctctcaagaggcttgaaatttgctgaaggtattttgggtggatccaaatctaaatccaaatcgctctcaaaccagatccacgccgagatcaacattttctctgttgcaagcggtcatctctacgagcgtatgcttaagatcatgatcgtctcagtcatgaagaacaccaaacatacagtcaaattctggttcatcgaacagttcctgtcgccgtcatttaaagaatccatcccccacctagctgaggagtacaaattcaggtacgaaatggtgacttacaagtggccacactggcttcgcgcgcagaaagagaagcagcgtgagatttggggctacaaaatcctctttttggacgtcctctttcctctttctctcgataaggtcatcttcgtagacgcggaccagattgttcgcacggatatgatcgacctcatcaaccatgacctgaagggagctccatacggcttcacgcccatgtgcgactcccgcactgagatggagggattccgcttctggaagcaagggtattgggagacgtatcttcgaggacaaccctaccacatctcggcgttgtacgttgttgatctccgtcgtttccggcaaatggccgcaggtgatcgcctccgacagcaatatcaagcactcagcgccgatcctgcatcactttctaacctggatcaagatttacctaaccacatgcaattccaaatccctattcacagtttgccgcaagagtggctgtggtgtgagacatggtgcagcgacgagagtcagaagcaagctcggactatcgacctatgcaataatccgcagaccaaggagcctaaacttgaccgtgcgcgcagacaggtacctgagtggacggtgtatgatgaagaaatcgcggctgtggagaagaagcgcaaaaatctgcatgatgatgatggcacgcaaaaggtcatcgttggagatgaaggcaccaacaccaagactagacgagtggaagagacgccagcccagagcaaaaaggatgagttgtgaatgtcgaaagtatgggctttacgatgttgaccatgtcactgtacatcatagatgagatactagagaatattacatttcaatgtcatgagattttgttgtatcttcccccgtttctg

SEQ ID NO: 22248 - DNA, 897 bp, Muscodor strobelii
  misc_feature: SGI cDNA ID NO. 567551
  misc_feature: Encodes the peptide sequence at SEQ ID NO 22249
atggtgcaacttagcaatggcgaggaggtctcctatgatttcctcatcgttgcaattggtgctggtgccagcgatactttgccgagtcgggtggatgccgacaatagaattggaggcatggctctgttgcgggacatgcagacgaagatcagagaggcgaaaagccttgttgtcgtgggtggcggtgctgccggtgttgaattggcaacagacgcgaaaggccaatacccggaaaagcatgtggtgttggtacactctagaagtgccgttctccatcgatttggtcctcgcttacaggaaactgcccttgggggtttgaacgagctaggcgtagaggtcgttctgggtgatcgggtgatagacgggtggaatgaagatccacgtgttgtgaaactgaagagtggaagagagatcgaatgcgattgccttgtcaattgcggtggacagagacccaattcagatctccttgcccggctgagcccgacctcgatatcttcaagtgggcatgtacgagtgaagagcaccatgcaaatccaagatgattcgctccccaacatctacgtgtgcggtgacctaacggagacgacgttgacaaatcagaactcacgagcagcagcgagccaagctctgattgctgccgataacgtggtacttgctacagagggaaaagagcccatttaccggtatgagccgcaatggctggaagagagcataaagttaacattgggactggagaagtcggtcatttccattgctcaaggcggtacagagttgctgttccagacgaaggagaaggacagagcgctgatgtctactcaggcttggaagcatatgggtgcaaagccgtttgaagacgatgatggcgcgggcctcgatagatttatgaggaatgtttga

SEQ ID NO: 22249 - protein, 298 aa, Muscodor strobelii
  misc_feature: SGI Peptide ID NO. 567551
  misc_feature (55)..(148): Pfam Id: PF00070 Pfam Desc: Pyridine nucleotide-disulphide oxidoreductase
  misc_feature (55)..(197): Pfam Id: PF07992 Pfam Desc: Pyridine nucleotide-disulphide oxidoreductase
  misc_feature (2)..(197): Pfam Id: PF07992 Pfam Desc: Pyridine nucleotide-disulphide oxidoreductase
  misc_feature (2)..(269): NCBI GI: 116200353 Blast Desc: CHGG_08332 [Chaetomium globosum CBS 148.51] gi|88179611|gb|EAQ87079.1| CHGG_08332 [Chaetomium globosum CBS 148.51]
  misc_feature (6)..(287): NCBI GI: 261360728 Blast Desc: oxidoreductase [Verticillium albo-atrum VaMs.102]
  misc_feature (2)..(287): NCBI GI: 240107752 Blast Desc: apoptosis-inducing factor, [Coccidioides posadasii C735 delta SOWgp]
  misc_feature (2)..(285): NCBI GI: 115387713 Blast Desc: [Aspergillus terreus NIH2624] gi|114195446|gb|EAU37146.1| [Aspergillus terreus NIH2624]
  misc_feature (2)..(285): NCBI GI: 171681208 Blast Desc: protein product [Podospora anserina] gi|170940562|emb|CAP65790.1| protein product [Podospora anserina]
  misc_feature (2)..(256): NCBI GI: 119177153 Blast Desc: CIMG_07557 [Coccidioides immitis RS]
  misc_feature (6)..(244): NCBI GI: 256728883 Blast Desc: NECHADRAFT_40288 [Nectria haematococca mpVI 77-13-4]
  misc_feature (2)..(286): NCBI GI: 242787675 Blast Desc: disulfide oxidoreductase, [Talaromyces stipitatus ATCC 10500] gi|242787680|ref|XP_002481065.1| disulfide oxidoreductase, [Talaromyces stipitatus ATCC 10500] gi|218721211|gb|EED20630.1|
  misc_feature (2)..(286): NCBI GI: 169763496 Blast Desc: [Aspergillus oryzae RIB40] gi|83770676|dbj|BAE60809.1| protein product [Aspergillus oryzae]
  misc_feature (2)..(286): NCBI GI: 238489415 Blast Desc: mercuric reductase, [Aspergillus flavus NRRL3357] gi|220698333|gb|EED54673.1| mercuric reductase, [Aspergillus flavus NRRL3357]
MVQLSNGEEVSYDFLIVAIGAGASDTLPSRVDADNRIGGMALLRDMQTKIREAKSLVVVGGGAAGVELATDAKGQYPEKHVVLVHSRSAVLHRFGPRLQETALGGLNELGVEVVLGDRVIDGWNEDPRVVKLKSGREIECDCLVNCGGQRPNSDLLARLSPTSISSSGHVRVKSTMQIQDDSLPNIYVCGDLTETTLTNQNSRAAASQALIAADNVVLATEGKEPIYRYEPQWLEESIKLTLGLEKSVISIAQGGTELLFQTKEKDRALMSTQAWKHMGAKPFEDDDGAGLDRFMRNV

SEQ ID NO: 22250 - DNA, 2233 bp, Muscodor strobelii
  misc_feature: SGI EST ID NO. CUFF.52308.0
  misc_feature: Variant of the nucleotide sequence at SEQ ID NO 22248
agatgccgcatcaagtcctacagcaattcgaggaccaatctaggcgtggattttagaagtcagccaaatatcagtccaaccgatttttcgggtgttgatgcggtcgtttagaggatatgttatacgattatacctggttaggggtggcgggcctggtccccactagagcagcatctaatcttatcagatccgaacttagtgcatcaccaccccatatttagtgacagggctggagtttcatgttctcatgacaatgtcggaacactcggtcatttcggtcatgtttatctcctatggacgccgtgtgcccgaggccgactcgggtcttggcatgtataatgactattcaacatgtcaacagggtccgctctccttgctggctggcgacctggtcggctgacttttgattttgtttcatcttcaatcaatagcacaacatacttccaacctgagaaccatgttttcaaagactattctgatattcaaggcgttgggaagtataggcagctttctcgggcggctacttgctcgctctgcaagattacgggtcaaacgcacattatatacggtatcctactcgttaaataccgccatcgaaccagggaaatgcaagaacatcgttattcttggcgcctcaaatgcgggatatatggcggtaaaaagcattggcatgtacaaaaagatcccgcgcgggttactgttcgaccatacttctatgacatcgcgctaactttgtttgtagtaagtgatctgaactatcagatatcataaaccaatcctttgttttgaagtcccgggccaagcagcggaacactgtgaaaaataagtaacgcgacacctttctggctaccagacagaatctttattgcctaatacgccttatcgtgtgatcgttgtcgagccacatgatcggtttcacttcacttgggtgctaccacgactttgtgttgtgagcggtcatgagcataaggcgtttatcccgtacggttcgcaactacgaaacgtgaagtcggaactattgaggtggattcgcgcacgtgcagtacaattgacaagagacatggtgcaacttagcaatggcgaggaggtctcctatgatttcctcatcgttgcaattggtgctggtgccagcgatactttgccgagtcgggtggatgccgacaatagaattggaggcatggctctgttgcgggacatgcagacgaagatcagagaggcgaaaagccttgttgtcgtgggtggcggtgctgccggtgttgaattggcaacagacgcgaaaggccaatacccggaaaagcatgtggtgttggtacactctagaagtgccgttctccatcgatttggtcctcgcttacaggaaactgcccttgggggtttgaacgagctaggcgtagaggtcgttctgggtgatcgggtgatagacgggtggaatgaagatccacgtgttgtgaaactgaagagtggaagagagatcgaatgcgattgccttgtaagagagtgacaggctgtcaagatgcacgtgtattgcccatttgctaaccttagagatacaggtcaattgcggtggacagagacccaattcagatctccttgcccggctgagcccgacctcgatatcttcaagtgggcatgtacgagtgaagagcaccatgcaaatccaagatgattcgctccccaacatctacgtgtgcggtgacctaacggagacgacgttgacaaatcagaactcacgagcagcagcgagccaagctctgattgctgccgataacgtggtacttgctacagagggaaaagagcccatttaccggtatgagccgcaatggctggaagagagcataaagttaacattgggactggagaagtcggtcatttccattgctcaaggcggtacagagttgctgttccagacgaaggagaaggacagagcgctgatgtctactcaggcttggaagcatatgggtgcaaagccgtttgaagacgatgatggcgcgggcctcgatagatttatgaggaatgtttgaggcggcaaacctaagttactgtgcttcaagaattgatgttacgcagtgggctatttgttcgggttctttcgcggtcatagtttagcgtgattcatagagggtaagaggcttcattatgataatttttttacagaagagcgcgttgattaaggaagcttttgaaaacacactgaaatatcttcgagttgtatgaatattaagatgactcccaa

SEQ ID NO: 22251 - DNA, 3294 bp, Muscodor strobelii
  misc_feature: SGI cDNA ID NO. 567552
  misc_feature: Encodes the peptide sequence at SEQ ID NO 22252
atgtctatcctggcgcccgaggtctcagccgagctgacggggctcctgcaggctctgcaggacaaggacaacgacacacgcgcccaggccgaagcgcacctccagaccagctggaccgacacccgtcccgagcttctgctcatgggcctggctgaacagacagccggcgcacctcaaccttcactccgttccttcgccgccgtcatattccgccgcattgcgtcaaagagccgcaagaccgagaaaggcgaaaacactgagatcttcatctccttgcctcccgagcaggctcaggtcatccgccagaagcttcttgaaacgctcgccaacgagactgatcgcctagtgcggaacaagatcagcgatgctgtggctgatgttgctcggcagtactctgagaacaatgaacaatggcctgaaattctcggtgtcctcttcaacctcagtacggcgagcgacgccggccagcgcgagactgcttaccgtgtgtttgctactacgccaggtatcatcgagaagcagcacgagaacgcagtgggggatgcattcagcaggggcttcaaggacagctcgatcaacgtgcagttggccgccatggaggcttttgcctctttcttccgaagcctgacgaagaagtctcagcccaagtatttcgccttactgcccgatgtgctgaacattctaccacccatcagggactcacatgattccgatgagcttagcaaggcattgctcgctctcatcgagatggctgagacttgtcccaagatgttcaagcccctcttccacaatctcgtcatgttcagcgtcagtgtgatccaagacaaggagcttagtgatatctgtcgccagaatgccctcgagttaatggccactttcgccgactatgccccttccatgtgccggaagaacccgtcgtacaccaccgacatgatcacacaatgcctcagtctgatgacagatcttggcgaggacgacgacgatgcagctgactggctgtccaacgacgaccttgaccaggaggaaagcgacttgaatcacgtggccggagaacagtgtatggatcggctggcgaacaagcttggcggcgaaaccatattagctccgaccttccattggcttcctagaatgatagattctatggcttggaaagaccgccatgccgcgctcatggccatttccgccatctctgaaggttgccgcgatttgatgatcaaggagctgaaccaagtgctgggccttgtcgtgcctgcattgaaggacgcgcacccgcgagttcgttgggctggttgccaggcccttgggcagatgagcaccgattttgcccccacgatgcagaaggaacactatgacactatcctcaaggccattattcccgttctggactcacccgaggcgcgggtcaaagcacatgctgccgctgccctcgtcaatttctgcgaggaggccgagaagagtatattggaaccatacttggacgatctcctatcccaccttttccaactcctacaaaacgacaagcgctacgtccaggagcaagcactgtccaccattgccaccatcgcggatgcagctgaagctgccttttctaagtactacgataccctcatgcctttactcgttaatgtcctgcgacgtgagaatgagaaggaatacagactgctccgtgccaaggctatggaatgtgccacactcattgcgctcgcggttggtaaggaacgccttggcaacgatacaatgacgcttgttgaactcctcgccaccattcagtcgagcatcaccgacacagatgacccgcaggcacagtatctcatgcactgctggggccgcatgtgccgtgtcatgggagctgattttttgcgtttccttcccaatgtgatgccgccgttggttgagctggctagcgctaaggccgatattcagcttttggacaacgatgatgatattgagcagatccaacaagaagacggatgggagcttgtgccgctcaaggggaagatgatagggattcggacctctactatggacgacaagcacatggctattgagctgctcgtggtgtacgcgcagactctcgagggactgtttgcaccctacacagccgagatcatggagaagattgcccttccaggtctcgccttcttcttccatgaccccgtccgcttcatatcggctaaactcgtaccgcagctgttgagttcatacaagaaggcttacggcccggattcgaatgaacttcgtggcttgtgggctgcgacggtcgataagttgctcgaagttctcaccgccgaaccagccattgacgcactcgcggaaatgtaccaatgcttctacgaatcagtcgaggtgttaggcaagaactgtcttacactggagcacatgggaaagttcatcgatggggtacattcagccatcgaggattacaaggaccgtgttgcgcaacgcgaagaggaccaagctggcaataccgccgaagacgccgaggatgaagccgaagatttgctccttgccatcgaagatgaccaaactctcctttcagacatgaacaaagctttccattcgatcttcaagaaccatggagccatcttcctgacaccctttgagcgccttatgggcacgtatgagagcttcctgaattcacaggaccctacccagcgtcaatggggtctatgcataatggatgatgtcctggaatactgtgggcctgagagtgttcgttacgcccagtccattagcacagcactcctcgcgggctgcagcgacccatctgctgccattcgacaagctgctgcatatggtattggcgtagccgctcatcacggtggagcaccttggtctcagttcttggccagctcattacccagcctattccaagtgacccaagtccccgatgcccgcggcgacgaagcagtatatgctaccgaaaatgcatgcgcagccattgctaagatcttgcacttcaacaagcagagtgtacaggaccctcaggccgtgatcaaccaatgggtcaacactctccccgtatcgaacgacgaggaagcggcgccatacgcctacggctatcttgtcgaactcatccaacaacaaaacccagcggttacgagtcagatagacaaggtgttcgtatacgtggggcgagcactcgaggcggaaatgcttcacggtacgacggctactcgcgtcacgggtgccgttcagactctactgctggcggccaaggtagaccccactccactcttacagcagcatttcacaccagccgcccaggaccttatcaggcgccatttcgcctag

SEQ ID NO: 22252 - protein, 1097 aa, Muscodor strobelii
  misc_feature: SGI Peptide ID NO. 567552
  misc_feature (489)..(525): Pfam Id: PF02985 Pfam Desc: HEAT repeat
  misc_feature (406)..(441): Pfam Id: PF02985 Pfam Desc: HEAT repeat
  misc_feature (447)..(483): Pfam Id: PF02985 Pfam Desc: HEAT repeat
  misc_feature (1)..(1096): NCBI GI: 256721634 Blast Desc: NECHADRAFT_92359 [Nectria haematococca mpVI 77-13-4]
  misc_feature (2)..(1097): NCBI GI: 189091910 Blast Desc: [Podospora anserina] gi|27803065|emb|CAD60768.1| protein product [Podospora anserina] gi|188219308|emb|CAP49288.1| protein product [Podospora anserina]
  misc_feature (1)..(1097): NCBI GI: 85093881 Blast Desc: NCU02357 [Neurospora crassa OR74A] gi|28921232|gb|EAA30542.1| NCU02357 [Neurospora crassa OR74A]
  misc_feature (1)..(1097): NCBI GI: 261358906 Blast Desc: importin subunit beta-3 [Verticillium albo-atrum VaMs.102]
  misc_feature (1)..(1096): NCBI GI: 116179526 Blast Desc: CHGG_00391 [Chaetomium globosum CBS 148.51] gi|88184688|gb|EAQ92156.1| CHGG_00391 [Chaetomium globosum CBS 148.51]
  misc_feature (1)..(1097): NCBI GI: 156039629 Blast Desc: SS1G_11951 [Sclerotinia sclerotiorum 1980] gi|154697688|gb|EDN97426.1| SS1G_11951 [Sclerotinia sclerotiorum 1980]
  misc_feature (1)..(1097): NCBI GI: 154295122 Blast Desc: BC1G_13504 [Botryotinia fuckeliana B05.10] gi|150844187|gb|EDN19380.1| BC1G_13504 [Botryotinia fuckeliana B05.10]
  misc_feature (1)..(1065): NCBI GI: 145616144 Blast Desc: MGG_03537 [Magnaporthe grisea 70-15] gi|145009901|gb|EDJ94557.1| MGG_03537 [Magnaporthe grisea 70-15]
  misc_feature (1)..(1096): NCBI GI: 169769052 Blast Desc: [Aspergillus oryzae RIB40] gi|83766854|dbj|BAE56994.1| protein product [Aspergillus oryzae]
  misc_feature (1)..(1071): NCBI GI: 169618020 Blast Desc: SNOG_12197 [Phaeosphaeria nodorum SN15] gi|160703533|gb|EAT80609.2| SNOG_12197 [Phaeosphaeria nodorum SN15]
MSILAPEVSAELTGLLQALQDKDNDTRAQAEAHLQTSWTDTRPELLLMGLAEQTAGAPQPSLRSFAAVIFRRIASKSRKTEKGENTEIFISLPPEQAQVIRQKLLETLANETDRLVRNKISDAVADVARQYSENNEQWPEILGVLFNLSTASDAGQRETAYRVFATTPGIIEKQHENAVGDAFSRGFKDSSINVQLAAMEAFASFFRSLTKKSQPKYFALLPDVLNILPPIRDSHDSDELSKALLALIEMAETCPKMFKPLFHNLVMFSVSVIQDKELSDICRQNALELMATFADYAPSMCRKNPSYTTDMITQCLSLMTDLGEDDDDAADWLSNDDLDQEESDLNHVAGEQCMDRLANKLGGETILAPTFHWLPRMIDSMAWKDRHAALMAISAISEGCRDLMIKELNQVLGLVVPALKDAHPRVRWAGCQALGQMSTDFAPTMQKEHYDTILKAIIPVLDSPEARVKAHAAAALVNFCEEAEKSILEPYLDDLLSHLFQLLQNDKRYVQEQALSTIATIADAAEAAFSKYYDTLMPLLVNVLRRENEKEYRLLRAKAMECATLIALAVGKERLGNDTMTLVELLATIQSSITDTDDPQAQYLMHCWGRMCRVMGADFLRFLPNVMPPLVELASAKADIQLLDNDDDIEQIQQEDGWELVPLKGKMIGIRTSTMDDKHMAIELLVVYAQTLEGLFAPYTAEIMEKIALPGLAFFFHDPVRFISAKLVPQLLSSYKKAYGPDSNELRGLWAATVDKLLEVLTAEPAIDALAEMYQCFYESVEVLGKNCLTLEHMGKFIDGVHSAIEDYKDRVAQREEDQAGNTAEDAEDEAEDLLLAIEDDQTLLSDMNKAFHSIFKNHGAIFLTPFERLMGTYESFLNSQDPTQRQWGLCIMDDVLEYCGPESVRYAQSISTALLAGCSDPSAAIRQAAAYGIGVAAHHGGAPWSQFLASSLPSLFQVTQVPDARGDEAVYATENACAAIAKILHFNKQSVQDPQAVINQWVNTLPVSNDEEAAPYAYGYLVELIQQQNPAVTSQIDKVFVYVGRALEAEMLHGTTATRVTGAVQTLLLAAKVDPTPLLQQHFTPAAQDLIRRHFA

SEQ ID NO: 22253 - DNA, 4597 bp, Muscodor strobelii
  misc_feature: SGI EST ID NO. CUFF.52560.0
  misc_feature: Variant of the nucleotide sequence at SEQ ID NO 22251
cacagcagcgatagagccatttgacaggcagataagaataatatcctggcccgctcccagcacaacaataaacaacacctcaccagcgcatgcgcagtcgcttctcgtcccatcggagcaagcgaacattctaaatcttttcgcctctcgacacttgttttgtgcttcgtctcggcctctctgccgccctattggaatcgctacattcattgtgcactcgcagttgcattgtgcattgaatatcgtactagcaccgcgtgtcgcataccaaacttcccccctcgtcctctctctcacctctccctctcgatcctctctctccctcccatttttctccctcatttcctatcgctttgctgccccttggccaaggaccagcctcacgttgtcgcattctgaagcaaccagcttgtcgctttcagcgctttgcacagttgcgtctttagccctgcggggcacacacacactcacccttcacctccagtttcgaccagcagcttcctcgaggaccctcctcaggactcgcaccgcccgaaagtgcctgaaggtgtcctttgcctcactatcttccatcgctcaatcacagcacaccgcgaacgacacggcaccagagcaaccacggcagccatgtctatcctggcgcccgaggtctcagccgagctgacggggctcctgcaggctctgcaggacaaggacaacgacacacgcgcccaggccgaagcgcacctccagaccagctggaccgacacccgtcccgagcttctgctcatgggcctggctgaacagacagccggcgcacctcaaccttcactccgttccttcgccgccgtcatattccgccgcattgcgtcaaagagccgcaagaccgagaaaggcgaaaacactgagatcttcatctccttgcctcccgagcaggctcaggtcatccgccagaagcttcttgaaacgctcgccaacgagactgatcgcctagtgcggaacaagatcagcgatgctgtggctgatgttgctcggcagtactctgagaacaatgaacaatggcctgaaattctcggtgtcctcttcaacctcagtacggcgagcgacgccggccagcgcgagactgcttaccgtgtgtttgctactacgccaggtatcatcgagaagcagcacgagaacgcagtgggggatgcattcagcaggggcttcaaggacagctcgatcaacgtgcagttggccgccatggaggcttttgcctctttcttccgaagcctgacgaagaagtctcagcccaagtatttcgccttactgcccgatgtgctgaacattctaccacccatcagggactcacatgattccgatgagcttagcaaggcattgctcgctctcatcgagatggctgagacttgtcccaagatgttcaagcccctcttccacaatctcgtcatgttcagcgtcagtgtgatccaagacaaggagcttagtgatatctgtcgccagaatgccctcgagttaatggccactttcgccgactatgccccttccatgtgccggaagaacccgtcgtacaccaccgacatgatcacacaatgcctcagtctgatgacagatcttggcgaggacgacgacgatgcagctgactggctgtccaacgacgaccttgaccaggaggaaagcgacttgaatcacgtggccggagaacagtgtatggatcggctggcgaacaagcttggcggcgaaaccatattagctccgaccttccattggcttcctagaatgatagattctatggcttggaaagaccgccatgccgcgctcatggccatttccgccatctctgaaggttgccgcgatttgatgatcaaggagctgaaccaagtgctgggccttgtcgtgcctgcattgaaggacgcgcacccgcgagttcgttgggctggttgccaggcccttgggcagatgagcaccgattttgcccccacgatgcagaaggaacactatgacactatcctcaaggccattattcccgttctggactcacccgaggcgcgggtcaaagcacatgctgccgctgccctcgtcaatttctgcgaggaggccgagaagagtatattggaaccatacttggacgatctcctatcccaccttttccaactcctacaaaacgacaagcgctacgtccaggagcaagcactgtccaccattgccaccatcgcggatgcagctgaagctgccttttctaagtactacgataccctcatgcctttactcgttaatgtcctgcgacgtgagaatgagaaggaatacagactgctccgtgccaaggctatggaatgtgccacactcattgcgctcgcggttggtaaggaacgccttggcaacgatacaatgacgcttgttgaactcctcgccaccattcagtcgagcatcaccgacacagatgacccgcaggcacagtatctcatgcactgctggggccgcatgtgccgtgtcatgggagctgattttttgcgtttccttcccaatgtgatgccgccgttggttgagctggctagcgctaaggccgatattcagcttttggacaacgatgatgatattgagcagatccaacaagaagacggatgggagcttgtgccgctcaaggggaagatgatagggattcggacctctactatggacgacaagcacatggctattgagctgctcgtggtgtacgcgcagactctcgagggactgtttgcaccctacacagccgagatcatggagaagattgcccttccaggtctcgccttcttcttccatgaccccgtccgcttcatatcggctaaactcgtaccgcagctgttgagttcatacaagaaggcttacggcccggattcgaatgaacttcgtggcttgtgggctgcgacggtcgataagttgctcgaagttctcaccgccgaaccagccattgacgcactcgcggaaatgtaccaatgcttctacgaatcagtcgaggtgttaggcaagaactgtcttacactggagcacatgggaaagttcatcgatggggtacattcagccatcgaggattacaaggaccgtgttgcgcaacgcgaagaggaccaagctggcaataccgccgaagacgccgaggatgaagccgaagatttgctccttgccatcgaagatgaccaaactctcctttcagacatgaacaaagctttccattcgatcttcaagaaccatggagccatcttcctgacaccctttgagcgccttatgggcacgtatgagagcttcctgaattcacaggaccctacccagcgtcaatggggtctatgcataatggatgatgtcctggaatactgtgggcctgagagtgttcgttacgcccagtccattagcacagcactcctcgcgggctgcagcgacccatctgctgccattcgacaagctgctgcatatggtattggcgtagccgctcatcacggtggagcaccttggtctcagttcttggccagctcattacccagcctattccaagtgacccaagtccccgatgcccgcggcgacgaagcagtatatgctaccgaaaatgcatgcgcagccattgctaagatcttgcacttcaacaagcagagtgtacaggaccctcaggccgtgatcaaccaatgggtcaacactctccccgtatcgaacgacgaggaagcggcgccatacgcctacggctatcttgtcgaactcatccaacagtaagcggattcaccttgtcgactgtgaagacagacctgggcctcgggctctcccattcacagcccatggtagccgtgctaactctcaacagacaaaacccagcggttacgagtcagatagacaaggtgttcgtatacgtggggcgagcactcgaggcggaaatgcttcacggtacgacggctactcgcgtcacgggtgccgttcagactctactgctggcggccaaggtagaccccactccactcttacagcagcatttcacaccagccgcccaggaccttatcaggcgccatttcgcctaggggagcggaaagggattcagagaaaatgaggcccgcgtatgggttcccgtcatgcgctgcatgcaccgaagtgtgctgctgagctgatgcgcggccagccgcctccaagcccaaaatgagacttgagcacgacagagatgtcatggtgggcatattgtagggactgggcatctttcatctcgagttggatggtgtttcgtcgaaagaagaagagggatgaagacggagaatagacgagagactctgttacgtctacagaggatttactcggtgggcagattccgcggaaggcggctgtacctatcacgcagtcgcgggatgtgcttccggtctacggagcacgagtcgcatggatatagatatgaactttgcaaggcttattcgggcatggtgtagggaggtagagacggactgactgaaagacaagtcctactgcaagagctctttcggcgtgggcttggaccaaatgaataaaaactcaaaagtttaagacatacatgtagtctgtctggcataaggtcggtgctaccattcctctaagacataggctggtgtacaatgtaatctttggcaagtaattcaca

SEQ ID NO: 22254 - DNA, 1476 bp, Muscodor strobelii
  misc_feature: SGI cDNA ID NO. 567553
  misc_feature: Encodes the peptide sequence at SEQ ID NO 22255
atggaccagcagtcccgcaaagactcgggcgaccttggcgaatccgccgtctcgccgacggctgtgccaacacctcctcagcggaccccgtcgacctcgagccttcacaaggccggcctggggtcgagccatagccaccgttcgagcttcgccgagaatctcagagccatgcctccctcgccgcgcgcgcagcgacatccctccttcacccaggcggccatccaggacctgctgaaccacccgccggccccgaggaaccacaacccgcgtttctctggacgcgactggagagacatcacgattggcgagctcgtctccaaggacgacgtccgctgggtgaacatggacacgagcgtcgaggatgcctccatgacactcgtcaagaacacggccaacaacgtcgtcctcatccgcgagaacgccacaagcaccaagcccatctccaccttcgactacagcgatctcaacgcctacatattggtcgtcgtcggtctcggccacccgcccgacgagctggtcgccctttacgacgacattgccaagaaggcccaggctcgcacccgcatacccctccgagacgtccagcccgtcttccgcaaagagtcgctcgtcgtcctccagggcgacgaggacctcgcccgcgctattgaggtctttggcagcggcatccatcgcatcctcgtcaccaacttccacggagacgtcgtcggcatcctgagccagctgaccctcgtcgacttcttctggaacgagggcatcaacttcaaagtcatcgacgagctctatcccaagctgatgcacgagctcggcgtcggctctcagcagatcataggagtaaatgctgacagcccgctgaccgatgctctcaaattgatgagcgaggagggtctgaccagtgttgccgtcgttgacagtggcctgaatgtgttgggtaacatatccactgcagacgtcaagctactagtcaacgccgccagtctcccgttactaaacaatacctgcctacacttcatctcagtcatcctaacggagcgtggcaccgaggcagggcaagattctttccctgttttctatgtgaatccatactccacactctctcacaccgttgccaagctcgtggcgactcactctcaccgcatgtgggtagtggaatcagcatcgccgtctgtctccgcacccagtaccccggcactcggtccttcggttctcgttcccagttctacgccagctgcgccaacgagccctgcagccgcccaatatccttccgcatccggctcatctctcccaggttctcacttatccggccgactgacgggcgtcgttaccttgacagacatcctcaatctattcgctagatcgacgggcttgaacccctccgaccctagcgagcaacgcgcgagacgacggaggagctcaagtagttcactacggccctcaattgattcggcgcgtgccagtgtcgatatgcgtcgttag

SEQ ID NO: 22255 - protein, 491 aa, Muscodor strobelii
  misc_feature: SGI Peptide ID NO. 567553
  misc_feature (104)..(249): Pfam Id: PF00571 Pfam Desc: CBS domain pair
  misc_feature (270)..(393): Pfam Id: PF00571 Pfam Desc: CBS domain pair
  misc_feature (270)..(384): Pfam Id: PF00571 Pfam Desc: CBS domain pair
  misc_feature (29)..(491): NCBI GI: 189091912 Blast Desc: [Podospora anserina] gi|74629581|sp|Q874W3.1|SDS23_PODAN RecName: Full=Protein SDS23 gi|27803066|emb|CAD60769.1| protein product [Podospora anserina]
  misc_feature (23)..(491): NCBI GI: 46127129 Blast Desc: FG07942.1 [Gibberella zeae PH-1]
  misc_feature (21)..(490): NCBI GI: 116179524 Blast Desc: CHGG_00390 [Chaetomium globosum CBS 148.51] gi|121792398|sp|Q2HHB4.1|SDS23_CHAGB RecName: Full=Protein SDS23 gi|88184687|gb|EAQ92155.1| CHGG_00390 [Chaetomium globosum CBS
  misc_feature (23)..(491): NCBI GI: 256721606 Blast Desc: [Nectria haematococca mpVI 77-13-4]
  misc_feature (16)..(491): NCBI GI: 39942912 Blast Desc: MGG_03536 [Magnaporthe grisea 70-15] gi|172044421|sp|A4QRM8.1|SDS23_MAGGR RecName: Full=Protein SDS23 gi|145009902|gb|EDJ94558.1| MGG_03536 [Magnaporthe grisea 70-15]
  misc_feature (42)..(485): NCBI GI: 156039627 Blast Desc: SS1G_11950 [Sclerotinia sclerotiorum 1980] gi|171704398|sp|A7F3V4.1|SDS23_SCLS1 RecName: Full=Protein sds23 gi|154697687|gb|EDN97425.1| SS1G_11950 [Sclerotinia sclerotiorum
  misc_feature (21)..(436): NCBI GI: 261358905 Blast Desc: sds23/moc1 [Verticillium albo-atrum VaMs.102]
  misc_feature (23)..(485): NCBI GI: 154295120 Blast Desc: BC1G_13503 [Botryotinia fuckeliana B05.10] gi|171704399|sp|A7FA72.1|SDS23_BOTFB RecName: Full=Protein sds23 gi|150844186|gb|EDN19379.1| BC1G_13503 [Botryotinia fuckeliana
  misc_feature (50)..(463): NCBI GI: 189200749 Blast Desc: CBS domain containing protein [Pyrenophora tritici-repentis Pt-1C-BFP] gi|187983810|gb|EDU49298.1| CBS domain containing protein [Pyrenophora tritici-repentis
  misc_feature (28)..(463): NCBI GI: 121702453 Blast Desc: CBS domain protein [Aspergillus clavatus NRRL 1] gi|171704492|sp|A1CQZ4.1|SDS23_ASPCL RecName: Full=Protein sds23 gi|119397634|gb|EAW08065.1| CBS domain protein [Aspergillus NRRL
MDQQSRKDSGDLGESAVSPTAVPTPPQRTPSTSSLHKAGLGSSHSHRSSFAENLRAMPPSPRAQRHPSFTQAAIQDLLNHPPAPRNHNPRFSGRDWRDITIGELVSKDDVRWVNMDTSVEDASMTLVKNTANNVVLIRENATSTKPISTFDYSDLNAYILVVVGLGHPPDELVALYDDIAKKAQARTRIPLRDVQPVFRKESLVVLQGDEDLARAIEVFGSGIHRILVTNFHGDVVGILSQLTLVDFFWNEGINFKVIDELYPKLMHELGVGSQQIIGVNADSPLTDALKLMSEEGLTSVAVVDSGLNVLGNISTADVKLLVNAASLPLLNNTCLHFISVILTERGTEAGQDSFPVFYVNPYSTLSHTVAKLVATHSHRMWVVESASPSVSAPSTPALGPSVLVPSSTPAAPTSPAAAQYPSASGSSLPGSHLSGRLTGVVTLTDILNLFARSTGLNPSDPSEQRARRRRSSSSSLRPSIDSARASVDMRR

SEQ ID NO: 22256 - DNA, 2364 bp, Muscodor strobelii
  misc_feature: SGI EST ID NO. CUFF.52372.0
  misc_feature: Variant of the nucleotide sequence at SEQ ID NO 22254
cgagctggcagttatgatcagctgggggggtttgtcgtcgtcattgtcatctcggtagcttccggcgccagtaccgttcccacttcgcggcaaccccgccatcactgcaccggcgcctggcatctctaagaggcagtgaagctacccgagctactgacctgcgagctctagtttacatcattcattgcgacctctcaccagtacttgggcacgcggaatccatgagaccaaatcagcattgttcaatccatcacaccttgtagtttcgaaaaccccaatcattgaatttgtcgcttgcgaaaggccaccagctatctcgccatccatcgtgggtcctctccgatgccccgcggcgacacggacggcgagaataaccctcttgacaataacactcagggcgagatagtgcgacccccttctattaatatctagtgatcttaagtttctccgcccagggttattttccgtagttgcgcccagtgagcagcgagcagcaagcagtgagcagcggccacgatggaccagcagtcccgcaaagactcgggcgaccttggcgaatccgccgtctcgccgacggctgtgccaacacctcctcagcggaccccgtcgacctcgagccttcacaaggccggcctggggtcgagccatagccaccgttcgagcttcgccgagaatctcagagccatgcctccctcgccgcgcgcgcagcgacatccctccttcacccaggcggccatccaggacctgctgaaccacccgccggccccgaggaaccacaacccgcgtttctctggacgcgactggagagacatcacgattggcgagctcgtctccaaggacgacgtccgctgggtgaacatggacacgagcgtcgaggatgcctccatgacactcgtcaagaacacggccaacaacgtcgtcctcatccgcgagaacgccacaagcaccaagcccatctccaccttcgactacagcgatctcaacgcctacatattggtcgtcgtcggtctcggccacccgcccgacgagctggtcgccctttacgacgacattgccaagaaggcccaggctcgcacccgcatacccctccgagacgtccagcccgtcttccgcaaagagtcgctcgtcgtcctccagggcgacgaggacctcgcccgcgctattgaggtctttggcagcggcatccatcgcatcctcgtcaccaacttccacggagacgtcgtcggcatcctgagccagctgaccctcgtcgacttcttctggaacgagggcatcaacttcaaagtcatcgacgagctctatcccaagctgatgcacgagctcggcgtcggctctcagcagatcataggagtaaatgctgacagcccgctgaccgatgctctcaaattgatgagcgaggagggtctgaccagtgttgccgtcgttgacagtggcctgaatgtgttgggtaacatatccactgcagacgtcaagctactagtcaacgccgccagtctcccgttactaaacaatacctgcctacacttcatctcagtcatcctaacggagcgtggcaccgaggcagggcaagattctttccctgttttctatgtgaatccatactccacactctctcacaccgttgccaagctcgtggcgactcactctcaccgcatgtgggtagtggaatcagcatcgccgtctgtctccgcacccagtaccccggcactcggtccttcggttctcgttcccagttctacgccagctgcgccaacgagccctgcagccgcccaatatccttccgcatccggctcatctctcccaggttctcacttatccggccgactgacgggcgtcgttaccttgacagacatcctcaatctattcgctagatcgacgggcttgaacccctccgaccctagcgagcaacgcgcgagacgacggaggagctcaagtagttcactacggccctcaattgattcggcgcgtgccagtgtcgatatgcgtcgttagagtcgagagtgaaatgtctcgtgcttacgattagtcttcaaaacttgccttgaggatggatggatgggtttgtattttcatgatgctctgtggcaggggatacgcaggaaggtcaagcaacggtaaggggattgtgctttccacgccacgttacctcaaacaagggatctaatcagtacccggtgacatgttcccggcgttgatggagttggttctgacgcttatgggctggtgctagatatgtttactttattctgcagagccagatggactccaaataaagacctctttgggaatcattccacatgtgctcagggacctaattctttgctaatactattttgtcacaaaatggcccacctatttggggta

SEQ ID NO: 22257 - DNA, 930 bp, Muscodor strobelii
  misc_feature: SGI cDNA ID NO. 567554
  misc_feature: Encodes the peptide sequence at SEQ ID NO 22258
atggatgaccctgatcaagttgaagagacggaacgattcgagccactcctcaccacaccaaatcctaatggacttaaatctgaccgatattggcctacctggaactggcgtagagttgccgatatgcagcaagaggagaatcattcgtgcaaagtggaccaaaacccagaggaatcaaacccccaacctcaggacaggaaagagctacaagtcatctatggatcatctttgaccgccgatggctcgcagcaggaagatcatatcgatactgatgaagcaaaaaccaaaggatgcctttctatcagtggcaatcggcagtcatcggtcgctcatatgcacaaaagctctgaggacagtcatagttcatgtgacgagaacgggaaacgtgaacgtcaacttttgacttcaaccaccaccatgcagcaagatctgggccaggcagacataacgcctgtgccaaccgtcaccgacacacgcggaagggctacctacaggcggcttcgatctacgcgtagaaaggtcatttggagatacctcaggtatcgtcatcagcgacagtgggatgtctgctctcctggcaagatcggtgcgccctcaaatcgtctaacgagtatgtatattttcaatgttaatcctcctataggtcgggcccgtcgtagatttcgtgatttgcgagctgagctcgagaaccagcttacagcgaagactcccttccaccgcctcgtgaagcagattgcgtatggtattgggtatagactcgaagaagatgcggtcgatgcgatccgcttggacgctgagaccatgatgacgaagtatcttgaagctggaatcttcatgatgcatcataacaatcgaactactcttaaagttaaagatctgcaccgggttcttcagatcatgcgaatgatgggaggttttcgattgtggtaa

SEQ ID NO: 22258 - protein, 309 aa, Muscodor strobelii
  misc_feature: SGI Peptide ID NO. 567554
  misc_feature (228)..(300): Pfam Id: PF00125 Pfam Desc: Core histone H2A/H2B/H3/H4
  misc_feature (213)..(293): NCBI GI: 18766182 Blast Desc: AF435459_1 centromeric histone Cid [Drosophila lutescens]
  misc_feature (213)..(293): NCBI GI: 18766188 Blast Desc: AF435462_1 centromeric histone Cid [Drosophila bipectinata]
  misc_feature (212)..(294): NCBI GI: 221486430 Blast Desc: histone H3 variant, [Toxoplasma gondii GT1] gi|221508206|gb|EEE33793.1| histone H3 variant, [Toxoplasma gondii VEG]
  misc_feature (212)..(294): NCBI GI: 237833833 Blast Desc: histone H3 variant, [Toxoplasma gondii ME49] gi|211963878|gb|EEA99073.1| histone H3 variant, [Toxoplasma gondii ME49]
MDDPDQVEETERFEPLLTTPNPNGLKSDRYWPTWNWRRVADMQQEENHSCKVDQNPEESNPQPQDRKELQVIYGSSLTADGSQQEDHIDTDEAKTKGCLSISGNRQSSVAHMHKSSEDSHSSCDENGKRERQLLTSTTTMQQDLGQADITPVPTVTDTRGRATYRRLRSTRRKVIWRYLRYRHQRQWDVCSPGKIGAPSNRLTSMYIFNVNPPIGRARRRFRDLRAELENQLTAKTPFHRLVKQIAYGIGYRLEEDAVDAIRLDAETMMTKYLEAGIFMMHHNNRTTLKVKDLHRVLQIMRMMGGFRLW

SEQ ID NO: 22259 - DNA, 1293 bp, Muscodor strobelii
  misc_feature: SGI cDNA ID NO. 567555
  misc_feature: Encodes the peptide sequence at SEQ ID NO 22260
atgaggctctttgccatctcgttcaccctactctcccttcttcatttgtcggtgggacagccacagcatcgtcacggtcttcgtcacagagcccaccgggcctttccgaagagagacaaaatcaccgtgtccaatggcgcctaccccattcgtactgagctgcccgaggtagtagtctatgttgatcaatacggcaagcccatcagaacggcgaccgagactgtcgtctacatacctagttcgacccccaagccggcctcttccagcaaggcgcctcctccgcctcccgctgtttctactctgccaagttctgcacctcctgcagttcaacctgccccagtaccgtcatcatctgccccatcagtggccgcagagtctgccccggcatcaagccgaacgcctcaaccgagccccgtcgctgcagaatcttccacgagcaatgcgttagtaccggcgacgtcttccactgcgtaccccgtgtcttcggcaggcaatctccacggcgtcacgtactctccgtataaaggggacggtaactgcaagacagcagatgaagttgataaggacttctctctcttcgctaaggactacggtgtcatccgcttgtatggagttgactgcaaccaagtggccaacgtctaccaagccgcgaagaaatatggtaacaaaatcatgctgggtatcttcgacatcaccgcggtagattcggctgtggccataatggcggctggtgttgaccatgattggagcatagtcgataccgtgtctgtgggcaatgagttggtcaacaacggtgctgccactccgggccagtccgtagcagcacttactgaagcacgttcggcgctgagatctgcgggttatcaaggtcccgttgtcattgtggatacgttcgttgctgtgctcgcgcaccccgagttgtgcgatgagtcagactactgtgccgtcaacgtccatcctttcttcgatcccaatacgggagccccccaagccggatctttcgtgagcaatacggtgaagagcattagcggcaagcttgccgaccctagcaagcgcattgtagttaccgagacgggctggccctggcaaggcaaagccaacggcaatgccgtacccggcttggatctccaagcatccgccatctcgtccatcaagggcgtgttctcctctaatgcggccgatgtcttcctctttaccgctttcaacgacttgtggaaaaaggccgagcccggcactttcatggccgagcaattctggggaatgggcggagtgtattcgccttgtgacgaataa

SEQ ID NO: 22260 - protein, 430 aa, Muscodor strobelii
  misc_feature: SGI Peptide ID NO. 567555
  misc_feature (167)..(428): Pfam Id: PF00332 Pfam Desc: Glycosyl hydrolases family 17
  misc_feature (165)..(423): NCBI GI: 46127133 Blast Desc: FG07944.1 [Gibberella zeae PH-1]
  misc_feature (1)..(421): NCBI GI: 226278459 Blast Desc: mannoprotein MP65 [Paracoccidioides brasiliensis Pb01]
  misc_feature (1)..(421): NCBI GI: 238840761 Blast Desc: conserved [Microsporum canis CBS 113480]
  misc_feature (1)..(421): NCBI GI: 226293423 Blast Desc: soluble cell wall protein [Paracoccidioides brasiliensis Pb18]
  misc_feature (159)..(429): NCBI GI: 256721635 Blast Desc: NECHADRAFT_123314 [Nectria haematococca mpVI 77-13-4]
  misc_feature (1)..(421): NCBI GI: 225684032 Blast Desc: soluble cell wall protein [Paracoccidioides brasiliensis Pb03]
  misc_feature (168)..(421): NCBI GI: 239608073 Blast Desc: cell wall glucanase [Ajellomyces dermatitidis ER-3]
  misc_feature (1)..(421): NCBI GI: 240280620 Blast Desc: conserved [Ajellomyces capsulatus H143]
  misc_feature (1)..(421): NCBI GI: 225560836 Blast Desc: conserved [Ajellomyces capsulatus G186AR]
  misc_feature (1)..(424): NCBI GI: 212534682 Blast Desc: cell wall glucanase (Scw4), [Penicillium marneffei ATCC 18224] gi|210069896|gb|EEA23986.1| cell wall glucanase (Scw4), [Penicillium marneffei ATCC 18224]
  misc_feature (154)..(406): SWISSPROT Homolog: EC 3.2.1.58 Glucan 1,3-beta-glucosidase
MRLFAISFTLLSLLHLSVGQPQHRHGLRHRAHRAFPKRDKITVSNGAYPIRTELPEVVVYVDQYGKPIRTATETVVYIPSSTPKPASSSKAPPPPPAVSTLPSSAPPAVQPAPVPSSSAPSVAAESAPASSRTPQPSPVAAESSTSNALVPATSSTAYPVSSAGNLHGVTYSPYKGDGNCKTADEVDKDFSLFAKDYGVIRLYGVDCNQVANVYQAAKKYGNKIMLGIFDITAVDSAVAIMAAGVDHDWSIVDTVSVGNELVNNGAATPGQSVAALTEARSALRSAGYQGPVVIVDTFVAVLAHPELCDESDYCAVNVHPFFDPNTGAPQAGSFVSNTVKSISGKLADPSKRIVVTETGWPWQGKANGNAVPGLDLQASAISSIKGVFSSNAADVFLFTAFNDLWKKAEPGTFMAEQFWGMGGVYSPCDE

SEQ ID NO: 22261 - DNA, 1984 bp, Muscodor strobelii
  misc_feature: SGI EST ID NO. CUFF.52321.0
  misc_feature: Variant of the nucleotide sequence at SEQ ID NO 22259
atctgcctctccatcacttgtgagtcgcagcccagagatgctgcgcctgccatggcgtccttgtgcattcttgcttcttagcactccttattgatgagacatctcagcagccccagtatctcgtgagctgattcctattgatacgcagtaaacattcatttttccccaaaactttgacactgcctctgctgcggtgggctcacacacgtgacaacgcacggtaattctacaattttcagcatcgtgaagtttgcgcaacgaaattgcagcaggtgacaacaagaattcaattcgcttgacagtcgccgctctgtcaacctagtcactcgttatttgtttacggccgttcccgcgtcgacgtcgtcgtcttacctgcaaaacataagtctcaagaccgtacaactacaaagtcgttttcgactcttctgcaaccatgaggctctttgccatctcgttcaccctactctcccttcttcatttgtcggtgggacagccacagcatcgtcacggtcttcgtcacagagcccaccgggcctttccgaagagagacaaaatcaccgtgtccaatggcgcctaccccattcgtactgagctgcccgaggtagtagtctatgttgatcaatacggcaagcccatcagaacggcgaccgagactgtcgtctacatacctagttcgacccccaagccggcctcttccagcaaggcgcctcctccgcctcccgctgtttctactctgccaagttctgcacctcctgcagttcaacctgccccagtaccgtcatcatctgccccatcagtggccgcagagtctgccccggcatcaagccgaacgcctcaaccgagccccgtcgctgcagaatcttccacgagcaatgcgttagtaccggcgacgtcttccactgcgtaccccgtgtcttcggcaggcaatctccacggcgtcacgtactctccgtataaaggggacggtaactgcaagacagcagatgaagttgataaggacttctctctcttcgctaaggactacggtgtcatccgcttgtatggagttgactgcaaccaagtggccaacgtctaccaagccgcgaagaaatatggtaacaaaatcatgctgggtatcttcgacatcaccgcggtagattcggctgtggccataatggcggctggtgttgaccatgattggagcatagtcgataccgtgtctgtgggcaatgagttggtcaacaacggtgctgccactccgggccagtccgtagcagcacttactgaagcacgttcggcgctgagatctgcgggttatcaaggtcccgttgtcattgtggatacgttcgttgctgtgctcgcgcaccccgagttgtgcgatgagtcagactactgtgccgtcaacgtccatcctttcttcgatcccaatacgggagccccccaagccggatctttcgtgagcaatacggtgaagagcattagcggcaagcttgccgaccctagcaagcgcattgtagttaccgagacgggctggccctggcaaggcaaagccaacggcaatgccgtacccggcttggatctccaagcatccgccatctcgtccatcaagggcgtgttctcctctaatgcggccgatgtcttcctctttaccgctttcaacgacttgtggaaaaaggccgagcccggcactttcatggccgagcaattctggggaatgggcggagtgtattcgccttgtgacgaataaggggaggggacgatataggtgacatagaggaggccatgttgtgtgtggtctcggctcaaatcttacgcgaatgcggatgacataggaatacgagtgacaaaattggctgatgacgggaaatgaccaagtttggctggagatcttcttcaccgtgtacgactttgctagcagcattacttttctttcatgttataaatgaatgcttttgatcgtttaccttgttatgagtagtcgaccgttttcaatacaacgttgcag

SEQ ID NO: 22262 - DNA, 5877 bp, Muscodor strobelii
  misc_feature: SGI cDNA ID NO. 567556
  misc_feature: Reduced expression when VOC is produced
  misc_feature: Encodes the peptide sequence at SEQ ID NO 22263
atgtcgggctatccacaaggtggtggtcatcacgactaccacgacggctacggccagaataccgactcatattatcaagacgatcacaacggccaatactacgatcatcacgaccagcagggtcaccatgaccagcagcacggctatgatgcccatggccagcacggcgatggctattacgacgaatctggctattacaatgcagacgccaataacccctaccaccaggacggcggctattacgatggccacgatcaaaacgagtattacgacgacggccacggcggctactacgacaactatgccaacaatggccaacagggccaggctggctacaatggccagggccgacggggtgattcggaagaagagtcggagacgttcagtgacttcaccatgagatccgacatggtccgtgccaccgacatggactactatggacgtggagatgagcgctacaacagctatgatggccaggccagaggctaccggccaccctcatcccagatttcatacggaggcaatcgctcttccggagcctcgaccccgaactatggcatggactacggtggtgccctccccaacggccaacgctctcgggagccctaccctgcctggacctcggatgcccaaattcccctgtccaaagaagaagtcgaggatatttttgttgacctgtcggccaaattcgggtttcagcgcgacagcatgaggaatatgtatgatcatttcatgacattactggattctcgcgcgtcccgcatgactcccaaccaggcactcctatctttgcacgccgactacatcggtggtgacaatgccaactaccgcaagtggtacttcgcggcccatcttgacctggacgacgccgtgggatttgccaacatgaatagcaataagaagggtcgtaaggccaacaagaaggcgaagaagaacaagaagggcgaccagacagaagagcaggtcttggaggacatggaaggcgacgacagtctcgaggcagccgagtatcggtggaagactcgcatgaaccgcatgtctcaacacgaccgagtccgtcaaattgcgctttatctcatgtgttggggagaagcgaatcaagtccgcttcatgcctgagtgtctttgcttcatcttcaagtgcgcagatgattatctcaattctcctgcttgccaaaatatggttgaaccagtcgaggaggggactttcctgaacaatgtcatcactcccctttaccagtattgccgcgaccaaggatacgagatctctaatggagtctatgtccgacgagagcgtgatcataatcagatcattggttacgacgactgtaatcagcttttctggtatcccgagggtattgagcgcatcgtcatggaggacaagagcaagcttgtcgacgtcccacctcaggagcgttacgccaagctcaaagacgtcaattggaaaaagtgttttttcaagacgtacagggagacgcgttcctggttccatcttgtcaccaactttaatcgtatctgggtcatccatctcagtgtattctggttctatacctcggccaatgcaccgactctcatcgtcggctcttcgtacgagcaacaagtcaatcagcagcctaaccagtccaaattctattctatcatcgcgctgggtggcggtattgcgacgctaatccaaatcattgccacctgcgccgagtgggcgttcgtacctcgtcgttgggcgggtgctcaacatctgaccaaacgccttcttttcctccttgttgtcttcgctcttaacgttggtcctagcgtctacatcctcggcattgagggtgcggataaagggacgcctggtcatatcctcgctattgtacagctcatcattgccgtcctcagtatggtgtatttctccatcatgccattgggtgcactgtttggaagctacctcacgaggaactcgcgtcgctacgtcgccagccagacgttcactgcaagctggccgcaactcaagggcaatgaccgagcattatcgtacttcctatgggttgtcgtcggtggagccaaattcggtgaatcctacaaataccttacactgtctgctcgtgatgctattcgctacgttgatgaactgaacgtggattcgtgtcttggcgacgctcagctcatgggcaatattctctgcaagcaccaaccggaagtcttgcttgttctgttgattatcacggatctcatattcttcatgttggacactttcctatggtacgttcttgtcaatgcggtcttctcgattgcgagatcattcttcctaggatcttccatctggacgccttggaggaatatcttttctcgacttcccaagcgtgtttactccaaggtccttgcaactaccgacatggagatcaaatataagccaaaggttctgatctcacagatttggaacgccattgttatctctatgtatcgagagcatctcctggccatcgaccatgttcagaaactcctttatcaccaggtaccctcggaacaagaagggaaaagaacactccgagcgcctactttcttcgtctcgcaagaagatcactcctttaagacggaattcttcccatcccagagcgaggctgaacgccgcatctctttcttcgcgcaatcgctttcaatgccgatcccagaaccgctcccggttgacaatatgcccactttcagcgtattgattccacactacagtgaaaagattttgctttctttgcgagagatcatccgtgaagatgagccgtattcgcgtgtcactatgctcgaatatctcaagcagctgcatccccatgaatgggactgttttgtcaaggacaccaaaattctcgcagacgaaacctcgcaatttaatggagaatacgagaagaacgagaaggatgatgccaagagcaagattgatgatctgccgttctactgcattgggttcaaatcttcggcgcccgagtacactcttcgaactcgtatctgggcatcccttcggtcacagacgctctatcgtaccatttctggtttcatgaactacagccgtgctatcaagctgctctaccgtgttgagaaccctgaggttgttcaaatgttcggtggtaactctgataagttggaacgcgaactggaaagaatggctcgtcgcaagttcaagctcattgtttcaatgcaaagatatgccaaattcaagaaggaggaaatggaaaatgccgaattcctccttcgcgcctaccccgacctgcaaattgcgtacttggacgaagaacctccagttgctgaaggtgaggagccgcgcatttactccgctctgattgatggccactctgaaatcatggagaatggaatgagacgaccgaaattccgaattcagctatctggcaaccccgtgcttggtgatggcaaatctgacaaccaaaatcattccattatcttttaccgcggtgaatatatccagctcatcgacgccaatcaagacaactacctggaagagtgcttgaagatccgatctgtattggcagaattcgaagagatgaagactgataatgtctccccatatacccctggtgtcaagaatgaggtgactgctcctgtggctattttgggcgcccgcgagtacatcttttccgaaaacatcggtatccttggtgatgtggctgctggtaaagaacagacattcggtaccttgttcgcacgaacactgtcccagatcggtggtaaacttcattatggtcacccggatttcctccatggtatcttcatgaccacgcggggaggtgtctccaaagctcaaaagggactgcacctgaacgaagatatctacgccggaatgaatgctatgttacgcggtggccgaatcaagcactgtgagtactaccagtgtggcaagggtcgtgatcttgggtttggctccattttgaacttcaccaccaagatcggtactggtatgggtgagcaattgctttcgcgcgagtactactacctcggtactcaacttcctctcgatcgcttcctctcattctactatgcccacgccggatttcacgtgcagaacatccttatcatcttgtcggttcagatattcatgctggttggtatcaacatcggcgtggtccggaaccaaacagtcagatgcgattacaatgttaacgtgcctatcaccgatccactattcccgactggttgcaacaacacggatgccctcatggactggatgttccgttgcgttctgtccatcttcgtcgtctttttcctggcattcgtccctttgattgtgcaagaattgacggaacgtggcttccaacgcgccgcgactcgctttaccaaacagttcttctctgggtcgttcctgttcgaggttttcgtcacccaaatttacgcgcagtctgttactcaggatctctccttcggtggtgcccgctacatcggaactggacgtggtttcgccacagcacgtatccccttcggtgtcctctattctcgctttgcaggtccttgtttgtacatgggttctcggctgctattgtcattgctattcgcgtccattacagtgtggcaagctccgcttctgtatttctggctttcgctcattgccttgattgcctgcccattcttgtacaatccccatcagttcgcatggaatgatttctttattgactaccgagatttccttcgctggctatctcgcggtaactctcgatcccattcctcgtcgtggatcgccttttgccgactctctcgcacgaggatcacgggttacaagcgaaaggctcttggcgacccttcagctaagctttctggtgatgttccacgtgcgtccttcttcaatgtcttcttcggcgaaatcgtctcaccgctgttgctcgtcgcatcgaccctcattccatatctgttcatcaacgcccagactggagtgaacgatacggttaccaaaggagacaatcgcgttcaaaatctctcaacggccaaacctacttcatcgctggtccgcgtcgccattgttgcgttcggtcccatcgttatcaacgctggtatcctagcagttttctttgctttggcttgctgcgctggtccgctcttgggcgtgtgctgcaagcggaccggagctgtactcgcggccattgctcacgctcttgccgtcattgtactgatagtcttctttgaagtcatgttcttcctagagggcttcaacttcactaagacgctctccggcatgattgctgttgttgcaatccagcgcttcataatcaaattaattgtcgccacgactctcactcgtgaactcaagacggatcaggctaacattgcgttctggacgggcaagtggtactctatgggttggcactccgtttcccaaccagctcgcgaattcctgtgcaagattacggagctgacaatgttcgccgccgacttcatcctcggccacttcttgttgtttttcatgcttcccatcatcatcatccccaagattgacacgctgcattccatcatgcttttctggctacgtcctagtcggcaaatccgcccccctatttattccatgaagcaatccaaacttcgcaggcgtcgggtcatccgctacgctgtgctatacttcactctcctggtcgtcttcgtagctctcattgtcgggcctgctgtcgctagcgacctcattctcagcgatgatacgatcaagagtctgaacagcaacattgaatcgaatctcgcaggcttcattcttgtccagcctcgcaacgacaagtacaaagacaacactcgtggtcgtaatcagacgggcactggtatggatggctacagtggacccggtaccgcctcgaggactacggctgcaggcgcgaagaacactgactcttcgaatgcgaagatgtttatgttcctctag

SEQ ID NO: 22263 - protein, 1958 aa, Muscodor strobelii
  misc_feature: SGI Peptide ID NO. 567556
  misc_feature (859)..(1692): Pfam Id: PF02364 Pfam Desc: 1,3-beta-glucan synthase component
  misc_feature (1)..(1943): NCBI GI: 156039769 Blast Desc: SS1G_12021 [Sclerotinia sclerotiorum 1980] gi|154697758|gb|EDN97496.1| SS1G_12021 [Sclerotinia sclerotiorum 1980]
  misc_feature (1)..(1955): NCBI GI: 84620620 Blast Desc: beta-(1, 3)-D-glucan synthase [Nectria haematococca mpVI] gi|256721637|gb|EEU35034.1| glycosyltransferase family 48 [Nectria haematococca mpVI 77-13-4]
  misc_feature (47)..(1955): NCBI GI: 171679419 Blast Desc: protein product [Podospora anserina] gi|170939335|emb|CAP64563.1| protein product [Podospora anserina]
  misc_feature (1)..(1954): NCBI GI: 85089503 Blast Desc: 1,3-beta-glucan synthase component GLS1 [Neurospora crassa OR74A] gi|28919277|gb|EAA28744.1| 1,3-beta-glucan synthase component GLS1 [Neurospora crassa OR74A]
  misc_feature (1)..(1958): NCBI GI: 95007737 Blast Desc: beta-1,3-glucan synthase catalytic subunit [Cordyceps militaris]
  misc_feature (1)..(1883): NCBI GI: 119352415 Blast Desc: glucan synthase [Exophiala dermatitidis]
  misc_feature (1)..(1935): NCBI GI: 145610849 Blast Desc: MGG_00865 [Magnaporthe grisea 70-15] gi|145018191|gb|EDK02470.1| MGG_00865 [Magnaporthe grisea 70-15]
  misc_feature (1)..(1883): NCBI GI: 189200617 Blast Desc: 1,3-beta-glucan synthase component GLS2 [Pyrenophora tritici-repentis Pt-1C-BFP] gi|187983744|gb|EDU49232.1| 1,3-beta-glucan synthase component GLS2 [Pyrenophora Pt-1C-BFP]
  misc_feature (10)..(1940): NCBI GI: 44928742 Blast Desc: AF159533_1 glucan synthase [Coccidioides posadasii] gi|240105173|gb|EER23366.1| 1,3-beta-glucan synthase [Coccidioides posadasii C735 delta SOWgp]
  misc_feature (1)..(1940): NCBI GI: 119194757 Blast Desc: 1,3-beta-glucan synthase component [Coccidioides immitis RS]
  misc_feature (65)..(1940): SWISSPROT Homolog: EC 2.4.1.34 1,3-beta-glucan synthase
  misc_feature: Useful for introducing or modulating the production of volatile compounds
MSGYPQGGGHHDYHDGYGQNTDSYYQDDHNGQYYDHHDQQGHHDQQHGYDAHGQHGDGYYDESGYYNADANNPYHQDGGYYDGHDQNEYYDDGHGGYYDNYANNGQQGQAGYNGQGRRGDSEEESETFSDFTMRSDMVRATDMDYYGRGDERYNSYDGQARGYRPPSSQISYGGNRSSGASTPNYGMDYGGALPNGQRSREPYPAWTSDAQIPLSKEEVEDIFVDLSAKFGFQRDSMRNMYDHFMTLLDSRASRMTPNQALLSLHADYIGGDNANYRKWYFAAHLDLDDAVGFANMNSNKKGRKANKKAKKNKKGDQTEEQVLEDMEGDDSLEAAEYRWKTRMNRMSQHDRVRQIALYLMCWGEANQVRFMPECLCFIFKCADDYLNSPACQNMVEPVEEGTFLNNVITPLYQYCRDQGYEISNGVYVRRERDHNQIIGYDDCNQLFWYPEGIERIVMEDKSKLVDVPPQERYAKLKDVNWKKCFFKTYRETRSWFHLVTNFNRIWVIHLSVFWFYTSANAPTLIVGSSYEQQVNQQPNQSKFYSIIALGGGIATLIQIIATCAEWAFVPRRWAGAQHLTKRLLFLLVVFALNVGPSVYILGIEGADKGTPGHILAIVQLIIAVLSMVYFSIMPLGALFGSYLTRNSRRYVASQTFTASWPQLKGNDRALSYFLWVVVGGAKFGESYKYLTLSARDAIRYVDELNVDSCLGDAQLMGNILCKHQPEVLLVLLIITDLIFFMLDTFLWYVLVNAVFSIARSFFLGSSIWTPWRNIFSRLPKRVYSKVLATTDMEIKYKPKVLISQIWNAIVISMYREHLLAIDHVQKLLYHQVPSEQEGKRTLRAPTFFVSQEDHSFKTEFFPSQSEAERRISFFAQSLSMPIPEPLPVDNMPTFSVLIPHYSEKILLSLREIIREDEPYSRVTMLEYLKQLHPHEWDCFVKDTKILADETSQFNGEYEKNEKDDAKSKIDDLPFYCIGFKSSAPEYTLRTRIWASLRSQTLYRTISGFMNYSRAIKLLYRVENPEVVQMFGGNSDKLERELERMARRKFKLIVSMQRYAKFKKEEMENAEFLLRAYPDLQIAYLDEEPPVAEGEEPRIYSALIDGHSEIMENGMRRPKFRIQLSGNPVLGDGKSDNQNHSIIFYRGEYIQLIDANQDNYLEECLKIRSVLAEFEEMKTDNVSPYTPGVKNEVTAPVAILGAREYIFSENIGILGDVAAGKEQTFGTLFARTLSQIGGKLHYGHPDFLHGIFMTTRGGVSKAQKGLHLNEDIYAGMNAMLRGGRIKHCEYYQCGKGRDLGFGSILNFTTKIGTGMGEQLLSREYYYLGTQLPLDRFLSFYYAHAGFHVQNILIILSVQIFMLVGINIGVVRNQTVRCDYNVNVPITDPLFPTGCNNTDALMDWMFRCVLSIFVVFFLAFVPLIVQELTERGFQRAATRFTKQFFSGSFLFEVFVTQIYAQSVTQDLSFGGARYIGTGRGFATARIPFGVLYSRFAGPCLYMGSRLLLSLLFASITVWQAPLLYFWLSLIALIACPFLYNPHQFAWNDFFIDYRDFLRWLSRGNSRSHSSSWIAFCRLSRTRITGYKRKALGDPSAKLSGDVPRASFFNVFFGEIVSPLLLVASTLIPYLFINAQTGVNDTVTKGDNRVQNLSTAKPTSSLVRVAIVAFGPIVINAGILAVFFALACCAGPLLGVCCKRTGAVLAAIAHALAVIVLIVFFEVMFFLEGFNFTKTLSGMIAVVAIQRFIIKLIVATTLTRELKTDQANIAFWTGKWYSMGWHSVSQPAREFLCKITELTMFAADFILGHFLLFFMLPIIIIPKIDTLHSIMLFWLRPSRQIRPPIYSMKQSKLRRRRVIRYAVLYFTLLVVFVALIVGPAVASDLILSDDTIKSLNSNIESNLAGFILVQPRNDKYKDNTRGRNQTGTGMDGYSGPGTASRTTAAGAKNTDSSNAKMFMFL

SEQ ID NO: 22264 - DNA, 6482 bp, Muscodor strobelii
  misc_feature: SGI EST ID NO. CUFF.54757.2
  misc_feature: Variant of the nucleotide sequence at SEQ ID NO 22262
tatcaacccatccagcactactgcacctgttgtgttgtcacgcagttagtgctgtttatgctgtttacctgattgcatctgtgtgagagcgccccggtcgcattgccaggctaaccgtcgcgatccagcagcatccgattaacttttcgcgtggcacgcaccacctcattcctaatcaatcccgcgtgtggcaggctacattacggatcttgatgagtctggtctaatctgtccgcgaatcgacaccctcgccagaatgtcgggctatccacaaggtggtggtcatcacgactaccacgacggctacggccagaataccgactcatattatcaagacgatcacaacggccaatactacgatcatcacgaccagcagggtcaccatgaccagcagcacggctatgatgcccatggccagcacggcgatggctattacgacgaatctggctattacaatgcagacgccaataacccctaccaccaggacggcggctattacgatggccacgatcaaaacgagtattacgacgacggccacggcggctactacgacaactatgccaacaatggccaacagggccaggctggctacaatggccagggccgacggggtgattcggaagaagagtcggagacgttcagtgacttcaccatgagatccgacatggtccgtgccaccgacatggactactatggacgtggagatgagcgctacaacagctatgatggccaggccagaggctaccggccaccctcatcccagatttcatacggaggcaatcgctcttccggagcctcgaccccgaactatggcatggactacggtggtgccctccccaacggccaacgctctcgggagccctaccctgcctggacctcggatgcccaaattcccctgtccaaagaagaagtcgaggatatttttgttgacctgtcggccaaattcgggtttcagcgcgacagcatgaggaatatgtatgatcatttcatgacattactggattctcgcgcgtcccgcatgactcccaaccaggcactcctatctttgcacgccgactacatcggtggtgacaatgccaactaccgcaagtggtacttcgcggcccatcttgacctggacgacgccgtgggatttgccaacatgaatagcaataagaagggtcgtaaggccaacaagaaggcgaagaagaacaagaagggcgaccagacagaagagcaggtcttggaggacatggaaggcgacgacagtctcgaggcagccgagtatcggtggaagactcgcatgaaccgcatgtctcaacacgaccgagtccgtcaaattgcgctttatctcatgtgttggggagaagcgaatcaagtccgcttcatgcctgagtgtctttgcttcatcttcaagtgcgcagatgattatctcaattctcctgcttgccaaaatatggttgaaccagtcgaggaggggactttcctgaacaatgtcatcactcccctttaccagtattgccgcgaccaaggatacgagatctctaatggagtctatgtccgacgagagcgtgatcataatcagatcattggttacgacgactgtaatcagcttttctggtatcccgagggtattgagcgcatcgtcatggaggacaagagcaagcttgtcgacgtcccacctcaggagcgttacgccaagctcaaagacgtcaattggaaaaagtgttttttcaagacgtacagggagacgcgttcctggttccatcttgtcaccaactttaatcgtatctgggtcatccatctcagtgtattctggttctatacctcggccaatgcaccgactctcatcgtcggctcttcgtacgagcaacaagtcaatcagcagcctaaccagtccaaattctattctatcatcgcgctgggtggcggtattgcgacgctaatccaaatcattgccacctgcgccgagtgggcgttcgtacctcgtcgttgggcgggtgctcaacatctgaccaaacgccttcttttcctccttgttgtcttcgctcttaacgttggtcctagcgtctacatcctcggcattgagggtgcggataaagggacgcctggtcatatcctcgctattgtacagctcatcattgccgtcctcagtatggtgtatttctccatcatgccattgggtgcactgtttggaagctacctcacgaggaactcgcgtcgctacgtcgccagccagacgttcactgcaagctggccgcaactcaagggcaatgaccgagcattatcgtacttcctatgggttgtcgtcggtggagccaaattcggtgaatcctacaaataccttacactgtctgctcgtgatgctattcgctacgttgatgaactgaacgtggattcgtgtcttggcgacgctcagctcatgggcaatattctctgcaagcaccaaccggaagtcttgcttgttctgttgattatcacggatctcatattcttcatgttggacactttcctatggtacgttcttgtcaatgcggtcttctcgattgcgagatcattcttcctaggatcttccatctggacgccttggaggaatatcttttctcgacttcccaagcgtgtttactccaaggtccttgcaactaccgacatggagatcaaatataagccaaaggttctgatctcacagatttggaacgccattgttatctctatgtatcgagagcatctcctggccatcgaccatgttcagaaactcctttatcaccaggtaccctcggaacaagaagggaaaagaacactccgagcgcctactttcttcgtctcgcaagaagatcactcctttaagacggaattcttcccatcccagagcgaggctgaacgccgcatctctttcttcgcgcaatcgctttcaatgccgatcccagaaccgctcccggttgacaatatgcccactttcagcgtattgattccacactacagtgaaaagattttgctttctttgcgagagatcatccgtgaagatgagccgtattcgcgtgtcactatgctcgaatatctcaagcagctgcatccccatgaatgggactgttttgtcaaggacaccaaaattctcgcagacgaaacctcgcaatttaatggagaatacgagaagaacgagaaggatgatgccaagagcaagattgatgatctgccgttctactgcattgggttcaaatcttcggcgcccgagtacactcttcgaactcgtatctgggcatcccttcggtcacagacgctctatcgtaccatttctggtttcatgaactacagccgtgctatcaagctgctctaccgtgttgagaaccctgaggttgttcaaatgttcggtggtaactctgataagttggaacgcgaactggaaagaatggctcgtcgcaagttcaagctcattgtttcaatgcaaagatatgccaaattcaagaaggaggaaatggaaaatgccgaattcctccttcgcgcctaccccgacctgcaaattgcgtacttggacgaagaacctccagttgctgaaggtgaggagccgcgcatttactccgctctgattgatggccactctgaaatcatggagaatggaatgagacgaccgaaattccgaattcagctatctggcaaccccgtgcttggtgatggcaaatctgacaaccaaaatcattccattatcttttaccgcggtgaatatatccagctcatcgacgccaatcaagacaactacctggaagagtgcttgaagatccgatctgtattggcagaattcgaagagatgaagactgataatgtctccccatatacccctggtgtcaagaatgaggtgactgctcctgtggctattttgggcgcccgcgagtacatcttttccgaaaacatcggtatccttggtgatgtggctgctggtaaagaacagacattcggtaccttgttcgcacgaacactgtcccagatcggtggtaaacttcattatggtcacccggatttcctccatggtatcttcatgaccacgcggggaggtgtctccaaagctcaaaagggactgcacctgaacgaagatatctacgccggaatgaatgctatgttacgcggtggccgaatcaagcactgtgagtactaccagtgtggcaagggtcgtgatcttgggtttggctccattttgaacttcaccaccaagatcggtactggtatgggtgagcaattgctttcgcgcgagtactactacctcggtactcaacttcctctcgatcgcttcctctcattctactatgcccacgccggatttcacgtgcagaacatccttatcatcttgtcggttcagatattcatgctggttggtatcaacatcggcgtggtccggaaccaaacagtcagatgcgattacaatgttaacgtgcctatcaccgatccactattcccgactggttgcaacaacacggatgccctcatggactggatgttccgttgcgttctgtccatcttcgtcgtctttttcctggcattcgtccctttgattgtgcaagaattgacggaacgtggcttccaacgcgccgcgactcgctttaccaaacagttcttctctgggtcgttcctgttcgaggttttcgtcacccaaatttacgcgcagtctgttactcaggatctctccttcggtggtgcccgctacatcggaactggacgtggtttcgccacagcacgtatccccttcggtgtcctctattctcgctttgcaggtccttgtttgtacatgggttctcggctgctattgtcattgctattcgcgtccattacagtgtggcaagctccgcttctgtatttctggctttcgctcattgccttgattgcctgcccattcttgtacaatccccatcagttcgcatggaatgatttctttattgactaccgagatttccttcgctggctatctcgcggtaactctcgatcccattcctcgtcgtggatcgccttttgccgactctctcgcacgaggatcacgggttacaagcgaaaggctcttggcgacccttcagctaagctttctggtgatgttccacgtgcgtccttcttcaatgtcttcttcggcgaaatcgtctcaccgctgttgctcgtcgcatcgaccctcattccatatctgttcatcaacgcccagactggagtgaacgatacggttaccaaaggagacaatcgcgttcaaaatctctcaacggccaaacctacttcatcgctggtccgcgtcgccattgttgcgttcggtcccatcgttatcaacgctggtatcctagcagttttctttgctttggcttgctgcgctggtccgctcttgggcgtgtgctgcaagcggaccggagctgtactcgcggccattgctcacgctcttgccgtcattgtactgatagtcttctttgaagtcatgttcttcctagagggcttcaacttcactaagacgctctccggcatgattgctgttgttgcaatccagcgcttcataatcaaattaattgtcgccacgactctcactcgtgaactcaagacggatcaggctaacattgcgttctggacgggcaagtggtactctatgggttggcactccgtttcccaaccagctcgcgaattcctgtgcaagattacggagctgacaatgttcgccgccgacttcatcctcggccacttcttgttgtttttcatgcttcccatcatcatcatccccaagattgacacgctgcattccatcatgcttttctggctacgtcctagtcggcaaatccgcccccctatttattccatgaagcaatccaaacttcgcaggcgtcgggtcatccgctacgctgtgctatacttcactctcctggtcgtcttcgtagctctcattgtcgggcctgctgtcgctagcgacctcattctcagcgatgatacgatcaagagtctgaacagcaacattgaatcgaatctcgcaggcttcattcttgtccagcctcgcaacgacaagtacaaagacaacactcgtggtcgtaatcagacgggcactggtatggatggctacagtggacccggtaccgcctcgaggactacggctgcaggcgcgaagaacactgactcttcgaatgcgaagatgtttatgttcctctagaccatggttcagaattttctgtattataagatgatggcaaaccatcggtaaactgggctctgccggatcctggatggctcggtggcagtgcgcaccggcagacggtggcgcttctgtattgattaataaatggcatggcattgcaggggtttacgtattcatttcttttagacaaacaaacatggattttttttttcaaagtacgctgcgccgatttgacgaaacaaatagtgtatacatcagcaatagtgcaaactatgacatggtccaataaggatgtgatatcgattggcccatcaacatgacatgtcatcctcaacgcagcctactccatcagataccggtccca

SEQ ID NO: 22265 - DNA, 2232 bp, Muscodor strobelii
  misc_feature: SGI cDNA ID NO. 567557
  misc_feature: Encodes the peptide sequence at SEQ ID NO 22266
atggccgcgctttacagtgggtgtagtgatgaggacgagttccccgaagtccaaattgtctttgagaagcaaaagcagaagatggcaggcacacaacttgaaagtgccaaagatatcactgcactgcagcccagatcaccaaatgcgcatcttgcacctctccgcgacacaattggtaaaacaccggcaacagtcaaggcaacaccgttgcgccggcgaaagtttgctcccggccaccagctaattgaggcttcactccggaaaccatggaatactatggacattgaaaacatagcgaccaaccacctttttcctacttccagacagccctcatggctacagtctagcagtgcagagacaagcatcgcgtccacaaatgagatgcacaatcgacttccaggaaaagctcagcagactctgcctcagaacatacccagtggaaccatgttcgacagcccttccccgaagaagcagagatctcaaactttcattctcacgacgggacgcaagaagacgaataagatgaccaaaggatgggacacatgtccgagtgattccgaacaagatagcactagcaacgggacaagaattgtcggtctgctcggcaagaaggaagagagcagcctgtctttcggaaagagtttgagcttggatctggaagatttcagcttcgaatccgacggctcctcaaagcactcacgaccagagagtcccactggtggtcctcgtcgcatgcagcgccgtgtcttatcatcctcgactggccctggccaaatgagacctgcttggatgagacctatcgaggagggttctaaagaaagcccgaagaaacgactggcggccaagcatcagaattcagaatcctttgagtctacaagctccattccggcgagcacaaaagaagcagaagaactcgaggacatttttgctaacctcaaaatattcggcgaggagtcatccacgaaagaatccaccatggcagacgacaacgcgagcgagccggccgtgacaccaaccacaccaaagaagactctcgtagcatctcccacaaagcttccccgaatccctacctcaccatggaaaccagagcataaggagttttgggatcatgagaagaacgtggcatggaacgacaagcattcgcctccgaagaagagcccccaaagggctctaaatatcatgggacaagacagccaagagaacctccagctcaaatacagcacgagccctgagaagaagcaggcgaagaaggcctttgacgccgtcaaggtagaagtcgcccgagacttcctgctcgaactagatgaagtgatcactgaaggtaagcttgcacagctcactgagaataccggtggtttgagaatcgagtggtcgaacacgctactcactacagccggacgcgcgcattggaaatgtgcaacaacaacaacgatgtcgaaacaaccgtcatcgtcgtcatccgccacaacgacgaagacaaccaagacacagcactctgcttacatcgaacttgccaccaaggtcctagccaacgaagccgatctcctgaacacggtggcgcatgagttctgccatctcgctgttttcctcttacacggcaagccgaagctcgcgcacggagcggagttcaaagccttcggccgacaagtcatggacgcggctacgtccaaagacggcaaaaggagtctcaagatccctcgcgtccgcgaggtcctgatcaacgtcaccacacgccacagctacgacatcgagtacaaatttgtctggcgctgtgctgattgcagcactgaagtgtcccgccattcccgtagtgtaaatcctatcaaacagcgatgtggcaagtgcaagagcggacagctggtgcaggtgaagcccataccccgaggttccggtccgagtagaaatgcaaaaccaaagcccagcgccgagggaaacgactcgatgttgaagtcgaaggcgcctgaaggaggtaaagcagagaaggccccaaagaagaagacggcctatcaagaatttacggcacgcgagatgaaagccctgagcgtcacccataaaggcgcttcgttcaaggagaagatgggcatcgtctcggcacgatggagcgagcaccggaagacgttggaggagacgaacacaagtactggcgatggcgatgcatcgagcctggtcgacgccgttgagatcttggagattgtcgacgagagtgttgcggacgagaaaatgcaggattga

SEQ ID NO: 22266 - protein, 743 aa, Muscodor strobelii
  misc_feature: SGI Peptide ID NO. 567557
  misc_feature (316)..(701): NCBI GI: 145610847 Blast Desc: MGG_00866 [Magnaporthe grisea 70-15] gi|145018190|gb|EDK02469.1| MGG_00866 [Magnaporthe grisea 70-15]
  misc_feature (346)..(731): NCBI GI: 154292014 Blast Desc: BC1G_14934 [Botryotinia fuckeliana B05.10] gi|150846353|gb|EDN21546.1| BC1G_14934 [Botryotinia fuckeliana B05.10]
  misc_feature (332)..(704): NCBI GI: 156042486 Blast Desc: SS1G_11040 [Sclerotinia sclerotiorum 1980] gi|154695427|gb|EDN95165.1| SS1G_11040 [Sclerotinia sclerotiorum 1980]
  misc_feature (242)..(619): NCBI GI: 116203725 Blast Desc: CHGG_09746 [Chaetomium globosum CBS 148.51] gi|88175874|gb|EAQ83342.1| CHGG_09746 [Chaetomium globosum CBS 148.51]
  misc_feature (299)..(701): NCBI GI: 256721608 Blast Desc: NECHADRAFT_92365 [Nectria haematococca mpVI 77-13-4]
  misc_feature (338)..(643): NCBI GI: 121700064 Blast Desc: SprT family metallopeptidase, [Aspergillus clavatus NRRL 1] gi|119396439|gb|EAW06871.1| SprT family metallopeptidase, [Aspergillus clavatus NRRL 1]
  misc_feature (272)..(724): NCBI GI: 46127139 Blast Desc: FG07947.1 [Gibberella zeae PH-1]
  misc_feature (314)..(651): NCBI GI: 240105177 Blast Desc: CPC735_047400 [Coccidioides posadasii C735 delta SOWgp]
  misc_feature (314)..(651): NCBI GI: 119194747 Blast Desc: CIMG_01748 [Coccidioides immitis RS]
  misc_feature (338)..(634): NCBI GI: 212534676 Blast Desc: SprT family metallopeptidase, [Penicillium marneffei ATCC 18224] gi|210069893|gb|EEA23983.1| SprT family metallopeptidase, [Penicillium marneffei ATCC 18224]
MAALYSGCSDEDEFPEVQIVFEKQKQKMAGTQLESAKDITALQPRSPNAHLAPLRDTIGKTPATVKATPLRRRKFAPGHQLIEASLRKPWNTMDIENIATNHLFPTSRQPSWLQSSSAETSIASTNEMHNRLPGKAQQTLPQNIPSGTMFDSPSPKKQRSQTFILTTGRKKTNKMTKGWDTCPSDSEQDSTSNGTRIVGLLGKKEESSLSFGKSLSLDLEDFSFESDGSSKHSRPESPTGGPRRMQRRVLSSSTGPGQMRPAWMRPIEEGSKESPKKRLAAKHQNSESFESTSSIPASTKEAEELEDIFANLKIFGEESSTKESTMADDNASEPAVTPTTPKKTLVASPTKLPRIPTSPWKPEHKEFWDHEKNVAWNDKHSPPKKSPQRALNIMGQDSQENLQLKYSTSPEKKQAKKAFDAVKVEVARDFLLELDEVITEGKLAQLTENTGGLRIEWSNTLLTTAGRAHWKCATTTTMSKQPSSSSSATTTKTTKTQHSAYIELATKVLANEADLLNTVAHEFCHLAVFLLHGKPKLAHGAEFKAFGRQVMDAATSKDGKRSLKIPRVREVLINVTTRHSYDIEYKFVWRCADCSTEVSRHSRSVNPIKQRCGKCKSGQLVQVKPIPRGSGPSRNAKPKPSAEGNDSMLKSKAPEGGKAEKAPKKKTAYQEFTAREMKALSVTHKGASFKEKMGIVSARWSEHRKTLEETNTSTGDGDASSLVDAVEILEIVDESVADEKMQD

SEQ ID NO: 22267 - DNA, 4372 bp, Muscodor strobelii
  misc_feature: SGI EST ID NO. CUFF.52375.0
  misc_feature: Variant of the nucleotide sequence at SEQ ID NO 22265
tattgacatccgcttatgtgtacctagacaagctcctctttcttcgctactacgatacttcaacaagcatacatacaggtgcatacgaacgcaattgaatgcttgcagaagattagatatactcaaaaatggccgcgctttacagtgggtgtagtgatgaggacgagttccccgaagtccaaattgtctttgagaagcaaaagcagaagatggcaggcacacaacttgaaagtgccaaagatatcactgcactgcagcccagatcaccaaatgcgcatcttgcacctctccgcgacacaattggtaaaacaccggcaacagtcaaggcaacaccgttgcgccggcgaaagtttgctcccggccaccagctaattgaggcttcactccggaaaccatggaatactatggacattgaaaacatagcgaccaaccacctttttcctacttccagacagccctcatggctacagtctagcagtgcagagacaagcatcgcgtccacaaatgagatgcacaatcgacttccaggaaaagctcagcagactctgcctcagaacatacccagtggaaccatgttcgacagcccttccccgaagaagcagagatctcaaactttcattctcacgacgggacgcaagaagacgaataagatgaccaaaggatgggacacatgtccgagtgattccgaacaagatagcactagcaacgggacaagaattgtcggtctgctcggcaagaaggaagagagcagcctgtctttcggaaagagtttgagcttggatctggaagatttcagcttcgaatccgacggctcctcaaagcactcacgaccagagagtcccactggtggtcctcgtcgcatgcagcgccgtgtcttatcatcctcgactggccctggccaaatgagacctgcttggatgagacctatcgaggagggttctaaagaaagcccgaagaaacgactggcggccaagcatcagaattcagaatcctttgagtctacaagctccattccggcgagcacaaaagaagcagaagaactcgaggacatttttgctaacctcaaaatattcggcgaggagtcatccacgaaagaatccaccatggcagacgacaacgcgagcgagccggccgtgacaccaaccacaccaaagaagactctcgtagcatctcccacaaagcttccccgaatccctacctcaccatggaaaccagagcataaggagttttgggatcatgagaagaacgtggcatggaacgacaagcattcgcctccgaagaagagcccccaaagggctctaaatatcatgggacaagacagccaagagaacctccagctcaaatacagcacgagccctgagaagaagcaggcgaagaaggcctttgacgccgtcaaggtagaagtcgcccgagacttcctgctcgaactagatgaagtgatcactgaaggtaagcttgcacagctcactgagaataccggtggtttgagaatcgagtggtcgaacacgctactcactacagccggacgcgcgcattggaaatgtgcaacaacaacaacgatgtcgaaacaaccgtcatcgtcgtcatccgccacaacgacgaagacaaccaagacacagcactctgcttacatcgaacttgccaccaaggtcctagccaacgaagccgatctcctgaacacggtggcgcatgagttctgccatctcgctgttttcctcttacacggcaagccgaagctcgcgcacggagcggagttcaaagccttcggccgacaagtcatggacgcggctacgtccaaagacggcaaaaggagtctcaagatccctcgcgtccgcgaggtcctgatcaacgtcaccacacgccacagctacgacatcgagtacaaatttgtctggcgctgtgctgattgcagcactgaagtgtcccgccattcccgtagtgtaaatcctatcaaacagcgatgtggcaagtgcaagagcggacagctggtgcaggtgaagcccataccccgaggttccggtccgagtagaaatgcaaaaccaaagcccagcgccgagggaaacgactcgatgttgaagtcgaaggcgcctgaaggaggtaaagcagagaaggccccaaagaagaagacggcctatcaagaatttacggcacgcgagatgaaagccctgagcgtcacccataaaggcgcttcgttcaaggagaagatgggcatcgtctcggcacgatggagcgagcaccggaagacgttggaggagacgaacacaagtactggcgatggcgatgcatcgagcctggtcgacgccgttgagatcttggagattgtcgacgagagtgttgcggacgagaaaatgcaggattgattcgttgtatacaaaagaacaggaagggagaccgaatatgacctgccctgtcagtcaccatctgcaactggattcttgtcggaaggtatttgcattctctggagtttgggtgaatttgagatgtaccggttggcttttttctttcggtgttgagaggacttcgtgaaagacaaagacattgcatggcgtcagacgaatgcccttattgctaatggtagacataaccagaatattgcttgcaacttctgctctgtattgtcaggctgtcttcgatgcgggacgcaatcgaggtgatcggcaatagacacgcacgtactcgtataattcaaaataacgtgaatgactgtatttaaatgagacagagctcatatcctcatgttgaccgtagtgccaactattccacgacaataatgtcatcatttatcaatccatgctggaagccactgatatcgaaatttcgcaaagaaaaggtatctgtctagacatttgacaaagccgcctcttgccctattgaactgatgtatcctcaaacatgttcttgttggcctacagcgctagacaagtatctaggttacaacggcccttcttctcaactgcccagccgagattcttcctccacacctgatatcaacccttacgctccagactcgtctatatctccttgaaaaggccccagtctttcaccttgaaagtctcccaaatcctcgacgcatagtccacagcgtccccaatcagttttccctgcttgcccagttggaggtcgacatcatcctcgtcgtattcgccgcggatatggggtacatttatggtgatgagaatatcggtcttctcgtgctcgaggcgcacgagggtcaggatcatggctgtgaagtcgggcgagcttggtcgttggctgctgtcgccagcggcggactctgaagacggagggtggctcggaggagatagcgtcgcgatcagtgtataggctggtatgtctgtgctgttacgaagacagaagtcagcacatcggatcacttgtagcgagtgtcactccgccgtgcctgtgcatcgcgcggagactacgagtacgactggtgaaagatggcaaagtacatactcgaggcgcgagaattgtgtaggggtcgtattccagaccttgagacggtcgacgtcgtcgccgacaacctcctcaagatgggtagtcagggcctggccatcgagttcgggcgagctgccactgccgccaacacgctcgttgatctcgacgatgatgctcgtgaagccatctttgtcgatgtagacttcttggttgtcggggacctggcgcagttggctgccaggtaaaagcaatgcgccgtcagtgaaagtgccatgaacgccgacttgcgagtctgcttcttctcacctcacatctgcaaacttggtgggcaggtcgcaaacaagggcccctccaaacagcggggtgctctggtatgtcgccatgttccagatgctcgtcgcccttgtacgggactggactgcgcgcgtgattctccggtctggtgtagagattatttcgctagacaatacaagtacaagaatcagaggcgcaagggattcggctgaacagacgatgtatacgatctcggatgccttatgtacgtgcctatcggactcaatgttatgtcgcaactgaggcataccactatgcagtttgctacgtcttggcaccgaaggcggggcgcatgcaaccttaccggcgggcgatgaggctaaagctatgatgtaatcccattcacacggcacatctagaccaacgttgtgcccaacgagatcagctttcagccaccatatttgacatcgtcaatgggaacgtattagtatgtattcccttgctttcaacccaactcaaatcaatgccaccctttttgacgtagtggctcacttattcggattcctcaacaaccgcccgtaattcagtaagacagagataatctaagtgtccaacctaggtgtgtacatagccaagccattgacaaaataattagctgtcg

SEQ ID NO: 22268 - DNA, 621 bp, Muscodor strobelii
  misc_feature: SGI cDNA ID NO. 567558
  misc_feature: Encodes the peptide sequence at SEQ ID NO 22269
atggcgacataccagagcaccccgctgtttggaggggcccttgtttgcgacctgcccaccaagtttgcagatgtgagccaactgcgccaggtccccgacaaccaagaagtctacatcgacaaagatggcttcacgagcatcatcgtcgagatcaacgagcgtgttggcggcagtggcagctcgcccgaactcgatggccaggccctgactacccatcttgaggaggttgtcggcgacgacgtcgaccgtctcaaggtctggaatacgacccctacacaattctcgcgcctcgacacagacataccagcctatacactgatcgcgacgctatctcctccgagccaccctccgtcttcagagtccgccgctggcgacagcagccaacgaccaagctcgcccgacttcacagccatgatcctgaccctcgtgcgcctcgagcacgagaagaccgatattctcatcaccataaatgtaccccatatccgcggcgaatacgacgaggatgatgtcgacctccaactgggcaagcagggaaaactgattggggacgctgtggactatgcgtcgaggatttgggagactttcaaggtgaaagactggggccttttcaaggagatatag

SEQ ID NO: 22269 - protein, 206 aa, Muscodor strobelii
  misc_feature: SGI Peptide ID NO. 567558
  misc_feature (6)..(160): Pfam Id: PF04603 Pfam Desc: Ran-interacting Mog1 protein
  misc_feature (6)..(79): Pfam Id: PF04603 Pfam Desc: Ran-interacting Mog1 protein
  misc_feature (1)..(206): NCBI GI: 261358890 Blast Desc: conserved [Verticillium albo-atrum VaMs.102]
  misc_feature (1)..(206): NCBI GI: 85092091 Blast Desc: NCU06875 [Neurospora crassa OR74A] gi|28920625|gb|EAA29986.1| conserved [Neurospora crassa OR74A]
  misc_feature (1)..(205): NCBI GI: 256721638 Blast Desc: [Nectria haematococca mpVI 77-13-4]
  misc_feature (1)..(203): NCBI GI: 46127141 Blast Desc: FG07948.1 [Gibberella zeae PH-1]
  misc_feature (1)..(206): NCBI GI: 154292016 Blast Desc: BC1G_14935 [Botryotinia fuckeliana B05.10] gi|150846354|gb|EDN21547.1| BC1G_14935 [Botryotinia fuckeliana B05.10]
  misc_feature (4)..(206): NCBI GI: 39973973 Blast Desc: MGG_00867 [Magnaporthe grisea 70-15] gi|145018189|gb|EDK02468.1| MGG_00867 [Magnaporthe grisea 70-15]
  misc_feature (1)..(206): NCBI GI: 156042488 Blast Desc: SS1G_11041 [Sclerotinia sclerotiorum 1980] gi|154695428|gb|EDN95166.1| SS1G_11041 [Sclerotinia sclerotiorum 1980]
  misc_feature (11)..(206): NCBI GI: 166714372 Blast Desc: [Stachybotrys elegans]
  misc_feature (3)..(206): NCBI GI: 171679425 Blast Desc: protein product [Podospora anserina] gi|170939338|emb|CAP64566.1| protein product [Podospora anserina]
  misc_feature (4)..(204): NCBI GI: 189194723 Blast Desc: conserved [Pyrenophora tritici-repentis Pt-1C-BFP] gi|187979264|gb|EDU45890.1| conserved [Pyrenophora tritici-repentis Pt-1C-BFP]
MATYQSTPLFGGALVCDLPTKFADVSQLRQVPDNQEVYIDKDGFTSIIVEINERVGGSGSSPELDGQALTTHLEEVVGDDVDRLKVWNTTPTQFSRLDTDIPAYTLIATLSPPSHPPSSESAAGDSSQRPSSPDFTAMILTLVRLEHEKTDILITINVPHIRGEYDEDDVDLQLGKQGKLIGDAVDYASRIWETFKVKDWGLFKEI

SEQ ID NO: 22270 - DNA, 3005 bp, Muscodor strobelii
  misc_feature: SGI EST ID NO. CUFF.52376.1
  misc_feature: Variant of the nucleotide sequence at SEQ ID NO 22268
gttgttgaggaatccgaataagtgagccactacgtcaaaaagggtggcattgatttgagttgggttgaaagcaagggaatacatactaatacgttcccattgacgatgtcaaatatggtggctgaaagctgatctcgttgggcacaacgttggtctagatgtgccgtgtgaatgggattacatcatagctttagcctcatcgcccgccggtaaggttgcatgcgccccgccttcggtgccaagacgtagcaaactgcatagtggtatgcctcagttgcgacataacattgagtccgataggcacgtacataaggcatccgagatcgtatacatcgtctgttcagccgaatcccttgcgcctctgattcttgtacttgtattgtctagcgaaataatctctacaccagaccggagaatcacgcgcgcagtccagtcccgtacaagggcgacgagcatctggaacatggcgacataccagagcaccccgctgtttggaggggcccttgtttgcgacctgcccaccaagtttgcagatgtgagccaactgcgccaggtccccgacaaccaagaagtctacatcgacaaagatggcttcacgagcatcatcgtcgagatcaacgagcgtgttggcggcagtggcagctcgcccgaactcgatggccaggccctgactacccatcttgaggaggttgtcggcgacgacgtcgaccgtctcaaggtctggaatacgacccctacacaattctcgcgcctcgacacagacataccagcctatacactgatcgcgacgctatctcctccgagccaccctccgtcttcagagtccgccgctggcgacagcagccaacgaccaagctcgcccgacttcacagccatgatcctgaccctcgtgcgcctcgagcacgagaagaccgatattctcatcaccataaatgtaccccatatccgcggcgaatacgacgaggatgatgtcgacctccaactgggcaagcagggaaaactgattggggacgctgtggactatgcgtcgaggatttgggagactttcaaggtgaaagactggggccttttcaaggagatatagacgagtctggagcgtaagggttgatatcaggtgtggaggaagaatctcggctgggcagttgagaagaagggccgttgtaacctagatacttgtctagcgctgtaggccaacaagaacatgtttgaggatacatcagttcaatagggcaagaggcggctttgtcaaatgtctagacagataccttttctttgcgaaatttcgatatcagtggcttccagcatggattgataaatgatgacattattgtcgtggaatagttggcactacggtcaacatgaggatatgagctctgtctcatttaaatacagtcattcacgttattttgaattatacgagtacgtgcgtgtctattgccgatcacctcgattgcgtcccgcatcgaagacagcctgacaatacagagcagaagttgcaagcaatattctggttatgtctaccattagcaataagggcattcgtctgacgccatgcaatgtctttgtctttcacgaagtcctctcaacaccgaaagaaaaaagccaaccggtacatctcaaattcacccaaactccagagaatgcaaataccttccgacaagaatccagttgcagatggtgactgacagggcaggtcatattcggtctcccttcctgttcttttgtatacaacgaatcaatcctgcattttctcgtccgcaacactctcgtcgacaatctccaagatctcaacggcgtcgaccaggctcgatgcatcgccatcgccagtacttgtgttcgtctcctccaacgtcttccggtgctcgctccatcgtgccgagacgatgcccatcttctccttgaacgaagcgcctttatgggtgacgctcagggctttcatctcgcgtgccgtaaattcttgataggccgtcttcttctttggggccttctctgctttacctccttcaggcgccttcgacttcaacatcgagtcgtttccctcggcgctgggctttggttttgcatttctactcggaccggaacctcggggtatgggcttcacctgcaccagctgtccgctcttgcacttgccacatcgctgtttgataggatttacactacgggaatggcgggacacttcagtgctgcaatcagcacagcgccagacaaatttgtactcgatgtcgtagctgtggcgtgtggtgacgttgatcaggacctcgcggacgcgagggatcttgagactccttttgccgtctttggacgtagccgcgtccatgacttgtcggccgaaggctttgaactccgctccgtgcgcgagcttcggcttgccgtgtaagaggaaaacagcgagatggcagaactcatgcgccaccgtgttcaggagatcggcttcgttggctaggaccttggtggcaagttcgatgtaagcagagtgctgtgtcttggttgtcttcgtcgttgtggcggatgacgacgatgacggttgtttcgacatcgttgttgttgttgcacatttccaatgcgcgcgtccggctgtagtgagtagcgtgttcgaccactcgattctcaaaccaccggtattctcagtgagctgtgcaagcttaccttcagtgatcacttcatctagttcgagcaggaagtctcgggcgacttctaccttgacggcgtcaaaggccttcttcgcctgcttcttctcagggctcgtgctgtatttgagctggaggttctcttggctgtcttgtcccatgatatttagagccctttgggggctcttcttcggaggcgaatgcttgtcgttccatgccacgttcttctcatgatcccaaaactccttatgctctggtttccatggtgaggtagggattcggggaagctttgtgggagatgctacgagagtcttctttggtgtggttggtgtcacggccggctcgctcgcgttgtcgtctgccatggtggattctttc

SEQ ID NO: 22271 - DNA, 1557 bp, Muscodor strobelii
  misc_feature: SGI cDNA ID NO. 567559
  misc_feature: Reduced expression when VOC is produced
  misc_feature: Encodes the peptide sequence at SEQ ID NO 22272
atggacctcaacgaggcgcaggcgtacgtgggcacgtgggtgcagcgggtgttcgaggcgttccagaaggtgccgggcagcgcggtgctgatccggtacatccagtcgagctaccagaacgacccgatccgctcggccatcgagctggtgctggtcatcttcttcgtccgctacctgctgtcgccgccgtacccgacccacggctctaactacatcaagctgcgcgaggacgagatcgacgagctggtgcgcgactgggagcccgagccgctggtgcccgcccagacgccgctcgagcagcacgaggccgaccgcctccccgtcatcgtcggccccacgggaccccgcgtcaagctgcagacgggcaagaccgtcgtcaacctggcctcgtacaacttctacaacttcaacgcctccgagagcatccgcgagaaggccatccagaccctgcgcacctacggcgtcggcccctgcggccccccgcagttctacggcacccaggacgtccacatgcacaccgaggccgacatcgcctccttcctcggcacccaggccagcatcgtctacgcccacgccttctccaccgtcaccagcgtcatcccctccttctgcaagcgcggcgacgtcatcgtcgccgacgccgcagtcaactactccatccgcaagggcctcgaggcctcccgctcctccatccgctggtaccgccacaacgacatggccgacctcgagcgcgtcatggcccgcgtcgtccaggagcaggcccacaagaagatcctcacccgccgcttcatcgtcaccgagggcctcttcgagatgaccggcgactgctccgacctgcccaagctcatcgatctcaaggagaagtacaagttccgcctcgccctcgacgagaccaactccttcggcgtcctcggccgcaatggccgcggtctcaccgaggcccagaacgtagactccgaggccgtcgacatgatcatcggctccctcgccggccccctctgcgctgccggtggcttctgtgccgggtcgacagatgtcgtgcggcaccagcgtatcaatgccctggcttacacctactcggccgctctccccgccatgtcagctgtaacggccagcgagacattgaatgtactccaatgcaatcccgacatcctcatccagtgccgtgagaatattcgtgccatgcgcgctcagttggatcctcggagcgactgggtcacgtgcaccagcgatcccgagaatcccgtcatgattctcgtcttcaagccagacgtcatcgtgaccagggcgctaagcatcgaggaccaggagcggctgttcctcgactgtgttgaagagtccctcaataacggtgtcctcataacacgcctaaagaccatgccactgatcagcagcctcggccctaaggacgccgacgtgaacattcaaccagcgctcaaagtctgcatcacctctgggctctccaagaaggagatcgaaaaggccggagtgacgatccgtcatgccatcacgaaagtcatgacgaggaagacgaaccgcccatcctcggctagctag

SEQ ID NO: 22272 - protein, 518 aa, Muscodor strobelii
  misc_feature: SGI Peptide ID NO. 567559
  misc_feature (123)..(499): Pfam Id: PF00155 Pfam Desc: Aminotransferase class I and II
  misc_feature (123)..(400): Pfam Id: PF00155 Pfam Desc: Aminotransferase class I and II
  misc_feature (1)..(512): NCBI GI: 116203729 Blast Desc: CHGG_09748 [Chaetomium globosum CBS 148.51] gi|88175876|gb|EAQ83344.1| CHGG_09748 [Chaetomium globosum CBS 148.51]
  misc_feature (1)..(507): NCBI GI: 39973979 Blast Desc: MGG_00864 [Magnaporthe grisea 70-15] gi|145018192|gb|EDK02471.1| MGG_00864 [Magnaporthe grisea 70-15]
  misc_feature (1)..(512): NCBI GI: 46127135 Blast Desc: FG07945.1 [Gibberella zeae PH-1]
  misc_feature (1)..(516): NCBI GI: 256721636 Blast Desc: [Nectria haematococca mpVI 77-13-4]
  misc_feature (1)..(512): NCBI GI: 85089501 Blast Desc: NCU06870 [Neurospora crassa OR74A] gi|28919276|gb|EAA28743.1| NCU06870 [Neurospora crassa OR74A]
  misc_feature (1)..(499): NCBI GI: 261358884 Blast Desc: serine palmitoyltransferase [Verticillium albo-atrum VaMs.102]
  misc_feature (1)..(501): NCBI GI: 154293931 Blast Desc: BC1G_14037 [Botryotinia fuckeliana B05.10] gi|150845192|gb|EDN20385.1| BC1G_14037 [Botryotinia fuckeliana B05.10]
  misc_feature (1)..(512): NCBI GI: 171679417 Blast Desc: protein product [Podospora anserina] gi|170939334|emb|CAP64562.1| protein product [Podospora anserina]
  misc_feature (1)..(512): NCBI GI: 156039771 Blast Desc: SS1G_12022 [Sclerotinia sclerotiorum 1980] gi|154697759|gb|EDN97497.1| SS1G_12022 [Sclerotinia sclerotiorum 1980]
  misc_feature (1)..(510): NCBI GI: 212534680 Blast Desc: serine palmitoyl CoA transferase subunit LcbA [Penicillium marneffei ATCC 18224] gi|210069895|gb|EEA23985.1| serine palmitoyl CoA transferase subunit LcbA [Penicillium ATCC
  misc_feature (3)..(500): SWISSPROT Homolog: EC 2.3.1.50 Serine C-palmitoyltransferase
  misc_feature: Useful for introducing or modulating the production of volatile compounds
MDLNEAQAYVGTWVQRVFEAFQKVPGSAVLIRYIQSSYQNDPIRSAIELVLVIFFVRYLLSPPYPTHGSNYIKLREDEIDELVRDWEPEPLVPAQTPLEQHEADRLPVIVGPTGPRVKLQTGKTVVNLASYNFYNFNASESIREKAIQTLRTYGVGPCGPPQFYGTQDVHMHTEADIASFLGTQASIVYAHAFSTVTSVIPSFCKRGDVIVADAAVNYSIRKGLEASRSSIRWYRHNDMADLERVMARVVQEQAHKKILTRRFIVTEGLFEMTGDCSDLPKLIDLKEKYKFRLALDETNSFGVLGRNGRGLTEAQNVDSEAVDMIIGSLAGPLCAAGGFCAGSTDVVRHQRINALAYTYSAALPAMSAVTASETLNVLQCNPDILIQCRENIRAMRAQLDPRSDWVTCTSDPENPVMILVFKPDVIVTRALSIEDQERLFLDCVEESLNNGVLITRLKTMPLISSLGPKDADVNIQPALKVCITSGLSKKEIEKAGVTIRHAITKVMTRKTNRPSSAS

SEQ ID NO: 22273 - DNA, 2091 bp, Muscodor strobelii
  misc_feature: SGI EST ID NO. CUFF.52367.0
  misc_feature: Variant of the nucleotide sequence at SEQ ID NO 22271
ggaacccctgaaagttaaaacagacaatctgcaaggttccatactatttctgaatgtggacataaaacgccgggaccctcattaatttccatatgatcgcagcctgtagggaaacagatggtcgccggctctgacggaagatcaggcacccgcacccgcaaccgcaaccgccattgacacgattcctcgataatacactactctgagctttcctgtcacgtctcggggcttactcttttgactgcttcttgttctcgactcgggctctagcacttggtccgtcgtctgcgcgtgccgatgtgatagacactccttacatctatctacaccagaaccacgaaactaggctgccgccgagagcgaggtggcgacgatggacctcaacgaggcgcaggcgtacgtgggcacgtgggtgcagcgggtgttcgaggcgttccagaaggtgccgggcagcgcggtgctgatccggtacatccagtcgagctaccagaacgacccgatccgctcggccatcgagctggtgctggtcatcttcttcgtccgctacctgctgtcgccgccgtacccgacccacggctctaactacatcaagctgcgcgaggacgagatcgacgagctggtgcgcgactgggagcccgagccgctggtgcccgcccagacgccgctcgagcagcacgaggccgaccgcctccccgtcatcgtcggccccacgggaccccgcgtcaagctgcagacgggcaagaccgtcgtcaacctggcctcgtacaacttctacaacttcaacgcctccgagagcatccgcgagaaggccatccagaccctgcgcacctacggcgtcggcccctgcggccccccgcagttctacggcacccaggacgtccacatgcacaccgaggccgacatcgcctccttcctcggcacccaggccagcatcgtctacgcccacgccttctccaccgtcaccagcgtcatcccctccttctgcaagcgcggcgacgtcatcgtcgccgacgccgcagtcaactactccatccgcaagggcctcgaggcctcccgctcctccatccgctggtaccgccacaacgacatggccgacctcgagcgcgtcatggcccgcgtcgtccaggagcaggcccacaagaagatcctcacccgccgcttcatcgtcaccgagggcctcttcgagatgaccggcgactgctccgacctgcccaagctcatcgatctcaaggagaagtacaagttccgcctcgccctcgacgagaccaactccttcggcgtcctcggccgcaatggccgcggtctcaccgaggcccagaacgtagactccgaggccgtcgacatgatcatcggctccctcgccggccccctctgcgctgccggtggcttctgtgccgggtcgacagatgtcgtgcggcaccagcgtatcaatgccctggcttacacctactcggccgctctccccgccatgtcagctgtaacggccagcgagacattgaatgtactccaatgcaatcccgacatcctcatccagtgccgtgagaatattcgtgccatgcgcgctcagttggatcctcggagcgactgggtcacgtgcaccagcgatcccgagaatcccgtcatgattctcgtcttcaagccagacgtcatcgtgaccagggcgctaagcatcgaggaccaggagcggctgttcctcgactgtgttgaagagtccctcaataacggtgtcctcataacacgcctaaagaccatgccactgatcagcagcctcggccctaaggacgccgacgtgaacattcaaccagcgctcaaagtctgcatcacctctgggctctccaagaaggagatcgaaaaggccggagtgacgatccgtcatgccatcacgaaagtcatgacgaggaagacgaaccgcccatcctcggctagctagctaagactcgggatgtctgatgagatagtacggggcaacgacagccatagagggcagggaaatgaaaatggtgcatacattagactacgaagctgaaaactcaagaccctatatactaataactaatacataacttgaaaagacattcttgataatcgggc

SEQ ID NO: 22274 - DNA, 1617 bp, Muscodor strobelii
  misc_feature: SGI cDNA ID NO. 567560
  misc_feature: Encodes the peptide sequence at SEQ ID NO 22275
atggacctcaacgaggcgcaggcgtacgtgggcacgtgggtgcagcgggtgttcgaggcgttccagaaggtgccgggcagcgcggtgctgatccggtacatccagtcgagctaccagaacgacccgatccgctcggccatcgagctggtgctggtcatcttcttcgtccgctacctgctgtcgccgccgtacccgacccacggctctaactacatcaagctgcgcgaggacgagatcgacgagctggtgcgcgactgggagcccgagccgctggtgcccgcccagacgccgctcgagcagcacgaggccgaccgcctccccgtcatcgtcggccccacgggaccccgcgtcaagctgcagacgggcaagaccgtcgtcaacctggcctcgtacaacttctacaacttcaacgcctccgagagcatccgcgagaaggccatccagaccctgcgcacctacggcgtcggcccctgcggccccccgcagttctacggcacccaggacgtccacatgcacaccgaggccgacatcgcctccttcctcggcacccaggccagcatcgtctacgcccacgccttctccaccgtcaccagcgtcatcccctccttctgcaagcgcggcgacgtcatcgtcgccgacgccgcagtcaactactccatccgcaagggcctcgaggcctcccgctcctccatccgctggtaccgccacaacgacatggccgacctcgagcgcgtcatggcccgcgtcgtccaggagcaggcccacaagaagatcctcacccgccgcttcatcgtcaccgagggcctcttcgagatgaccggcgactgctccgacctgcccaagctcgtcagtatccccagaacaacactgctccgccgccatgctaacaatagtgcatccttgcagatcgatctcaaggagaagtacaagttccgcctcgccctcgacgagaccaactccttcggcgtcctcggccgcaatggccgcggtctcaccgaggcccagaacgtagactccgaggccgtcgacatgatcatcggctccctcgccggccccctctgcgctgccggtggcttctgtgccgggtcgacagatgtcgtgcggcaccagcgtatcaatgccctggcttacacctactcggccgctctccccgccatgtcagctgtaacggccagcgagacattgaatgtactccaatgcaatcccgacatcctcatccagtgccgtgagaatattcgtgccatgcgcgctcagttggatcctcggagcgactgggtcacgtgcaccagcgatcccgagaatcccgtcatgattctcgtcttcaagccagacgtcatcgtgaccagggcgctaagcatcgaggaccaggagcggctgttcctcgactgtgttgaagagtccctcaataacggtgtcctcataacacgcctaaagaccatgccactgatcagcagcctcggccctaaggacgccgacgtgaacattcaaccagcgctcaaagtctgcatcacctctgggctctccaagaaggagatcgaaaaggccggagtgacgatccgtcatgccatcacgaaagtcatgacgaggaagacgaaccgcccatcctcggctagctag

SEQ ID NO: 22275 - protein, 538 aa, Muscodor strobelii
  misc_feature: SGI Peptide ID NO. 567560
  misc_feature (123)..(519): Pfam Id: PF00155 Pfam Desc: Aminotransferase class I and II
  misc_feature (123)..(285): Pfam Id: PF00155 Pfam Desc: Aminotransferase class I and II
  misc_feature (303)..(420): Pfam Id: PF00155 Pfam Desc: Aminotransferase class I and II
  misc_feature (1)..(532): NCBI GI: 116203729 Blast Desc: CHGG_09748 [Chaetomium globosum CBS 148.51] gi|88175876|gb|EAQ83344.1| CHGG_09748 [Chaetomium globosum CBS 148.51]
  misc_feature (1)..(527): NCBI GI: 39973979 Blast Desc: MGG_00864 [Magnaporthe grisea 70-15] gi|145018192|gb|EDK02471.1| MGG_00864 [Magnaporthe grisea 70-15]
  misc_feature (1)..(532): NCBI GI: 46127135 Blast Desc: FG07945.1 [Gibberella zeae PH-1]
  misc_feature (1)..(536): NCBI GI: 256721636 Blast Desc: [Nectria haematococca mpVI 77-13-4]
  misc_feature (1)..(532): NCBI GI: 85089501 Blast Desc: NCU06870 [Neurospora crassa OR74A] gi|28919276|gb|EAA28743.1| NCU06870 [Neurospora crassa OR74A]
  misc_feature (1)..(519): NCBI GI: 261358884 Blast Desc: serine palmitoyltransferase [Verticillium albo-atrum VaMs.102]
  misc_feature (1)..(521): NCBI GI: 154293931 Blast Desc: BC1G_14037 [Botryotinia fuckeliana B05.10] gi|150845192|gb|EDN20385.1| BC1G_14037 [Botryotinia fuckeliana B05.10]
  misc_feature (1)..(532): NCBI GI: 171679417 Blast Desc: protein product [Podospora anserina] gi|170939334|emb|CAP64562.1| protein product [Podospora anserina]
  misc_feature (1)..(532): NCBI GI: 156039771 Blast Desc: SS1G_12022 [Sclerotinia sclerotiorum 1980] gi|154697759|gb|EDN97497.1| SS1G_12022 [Sclerotinia sclerotiorum 1980]
  misc_feature (1)..(530): NCBI GI: 212534680 Blast Desc: serine palmitoyl CoA transferase subunit LcbA [Penicillium marneffei ATCC 18224] gi|210069895|gb|EEA23985.1| serine palmitoyl CoA transferase subunit LcbA [Penicillium ATCC
  misc_feature (3)..(529): SWISSPROT Homolog: EC 2.3.1.50 Serine C-palmitoyltransferase
MDLNEAQAYVGTWVQRVFEAFQKVPGSAVLIRYIQSSYQNDPIRSAIELVLVIFFVRYLLSPPYPTHGSNYIKLREDEIDELVRDWEPEPLVPAQTPLEQHEADRLPVIVGPTGPRVKLQTGKTVVNLASYNFYNFNASESIREKAIQTLRTYGVGPCGPPQFYGTQDVHMHTEADIASFLGTQASIVYAHAFSTVTSVIPSFCKRGDVIVADAAVNYSIRKGLEASRSSIRWYRHNDMADLERVMARVVQEQAHKKILTRRFIVTEGLFEMTGDCSDLPKLVSIPRTTLLRRHANNSASLQIDLKEKYKFRLALDETNSFGVLGRNGRGLTEAQNVDSEAVDMIIGSLAGPLCAAGGFCAGSTDVVRHQRINALAYTYSAALPAMSAVTASETLNVLQCNPDILIQCRENIRAMRAQLDPRSDWVTCTSDPENPVMILVFKPDVIVTRALSIEDQERLFLDCVEESLNNGVLITRLKTMPLISSLGPKDADVNIQPALKVCITSGLSKKEIEKAGVTIRHAITKVMTRKTNRPSSAS

SEQ ID NO: 22276 - DNA, 2091 bp, Muscodor strobelii; identical to SEQ ID NO: 22273
  misc_feature: SGI EST ID NO. CUFF.52367.0
  misc_feature: Variant of the nucleotide sequence at SEQ ID NO 22274

SEQ ID NO: 22277 - DNA, 1173 bp, Muscodor strobelii
  misc_feature: SGI cDNA ID NO. 567561
  misc_feature: Encodes the peptide sequence at SEQ ID NO 22278
atgccacctcacgaaggtctagttcaccaggaggaatacgactggcgggacagcaacgtggaattcattggcaccgagatcgaccacaaggtcaaatacaactcagcagcagcagaaccggcatggcagggtgttggcgaagcgcccgggcttaaagtttggcgcatagagagcttcgaggttgttccctggccagaatcgagctacggcgacttccatgaaggagatagttacatcgtcctacactcttacaaggttggtagcaagggcggccaggaacggctcgcccacgacatcttcttctggctaggcagaaagactacgcaagatgaagctggcacggcggcttacaagacggtcgaacttgatgagttcctccatggcatagccacacagcaccgcgaactccaaacggaagcctctgatgagtttgtggccttgttctcacaaattcgcatcctgtcaggtggcgtgcggtcaggtttcacacacgtgcagacggaagagcccgaagagaagatgacgttgttgcgtatctttaagcacccatcagctaagaaagccgactccatcatggtccatgaagtggagccgacgtggaagagcctggacgagaacgatgtgtttattctggaccgcaacgacaagatttttgtgtggcagggcaagaactgcagtccgatggagaaggccaaggcggcacaggtggtccacgacatgacgattgcaaagcacgtcgacgtcgaagtactctcccagacggaatcgcgctctcggaccgtggtcaacatgctggatggtgaagaggcgcaggaacctttccaatgtcgtcgacctgttagatctcaagctgagcggcggccacgcaagttatggcgcctctctgatgcttctggggagctcgaattctccttgattaaggagggttcgggcatgagcgaagaagacttggacagtaacgacgtgttcctcttggatacgggcaatagcatttgggtatggatcggctcacaagcgagtaagactgagaggactacatggctcaaagtagtagaaagatattgtaaagttgcagacggacaagagagcaacggggaaacgtacctgtcaccaattgccaaaattgccgaaggtgctgagagtccggcgtttgttaaggctctggaggcatag

SEQ ID NO: 22278 - protein, 390 aa, Muscodor strobelii
  misc_feature: SGI Peptide ID NO. 567561
  misc_feature (58)..(145): Pfam Id: PF00626 Pfam Desc: Gelsolin repeat
  misc_feature (189)..(262): Pfam Id: PF00626 Pfam Desc: Gelsolin repeat
  misc_feature (303)..(385): Pfam Id: PF00626 Pfam Desc: Gelsolin repeat
  misc_feature (189)..(236): Pfam Id: PF00626 Pfam Desc: Gelsolin repeat
  misc_feature (313)..(345): Pfam Id: PF00626 Pfam Desc: Gelsolin repeat
  misc_feature (1)..(389): NCBI GI: 115386668 Blast Desc: conserved [Aspergillus terreus NIH2624] gi|114190873|gb|EAU32573.1| conserved [Aspergillus terreus NIH2624]
  misc_feature (1)..(390): NCBI GI: 145251792 Blast Desc: An16g00960 [Aspergillus niger] gi|134082946|emb|CAK46782.1| protein product [Aspergillus niger]
  misc_feature (1)..(388): NCBI GI: 255945477 Blast Desc: Pc20g10120 [Penicillium chrysogenum Wisconsin 54-1255] gi|211588241|emb|CAP86341.1| Pc20g10120 [Penicillium chrysogenum Wisconsin 54-1255]
  misc_feature (1)..(390): NCBI GI: 238504658 Blast Desc: actin-binding protein Fragmin, [Aspergillus flavus NRRL3357] gi|220691031|gb|EED47380.1| actin-binding protein Fragmin, [Aspergillus flavus NRRL3357]
  misc_feature (1)..(389): NCBI GI: 169764155 Blast Desc: [Aspergillus oryzae RIB40] gi|83764403|dbj|BAE54547.1| protein product [Aspergillus oryzae]
  misc_feature (1)..(388): NCBI GI: 70997742 Blast Desc: actin-binding protein Fragmin [Aspergillus fumigatus Af293] gi|66851242|gb|EAL91568.1| actin-binding protein Fragmin, [Aspergillus fumigatus Af293]
  misc_feature (1)..(390): NCBI GI: 145607814 Blast Desc: MGG_10059 [Magnaporthe grisea 70-15] gi|145015308|gb|EDJ99844.1| MGG_10059 [Magnaporthe grisea 70-15]
  misc_feature (1)..(389): NCBI GI: 67521698 Blast Desc: AN1306.2 [Aspergillus nidulans FGSC A4] gi|40746333|gb|EAA65489.1| AN1306.2 [Aspergillus nidulans FGSC A4] gi|259488363|tpe|CBF87748.1| TPA: conserved similar to FGSC
  misc_feature (1)..(352): NCBI GI: 46127107 Blast Desc: FG07931.1 [Gibberella zeae PH-1]
  misc_feature (1)..(352): NCBI GI: 256721857 Blast Desc: [Nectria haematococca mpVI 77-13-4]
MPPHEGLVHQEEYDWRDSNVEFIGTEIDHKVKYNSAAAEPAWQGVGEAPGLKVWRIESFEVVPWPESSYGDFHEGDSYIVLHSYKVGSKGGQERLAHDIFFWLGRKTTQDEAGTAAYKTVELDEFLHGIATQHRELQTEASDEFVALFSQIRILSGGVRSGFTHVQTEEPEEKMTLLRIFKHPSAKKADSIMVHEVEPTWKSLDENDVFILDRNDKIFVWQGKNCSPMEKAKAAQVVHDMTIAKHVDVEVLSQTESRSRTVVNMLDGEEAQEPFQCRRPVRSQAERRPRKLWRLSDASGELEFSLIKEGSGMSEEDLDSNDVFLLDTGNSIWVWIGSQASKTERTTWLKVVERYCKVADGQESNGETYLSPIAKIAEGAESPAFVKALEA

SEQ ID NO: 22279 - DNA, 1452 bp, Muscodor strobelii
  misc_feature: SGI EST ID NO. CUFF.52360.0
  misc_feature: Variant of the nucleotide sequence at SEQ ID NO 22277
cgaattgcacgtcgactacccaactcttcacttgctgctatttcttaatgcaagtattacaaaacataacgaattccagagaagcaagagtaggggccgcactcgcctggatccgcgaactcgcccgttgtcaagcaaatgccacctcacgaaggtctagttcaccaggaggaatacgactggcgggacagcaacgtggaattcattggcaccgagatcgaccacaaggtcaaatacaactcagcagcagcagaaccggcatggcagggtgttggcgaagcgcccgggcttaaagtttggcgcatagagagcttcgaggttgttccctggccagaatcgagctacggcgacttccatgaaggagatagttacatcgtcctacactcttacaaggttggtagcaagggcggccaggaacggctcgcccacgacatcttcttctggctaggcagaaagactacgcaagatgaagctggcacggcggcttacaagacggtcgaacttgatgagttcctccatggcatagccacacagcaccgcgaactccaaacggaagcctctgatgagtttgtggccttgttctcacaaattcgcatcctgtcaggtggcgtgcggtcaggtttcacacacgtgcagacggaagagcccgaagagaagatgacgttgttgcgtatctttaagcacccatcagctaagaaagccgactccatcatggtccatgaagtggagccgacgtggaagagcctggacgagaacgatgtgtttattctggaccgcaacgacaagatttttgtgtggcagggcaagaactgcagtccgatggagaaggccaaggcggcacaggtggtccacgacatgacgattgcaaagcacgtcgacgtcgaagtactctcccagacggaatcgcgctctcggaccgtggtcaacatgctggatggtgaagaggcgcaggaacctttccaatgtcgtcgacctgttagatctcaagctgagcggcggccacgcaagttatggcgcctctctgatgcttctggggagctcgaattctccttgattaaggagggttcgggcatgagcgaagaagacttggacagtaacgacgtgttcctcttggatacgggcaatagcatttgggtatggatcggctcacaagcgagtaagactgagaggactacatggctcaaagtagtagaaagatattgtaaagttgcagacggacaagagagcaacggggaaacgtacctgtcaccaattgccaaaattgccgaaggtgctgagagtccggcgtttgttaaggctctggaggcatagaattcggtcgacttgtgtcacaaagtggcccacctattcgggtaaccacctaaggtaatgtagtacgctcagaaaagcatgatacaggggtttaggtatatatatatataggcgttatccgctagtttattcggaagttag

SEQ ID NO: 22280 - DNA, 414 bp, Muscodor strobelii
  misc_feature: SGI cDNA ID NO. 567562
  misc_feature: Elevated expression when VOC is produced
  misc_feature: Encodes the peptide sequence at SEQ ID NO 22281
atgtcatctaaaatggcatcctgtatcttctgcaaaatcatcaagggtgagatcccttgcttcaagctcttcgagagtgacaagacttttgcctttctcgatatcgggcccatatcaaagggccatgctctcgtgatccctaagttccacggcgctaagctcactgatattccggatgagcacttgtccgagattctgcccgtagctaagaagctcgttaacgcgaccggagctgaaaactacaacattcttcagaacaacggccggattgcccatcaggttgttgaccatgttcacttccatatgatccccaagcccaacgaaaccgaaggactgggagtcggttggccgacgaagcccgcagacatggaggtgctgaaggcatattttgaggaggtcaagtctaagatgtga

SEQ ID NO: 22281 - protein, 137 aa, Muscodor strobelii
  misc_feature: SGI Peptide ID NO. 567562
  misc_feature (15)..(108): Pfam Id: PF01230 Pfam Desc: HIT domain
  misc_feature (3)..(137): NCBI GI: 261358891 Blast Desc: hit family protein [Verticillium albo-atrum VaMs.102]
  misc_feature (1)..(137): NCBI GI: 145236725 Blast Desc: An06g01890 [Aspergillus niger] gi|134075471|emb|CAK48032.1| protein product [Aspergillus niger]
  misc_feature (5)..(137): NCBI GI: 259481750 Blast Desc: TPA: HIT domain protein (AFU_orthologue; AFUA_6G12680) [Aspergillus nidulans FGSC A4]
  misc_feature (3)..(137): NCBI GI: 256721609 Blast Desc: NECHADRAFT_99860 [Nectria haematococca mpVI 77-13-4]
  misc_feature (1)..(137): NCBI GI: 68160373 Blast Desc: HIT family protein 1 [Chaetomium globosum]
  misc_feature (1)..(137): NCBI GI: 255946874 Blast Desc: Pc22g01600 [Penicillium chrysogenum Wisconsin 54-1255] gi|211591221|emb|CAP97448.1| Pc22g01600 [Penicillium chrysogenum Wisconsin 54-1255]
  misc_feature (7)..(137): NCBI GI: 212534312 Blast Desc: HIT domain protein [Penicillium marneffei ATCC 18224] gi|210069711|gb|EEA23801.1| HIT domain protein [Penicillium marneffei ATCC 18224]
  misc_feature (1)..(137): NCBI GI: 145610837 Blast Desc: MGG_00872 [Magnaporthe grisea 70-15] gi|145018183|gb|EDK02462.1| MGG_00872 [Magnaporthe grisea 70-15]
  misc_feature (1)..(137): NCBI GI: 171679427 Blast Desc: protein product [Podospora anserina] gi|170939339|emb|CAP64567.1| protein product [Podospora anserina]
  misc_feature (7)..(137): NCBI GI: 242789858 Blast Desc: HIT domain protein [Talaromyces stipitatus ATCC 10500] gi|218718036|gb|EED17456.1| HIT domain protein [Talaromyces stipitatus ATCC 10500]
  misc_feature (12)..(105): SWISSPROT Homolog: EC 3.6.1.29 Bis(5'-adenosyl)-triphosphatase
  misc_feature: Useful for introducing or modulating the production of volatile compounds
MSSKMASCIFCKIIKGEIPCFKLFESDKTFAFLDIGPISKGHALVIPKFHGAKLTDIPDEHLSEILPVAKKLVNATGAENYNILQNNGRIAHQVVDHVHFHMIPKPNETEGLGVGWPTKPADMEVLKAYFEEVKSKM

SEQ ID NO: 22282 - DNA, 1363 bp, Muscodor strobelii
  misc_feature: SGI EST ID NO. CUFF.52535.0
  misc_feature: Variant of the nucleotide sequence at SEQ ID NO 22280
atcactgaggtttacttggatgtcctgtaacaaatcggacatttgcgctcgctctctttattcttcgctcatagttcccgctctgcacagatgtcatctaaaatggcatcctgtatcttctgcaaaatcatcaagggtaagatcccttgcttcaagctcttcgagagtgacaagacttttgcctttctcgatatcgggcccatatcaaagggccatgctctcgtgatccctaagttccacggcgctaagctcactgatattccggatgagcacttgtccgagattctgcccgtagctaagaagctcgttaacgcgaccggagctgaaaactacaacattcttcagaacaacggccggattgcccatcaggttgttgaccatgttcacttccatatgatccccaagcccaacgaaaccgaaggactgggagtcggttggccgacgaagcccgcagacatggaggtgctgaaggcatattttgaggaggtcaagtctaagatgtgaacgtggtcttacgcgctaaataaggctctgccacgctgtactatgcattacactcctatgccgagctgaggctattgtcgcatagagaaaatgtatatataccagagtgccatcaaaatctcgcgcctacgattgacttttctctcaatactttcaccttctagccattctaacaagttgaaatctaatcaacatcatcatcagcggttgccgctgcgggtggagccccgttcgtgggcgttgctgatacattttctgttttcgccggtgtctcccacgacgaataatagtctactttacctccgggtctgagcatacccactctgtcgtacagcgatctcgaccgaatgtaagggtcgagttgccagtactgctccttaagtttcttggcaatggaggatcgctccacgttgatgcttgtgcgttttgcggcgtccatttcgttgagccactctatcgtcttactttcatattcctcgtagatggcctcgcgctccttcaggagtctatctcgagtctccgtgtctttcatcttgtcattttcgccggcccgaggctcgacgtatcggtagctccaacccgatgtgccctccatttctgtgggaagcttgtcaacgtcgatgaatgcctctagatcctttatgttgttggtgaagttgactttattcgccacgactgggtctaaccatccacgaataatcttccatatacctggtcggattgttagttggctttagtaaacttggtatgacagtgcttcacttgccttgaaacacccatggtgccttgtgcacaagcacaatgcctaagctctcgggatagttggcctcgaagcatcgaatcataaacttcactggag

SEQ ID NO: 22283 - DNA, 1908 bp, Muscodor strobelii
  misc_feature: SGI cDNA ID NO. 567563
  misc_feature: Encodes the peptide sequence at SEQ ID NO 22284
atgatcagctcccgccgcctgtgcagctcatcaagaccccttaacccgttgacatatccgtcgcagttgactcctcgtttcgcttctgtctctggcattaaccccttattgcgcgccgtccttcctccccgcgccagtcacgcgacctgcattccccaacggccacggctcttacacactgctccgcgcgacgcatcatctacgcccgtcagcgagatctcttcttttgctctccccgcgcctcggctgcattctacctcaccgttcgtccctattccggcgatctatctccatctctatccgcctagagttgtgtgcgatcaggaacaccttcgcagccagagcatatctgcactatttttagtcccacttgtggtcactgctgtcatcctctacgaatttggcctcgtcagctccccgcccctttcttcaagccagagccaggacctcgaattccaattgggggaagacagtgacaaaatggcagcgcttccaggtagaccggggaatttgaacccggaagaggaagagaagctgcgcaaattctgggagctgttcctgcaagtctgtggggtctatgaggaagacggtgccgacaatgacggccctacccctcttgcgtcccagggcaaacaggctacggcgggctcggaaaagcccaagaagaagcggctcggtctctttaagaaaaagaagggcaaggagaatggtgggtccgagaaagatgctgtcgacacccccaaatccaacgacccagaagataaatggggcgaaagcaaggcctatcacgagactttggccaagcactcgcctgaagccatccgcgccaccatctggtccatggtgaagcacgataaccccgatgcattgctgttacgcttcttgcgggcccgtaaatgggacttacaaagggctcttgtcatgatgatctcgtctatgaattggagactgtctgagatgcacgttgatgatgaagtcatggtgaagggagaggaacatcaactatctgaggaaaaaagcagtgacgcagataccaagaaacacgcaagcgactttttggctcagatgcgtctcggcaagagttataattacggcatcgataagactggacggcctatctgcatctgcagggctcgactgcacaaagccggcgagcactccgagcaatctctcgagcgctacactgtatatctgatcgagacaacgcgattccttttggaacctccaactgacactggctgtgtcatttttgatttgactggattctcgctagcaaacatggactatactccagtgaagtttatgattcgatgcttcgaggccaactatcccgagagcttaggcattgtgcttgtgcacaaggcaccatgggtgtttcaaggtatatggaagattattcgtggatggttagacccagtcgtggcgaataaagtcaacttcaccaacaacataaaggatctagaggcattcatcgacgttgacaagcttcccacagaaatggagggcacatcgggttggagctaccgatacgtcgagcctcgggccggcgaaaatgacaagatgaaagacacggagactcgagatagactcctgaaggagcgcgaggccatctacgaggaatatgaaagtaagacgatagagtggctcaacgaaatggacgccgcaaaacgcacaagcatcaacgtggagcgatcctccattgccaagaaacttaaggagcagtactggcaactcgacccttacattcggtcgagatcgctgtacgacagagtgggtatgctcagacccggaggtaaagtagactattattcgtcgtgggagacaccggcgaaaacagaaaatgtatcagcaacgcccacgaacggggctccacccgcagcggcaaccgctgatgatgatgttgattag

SEQ ID NO: 22284 - protein, 635 aa, Muscodor strobelii
  misc_feature: SGI Peptide ID NO. 567563
  misc_feature (360)..(530): Pfam Id: PF00650 Pfam Desc: CRAL/TRIO domain
  misc_feature (245)..(325): Pfam Id: PF03765 Pfam Desc: CRAL/TRIO, N-terminus
  misc_feature (163)..(632): NCBI GI: 261358892 Blast Desc: phosphatidylinositol transfer protein CSR1 [Verticillium albo-atrum VaMs.102]
  misc_feature (165)..(635): NCBI GI: 46127145 Blast Desc: FG07950.1 [Gibberella zeae PH-1]
  misc_feature (143)..(604): NCBI GI: 256721639 Blast Desc: NECHADRAFT_59675 [Nectria haematococca mpVI 77-13-4]
  misc_feature (165)..(603): NCBI GI: 116203721 Blast Desc: CHGG_09744 [Chaetomium globosum CBS 148.51] gi|88175872|gb|EAQ83340.1| CHGG_09744 [Chaetomium globosum CBS 148.51]
  misc_feature (165)..(603): NCBI GI: 164424673 Blast Desc: NCU06877 [Neurospora crassa OR74A] gi|157070613|gb|EAA29988.2| [Neurospora crassa OR74A]
  misc_feature (164)..(635): NCBI GI: 156042494 Blast Desc: SS1G_11044 [Sclerotinia sclerotiorum 1980] gi|154695431|gb|EDN95169.1| SS1G_11044 [Sclerotinia sclerotiorum 1980]
  misc_feature (165)..(605): NCBI GI: 119472756 Blast Desc: CRAL/TRIO domain protein [Neosartorya fischeri NRRL 181] gi|119406563|gb|EAW16514.1| CRAL/TRIO domain protein [Neosartorya fischeri NRRL 181]
  misc_feature (165)..(603): NCBI GI: 39973965 Blast Desc: MGG_00871 [Magnaporthe grisea 70-15] gi|145018184|gb|EDK02463.1| MGG_00871 [Magnaporthe grisea 70-15]
  misc_feature (165)..(605): NCBI GI: 70992597 Blast Desc: CRAL/TRIO domain protein [Aspergillus fumigatus Af293] gi|66848780|gb|EAL89109.1| CRAL/TRIO domain protein [Aspergillus fumigatus Af293] gi|159124718|gb|EDP49836.1| CRAL/TRIO domain
  misc_feature (109)..(603): NCBI GI: 169617722 Blast Desc: SNOG_12042 [Phaeosphaeria nodorum SN15] gi|160703468|gb|EAT80454.2| SNOG_12042 [Phaeosphaeria nodorum SN15]
MISSRRLCSSSRPLNPLTYPSQLTPRFASVSGINPLLRAVLPPRASHATCIPQRPRLLHTAPRDASSTPVSEISSFALPAPRLHSTSPFVPIPAIYLHLYPPRVVCDQEHLRSQSISALFLVPLVVTAVILYEFGLVSSPPLSSSQSQDLEFQLGEDSDKMAALPGRPGNLNPEEEEKLRKFWELFLQVCGVYEEDGADNDGPTPLASQGKQATAGSEKPKKKRLGLFKKKKGKENGGSEKDAVDTPKSNDPEDKWGESKAYHETLAKHSPEAIRATIWSMVKHDNPDALLLRFLRARKWDLQRALVMMISSMNWRLSEMHVDDEVMVKGEEHQLSEEKSSDADTKKHASDFLAQMRLGKSYNYGIDKTGRPICICRARLHKAGEHSEQSLERYTVYLIETTRFLLEPPTDTGCVIFDLTGFSLANMDYTPVKFMIRCFEANYPESLGIVLVHKAPWVFQGIWKIIRGWLDPVVANKVNFTNNIKDLEAFIDVDKLPTEMEGTSGWSYRYVEPRAGENDKMKDTETRDRLLKEREAIYEEYESKTIEWLNEMDAAKRTSINVERSSIAKKLKEQYWQLDPYIRSRSLYDRVGMLRPGGKVDYYSSWETPAKTENVSATPTNGAPPAAATADDDVD

SEQ ID NO: 22285 - DNA, 2712 bp, Muscodor strobelii
  misc_feature: SGI EST ID NO. CUFF.52536.2
  misc_feature: Variant of the nucleotide sequence at SEQ ID NO 22283
cattatccccctcatgactctacactccttgctctagccttctacctcttcattcttcctgatcaggagcagccgcatctccaactcttaataatgccgagcgctactgcataaatgtttgcttgaagtaaacccgccttatactgcgaactgtttcattgttgacgtgcgggctctggtcgtcgcttttttttgtcattgcttttgatctctcacggctcgcccggatattacattttgcgaacagcactccatgatcagctcccgccgcctgtgcagctcatcaagaccccttaacccgttgacatatccgtcgcagttgactcctcgtttcgcttctgtctctggcattaaccccttattgcgcgccgtccttcctccccgcgccagtcacgcgacctgcattccccaacggccacggctcttacacactgctccgcgcgacgcatcatctacgcccgtcagcgagatctcttcttttgctctccccgcgcctcggctgcattctacctcaccgttcgtccctattccggcgatctatctccatctctatccgcctagagttgtgtgcgatcaggaacaccttcgcagccagagcatatctgcactatttttagtcccacttgtggtcactgctgtcatcctctacgaatttggcctcgtcagctccccgcccctttcttcaagccagagccaggacctcgaattccaattgggggaagacagtgacaaaatggcagcgcttccaggtagaccggggaatttgaacccggaagaggaagagaagctgcgcaaattctgggagctgttcctgcaagtctgtggggtctatgaggaagacggtgccgacaatgacggccctacccctcttgcgtcccagggcaaacaggctacggcgggctcggaaaagcccaagaagaagcggctcggtctctttaagaaaaagaagggcaaggagaatggtgggtccgagaaagatgctgtcgacacccccaaatccaacgacccagaagataaatggggcgaaagcaaggcctatcacgagactttggccaagcactcgcctgaagccatccgcgccaccatctggtccatggtgaagcacgataaccccgatgcattgctgttacgcttcttgcgggcccgtaaatgggacttacaaagggctcttgtcatgatgatctcgtctatgaattggagactgtctgagatgcacgttgatgatgaagtcatggtgaagggagaggaacatcaactatctgaggaaaaaagcagtgacgcagataccaagaaacacgcaagcgactttttggctcagatgcgtctcggcaagagttataattacggcatcgataagactggacggcctatctgcatctgcagggctcgactgcacaaagccggcgagcactccgagcaatctctcgagcgctacactgtatatctgatcgagacaacgcgattccttttggaacctccaactgacactggctgtgtcatttttgatttgactggattctcgctagcaaacatggactatactccagtgaagtttatgattcgatgcttcgaggccaactatcccgagagcttaggcattgtgcttgtgcacaaggcaccatgggtgtttcaaggtatatggaagattattcgtggatggttagacccagtcgtggcgaataaagtcaacttcaccaacaacataaaggatctagaggcattcatcgacgttgacaagcttcccacagaaatggagggcacatcgggttggagctaccgatacgtcgagcctcgggccggcgaaaatgacaagatgaaagacacggagactcgagatagactcctgaaggagcgcgaggccatctacgaggaatatgaaagtaagacgatagagtggctcaacgaaatggacgccgcaaaacgcacaagcatcaacgtggagcgatcctccattgccaagaaacttaaggagcagtactggcaactcgacccttacattcggtcgagatcgctgtacgacagagtgggtatgctcagacccggaggtaaagtagactattattcgtcgtgggagacaccggcgaaaacagaaaatgtatcagcaacgcccacgaacggggctccacccgcagcggcaaccgctgatgatgatgttgattagatttcaacttgttagaatggctagaaggtgaaagtattgagagaaaagtcaatcgtaggcgcgagattttgatggcactctggtatatatacattttctctatgcgacaatagcctcagctcggcataggagtgtaatgcatagtacagcgtggcagagccttatttagcgcgtaagaccacgttcacatcttagacttgacctcctcaaaatatgccttcagcacctccatgtctgcgggcttcgtcggccaaccgactcccagtccttcggtttcgttgggcttggggatctgtagggtacatcagtgagtcgagctgtctacgcagtctggaaagggggttgaactctcgtctcttaccatatggaagtgaacctaatccgtattaatatgctgacaacgtcaatcttgagttggaagtaggggacatacatggtcaacaacctgatgggcaatccggccgttgttctgaagaatgttgtagttttcagctccggtcgcgttaacgagcttcttagctacgggctatgcaaatcctatcagttgtttc

SEQ ID NO: 22286 - DNA, 627 bp, Muscodor strobelii
  misc_feature: SGI cDNA ID NO. 567564
  misc_feature: Encodes the peptide sequence at SEQ ID NO 22287
atggcgacgagcgaggccccggacagcgggcgacggccgcgctcgacatcgcgttcccgccccaccacgcctttgcgcccctcgtcgcgctcctcgttccgcgattctgcccaacgaagtgccgacggacatgaccctttcccactcaatgccttcgagcccgcctttgcagagctctccgatgccgtcgccgatctcgaagccaacatgatgcacttccagctcatgcacgagagtctagcccgcttcggcgagagcttcgccagcttcctctacggcttgaacatgaacgccttttgcgtcgatttccccgaagggcccgtggccgagtcgtttcgtagagcgaaactcaacgagggggaccagcctgttcgatctagaagcacggaacgtggcgaaatagatggcgaaacgaccttcatgactaccgacatgtcttttgtcgagaacccaccggccgcctccgcttccaaaccaacccccaagagcttcgcagcctcggaagcccggcagtcacaggtgcccgctcctgcgcgcggcggcgcccagcccagaggccgcggcactaccggtcgtggtcgtacaagtggcctccagcgccctcgagctcgcggcctgacgagatga

SEQ ID NO: 22287 - protein, 208 aa, Muscodor strobelii
  misc_feature: SGI Peptide ID NO. 567564
  misc_feature (50)..(107): Pfam Id: PF08653 Pfam Desc: DASH complex subunit Dam1
  misc_feature (8)..(206): NCBI GI: 46127147 Blast Desc: FG07951.1 [Gibberella zeae PH-1]
  misc_feature (14)..(198): NCBI GI: 85092097 Blast Desc: NCU06878 [Neurospora crassa OR74A] gi|28920628|gb|EAA29989.1| [Neurospora crassa OR74A]
  misc_feature (8)..(206): NCBI GI: 261203671 Blast Desc: DASH complex component Dam1 [Ajellomyces dermatitidis SLH14081] gi|239586834|gb|EEQ69477.1| DASH complex component Dam1 [Ajellomyces dermatitidis SLH14081] gi|239608132|gb|EEQ85119.1|
  misc_feature (8)..(206): NCBI GI: 225560892 Blast Desc: conserved [Ajellomyces capsulatus G186AR]
  misc_feature (28)..(205): NCBI GI: 145610831 Blast Desc: MGG_00874 [Magnaporthe grisea 70-15] gi|145018180|gb|EDK02459.1| MGG_00874 [Magnaporthe grisea 70-15]
  misc_feature (6)..(208): NCBI GI: 212534316 Blast Desc: DASH complex component Dam1, [Penicillium marneffei ATCC 18224] gi|210069713|gb|EEA23803.1| DASH complex component Dam1, [Penicillium marneffei ATCC 18224]
  misc_feature (9)..(206): NCBI GI: 119194657 Blast Desc: CIMG_01703 [Coccidioides immitis RS]
  misc_feature (8)..(203): NCBI GI: 226278406 Blast Desc: PAAG_05021 [Paracoccidioides brasiliensis Pb01]
  misc_feature (8)..(206): NCBI GI: 226293372 Blast Desc: PADG_04871 [Paracoccidioides brasiliensis Pb18]
  misc_feature (9)..(206): NCBI GI: 240105215 Blast Desc: DASH complex subunit DAM1, [Coccidioides posadasii C735 delta SOWgp]
MATSEAPDSGRRPRSTSRSRPTTPLRPSSRSSFRDSAQRSADGHDPFPLNAFEPAFAELSDAVADLEANMMHFQLMHESLARFGESFASFLYGLNMNAFCVDFPEGPVAESFRRAKLNEGDQPVRSRSTERGEIDGETTFMTTDMSFVENPPAASASKPTPKSFAASEARQSQVPAPARGGAQPRGRGTTGRGRTSGLQRPRARGLTR

SEQ ID NO: 22288 - DNA, 2243 bp, Muscodor strobelii
  misc_feature: SGI EST ID NO. CUFF.52424.1
  misc_feature: Variant of the nucleotide sequence at SEQ ID NO 22286
gtgacgcaatgcgaagggacatgcaactatataatgctgcgggcacgatgatgaatacctaatcatccggcaacttagtagaattaatatgagagtatctgattatacacatacctagattgctttggggtttgacggacaatatgcaaagaatgtgttgctagtgtgatcaaatataattcaagatgtagtggccttagtaccttaattccatccatgaagacaccccgcagccagagaacctgtaggtccccctgtgcccccgcatgaattggaggaagcgacccgataaattcgagcgattgtttgacttgggacgggagaggtaaaatactagcaaaggcttcttcgttgttacaacgaatatagccaatcgagtcccgcaagtcgctctcttcctacatcgaccttttcgacacaccagtcaatcttttcaaacttgcctgctggctctgcgcattttaccacatggcgacgagcgaggccccggacagcgggcgacggccgcgctcgacatcgcgttcccgccccaccacgcctttgcgcccctcgtcgcgctcctcgttccgcgattctgcccaacgaagtgccgacggacatgaccctttcccactcaatgccttcgagcccgcctttgcagagctctccgatgccgtcgccgatctcgaagccaacatgatgcacttccagctcatgcacgagagtctagcccgcttcggcgagagcttcgccagcttcctctacggcttgaacatgaacgccttttgcgtcgatttccccgaagggcccgtggccgagtcgtttcgtagagcgaaactcaacgagggggaccagcctgttcgatctagaagcacggaacgtggcgaaatagatggcgaaacgaccttcatgtaaatcgttgaatcctccccacaatcagctcaggctatctcatcctctaatcgtctgtctaggactaccgacatgtcttttgtcgagaacccaccggccgcctccgcttccaaaccaacccccaagagcttcgcagcctcggaagcccggcagtcacaggtgcccgctcctgcgcgcggcggcgcccagcccagaggccgcggcactaccggtcgtggtcgtacaagtggcctccagcgccctcgagctcgcggcctgacgagatgaaccttgctctattctctctgttctgccccgccgatcaacaaagataagccgcatgcacctgccaatccattgcaatccactgcaatccactgcttctcccggatcctgaacacgcctcaaatgcgctgcggtccggccgggacgtccatcgagccatgcggtctggtgtgcaatgggataatcgctgggcagaagtgatgcggcaacgcgtgtagtatgatgcagtcttcagaagtcgttcatgtagccatctcgatttcgttctcggcagaggaatcctgttgcggcccgctattgtcggtgcccaggccgacggctgcttcggcctccttttgcgagtagggtgcttcgcgcagtgccttgaccctgtgtaaaatgtatgcgttagtcaattgttggccggtatgcgtccgagcccagtctcgaataaatgcggtgtgcgcagtatgctgtaccttctcttgtgcggttttcccttgcggtggaagatgagattgacctcggtgtcgtaccactttgcgcattcgacacagtaccatctgcccaggcctggaaggtcctctttcgacttggtgtcctggtactgagtcaggtgcttgggcgagaggagatcggccttgatctggtcgagatctcttgtcttgcgacgcgttttggtgagcgtcttcttgttggtgactcccatgctggatcttgcgtgccccgccttgtaggtagagcagacgagtcgatctagagcgaaagcgacgtgtttactgacattcgaatgctaccttagctgatgagcctgaagtgctgcggctgtcaaaagaaattcctttcgagatcggccgccaaccacaaattttagtgggcttgttttttcacgtggctgtggtgggccgcggggtcatgtggctgaggttacaagctggagcagtgagcatgaagccgcctaggtactaggtagacaaagccaacgaggcgaaggttctaagcatgttacgtcgcccattatttgtttcgacatgtcccttgcgaaagggagttgtgcccaaattgcatctagatggtagcaatgatatggctcagaaagcattgccatg

SEQ ID NO: 22289 - DNA, 357 bp, Muscodor strobelii
  misc_feature: SGI cDNA ID NO. 567565
  misc_feature: Encodes the peptide sequence at SEQ ID NO 22290
atgggagtcaccaacaagaagacgctcaccaaaacgcgtcgcaagacaagagatctcgaccagatcaaggccgatctcctctcgcccaagcacctgactcagtaccaggacaccaagtcgaaagaggaccttccaggcctgggcagatggtactgtgtcgaatgcgcaaagtggtacgacaccgaggtcaatctcatcttccaccgcaagggaaaaccgcacaagagaagggtcaaggcactgcgcgaagcaccctactcgcaaaaggaggccgaagcagccgtcggcctgggcaccgacaatagcgggccgcaacaggattcctctgccgagaacgaaatcgagatggctacatga

SEQ ID NO: 22290 - protein, 118 aa, Muscodor strobelii
  misc_feature: SGI Peptide ID NO. 567565
  misc_feature (1)..(117): NCBI GI: 39942880 Blast Desc: MGG_03520 [Magnaporthe grisea 70-15] gi|145009919|gb|EDJ94575.1| MGG_03520 [Magnaporthe grisea 70-15]
  misc_feature (1)..(117): NCBI GI: 46127149 Blast Desc: FG07952.1 [Gibberella zeae PH-1]
  misc_feature (1)..(116): NCBI GI: 256721640 Blast Desc: [Nectria haematococca mpVI 77-13-4]
  misc_feature (1)..(113): NCBI GI: 119472873 Blast Desc: C2H2 finger domain protein, [Neosartorya fischeri NRRL 181] gi|119406584|gb|EAW16535.1| C2H2 finger domain protein, [Neosartorya fischeri NRRL 181]
  misc_feature (1)..(114): NCBI GI: 225560866 Blast Desc: conserved [Ajellomyces capsulatus G186AR] gi|240280585|gb|EER44089.1| C2H2 finger domain-containing protein [Ajellomyces capsulatus H143]
  misc_feature (1)..(101): NCBI GI: 154277934 Blast Desc: conserved [Ajellomyces capsulatus NAm1] gi|150413382|gb|EDN08765.1| conserved [Ajellomyces capsulatus NAm1]
  misc_feature (1)..(116): NCBI GI: 85093912 Blast Desc: NCU02364 [Neurospora crassa OR74A] gi|28921239|gb|EAA30549.1| conserved [Neurospora crassa OR74A]
  misc_feature (1)..(108): NCBI GI: 115389994 Blast Desc: conserved [Aspergillus terreus NIH2624] gi|114194898|gb|EAU36598.1| conserved [Aspergillus terreus NIH2624]
  misc_feature (1)..(101): NCBI GI: 261203727 Blast Desc: C2H2 finger domain-containing protein [Ajellomyces dermatitidis SLH14081] gi|239586862|gb|EEQ69505.1| C2H2 finger domain-containing protein [Ajellomyces dermatitidis SLH14081]
  misc_feature (1)..(117): NCBI GI: 189091874 Blast Desc: [Podospora anserina] gi|27803047|emb|CAD60750.1| protein product [Podospora anserina] gi|188219290|emb|CAP49270.1| protein product [Podospora anserina]
MGVTNKKTLTKTRRKTRDLDQIKADLLSPKHLTQYQDTKSKEDLPGLGRWYCVECAKWYDTEVNLIFHRKGKPHKRRVKALREAPYSQKEAEAAVGLGTDNSGPQQDSSAENEIEMAT

SEQ ID NO: 22291 - DNA, 2279 bp, Muscodor strobelii
  misc_feature: SGI EST ID NO. CUFF.52425.3
  misc_feature: Variant of the nucleotide sequence at SEQ ID NO 22289
catggcaatgctttctgagccatatcattgctaccatctagatgcaatttgggcacaactccctttcgcaagggacatgtcgaaacaaataatgggcgacgtaacatgcttagaaccttcgcctcgttggctttgtctacctagtacctaggcggcttcatgctcactgctccagcttgtaacctcagccacatgaccccgcggcccaccacagccacgtgaaaaaacaagcccactaaaatttgtggttggcggccgatctcgaaaggaatttcttttgacagccgcagcacttcaggctcatcagctaaggtagcattcgaatgtcagtaaacacgtcgctttcgctctagatcgactcgtctgctctacctacaaggcggggcacgcaagatccagcatgggagtcaccaacaagaagacgctcaccaaaacgcgtcgcaagacaagagatctcgaccagatcaaggccgatctcctctcgcccaagcacctgactcagtaccaggacaccaagtcgaaagaggaccttccaggcctgggcagatggtactgtgtcgaatgcgcaaagtggtacgacaccgaggtcaatctcatcttccaccgcaagggaaaaccgcacaagagaagggtcaaggcactgcgcgaagcaccctactcgcaaaaggaggccgaagcagccgtcggcctgggcaccgacaatagcgggccgcaacaggattcctctgccgagaacgaaatcgagatggctacatgaacgacttctgaagactgcatcatactacacgcgttgccgcatcacttctgcccagcgattatcccattgcacaccagaccgcatggctcgatggacgtcccggccggaccgcagcgcatttgaggcgtgttcaggatccgggagaagcagtggattgcagtggattgcaatggattggcaggtgcatgcggcttatctttgttgatcggcggggcagaacagagagaatagagcaaggttcatctcgtcaggccgcgagctcgagggcgctggaggccacttgtacgaccacgaccggtagtgccgcggcctctgggctgggcgccgccgcgcgcaggagcgggcacctgtgactgccgggcttccgaggctgcgaagctcttgggggttggtttggaagcggaggcggccggtgggttctcgacaaaagacatgtcggtagtcctagacagacgattagaggatgagatagcctgagctgattgtggggaggattcaacgatttacatgaaggtcgtttcgccatctatttcgccacgttccgtgcttctagatcgaactgtgaggtgtctggtgttagtgcagggcccacgagacaatgttcattttgccgtgactgcatgtcgtaccaggctggtccccctcgttgagtttcgctctacgaaacgactcggccacgggcccctttgcgcgtggggttagctgctggacgagcagggagatgagcattaggctttacttcggggaaatcgacgcaaaaggcgttcatgttcaagccgtagaggaagctggcgaagctctcgccgaagcgggctagactctcgtgcatgagctggaagtgcatcatgttggcttcgagatcggcgacggcatcggagagctctgcaaaggcgggctcgaaggcattgagtgggaaagggtcatgtccgtcggcacttcgttgggcagaatcgcggaacgaggagcgcgacgaggggcgcaaaggcgtggtggggcgggaacgcgatgtcgagcgcggccgtcgcccgctgtccggggcctcgctcgtcgccatgtggtaaaatgcgcagagccagcaggcaagtttgaaaagattgactggtgtgtcgaaaaggtcgatgtaggaagagagcgacttgcgggactcgattggctatattcgttgtaacaacgaagaagcctttgctagtattttacctctcccgtcccaagtcaaacaatcgctcgaatttatcgggtcgcttcctccaattcatgcgggggcacagggggacctacaggttctctggctgcggggtgtcttcatggatggaattaaggtactaaggccactacatcttgaattatatttgatcacactagcaacacattctttgcatattgtccgtcaaaccccaaagcaatctaggtatgtgtataatcagatactctcatattaattctactaagttgccggatgattaggtattcatcatcgtgcccgcagcattatatagttgcatgtcccttcgcattgcgtcac

SEQ ID NO: 22292 - DNA, 2358 bp, Muscodor strobelii
  misc_feature: SGI cDNA ID NO. 567566
  misc_feature: Reduced expression when VOC is produced
  misc_feature: Encodes the peptide sequence at SEQ ID NO 22293
atgctggcttcacgacaggtcctgggcagtgtcgcccgttcgcgggtcatggccaacctgggcctccgcaggaccatggccactgtcaccgactctcctcttgacaagaaggtcaagcagaacaactgggaggaaggcaacttcatcaactacaagaagatgtctgagaacttggccgttgttcgttcgcgcttgaaccgccctctcacatacgccgagaagatcctctactcccatttggacgatcctcatggccaggacatccagagaggtgtctcctacctcaagctgcgccctgaccgtgttgcctgtcaggacgccactgctcagatggccatcctgcagttcatgtccgccggcatggacaaggtcgccaacccttccaccgtccactgtgaccacttgattgaggctcaggttggcggagagaaggacctcgccaacgccatcaacatcaacaaggaagtctacgacttcttgtcctctgcttgcgccaagtacaacatcgggttctggcgccctggctctggtatcattcaccagattcttctcgagaactacgccttccccggtggtctgttgatcggcactgactcccacactcccaatgctggtggtctgggcatgtgcgctattggtgttggcggtgctgatgctgtcgatgtcatggccaatcttccctgggaactcaaggcccccaagttcatcggtgtcaagctcactggtgagatgtctggctggactgctcccaaggacgttatcctgaaggttgctggcattcttaccgtcaagggtggcactggtgccatcgttgagtatttcggagatggcgttgacaagctctcctccactggcatgggtacgatctgcaacatgggtgccgagatcggtgctacaacctcggttttccccttcaacgaccgtatgtacgactacctggctgccacgaagcgatcggctattggcgatttctcccgcgagtatgccaaggagctccgcgccgacgagggtgccgagtacgaccaggtcattgagatcaacctgagcgagcttgagcctcacatcaacggtcccttcactcccgatcttgccacacccatctccaagttctccgccgctgtcaaggccaacaactggcccgaggagctcaaggtcggtctcattggttcttgcaccaactcctcgtacgaggatatgagccgagctgccaacattgctcgcgatgctatggaccatggtatcaaggccaaggctgctttcctcgtcactcctggctccgaacagatcagagcgaccattgctcgcgatggacagctgcagaccttcgaggaattcggcggcaccgtggttgccaacgcctgcggtccttgcatcggccagtggaagcgaaccgacgttgagaagggcacccctaactccatcctctcctcctacaaccgtaacttcaccggccgaaacgacggtaaccccgccacccactcttttgttacctcgcccgacttggttgttgccctgaccattgccggctccctccacttcaaccctctcaccgacacgctcaagggcaaagatggaaaggagttcaaattggctcctcccactggcgacggtctccccacccgcggatatgaccccggccaagatacctaccaagctccgcccgccgaccgttccactgtccaggtccaggtttcgccctcgtcagaccgtctccagattctctcgcctttcgatgcctgggacggcaaggatgctctggacatgcccatcctgatcaaggctcagggcaagaccacgaccgatcacatctccatggccggcccatggctcaagtaccgcggccatttagacaacatctccaacaacatgttgatcggcgccatcaacgaggctaacggcgaggccaacaaagtcaagaacgttaccaacagtgagtgggcgggcgtccccgatgtcgcccgcgactataaggccaagggcatcaagtgggttgtcattggtgactggaactatggtgagggcagttcccgtgagcacgccgctctggagccccgccaccttggcggtctcgccatcatcacccgatcgttcgcgcgtatccacgagaccaacttgaagaagcagggcatgctgcccctgaccttcgccgaccccgctgactacgacaagatcaagcctgaggacaaggtcgatcttctttgcaccgagcttgccgttggccagcccatgacgctgcgcgtgcacccgcagagcggcgagacgttcgacatcaagctcgcccacacgttcaacgagccccagatcgagtggttcaagaacggcagcgcattgaacacgatggccaagatgaacgcatag

SEQ ID NO: 22293 - protein, 785 aa, Muscodor strobelii
  misc_feature: SGI Peptide ID NO. 567566
  misc_feature (70)..(509): Pfam Id: PF00330 Pfam Desc: Aconitase family (aconitate hydratase)
  misc_feature (588)..(718): Pfam Id: PF00694 Pfam Desc: Aconitase C-terminal domain
  misc_feature (1)..(782): NCBI GI: 189091876 Blast Desc: [Podospora anserina] gi|27803048|emb|CAD60751.1| protein product [Podospora anserina] gi|188219291|emb|CAP49271.1| protein product [Podospora anserina]
  misc_feature (1)..(782): NCBI GI: 256721611 Blast Desc: [Nectria haematococca mpVI 77-13-4]
  misc_feature (1)..(785): NCBI GI: 156042500 Blast Desc: SS1G_11047 [Sclerotinia sclerotiorum 1980] gi|154695434|gb|EDN95172.1| SS1G_11047 [Sclerotinia sclerotiorum 1980]
  misc_feature (1)..(782): NCBI GI: 85093919 Blast Desc: NCU02366 [Neurospora crassa OR74A] gi|28921241|gb|EAA30551.1| NCU02366 [Neurospora crassa OR74A]
  misc_feature (1)..(782): NCBI GI: 116179570 Blast Desc: CHGG_00413 [Chaetomium globosum CBS 148.51] gi|88184710|gb|EAQ92178.1| CHGG_00413 [Chaetomium globosum CBS 148.51]
  misc_feature (1)..(782): NCBI GI: 46127151 Blast Desc: FG07953.1 [Gibberella zeae PH-1]
  misc_feature (1)..(785): NCBI GI: 119194709 Blast Desc: aconitate hydratase, mitochondrial precursor [Coccidioides immitis RS]
  misc_feature (1)..(785): NCBI GI: 111606559 Blast Desc: aconitase [Coccidioides posadasii] gi|240105195|gb|EER23388.1| aconitate hydratase, mitochondrial precursor, [Coccidioides posadasii C735 delta SOWgp]
  misc_feature (23)..(784): NCBI GI: 39942882 Blast Desc: conserved [Magnaporthe grisea 70-15] gi|58257455|gb|AAW69349.1| aconitate hydratase-like protein [Magnaporthe grisea] gi|145009918|gb|EDJ94574.1| conserved grisea
  misc_feature (10)..(782): NCBI GI: 242790238 Blast Desc: mitochondrial aconitate hydratase, [Talaromyces stipitatus ATCC 10500] gi|218718110|gb|EED17530.1| mitochondrial aconitate hydratase, [Talaromyces stipitatus ATCC 10500]
  misc_feature (24)..(780): SWISSPROT Homolog: EC 4.2.1.3 Aconitate hydratase
  misc_feature: Useful for introducing or modulating the production of volatile compounds
MLASRQVLGSVARSRVMANLGLRRTMATVTDSPLDKKVKQNNWEEGNFINYKKMSENLAVVRSRLNRPLTYAEKILYSHLDDPHGQDIQRGVSYLKLRPDRVACQDATAQMAILQFMSAGMDKVANPSTVHCDHLIEAQVGGEKDLANAININKEVYDFLSSACAKYNIGFWRPGSGIIHQILLENYAFPGGLLIGTDSHTPNAGGLGMCAIGVGGADAVDVMANLPWELKAPKFIGVKLTGEMSGWTAPKDVILKVAGILTVKGGTGAIVEYFGDGVDKLSSTGMGTICNMGAEIGATTSVFPFNDRMYDYLAATKRSAIGDFSREYAKELRADEGAEYDQVIEINLSELEPHINGPFTPDLATPISKFSAAVKANNWPEELKVGLIGSCTNSSYEDMSRAANIARDAMDHGIKAKAAFLVTPGSEQIRATIARDGQLQTFEEFGGTVVANACGPCIGQWKRTDVEKGTPNSILSSYNRNFTGRNDGNPATHSFVTSPDLVVALTIAGSLHFNPLTDTLKGKDGKEFKLAPPTGDGLPTRGYDPGQDTYQAPPADRSTVQVQVSPSSDRLQILSPFDAWDGKDALDMPILIKAQGKTTTDHISMAGPWLKYRGHLDNISNNMLIGAINEANGEANKVKNVTNSEWAGVPDVARDYKAKGIKWVVIGDWNYGEGSSREHAALEPRHLGGLAIITRSFARIHETNLKKQGMLPLTFADPADYDKIKPEDKVDLLCTELAVGQPMTLRVHPQSGETFDIKLAHTFNEPQIEWFKNGSALNTMAKMNA

SEQ ID NO: 22294 - DNA, 3349 bp, Muscodor strobelii
  misc_feature: SGI EST ID NO. CUFF.53130.0
  misc_feature: Variant of the nucleotide sequence at SEQ ID NO 22292
gcactggagagtaattaagtgcgttctgattcgtcccttcgaccggccatgaccgtgtggtgcgtgcgtgggctggcgatggagacgatctgaggtaccgcctcgatacctgtgcatagtgctcaggcctgcctgcttctagaggtcttctctcggtacatgctctaacctctgccccccaaaagctcccatcggcctgccgaaggttgtccccagcagcgacgcagcgacagcttgctcggctccatccaacttttgtcgccctctccacctcgccttttctacccgcatcgcatcaacctatattttctaaacctctccttcctcactccttattcctctcccgttttctttgaggtctgcctgcgattgctcccccctctccactccattgataccccgggagagctgcattgctgtgttcacgtcgccacattccttgcctctcaggactgccgccctcaccatgctggcttcacgacaggtcctgggcagtgtcgcccgttcgcgggtcatggccaacctgggcctccgcaggaccatggccactgtcaccgactctcctcttgacaagaaggtcaagcagaacaactgggaggaaggcaacttcatcaactacaagaagatgtctgagaacttggccgttgttcgttcgcgcttgaaccgccctctcacatacgccgagaagatcctctactcccatttggacgatcctcatggccaggacatccagagaggtgtctcctacctcaagctgcgccctgaccgtgttgcctgtcaggacgccactgctcagatggccatcctgcagttcatgtccgccggcatggacaaggtcgccaacccttccaccgtccactgtgaccacttgattgaggctcaggttggcggagagaaggacctcgccaacgccatcaacatcaacaaggaagtctacgacttcttgtcctctgcttgcgccaagtacaacatcgggttctggcgccctggctctggtatcattcaccagattcttctcgagaactacgccttccccggtggtctgttgatcggcactgactcccacactcccaatgctggtggtctgggcatgtgcgctattggtgttggcggtgctgatgctgtcgatgtcatggccaatcttcccgtgagctccccgcgatttcaggctttactgggagcattatagttactgactcgactcgaaacagtgggaactcaaggcccccaagttcatcggtgtcaagctcactggtgagatgtctggctggactgctcccaaggacgttatcctgaaggttgctggcattcttaccgtcaagggtggcactggtgccatcgttgagtatttcggagatggcgttgacaagctctcctccactggcatgggtacgatctgcaacatgggtgccgagatcggtgctacaacctcggttttccccttcaacgaccgtatgtacgactacctggctgccacgaagcgatcggctattggcgatttctcccgcgagtatgccaaggagctccgcgccgacgagggtgccgagtacgaccaggtcattgagatcaacctgagcgagcttgagcctcacatcaacggtcccttcactcccgatcttgccacacccatctccaagttctccgccgctgtcaaggccaacaactggcccgaggagctcaaggtcggtctcattggttcttgcaccaactcctcgtacgaggatatgagccgagctgccaacattgctcgcgatgctatggaccatggtatcaaggccaaggctgctttcctcgtcactcctggctccgaacagatcagagcgaccattgctcgcgatggacagctgcagaccttcgaggaattcggcggcaccgtggttgccaacgcctgcggtccttgcatcggccagtggaagcgaaccgacgttgagaagggcacccctaactccatcctctcctcctacaaccgtaacttcaccggccgaaacgacggtaaccccgccacccactcttttgttacctcgcccgacttggttgttgccctgaccattgccggctccctccacttcaaccctctcaccgacacgctcaagggcaaagatggaaaggagttcaaattggctcctcccactggcgacggtctccccacccgcggatatgaccccggccaagatacctaccaagctccgcccgccgaccgttccactgtccaggtccaggtttcgccctcgtcagaccgtctccagattctctcgcctttcgatgcctgggacggcaaggatgctctggacatgcccatcctgatcaaggctcagggcaagaccacgaccgatcacatctccatggccggcccatggctcaagtaccgcggccatttagacaacatctccaacaacatgttgatcggcgccatcaacgaggctaacggcgaggccaacaaagtcaagaacgttaccaacagtgagtgggcgggcgtccccgatgtcgcccgcgactataaggccaagggcatcaagtgggttgtcattggtgactggaactatggtgagggcagttcccgtgagcacgccgctctggagccccgccaccttggcggtctcgccatcatcacccgatcgttcgcgcgtatccacgagaccaacttgaagaagcagggcatgctgcccctgaccttcgccgaccccgctgactacgacaagatcaagcctgaggacaaggtcgatcttctttgcaccgagcttgccgttggccagcccatgacgctgcgcgtgcacccgcagagcggcgagacgttcgacatcaagctcgcccacacgttcaacgagccccagatcgagtggttcaagaacggcagcgcattgaacacgatggccaagatgaacgcatagatgcgtgtttgaagagagacagcgcgtgttagaacaattcagcgagtaatggccagctcagaagaggaggagctgcatatcggtgcattatgggtatgcttttctagattagtacaagactactaccgcaggtgtcataggttcatttttttctgggttatgggtatcatgcttgacgggaccaacaggtctttttagtctgtacaaaatgaaagttatgaaagataccttttttgtcgaaagatattgcccgttcctctgcatctacctacctgtacgctgcgcaacatgtcctatgagagggcataaagttgtagcagatgatatcaaacattcgtcagacttagtatatcggccaacttagtattatagaactgagaaacgcgcctacttagagctacttgtcgcaagcttttttgtatgtaagtcataagtgatgatactgccaatcgaggttgaag

SEQ ID NO: 22295 - DNA, 1431 bp, Muscodor strobelii
  misc_feature: SGI cDNA ID NO. 567567
  misc_feature: Encodes the peptide sequence at SEQ ID NO 22296
atgggtgagacttgggcaatgacgtcaagcatactccggcggttttcgctgagcaagttgcaccacaatcatcaccatcataacaactctcacaacacgaccacgacgactattgtcgagaacaacaccagagatgaactaccgaacagatccgagtcagcagctactcgcctccagaagaaagaaaagctacccttggcagtccatcttctcgacagtccctgctctgttgatgagcaagatggctctcctttattcaccaagctccctattgaacttagagagatgatctgggactacgctctcatgcagtacgaagacacaaaggcactataccctctcaatgagtcctatacacgaccgggccaggcggcgcccatgcgcgtagctgttgaattactccgcacatgccgggcagtttatcttgaggcattccttgtcccattcaaagtgaatccaatgacagtattcgatggccatctggacgtcgttcctccaaacaacatcctccaatgcacatcatcaaatctgaaattgtgcagaaagctacgaccatggcaattcgctaatattacctcggtcgagatgaacgtgcagcagtttatgttggaaggtggagctgtcgagcgagtctcgaggctggctggtgctaaggggcgacatatgggtcacgaggcacagggctttacgctagcaggttacgcatccttcaaggccccaaaggatcacaaaccggccacattggacgctgagctgcatcccggcacaactgaggctcgtaacgctctggtgcgaagcattttcgcagggaagaagatcacacatctcaaaatccgtatgtctcattcggactggtggtcatggacagtgtctccagagatcgacgagtacccacagaacgtaatgcgcctggagccaatgatcaacgtcacagaccgtcaggaagtaagcttagctatgcgcaagggttacgaagcccgtaaagagggcaacgagccagattttaacctcgatgacttcgagaaggacggtcggtggggtatgcagtttgcggagtactggccagatctccaaaccctcgagatcgtccttgagacatatgcgcagaaggagaagcaactcgacttggtaattgaatgcgccaaactatggacattcccgcttaacagtggatcacagctggagtgggatcgccaggatgaagcgactgtaagatggcagggcgcaaatcaatacgcctttgacgaggaacttggcatgtgctgggtaaaagaccagtctaagatagatagccaagagaacggtagccggctgacccagtggcgaccagcaggtgagaaagagactgtgggtgggcaaatgtttgtgatgaagtcgcttgtcttcaataagcgacgaagcgctagcaagtctggcgcatttgaacattga

SEQ ID NO: 22296 - protein, 476 aa, Muscodor strobelii
  misc_feature: SGI Peptide ID NO. 567567
  misc_feature (72)..(397): NCBI GI: 169616820 Blast Desc: SNOG_11585 [Phaeosphaeria nodorum SN15] gi|111060173|gb|EAT81293.1| SNOG_11585 [Phaeosphaeria nodorum SN15]
  misc_feature (83)..(411): NCBI GI: 255939940 Blast Desc: Pc16g03820 [Penicillium chrysogenum Wisconsin 54-1255] gi|211585362|emb|CAP93052.1| Pc16g03820 [Penicillium chrysogenum Wisconsin 54-1255]
  misc_feature (76)..(251): NCBI GI: 119473735 Blast Desc: NFIA_001950 [Neosartorya fischeri NRRL 181] gi|119406896|gb|EAW16846.1| conserved [Neosartorya fischeri NRRL 181]
  misc_feature (76)..(149): NCBI GI: 121712425 Blast Desc: conserved [Aspergillus clavatus NRRL 1] gi|119401976|gb|EAW12398.1| conserved [Aspergillus clavatus NRRL 1]
  misc_feature (77)..(144): NCBI GI: 169842878 Blast Desc: [Coprinopsis cinerea okayama7#130] gi|116510626|gb|EAU93521.1| [Coprinopsis cinerea okayama7#130]
  misc_feature (80)..(213): NCBI GI: 256734189 Blast Desc: NECHADRAFT_6355 [Nectria haematococca mpVI 77-13-4]
  misc_feature (76)..(206): NCBI GI: 70985849 Blast Desc: conserved [Aspergillus fumigatus Af293] gi|66846059|gb|EAL86392.1| conserved [Aspergillus fumigatus Af293]
  misc_feature (76)..(206): NCBI GI: 159128435 Blast Desc: conserved [Aspergillus fumigatus A1163]
  misc_feature (79)..(165): NCBI GI: 67904360 Blast Desc: AN9167.2 [Aspergillus nidulans FGSC A4] gi|40742810|gb|EAA62000.1| [Aspergillus nidulans FGSC A4] gi|259485408|tpe|CBF82405.1| TPA: conserved [Aspergillus nidulans
  misc_feature (83)..(207): NCBI GI: 169611646 Blast Desc: SNOG_08937 [Phaeosphaeria nodorum SN15] gi|111062985|gb|EAT84105.1| SNOG_08937 [Phaeosphaeria nodorum SN15]
MGETWAMTSSILRRFSLSKLHHNHHHHNNSHNTTTTTIVENNTRDELPNRSESAATRLQKKEKLPLAVHLLDSPCSVDEQDGSPLFTKLPIELREMIWDYALMQYEDTKALYPLNESYTRPGQAAPMRVAVELLRTCRAVYLEAFLVPFKVNPMTVFDGHLDVVPPNNILQCTSSNLKLCRKLRPWQFANITSVEMNVQQFMLEGGAVERVSRLAGAKGRHMGHEAQGFTLAGYASFKAPKDHKPATLDAELHPGTTEARNALVRSIFAGKKITHLKIRMSHSDWWSWTVSPEIDEYPQNVMRLEPMINVTDRQEVSLAMRKGYEARKEGNEPDFNLDDFEKDGRWGMQFAEYWPDLQTLEIVLETYAQKEKQLDLVIECAKLWTFPLNSGSQLEWDRQDEATVRWQGANQYAFDEELGMCWVKDQSKIDSQENGSRLTQWRPAGEKETVGGQMFVMKSLVFNKRRSASKSGAFEH

SEQ ID NO: 22297 - DNA, 2280 bp, Muscodor strobelii
  misc_feature: SGI EST ID NO. CUFF.52379.0
  misc_feature: Variant of the nucleotide sequence at SEQ ID NO 22295
cgagaggaatatgttggagtcgcggatgtctggaaccggtatagcggttatctggaaaaacccatgctcggcaaagtggattctccatgctggacgagaacccgcggtggtgacctcagatggcgagggtatggcactgcacgatgtgaagccccatctcgccccatgcgatccgcctggtaggtttgcccaacctgctgggggctatttgacataatgctgtacggaggcatgttccgacgaaagctcccagtccatcccttgccaatgtttcctcatcggggcccttgttaactcgtcgtaattggattaagcgtgtgatcaggataatccctacccaaaatggggcaaacggtcgaagtgagaattgtcaataaaacatggggtcctcttctcagtgcaagaaagtcctgtctcagattctcgttgtcctacatatttgaacacgacttctctcgggcagaaacaacgtataaattagctctcttttgcttttggtagcattgctcaatactaggatataataccattcatacggaaacgaatgatcttaccatcttactccagcagtagattcacaatgggtgagacttgggcaatgacgtcaagcatactccggcggttttcgctgagcaagttgcaccacaatcatcaccatcataacaactctcacaacacgaccacgacgactattgtcgagaacaacaccagagatgaactaccgaacagatccgagtcagcagctactcgcctccagaagaaagaaaagctacccttggcagtccatcttctcgacagtccctgctctgttgatgagcaagatggctctcctttattcaccaagctccctattgaacttagagagatgatctgggactacgctctcatgcagtacgaagacacaaaggcactataccctctcaatgagtcctatacacgaccgggccaggcggcgcccatgcgcgtagctgttgaattactccgcacatgccgggcagtttatcttgaggcattccttgtcccattcaaagtgaatccaatgacagtattcgatggccatctggacgtcgttcctccaaacaacatcctccaatgcacatcatcaaatctgaaattgtgcagaaagctacgaccatggcaattcgctaatattacctcggtcgagatgaacgtgcagcagtttatgttggaaggtggagctgtcgagcgagtctcgaggctggctggtgctaaggggcgacatatgggtcacgaggcacagggctttacgctagcaggttacgcatccttcaaggccccaaaggatcacaaaccggccacattggacgctgagctgcatcccggcacaactgaggctcgtaacgctctggtgcgaagcattttcgcagggaagaagatcacacatctcaaaatccgtatgtctcattcggactggtggtcatggacagtgtctccagagatcgacgagtacccacagaacgtaatgcgcctggagccaatgatcaacgtcacagaccgtcaggaagtaagcttagctatgcgcaagggttacgaagcccgtaaagagggcaacgagccagattttaacctcgatgacttcgagaaggacggtcggtggggtatgcagtttgcggagtactggccagatctccaaaccctcgagatcgtccttgagacatatgcgcagaaggagaagcaactcgacttggtaattgaatgcgccaaactatggacattcccgcttaacagtggatcacagctggagtgggatcgccaggatgaagcgactgtaagatggcagggcgcaaatcaatacgcctttgacgaggaacttggcatgtgctgggtaaaagaccagtctaagatagatagccaagagaacggtagccggctgacccagtggcgaccagcaggtgagaaagagactgtgggtgggcaaatgtttgtgatgaagtcgcttgtcttcaataagcgacgaagcgctagcaagtctggcgcatttgaacattgaaatttgggttgcatatcgcatgctcaggtcacaaaaggcatcaaagggtcattgggttgaagttttactcggcgcatagcattttcggacatcttgtagatcatcaatagcgtgagaatcatgatcgcgtttcttatacgaactctctgtcacaacttatagtcgaatccttacattctacagtcttctagctatgtattgcgagacggacttcaacgctacctatttaaacaatcactggtttgcacattggccatatacacttttgc

SEQ ID NO: 22298 - DNA, 1695 bp, Muscodor strobelii
  misc_feature: SGI cDNA ID NO. 567568
  misc_feature: Encodes the peptide sequence at SEQ ID NO 22299
atgtcaggattggaggtagcaggtttggtgcttggtgcactcccgatagccctgcaggcaatcagagcctatagcgaggttctttcttcaattaggagctttagagtcatccttgaacgactgcaacgcgatattgaaaccgagagactgcgtttggaaaatacttgcgagggtcttatcagtgacattgtgccccaaggcaagattcaaactatgattgatgaccccttggggcccgagtggaagcagtatggcgaccaactgcgtctacggctatggaaagcatcaggacaatttgaaaggtgtgtcacggacctgttggatgctacacaagaattgagacgaaagctcggggttgaagatggcaatcagactcgcacaaaaagcagagcctctatactcgaagagctcaaacgagggacacaattcactcttaagaagaaagaatacgaacatgtgatgtcgcgcatcaaagattgcaacaccaccctgcgcgaaatctgtacaacgcacaatcaattagaaccgggcagacgccaccgatctcaagccatggtcactaggctcttgagaggtctatctcaaagtatctataatgcaatatgctctgcgatgacttgtgcctgtgcttctacgcacagcataggtatccaactcgttcaccgaagcaccatcatgttaccagatgatcttgaagaacaaatatcaaagagtttcaatttcggcgttgcgctgagaacaagtagtgtgacaacccctgacggctttagatggagggacttcaagatgagggtattggacgatgggaaacggtcaaatccaactacaccactatcttctaccaggagccttaaacctagagtaagatgggctccttcgcttacacatgggggctcgatatcgccttcaatattggagtctgacttggaactgtcgccacccttgccatctatttctcgagtatcagatatatgcaaaatcgctctacgggaccagaaatccaaagctgttcgtagctatgggtacgtattggatatccaacgaaggtttgagttgtcacctcagacggattctaccgctcgaagatccatcacccttcgccaactacttaacaacaaaataccaagccaggtctctttcaccttccctgagaggatgcaactaggattggctctttcgacaagtgttttgcatctatataacacaccttggttggcccagattgtgacgctcgacgatattaccttactcctcgcagacgagacttgcgctggtcaatcttgctctctatacctgccctttgtcacaaagcctgttatcaggacatcggagctactaacagcacaccaaaacacaactagtaagatggagatgcggccgattaatctgacaataatttccttgggcgctctgctcattcagattatcatcgctgaagtgatcgatgagctggccatgatggaagatatgactgatagcgcaatcctatctataagagacaaaggatatcaaatgcaagacacgatgctgacgaggggtggtatgaattatttcgcagcggtgaattggtgttttgagaacgtgttttctatcactgattttggaaaagaccagttctgtcaacggttctacgaaggcgtggtatctaggttagaagaggacgtgaagaccttgaattctgacgagataggataa

SEQ ID NO: 22299 - protein, 564 aa, Muscodor strobelii
  misc_feature: SGI Peptide ID NO. 567568
  misc_feature (1)..(560): NCBI GI: 256724298 Blast Desc: NECHADRAFT_53534 [Nectria haematococca mpVI 77-13-4]
  misc_feature (1)..(552): NCBI GI: 256734980 Blast Desc: NECHADRAFT_90584 [Nectria haematococca mpVI 77-13-4]
  misc_feature (1)..(438): NCBI GI: 46137989 Blast Desc: FG10509.1 [Gibberella zeae PH-1]
  misc_feature (1)..(560): NCBI GI: 169615082 Blast Desc: SNOG_10696 [Phaeosphaeria nodorum SN15] gi|111060970|gb|EAT82090.1| SNOG_10696 [Phaeosphaeria nodorum SN15]
  misc_feature (92)..(556): NCBI GI: 164422634 Blast Desc: NCU09957 [Neurospora crassa OR74A] gi|157069754|gb|EAA29228.2| [Neurospora crassa OR74A]
  misc_feature (72)..(558): NCBI GI: 46139091 Blast Desc: FG11060.1 [Gibberella zeae PH-1]
  misc_feature (72)..(553): NCBI GI: 164427568 Blast Desc: NCU02990 [Neurospora crassa OR74A] gi|16945370|emb|CAD11798.1| conserved [Neurospora crassa] gi|157071798|gb|EAA36140.2| [Neurospora crassa OR74A]
  misc_feature (1)..(558): NCBI GI: 154270750 Blast Desc: [Ajellomyces capsulatus NAm1] gi|150409803|gb|EDN05243.1| [Ajellomyces capsulatus NAm1]
  misc_feature (1)..(558): NCBI GI: 240274341 Blast Desc: conserved [Ajellomyces capsulatus H143]
  misc_feature (1)..(414): NCBI GI: 169612237 Blast Desc: SNOG_09237 [Phaeosphaeria nodorum SN15] gi|160702463|gb|EAT83429.2| SNOG_09237 [Phaeosphaeria nodorum SN15]
MSGLEVAGLVLGALPIALQAIRAYSEVLSSIRSFRVILERLQRDIETERLRLENTCEGLISDIVPQGKIQTMIDDPLGPEWKQYGDQLRLRLWKASGQFERCVTDLLDATQELRRKLGVEDGNQTRTKSRASILEELKRGTQFTLKKKEYEHVMSRIKDCNTTLREICTTHNQLEPGRRHRSQAMVTRLLRGLSQSIYNAICSAMTCACASTHSIGIQLVHRSTIMLPDDLEEQISKSFNFGVALRTSSVTTPDGFRWRDFKMRVLDDGKRSNPTTPLSSTRSLKPRVRWAPSLTHGGSISPSILESDLELSPPLPSISRVSDICKIALRDQKSKAVRSYGYVLDIQRRFELSPQTDSTARRSITLRQLLNNKIPSQVSFTFPERMQLGLALSTSVLHLYNTPWLAQIVTLDDITLLLADETCAGQSCSLYLPFVTKPVIRTSELLTAHQNTTSKMEMRPINLTIISLGALLIQIIIAEVIDELAMMEDMTDSAILSIRDKGYQMQDTMLTRGGMNYFAAVNWCFENVFSITDFGKDQFCQRFYEGVVSRLEEDVKTLNSDEIG

SEQ ID NO: 22300 - DNA, 2168 bp, Muscodor strobelii
  misc_feature: SGI EST ID NO. CUFF.52389.0
  misc_feature: Variant of the nucleotide sequence at SEQ ID NO 22298
gttacactgcatactatcggtaggtatatctcagctaggataactatcaaatgcggggattgtaagctgcgccagaaatctctcgatgagaacctgccttagtcttccgtaaagccccttattttatcgagtcaattagtgatcgctcatggctacggtcctcccgatcggaattgatggatagcgttgccgacaatgtcaggattggaggtagcaggtttggtgcttggtgcactcccgatagccctgcaggcaatcagagcctatagcgaggttctttcttcaattaggagctttagagtcatccttgaacgactgcaacgcgatattgaaaccgagagactgcgtttggaaaatacttgcgagggtcttatcagtgacattgtgccccaaggcaagattcaaactatgattgatgaccccttggggcccgagtggaagcagtatggcgaccaactgcgtctacggctatggaaagcatcaggacaatttgaaaggtgtgtcacggacctgttggatgctacacaagaattgagacgaaagctcggggttgaagatggcaatcagactcgcacaaaaagcagagcctctatactcgaagagctcaaacgagggacacaattcactcttaagaagaaagaatacgaacatgtgatgtcgcgcatcaaagattgcaacaccaccctgcgcgaaatctgtacaacgcacaatcaattagaaccgggcagacgccaccgatctcaagccatggtcactaggctcttgagaggtctatctcaaagtatctataatgcaatatgctctgcgatgacttgtgcctgtgcttctacgcacagcataggtatccaactcgttcaccgaagcaccatcatgttaccagatgatcttgaagaacaaatatcaaagagtttcaatttcggcgttgcgctgagaacaagtagtgtgacaacccctgacggctttagatggagggacttcaagatgagggtattggacgatgggaaacggtcaaatccaactacaccactatcttctaccaggagccttaaacctagagtaagatgggctccttcgcttacacatgggggctcgatatcgccttcaatattggagtctgacttggaactgtcgccacccttgccatctatttctcgagtatcagatatatgcaaaatcgctctacgggaccagaaatccaaagctgttcgtagctatgggtacgtattggatatccaacgaaggtttgagttgtcacctcagacggattctaccgctcgaagatccatcacccttcgccaactacttaacaacaaaataccaagccaggtctctttcaccttccctgagaggatgcaactaggattggctctttcgacaagtgttttgcatctatataacacaccttggttggcccagattgtgacgctcgacgatattaccttactcctcgcagacgagacttgcgctggtcaatcttgctctctatacctgccctttgtcacaaagcctgttatcaggacatcggagctactaacagcacaccaaaacacaactagtaagatggagatgcggccgattaatctgacaataatttccttgggcgctctgctcattcagattatcatcgctgaagtgatcgatgagctggccatgatggaagatatgactgatagcgcaatcctatctataagagacaaaggatatcaaatgcaagacacgatgctgacgaggggtggtatgaattatttcgcagcggtgaattggtgttttgagaacgtgttttctatcactgattttggaaaagaccagttctgtcaacggttctacgaaggcgtggtatctaggttagaagaggacgtgaagaccttgaattctgacgagataggataacaaaatgacaccagagttgacgatatgcttggttgccccactgtgtagatatcctatcatctgctctgattctagccaatatatggcagcggtacttcggacaattgagtctgtttccatgttcctcgtgagatggccttactaaattgccaggagctctaaggagcggcccgcattgctagcgacttattaagcttacctaaggtaaggttaacatcctctcaagtgcacatctctcctgcaggattaggaccacgcttcagggacctccattgagc

SEQ ID NO: 22301 - DNA, 1992 bp, Muscodor strobelii
  misc_feature: SGI cDNA ID NO. 567569
  misc_feature: Encodes the peptide sequence at SEQ ID NO 22302
atgtaccataacgacgacctaactgggactgcgccgtcgttaccgatctcgacattggtgaatcgtagcctggagtcattagaggatatgctccgctctttccaaacccatgatccgcgatacgaagagatcaacacccactggacaagattgaaactttgggctggtagtctgggggctcataggaaatctggtggcagatcgttagaatatcggcttcgcgatgcgtcatctatgcagctcgaaagggcagtcgaacaagcgaaatcgtcagtggttgaaggcaagctaccatctccggaaacacaggatccactagacttagagcttgccgaatacctacgggatagtgaagatgaagatgccgaacaatctgagcttgaaatagctctcgtagaaatagggcatatcattgattgtctcttacgcttgtcagttacgatcagaaaccctgcgccgcatgaccagttcgtctccagggcaggacaggaaacactaggtttctacaaccactatgatgttgcacatatccaagcaaaattccctaaactggccctgagcatagcaaagcgactaggtagtgcgatgacgtttcgacggcagttttttaaatatcgacaagatcatcatctcaaaatggcggacgagagcaccactgatcatggtgatggaacaaccgttgcctcttctcttcccaaacatctcagagattcctctgatcaggaacagacaagggatattcttacgccgtctggggtttcgataacctcatatgcgccatcagagacagatccagagaagcttagtgtaccatcagccccaccgaactatctcaagggaccatttatgtgccctttctgcttcttgatggtagaaacaccgtctagaaatgactggaagaaacatgtttttagagacttgcagccttatacttgtgttgcgccgttctgttcaatgcagcaccatcgattttcgcgtcgatcgcaatgggcgagtcatatgaggcaggaacactggaggtcgtggcattgctgttttgggtgcgcggtcgattttcagagcgtcaacgagttccgtgctcatatcaataaagtccatccacgagacatatccgctaaaaccatagatgatctagcagaagtttgtagccagacagatctccgccaagcacaaggaacttgctccatgtgtatgtcatttgagatcatatcagcatcctcatattacaagcatgttggcggccatctagagcaattgtctcttttcgctctatcccttacagatttagaggagaatgaggatgaggatgaggatgaattgagtgcagcgggtagcgacgcatctttatcttcggagacaaaagacgttgatgggattgatgtagtggagatgaatcgacacaagctcgagttcgataagggtcgtttcaaagagttagcagaggaacatcagcgggcaatgaaaaaacttgtaaaggaggcacaagaagcgcaggcgcgtgaggacgaatacaagcggcatatgaaggaacaacttctgaagtctggtctcgatgagaaagccatcgaagacattctagcaggaaaagctagaacaaaaaaggatcaatcacagcctatccgaaaagtaaaaaacgagttccgaccaacctatacacgtatggctcggagacacctttctctcgagacgttgcgtattcacgacattgactatgctttagacacttcatctaaccaatccattacctaccaggacccagaatatgttctaatcaagcgatgggttcccgaacaagagcaagatatactttggcaacatacaaagacagtccgtgaacagcgcacggttaaaccctacttaacgactacagtatatggaggtggaggtggaagcggatcaataaatactggagatatagacgttgacaagaatgcggagaatgtcgtaataggggcgcaggctatggacggcagacgttcgcgttcgcagtaa

SEQ ID NO: 22302 - protein, 663 aa, Muscodor strobelii
  misc_feature: SGI Peptide ID NO. 567569
  misc_feature (101)..(424): NCBI GI: 256724198 Blast Desc: NECHADRAFT_53468 [Nectria haematococca mpVI 77-13-4]
  misc_feature (43)..(424): NCBI GI: 46139093 Blast Desc: FG11061.1 [Gibberella zeae PH-1]
  misc_feature (101)..(424): NCBI GI: 11291594 Blast Desc: FG11061.1 [Gibberella zeae PH-1]
  misc_feature (16)..(459): NCBI GI: 256735683 Blast Desc: NECHADRAFT_99050 [Nectria haematococca mpVI 77-13-4]
  misc_feature (53)..(448): NCBI GI: 46137987 Blast Desc: FG10508.1 [Gibberella zeae PH-1]
  misc_feature (106)..(424): NCBI GI: 164427570 Blast Desc: NCU02989 [Neurospora crassa OR74A] gi|157071799|gb|EAA36139.2| [Neurospora crassa OR74A]
  misc_feature (106)..(424): NCBI GI: 16945369 Blast Desc: [Neurospora crassa]
  misc_feature (140)..(424): NCBI GI: 170940241 Blast Desc: protein product [Podospora anserina]
  misc_feature (16)..(460): NCBI GI: 212544688 Blast Desc: conserved [Penicillium marneffei ATCC 18224] gi|210065467|gb|EEA19561.1| conserved [Penicillium marneffei ATCC 18224]
  misc_feature (50)..(438): NCBI GI: 115387082 Blast Desc: [Aspergillus terreus NIH2624] gi|114191080|gb|EAU32780.1| [Aspergillus terreus NIH2624]
MYHNDDLTGTAPSLPISTLVNRSLESLEDMLRSFQTHDPRYEEINTHWTRLKLWAGSLGAHRKSGGRSLEYRLRDASSMQLERAVEQAKSSVVEGKLPSPETQDPLDLELAEYLRDSEDEDAEQSELEIALVEIGHIIDCLLRLSVTIRNPAPHDQFVSRAGQETLGFYNHYDVAHIQAKFPKLALSIAKRLGSAMTFRRQFFKYRQDHHLKMADESTTDHGDGTTVASSLPKHLRDSSDQEQTRDILTPSGVSITSYAPSETDPEKLSVPSAPPNYLKGPFMCPFCFLMVETPSRNDWKKHVFRDLQPYTCVAPFCSMQHHRFSRRSQWASHMRQEHWRSWHCCFGCAVDFQSVNEFRAHINKVHPRDISAKTIDDLAEVCSQTDLRQAQGTCSMCMSFEIISASSYYKHVGGHLEQLSLFALSLTDLEENEDEDEDELSAAGSDASLSSETKDVDGIDVVEMNRHKLEFDKGRFKELAEEHQRAMKKLVKEAQEAQAREDEYKRHMKEQLLKSGLDEKAIEDILAGKARTKKDQSQPIRKVKNEFRPTYTRMARRHLSLETLRIHDIDYALDTSSNQSITYQDPEYVLIKRWVPEQEQDILWQHTKTVREQRTVKPYLTTTVYGGGGGSGSINTGDIDVDKNAENVVIGAQAMDGRRSRSQ

SEQ ID NO: 22303 - DNA, 2195 bp, Muscodor strobelii
  misc_feature: SGI EST ID NO. CUFF.52394.0
  misc_feature: Variant of the nucleotide sequence at SEQ ID NO 22301
gaccttcttaagcagctcgaaagggcagtcgaacaagcgaaatcgtcagtggttgaaggcaagctaccatctccggaaacacaggatccactagacttagagcttgccgaatacctacgggatagtgaagatgaagatgccgaacaatctgagcttgaaatagctctcgtagaaatagggcatatcattgattgtctcttacgcttgtcagttacgatcagaaaccctgcgccgcatgaccagttcgtctccagggcaggacaggaaacactaggtttctacaaccactatgatgttgcacatatccaagcaaaattccctaaactggccctgagcatagcaaagcgactaggtagtgcgatgacgtttcgacggcagttttttaaatatcgacaagatcatcatctcaaaatggcggacgagagcaccactgatcatggtgatggaacaaccgttgcctcttctcttcccaaacatctcagagattcctctgatcaggaacagacaagggatattcttacgccgtctggggtttcgataacctcatatgcgccatcagagacagatccagagaagcttagtgtaccatcagccccaccgaactatctcaagggaccatttatgtgccctttctgcttcttgatggtagaaacaccgtctagaaatgactggaagaaacatgtttttagagacttgcagccttatacttgtgttgcgccgttctgttcaatgcagcaccatcgattttcgcgtcgatcgcaatgggcgagtcatatgaggcaggaacactggaggtcgtggcattgctgttttgggtgcgcggtcgattttcagagcgtcaacgagttccgtgctcatatcaataaagtccatccacgagacatatccgctaaaaccatagatgatctagcagaagtttgtagccagacagatctccgccaagcacaaggaacttgctccatgtgtatgtcatttgagatcatatcagcatcctcatattacaagcatgttggcggccatctagagcaattgtctcttttcgctctatcccttacagatttagaggagaatgaggatgaggatgaggatgaattgagtgcagcgggtagcgacgcatctttatcttcggagacaaaagacgttgatgggattgatgtagtggagatgaatcgacacaagctcgagttcgataagggtcgtttcaaagagttagcagaggaacatcagcgggcaatgaaaaaacttgtaaaggaggcacaagaagcgcaggcgcgtgaggacgaatacaagcggcatatgaaggaacaacttctgaagtctggtctcgatgagaaagccatcgaagacattctagcaggaaaagctagaacaaaaaaggatcaatcacagcctatccgaaaagtaaaaaacgagttccgaccaacctatacacgtatggctcggagacacctttctctcgagacgttgcgtattcacgacattgactatgctttagacactgacccagaatatgttctaatcaagcgatgggttcccgaacaagagcaagatatactttggcaacatacaaagacagtccgtgaacagcgcacggttaaaccctacttaacgactacagtatatggaggtggaggtggaagcggatcaataaatactggagatatagacgttgacaagaatgcggagaatgtcgtaataggggcgcaggctatggacggcagacgttcgcgttcgcagtaacccaactaacaagactacaaccaggatcagatgcggaaacatcgactgctctacagaagattacttcctttatagaactaatataaaggatgcagtgtgccaccactgtggagcgagaagaccataagacaaacaggcgagcaacctatacaacaccgattctctcgaaacttatgctcggagcgactcgaagagcacatgaaaatgggtgtactcaaaaaggagcgtacgaaaagtcggtttccaaccctcacgatgtattaggctggtgctcaaccagtctgaatttgtgacccgtctacaccctgcacacgagacagaatagacgcttcagagcgtagacatgtacaatacggtccgcgttcgtgtaacttctaaagagaaacacgaagttaagtctaaagatggtgcatagaaaaaggcaacgagaggtaaatacagtgaggatgtatctg

SEQ ID NO: 22304 - DNA, 1086 bp, Muscodor strobelii
  misc_feature: SGI cDNA ID NO. 567570
  misc_feature: Encodes the peptide sequence at SEQ ID NO 22305
atgtcgaccttaaccaccctagagggtctcgaccccgcgcacttcaccgcaatagccaaggcaatcaataaccttgtctcttgcgagattgctgagttgacttatagtcagatagttgatggcatgccaacatgcgattcgtatttcgatttccattggggacttgaaggacacccgatctattcacatcaaacgttatgccaaggtgccatagaaaagacaaggacactgctacgagacttccaatttttgaacttgaaattcgacccattagctgtacaagggtttcagaactctaccatgaatacgccagaatttgagatacgattaatagagttgctggctgttgcttttcacgcaatcgcggcgcacttttatcaacttgacgacggcgttcataggtattgtgaacatgaaacatggttgaaagaggaaatctcacgcttaggagaagacaaagctaatgaagcgagatttcttccaccggcgacccttttttaccaccgcaactataagcattgtcaccaatatccccaaggcattgcagatatcgttggatattgggctgaagccaagatcttcggtggcgtagtattgctagatcgaggtgaatccgaaaccgaggcgaaaaacatctacctacatccaagtcgtgtggaagggccaagaacgctatatccgccaacggcggcccagtatcaagcccttatcaggttcctcctttcggactcaggaaaagatcaatcaccacttccactgctggatttcaatgacaaccgtcctcgctatgagccttatgatgcatttaaatacttccatatatttcgcgacagatatgaaacagttctacctccagtgcgaaaaatcaagcatactattagatctacggatttccccgagatactggatttccgttacatatgcgaggaggaaataaaacgcttggcgggacagtctgtagatgaggagcagatagcggccgcgaaggcaagaatgaagaatatcagtccttcgtcgccgcactggaatgggcccaggccgtgggatgacgagcaagggtatcatgaactgtggcagaggtggtaa

SEQ ID NO: 22305 - protein, 361 aa, Muscodor strobelii
  misc_feature: SGI Peptide ID NO. 567570
  misc_feature (6)..(342): NCBI GI: 256724889 Blast Desc: NECHADRAFT_66940 [Nectria haematococca mpVI 77-13-4]
  misc_feature (5)..(343): NCBI GI: 46129238 Blast Desc: FG08804.1 [Gibberella zeae PH-1]
  misc_feature (6)..(345): NCBI GI: 256722364 Blast Desc: NECHADRAFT_44324 [Nectria haematococca mpVI 77-13-4]
  misc_feature (10)..(283): NCBI GI: 46126925 Blast Desc: FG07840.1 [Gibberella zeae PH-1]
  misc_feature (6)..(304): NCBI GI: 116178988 Blast Desc: CHGG_00122 [Chaetomium globosum CBS 148.51] gi|88184419|gb|EAQ91887.1| CHGG_00122 [Chaetomium globosum CBS 148.51]
  misc_feature (4)..(340): NCBI GI: 256734154 Blast Desc: NECHADRAFT_35598 [Nectria haematococca mpVI 77-13-4]
  misc_feature (6)..(314): NCBI GI: 256734181 Blast Desc: NECHADRAFT_67600 [Nectria haematococca mpVI 77-13-4]
  misc_feature (5)..(303): NCBI GI: 171683089 Blast Desc: protein product [Podospora anserina] gi|170941504|emb|CAP67156.1| protein product [Podospora anserina]
  misc_feature (14)..(280): NCBI GI: 256726319 Blast Desc: NECHADRAFT_82106 [Nectria haematococca mpVI 77-13-4]
  misc_feature (7)..(299): NCBI GI: 240104968 Blast Desc: CPC735_045310 [Coccidioides posadasii C735 delta SOWgp]
MSTLTTLEGLDPAHFTAIAKAINNLVSCEIAELTYSQIVDGMPTCDSYFDFHWGLEGHPIYSHQTLCQGAIEKTRTLLRDFQFLNLKFDPLAVQGFQNSTMNTPEFEIRLIELLAVAFHAIAAHFYQLDDGVHRYCEHETWLKEEISRLGEDKANEARFLPPATLFYHRNYKHCHQYPQGIADIVGYWAEAKIFGGVVLLDRGESETEAKNIYLHPSRVEGPRTLYPPTAAQYQALIRFLLSDSGKDQSPLPLLDFNDNRPRYEPYDAFKYFHIFRDRYETVLPPVRKIKHTIRSTDFPEILDFRYICEEEIKRLAGQSVDEEQIAAAKARMKNISPSSPHWNGPRPWDDEQGYHELWQRW

SEQ ID NO: 22306 - DNA, 837 bp, Muscodor strobelii
  misc_feature: SGI EST ID NO. CUFF.52401.0
  misc_feature: Variant of the nucleotide sequence at SEQ ID NO 22304
tgcttttcacgcaatcgcggcgcacttttatcaacttgacgacggcgttcataggtattgtgaacatgaaacatggttgaaagaggaaatctcacgcttaggagaagacaaagctaatgaagcgagatttcttccaccggcgacccttttttaccaccgcaactataagcattgtcaccaatatccccaaggcattgcagatatcgttggatattgggctgaagccaagatcttcggtggcgtagtattgctagatcgaggtgaatccgaaaccgaggcgaaaaacatctacctacatccaagtcgtgtggaagggccaagaacgctatatccgccaacggcggcccagtatcaagcccttatcaggttcctcctttcggactcaggaaaagatcaatcaccacttccactgctggatttcaatgacaaccgtcctcgctatgagccttatgatgcatttaaatacttccatatatttcgcgacagatatgaaacagttctacctccagtgcgaaaaatcaagcatactattagatctacggatttccccgagatactggatttccgttacatatgcgaggaggaaataaaacgcttggcgggacagtctgtagatgaggagcagatagcggccgcgaaggcaagaatgaagaatatcagtccttcgtcgccgcactggaatgggcccaggccgtgggatgacgagcaagggtatcatgaactgtggcagaggtggtaataattttcacccggaactaacactgtatgctaagctctatgacgtgttggctctcattatgacttgatttcccccaacctcgcgtcagatcctgcgat

SEQ ID NO: 22307 - DNA, 732 bp, Muscodor strobelii
  misc_feature: SGI cDNA ID NO. 567571
  misc_feature: Encodes the peptide sequence at SEQ ID NO 22308
atgccgctcgtcctgggcctcgctgagccggccgatgccgaccgtatcgcggagatccacatgttaactttcgggtctaatgccatgttgcttgctcaatttccaacgcctcatgctttgaaaggtttacgagagtgcattcgaactaaaacattagctgatatagactatccttacgttaccgtactcgtagtgagagatgtgccaagtcatcatgatacaggcagagattcattttcagacaattcgatagtaaaccaaaaagcagtggaattgccaggagataccaagttaagaaatgggacgaactctcaggtcgttgcattcgcaaaatggtcgcgtccaattgcagaaggtggccagcccgatgagccagaatggaactggccacttggaacatacatggatctattagatgcatggataaaggcagctgaagaagctcacatgaaagctatcggcgataagccatgttatcatctcacgttcatggggacagatccagctttcgaaagaaaaggcgccgcttctctcatggttcagtggggcctcgaccgttgcaataaagagacaacgatcgcttatcttgagagcacgcttagttcggcacacttctatgagaagatgggattcagttcggtagatcgattttcggtgcgttacaaagcggtcggacagccaaagacggaagagatatatgaggagatcagctatgtatactaccctacttag

SEQ ID NO: 22308 - protein, 243 aa, Muscodor strobelii
  misc_feature: SGI Peptide ID NO. 567571
  misc_feature (98)..(212): Pfam Id: PF00583 Pfam Desc: Acetyltransferase (GNAT) family
  misc_feature (153)..(212): Pfam Id: PF00583 Pfam Desc: Acetyltransferase (GNAT) family
  misc_feature (1)..(243): NCBI GI: 238838065 Blast Desc: conserved [Microsporum canis CBS 113480]
  misc_feature (1)..(243): NCBI GI: 119497665 Blast Desc: GNAT family acetyltransferase, [Neosartorya fischeri NRRL 181] gi|119413754|gb|EAW23693.1| GNAT family acetyltransferase, [Neosartorya fischeri NRRL 181]
  misc_feature (1)..(243): NCBI GI: 261193587 Blast Desc: GNAT family acetyltransferase [Ajellomyces dermatitidis SLH14081] gi|239588804|gb|EEQ71447.1| GNAT family acetyltransferase [Ajellomyces dermatitidis SLH14081] GNAT family
  misc_feature (1)..(242): NCBI GI: 240106280 Blast Desc: GNAT family acetyltransferase, [Coccidioides posadasii C735 delta SOWgp]
  misc_feature (1)..(242): NCBI GI: 119191960 Blast Desc: CIMG_00357 [Coccidioides immitis RS]
  misc_feature (1)..(242): NCBI GI: 225558753 Blast Desc: conserved [Ajellomyces capsulatus G186AR]
  misc_feature (1)..(240): NCBI GI: 70988631 Blast Desc: GNAT family acetyltransferase [Aspergillus fumigatus Af293] gi|66846805|gb|EAL87136.1| GNAT family acetyltransferase, [Aspergillus fumigatus Af293]
  misc_feature (1)..(240): NCBI GI: 159128588 Blast Desc: GNAT family acetyltransferase, [Aspergillus fumigatus A1163]
  misc_feature (8)..(242): NCBI GI: 189194133 Blast Desc: conserved [Pyrenophora tritici-repentis Pt-1C-BFP] gi|187978969|gb|EDU45595.1| conserved [Pyrenophora tritici-repentis Pt-1C-BFP]
  misc_feature (1)..(184): NCBI GI: 154286644 Blast Desc: [Ajellomyces capsulatus NAm1] gi|150407758|gb|EDN03299.1| [Ajellomyces capsulatus NAm1]
MPLVLGLAEPADADRIAEIHMLTFGSNAMLLAQFPTPHALKGLRECIRTKTLADIDYPYVTVLVVRDVPSHHDTGRDSFSDNSIVNQKAVELPGDTKLRNGTNSQVVAFAKWSRPIAEGGQPDEPEWNWPLGTYMDLLDAWIKAAEEAHMKAIGDKPCYHLTFMGTDPAFERKGAASLMVQWGLDRCNKETTIAYLESTLSSAHFYEKMGFSSVDRFSVRYKAVGQPKTEEIYEEISYVYYPT

SEQ ID NO: 22309 - DNA, 795 bp, Muscodor strobelii
  misc_feature: SGI cDNA ID NO. 567572
  misc_feature: Encodes the peptide sequence at SEQ ID NO 22310
atgtcagaagctacaactccgatcaaagaagcccaatacaagcgctcagactcagcaatagatatgcaagaaaaccaaacacctcacgaagcttcttcaactccggtatcagcaaaacaagaccgacgcagctcagtaagcatgttactggatgaagcgattctgagccggcactcctcacgcctctacacatccaggcccgtgccccgcacaaccctacagaaagcgctggaactcgcatctcactcaccaagtaattcaaacacacaagcctggcggctcttcatcgtaaccggctcagcactcgaacgactcagttccgcactattgaaagaagcctcgaaaggcgcagcgccaaacattccggatgtacctgaagaatttcaaaagtaccgctcggaactcggaaagcaagtgtatggcgaaggatggaagataccgcgcgaagatacagaggcccgcaaggctgctgtgctgcggaactttgatttcttcggtgcgccagtcggtgtcattgtgtgtatgagcgactccttacagggtcgtgctgcatttagtgttgggatgtatatccagactttcttgcttggacttacggagcgcggggttgggagctgtgtggaagtcagtatttcgggatatcctgaagttgtgaggagggaggtcgggattcctgagaatatgcaggttctgtgtgggattgcgattggttatgaggatgagagtgcgggcgtcaacaagattaggagtgggagggaagttgttgagaagactactgtttgggtaaatgagtaa

SEQ ID NO: 22310 - protein, 264 aa, Muscodor strobelii
  misc_feature: SGI Peptide ID NO. 567572
  misc_feature (54)..(238): Pfam Id: PF00881 Pfam Desc: Nitroreductase family
  misc_feature (54)..(106): Pfam Id: PF00881 Pfam Desc: Nitroreductase family
  misc_feature (186)..(238): Pfam Id: PF00881 Pfam Desc: Nitroreductase family
  misc_feature (44)..(257): NCBI GI: 156054490 Blast Desc: SS1G_06093 [Sclerotinia sclerotiorum 1980] gi|154703873|gb|EDO03612.1| SS1G_06093 [Sclerotinia sclerotiorum 1980]
  misc_feature (50)..(264): NCBI GI: 183981752 Blast Desc: nitroreductase [Mycobacterium marinum M] gi|183175078|gb|ACC40188.1| nitroreductase [Mycobacterium marinum M]
  misc_feature (48)..(262): NCBI GI: 154321089 Blast Desc: BC1G_01419 [Botryotinia fuckeliana B05.10] gi|150851957|gb|EDN27149.1| BC1G_01419 [Botryotinia fuckeliana B05.10]
  misc_feature (50)..(261): NCBI GI: 186682475 Blast Desc: nitroreductase [Nostoc punctiforme PCC 73102] gi|186464927|gb|ACC80728.1| nitroreductase [Nostoc punctiforme PCC 73102]
  misc_feature (22)..(258): NCBI GI: 256726269 Blast Desc: NECHADRAFT_82005 [Nectria haematococca mpVI 77-13-4]
  misc_feature (48)..(261): NCBI GI: 118473418 Blast Desc: oxidoreductase [Mycobacterium smegmatis str. MC2 155] gi|118174705|gb|ABK75601.1| oxidoreductase [Mycobacterium smegmatis str. MC2 155]
  misc_feature (124)..(264): NCBI GI: 118617566 Blast Desc: nitroreductase [Mycobacterium ulcerans Agy99] gi|118569676|gb|ABL04427.1| nitroreductase [Mycobacterium ulcerans Agy99]
  misc_feature (48)..(252): NCBI GI: 120553113 Blast Desc: nitroreductase [Marinobacter aquaeolei VT8] gi|120322962|gb|ABM17277.1| nitroreductase [Marinobacter aquaeolei VT8]
  misc_feature (47)..(261): NCBI GI: 119474742 Blast Desc: NADH dehydrogenase [marine gamma proteobacterium HTCC2143] gi|119450945|gb|EAW32178.1| NADH dehydrogenase [marine gamma proteobacterium HTCC2143]
  misc_feature (46)..(253): NCBI GI: 183222700 Blast Desc: nitroreductase [Leptospira biflexa serovar Patoc strain 'Patoc 1 (Paris)'] gi|189912732|ref|YP_001964287.1| Nitroreductase [Leptospira biflexa serovar Patoc strain 'Patoc 1
  misc_feature (53)..(261): SWISSPROT Homolog: EC 1.6.99.3 NADH dehydrogenase
MSEATTPIKEAQYKRSDSAIDMQENQTPHEASSTPVSAKQDRRSSVSMLLDEAILSRHSSRLYTSRPVPRTTLQKALELASHSPSNSNTQAWRLFIVTGSALERLSSALLKEASKGAAPNIPDVPEEFQKYRSELGKQVYGEGWKIPREDTEARKAAVLRNFDFFGAPVGVIVCMSDSLQGRAAFSVGMYIQTFLLGLTERGVGSCVEVSISGYPEVVRREVGIPENMQVLCGIAIGYEDESAGVNKIRSGREVVEKTTVWVNE

SEQ ID NO: 22311 - DNA, 2202 bp, Muscodor strobelii
  misc_feature: SGI EST ID NO. CUFF.52409.0
  misc_feature: Variant of the nucleotide sequence at SEQ ID NO 22309
ccggtttgcacctaaggttcactttcatgtagatccgaaaatgcaacgtccgattaagctcgcgcgctagttcttcggggttggatatctgatgcgaaacggcaatggaatagggacgtggtggggaaatgttgtcgcgatcattaattgaaggaccggagattgctatataagagacaaagctaggcttcatctaaaggaaccatttctatgacgactttgatttcaattaagaaaagaagtattaagcgcatagtcctccaactaccagtcgttttcataagaatcgaaaaccaaacagtgcgcagcacaatagtccatccgaatgtcagaagctacaactccgatcaaagaagcccaatacaagcgctcagactcagcaatagatatgcaagaaaaccaaacacctcacgaagcttcttcaactccggtatcagcaaaacaagaccgacgcagctcagtaagcatgttactggatgaagcgattctgagccggcactcctcacgcctctacacatccaggcccgtgccccgcacaaccctacagaaagcgctggaactcgcatctcactcaccaagtaattcaaacacacaagcctggcggctcttcatcgtaaccggctcagcactcgaacgactcagttccgcactattgaaagaagcctcgaaaggcgcagcgccaaacattccggatgtacctgaagaatttcaaaagtaccgctcggaactcggaaagcaagtgtatggcgaaggatggaagataccgcgcgaagatacagaggcccgcaaggctgctgtgctgcggaactttgatttcttcggtgcgccagtcggtgtcattgtgtgtatgagcgactccttacagggtcgtgctgcatttagtgttgggatgtatatccagactttcttgcttggacttacggagcgcggggttgggagctgtgtggaagtcagtatttcgggatatcctgaagttgtgaggagggaggtcgggattcctgagaatatgcaggttctgtgtgggattgcgattggttatgaggatgagagtgcgggcgtcaacaagattaggagtgggagggaagttgttgagaagactactgtttgggtaaatgagtaacctgatgggatgaaagacaaatcgtgatttggtgagacatgtagacaagtgagcgagatgcggctaggaccatatctttcagaatgatgatctatctgcctacataagtcatagggtcgaaaagtcatcttctttgagcattcatagaatttagggttccgttggtttagagagttataatgtatttccaatctgaataatccatacctatgcgatgcgtctcaagtctcaaacaatacctctcgtagtgtagatgaagaattataatcgttttgaactatcctcccccagtttttagtcacgtcgcccccaatgaacagaatgatttatgcctagatggtgaaaattctcgaatcgcaacatgaggatgtgagtaagtgtgtcccggtattttcttttttgataatcgaaattgccctagatttagtattatttctcattttccgccaaaatatgtgctaactggctgagattaaggagagtaaatcctatcggacaacacaatgatattacccctccctccggcgttttggcctcaatcaaccattccacttccatccctcaccacgcaactctcatttctacgcgattcccgaaccatcttacaacatttcattcgctcaaatactcttgtaattgtgaataaatgcgcgagaatctgtcaagttgacaattacgtcagagaggatcatgccgctcgtcctgggcctcgctgagccggccgatgccgaccgtatcgcggagatccacatgttaactttcgggtctaatgccatgttgcttgctcaatttccaacgcctcatgctttgaaaggtttacgagagtgcattcgaactaaaacattagctgatatagactatccttacgttaccgtactcgtagtgagagatgtgccaagtcatcatgatacaggcagagattcattttcagacaattcgatagtaaaccaaaaagcagtggaattgccaggagataccaagttaagaaatgggacgaactctcaggtcgttgcattcgcaaaatggtcgcgtccaattgcagaaggtggccagcccgatgagccagaatggaactggccact

SEQ ID NO: 22312 - DNA, 1038 bp, Muscodor strobelii
  misc_feature: SGI cDNA ID NO. 567573
  misc_feature: Reduced expression when VOC is produced
  misc_feature: Encodes the peptide sequence at SEQ ID NO 22313
tacttcaacccgggcatgaagaagatccaggacgccaagatcggcgacaccttcaccaccctcggctccgagcacctcgtcgagccctacccgggcttcgaggagcccaagcccatggtcttcgtcgccgccttccccaccgacccctccgactacaaccgtctctccgacagtatcggccagctggtcctcaacgatcgcagcatcaccctctacaaggaccactccgaggccctcggcgctggatggcgcgtgggctttctgggcagtctgcattgctccgtcttccaggaccggctgcggcaggagtacggcgccagcgtcatcatcaccgagcccgccgtccagaccaagattgtctggaaagacggcaccgagaccgtcctgcagagccccgccgatttccccgacgccgtcggaagcggcaagacccatggcgccactttctacgagcctttcgtcttcgccaccatcacggttcccgaggagtatctgggtcgtgccatcgagctgtgcgaggctagccgtggtgagcaggagagcatcgagttcttccgcggcatgcaggtcattctcaagtaccgcatccctacggcccagctcgtagacgatctgtttggcaagctcaagggcgctacgaaaggctacgcgacgctggactacgaagatgcgggctggagggagagcgatctggtgaagctgcagttgctcgtgaacaaggttcctgtcgacgccattgcgcgagtctgtcacaggtcccagacggagcggctggcgaggcagtgggtcaccaagttcaaggaacacgtgcagaggcagatgtttgagattgtcatccaggccgccgtgggcaacaagatcctagcgagggagacgatcaagccgttccggaaggatgtgctagccaagttgcatgcctcggatattacgcgacgcaagaagttgctagaaaagcagaaggtggggaggaagaagctgagggctattgggaatgtcgtcattgagcaggaggcctttcagaggtttcttgcgaaatag

SEQ ID NO: 22313 - protein, 345 aa, Muscodor strobelii
  misc_feature: SGI Peptide ID NO. 567573
  misc_feature (148)..(237): Pfam Id: PF00679 Pfam Desc: Elongation factor G C-terminus
  misc_feature (238)..(345): Pfam Id: PF06421 Pfam Desc: GTP-binding protein LepA C-terminus
  misc_feature (238)..(343): Pfam Id: PF06421 Pfam Desc: GTP-binding protein LepA C-terminus
  misc_feature (1)..(345): NCBI GI: 116201377 Blast Desc: conserved [Chaetomium globosum CBS 148.51] gi|88177091|gb|EAQ84559.1| conserved [Chaetomium globosum CBS 148.51]
  misc_feature (1)..(345): NCBI GI: 85089814 Blast Desc: GTP-binding protein GUF1 [Neurospora crassa OR74A] gi|28919447|gb|EAA28886.1| GTP-binding protein GUF1 [Neurospora crassa OR74A]
  misc_feature (2)..(345): NCBI GI: 145602935 Blast Desc: MGG_04686 [Magnaporthe grisea 70-15] gi|145011284|gb|EDJ95940.1| MGG_04686 [Magnaporthe grisea 70-15]
  misc_feature (1)..(328): NCBI GI: 46111565 Blast Desc: FG02664.1 [Gibberella zeae PH-1]
  misc_feature (1)..(328): NCBI GI: 256726242 Blast Desc: [Nectria haematococca mpVI 77-13-4]
  misc_feature (1)..(345): NCBI GI: 119191173 Blast Desc: CIMG_05634 [Coccidioides immitis RS]
  misc_feature (1)..(345): NCBI GI: 156043237 Blast Desc: SS1G_10621 [Sclerotinia sclerotiorum 1980] gi|154695009|gb|EDN94747.1| SS1G_10621 [Sclerotinia sclerotiorum 1980]
  misc_feature (1)..(345): NCBI GI: 258564809 Blast Desc: GTP-binding protein LepA [Uncinocarpus reesii 1704] gi|237906850|gb|EEP81251.1| GTP-binding protein LepA [Uncinocarpus reesii 1704]
  misc_feature (1)..(345): NCBI GI: 261196047 Blast Desc: GTP-binding protein LepA [Ajellomyces dermatitidis SLH14081] gi|239587560|gb|EEQ70203.1| GTP-binding protein LepA [Ajellomyces dermatitidis SLH14081] gi|239614511|gb|EEQ91498.1|
  misc_feature (1)..(345): NCBI GI: 226285561 Blast Desc: GTP-binding protein GUF1 [Paracoccidioides brasiliensis Pb01]
  misc_feature: Useful for introducing or modulating the production of volatile compounds
YFNPGMKKIQDAKIGDTFTTLGSEHLVEPYPGFEEPKPMVFVAAFPTDPSDYNRLSDSIGQLVLNDRSITLYKDHSEALGAGWRVGFLGSLHCSVFQDRLRQEYGASVIITEPAVQTKIVWKDGTETVLQSPADFPDAVGSGKTHGATFYEPFVFATITVPEEYLGRAIELCEASRGEQESIEFFRGMQVILKYRIPTAQLVDDLFGKLKGATKGYATLDYEDAGWRESDLVKLQLLVNKVPVDAIARVCHRSQTERLARQWVTKFKEHVQRQMFEIVIQAAVGNKILARETIKPFRKDVLAKLHASDITRRKKLLEKQKVGRKKLRAIGNVVIEQEAFQRFLAK

SEQ ID NO: 22314 - DNA, 1209 bp, Muscodor strobelii
  misc_feature: SGI EST ID NO. CUFF.52415.0
  misc_feature: Variant of the nucleotide sequence at SEQ ID NO 22312
caacccgggcatgaagaagatccaggacgccaagatcggcgacaccttcaccaccctcggctccgagcacctcgtcgagccctacccgggcttcgaggagcccaagcccatggtcttcgtcgccgccttccccaccgacccctccgactacaaccgtctctccgacagtatcggccagctggtcctcaacgatcgcagcatcaccctctacaaggaccactccgaggccctcggcgctggatggcgcgtgggctttctgggcagtctgcattgctccgtcttccaggaccggctgcggcaggagtacggcgccagcgtcatcatcaccgagcccgccgtccagaccaagattgtctggaaagacggcaccgagaccgtcctgcagagccccgccgatttccccgacgccgtcggaagcggcaagacccatggcgccactttctacgagcctttcgtcttcgccaccatcacggttcccgaggagtatctgggtcgtgccatcgagctgtgcgaggctagccgtggtgagcaggagagcatcgagttcttccgcggcatgcaggtcattctcaagtaccgcatccctacggcccagctcgtagacgatctgtttggcaagctcaagggcgctacgaaaggctacgcgacgctggactacgaagatgcgggctggagggagagcgatctggtgaagctgcagttgctcgtgaacaaggttcctgtcgacgccattgcgcgagtctgtcacaggtcccagacggagcggctggcgaggcagtgggtcaccaagttcaaggaacacgtgcagaggcagatgtttgagattgtcatccaggccgccgtgggcaacaagatcctagcgagggagacgatcaagccgttccggaaggatgtgctagccaagttgcatgcctcggatattacgcgacgcaagaagttgctagaaaagcagaaggtggggaggaagaagctgagggctattgggaatgtcgtcattgagcaggaggcctttcagaggtttcttgcgaaatagtggcgcaagtgatggaattgtatattttgtatggatgtagtgtacatataaggtaatgatgagagggttacgtgtgtagactatatatgcccctatttccaattgaatctcagaatcaagatggagatgcatgatatgttgaaatcagtgactactatgtagcttacaaagtggga

SEQ ID NO: 22315 - DNA, 1158 bp, Muscodor strobelii
  misc_feature: SGI cDNA ID NO. 567574
  misc_feature: Elevated expression when VOC is produced
  misc_feature: Encodes the peptide sequence at SEQ ID NO 22316
atgcccaagattaccaacgtcgagtatttccgggtgaagccccgttggctgatggtcaagatcaccgacgagaatggcgagtttggctggggtgaggccacgctcgagggtcatgacctggccgtagagggaactctggaggagatgatccccagaataatgggaagggaagccaatgagattgagaacatctggcagactttctggagacatggcttctatcgtggtggccccgtctttatgagcgctctatccggtattgacattgccctgtgggatctgaaaggcaaggtgctcaagacgccggtctacgagctcttgggcggaaaggtccgtaacgaggttcaagtctactgctggatcggcggagatagaccctcggacattgagaatgctgccaaggcacgtattgctcaaggccttaagtgtgtcaagatgaacgccaccgaagacttgaactgggttgactccccatccgctctcgatgccacagttgaaagactaaagatcgtcaagtctcttggactcgacgccggtcttgatttccacggacgtctacacaaggccatggctaagcagctcgccagggctcttgagccgcatcgcccccttttcattgaagagcctctgctttgcgagcatcccgaggctatcaagcagctctctggccagaccactattcctatcgctttcggcgaacggttatacactcgttgggatatcaagcgcttccttgaagatgcgtcggtcgacatccttcagcctgatatcgcccacgctggtggtatcagtgaaacgaagagaatcgcacagatggccgaggcctatgatgtgggcattgcgccgcattgcccgctaggaccagttgcatttgctgctagtgttcacgtcgctttaacgacacctaactttgcaattctcgagatgagtctcggcatgcattacaacactgaggctggtgatgatatcgacttgttgacgtatctaaaagatcccaaggtgtttgatatccagagtggtggttatatcaaggttcctggcggctatggtctaggcattgaagtagatgaggagatggtccggaagatctccaaagacactgagccgtggcagtgtaaggtgttccatggccctgatggcagcattcgggagtggtag

SEQ ID NO: 22316 - protein, 385 aa, Muscodor strobelii
  misc_feature: SGI Peptide ID NO. 567574
  misc_feature (126)..(228): Pfam Id: PF01188 Pfam Desc: Mandelate racemase / muconate lactonizing enzyme, C-terminal domain
  misc_feature (6)..(108): Pfam Id: PF02746 Pfam Desc: Mandelate racemase / muconate lactonizing enzyme, N-terminal domain
  misc_feature (1)..(385): NCBI GI: 39973281 Blast Desc: MGG_07935 [Magnaporthe grisea 70-15] gi|145012753|gb|EDJ97407.1| MGG_07935 [Magnaporthe grisea 70-15]
  misc_feature (1)..(382): NCBI GI: 46116226 Blast Desc: FG03955.1 [Gibberella zeae PH-1]
  misc_feature (1)..(385): NCBI GI: 212545855 Blast Desc: mandelate racemase/muconate lactonizing enzyme family protein [Penicillium marneffei ATCC 18224] gi|210064601|gb|EEA18696.1| mandelate racemase/muconate enzyme
  misc_feature (1)..(385): NCBI GI: 242820613 Blast Desc: mandelate racemase/muconate lactonizing enzyme family protein [Talaromyces stipitatus ATCC 10500] gi|218714007|gb|EED13431.1| mandelate racemase/muconate enzyme
  misc_feature (1)..(385): NCBI GI: 169770025 Blast Desc: [Aspergillus oryzae RIB40] gi|238487632|ref|XP_002375054.1| mandelate racemase/muconate lactonizing enzyme family protein [Aspergillus flavus NRRL3357]
  misc_feature (1)..(385): NCBI GI: 255933337 Blast Desc: Pc12g13310 [Penicillium chrysogenum Wisconsin 54-1255] gi|211582758|emb|CAP80958.1| Pc12g13310 [Penicillium chrysogenum Wisconsin 54-1255]
  misc_feature (1)..(360): NCBI GI: 145257196 Blast Desc: An04g02760 [Aspergillus niger] gi|134058556|emb|CAK96443.1| protein product [Aspergillus niger]
  misc_feature (1)..(385): NCBI GI: 70990904 Blast Desc: mandelate racemase/muconate lactonizing enzyme family protein [Aspergillus fumigatus Af293] gi|66847933|gb|EAL88263.1| mandelate racemase/muconate lactonizing enzyme family protein
  misc_feature (1)..(385): NCBI GI: 119496689 Blast Desc: mandelate racemase/muconate lactonizing enzyme family protein [Neosartorya fischeri NRRL 181] gi|119413280|gb|EAW23221.1| mandelate racemase/muconate enzyme
  misc_feature (1)..(385): NCBI GI: 145255204 Blast Desc: An18g04330 [Aspergillus niger] gi|134084482|emb|CAK43236.1| protein product [Aspergillus niger]
  misc_feature (3)..(385): SWISSPROT Homolog: EC 4.2.1.6 Galactonate dehydratase
  misc_feature: Useful for introducing or modulating the production of volatile compounds
MPKITNVEYFRVKPRWLMVKITDENGEFGWGEATLEGHDLAVEGTLEEMIPRIMGREANEIENIWQTFWRHGFYRGGPVFMSALSGIDIALWDLKGKVLKTPVYELLGGKVRNEVQVYCWIGGDRPSDIENAAKARIAQGLKCVKMNATEDLNWVDSPSALDATVERLKIVKSLGLDAGLDFHGRLHKAMAKQLARALEPHRPLFIEEPLLCEHPEAIKQLSGQTTIPIAFGERLYTRWDIKRFLEDASVDILQPDIAHAGGISETKRIAQMAEAYDVGIAPHCPLGPVAFAASVHVALTTPNFAILEMSLGMHYNTEAGDDIDLLTYLKDPKVFDIQSGGYIKVPGGYGLGIEVDEEMVRKISKDTEPWQCKVFHGPDGSIREW

SEQ ID NO: 22317 - DNA, 1832 bp, Muscodor strobelii
  misc_feature: SGI EST ID NO. CUFF.52421.0
  misc_feature: Variant of the nucleotide sequence at SEQ ID NO 22315
ggttaccaatgggtcagagtagacgaggggaaatagtacaaacgtcgcggggacgagtgggccctggggaacatgccccacggagaattggcggagtagttcctgtgggcgaggatcgcgagtcgtgccatgttgggtactgctaagcccaagcctgggccattagccgccgaacctggccagtatgcgcgacgctgctcagcgatgagccggtgtgaaagcgccattgcgcttgaatcaaatagacctgccattctaactgtgacgtgaattgttgttttcgcttctgtttggatagttttatgtatttgttggagggtttcgtatttttctggccgactccgacagaaattgaggcctatcacttctggccccaaaatctattgatttttaaatacagtatcgtcaaagtcgggagatcaaaatgcccaagattaccaacgtcgagtatttccgggtgaagccccgttggctgatggtcaagatcaccgacgagaatggcgagtttggctggggtgaggccacgctcgagggtcatgacctggccgtagagggaactctggaggagatgatccccagaataatgggaagggaagccaatgagattgagaacatctggcagactttctggagacatggcttctatcgtggtggccccgtctttatgagcgctctatccggtattgacattgccctgtgggatctgaaaggcaaggtgctcaagacgccggtctacgagctcttgggcggaaaggtccgtaacgaggttcaagtctactgctggatcggcggagatagaccctcggacattgagaatgctgccaaggcacgtattgctcaaggccttaagtgtgtcaagatgaacgccaccgaagacttgaactgggttgactccccatccgctctcgatgccacagttgaaagactaaagatcgtcaagtctcttggactcgacgccggtcttgatttccacggacgtctacacaaggccatggctaagcagctcgccagggctcttgagccgcatcgcccccttttcattgaagagcctctgctttgcgagcatcccgaggctatcaagcagctctctggccagaccactattcctatcgctttcggcgaacggttatacactcgttgggatatcaagcgcttccttgaagatgcgtcggtcgacatccttcagcctgatatcgcccacgctggtggtatcagtgaaacgaagagaatcgcacagatggccgaggcctatgatgtgggcattgcgccgcattgcccgctaggaccagttgcatttgctgctagtgttcacgtcgctttaacgacacctaactttgcaattctcgagatgagtctcggcatgcattacaacactgaggctggtgatgatatcgacttgttgacgtatctaaaagatcccaaggtgtttgatatccagagtggtggttatatcaaggttcctggcggctatggtctaggcattgaagtagatgaggagatggtccggaagatctccaaagacactgagccgtggcagtgtaaggtgttccatggccctgatggcagcattcgggagtggtaggactatgttgtaagatagcctgataatgttcatgtgtttataaaacatctcttccgctcaagctttcggcctatttttcgaacatattcggcagctctatgatctttgttttctatcagctcagcattgtttattaatatgtggtcacagcgtagatgtaaccagcatcgtttgtatttatagattatcatgcatacagaattctgagagggtcttttggcctagccatgattctctttgttcaaattga

SEQ ID NO: 22318 - DNA, 1131 bp, Muscodor strobelii
  misc_feature: SGI cDNA ID NO. 567575
  misc_feature: Elevated expression when VOC is produced
  misc_feature: Encodes the peptide sequence at SEQ ID NO 22319
atgtctagaaccgtcacggcctcggtcctccatggaaaacgagatcttcgggctgaaatcagaaccattcccgccccggagccggatgagcttcaaattgctgttcgcgccacagggatctgcggctccgatcaacactactacaaccacttcgcaaacggtgatattctaattcgtgagcctttagcgctcggccatgaatcttcgggtgttgttgaagcagtgggcgccaattatacctcgcaattccagacgggtgatcgggtggccatcgaagtcggcgtagcctgcgatacctgccatctgtgcaaagccggtcggtacaacatttgcagagacatgaagtttcgctcttcggcaaagtcgttccctcatttccaggggacattgcaatgtgttgttaaccatccggcaaaatggtgctacaagctgccggagaccgtctccctcgatgaagctgcactccttgaaccactgtccgtcgccatgcacgccgttcgtcgcgcacggcttcagcccggatgcaatgctctcgtcattggtgccggcgccgtgggtctcctcacagccgctatgctgcgcgtcgaaaaagcggccaaaatcacgctcgcggacatcgagggccgacgagttgaatttggcactcagaacgggttcgcagatgcgggtgtcatggtgccacggacaagacctacctccaatgagataatacacaaactcgctcacgcacaagagactgccaagctactagtcggtggcgagtcagcaccactgtacgatgttgtgttcgagtgtaccggtgtcgaaccatgcatcgtcgcatcgatatatgcaaccgcgcccggcggtgcggtcatgcttgtgggcatggggacgccaaatgtgacactgcctttgtctgccgccgcccttcgagaagtcgacattctcggtgtatttcgatacgccaatacgtaccagaagggtctcgagatcctaaaggatagagcggcaagcggtttgccggatatctcgaaattagcgactcatcacgtaaagggaatagatcatgtcgttgatgcttttacgctagctggcaaaccggtcgatgacaaagataatttggtcattaaggtcataatagagacgtag

SEQ ID NO: 22319 - protein, 376 aa, Muscodor strobelii
  misc_feature: SGI Peptide ID NO. 567575
  misc_feature (28)..(144): Pfam Id: PF08240 Pfam Desc: Alcohol dehydrogenase GroES-like domain
  misc_feature (173)..(328): Pfam Id: PF00107 Pfam Desc: Zinc-binding dehydrogenase
  misc_feature (260)..(328): Pfam Id: PF00107 Pfam Desc: Zinc-binding dehydrogenase
  misc_feature (173)..(222): Pfam Id: PF00107 Pfam Desc: Zinc-binding dehydrogenase
  misc_feature (4)..(376): NCBI GI: 145604833 Blast Desc: MGG_13917 [Magnaporthe grisea 70-15] gi|145012754|gb|EDJ97408.1| MGG_13917 [Magnaporthe grisea 70-15]
  misc_feature (3)..(376): NCBI GI: 154296220 Blast Desc: BC1G_12937 [Botryotinia fuckeliana B05.10] gi|150843501|gb|EDN18694.1| BC1G_12937 [Botryotinia fuckeliana B05.10]
  misc_feature (5)..(365): NCBI GI: 156035984 Blast Desc: SS1G_12678 [Sclerotinia sclerotiorum 1980] gi|154698086|gb|EDN97824.1| SS1G_12678 [Sclerotinia sclerotiorum 1980]
  misc_feature (1)..(374): NCBI GI: 171676221 Blast Desc: protein product [Podospora anserina] gi|170936176|emb|CAP60836.1| protein product [Podospora anserina]
  misc_feature (5)..(375): NCBI GI: 261353403 Blast Desc: sorbitol dehydrogenase [Verticillium albo-atrum VaMs.102]
  misc_feature (5)..(375): NCBI GI: 116193843 Blast Desc: CHGG_06639 [Chaetomium globosum CBS 148.51] gi|88182552|gb|EAQ90020.1| CHGG_06639 [Chaetomium globosum CBS 148.51]
  misc_feature (5)..(376): NCBI GI: 256734277 Blast Desc: [Nectria haematococca mpVI 77-13-4]
  misc_feature (5)..(375): NCBI GI: 46130676 Blast Desc: FG08942.1 [Gibberella zeae PH-1]
  misc_feature (4)..(375): NCBI GI: 169621153 Blast Desc: SNOG_13783 [Phaeosphaeria nodorum SN15] gi|111057687|gb|EAT78807.1| SNOG_13783 [Phaeosphaeria nodorum SN15]
  misc_feature (5)..(375): NCBI GI: 256727601 Blast Desc: [Nectria haematococca mpVI 77-13-4]
  misc_feature (9)..(375): SWISSPROT Homolog: EC 1.1.1.14 L-iditol 2-dehydrogenase
  misc_feature: Useful for introducing or modulating the production of volatile compounds
MSRTVTASVLHGKRDLRAEIRTIPAPEPDELQIAVRATGICGSDQHYYNHFANGDILIREPLALGHESSGVVEAVGANYTSQFQTGDRVAIEVGVACDTCHLCKAGRYNICRDMKFRSSAKSFPHFQGTLQCVVNHPAKWCYKLPETVSLDEAALLEPLSVAMHAVRRARLQPGCNALVIGAGAVGLLTAAMLRVEKAAKITLADIEGRRVEFGTQNGFADAGVMVPRTRPTSNEIIHKLAHAQETAKLLVGGESAPLYDVVFECTGVEPCIVASIYATAPGGAVMLVGMGTPNVTLPLSAAALREVDILGVFRYANTYQKGLEILKDRAASGLPDISKLATHHVKGIDHVVDAFTLAGKPVDDKDNLVIKVIIET

SEQ ID NO: 22320 - DNA, 1479 bp, Muscodor strobelii
  misc_feature: SGI EST ID NO. CUFF.52435.1
  misc_feature: Variant of the nucleotide sequence at SEQ ID NO 22318
aagcattcggtcattgcaaagccggaattgacacatgagaggactccaaacgtcacgcaggccggcgggcgagtccgatgccgcgataaagaaaggaccatgatcgatgtcgtccttagggcaaaattaaagtcacgacactgatagtctgcctttaggtgttatttacaacagcggcgaaggacaaactctaagtgcctggcgtaatatcctctccgaatcgtcacaatgtctagaaccgtcacggcctcggtcctccatggaaaacgagatcttcgggctgaaatcagaaccattcccgccccggagccggatgagcttcaaattgctgttcgcgccacagggatctgcggctccgatcaacactactacaaccacttcgcaaacggtgatattctaattcgtgagcctttagcgctcggccatgaatcttcgggtgttgttgaagcagtgggcgccaattatacctcgcaattccagacgggtgatcgggtggccatcgaagtcggcgtagcctgcgatacctgccatctgtgcaaagccggtcggtacaacatttgcagagacatgaagtttcgctcttcggcaaagtcgttccctcatttccaggggacattgcaatgtgttgttaaccatccggcaaaatggtgctacaagctgccggagaccgtctccctcgatgaagctgcactccttgaaccactgtccgtcgccatgcacgccgttcgtcgcgcacggcttcagcccggatgcaatgctctcgtcattggtgccggcgccgtgggtctcctcacagccgctatgctgcgcgtcgaaaaagcggccaaaatcacgctcgcggacatcgagggccgacgagttgaatttggcactcagaacgggttcgcagatgcgggtgtcatggtgccacggacaagacctacctccaatgagataatacacaaactcgctcacgcacaagagactgccaagctactagtcggtggcgagtcagcaccactgtacgatgttgtgttcgagtgtaccggtgtcgaaccatgcatcgtcgcatcgatatatgcaaccgcgcccggcggtgcggtcatgcttgtgggcatggggacgccaaatgtgacactgcctttgtctgccgccgcccttcgagaagtcgacattctcggtgtatttcgatacgccaatacgtaccagaagggtctcgagatcctaaaggatagagcggcaagcggtttgccggatatctcgaaattagcgactcatcacgtaaagggaatagatcatgtcgttgatgcttttacgctagctggcaaaccggtcgatgacaaagataatttggtcattaaggtcataatagagacgtagaacgactgcaagttgtatgcatatgtggatctaattacctctctagtaatgtgtccccaaacgtgtgatctctataatccttttctcccctcaaatttgagcttcaagcgtgcttgtcta

SEQ ID NO: 22321 - DNA, 789 bp, Muscodor strobelii
  misc_feature: SGI cDNA ID NO. 567576
  misc_feature: Elevated expression when VOC is produced
  misc_feature: Encodes the peptide sequence at SEQ ID NO 22322
atggcttcctatcttgaacagctgttctcgctgaaagggcatctcgcagttattacaggcggcacgcgaggtatcgggcagtcaatggctcttgcgctcgctggtgcaggctccgatatcatccttattcaacgtgacgagtccaatctcgaaactaggggaaagattgaagcactagggcgcaaggccttcgtctacacagcagatttaaattcgcaggaagctgtcgaggggctgtcgaagcgcatactgggcgatggtcacgacgtcgacattctcgtcacttgcgctggtatccagagacgacatcccgcgcacgttttccccatgtccgactgggacgatgttttacaagtcaacctcaagaccgtgtggacactcgaccgggacttcggtgcgtatatgctcacacgcaagccagatactacagggcggcgcggggccatcatcaacgttgcctctctcgtctcattccaaggtggactgaatgttcccgcctacgctgcagcgaagggtggtatcgcgcagctcacgaaatcactatcaaaccagtggtcgagcgatggcatcaacgtcaacgccattgctcctggctatattcatactgacatgaatgaggccttattgaaggacgagaaaaggtccgcgagtattctcgaacgtattcccatgggtagatggggaacaccgcaggattttgagggcgcaactgtgtttcttgccggcgcagcatgtcgatatgtatcgggtgaaatagtgaccgttgatggaggctggatggggaggtaa

SEQ ID NO: 22322 - protein, 262 aa, Muscodor strobelii
  misc_feature: SGI Peptide ID NO. 567576
  misc_feature (14)..(186): Pfam Id: PF00106 Pfam Desc: short chain dehydrogenase
  misc_feature (17)..(203): Pfam Id: PF08659 Pfam Desc: KR domain
  misc_feature (4)..(262): NCBI GI: 145604835 Blast Desc: MGG_13918 [Magnaporthe grisea 70-15] gi|145012755|gb|EDJ97409.1| MGG_13918 [Magnaporthe grisea 70-15]
  misc_feature (8)..(262): NCBI GI: 169770027 Blast Desc: [Aspergillus oryzae RIB40] gi|238487630|ref|XP_002375053.1| 2-deoxy-D-gluconate 3-dehydrogenase, [Aspergillus flavus NRRL3357] protein product
  misc_feature (5)..(262): NCBI GI: 242820619 Blast Desc: short-chain dehydrogenase, [Talaromyces stipitatus ATCC 10500] gi|242820625|ref|XP_002487544.1| short-chain dehydrogenase, [Talaromyces stipitatus ATCC 10500] short-chain
  misc_feature (8)..(262): NCBI GI: 115399230 Blast Desc: 2-deoxy-D-gluconate 3-dehydrogenase [Aspergillus terreus NIH2624] gi|114192087|gb|EAU33787.1| 2-deoxy-D-gluconate 3-dehydrogenase [Aspergillus terreus NIH2624]
  misc_feature (5)..(262): NCBI GI: 212545857 Blast Desc: gluconate 5-dehydrogenase, [Penicillium marneffei ATCC 18224] gi|210064602|gb|EEA18697.1| gluconate 5-dehydrogenase, [Penicillium marneffei ATCC 18224]
  misc_feature (5)..(262): NCBI GI: 189200192 Blast Desc: 2-deoxy-D-gluconate 3-dehydrogenase [Pyrenophora tritici-repentis Pt-1C-BFP] gi|187983532|gb|EDU49020.1| 2-deoxy-D-gluconate 3-dehydrogenase [Pyrenophora tritici-repentis
  misc_feature (8)..(246): NCBI GI: 145257200 Blast Desc: An04g02770 [Aspergillus niger] gi|134058557|emb|CAK96444.1| protein product [Aspergillus niger]
  misc_feature (3)..(262): NCBI GI: 169608778 Blast Desc: SNOG_07473 [Phaeosphaeria nodorum SN15] gi|160701712|gb|EAT84939.2| SNOG_07473 [Phaeosphaeria nodorum SN15]
  misc_feature (1)..(262): NCBI GI: 121701119 Blast Desc: 2-deoxy-D-gluconate 3-dehydrogenase, [Aspergillus clavatus NRRL 1] gi|119396967|gb|EAW07398.1| 2-deoxy-D-gluconate 3-dehydrogenase, [Aspergillus clavatus NRRL 1]
  misc_feature (7)..(262): NCBI GI: 39970895 Blast Desc: conserved [Magnaporthe grisea 70-15] gi|149210399|ref|XP_001522574.1| MGCH7_ch7g677 [Magnaporthe grisea 70-15] gi|86196632|gb|EAQ71270.1| MGCH7_ch7g677 grisea
  misc_feature (4)..(262): SWISSPROT Homolog: EC 1.1.1.127 2-dehydro-3-deoxy-D-gluconate 5-dehydrogenase
  misc_feature: Useful for introducing or modulating the production of volatile compounds
MASYLEQLFSLKGHLAVITGGTRGIGQSMALALAGAGSDIILIQRDESNLETRGKIEALGRKAFVYTADLNSQEAVEGLSKRILGDGHDVDILVTCAGIQRRHPAHVFPMSDWDDVLQVNLKTVWTLDRDFGAYMLTRKPDTTGRRGAIINVASLVSFQGGLNVPAYAAAKGGIAQLTKSLSNQWSSDGINVNAIAPGYIHTDMNEALLKDEKRSASILERIPMGRWGTPQDFEGATVFLAGAACRYVSGEIVTVDGGWMGR

SEQ ID NO: 22323 - DNA, 1331 bp, Muscodor strobelii
  misc_feature: SGI EST ID NO. CUFF.52429.0
  misc_feature: Variant of the nucleotide sequence at SEQ ID NO 22321
tgacattactgacaggtactaaagttgcaccgctcgaacgtcgtctattatggatcaggtgactttacccccaagccgccaaagtcattgaaggaacatgtacctgaggtttcgacccctcattgccttatccgcttggggttcatcagtgaaacgccgtctcatatgtcgtaggcaaaatacggatccgatgtcgtgggacaggtctagaaaacagactatcggtgtttcggagcctttagacgtgctgttgcattgtgctaatactttcaccttgaatagagtcaatgcaaccttgctgctccgatcaaaattctcaaggggatattcaagttagaaaagcacgacgcatttgaacccccgctcaaaaacgacgagccacgagccttctactactgaattaaattctacaccatggcttcctatcttgaacagctgttctcgctgaaagggcatctcgcagttattacaggcggcacgcgaggtatcgggcagtcaatggctcttgcgctcgctggtgcaggctccgatatcatccttattcaacgtgacgagtccaatctcgaaactaggggaaagattgaagcactagggcgcaaggccttcgtctacacagcagatttaaattcgcaggaagctgtcgaggggctgtcgaagcgcatactgggcgatggtcacgacgtcgacattctcgtcacttgcgctggtatccagagacgacatcccgcgcacgttttccccatgtccgactgggacgatgttttacaagtcaacctcaagaccgtgtggacactcgaccgggacttcggtgcgtatatgctcacacgcaagccagatactacagggcggcgcggggccatcatcaacgttgcctctctcgtctcattccaaggtggactgaatgttcccgcctacgctgcagcgaagggtggtatcgcgcagctcacgaaatcactatcaaaccagtggtcgagcgatggcatcaacgtcaacgccattgctcctggctatattcatactgacatgaatgaggccttattgaaggacgagaaaaggtccgcgagtattctcgaacgtattcccatgggtagatggggaacaccgcaggattttgagggcgcaactgtgtttcttgccggcgcagcatgtcgatatgtatcgggtgaaatagtgaccgttgatggaggctggatggggaggtaaaatagtgaaatgctagaatactatttggattgtcacgatttggcgaaattgcatatctgcgggcactatactgggacacacaatccaggtcatagacacttggaatgatacacacacttagatggctg

SEQ ID NO: 22324 - DNA, 927 bp, Muscodor strobelii
  misc_feature: SGI cDNA ID NO. 567577
  misc_feature: Encodes the peptide sequence at SEQ ID NO 22325
atgccgtcctcatcctccctacccgcagggttgtatgtcccaactgtcgcctttttcacttccgaagatactgtcgaccaaaagacgacttcagagcacgcccttcgtctggccaaggctggtgtgcagggtatcgtcacacacggatctaatggtgaagccgtgcacctggaccatgatgaacgctctctcatcacaaagctcacgcgcgaggccctcgacaacgcggggtacacaagcatgcccgtcatcgttggctgcggcgcacaaagcacccgggagaccattcagctttgcaaagaagctgccgcggccggcggcacgcacgtcctgatcctgcccccggcctattatggtagcctcaccaccatcgatcttattatcgcgcacttccaagccgttgcagatgcatcccctattcctgttctcatctacaacttcccggccgcttgtggtggtctggatctgagctccgatgtcatcctcgagctcgctaagcatcctaatattcacggatgcaagctgacttgcggcaacaccggtaaactcgcacgtgtcgtagccggcactgatggcaccaatttccgcaccatgggtggcagcgtcgacttcactgtgcagatgcttgccgtaggtggtcatggtatcattggaggcaccggtaacattgcgcccagagcttgccacgagatcttcaagctgtgggaagccgggaagcaaaaggaggctttagccatgcagcagattgtggcgagaggcgactgggtgtgtatcaagggcggatttgtttcggtgaaggtcggtctccaaaaatacttcggatacggcggagaaccgaggaaaccgtgcgctttgccaacaggtgacaagctcacagcgcaacaagaagaattggctgaattgatcgaggcagagaagaagctatag

SEQ ID NO: 22325 - protein, 308 aa, Muscodor strobelii
  misc_feature: SGI Peptide ID NO. 567577
  misc_feature (7)..(306): Pfam Id: PF00701 Pfam Desc: Dihydrodipicolinate synthetase family
  misc_feature (10)..(308): NCBI GI: 256734695 Blast Desc: NECHADRAFT_75207 [Nectria haematococca mpVI 77-13-4]
  misc_feature (7)..(308): NCBI GI: 39973277 Blast Desc: MGG_07933 [Magnaporthe grisea 70-15] gi|145012751|gb|EDJ97405.1| MGG_07933 [Magnaporthe grisea 70-15]
  misc_feature (10)..(308): NCBI GI: 156061545 Blast Desc: SS1G_02917 [Sclerotinia sclerotiorum 1980] gi|154700319|gb|EDO00058.1| SS1G_02917 [Sclerotinia sclerotiorum 1980]
  misc_feature (6)..(295): NCBI GI: 154319600 Blast Desc: BC1G_02281 [Botryotinia fuckeliana B05.10] gi|150855939|gb|EDN31131.1| BC1G_02281 [Botryotinia fuckeliana B05.10]
  misc_feature (10)..(308): NCBI GI: 67522092 Blast Desc: AN1503.2 [Aspergillus nidulans FGSC A4] gi|74598145|sp|Q5BD77.1|DAPAL_EMENI RecName: Full=Dihydrodipicolinate synthase-like protein AN1503; protein
  misc_feature (5)..(308): NCBI GI: 255945519 Blast Desc: dap-Penicillium chrysogenum [Penicillium chrysogenum Wisconsin 54-1255] gi|211588262|emb|CAP86364.1| dap-Penicillium chrysogenum [Penicillium chrysogenum Wisconsin 54-1255]
  misc_feature (7)..(308): NCBI GI: 145253112 Blast Desc: An16g07700 [Aspergillus niger] gi|134083627|emb|CAL00542.1| protein product [Aspergillus niger]
  misc_feature (2)..(308): NCBI GI: 121719827 Blast Desc: dihydrodipicolinate synthetase family protein [Aspergillus clavatus NRRL 1] gi|119404824|gb|EAW15186.1| dihydrodipicolinate synthetase family protein [Aspergillus NRRL
  misc_feature (7)..(308): NCBI GI: 226291498 Blast Desc: N-acetylneuraminate lyase [Paracoccidioides brasiliensis Pb18]
  misc_feature (4)..(308): NCBI GI: 261205952 Blast Desc: dihydrodipicolinate synthetase [Ajellomyces dermatitidis SLH14081] gi|239592772|gb|EEQ75353.1| dihydrodipicolinate synthetase [Ajellomyces dermatitidis
  misc_feature (19)..(211): SWISSPROT Homolog: EC 4.2.1.52 Dihydrodipicolinate synthase
MPSSSSLPAGLYVPTVAFFTSEDTVDQKTTSEHALRLAKAGVQGIVTHGSNGEAVHLDHDERSLITKLTREALDNAGYTSMPVIVGCGAQSTRETIQLCKEAAAAGGTHVLILPPAYYGSLTTIDLIIAHFQAVADASPIPVLIYNFPAACGGLDLSSDVILELAKHPNIHGCKLTCGNTGKLARVVAGTDGTNFRTMGGSVDFTVQMLAVGGHGIIGGTGNIAPRACHEIFKLWEAGKQKEALAMQQIVARGDWVCIKGGFVSVKVGLQKYFGYGGEPRKPCALPTGDKLTAQQEELAELIEAEKKL

SEQ ID NO: 22326 - DNA, 1547 bp, Muscodor strobelii
  misc_feature: SGI EST ID NO. CUFF.52438.0
  misc_feature: Variant of the nucleotide sequence at SEQ ID NO 22324
gcagtaccgaggtagataaggaaaacacgaagaaataaaagtacaacgcatacgtgggcttgcgcactcaagatttcatctaagcggcaacttggtctgactgacatagactcatcctcctcattgcaaccgtgactattcccattactcaacagctttctacctattcgctgagtccacaggtggcagtcaacaacaccacgctctactttttcctgcctatcttctatcaatacaaatcctgcctcttctaccgctaatcctatcacctcagagcctttacagacgttctagcgtcagcacgactgcggaatatctattgccagagctagggatagcacgctcatcagcttacactacccttctttgccatgccgtcctcatcctccctacccgcagggttgtatgtcccaactgtcgcctttttcacttccgaagatactgtcgaccaaaagacgacttcagagcacgcccttcgtctggccaaggctggtgtgcagggtatcgtcacacacggatctaatggtgaagccgtgcacctggaccatgatgaacgctctctcatcacaaagctcacgcgcgaggccctcgacaacgcggggtacacaagcatgcccgtcatcgttggctgcggcgcacaaagcacccgggagaccattcagctttgcaaagaagctgccgcggccggcggcacgcacgtcctgatcctgcccccggcctattatggtagcctcaccaccatcgatcttattatcgcgcacttccaagccgttgcagatgcatcccctattcctgttctcatctacaacttcccggccgcttgtggtggtctggatctgagctccgatgtcatcctcgagctcgctaagcatcctaatattcacggatgcaagctgacttgcggcaacaccggtaaactcgcacgtgtcgtagccggcactgatggcaccaatttccgcaccatgggtggcagcgtcgacttcactgtgcagatgcttgccgtaggtggtcatggtatcattggaggcaccggtaacattgcgcccagagcttgccacgagatcttcaagctgtgggaagccgggaagcaaaaggaggctttagccatgcagcagattgtggcgagaggcgactgggtgtgtatcaagggcggatttgtttcggtgaaggtcggtctccaaaaatacttcggatacggcggagaaccgaggaaaccgtgcgctttgccaacaggtgacaagctcacagcgcaacaagaagaattggctgaattgatcgaggcagagaagaagctatagcatggtatgcgaattgattgtaagcatggcgcagcatacctagttagacttgcaagtacttctgctcttcagttatcatgcatctcaatgaaaccatcatcttttcctcaacacgctctcgaattctcgacctatatgtttcagctccttgaaaccctaagcctgactttatttctgctaggcaagacgtgagtgactatcacgactatgcctattcaacgcagtggtgattatgatgttacatcttgt

SEQ ID NO: 22327 - DNA, 888 bp, Muscodor strobelii
  misc_feature: SGI cDNA ID NO. 567578
  misc_feature: Encodes the peptide sequence at SEQ ID NO 22328
atggcctacgagcatttcctagcccgcttgacccttcgccagctggagcaagaagattcctttccagaaagacaccttactcgtcccagcgacgcaaatcatgacaatgaccatacattgacttcccagcgcgagaggccgccacggacccggtctgagtccccggagggttatgattttagaggacgatactgggaggctgtagacttactgaagctcgatcaggaagagtccaggaagccacctaacgtttgggactatatatatgacgatgtgtgtctccctccgaccggcgtggcaaagacgttgtcgattcggagactaggccggatgccgatccacagagcatggagacggaaaagccacaaagagaagccgaacctgcaacaaatcaacatcgttgaggctatcatggtgtatgagagaggtcagattgttgatcccaacatgcagtctgatcggtgtcgcgacggcaagggagcaactcgagaatgtgttattatgccctgtattggcgaaactatctgctccaactgcttatatgaaggctctgctacggaatgcagtatatgcaattgtacagcacaggctcctgacgcgcacgagatggacgactcggggagagggagaaaaggtagagggaaaccaacggctcatgtcaatcccaccatggaagattacgtgagtgatctgacagtcctgatgatcgtcctcaagcttatcgagcagatgaaacaagcgagcgcaatcggtcttaggaatgatgtgaacatcgcttccaaggctaagaggatcgaaaaggcagcccttgaggttgcgagggctgctagagaatggggcctcttaggggcgtcgatgccagggccccaggatttcgagactccgtga

SEQ ID NO: 22328 - protein, 295 aa, Muscodor strobelii
  misc_feature: SGI Peptide ID NO. 567578
MAYEHFLARLTLRQLEQEDSFPERHLTRPSDANHDNDHTLTSQRERPPRTRSESPEGYDFRGRYWEAVDLLKLDQEESRKPPNVWDYIYDDVCLPPTGVAKTLSIRRLGRMPIHRAWRRKSHKEKPNLQQINIVEAIMVYERGQIVDPNMQSDRCRDGKGATRECVIMPCIGETICSNCLYEGSATECSICNCTAQAPDAHEMDDSGRGRKGRGKPTAHVNPTMEDYVSDLTVLMIVLKLIEQMKQASAIGLRNDVNIASKAKRIEKAALEVARAAREWGLLGASMPGPQDFETP

SEQ ID NO: 22329 - DNA, 1479 bp, Muscodor strobelii
  misc_feature: SGI cDNA ID NO. 567579
  misc_feature: Encodes the peptide sequence at SEQ ID NO 22330
atggacaccgccaaaccagacaacacctccgagcagatcgagacgaaggaggttggatcttaccatgccagtcatgcgctgccagagagcctggtagctcttagcgaagaagaactctacaggcttggtcgcatggcgacgctgaagcttgactgcacgctcatgccgatactggtcatcatgtatatcctcaactatcttgaccgccaaaacattgccagcgctaggctggcgggacttgaggaggatctcgggttgagtaaggtccagtatcagactgccgttagcattcttttcgtcggatatatcctggcccaaacgccctccaatatcatcgccaacaaagtgtcgtggccaggcgtttacatttgcgctggcatggccgcctggggtctgctctcagccctgacagctctcgttaccggcttcgcgggtctcctcgtgattcgtgttctgctcggtgtcattgaggccgttttcttcccgggtgccctctttctcctctccctattctacaaccggaagcaattcgccttccgcactgcaatactttattccggctcacaggttggcaatgcaattggcggcctttttgcgattggagttttgcgcctcgatggccagcatggtatctcgggctggcgctggctttttatcatcgaaggcgttttgactatctttctcgcgctatgcttcgtctttgtcataccaaactcgaataagaaaattatcggcttgtccgccatcgaatgcgaatatgtccagtggaacttccgctcagatcttggacaatcagatgacagccacgagatttctggctttcagggatttatcatggcagccaaggacccgaagacatggttactcactggcatcctgtactcgacctacattgttggcacagttgtcaacttcttccctacagtcgttggaggactaggatttggacgtaccgagacctacggtctcacggcacccccatttatcttgtgcgtgttcgtgatgttgatcaatggctggcactcggacaagacccaggaaaggtacttgcatatcattgtgcccctgtgcgtgggcctcattgcgaacataattgccgtgtcaacactcaatatcggcgcacgttactttgccgttctcatcctaccagcttctatctacggtgcagccgtcgtaatcctatcctggatcaccggtagcctgtcgcagcctaccgctaagcgtgccgccgctatagcatttatcaattctctgtgcaacacgccaaacatctttgggtcgtacctattttataacggcccgcgctaccttactgccttcattgtctttgtggcagcttcaggtcttgccatcggatttgccacaatcactaggatccatcttcaaggacaaaataaaaggctcgatcgtggtgacaacccaggcaagcacggcccaactgagtctcaagttgctagcggcttcagatacatcttatag

SEQ ID NO: 22330 - protein, 492 aa, Muscodor strobelii
  misc_feature: SGI Peptide ID NO. 567579
  misc_feature (58)..(427): Pfam Id: PF07690 Pfam Desc: Major Facilitator Superfamily
  misc_feature (5)..(492): NCBI GI: 145609489 Blast Desc: MGG_13442 [Magnaporthe grisea 70-15] gi|145016850|gb|EDK01280.1| MGG_13442 [Magnaporthe grisea 70-15]
  misc_feature (1)..(492): NCBI GI: 212538749 Blast Desc: MFS transporter, [Penicillium marneffei ATCC 18224] gi|210069272|gb|EEA23363.1| MFS transporter, [Penicillium marneffei ATCC 18224]
  misc_feature (3)..(492): NCBI GI: 242805719 Blast Desc: MFS transporter, [Talaromyces stipitatus ATCC 10500] gi|218715215|gb|EED14637.1| MFS transporter, [Talaromyces stipitatus ATCC 10500]
  misc_feature (27)..(492): NCBI GI: 238500544 Blast Desc: pantothenate transporter, [Aspergillus flavus NRRL3357] gi|220691743|gb|EED48090.1| pantothenate transporter, [Aspergillus flavus NRRL3357]
  misc_feature (10)..(492): NCBI GI: 58271348 Blast Desc: nicotinamide mononucleotide permease [Cryptococcus neoformans var. neoformans JEC21] gi|57229089|gb|AAW45523.1| nicotinamide mononucleotide permease, [Cryptococcus neoformans
  misc_feature (10)..(492): NCBI GI: 134114884 Blast Desc: CNBH1950 [Cryptococcus neoformans var. neoformans B-3501A] gi|50256368|gb|EAL19093.1| CNBH1950 [Cryptococcus neoformans var. neoformans B-3501A]
  misc_feature (27)..(491): NCBI GI: 241957998 Blast Desc: permease of the major facilitator superfamily, [Candida dubliniensis CD36] gi|223645063|emb|CAX39657.1| permease of the major facilitator superfamily, [Candida dubliniensis CD36]
  misc_feature (4)..(491): NCBI GI: 255722519 Blast Desc: conserved [Candida tropicalis MYA-3404] gi|240136683|gb|EER36236.1| conserved [Candida tropicalis MYA-3404]
  misc_feature (1)..(491): NCBI GI: 146414293 Blast Desc: PGUG_05072 [Pichia guilliermondii ATCC 6260] gi|146392816|gb|EDK40974.1| PGUG_05072 [Pichia guilliermondii ATCC 6260]
  misc_feature (1)..(491): NCBI GI: 68475965 Blast Desc: CaO19.3232 [Candida albicans SC5314] gi|68476096|ref|XP_717857.1| CaO19.10742 [Candida albicans SC5314] gi|46439591|gb|EAK98907.1| CaO19.10742 [Candida albicans
MDTAKPDNTSEQIETKEVGSYHASHALPESLVALSEEELYRLGRMATLKLDCTLMPILVIMYILNYLDRQNIASARLAGLEEDLGLSKVQYQTAVSILFVGYILAQTPSNIIANKVSWPGVYICAGMAAWGLLSALTALVTGFAGLLVIRVLLGVIEAVFFPGALFLLSLFYNRKQFAFRTAILYSGSQVGNAIGGLFAIGVLRLDGQHGISGWRWLFIIEGVLTIFLALCFVFVIPNSNKKIIGLSAIECEYVQWNFRSDLGQSDDSHEISGFQGFIMAAKDPKTWLLTGILYSTYIVGTVVNFFPTVVGGLGFGRTETYGLTAPPFILCVFVMLINGWHSDKTQERYLHIIVPLCVGLIANIIAVSTLNIGARYFAVLILPASIYGAAVVILSWITGSLSQPTAKRAAAIAFINSLCNTPNIFGSYLFYNGPRYLTAFIVFVAASGLAIGFATITRIHLQGQNKRLDRGDNPGKHGPTESQVASGFRYIL

SEQ ID NO: 22331 - DNA, 1410 bp, Muscodor strobelii
  misc_feature: SGI cDNA ID NO. 567580
  misc_feature: Encodes the peptide sequence at SEQ ID NO 22332
atggctgccatcgagggcacagaggtctcacggcacaaccagcgaaaagactgctgggtcgtcttacacggaaaggtttgggatgtcaccgaattccttgataatcatccaggtggtgctagtgtgattttaaaatacgcgggccgggatgccagcgaggcttacaatgaagtacacgatctagaaacagtctcttccactttaccctcaagcaaatgtctaggcagcatcaatccaaattctttactacagtcacaggagcccgaggccaatacacaagccgtggtacccaaatcgagataccctcctctcggggccatggtcaacgtagctgatttcgagaaagttgctcaaatctatctcagtccagccggttgggcttactattccgctggagcagaggacgaattcagtttgagcgatacgcagcggttgtttcgcaaaataacgttccgtccgaggatcttgcgtcgtgtcgagcccgtctctacggcaatctgcatcctaggatatccgtcatcacttcctttctatatctcgccaacaggattgggccgatatgcatacaaagacgccgagccgaccatggctcgcgttgccggaaatgaaggccttatctactgtatgccaacctctgcaacacatgaagcagtctttaaagagcggacaaaccctaatcagcccttatttgttcaactatacaccacacgagagagagccaaagcccaggagatgattcagaaagtggaggctcttggagcacgtgctatctttgtgaccgtcgactctcccgtactgggacgaagagagagggacgaacgtgttaaagttgctgaaggtggtgatgcgtccgataacaccggcgtggcgagaaccggatcaatgtcattactcaaccccaatctcacatgggatgaccttaagtggctgcgtgagactaccaatctaccacttattctcaaaggcgttcaaactgtcgaagatgctgttctcgcatacgatcatggcgtcgagggtatcgttctatcaaaccacggtgggcgatcactagattttgcccaggctcctatccttacgcttcttgagattcgcaagcatgcggctcatctgctcgcacctcatgttcgcgagaagttccaagttttcgtagacggagggtacaggagaggcacagatgttctcaaggcacttgctctaggggcaacggcagtcggaattggccggccgtgtttgtattccatgtgtgcagactacggggaggctggattgaagcgactggtacaaatgctgagattcgagattgaaaccagcatggcgcttgtaggagccacaagggtaggcgaactcgtgcccgagttaatcaacagtgagcgtgccgaaaatgaaatgtctcggcgtgtgaaactataa

SEQ ID NO: 22332 - protein, 469 aa, Muscodor strobelii
  misc_feature: SGI Peptide ID NO. 567580
  misc_feature (3)..(78): Pfam Id: PF00173 Pfam Desc: Cytochrome b5-like Heme/Steroid binding domain
  misc_feature (117)..(456): Pfam Id: PF01070 Pfam Desc: FMN-dependent dehydrogenase
  misc_feature (3)..(60): Pfam Id: PF00173 Pfam Desc: Cytochrome b5-like Heme/Steroid binding domain
  misc_feature (300)..(456): Pfam Id: PF01070 Pfam Desc: FMN-dependent dehydrogenase
  misc_feature (117)..(272): Pfam Id: PF01070 Pfam Desc: FMN-dependent dehydrogenase
  misc_feature (376)..(414): Pfam Id: PF01645 Pfam Desc: Conserved region in glutamate synthase
  misc_feature (107)..(469): NCBI GI: 145609487 Blast Desc: MGG_13441 [Magnaporthe grisea 70-15] gi|145016849|gb|EDK01279.1| MGG_13441 [Magnaporthe grisea 70-15]
  misc_feature (8)..(469): NCBI GI: 115399236 Blast Desc: conserved [Aspergillus terreus NIH2624] gi|114192090|gb|EAU33790.1| conserved [Aspergillus terreus NIH2624]
  misc_feature (1)..(469): NCBI GI: 145257215 Blast Desc: An04g02840 [Aspergillus niger] gi|134058564|emb|CAK96451.1| protein product [Aspergillus niger]
  misc_feature (4)..(464): NCBI GI: 242812213 Blast Desc: oxidoreductase, [Talaromyces stipitatus ATCC 10500] gi|218714251|gb|EED13674.1| oxidoreductase, [Talaromyces stipitatus ATCC 10500]
  misc_feature (1)..(464): NCBI GI: 212544344 Blast Desc: cytochrome B2, [Penicillium marneffei ATCC 18224] gi|210065295|gb|EEA19389.1| cytochrome B2, [Penicillium marneffei ATCC 18224]
  misc_feature (8)..(469): NCBI GI: 255933333 Blast Desc: Pc12g13290 [Penicillium chrysogenum Wisconsin 54-1255] gi|211582756|emb|CAP80956.1| Pc12g13290 [Penicillium chrysogenum Wisconsin 54-1255]
  misc_feature (8)..(469): NCBI GI: 238487638 Blast Desc: L-lactate dehydrogenase, [Aspergillus flavus NRRL3357] gi|220699936|gb|EED56275.1| L-lactate dehydrogenase, [Aspergillus flavus NRRL3357]
  misc_feature (9)..(463): NCBI GI: 169770019 Blast Desc: [Aspergillus oryzae RIB40] gi|83767338|dbj|BAE57477.1| protein product [Aspergillus oryzae]
  misc_feature (4)..(463): NCBI GI: 170098374 Blast Desc: [Laccaria bicolor S238N-H82] gi|164644844|gb|EDR09093.1| [Laccaria bicolor S238N-H82]
  misc_feature (4)..(456): NCBI GI: 225636766 Blast Desc: glyoxylate dehydrogenase [Fomitopsis palustris]
  misc_feature (9)..(461): SWISSPROT Homolog: EC 1.1.2.3 L-lactate dehydrogenase (cytochrome)
MAAIEGTEVSRHNQRKDCWVVLHGKVWDVTEFLDNHPGGASVILKYAGRDASEAYNEVHDLETVSSTLPSSKCLGSINPNSLLQSQEPEANTQAVVPKSRYPPLGAMVNVADFEKVAQIYLSPAGWAYYSAGAEDEFSLSDTQRLFRKITFRPRILRRVEPVSTAICILGYPSSLPFYISPTGLGRYAYKDAEPTMARVAGNEGLIYCMPTSATHEAVFKERTNPNQPLFVQLYTTRERAKAQEMIQKVEALGARAIFVTVDSPVLGRRERDERVKVAEGGDASDNTGVARTGSMSLLNPNLTWDDLKWLRETTNLPLILKGVQTVEDAVLAYDHGVEGIVLSNHGGRSLDFAQAPILTLLEIRKHAAHLLAPHVREKFQVFVDGGYRRGTDVLKALALGATAVGIGRPCLYSMCADYGEAGLKRLVQMLRFEIETSMALVGATRVGELVPELINSERAENEMSRRVKL

SEQ ID NO: 22333 - DNA, 972 bp, Muscodor strobelii
  misc_feature: SGI cDNA ID NO. 567581
  misc_feature: Encodes the peptide sequence at SEQ ID NO 22334
atggcacctccgaatcagatcgacgtcctcctttacgggctaggcgcaatcggttctttctacgccttcattctcagtcgagcggaagatgttaggctcactgttgtggcccgatcgaactacgatgcagtcaaaagtaatggcattcagatcactagcgaaaaccacggcaaacatgtcgttaagccatatagagttataaaggcagccgcagaggctcagtcgacattcgattttattgtatgcgctcataaagctatcgaccaggccgctgttcctgcacaaattgctccgggtatcgacgacaaaaccacgatagtccttattcagaatggggttggaaatgaagaaccgttcaggaagcgatttccgggcgctactattatatcatgcgtgacctgggtgggggctgctcaacccgagcccggcatcgtcacgcatacgagatcggaggatatgcagatcggcctatttccaaatagagcggtggacaaaaatctagaaaaagagcggctagggaaatttgcttcgctcctcacaaatggcaagacagtgttccaggtggttcctaatatccaggttcaacgatgggagaaggtcgtttggaacgcggcatggaactcgttaacagccatgactcttctagatacccacagctggctcaactcttctcctagcgcaatgcccatgacaagaaaactcatgcacgaagtcatcgctgtggctcaaaaatgcgacgtgccaatcgagtactcgctagccgacaaactgattgataagattctcaacatgccgccaatcggcagcagtatgcaaaacgatgcgaaggccggaaaacctatggaggttgaaatcattcttggataccccgtgtctaagggcaaagaactgggattgagcgtgcctacaatcgaaaccatctacgtgattctcactggtatgaaccagagattccttgaagctagcttgtag

SEQ ID NO: 22334 - protein, 323 aa, Muscodor strobelii
  misc_feature: SGI Peptide ID NO. 567581
  misc_feature (9)..(160): Pfam Id: PF02558 Pfam Desc: Ketopantoate reductase PanE/ApbA
  misc_feature (191)..(315): Pfam Id: PF08546 Pfam Desc: Ketopantoate reductase PanE/ApbA C terminal
  misc_feature (6)..(322): NCBI GI: 46116220 Blast Desc: FG03952.1 [Gibberella zeae PH-1]
  misc_feature (5)..(321): NCBI GI: 255933331 Blast Desc: Pc12g13280 [Penicillium chrysogenum Wisconsin 54-1255] gi|211582755|emb|CAP80955.1| Pc12g13280 [Penicillium chrysogenum Wisconsin 54-1255]
  misc_feature (1)..(318): NCBI GI: 242812203 Blast Desc: ketopantoate reductase family protein, [Talaromyces stipitatus ATCC 10500] gi|242812208|ref|XP_002485911.1| ketopantoate reductase family protein, [Talaromyces stipitatus
  misc_feature (1)..(318): NCBI GI: 212544342 Blast Desc: ketopantoate reductase family protein, [Penicillium marneffei ATCC 18224] gi|210065294|gb|EEA19388.1| ketopantoate reductase family protein, [Penicillium marneffei ATCC 18224]
  misc_feature (1)..(318): NCBI GI: 261360556 Blast Desc: 2-dehydropantoate 2-reductase [Verticillium albo-atrum VaMs.102]
  misc_feature (5)..(323): NCBI GI: 238487636 Blast Desc: ketopantoate reductase family protein, [Aspergillus flavus NRRL3357] gi|220699935|gb|EED56274.1| ketopantoate reductase family protein, [Aspergillus flavus NRRL3357]
  misc_feature (1)..(315): NCBI GI: 115383704 Blast Desc: conserved [Aspergillus terreus NIH2624] gi|114196091|gb|EAU37791.1| conserved [Aspergillus terreus NIH2624]
  misc_feature (17)..(323): NCBI GI: 115399236 Blast Desc: conserved [Aspergillus terreus NIH2624] gi|114192090|gb|EAU33790.1| conserved [Aspergillus terreus NIH2624]
  misc_feature (6)..(318): NCBI GI: 146323008 Blast Desc: ketopantoate reductase family protein [Aspergillus fumigatus Af293] gi|129558570|gb|EAL93745.2| ketopantoate reductase family protein, [Aspergillus fumigatus Af293]
  misc_feature (6)..(318): NCBI GI: 119481759 Blast Desc: ketopantoate reductase, [Neosartorya fischeri NRRL 181] gi|119409062|gb|EAW19011.1| ketopantoate reductase, [Neosartorya fischeri NRRL 181]
  misc_feature (5)..(317): SWISSPROT Homolog: EC 1.1.1.169 2-dehydropantoate 2-reductase
MAPPNQIDVLLYGLGAIGSFYAFILSRAEDVRLTVVARSNYDAVKSNGIQITSENHGKHVVKPYRVIKAAAEAQSTFDFIVCAHKAIDQAAVPAQIAPGIDDKTTIVLIQNGVGNEEPFRKRFPGATIISCVTWVGAAQPEPGIVTHTRSEDMQIGLFPNRAVDKNLEKERLGKFASLLTNGKTVFQVVPNIQVQRWEKVVWNAAWNSLTAMTLLDTHSWLNSSPSAMPMTRKLMHEVIAVAQKCDVPIEYSLADKLIDKILNMPPIGSSMQNDAKAGKPMEVEIILGYPVSKGKELGLSVPTIETIYVILTGMNQRFLEASL

SEQ ID NO: 22335 - DNA, 807 bp, Muscodor strobelii
  misc_feature: SGI EST ID NO. CUFF.52475.0
  misc_feature: Variant of the nucleotide sequence at SEQ ID NO 22333
aacaacttgtgcgacgattgttggttgatgatccgctatgtctagatctataagttcatgatccttggacaatgaagacccccaaattcctagtcgcggccagtggagcccccctccactaatgtgaatcgagggaacccccaccatctccaaacaacggattctctttagtacacgagtcacattgtctagtgttagcttgcaaatcgaggggtaagaaaataaggagaaatgcaatgtttgctccgcgcctagcgtgatccggtcaatgcgtggggtgtaatgcaaggcatgagcttctttagcgactgtcgtccatgcgcgtacgaattgtcaatagttatgggtaacttagttgcgattgtgtcttactttgattctaaagcttgacttacagccatttgaatgatcatggcacctccgaatcagatcgacgtcctcctttacgggctaggcgcaatcggttctttctacgccttcattctcagtcgagcggaagatgttaggctcactgttgtggcccgatcgaactacgatgcagtcaaaagtaatggcattcagatcactagcgaaaaccacggcaaacatgtcgttaagccatatagagttataaaggcagccgcagaggctcagtcgacattcgattttattgtatgcgctcataaagctatcgaccaggccgctgttcctgcacaaattgctccgggtatcgacgacaaaaccacgatagtccttattcagaatggggttggaaatgaagaaccgttcaggaagcgatttccgggcgctactattatatcatgcgtg

SEQ ID NO: 22336 - DNA, 1308 bp, Muscodor strobelii
  misc_feature: SGI cDNA ID NO. 567582
  misc_feature: Elevated expression when VOC is produced
  misc_feature: Encodes the peptide sequence at SEQ ID NO 22337
atggtgtctatcaagaatcttgctacagtgctgctttcagcatcaccggcgctcaccactcctatcagtgccattacagagcgggctaccggctacaagaacattgcttatttcacaaattggggtatttatggtagaaactaccagcctgctcagttgcccgccacccaattaaaccaagtcctctactcgttcgcaaacttccagagcgatggaactgtctacacctcagacagctatgctgacctcgaaaagcattacgatggcgattcctggaacgacgtcggcaccaacgcatatggctgtgtaaagcagctatacattctcaagaaggcacatcgtcaactgaaagtccttcttagcatcggcggctggacttattccccaggcttcgctgccgcagccagcacggccacgacacgtgcaaacttcgccaagactgccgtaactctcgtcaaagactggggttttgacggaattgacatcgactgggaatggccagctagtgacaccgaagccaacaacatggtttcgctgctgcaggcaatccgtacagagcttgattcctactctgcacaatacgccggcggttaccgctgtcagtctccgcttactttattgcttacacaatatgggttggctaactttacattagttattttgagcgttgctctgcccgctggccctgacaactattccaagctgaagctcagccagatgaacacgatcgtcgatcagtttaacatgctcgcttatgactacgctggatcatgggacaccacgtcgggacaccaagctaatctttataaggatgccagtcacccgacagatactccattctccacagacgtagcactcaaggcctatattgcagcaggcgcatctgccagcaagatcacgatgggtattcctttatatggccgtgcattcgaaagcacctctggtatcgggcagccgtattccggcgttggatctggatcctgggagaatggtatctgggactataaagtgctccctcgttcgggaaaggagatctacgactcggtcgccggtgctagctactcgtacgacagttcaaccaaagagttgatctcatacgataacgtggacatggtgaccaagaaggcagcctatatcaagagcaaaggtcttgctggtgccatgttctgggaagcctcgggtgaccgcactggatctggcagtcttatcgccaccacttacaactctcttggctcacttgatagcactcagaacctcctctcataccccaattccaaatacgctaatattaagaacaacctcaactaa

SEQ ID NO: 22337 - protein, 435 aa, Muscodor strobelii
  misc_feature: SGI Peptide ID NO. 567582
  misc_feature (32)..(395): Pfam Id: PF00704 Pfam Desc: Glycosyl hydrolases family 18
  misc_feature (3)..(434): NCBI GI: 159460232 Blast Desc: chitinase [Pochonia chlamydosporia]
  misc_feature (25)..(435): NCBI GI: 157488917 Blast Desc: chitinase [Bionectria ochroleuca]
  misc_feature (13)..(435): NCBI GI: 74049056 Blast Desc: endochitinase [Hypocrea lixii] gi|74049064|gb|AAZ95175.1| endochitinase [Hypocrea lixii]
  misc_feature (12)..(435): NCBI GI: 487419 Blast Desc: endochitinase [Hypocrea lixii] gi|499085|emb|CAA55928.1| chitinase [Hypocrea lixii] gi|13516879|dbj|BAB40591.1| endochitinase-HAR3 [Hypocrea lixii]
  misc_feature (12)..(435): NCBI GI: 149691244 Blast Desc: ThEn42(GC) [Transformation vector pYW100b] gi|149691380|gb|ABR28059.1| ThEn42(GC) [Transformation vector pYW301]
  misc_feature (13)..(435): NCBI GI: 284451168 Blast Desc: chitinase [Trichoderma viride]
  misc_feature (13)..(435): NCBI GI: 9957724 Blast Desc: AF208842_1 chitinase [Trichoderma viride]
  misc_feature (12)..(435): NCBI GI: 92911764 Blast Desc: chitinase [Trichoderma sp. w512]
  misc_feature (12)..(435): NCBI GI: 226596953 Blast Desc: chitinase [Trichoderma atroviride]
  misc_feature (13)..(435): NCBI GI: 149688626 Blast Desc: chitinase [Trichoderma viride]
  misc_feature (5)..(435): SWISSPROT Homolog: EC 3.2.1.14 Chitinase
  misc_feature: Useful for introducing or modulating the production of volatile compounds
MVSIKNLATVLLSASPALTTPISAITERATGYKNIAYFTNWGIYGRNYQPAQLPATQLNQVLYSFANFQSDGTVYTSDSYADLEKHYDGDSWNDVGTNAYGCVKQLYILKKAHRQLKVLLSIGGWTYSPGFAAAASTATTRANFAKTAVTLVKDWGFDGIDIDWEWPASDTEANNMVSLLQAIRTELDSYSAQYAGGYRCQSPLTLLLTQYGLANFTLVILSVALPAGPDNYSKLKLSQMNTIVDQFNMLAYDYAGSWDTTSGHQANLYKDASHPTDTPFSTDVALKAYIAAGASASKITMGIPLYGRAFESTSGIGQPYSGVGSGSWENGIWDYKVLPRSGKEIYDSVAGASYSYDSSTKELISYDNVDMVTKKAAYIKSKGLAGAMFWEASGDRTGSGSLIATTYNSLGSLDSTQNLLSYPNSKYANIKNNLN

SEQ ID NO: 22338 - DNA, 1127 bp, Muscodor strobelii
  misc_feature: SGI EST ID NO. CUFF.52478.0
  misc_feature: Variant of the nucleotide sequence at SEQ ID NO 22336
cgctggccctgacaactattccaagctgaagctcagccagatgaacacgatcgtcgatcagtttaacatgctcgcttatgactacgctggatcatgggacaccacgtcgggacaccaagctaatctttataaggatgccagtcacccgacagatactccattctccacagacgtagcactcaaggcctatattgcagcaggcgcatctgccagcaagatcacgatgggtattcctttatatggccgtgcattcgaaagcacctctggtatcgggcagccgtattccggcgttggatctggatcctgggagaatggtatctgggactataaagtgctccctcgttcgggaaaggagatctacgactcggtcgccggtgctagctactcgtacgacagttcaaccaaagagttgatctcatacgataacgtggacatggtgaccaagaaggcagcctatatcaagagcaaaggtcttgctggtgccatgttctgggaagcctcgggtgaccgcactggatctggcagtcttatcgccaccacttacaactctcttggctcacttgatagcactcagaacctcctctcataccccaattccaaatacgctaatattaagaacaacctcaactaagctacatgaggtcgccgttcgtttcgaaatgaccggtcattcggattggaggcgggcgcttcgtccggaagactgccaccattcagcccggtttacacatggtgctgaccgggccatggccgctcatccaatgtgaggtcttgacatcgcatggaaattacttggagtatcgagactgcatgcttccccctgtagggcaatctagacctctactgaacagcgcgcaacaaaacggcttgccctcgaagcaagggcgatggaaagaggtctttgcatacgctagggagttcggttaccgtatccgctttctcgttctttcgctcatgctcattacttgcatcttttcgctgtatatattacacaattacttagctctggatgtatatacatatgtgtgctaagcttttttgttttagtgattactcgtgtacggtagtaggtgttgtcctccccatagatgtaatactggatgcccttgtagaaatcgagatagccc

SEQ ID NO: 22339 - DNA, 4602 bp, Muscodor strobelii
  misc_feature: SGI cDNA ID NO. 567583
  misc_feature: Reduced expression when VOC is produced
  misc_feature: Encodes the peptide sequence at SEQ ID NO 22340
ggcctctccgcccaggggctcgacctctacaagaacgtcaacatctctgtcctcgacggcatgctggccaaggcccccacgcccgacccgcgccgctctctgctgagcgatgtcacatttctgtcccacctgacccggagcctgcccgtcaaccgcaccatcgtgtccgtgctcgagggccaggtcatcaccctgctcgtcattgtctgcttcatcctcatcatcctcgtccgcgactacgtcgtccagcagcagcccgagatcaacatgcgcgctgcctttgccgccgtcgagaacgccgagaacgacatggcccccaatcccccgcccgccgaggttcccgcgcctcccgccgactgggccatacctatcgatgatcttgacgatcaagacgaccatgaccatcacgatatacccgacgacgaggatgttgaagaagaccaggctgtggatcacattgaagaccccgtgggggcccgtgaggcagatcgcagagccctgtttcagaccgccttcgaaaatcacatgaccgaggatgacatggaagacatgacacggctactcagagcgagacacgcagatccggacacggcggcctggtaccgaggcgagagacccctctacggaagcggagatagagatggactacgcgccctccagaatgaaaccctagatggggaagcgagagggatgctgtctgcacacgacaagacggtcgtggattcagacgatgccgagcatcccgattttgctcgccgtgccgagtatgactttgtgcagctacaccggcgcgccggcggagaacgggacaggattctcgacatcatccgcagcgaagggctcgacgaatctcgcttcgcccctttcctctcgagggattcgccctcggctgcatcctcggtgagggacgctaaaactagtagtgatagttccagctggacctgggccggctccgacgacgagagcgaggccccctttcccgcagcaccggccgacaaggggaagcgcagagtcattcatctgcctgcatcacgcgcccggcatacccctgaattctctgctgaccaagctgcttcgtcttcatcctcatccgctcagcccgcggctcctctgcctaaaccataccggcctagagctgtctccgatggtcctcagctgctaagcaatcccatcaaccctctggccaataacacctggtcgttctccaatctgcccgctgagggtccatcttcatcacaggatgttaggaataatgcttctgccgagccaggcccttcatcacttgccaatgtgtcgaattcacattatcggccggcctcgaccgagaggtcagatgcttttgccttgcccaataacccattggagttgccgtcgtctaccgagtctgatcacatagccacgccgtcctcatcggattctcgaagcttggatccacggacagacatgtacgatgcgcacatggtggatgatgccactggtctcattcccgacgaagtcgcagacgatgtcatagttgccgttggcctagagaggccagttgttgcggccccggccaatcctagcattgtagatcgcgtggcggatttcatgtggggtgatgttcagcccggcgacgtgattgatggagtcaaccaggaagaagccgtagacatctttggtgacaatcaaaatgtgccgttcatgcacggcggtcgtgagcccgaccccgaagccgaggacgacgaggaagaagaaccagaccaacaagacgaggcggccatggctcctgacgtcgtggaagccgccgtagctgcaggtctggatcccgaagccatcgaagacgtcgaagactttgatggcatcatggagttgatcggcatgcgtggtcccattgccggtcttttccagaatgcagttttctgtgcctttctcgtcaccatctccatcttcttgggcatcttcgtcccctataatctcggccgtgtcacggtctgggtcctagcgaaccccgctcggctcatgaggattgccttcggcttcgccaagttcgtgcaggacggtgctttgcttgccgttggctacacctcctccttcatcttcaatttgttcgaggcccttcgccttctgttgggcattcaggcgggaaagcagctcatgcggactctgcgatctgacgcccagctcatcgcctcaaccgccgccgagagtattgccgatagcttcatggctgacatgcctctcttgtctaccacggaaattcgcaatttctcagcggtcagccaccacgcacttgttgtgttgaagagcaacatacgctactgtgcgtctgctttcggccaggtccttatctacgtgtttggtggtgactacttgtccaagctggccaccgtgagcacagccttgactagcatcctcacgagtctcatgcaagttatgaaagatgttcccaacgcacccttccgtccttcgtcatggattatcagcttcacactcccagacaccaggctggctgtcgatccgaccctcacgtattggagtgcgcccgaccgatgctgggctattcttgtcggttatgccaccatcatattcctcgcggctctatatttgaggagaggaatccctttctccgcgggacagacagctcaagaatgggaggcttccattattgacggcttaaatcaggcgagcggtgtaatgaaagtcatactaatcatcagtattgagatgttggttttcccgttatactgcggcctgctcctggacttcgccctacttccactgttcgaaagtacaagcttcaaatctcgtctgtacttcacgtacaactacccactcacctcgatcttcgtccattggttcgtcgggaccggttacatgttccattttgccctgtttgtgagcatgtgccggaagatcatgcgcaaaggagtgctatacttcatccgcgatcccgacgatcccgaatttcaccctgtgcgtgatgtgctcgaacgtaatgttaccacgcagctccgcaagatcctgttctcggcgttcgtctacggagccctcgtcgtcatctgtctcggcggagtggtctggggtctatctctcacccttccccacgttctgcctatccactattcctctaatgagccagtgttggaattccctatcgacctcctattttacaacttcttgatgcccttagctgtcaagttcttcaagcctagcgacgcattgcatgctatgtatacttggtggtttcgtaagtgtgccagtgctctgcgcctcacatggttcttgtttggcgaacggcggatcgaagaagaaggcaagttgacggcagatccgaagcgcaatctcccctggtggcgtactatgttcctcgaggttgatgagaacatcgaggtggtgccgaagacatggacctcctttttcgaaggcggcaaggctaaaccatcaacgaagatcggcaagaaggaaatggccttcatgagcctaaagaaaattcatctagtggactcaggacagttggccacaagtggccggttcgttcgctcgcccgcttctgatcaggtcaaaattcccaaggggcagccagtgttcgtcgatgtacctgaagaacgcctaggtcaagagaggctcaccggtcctaccgaagtaaatgtatactctgatgaccactatcaggtcgtctatattccgccctggtttcgtttgcgcatctttatcttcatcttttcgatatggatctttgctgcaacaacgggcgtcggctttacgatcctgcctctagtcttcggacgccgtgtgttcaaagcccttatccccgcccacattcgtacgaacgacatctacgcctttagcatagggatctatgtgttaggctccgccttttacctcgccttccacctacattctgccctcgagcaactaaagacgtgggtttccaacacaatcgactcgctccttgaccgccatgcctttcagcgcgctctccatcttacgcatcgcgcttcgaaattagtttacacctacactatgctattggtagtattccctatcttgatcacagtgctggtggagatctacgttcttgtaccgctacacacttacatgtaccccatcggcacgcaaagccccctcaggctcgatggtctccgtgacggtcatacgatccgcgttatacaagcatggacattgggaattctatatctcaagctcggttcgcgcgccttgacactgtatggcggacgtccagcacaagccgtccgcgccgtattgagaaggggatggttagagccagatgtcggtgtgttgacacgggcattcgtcattccgggcttcatcgcaagtgccgtcatgatattcactccgccagtcatagcatgggccgtactgaaccatggatatggcggcgagggagagatgccctacgagatgagggtctttgcgtatcgccttgcttacccactaacggccagtttttggttagcggtcgttttagtgaggaggctgctgggtgtgttcgaggcgtgtcaggtcaggattagggacgaggcttatcttatgggtgagaggcttcacaacttcacaggcgctaagggtggtcgtggatggagaggaacccggagagtgtga

SEQ ID NO: 22340 - protein, 1533 aa, Muscodor strobelii
  misc_feature: SGI Peptide ID NO. 567583
  misc_feature (11)..(1518): NCBI GI: 256726527 Blast Desc: NECHADRAFT_68793 [Nectria haematococca mpVI 77-13-4]
  misc_feature (28)..(1529): NCBI GI: 171685250 Blast Desc: protein product [Podospora anserina] gi|170942586|emb|CAP68238.1| protein product [Podospora anserina]
  misc_feature (33)..(1518): NCBI GI: 46124409 Blast Desc: FG06582.1 [Gibberella zeae PH-1]
  misc_feature (257)..(1521): NCBI GI: 85090329 Blast Desc: NCU07516 [Neurospora crassa OR74A] gi|28919721|gb|EAA29128.1| conserved [Neurospora crassa OR74A]
  misc_feature (512)..(1532): NCBI GI: 116208756 Blast Desc: CHGG_03671 [Chaetomium globosum CBS 148.51] gi|88184268|gb|EAQ91736.1| CHGG_03671 [Chaetomium globosum CBS 148.51]
  misc_feature (243)..(1533): NCBI GI: 154298827 Blast Desc: BC1G_11305 [Botryotinia fuckeliana B05.10] gi|150857701|gb|EDN32893.1| BC1G_11305 [Botryotinia fuckeliana B05.10]
  misc_feature (33)..(1533): NCBI GI: 156052337 Blast Desc: SS1G_06334 [Sclerotinia sclerotiorum 1980] gi|154704114|gb|EDO03853.1| SS1G_06334 [Sclerotinia sclerotiorum 1980]
  misc_feature (33)..(1533): NCBI GI: 239606349 Blast Desc: RING finger membrane protein [Ajellomyces dermatitidis ER-3]
  misc_feature (33)..(1533): NCBI GI: 261190102 Blast Desc: RING finger membrane protein [Ajellomyces dermatitidis SLH14081] gi|239591289|gb|EEQ73870.1| RING finger membrane protein [Ajellomyces dermatitidis SLH14081]
  misc_feature (241)..(1157): NCBI GI: 261354201 Blast Desc: RING finger membrane protein [Verticillium albo-atrum VaMs.102]
  misc_feature: Useful for introducing or modulating the production of volatile compounds
GLSAQGLDLYKNVNISVLDGMLAKAPTPDPRRSLLSDVTFLSHLTRSLPVNRTIVSVLEGQVITLLVIVCFILIILVRDYVVQQQPEINMRAAFAAVENAENDMAPNPPPAEVPAPPADWAIPIDDLDDQDDHDHHDIPDDEDVEEDQAVDHIEDPVGAREADRRALFQTAFENHMTEDDMEDMTRLLRARHADPDTAAWYRGERPLYGSGDRDGLRALQNETLDGEARGMLSAHDKTVVDSDDAEHPDFARRAEYDFVQLHRRAGGERDRILDIIRSEGLDESRFAPFLSRDSPSAASSVRDAKTSSDSSSWTWAGSDDESEAPFPAAPADKGKRRVIHLPASRARHTPEFSADQAASSSSSSAQPAAPLPKPYRPRAVSDGPQLLSNPINPLANNTWSFSNLPAEGPSSSQDVRNNASAEPGPSSLANVSNSHYRPASTERSDAFALPNNPLELPSSTESDHIATPSSSDSRSLDPRTDMYDAHMVDDATGLIPDEVADDVIVAVGLERPVVAAPANPSIVDRVADFMWGDVQPGDVIDGVNQEEAVDIFGDNQNVPFMHGGREPDPEAEDDEEEEPDQQDEAAMAPDVVEAAVAAGLDPEAIEDVEDFDGIMELIGMRGPIAGLFQNAVFCAFLVTISIFLGIFVPYNLGRVTVWVLANPARLMRIAFGFAKFVQDGALLAVGYTSSFIFNLFEALRLLLGIQAGKQLMRTLRSDAQLIASTAAESIADSFMADMPLLSTTEIRNFSAVSHHALVVLKSNIRYCASAFGQVLIYVFGGDYLSKLATVSTALTSILTSLMQVMKDVPNAPFRPSSWIISFTLPDTRLAVDPTLTYWSAPDRCWAILVGYATIIFLAALYLRRGIPFSAGQTAQEWEASIIDGLNQASGVMKVILIISIEMLVFPLYCGLLLDFALLPLFESTSFKSRLYFTYNYPLTSIFVHWFVGTGYMFHFALFVSMCRKIMRKGVLYFIRDPDDPEFHPVRDVLERNVTTQLRKILFSAFVYGALVVICLGGVVWGLSLTLPHVLPIHYSSNEPVLEFPIDLLFYNFLMPLAVKFFKPSDALHAMYTWWFRKCASALRLTWFLFGERRIEEEGKLTADPKRNLPWWRTMFLEVDENIEVVPKTWTSFFEGGKAKPSTKIGKKEMAFMSLKKIHLVDSGQLATSGRFVRSPASDQVKIPKGQPVFVDVPEERLGQERLTGPTEVNVYSDDHYQVVYIPPWFRLRIFIFIFSIWIFAATTGVGFTILPLVFGRRVFKALIPAHIRTNDIYAFSIGIYVLGSAFYLAFHLHSALEQLKTWVSNTIDSLLDRHAFQRALHLTHRASKLVYTYTMLLVVFPILITVLVEIYVLVPLHTYMYPIGTQSPLRLDGLRDGHTIRVIQAWTLGILYLKLGSRALTLYGGRPAQAVRAVLRRGWLEPDVGVLTRAFVIPGFIASAVMIFTPPVIAWAVLNHGYGGEGEMPYEMRVFAYRLAYPLTASFWLAVVLVRRLLGVFEACQVRIRDEAYLMGERLHNFTGAKGGRGWRGTRRV

SEQ ID NO: 22341 - DNA, 4759 bp, Muscodor strobelii
  misc_feature: SGI EST ID NO. CUFF.52542.0
  misc_feature: Variant of the nucleotide sequence at SEQ ID NO 22339
cctctccgcccaggggctcgacctctacaagaacgtcaacatctctgtcctcgacggcatgctggccaaggcccccacgcccgacccgcgccgctctctgctgagcgatgtcacatttctgtcccacctgacccggagcctgcccgtcaaccgcaccatcgtgtccgtgctcgagggccaggtcatcaccctgctcgtcattgtctgcttcatcctcatcatcctcgtccgcgactacgtcgtccagcagcagcccgagatcaacatgcgcgctgcctttgccgccgtcgagaacgccgagaacgacatggcccccaatcccccgcccgccgaggttcccgcgcctcccgccgactgggccatacctatcgatgatcttgacgatcaagacgaccatgaccatcacgatatacccgacgacgaggatgttgaagaagaccaggctgtggatcacattgaagaccccgtgggggcccgtgaggcagatcgcagagccctgtttcagaccgccttcgaaaatcacatgaccgaggatgacatggaagacatgacacggctactcagagcgagacacgcagatccggacacggcggcctggtaccgaggcgagagacccctctacggaagcggagatagagatggactacgcgccctccagaatgaaaccctagatggggaagcgagagggatgctgtctgcacacgacaagacggtcgtggattcagacgatgccgagcatcccgattttgctcgccgtgccgagtatgactttgtgcagctacaccggcgcgccggcggagaacgggacaggattctcgacatcatccgcagcgaagggctcgacgaatctcgcttcgcccctttcctctcgagggattcgccctcggctgcatcctcggtgagggacgctaaaactagtagtgatagttccagctggacctgggccggctccgacgacgagagcgaggccccctttcccgcagcaccggccgacaaggggaagcgcagagtcattcatctgcctgcatcacgcgcccggcatacccctgaattctctgctgaccaagctgcttcgtcttcatcctcatccgctcagcccgcggctcctctgcctaaaccataccggcctagagctgtctccgatggtcctcagctgctaagcaatcccatcaaccctctggccaataacacctggtcgttctccaatctgcccgctgagggtccatcttcatcacaggatgttaggaataatgcttctgccgagccaggcccttcatcacttgccaatgtgtcgaattcacattatcggccggcctcgaccgagaggtcagatgcttttgccttgcccaataacccattggagttgccgtcgtctaccgagtctgatcacatagccacgccgtcctcatcggattctcgaagcttggatccacggacagacatgtacgatgcgcacatggtggatgatgccactggtctcattcccgacgaagtcgcagacgatgtcatagttgccgttggcctagagaggccagttgttgcggccccggccaatcctagcattgtagatcgcgtggcggatttcatgtggggtgatgttcagcccggcgacgtgattgatggagtcaaccaggaagaagccgtagacatctttggtgacaatcaaaatgtgccgttcatgcacggcggtcgtgagcccgaccccgaagccgaggacgacgaggaagaagaaccagaccaacaagacgaggcggccatggctcctgacgtcgtggaagccgccgtagctgcaggtctggatcccgaagccatcgaagacgtcgaagactttgatggcatcatggagttgatcggcatgcgtggtcccattgccggtcttttccagaatgcagttttctgtgcctttctcgtcaccatctccatcttcttgggcatcttcgtcccctataatctcggccgtgtcacggtctgggtcctagcgaaccccgctcggctcatgaggattgccttcggcttcgccaagttcgtgcaggacggtgctttgcttgccgttggctacacctcctccttcatcttcaatttgttcgaggcccttcgccttctgttgggcattcaggcgggaaagcagctcatgcggactctgcgatctgacgcccagctcatcgcctcaaccgccgccgagagtattgccgatagcttcatggctgacatgcctctcttgtctaccacggaaattcgcaatttctcagcggtcagccaccacgcacttgttgtgttgaagagcaacatacgctactgtgcgtctgctttcggccaggtccttatctacgtgtttggtggtgactacttgtccaagctggccaccgtgagcacagccttgactagcatcctcacgagtctcatgcaagttatgaaagatgttcccaacgcacccttccgtccttcgtcatggattatcagcttcacactcccagacaccaggctggctgtcgatccgaccctcacgtattggagtgcgcccgaccgatgctgggctattcttgtcggttatgccaccatcatattcctcgcggctctatatttgaggagaggaatccctttctccgcgggacagacagctcaagaatgggaggcttccattattgacggcttaaatcaggcgagcggtgtaatgaaagtcatactaatcatcagtattgagatgttggttttcccgttatactgcggcctgctcctggacttcgccctacttccactgttcgaaagtacaagcttcaaatctcgtctgtacttcacgtacaactacccactcacctcgatcttcgtccattggttcgtcgggaccggttacatgttccattttgccctgtttgtgagcatgtgccggaagatcatgcgcaaaggagtgctatacttcatccgcgatcccgacgatcccgaatttcaccctgtgcgtgatgtgctcgaacgtaatgttaccacgcagctccgcaagatcctgttctcggcgttcgtctacggagccctcgtcgtcatctgtctcggcggagtggtctggggtctatctctcacccttccccacgttctgcctatccactattcctctaatgagccagtgttggaattccctatcgacctcctattttacaacttcttgatgcccttagctgtcaagttcttcaagcctagcgacgcattgcatgctatgtatacttggtggtttcgtaagtgtgccagtgctctgcgcctcacatggttcttgtttggcgaacggcggatcgaagaagaaggcaagttgacggcagatccgaagcgcaatctcccctggtggcgtactatgttcctcgaggttgatgagaacatcgaggtggtgccgaagacatggacctcctttttcgaaggcggcaaggctaaaccatcaacgaagatcggcaagaaggaaatggccttcatgagcctaaagaaaattcatctagtggactcaggacagttggccacaagtggccggttcgttcgctcgcccgcttctgatcaggtcaaaattcccaaggggcagccagtgttcgtcgatgtacctgaagaacgcctaggtcaagagaggctcaccggtcctaccgaagtaaatgtatactctgatgaccactatcaggtcgtctatattccgccctggtttcgtttgcgcatctttatcttcatcttttcgatatggatctttgctgcaacaacgggcgtcggctttacgatcctgcctctagtcttcggacgccgtgtgttcaaagcccttatccccgcccacattcgtacgaacgacatctacgcctttagcatagggatctatgtgttaggctccgccttttacctcgccttccacctacattctgccctcgagcaactaaagacgtgggtttccaacacaatcgactcgctccttgaccgccatgcctttcagcgcgctctccatcttacgcatcgcgcttcgaaattagtttacacctacactatgctattggtagtattccctatcttgatcacagtgctggtggagatctacgttcttgtaccgctacacacttacatgtaccccatcggcacgcaaagccccctcaggctcgatggtctccgtgacggtcatacgatccgcgttatacaagcatggacattgggaattctatatctcaagctcggttcgcgcgccttgacactgtatggcggacgtccagcacaagccgtccgcgccgtattgagaaggggatggttagagccagatgtcggtgtgttgacacgggcattcgtcattccgggcttcatcgcaagtgccgtcatgatattcactccgccagtcatagcatgggccgtactgaaccatggatatggcggcgagggagagatgccctacgagatgagggtctttgcgtatcgccttgcttacccactaacggccagtttttggttagcggtcgttttagtgaggaggctgctgggtgtgttcgaggcgtgtcaggtcaggattagggacgaggcttatcttatgggtgagaggcttcacaacttcacaggcgctaagggtggtcgtggatggagaggaacccggagagtgtgatgataatgaactgtacttgatcccagaccggcatgagtcgatgttgtctatatacccctcccctacttgtcaaatagaaatatgttacaaatgaatgatttctttgactgcgctgcgccatgtctttaatgaggtgtacggaacgttctgttgtcctcg

SEQ ID NO: 22342 - DNA, 1443 bp, Muscodor strobelii
  misc_feature: SGI cDNA ID NO. 567584
  misc_feature: Encodes the peptide sequence at SEQ ID NO 22343
atgcccttagctgtcaagttcttcaagcctagcgacgcattgcatgctatgtatacttggtggtttcgtaagtgtgccagtgctctgcgcctcacatggttcttgtttggcgaacggcggatcgaagaagaaggcaagttgacggcagatccgaagcgcaatctcccctggtggcgtactatgttcctcgaggttgatgagaacatcgaggtggtgccgaagacatggacctcctttttcgaaggcggcaaggctaaaccatcaacgaagatcggcaagaaggaaatggccttcatgagcctaaagaaaattcatctagtggactcaggacagttggccacaagtggccggttcgttcgctcgcccgcttctgatcaggtcaaaattcccaaggggcagccagtgttcgtcgatgtacctgaagaacgcctaggtcaagagaggctcaccggtcctaccgaagtaaatgtatactctgatgaccactatcaggtcgtctatattccgccctggtttcgtttgcgcatctttatcttcatcttttcgatatggatctttgctgcaacaacgggcgtcggctttacgatcctgcctctagtcttcggacgccgtgtgttcaaagcccttatccccgcccacattcgtacgaacgacatctacgcctttagcatagggatctatgtgttaggctccgccttttacctcgccttccacctacattctgccctcgagcaactaaagacgtgggtttccaacacaatcgactcgctccttgaccgccatgcctttcagcgcgctctccatcttacgcatcgcgcttcgaaattagtttacacctacactatgctattggtagtattccctatcttgatcacagtgctggtggagatctacgttcttgtaccgctacacacttacatgtaccccatcggcacgcaaagccccctcaggctcgatggtctccgtgacggtcatacgatccgcgttatacaagcatggacattgggaattctatatctcaagctcggttcgcgcgccttgacactgtatggcggacgtccagcacaagccgtccgcgccgtattgagaaggggatggttagagccagatgtcggtgtgttgacacgggcattcgtcattccgggcttcatcgcaagtgccgtcatgatattcactccgccagtcatagcatgggccgtactgaaccatggatatggcggcgagggagagatgccctacgagatgagggtctttgcgtatcgccttgcttacccactaacggccagtttttggttagcggtcgttttagtgaggaggctgctgggtgtgttcgaggcgtgtcaggtcaggattagggacgaggcttatcttatgggtgagaggcttcacaacttcacaggcgctaagggtggtcgtggatggagaggaacccggagagtgtga

SEQ ID NO: 22343 - protein, 480 aa, Muscodor strobelii
  misc_feature: SGI Peptide ID NO. 567584
  misc_feature (1)..(465): NCBI GI: 256726527 Blast Desc: NECHADRAFT_68793 [Nectria haematococca mpVI 77-13-4]
  misc_feature (1)..(476): NCBI GI: 171685250 Blast Desc: protein product [Podospora anserina] gi|170942586|emb|CAP68238.1| protein product [Podospora anserina]
  misc_feature (1)..(465): NCBI GI: 46124409 Blast Desc: FG06582.1 [Gibberella zeae PH-1]
  misc_feature (1)..(468): NCBI GI: 85090329 Blast Desc: NCU07516 [Neurospora crassa OR74A] gi|28919721|gb|EAA29128.1| conserved [Neurospora crassa OR74A]
  misc_feature (63)..(465): NCBI GI: 145609013 Blast Desc: MGG_13328 [Magnaporthe grisea 70-15] gi|145016475|gb|EDK00905.1| MGG_13328 [Magnaporthe grisea 70-15]
  misc_feature (1)..(479): NCBI GI: 116208756 Blast Desc: CHGG_03671 [Chaetomium globosum CBS 148.51] gi|88184268|gb|EAQ91736.1| CHGG_03671 [Chaetomium globosum CBS 148.51]
  misc_feature (1)..(480): NCBI GI: 156052337 Blast Desc: SS1G_06334 [Sclerotinia sclerotiorum 1980] gi|154704114|gb|EDO03853.1| SS1G_06334 [Sclerotinia sclerotiorum 1980]
  misc_feature (1)..(480): NCBI GI: 154298827 Blast Desc: BC1G_11305 [Botryotinia fuckeliana B05.10] gi|150857701|gb|EDN32893.1| BC1G_11305 [Botryotinia fuckeliana B05.10]
  misc_feature (1)..(480): NCBI GI: 258574191 Blast Desc: conserved [Uncinocarpus reesii 1704] gi|237901543|gb|EEP75944.1| conserved [Uncinocarpus reesii 1704]
  misc_feature (1)..(480): NCBI GI: 239606349 Blast Desc: RING finger membrane protein [Ajellomyces dermatitidis ER-3]
MPLAVKFFKPSDALHAMYTWWFRKCASALRLTWFLFGERRIEEEGKLTADPKRNLPWWRTMFLEVDENIEVVPKTWTSFFEGGKAKPSTKIGKKEMAFMSLKKIHLVDSGQLATSGRFVRSPASDQVKIPKGQPVFVDVPEERLGQERLTGPTEVNVYSDDHYQVVYIPPWFRLRIFIFIFSIWIFAATTGVGFTILPLVFGRRVFKALIPAHIRTNDIYAFSIGIYVLGSAFYLAFHLHSALEQLKTWVSNTIDSLLDRHAFQRALHLTHRASKLVYTYTMLLVVFPILITVLVEIYVLVPLHTYMYPIGTQSPLRLDGLRDGHTIRVIQAWTLGILYLKLGSRALTLYGGRPAQAVRAVLRRGWLEPDVGVLTRAFVIPGFIASAVMIFTPPVIAWAVLNHGYGGEGEMPYEMRVFAYRLAYPLTASFWLAVVLVRRLLGVFEACQVRIRDEAYLMGERLHNFTGAKGGRGWRGTRRV

SEQ ID NO: 22344 - DNA, 4759 bp, Muscodor strobelii; identical to SEQ ID NO: 22341
  misc_feature: SGI EST ID NO. CUFF.52542.0
  misc_feature: Variant of the nucleotide sequence at SEQ ID NO 22342

SEQ ID NO: 22345 - DNA, 2064 bp, Muscodor strobelii
  misc_feature: SGI cDNA ID NO. 567585
  misc_feature: Encodes the peptide sequence at SEQ ID NO 22346
atgtctcaaactcaggcgccaacttctacgcactcgccagtgacccaggagctatcataccagagcttatgtgacgagactcgatcgcgaccgtccacggcacccagaagtgcaccagcttggtcaaccaagtctatcgcggaatctgcagcaacgtctgtgtccgcattatgtgaacatcacttacctgctctgcaaacttcgaatatcactgagcatggtgagttgagcccgttggcagaagatgatattgatccgtcgtcgttcgacttgatcctgccgaatgaagagccagggccgcgatattcgctcgaagacagatccgaagcgctcttctctacagatcatttagaagtcatattcaatgacccaaagcatctgcaaacgttctcacggttcttgtatacattcaagcctgattcgatcccactattgctgtattacctgagtgtgaagaaggcgcaaaacgccatcagatacgcaaatactgtcacgaatggtctcgccgcggtcgacaagttcccagcgagcgaggatccaatcgcggaagcaagaagtcaagctctgtgtgatagagcatctaaagcatttgaagcaattgctcggtcggatttgcccgcttatatcacgcatgtttgggtacaaatagtgaacgccaccatcaagaaccgcattacgaatacccttcctgctcatttgcgggatctctccgaaggcctcgctgaagttttctgtctaacagatccttctcgacacgaaaatcccataatttttgccagtgaagaattccataggactagccagtacggacgaaaatttgctctaggtcgtaattgccgatttctgcaaggccccaagaccgataaagctgctgtccgacgattgagtgaagtggtcaaaaatggcaaggagcacagcgaagtcctactcaattacagacgagacgggtctacctttatgaatctcctcatgatgatgccactctatgacaaccgtggaaaaatccgctacttcttaggggctcaagtagatgtctcaggtcttgcaaaggactgctctgggctcgaatcgctcgcgctactcgtcaacaaaagctcagatgcgcaacctaaggattgtcataacgataaccatcaaggtgacaaccgctcatcaccctcccagaccgccttccgcgaattcgccaaagtactaaacctcgacgagctgcgcattgtacacgaatcgggcggaacagcacacagcacacaatacgccgaagtgaatcacacaggatcagacgtcaagtccacaagtccaagtaaaccacgcctactcataagagagggtactctgcccatcgatctaatgtcaaatctatcctctccgcatcctagttccatcccatcaaccactcgcttcaaaggcatattggagcactatctgcttgtgcgcccgtgtaaagaccttcgcatcctttttgtgagcccatcgctacgcatcccaggaattctacaatcgccctttctaacccgcattggtggctcgtcctcggtgcaagacgcaatcgcaaaggccttcgaagacgggcatggcgttactgcgaaagtccaatggctttcacgtgcgctgcatactcgtcctcaacatagtgccaatgttcatcctgcacccagatctgaaccccagctgtcattgacggccgggagaagccggtggatccatactacgcccctactgggcgttgggggcgccgttgggtcctgggttgtaatcctcgttgatgatgaggatgacaaagcaaagatcacagatccaccacccgtagatgcgatgatctcagggccaggctgtgagatagatgattcgatttgcaaaataaatgaatataaactcgttcaagatatgccggcggtcaccacacaagaaatactaagatacggatattcgcacagaaccgcggtagcagcgcttggcgatatcatcgagatgccacaacccatgctcaagttaccgggcgaagaggcgcaccagatcactcgcactacgcatgcggtgaacaagctcagagtttatggaggctga

SEQ ID NO: 22346 - protein, 687 aa, Muscodor strobelii
  misc_feature: SGI Peptide ID NO. 567585
  misc_feature (231)..(345): Pfam Id: PF00989 Pfam Desc: PAS fold
  misc_feature (32)..(599): NCBI GI: 256723426 Blast Desc: NECHADRAFT_42185 [Nectria haematococca mpVI 77-13-4]
  misc_feature (4)..(596): NCBI GI: 46114260 Blast Desc: FG02972.1 [Gibberella zeae PH-1]
  misc_feature (52)..(590): NCBI GI: 154291032 Blast Desc: BC1G_15404 [Botryotinia fuckeliana B05.10] gi|150847133|gb|EDN22326.1| BC1G_15404 [Botryotinia fuckeliana B05.10]
  misc_feature (42)..(608): NCBI GI: 189202218 Blast Desc: conserved [Pyrenophora tritici-repentis Pt-1C-BFP] gi|187984544|gb|EDU50032.1| conserved [Pyrenophora tritici-repentis Pt-1C-BFP]
  misc_feature (32)..(544): NCBI GI: 256723388 Blast Desc: NECHADRAFT_88949 [Nectria haematococca mpVI 77-13-4] gi|256725161|gb|EEU38527.1| NECHADRAFT_88657 [Nectria haematococca mpVI 77-13-4]
  misc_feature (47)..(590): NCBI GI: 156037698 Blast Desc: SS1G_12563 [Sclerotinia sclerotiorum 1980] gi|154697971|gb|EDN97709.1| SS1G_12563 [Sclerotinia sclerotiorum 1980]
  misc_feature (30)..(602): NCBI GI: 169596152 Blast Desc: SNOG_00829 [Phaeosphaeria nodorum SN15] gi|160701242|gb|EAT92324.2| SNOG_00829 [Phaeosphaeria nodorum SN15]
  misc_feature (62)..(603): NCBI GI: 145609331 Blast Desc: MGG_07517 [Magnaporthe grisea 70-15] gi|145016713|gb|EDK01143.1| MGG_07517 [Magnaporthe grisea 70-15]
  misc_feature (35)..(600): NCBI GI: 261360806 Blast Desc: hisactophilin C49S mutant/phototropin PHY3 fusion protein [Verticillium albo-atrum VaMs.102]
  misc_feature (60)..(595): NCBI GI: 121716497 Blast Desc: conserved [Aspergillus clavatus NRRL 1] gi|119403982|gb|EAW14399.1| conserved [Aspergillus clavatus NRRL 1]
MSQTQAPTSTHSPVTQELSYQSLCDETRSRPSTAPRSAPAWSTKSIAESAATSVSALCEHHLPALQTSNITEHGELSPLAEDDIDPSSFDLILPNEEPGPRYSLEDRSEALFSTDHLEVIFNDPKHLQTFSRFLYTFKPDSIPLLLYYLSVKKAQNAIRYANTVTNGLAAVDKFPASEDPIAEARSQALCDRASKAFEAIARSDLPAYITHVWVQIVNATIKNRITNTLPAHLRDLSEGLAEVFCLTDPSRHENPIIFASEEFHRTSQYGRKFALGRNCRFLQGPKTDKAAVRRLSEVVKNGKEHSEVLLNYRRDGSTFMNLLMMMPLYDNRGKIRYFLGAQVDVSGLAKDCSGLESLALLVNKSSDAQPKDCHNDNHQGDNRSSPSQTAFREFAKVLNLDELRIVHESGGTAHSTQYAEVNHTGSDVKSTSPSKPRLLIREGTLPIDLMSNLSSPHPSSIPSTTRFKGILEHYLLVRPCKDLRILFVSPSLRIPGILQSPFLTRIGGSSSVQDAIAKAFEDGHGVTAKVQWLSRALHTRPQHSANVHPAPRSEPQLSLTAGRSRWIHTTPLLGVGGAVGSWVVILVDDEDDKAKITDPPPVDAMISGPGCEIDDSICKINEYKLVQDMPAVTTQEILRYGYSHRTAVAALGDIIEMPQPMLKLPGEEAHQITRTTHAVNKLRVYGG

SEQ ID NO: 22347 - DNA, 1857 bp, Muscodor strobelii
  misc_feature: SGI cDNA ID NO. 567586
  misc_feature: Elevated expression when VOC is produced
  misc_feature: Encodes the peptide sequence at SEQ ID NO 22348
atggctcgtattctagctttggcactattgataactagcaatgctgtggtctaccctgtcgaagctggttctctggctgatgtcgaacatgtcgttcttttcatgcaggagaatcgagccttcgaccactactttggaacgatgagcggcgtacgaggctttaaagacccgaatgtgcacattgtgaatgggaaaccagtttggtatcagattgtcaactctacgctttctaaccaaaccgagtacttactgccatggtatctcaattatcagggcggggattggatcaatgcgactcaatgcatagtcgcaggggataatggttatgaatccaaccatattgccttgaacaacgacctgaacaacatgtgggtacttggcaacaccccgtggtcttggggtcatttgaagcgccaggaacttcctatacactttgcaattgcggaaggatggacggttggcgacatgtaccaggagtctgtcatcgcgtcaacttgtccaaatagagtcagctgggtgagcggctctatcaacgtccctggatcccctcagtcgcccgatcaaggaggagtatatttggacaacaatgagactccaggttgtgaagcgcctggcctcaactgctatcctctagagtggacgacttgcgctgaatattacgaggcacagggtgtgacctggcaggtctaccaagatgtcaacaattttgacgataatcctttcgcctggtttaaacaattccaagttgcctcaaatactagtgcgcttggatctcgtgggctctcgtttataggcctggataaattttttaacgattgtgctgccggcaccttaccacaagtctcatacattgttggcccagccgaattgagcgagcaccctccttaccaaccgagagatggtgcatggctacaaaagcaaataaccgaggctgttatcaactctcctgtttataataaaacagtcttgatgatcagttacgatgagaccggaggcttcggtgaccatgttgttccataccatgctcccagcggaacaccaggagaatggctagaggatccctacggtgtctttggcgatgtctactccggtccagggttccgtctaccattctatatcgtttcgccctggacgcgtggtaacaatgtctttgtcgagcgcgctgatcatacttctcaaattaaatttatcgagaagtggctactttctaaaggcatcaacgttacaagcccacagatcccgagttggcggcggatgcacatgagcgatttagtcaacgcgtttgactttgataatccggactatactctaccctacatacccgatatcagtgcaccaacaacagacagcaacggcgactacaatggttactctatttgcgaagcaacatacgcagttcagagacctcctgtgccatacggagagcaaaacgaattagactcactcgctacggagcagggatttaagcaagtcagaggatacttgactgagggccgatatctcgtgttcgagatgaacggctatgccttgactatctcggaaggctctgcgaaagggacgaagtcaactccaggccatgagaataagtcgcagagatggattgcccatcaagcggtatccggcgtgaacgacttcatttttgagagcgctttgactagagagtatctattggcaaacggatctaccacaaccttggcttcttctgcaacgagtttcgaagttcaagatctaggaaatggtcaaggacatacaatttctatctccgaaggccatttattactagattttcggggaaaactagtcgtgggcaacacaggtataggctttgcgttatatagtgtcacatatgacaactag

SEQ ID NO: 22348 - protein, 618 aa, Muscodor strobelii
  misc_feature: SGI Peptide ID NO. 567586
  misc_feature (28)..(403): Pfam Id: PF04185 Pfam Desc: Phosphoesterase family
  misc_feature (19)..(590): NCBI GI: 115389344 Blast Desc: conserved [Aspergillus terreus NIH2624] gi|108794020|gb|ABG20603.1| PLC-E [Aspergillus terreus] gi|114194573|gb|EAU36273.1| conserved [Aspergillus terreus
  misc_feature (5)..(616): NCBI GI: 238484037 Blast Desc: non-hemolytic phospholipase C precursor, [Aspergillus flavus NRRL3357] gi|220701307|gb|EED57645.1| non-hemolytic phospholipase C precursor, [Aspergillus flavus NRRL3357]
  misc_feature (5)..(616): NCBI GI: 108794008 Blast Desc: PLC-E [Aspergillus flavus]
  misc_feature (19)..(602): NCBI GI: 169767202 Blast Desc: [Aspergillus oryzae RIB40] gi|83765927|dbj|BAE56070.1| protein product [Aspergillus oryzae]
  misc_feature (2)..(616): NCBI GI: 256722757 Blast Desc: NECHADRAFT_87247 [Nectria haematococca mpVI 77-13-4]
  misc_feature (1)..(618): NCBI GI: 212535826 Blast Desc: non-hemolytic phospholipase C precursor, [Penicillium marneffei ATCC 18224] gi|210070468|gb|EEA24558.1| non-hemolytic phospholipase C precursor, [Penicillium marneffei ATCC 18224]
  misc_feature (19)..(616): NCBI GI: 46139443 Blast Desc: FG11236.1 [Gibberella zeae PH-1]
  misc_feature (1)..(618): NCBI GI: 242794096 Blast Desc: non-hemolytic phospholipase C precursor, [Talaromyces stipitatus ATCC 10500] gi|218718890|gb|EED18310.1| non-hemolytic phospholipase C precursor, [Talaromyces stipitatus ATCC 10500]
  misc_feature (1)..(616): NCBI GI: 108794000 Blast Desc: PLC-E [Hypocrea jecorina]
  misc_feature (1)..(582): NCBI GI: 226294494 Blast Desc: conserved [Paracoccidioides brasiliensis Pb18]
  misc_feature (5)..(444): SWISSPROT Homolog: EC 3.1.4.3 Phospholipase C
  misc_feature: Useful for introducing or modulating the production of volatile compounds
MARILALALLITSNAVVYPVEAGSLADVEHVVLFMQENRAFDHYFGTMSGVRGFKDPNVHIVNGKPVWYQIVNSTLSNQTEYLLPWYLNYQGGDWINATQCIVAGDNGYESNHIALNNDLNNMWVLGNTPWSWGHLKRQELPIHFAIAEGWTVGDMYQESVIASTCPNRVSWVSGSINVPGSPQSPDQGGVYLDNNETPGCEAPGLNCYPLEWTTCAEYYEAQGVTWQVYQDVNNFDDNPFAWFKQFQVASNTSALGSRGLSFIGLDKFFNDCAAGTLPQVSYIVGPAELSEHPPYQPRDGAWLQKQITEAVINSPVYNKTVLMISYDETGGFGDHVVPYHAPSGTPGEWLEDPYGVFGDVYSGPGFRLPFYIVSPWTRGNNVFVERADHTSQIKFIEKWLLSKGINVTSPQIPSWRRMHMSDLVNAFDFDNPDYTLPYIPDISAPTTDSNGDYNGYSICEATYAVQRPPVPYGEQNELDSLATEQGFKQVRGYLTEGRYLVFEMNGYALTISEGSAKGTKSTPGHENKSQRWIAHQAVSGVNDFIFESALTREYLLANGSTTTLASSATSFEVQDLGNGQGHTISISEGHLLLDFRGKLVVGNTGIGFALYSVTYDN

SEQ ID NO: 22349 - DNA, 2099 bp, Muscodor strobelii
  misc_feature: SGI EST ID NO. CUFF.52523.0
  misc_feature: Variant of the nucleotide sequence at SEQ ID NO 22347
ctcttatccagacactggccctggctctctaacccccaagagcatggcaatacgaagcggggtgagctttccacatgggtaacataatacgataattacaacgtgtatctctctaaataaaatgggacatgcctcaccttagtagatgcgacgacgacaggagaggtgctcgtcattcttaatttcgtgggttacgttcgcgatggctcgtattctagctttggcactattgataactagcaatgctgtggtctaccctgtcgaagctggttctctggctgatgtcgaacatgtcgttcttttcatgcaggagaatcgagccttcgaccactactttggaacgatgagcggcgtacgaggctttaaagacccgaatgtgcacattgtgaatgggaaaccagtttggtatcagattgtcaactctacgctttctaaccaaaccgagtacttactgccatggtatctcaattatcagggcggggattggatcaatgcgactcaatgcatagtcgcaggggataatggttatgaatccaaccatattgccttgaacaacgacctgaacaacatgtgggtacttggcaacaccccgtggtcttggggtcatttgaagcgccaggaacttcctatacactttgcaattgcggaaggatggacggttggcgacatgtaccaggagtctgtcatcgcgtcaacttgtccaaatagagtcagctgggtgagcggctctatcaacgtccctggatcccctcagtcgcccgatcaaggaggagtatatttggacaacaatgagactccaggttgtgaagcgcctggcctcaactgctatcctctagagtggacgacttgcgctgaatattacgaggcacagggtgtgacctggcaggtctaccaagatgtcaacaattttgacgataatcctttcgcctggtttaaacaattccaagttgcctcaaatactagtgcgcttggatctcgtgggctctcgtttataggcctggataaattttttaacgattgtgctgccggcaccttaccacaagtctcatacattgttggcccagccgaattgagcgagcaccctccttaccaaccgagagatggtgcatggctacaaaagcaaataaccgaggctgttatcaactctcctgtttataataaaacagtcttgatgatcagttacgatgagaccggaggcttcggtgaccatgttgttccataccatgctcccagcggaacaccaggagaatggctagaggatccctacggtgtctttggcgatgtctactccggtccagggttccgtctaccattctatatcgtttcgccctggacgcgtggtaacaatgtctttgtcgagcgcgctgatcatacttctcaaattaaatttatcgagaagtggctactttctaaaggcatcaacgttacaagcccacagatcccgagttggcggcggatgcacatgagcgatttagtcaacgcgtttgactttgataatccggactatactctaccctacatacccgatatcagtgcaccaacaacagacagcaacggcgactacaatggttactctatttgcgaagcaacatacgcagttcagagacctcctgtgccatacggagagcaaaacgaattagactcactcgctacggagcagggatttaagcaagtcagaggatacttgactgagggccgatatctcgtgttcgagatgaacggctatgccttgactatctcggaaggctctgcgaaagggacgaagtcaactccaggccatgagaataagtcgcagagatggattgcccatcaagcggtatccggcgtgaacgacttcatttttgagagcgctttgactagagagtatctattggcaaacggatctaccacaaccttggcttcttctgcaacgagtttcgaagttcaagatctaggaaatggtcaaggacatacaatttctatctccgaaggccatttattactagattttcggggaaaactagtcgtgggcaacacaggtataggctttgcgttatatagtgtcacatatgacaactagggtttcgaatattcaattccacaatcattaaattgcaaga

SEQ ID NO: 22350 - DNA, 1923 bp, Muscodor strobelii
  misc_feature: SGI cDNA ID NO. 567587
  misc_feature: Encodes the peptide sequence at SEQ ID NO 22351
atgaagattgaagacaatgcaagcgatagtcctccaagaaggccgatcaagcgacttctagtggtgaatagaggcgagatcgccaagcgcataatcgactgcgcgcgcgaacgctcagtcgagacgtttgctcttgcgacaccaggcgacacgagccatgcacttggagctacccgtctcattccccttacctcggccatcagcttctcagatatcacagtccttgcaaagatcgctaagcaaaataacatcgatacaatccatccagggtatggatttctatccgaatctgccgacttcgccagtcgcatgtggaaagatgccggcgccgtcgtaatcggaccaggttggggtatcctccgcaaaaccggagataaacttgcggcgaaatcactcgcccaaatgctgaaggccgtggacggaggtggtgggaagggaattcgcctcgtgcgggaacagtctgcgcttcaaaatgccaccctgcgcgctatttccgaaagtccatcaggccagatatttgccgaaagggccgtcatcgagggcttccgacatatcgagatccagattgttggtgatggatcgggtcaagttcggcacctttgggagcgggaatgcagcatccagcgacggtaccaaaagatcgtcgaacaggcaccaagcaacatcacagatcgcgcatttgtgaacagaattataagcgcagctatgcggatggcccgacacattaagtacctatcattaggtacatttgagtttctagcaaatgccgagaccgatgaattctacttcttagaggttaacccacgactacaagtagagcacacagtcacagaggctgtaaatcacatcgaccttgtaaaggtacaactagatattgctgaaggcaaaagttgcgatgagactagccttcaaagtatctcgcaagatgtaacgcacatgccaaagctacactcagtccagctacgactgacagccgaaaatgttcaaaaggattggaccttgagcattgggcgtattcgaactttcacgttccctacgggccatggcatccgaattgacacccatctcaatcacaggcagacgacaatcgtaggtgccgactacgatagcttgctagccaagatcatcgtcgtaggcacgacccggaaagaagtgatttcgcgatgtaggcgcgcccttcaagacacaagcgtaatagggttggagacaaatctagacatactcagtgcaatttgtgccgagcaagacttcgaggaaggacgttgtgatacgtcttggttggagagaaatgttgatgcgttagtcgcttccgggatgaggctctctcgagatttattacgcagacaaggagcagcatcgccgtttgcagcggacgtgtcagaactttcctcggcatcctggagcgggtcaaactcgacaatcttgttgcgaaagggagacgcttgggcaataaaacttatgccccattcatcatcacaacaagatacgcatcatgtcaagttaagccgtgtcatacgcaacgaatttccttcatctctgcgagccgaaatcgaatacaccacatccgggtctcagggtatgcaagtctttacattggacgctaccagcaccaacgcatctgggaaagcaatcacagccgagggcaagcaccgtcggggtgaccttaacaacccgctccatgtcatcattccgattccgggaaagctggtggaagtgctcgtagatgaaggtgatgttgttgaggcgggacaggtgatatgcatcgtgcaacagatgaagatggagctagagatccggaccaatagagcagggagggtcaggtggatcactgaagccgaggatggcgaagatatagctgaaggcacactcgctgctgaacttgaagacaaccgagagaatagcgaagctaaaccgcgtttatga

SEQ ID NO: 22351 - protein, 640 aa, Muscodor strobelii
  misc_feature: SGI Peptide ID NO. 567587
  misc_feature (320)..(428): Pfam Id: PF02785 Pfam Desc: Biotin carboxylase C-terminal domain
  misc_feature (559)..(627): Pfam Id: PF00364 Pfam Desc: Biotin-requiring enzyme
  misc_feature (15)..(123): Pfam Id: PF00289 Pfam Desc: Carbamoyl-phosphate synthase L chain, N-terminal domain
  misc_feature (99)..(303): Pfam Id: PF02786 Pfam Desc: Carbamoyl-phosphate synthase L chain, ATP binding domain
  misc_feature (64)..(123): Pfam Id: PF00289 Pfam Desc: Carbamoyl-phosphate synthase L chain, N-terminal domain
  misc_feature (135)..(295): Pfam Id: PF02786 Pfam Desc: Carbamoyl-phosphate synthase L chain, ATP binding domain
  misc_feature (11)..(628): NCBI GI: 119190005 Blast Desc: CIMG_05050 [Coccidioides immitis RS]
  misc_feature (10)..(640): NCBI GI: 255949338 Blast Desc: Pc22g15180 [Penicillium chrysogenum Wisconsin 54-1255] gi|211592453|emb|CAP98806.1| Pc22g15180 [Penicillium chrysogenum Wisconsin 54-1255]
  misc_feature (11)..(628): NCBI GI: 258565597 Blast Desc: PycA protein [Uncinocarpus reesii 1704] gi|237907244|gb|EEP81645.1| PycA protein [Uncinocarpus reesii 1704]
  misc_feature (11)..(627): NCBI GI: 261199396 Blast Desc: carboxylase:pyruvate/acetyl-CoA/propionyl-CoA [Ajellomyces dermatitidis SLH14081] gi|239594307|gb|EEQ76888.1| carboxylase:pyruvate/acetyl-CoA/propionyl-CoA [Ajellomyces
  misc_feature (11)..(627): NCBI GI: 239615469 Blast Desc: carboxylase:pyruvate/acetyl-CoA/propionyl-CoA [Ajellomyces dermatitidis ER-3]
  misc_feature (11)..(628): NCBI GI: 225684834 Blast Desc: biotin carboxylase [Paracoccidioides brasiliensis Pb03]
  misc_feature (15)..(630): NCBI GI: 145250613 Blast Desc: An15g02820 [Aspergillus niger] gi|134082342|emb|CAK42357.1| protein product [Aspergillus niger]
  misc_feature (11)..(628): NCBI GI: 226280714 Blast Desc: biotin carboxylase [Paracoccidioides brasiliensis Pb01]
  misc_feature (71)..(628): NCBI GI: 240111010 Blast Desc: Carbamoyl-phosphate synthase L chain, ATP binding domain containing protein [Coccidioides posadasii C735 delta SOWgp]
  misc_feature (16)..(630): NCBI GI: 115433702 Blast Desc: ATEG_08367 [Aspergillus terreus NIH2624] gi|114189840|gb|EAU31540.1| ATEG_08367 [Aspergillus terreus NIH2624]
  misc_feature (19)..(614): SWISSPROT Homolog: EC 6.3.4.14 Biotin carboxylase
MKIEDNASDSPPRRPIKRLLVVNRGEIAKRIIDCARERSVETFALATPGDTSHALGATRLIPLTSAISFSDITVLAKIAKQNNIDTIHPGYGFLSESADFASRMWKDAGAVVIGPGWGILRKTGDKLAAKSLAQMLKAVDGGGGKGIRLVREQSALQNATLRAISESPSGQIFAERAVIEGFRHIEIQIVGDGSGQVRHLWERECSIQRRYQKIVEQAPSNITDRAFVNRIISAAMRMARHIKYLSLGTFEFLANAETDEFYFLEVNPRLQVEHTVTEAVNHIDLVKVQLDIAEGKSCDETSLQSISQDVTHMPKLHSVQLRLTAENVQKDWTLSIGRIRTFTFPTGHGIRIDTHLNHRQTTIVGADYDSLLAKIIVVGTTRKEVISRCRRALQDTSVIGLETNLDILSAICAEQDFEEGRCDTSWLERNVDALVASGMRLSRDLLRRQGAASPFAADVSELSSASWSGSNSTILLRKGDAWAIKLMPHSSSQQDTHHVKLSRVIRNEFPSSLRAEIEYTTSGSQGMQVFTLDATSTNASGKAITAEGKHRRGDLNNPLHVIIPIPGKLVEVLVDEGDVVEAGQVICIVQQMKMELEIRTNRAGRVRWITEAEDGEDIAEGTLAAELEDNRENSEAKPRL

SEQ ID NO: 22352 - DNA, 635 bp, Muscodor strobelii
  misc_feature: SGI EST ID NO. CUFF.52533.0
  misc_feature: Variant of the nucleotide sequence at SEQ ID NO 22350
gcgattcgtaacagcttgaagtagcaacacattgaaattgacacacactttgctcaacagtcatattttatattcgcatataatggtatatcatctgtctgggaagacactccggctctatgggagctagacaataccaaggttagtttaagaatgaagattgaagacaatgcaagcgatagtcctccaagaaggccgatcaagcgacttctagtggtgaatagaggcgagatcgccaagcgcataatcgactgcgcgcgcgaacgctcagtcgagacgtttgctcttgcgacaccaggcgacacgagccatgcacttggagctacccgtctcattccccttacctcggccatcagcttctcagatatcacagtccttgcaaagatcgctaagcaaaataacatcgatacaatccatccagggtatggatttctatccgaatctgccgacttcgccagtcgcatgtggaaagatgccggcgccgtcgtaatcggaccaggttggggtatcctccgcaaaaccggagataaacttgcggcgaaatcactcgcccaagtatgtggtgtgccaactctcccggccatgggaactccaactaggagattggaagacgtggagcggtttgtcaaagcgac

SEQ ID NO: 22353 - DNA, 1740 bp, Muscodor strobelii
  misc_feature: SGI cDNA ID NO. 567588
  misc_feature: Encodes the peptide sequence at SEQ ID NO 22354
atgggatctgagaaggacgacgcggccgaccgagcgcgtcagcgtgtcgaccaggtttcgtcacatctcacagcatcctctgccccagagaacggcatacaggatgcaccacgtcggaagagaaaaacaccaccgtcgtcgaaatcaatagaaaacgagcctgcggattattccgatcggctgacgcaaattcggacacttgagaagatggcccgtacaccagatatcagccaccgtgggtatgtgagacagaagagggctggaaaattatgggtgcatgaacgtatcgaagcgctgctagacaaggggagtttacacgaaattggtagcatctcgggcgatgtttcttggaaacgggagaaagatgccgatagtgttgagcgagaaatcatcaccggattcataccaagtaatagcgtccgctttcacagcactcatgagggctatggtaagctgaacggtcgcaagatcgtattcactgctgacgattacactttgcgtgccggccacgccgacggtgcgctctgggaaaagactttatatattgagaagctcgccttgtctttacggctccccatcgttaagctcgtagacgggtcctcaggcggtggcattgcgcagctgaatatgggtattcccaacctcggcgcggtactaggaccggccatcggacttggggcagctcgcgtgtctatttgccacttcagtgtcatggcaggaaacattgggtcactgtttaatgcagggcctcaagtggtcaagagtgcaacatttgaggacggtcttagcatggccgagctgggcgggcccgatatgcattgtcgtaatggcactatagacaacctcgcgcgtgatgagcacgatgcattcgaacagcttcgtcgtgtcatcggctatcttcccaactcaggcttctctcccccacccgtgatcaagagtcgtgatcgaacggatcgccgagaggaagcgcttcgtacgctgataccccgtcggaaagagcgcatgtatgatcctaggaggctaataaatctggtcgttgaccaaaactcgttcttcgagataggcgcgctttggggtacgacggccattgttggactcgctcatctgaacggacatcctgtcgggatcatttccaacaattgcgaaagtttgaccgggggtgctctagatgcgttaggatcgcagaagatgactaaacacctcaagctttgtgatgttatgaacgtccctattcttcagtttgtcgatgtgccaggttacgctgttggaacagctgcagagcgatcggcgactatgcgtcatggtgtcaatcttgcaatggcatattacacgaccacgacgccgatattcagtgtcgtgacgcgacgagcttacggagtggctggtggcgtgatgcttgactgcagagatccacgcatgcgtgttgcttggccaagtggcgattggggctcattgccgctcaaaggtggtatcgaggttggccattctcatgagctccagcaagctgcggagaagggcggacaagaattagcaaatgagctgtacggcaaactccagagagagtataccgagttgatgaaccctatacggacagcgaatgctttcggtgttgaggaaatcattgatcctgcagagactcgatccatcgtctgtaattggacttctcatgtctataatgaacttatgatagagcggcttacaaagaggagagccggaacgctgcatgcttcgtttgcctaa

SEQ ID NO: 22354 - protein, 579 aa, Muscodor strobelii
  misc_feature: SGI Peptide ID NO. 567588
  misc_feature (80)..(573): Pfam Id: PF01039 Pfam Desc: Carboxyl transferase domain
  misc_feature (206)..(573): Pfam Id: PF01039 Pfam Desc: Carboxyl transferase domain
  misc_feature (8)..(579): NCBI GI: 189201085 Blast Desc: propionyl-CoA carboxylase beta chain, mitochondrial precursor [Pyrenophora tritici-repentis Pt-1C-BFP] gi|187983978|gb|EDU49466.1| propionyl-CoA carboxylase beta chain,
  misc_feature (4)..(578): NCBI GI: 154319337 Blast Desc: BC1G_02620 [Botryotinia fuckeliana B05.10] gi|150857051|gb|EDN32243.1| BC1G_02620 [Botryotinia fuckeliana B05.10]
  misc_feature (3)..(578): NCBI GI: 156063328 Blast Desc: SS1G_01780 [Sclerotinia sclerotiorum 1980] gi|154697116|gb|EDN96854.1| SS1G_01780 [Sclerotinia sclerotiorum 1980]
  misc_feature (7)..(578): NCBI GI: 225684835 Blast Desc: propionyl-CoA carboxylase [Paracoccidioides brasiliensis Pb03]
  misc_feature (7)..(578): NCBI GI: 226280713 Blast Desc: propionyl-CoA carboxylase [Paracoccidioides brasiliensis Pb01]
  misc_feature (7)..(578): NCBI GI: 226286589 Blast Desc: propionyl-CoA carboxylase [Paracoccidioides brasiliensis Pb18]
  misc_feature (10)..(579): NCBI GI: 255949336 Blast Desc: Pc22g15170 [Penicillium chrysogenum Wisconsin 54-1255] gi|211592452|emb|CAP98805.1| Pc22g15170 [Penicillium chrysogenum Wisconsin 54-1255]
  misc_feature (10)..(579): NCBI GI: 119479791 Blast Desc: propionyl-CoA carboxylase [Neosartorya fischeri NRRL 181] gi|119408078|gb|EAW18027.1| propionyl-CoA carboxylase [Neosartorya fischeri NRRL 181]
  misc_feature (5)..(578): NCBI GI: 145250615 Blast Desc: An15g02830 [Aspergillus niger] gi|134082343|emb|CAK42358.1| protein product [Aspergillus niger]
  misc_feature (4)..(578): NCBI GI: 239615468 Blast Desc: methylmalonyl-CoA decarboxylase [Ajellomyces dermatitidis ER-3]
  misc_feature (46)..(551): SWISSPROT Homolog: EC 6.4.1.3 Propionyl-CoA carboxylase
MGSEKDDAADRARQRVDQVSSHLTASSAPENGIQDAPRRKRKTPPSSKSIENEPADYSDRLTQIRTLEKMARTPDISHRGYVRQKRAGKLWVHERIEALLDKGSLHEIGSISGDVSWKREKDADSVEREIITGFIPSNSVRFHSTHEGYGKLNGRKIVFTADDYTLRAGHADGALWEKTLYIEKLALSLRLPIVKLVDGSSGGGIAQLNMGIPNLGAVLGPAIGLGAARVSICHFSVMAGNIGSLFNAGPQVVKSATFEDGLSMAELGGPDMHCRNGTIDNLARDEHDAFEQLRRVIGYLPNSGFSPPPVIKSRDRTDRREEALRTLIPRRKERMYDPRRLINLVVDQNSFFEIGALWGTTAIVGLAHLNGHPVGIISNNCESLTGGALDALGSQKMTKHLKLCDVMNVPILQFVDVPGYAVGTAAERSATMRHGVNLAMAYYTTTTPIFSVVTRRAYGVAGGVMLDCRDPRMRVAWPSGDWGSLPLKGGIEVGHSHELQQAAEKGGQELANELYGKLQREYTELMNPIRTANAFGVEEIIDPAETRSIVCNWTSHVYNELMIERLTKRRAGTLHASFA

SEQ ID NO: 22355 - DNA, 2721 bp, Muscodor strobelii
  misc_feature: SGI EST ID NO. CUFF.52551.0
  misc_feature: Variant of the nucleotide sequence at SEQ ID NO 22353
ctcagatcaaagtatccatctacaatgaatattactgtcaagcttagacggcctcggatcccattgaataagttgagctgattcagtagtacctgtttcatcgatatgggatctgagaaggacgacgcggccgaccgagcgcgtcagcgtgtcgaccaggtttcgtcacatctcacagcatcctctgccccagagaacggcatacaggatgcaccacgtcggaagagaaaaacaccaccgtcgtcgaaatcaatagaaaacgagcctgcggattattccgatcggctgacgcaaattcggacacttgagaagatggcccgtacaccagatatcagccaccgtgggtatgtgagacagaagagggctggaaaattatgggtgcatgaacgtatcgaagcgctgctagacaaggggagtttacacgaaattggtagcatctcgggcgatgtttcttggaaacgggagaaagatgccgatagtgttgagcgagaaatcatcaccggattcataccaagtaatagcgtccgtaagttaagcgtctccacattgacaatctagctttcacagcactcatggtagacaagtcgcattatgtgcaatcggaacttcgatgacattactgatgtgatgcagagggctatggtaagctgaacggtcgcaagatcgtattcactgctgacgattacactttgcgtgccggccacgccgacggtgcgctctgggaaaagactttatatattgagaagctcgccttgtctttacggctccccatcgttaagctcgtagacgggtcctcaggcggtggcagtgtgacgacgattcgaaacaagggttttcttacatccctccacttcctgcgttcgaacatgtagttgcgcagctgaatatgggtattcccaacctcggcgcggtactaggaccggccatcggacttggggcagctcgcgtgtctatttgccacttcagtgtcatggcaggaaacattgggtcactgtttaatgcagggcctcaagtggtcaagagtgcaacatttgaggacggtcttagcatggccgagctgggcgggcccgatatgcattgtcgtaatggcactatagacaacctcgcgcgtgatgagcacgatgcattcgaacagcttcgtcgtgtcatcggctatcttcccaactcaggcttctctcccccacccgtgatcaagagtcgtgatcgaacggatcgccgagaggaagcgcttcgtacgctgataccccgtcggaaagagcgcatgtatgatcctaggaggctaataaatctggtcgttgaccaaaactcgttcttcgagataggcgcgctttggggtacgacggccattgttggactcgctcatctgaacggacatcctgtcgggatcatttccaacaattgcgaaagtttgaccgggggtgctctagatgcgttaggatcgcagaagatgactaaacacctcaagctttgtgatgttatgaacgtccctattcttcagtttgtcgatgtgccaggttacgctgttggaacagctgcagagcgatcggcgactatgcgtcatggtgtcaatcttgcaatggcatattacacgaccacgacgccgatattcagtgtcgtgacgcgacgagcttacggagtggctggtggcgtgatgcttgactgcagagatccacgcatgcgtgttgcttggccaagtggcgattggggctcattgccgctcaaaggtggtatcgaggttggccattctcatgagctccagcaagctgcggagaagggcggacaagaattagcaaatgagctgtacggcaaactccagagagagtataccgagttgagtaggtcccaattccgcctccttgcgattctagacagcatctgataaatctcctcccccgccattcgacatacttgattgtaacacttactatcggcgcagtgaaccctatacggacagcgaatgctttcggtgttgaggaaatcattgatcctgcagagactcgatccatcgtctgtaattggacttctcatgtctataatgaacttatgatagagcggcttacaaagaggagagccggaacgctgcatgcttcgtttgcctaattgtatcagctgatcgccgaggttgaggtttaatataggatatgacatgactagcatgtacagtatggctcgacagtcctccgtcggcaagatcgtgttcagtgtctataaagcaatatctcgcgaaacttaatgcactcgggtagctcttgcctgacactccagaggagcgtctgcgcaagtactcaattgtcataatcaccttttacgagtaacgtgctagaggagcctgtgcatgaagagactctcacctcatttaactgatttatttatttcacgcagtaatggtacagtgatggactatggttaatcgtgctccatgctcaagtatgctggacaatgaatcatatcaacatacgttggctgggagttgttaatagcgtgtttccagctgccgctagcatagtgctctgaatgctcgaggctgaagtcgcaagcgcgatgatatcacgaacggagaagagttacagtatcaagcttcatccttcgagagggcgcctgagttggaaagcgagttgcgacatagttgtggcctaagtatgcggcgtactctgagacagtcccttaattggagatcgcaaggcggacggcagagtcggacactataggcgttggagcgtt

SEQ ID NO: 22356 - DNA, 1734 bp, Muscodor strobelii
  misc_feature: SGI cDNA ID NO. 567589
  misc_feature: Encodes the peptide sequence at SEQ ID NO 22357
atgggatctgagaaggacgacgcggccgaccgagcgcgtcagcgtgtcgaccaggtttcgtcacatctcacagcatcctctgccccagagaacggcatacaggatgcaccacgtcggaagagaaaaacaccaccgtcgtcgaaatcaatagaaaacgagcctgcggattattccgatcggctgacgcaaattcggacacttgagaagatggcccgtacaccagatatcagccaccgtgggtatgtgagacagaagagggctggaaaattatgggtgcatgaacgtatcgaagcgctgctagacaaggggagtttacacgaaattggtagcatctcgggcgatgtttcttggaaacgggagaaagatgccgatagtgttgagcgagaaatcatcaccggattcataccaagtaatagcgtccgctttcacagcactcatgagggctatggtaagctgaacggtcgcaagatcgtattcactgctgacgattacactttgcgtgccggccacgccgacggtgcgctctgggaaaagactttatatattgagaagctcgccttgtctttacggctccccatcgttaagctcgtagacgggtcctcaggcggtggcagtctgaatatgggtattcccaacctcggcgcggtactaggaccggccatcggacttggggcagctcgcgtgtctatttgccacttcagtgtcatggcaggaaacattgggtcactgtttaatgcagggcctcaagtggtcaagagtgcaacatttgaggacggtcttagcatggccgagctgggcgggcccgatatgcattgtcgtaatggcactatagacaacctcgcgcgtgatgagcacgatgcattcgaacagcttcgtcgtgtcatcggctatcttcccaactcaggcttctctcccccacccgtgatcaagagtcgtgatcgaacggatcgccgagaggaagcgcttcgtacgctgataccccgtcggaaagagcgcatgtatgatcctaggaggctaataaatctggtcgttgaccaaaactcgttcttcgagataggcgcgctttggggtacgacggccattgttggactcgctcatctgaacggacatcctgtcgggatcatttccaacaattgcgaaagtttgaccgggggtgctctagatgcgttaggatcgcagaagatgactaaacacctcaagctttgtgatgttatgaacgtccctattcttcagtttgtcgatgtgccaggttacgctgttggaacagctgcagagcgatcggcgactatgcgtcatggtgtcaatcttgcaatggcatattacacgaccacgacgccgatattcagtgtcgtgacgcgacgagcttacggagtggctggtggcgtgatgcttgactgcagagatccacgcatgcgtgttgcttggccaagtggcgattggggctcattgccgctcaaaggtggtatcgaggttggccattctcatgagctccagcaagctgcggagaagggcggacaagaattagcaaatgagctgtacggcaaactccagagagagtataccgagttgatgaaccctatacggacagcgaatgctttcggtgttgaggaaatcattgatcctgcagagactcgatccatcgtctgtaattggacttctcatgtctataatgaacttatgatagagcggcttacaaagaggagagccggaacgctgcatgcttcgtttgcctaa

SEQ ID NO: 22357 - protein, 577 aa, Muscodor strobelii
  misc_feature: SGI Peptide ID NO. 567589
  misc_feature (80)..(571): Pfam Id: PF01039 Pfam Desc: Carboxyl transferase domain
  misc_feature (209)..(571): Pfam Id: PF01039 Pfam Desc: Carboxyl transferase domain
  misc_feature (8)..(577): NCBI GI: 189201085 Blast Desc: propionyl-CoA carboxylase beta chain, mitochondrial precursor [Pyrenophora tritici-repentis Pt-1C-BFP] gi|187983978|gb|EDU49466.1| propionyl-CoA carboxylase beta chain,
  misc_feature (4)..(576): NCBI GI: 154319337 Blast Desc: BC1G_02620 [Botryotinia fuckeliana B05.10] gi|150857051|gb|EDN32243.1| BC1G_02620 [Botryotinia fuckeliana B05.10]
  misc_feature (3)..(576): NCBI GI: 156063328 Blast Desc: SS1G_01780 [Sclerotinia sclerotiorum 1980] gi|154697116|gb|EDN96854.1| SS1G_01780 [Sclerotinia sclerotiorum 1980]
  misc_feature (3)..(576): NCBI GI: 225684835 Blast Desc: propionyl-CoA carboxylase [Paracoccidioides brasiliensis Pb03]
  misc_feature (7)..(576): NCBI GI: 226280713 Blast Desc: propionyl-CoA carboxylase [Paracoccidioides brasiliensis Pb01]
  misc_feature (7)..(576): NCBI GI: 226286589 Blast Desc: propionyl-CoA carboxylase [Paracoccidioides brasiliensis Pb18]
  misc_feature (10)..(577): NCBI GI: 255949336 Blast Desc: Pc22g15170 [Penicillium chrysogenum Wisconsin 54-1255] gi|211592452|emb|CAP98805.1| Pc22g15170 [Penicillium chrysogenum Wisconsin 54-1255]
  misc_feature (10)..(577): NCBI GI: 119479791 Blast Desc: propionyl-CoA carboxylase [Neosartorya fischeri NRRL 181] gi|119408078|gb|EAW18027.1| propionyl-CoA carboxylase [Neosartorya fischeri NRRL 181]
  misc_feature (5)..(576): NCBI GI: 145250615 Blast Desc: An15g02830 [Aspergillus niger] gi|134082343|emb|CAK42358.1| protein product [Aspergillus niger]
  misc_feature (4)..(576): NCBI GI: 239615468 Blast Desc: methylmalonyl-CoA decarboxylase [Ajellomyces dermatitidis ER-3]
  misc_feature (46)..(549): SWISSPROT Homolog: EC 6.4.1.3 Propionyl-CoA carboxylase
MGSEKDDAADRARQRVDQVSSHLTASSAPENGIQDAPRRKRKTPPSSKSIENEPADYSDRLTQIRTLEKMARTPDISHRGYVRQKRAGKLWVHERIEALLDKGSLHEIGSISGDVSWKREKDADSVEREIITGFIPSNSVRFHSTHEGYGKLNGRKIVFTADDYTLRAGHADGALWEKTLYIEKLALSLRLPIVKLVDGSSGGGSLNMGIPNLGAVLGPAIGLGAARVSICHFSVMAGNIGSLFNAGPQVVKSATFEDGLSMAELGGPDMHCRNGTIDNLARDEHDAFEQLRRVIGYLPNSGFSPPPVIKSRDRTDRREEALRTLIPRRKERMYDPRRLINLVVDQNSFFEIGALWGTTAIVGLAHLNGHPVGIISNNCESLTGGALDALGSQKMTKHLKLCDVMNVPILQFVDVPGYAVGTAAERSATMRHGVNLAMAYYTTTTPIFSVVTRRAYGVAGGVMLDCRDPRMRVAWPSGDWGSLPLKGGIEVGHSHELQQAAEKGGQELANELYGKLQREYTELMNPIRTANAFGVEEIIDPAETRSIVCNWTSHVYNELMIERLTKRRAGTLHASFA

SEQ ID NO: 22358 - DNA, 2721 bp, Muscodor strobelii; identical to SEQ ID NO: 22355
  misc_feature: SGI EST ID NO. CUFF.52551.0
  misc_feature: Variant of the nucleotide sequence at SEQ ID NO 22356

SEQ ID NO: 22359 - DNA, 3576 bp, Muscodor strobelii
  misc_feature: SGI cDNA ID NO. 567590
  misc_feature: Encodes the peptide sequence at SEQ ID NO 22360
atggaatcttattttcagcgtggcgggttgcccttgggcttccagcgccgactgagtagactatacaatgacactaagaagtcatccgactttgtgcaggagcctgtacaatcagctgatgatccagagatcaaggccctgcatcgcaaactgcgcatccagaaagacaggctcgtaagctggggggtggaatggtctgacccgaatcagacggccgagatcgacgagtctcttaaagaggccggcctcgcggatcttgttgggagtataatgaataccatcaaggatattctagctgaagccgaaccgctgtggctcgcttcaaagaggtcaactggaggcgagaagtcgtcggaaaaatcgatcggggacaaaaagacgcccatcatagtgtgggataagggacggttcgaagacctcgtcaaagacctaacagcttctattgatactctgtgcgatctttcacgcaccaggtcttcagcagcagcctcgacgaaaaagccaaggcctataccttctatggaagacatcaggccttatggttcatcgcgcataagaacccctcaacaaattgatcctcagtctctgtccagtttgagatcaatacaggcactcccgctcgcacagaccgaagtaatacatgaccgaccgcaagaaattttcttcatgagtaagcaggcctacgcagacttgacacaccgtccagctggacatcgatggtctccattactggttgagtatgcctctttcgatcccatctactctgcaactggtatcatgcctgagctgtctcgctttgagaaactcagcgccgcattgcagacagagtcttcaaggtcgtcagcggcttggattgggttacccctcctccttggctattatgaggatatggcacactcgagactagcactgatctactccttccctcccaccttcaatgctgtcacatttgagaatctgacgcaaaatcctgtcgacaacctctgtaccctgacaaatctcctcaaccgtcctgattttgaaccgactctagaggccaaattccgcctggcatacaacctagccaacacagtgttcgatatgcactcgcggggtatcactcacggcaacatccacgcatctgccatttcattcaccaacacagtcggcaacgactctggcctatctgctgttcatgaagtcgacattcggcgcccgctcatttcttcatttgacatcttccctgattcgtcacccgccccctcgtcatctacgtttcttcttcatcgtcatccacttgatccacggaccaccaatcagtcacccttggccgcgaacagcgaaactcagactttagatctttattcccttgcaatgcttctcgtatccatcggcttgtggaccaccttggagaatctcatacccaatcgagattctccaagcattcccgagtctgttctcgaccaaattgcaatacgctgcggcacaccatatatgagagcagtgcaggtttgttggaacgcggtcgaacacgagctctctcgacccggatctggtgaagaaatcatcaggcaagtacaagtcagggttagcggctacttggaagcatgttgtatcttggatggtgtgagcgggcttgatgatcgcctaagcgacgactttggccactcatctgcgcgggttgttaaccagcaagaaatcccaactcatccattgccagggccttctgtaacgaaatcattcagctcgagggatgaaaagaagcctgttttcttacaagaacggtcatcatccgctccgcttgacacaaagttgctgaaggaattccaatcgatggacaacaaaccagagaagcccaaagagaaatctcagagacttcgactctatcctcagatttcacccccggctgagatcgtggaccagtggaacgaagtcatcatgccgcaaatcaatatggctttgcgacacttttaccgcaagaacccagagtctgtagaaatatcgctggaatctattggagaatctcctcagaagaccacacctacggcgctcgttgtatgcacgtcggtcagcaaagtacgcgccatattgacgaaaaagcttggaattctcttcgacggcactacgacaggtgtctccctcaaggtttgtcgcggatcgctcgtccgctcgcggaagggcccgaagcgtagcatggcgaagggggaggatgccgagacttcgagtgacaaaagctgcgatgatacgccagaggaccatgatccctcggccgcgaatcccggataccaagtgcgacctcagaatggggcaagtatcggcgcctggattggtgacaagcatctcccgccagtcagtcttgggggcatcatccttgtcgacaataagccgtacggcatgactgtgcaccatatgctcgacgatcccgaccgtccacttgcgccgagtgactttgagcctcaatcatctgacgctgaacgcgctagcgcccccacgtatcgaagtagtgcggccgctcaagatttttcttttttgtcggagggggagacatcgtcggtcagcagcggagatgacttcgcttgcgaattttcagacacagaatcggaatactctgtcacggatatcacaagcgatgaagaagaagatgatgatgatgatgagtatgaacagttcaacgaacctggcgacatacctggtatcgaaccaggctgtggagatggttatatcatcacccagcccgcgcttgacgatgttccagatggattctatccttcatctgacacagagaatgaggatcatatcgacacatgcagcgttggcgaagtgtatgcctcttctgggattcgaaggcgcaaccaagatggacttgttcacgagatcgattgggccctatttgaatttcaggatcaccggatgcccgacgagaaccttttcccacaattgacggccggagatagccgacatgctccaatgtcaaaaaacttacaaccagttgaagttgcaccagccaagtcgctaccagggttagatgtgcaatgtctagcccgcacaagtggctcacagctgggacgtatcttgcctgccattacatccgtcaaaatatatgggcgagcatctccaagtcactcgtatcaagtgagcggtcgtataccaggcctaacccccggctcttcacctttaaatcagactcggcagggggtctctctcggcatacccggcgactcgggggcttggattattgacaggtttcaaggtcgtctctgtggacatattctggcatggagcgagcgcaagcaagtggcgtatatttgtccaatggatgtacttttcaatgacatcgccgatactctggaaggtgcggacgtgcgattgcccctgggtgagatcgccaacgaagaaggcaacagaggtgtaatcgaggtgactgatcttggttggtcagaggccgatgccccagaaattcaggatatccgccagtctgggcaattcttcatgcctggtgctatagaaccaggcagaataagcgaccggcccgactcgtcggtcaggagcagagagattggtgttttagtacgggatatggacaaggtgcacttttag

SEQ ID NO: 22360 - protein, 1191 aa, Muscodor strobelii
  misc_feature: SGI Peptide ID NO. 567590
  misc_feature (1)..(1121): NCBI GI: 116208760 Blast Desc: CHGG_03673 [Chaetomium globosum CBS 148.51] gi|88184270|gb|EAQ91738.1| CHGG_03673 [Chaetomium globosum CBS 148.51]
  misc_feature (1)..(1117): NCBI GI: 256726387 Blast Desc: NECHADRAFT_284 [Nectria haematococca mpVI 77-13-4]
  misc_feature (1)..(1120): NCBI GI: 261354204 Blast Desc: conserved [Verticillium albo-atrum VaMs.102]
  misc_feature (1)..(1117): NCBI GI: 85089514 Blast Desc: NCU07513 [Neurospora crassa OR74A] gi|28919283|gb|EAA28749.1| conserved [Neurospora crassa OR74A]
  misc_feature (1)..(1119): NCBI GI: 46124381 Blast Desc: FG06568.1 [Gibberella zeae PH-1]
  misc_feature (1)..(1121): NCBI GI: 145609003 Blast Desc: MGG_13324 [Magnaporthe grisea 70-15] gi|145016467|gb|EDK00897.1| MGG_13324 [Magnaporthe grisea 70-15]
  misc_feature (13)..(1121): NCBI GI: 171685254 Blast Desc: protein product [Podospora anserina] gi|170942588|emb|CAP68240.1| protein product [Podospora anserina]
  misc_feature (1)..(1117): NCBI GI: 156052485 Blast Desc: SS1G_06408 [Sclerotinia sclerotiorum 1980] gi|154704188|gb|EDO03927.1| SS1G_06408 [Sclerotinia sclerotiorum 1980]
  misc_feature (3)..(1117): NCBI GI: 169783900 Blast Desc: [Aspergillus oryzae RIB40] gi|83775156|dbj|BAE65279.1| protein product [Aspergillus oryzae]
  misc_feature (3)..(1117): NCBI GI: 115443032 Blast Desc: conserved [Aspergillus terreus NIH2624] gi|114188192|gb|EAU29892.1| conserved [Aspergillus terreus NIH2624]
MESYFQRGGLPLGFQRRLSRLYNDTKKSSDFVQEPVQSADDPEIKALHRKLRIQKDRLVSWGVEWSDPNQTAEIDESLKEAGLADLVGSIMNTIKDILAEAEPLWLASKRSTGGEKSSEKSIGDKKTPIIVWDKGRFEDLVKDLTASIDTLCDLSRTRSSAAASTKKPRPIPSMEDIRPYGSSRIRTPQQIDPQSLSSLRSIQALPLAQTEVIHDRPQEIFFMSKQAYADLTHRPAGHRWSPLLVEYASFDPIYSATGIMPELSRFEKLSAALQTESSRSSAAWIGLPLLLGYYEDMAHSRLALIYSFPPTFNAVTFENLTQNPVDNLCTLTNLLNRPDFEPTLEAKFRLAYNLANTVFDMHSRGITHGNIHASAISFTNTVGNDSGLSAVHEVDIRRPLISSFDIFPDSSPAPSSSTFLLHRHPLDPRTTNQSPLAANSETQTLDLYSLAMLLVSIGLWTTLENLIPNRDSPSIPESVLDQIAIRCGTPYMRAVQVCWNAVEHELSRPGSGEEIIRQVQVRVSGYLEACCILDGVSGLDDRLSDDFGHSSARVVNQQEIPTHPLPGPSVTKSFSSRDEKKPVFLQERSSSAPLDTKLLKEFQSMDNKPEKPKEKSQRLRLYPQISPPAEIVDQWNEVIMPQINMALRHFYRKNPESVEISLESIGESPQKTTPTALVVCTSVSKVRAILTKKLGILFDGTTTGVSLKVCRGSLVRSRKGPKRSMAKGEDAETSSDKSCDDTPEDHDPSAANPGYQVRPQNGASIGAWIGDKHLPPVSLGGIILVDNKPYGMTVHHMLDDPDRPLAPSDFEPQSSDAERASAPTYRSSAAAQDFSFLSEGETSSVSSGDDFACEFSDTESEYSVTDITSDEEEDDDDDEYEQFNEPGDIPGIEPGCGDGYIITQPALDDVPDGFYPSSDTENEDHIDTCSVGEVYASSGIRRRNQDGLVHEIDWALFEFQDHRMPDENLFPQLTAGDSRHAPMSKNLQPVEVAPAKSLPGLDVQCLARTSGSQLGRILPAITSVKIYGRASPSHSYQVSGRIPGLTPGSSPLNQTRQGVSLGIPGDSGAWIIDRFQGRLCGHILAWSERKQVAYICPMDVLFNDIADTLEGADVRLPLGEIANEEGNRGVIEVTDLGWSEADAPEIQDIRQSGQFFMPGAIEPGRISDRPDSSVRSREIGVLVRDMDKVHF

SEQ ID NO: 22361 - DNA, 4177 bp, Muscodor strobelii
  misc_feature: SGI EST ID NO. CUFF.52818.0
  misc_feature: Variant of the nucleotide sequence at SEQ ID NO 22359
tcctgctcaaggcagcggaattatagactttggcggcgcgctgtacagcgacgagcctcatgacctgacattcaccttttttattcttctctttattcctcgctgtatctcgttgatatgttgcttgttcattcatagaagccacgtttggaaccatttccctttaccttcgcttccccgcagctccgcgtcagtctgtatcgctcatgatgatctagtccggtctgtgacgatcctagttcaaatatctgcttgatacatcccggacacccctaaaggctttctgtttcttaaagtagcacatcgctagcgattcgacactgacaccacaacataaggagaacaagtcccagcagcttaggagtgttgccacactatggaatcttattttcagcgtggcgggttgcccttgggcttccagcgccgactgagtagactatacaatgacactaagaagtcatccgactttgtgcaggagcctgtacaatcagctgatgatccagagatcaaggccctgcatcgcaaactgcgcatccagaaagacaggctcgtaagctggggggtggaatggtctgacccgaatcagacggccgagatcgacgagtctcttaaagaggccggcctcgcggatcttgttgggagtataatgaataccatcaaggatattctagctgaagccgaaccgctgtggctcgcttcaaagaggtcaactggaggcgagaagtcgtcggaaaaatcgatcggggacaaaaagacgcccatcatagtgtgggataagggacggttcgaagacctcgtcaaagacctaacagcttctattgatactctgtgcgatctttcacgcaccaggtcttcagcagcagcctcgacgaaaaagccaaggcctataccttctatggaagacatcaggccttatggttcatcgcgcataagaacccctcaacaaattgatcctcagtctctgtccagtttgagatcaatacaggcactcccgctcgcacagaccgaagtaatacatgaccgaccgcaagaaattttcttcatgagtaagcaggcctacgcagacttgacacaccgtccagctggacatcgatggtctccattactggttgagtatgcctctttcgatcccatctactctgcaactggtatcatgcctgagctgtctcgctttgagaaactcagcgccgcattgcagacagagtcttcaaggtcgtcagcggcttggattgggttacccctcctccttggctattatgaggatatggcacactcgagactagcactgatctactccttccctcccaccttcaatgctgtcacatttgagaatctgacgcaaaatcctgtcgacaacctctgtaccctgacaaatctcctcaaccgtcctgattttgaaccgactctagaggccaaattccgcctggcatacaacctagccaacacagtgttcgatatgcactcgcggggtatcactcacggcaacatccacgcatctgccatttcattcaccaacacagtcggcaacgactctggcctatctgctgttcatgaagtcgacattcggcgcccgctcatttcttcatttgacatcttccctgattcgtcacccgccccctcgtcatctacgtttcttcttcatcgtcatccacttgatccacggaccaccaatcagtcacccttggccgcgaacagcgaaactcagactttagatctttattcccttgcaatgcttctcgtatccatcggcttgtggaccaccttggagaatctcatacccaatcgagattctccaagcattcccgagtctgttctcgaccaaattgcaatacgctgcggcacaccatatatgagagcagtgcaggtttgttggaacgcggtcgaacacgagctctctcgacccggatctggtgaagaaatcatcaggcaagtacaagtcagggttagcggctacttggaagcatgttgtatcttggatggtgtgagcgggcttgatgatcgcctaagcgacgactttggccactcatctgcgcgggttgttaaccagcaagaaatcccaactcatccattgccagggccttctgtaacgaaatcattcagctcgagggatgaaaagaagcctgttttcttacaagaacggtcatcatccgctccgcttgacacaaagttgctgaaggaattccaatcgatggacaacaaaccagagaagcccaaagagaaatctcagagacttcgactctatcctcagatttcacccccggctgagatcgtggaccagtggaacgaagtcatcatgccgcaaatcaatatggctttgcgacacttttaccgcaagaacccagagtctgtagaaatatcgctggaatctattggagaatctcctcagaagaccacacctacggcgctcgttgtatgcacgtcggtcagcaaagtacgcgccatattgacgaaaaagcttggaattctcttcgacggcactacgacaggtgtctccctcaaggtttgtcgcggatcgctcgtccgctcgcggaagggcccgaagcgtagcatggcgaagggggaggatgccgagacttcgagtgacaaaagctgcgatgatacgccagaggaccatgatccctcggccgcgaatcccggataccaagtgcgacctcagaatggggcaagtatcggcgcctggattggtgacaagcatctcccgccagtcagtcttgggggcatcatccttgtcgacaataagccgtacggcatgactgtgcaccatatgctcgacgatcccgaccgtccacttgcgccgagtgactttgagcctcaatcatctgacgctgaacgcgctagcgcccccacgtatcgaagtagtgcggccgctcaagatttttcttttttgtcggagggggagacatcgtcggtcagcagcggagatgacttcgcttgcgaattttcagacacagaatcggaatactctgtcacggatatcacaagcgatgaagaagaagatgatgatgatgatgagtatgaacagttcaacgaacctggcgacatacctggtatcgaaccaggctgtggagatggttatatcatcacccagcccgcgcttgacgatgttccagatggattctatccttcatctgacacagagaatgaggatcatatcgacacatgcagcgttggcgaagtgtatgcctcttctgggattcgaaggcgcaaccaagatggacttgttcacgagatcgattgggccctatttgaatttcaggatcaccggatgcccgacgagaaccttttcccacaattgacggccggagatagccgacatgctccaatgtcaaaaaacttacaaccagttgaagttgcaccagccaagtcgctaccagggttagatgtgcaatgtctagcccgcacaagtggctcacaggtaagatacatcagcttgttctcgtctttcctctgcctatccccactaacagtcttagctgggacgtatcttgcctgccattacatccgtcaaaatatatgggcgagcatctccaagtcactcgtatcaagtgagcggtcgtataccaggcctaacccccggctcttcacctttaaatcagactcggcagggggtctctctcggcatacccggcgactcgggggcttggattattgacaggtttcaaggtcgtctctgtggacatattctggcatggagcgagcgcaagcaagtggcgtatatttgtccaatggatgtacttttcaatgacatcgccgatactctggaaggtgcggacgtgcgattgcccctgggtgagatcgccaacgaagaaggcaacagaggtgtaatcgaggtgactgatcttggttggtcagaggccgatgccccagaaattcaggatatccgccagtctgggcaattcttcatgcctggtgctatagaaccaggcagaataagcgaccggcccgactcgtcggtcaggagcagagagattggtgttttagtacgggatatggacaaggtgcacttttaggataaacggcggcgtataatgtgttacgagttacgaacccaatacccttttcacatcacctaaggcgctagaggaggttaggttcgtaaatagtctaaattagtagaatgatcaatgaaagacagcgacctttgattgaaatccttccgtctgtgattgcgtacccg

SEQ ID NO: 22362 - DNA, 885 bp, Muscodor strobelii
  misc_feature: SGI cDNA ID NO. 567591
  misc_feature: Reduced expression when VOC is produced
  misc_feature: Encodes the peptide sequence at SEQ ID NO 22363
atggctcttacagagcgccatggtatatccatcgcccaactggtcatctacatacccaccctcatcatcggcatcttgctctgcatccggcacggcttcggccgcaatgccggcttcttcttcctcatcatcttctccctcgcgcggaccctgggcgccgcattagacctcgcgacgatcgcccagccccgaaacctcagcatctactttggcgctttcaccctgcaaagcatcggtctcgcaccacttatcctcatgctgctcgctctcgataaccgtgtcctggcgggaattgagaaggtcacgagcattcctgtgtcatctcgccaagtgcgcttcgtcaatctgatcctaatcgccgctttggttctctcatcggttggcggtgcgaacgcaggcaacgcgtacggagacacaggcgtataccaggtctctgacctgaccaaagctggcattgcactgaccatcgtcggcttcggtatcctcgcactggtgaccattgccatcgccttcaacgccagccacattgaagccggcgagaagcgcgtcttactcgcagtcgtggcctcccttcctttcctcctcgtccggttgatatattccggcgagtctgtcttcggaagtaaccccgacttcagtcccctgaacgggaataccaatgtctatttgggtactgccgtcattgaggagatcatcattgttattattgtcgaggctatgggtctcaccctgagagttctcccgaaatccagtagcagcgcttcgcagtcttcgagctcgggcctgctggggggtcttagcagtcgcttcgggagaaggtttgacagaggcagggagcagagctatcacatggaagatatgcggagaggtgatgcgagactgtag

SEQ ID NO: 22363 - protein, 294 aa, Muscodor strobelii
  misc_feature: SGI Peptide ID NO. 567591
  misc_feature (1)..(247): NCBI GI: 156040756 Blast Desc: SS1G_11356 [Sclerotinia sclerotiorum 1980] gi|154695740|gb|EDN95478.1| SS1G_11356 [Sclerotinia sclerotiorum 1980]
  misc_feature (1)..(249): NCBI GI: 154303844 Blast Desc: BC1G_08806 [Botryotinia fuckeliana B05.10] gi|150854390|gb|EDN29582.1| BC1G_08806 [Botryotinia fuckeliana B05.10]
  misc_feature (1)..(278): NCBI GI: 115388549 Blast Desc: [Aspergillus terreus NIH2624] gi|114195864|gb|EAU37564.1| [Aspergillus terreus NIH2624]
  misc_feature (3)..(248): NCBI GI: 39977025 Blast Desc: MGG_06415 [Magnaporthe grisea 70-15] gi|145016172|gb|EDK00662.1| MGG_06415 [Magnaporthe grisea 70-15]
  misc_feature (6)..(257): NCBI GI: 212531723 Blast Desc: conserved [Penicillium marneffei ATCC 18224] gi|210071382|gb|EEA25471.1| conserved [Penicillium marneffei ATCC 18224]
  misc_feature (1)..(250): NCBI GI: 171687006 Blast Desc: protein product [Podospora anserina] gi|170943464|emb|CAP69117.1| protein product [Podospora anserina]
  misc_feature (1)..(237): NCBI GI: 121714154 Blast Desc: conserved [Aspergillus clavatus NRRL 1] gi|119402841|gb|EAW13262.1| conserved [Aspergillus clavatus NRRL 1]
  misc_feature (1)..(287): NCBI GI: 238841039 Blast Desc: conserved [Microsporum canis CBS 113480]
  misc_feature (2)..(261): NCBI GI: 46122309 Blast Desc: FG05532.1 [Gibberella zeae PH-1]
  misc_feature (1)..(245): NCBI GI: 115433318 Blast Desc: [Aspergillus terreus NIH2624] gi|114189648|gb|EAU31348.1| [Aspergillus terreus NIH2624]
  misc_feature: Useful for introducing or modulating the production of volatile compounds
MALTERHGISIAQLVIYIPTLIIGILLCIRHGFGRNAGFFFLIIFSLARTLGAALDLATIAQPRNLSIYFGAFTLQSIGLAPLILMLLALDNRVLAGIEKVTSIPVSSRQVRFVNLILIAALVLSSVGGANAGNAYGDTGVYQVSDLTKAGIALTIVGFGILALVTIAIAFNASHIEAGEKRVLLAVVASLPFLLVRLIYSGESVFGSNPDFSPLNGNTNVYLGTAVIEEIIIVIIVEAMGLTLRVLPKSSSSASQSSSSGLLGGLSSRFGRRFDRGREQSYHMEDMRRGDARL

SEQ ID NO: 22364 - DNA, 1492 bp, Muscodor strobelii
  misc_feature: SGI EST ID NO. CUFF.52596.0
  misc_feature: Variant of the nucleotide sequence at SEQ ID NO 22362
tggcaatctcccttgaactactcagccaagccctgtcaaaactggtcccctgctcagcccggcagctggatcctagcgcaaacgacgcagccaatcaatctcttggcaccagctttgcacttttccttcttcagaactttcaccttcgcattcgctcgcattcagacctggccagcatttcgcgatgcattcaatttcttcatgctacgccattcctctccacgacatggcccaaacatgctgcctagatcttcgtaggagagagaggtaagtcagacgtacaagatataagacgactggctcggtaggttcgtatcaaatttccttattagtagtcatcacgatcacgtccaacactctcgcctcattgatcacgacttgatcacacaagtgtcacatcactatatcatcccgctctaccacgcccaatcctcgtcacaatggctcttacagagcgccatggtatatccatcgcccaactggtcatctacatacccaccctcatcatcggcatcttgctctgcatccggcacggcttcggccgcaatgccggcttcttcttcctcatcatcttctccctcgcgcggaccctgggcgccgcattagacctcgcgacgatcgcccagccccgaaacctcagcatctactttggcgctttcaccctgcaaagcatcggtctcgcaccacttatcctcatgctgctcgctctcgataaccgtgtcctggcgggaattgagaaggtcacgagcattcctgtgtcatctcgccaagtgcgcttcgtcaatctgatcctaatcgccgctttggttctctcatcggttggcggtgcgaacgcaggcaacgcgtacggagacacaggcgtataccaggtctctgacctgaccaaagctggcattgcactgaccatcgtcggcttcggtatcctcgcactggtgaccattgccatcgccttcaacgccagccacattgaagccggcgagaagcgcgtcttactcgcagtcgtggcctcccttcctttcctcctcgtccggttgatatattccggcgagtctgtcttcggaagtaaccccgacttcagtcccctgaacgggaataccaatgtctatttgggtactgccgtcattgaggagatcatcattgttattattgtcgaggctatgggtctcaccctgagagttctcccgaaatccagtagcagcgcttcgcagtcttcgagctcgggcctgctggggggtcttagcagtcgcttcgggagaaggtttgacagaggcagggagcagagctatcacatggaagatatgcggagaggtgatgcgagactgtagaattgagtgcaagatcggaaagggtaatgtatactctaggttcggagccgctttcttttgcgatggactctagcttgggcgatacctcaaaaacgcgctgcgttcgcattcaaaatttgttcatttagatcatatcttagactatagaaacatgactttcccgaaga

SEQ ID NO: 22365 - DNA, 1125 bp, Muscodor strobelii
  misc_feature: SGI cDNA ID NO. 567592
  misc_feature: Encodes the peptide sequence at SEQ ID NO 22366
atgcccctcatcatagtgacgggcttcccgacgtcgggcaagtcgacgcgagcgaggcagctgcacgcatacctcgccgaccgcatccaatccgcccatgccgcccagtccgcccaagccacgactacgaacggcctctctgcgcccaaataccgtctgcacctgatctccgaccagtcgctgtccatctcccgcgccgtctacgacctctcggccgtgcccgcgcacacgcggtccgccaatgcctcggagaaggacgcgcgtgccgccatctacgcggccgtcaagcgcgtgctcagcgacagggacatcgtcatcctcgacggcctgaactacatcaagggctggcgctaccagctgcactgcgaggccaaggccatgcgcacgccctcgtgcatcctgcaggtcggctgcggacgggacaggtcgcgcgagatcaacgaagcccgtctgcgcctgcgtctgcgcaccacgcccgacaccaccgcccccgacactgctcccgaagcccgcaagacagcccacgatgcccatgtccacgatgcccatgccgacgacaccgaagccaacacagaggcagaggcagacgcagacgcagaggccgcctacgacccggccaactgggagaacctcgtcttccgttacgaagagcccaaccccatgacccggtgggacagccccctcttcaccctcatatgggacgacggcgacgaccacgccaggcaggtcttcgatagcctgtgggaagccatcgccggcgactccaggaagattgtcaagcccaaccaggccaccgtccagaggagccgcgacgccgacggcgactacctctacactctcgaccgcgaaacgcacgacatcgtcaagcgcatcctcgaccagcagggcgacgagggcggaggcgaagtcaagatctcgcctggaggcaccgcagaggaggaggaactcgtcgtcgagctgcccggcaagaagatcggcctgccccagctgcagcggctgaggagggctttcgtaggcttgaaccggggtggtataggacttgagggtgtaagcaacatgggcgctttgaggatacggcagacctttgtccgctatctcaacgacactttcgaacatgacgcttga

SEQ ID NO: 22366 - protein, 374 aa, Muscodor strobelii
  misc_feature: SGI Peptide ID NO. 567592
  misc_feature (1)..(367): Pfam Id: PF08433 Pfam Desc: Chromatin associated protein KTI12
  misc_feature (1)..(373): NCBI GI: 256729693 Blast Desc: NECHADRAFT_71081 [Nectria haematococca mpVI 77-13-4]
  misc_feature (1)..(373): NCBI GI: 261358491 Blast Desc: RNA polymerase II elongator complex subunit [Verticillium albo-atrum VaMs.102]
  misc_feature (1)..(373): NCBI GI: 46122307 Blast Desc: FG05531.1 [Gibberella zeae PH-1]
  misc_feature (1)..(373): NCBI GI: 145602097 Blast Desc: MGG_12920 [Magnaporthe grisea 70-15] gi|145010538|gb|EDJ95194.1| MGG_12920 [Magnaporthe grisea 70-15]
  misc_feature (1)..(373): NCBI GI: 85079698 Blast Desc: NCU00178 [Neurospora crassa OR74A] gi|28917464|gb|EAA27165.1| conserved [Neurospora crassa OR74A]
  misc_feature (1)..(371): NCBI GI: 156054386 Blast Desc: SS1G_06041 [Sclerotinia sclerotiorum 1980] gi|154703821|gb|EDO03560.1| SS1G_06041 [Sclerotinia sclerotiorum 1980]
  misc_feature (3)..(299): NCBI GI: 154321209 Blast Desc: BC1G_01479 [Botryotinia fuckeliana B05.10] gi|150852017|gb|EDN27209.1| BC1G_01479 [Botryotinia fuckeliana B05.10]
  misc_feature (3)..(370): NCBI GI: 169615234 Blast Desc: SNOG_10773 [Phaeosphaeria nodorum SN15] gi|160702915|gb|EAT82167.2| SNOG_10773 [Phaeosphaeria nodorum SN15]
  misc_feature (81)..(373): NCBI GI: 116191785 Blast Desc: CHGG_05610 [Chaetomium globosum CBS 148.51] gi|88181523|gb|EAQ88991.1| CHGG_05610 [Chaetomium globosum CBS 148.51]
  misc_feature (50)..(370): NCBI GI: 189207853 Blast Desc: RNA polymerase II elongator complex subunit [Pyrenophora tritici-repentis Pt-1C-BFP] gi|187976353|gb|EDU42979.1| RNA polymerase II elongator complex
MPLIIVTGFPTSGKSTRARQLHAYLADRIQSAHAAQSAQATTTNGLSAPKYRLHLISDQSLSISRAVYDLSAVPAHTRSANASEKDARAAIYAAVKRVLSDRDIVILDGLNYIKGWRYQLHCEAKAMRTPSCILQVGCGRDRSREINEARLRLRLRTTPDTTAPDTAPEARKTAHDAHVHDAHADDTEANTEAEADADAEAAYDPANWENLVFRYEEPNPMTRWDSPLFTLIWDDGDDHARQVFDSLWEAIAGDSRKIVKPNQATVQRSRDADGDYLYTLDRETHDIVKRILDQQGDEGGGEVKISPGGTAEEEELVVELPGKKIGLPQLQRLRRAFVGLNRGGIGLEGVSNMGALRIRQTFVRYLNDTFEHDA

SEQ ID NO: 22367 - DNA, 2679 bp, Muscodor strobelii
  misc_feature: SGI cDNA ID NO. 567593
  misc_feature: Elevated expression when VOC is produced
  misc_feature: Encodes the peptide sequence at SEQ ID NO 22368
atgtcaagagatgagacatctggcaacaaccttgacattgaacagctcaacatcatcgactctgctgcggatgaacatgcagatgatagttctacatcatcgactgatgactcgagcgaggaggacagcgatgactcccatcaagtgtcaataaggcttcgcgatgagtacatgagcacttcggtcggaagagggtatcgttctgagactacgacgcctcggccggtgcgcaatgttcgtatctcgtcaccagttgcgacctcgctattcgaaccgccagcctcgccaacaccgccgccattgtatcctcccggatcgcaccaagccactgtcgaaaataattccgactcagacgggagaattgagtcgaatgaaacgatctccgatgagaatatccgagatcgagccagaagcaaatcttctaatagcgacgagtcgggatcagatcgcaagaccttggttcggcgtaatgatcgggatgctcccacaacagacaccacggctgcccttttggatgagattgaaggcctgcgtcgcgaaaatgatcgtatgcgacaacagtatgaagcgtatcaagcgcctcagcagcctgcgaaaccggcatccacgtataagacattttattacatcaacccaacgcattatcttgacgaacctcattgggagccaggtgagaataatgcgacaattctaaggtccttgaatccaattcggaattatgaggactatttggatcagcatccagatattgcattcgcaatcgttaaaatttacaacaagcatccccctcgagatcgtaaaaagatcgagaggagagatggtgcctatcgcacccccgaaccggaatcgcaggttctgttgctaatctcggacacgatggtggatgctgtcgaggaattcgtgaatctcgtaccactattcaggcaactctttcctagcttcaagccccggaaacctatccccgcaccctatctcttcatgttttacagtgcaccatacttagaagacatactgcttgacgtcgacccggttcatcattaccttctagaacagttagataagtgcatcaagaaaagccatggcttcgagcatagttccgccgtcagtcttgcgaggaaaggacgtgtttccaatgacttgtttgggtatcttattaggcctggcgatgtacttgtccgtgaagcggggccatatacaaaagcatacattgcacttgattgggccagtgagaccgatgattccaagcaagaaaagctggatgacttcagatacgacgagattggcgctcaagatggggccccgaagaaagagtgggacgcatggaatcaagaggacaccaagacgagatatgagtggatggtaccggtttggtcatgggaatttgatggtagttttcacatgcagcgacgtcgcttgaaaatcggtgtcatggccagctactctgccgagatcatctccatacagcagttggagatcattcctctcaaacacgcgagaccggaaatacgcaaacagctagaaataagagggcgaatgttttggactcttcgatttcgtcgattcattagttacaagaaaagcgaacagggagagctaaacgatgtttgtgacagatttatgatagataccgatacatataagaaactgcatcccaagtctgctttgagtaatatgaaactacgatcaagcttgtcccggaaagcgatggccagtcatgcacctccttctggcgacgaccttctagtgttcccacctcagatcccaggatttaatttattacgaaagacttgggtagacttgtgtgttgattacatgtccgatgttggttggaataaacaagcctttgcagatctagttgttcatcccgaaaccaaggaacttgttcaagcccttgtcatgaagcaacttgtggccgcacagtccacggacttcgtcgcgggaaaaggaaatggacttatcgttcttctacatggagggccggggactggaaagacattcactgccgagggagtggctgaatttgcagagaagccattactacgtgtgacatgtggcgacgttgggaccagggccgaagttgtggagaagaagctccaatcatcatttcacctggggaagatatgggactgtgtggtcctcctggatgaagctgacgtgttcttggaggaacgggatatgaaagacctcaatcggaatgcattagtatccgtgttcctccgtgagctagaatactatgatggaatcctgatactaacatctaatcgcgtgggtacgtttgacgaagcgttcaagtctcgcatccagctgtcgcttcactacgaaaatcttggggtcagtcaacgacgaaaaatttggcgcaactttataacccgcgtcaggtctctcgattcaacaattgactatgatgatatcagagatcactttgacgaactcagcaaggcagagatgaatggacgcgagattagaaacgcgatcaccacagcaagacaattggctcaatacaagagtgagcctttgaactctgagcatcttgcccatgtcttacgagtcagcaagaagttcggcaagtatcttagtgatttgaaagacggagcgacggcagacgagatcaaacgggagaaagaaattaggttaacctacacagcttctaaacctcgctcgcaggaatcgccgttttga

SEQ ID NO: 22368 - protein, 892 aa, Muscodor strobelii
  misc_feature: SGI Peptide ID NO. 567593
  misc_feature (653)..(834): Pfam Id: PF00004 Pfam Desc: ATPase family associated with various cellular activities (AAA)
  misc_feature (241)..(877): NCBI GI: 212545270 Blast Desc: conserved [Penicillium marneffei ATCC 18224] gi|210065758|gb|EEA19852.1| conserved [Penicillium marneffei ATCC 18224]
  misc_feature (168)..(877): NCBI GI: 46105200 Blast Desc: FG00228.1 [Gibberella zeae PH-1]
  misc_feature (231)..(877): NCBI GI: 115449835 Blast Desc: [Aspergillus terreus NIH2624] gi|114187657|gb|EAU29357.1| [Aspergillus terreus NIH2624]
  misc_feature (215)..(865): NCBI GI: 255932979 Blast Desc: Pc12g11420 [Penicillium chrysogenum Wisconsin 54-1255] gi|211582579|emb|CAP80769.1| Pc12g11420 [Penicillium chrysogenum Wisconsin 54-1255]
  misc_feature (203)..(877): NCBI GI: 171685452 Blast Desc: protein product [Podospora anserina] gi|170942687|emb|CAP68340.1| protein product [Podospora anserina]
  misc_feature (216)..(872): NCBI GI: 169619754 Blast Desc: SNOG_13075 [Phaeosphaeria nodorum SN15] gi|111058282|gb|EAT79402.1| SNOG_13075 [Phaeosphaeria nodorum SN15]
  misc_feature (179)..(874): NCBI GI: 46133953 Blast Desc: FG09116.1 [Gibberella zeae PH-1]
  misc_feature (231)..(870): NCBI GI: 212532637 Blast Desc: conserved [Penicillium marneffei ATCC 18224] gi|210071839|gb|EEA25928.1| conserved [Penicillium marneffei ATCC 18224]
  misc_feature (307)..(877): NCBI GI: 242765142 Blast Desc: TSTA_069470 [Talaromyces stipitatus ATCC 10500] gi|218724110|gb|EED23527.1| TSTA_069470 [Talaromyces stipitatus ATCC 10500]
  misc_feature (564)..(877): NCBI GI: 169615523 Blast Desc: SNOG_10919 [Phaeosphaeria nodorum SN15] gi|160702979|gb|EAT81418.2| SNOG_10919 [Phaeosphaeria nodorum SN15]
  misc_feature: Useful for introducing or modulating the production of volatile compounds
MSRDETSGNNLDIEQLNIIDSAADEHADDSSTSSTDDSSEEDSDDSHQVSIRLRDEYMSTSVGRGYRSETTTPRPVRNVRISSPVATSLFEPPASPTPPPLYPPGSHQATVENNSDSDGRIESNETISDENIRDRARSKSSNSDESGSDRKTLVRRNDRDAPTTDTTAALLDEIEGLRRENDRMRQQYEAYQAPQQPAKPASTYKTFYYINPTHYLDEPHWEPGENNATILRSLNPIRNYEDYLDQHPDIAFAIVKIYNKHPPRDRKKIERRDGAYRTPEPESQVLLLISDTMVDAVEEFVNLVPLFRQLFPSFKPRKPIPAPYLFMFYSAPYLEDILLDVDPVHHYLLEQLDKCIKKSHGFEHSSAVSLARKGRVSNDLFGYLIRPGDVLVREAGPYTKAYIALDWASETDDSKQEKLDDFRYDEIGAQDGAPKKEWDAWNQEDTKTRYEWMVPVWSWEFDGSFHMQRRRLKIGVMASYSAEIISIQQLEIIPLKHARPEIRKQLEIRGRMFWTLRFRRFISYKKSEQGELNDVCDRFMIDTDTYKKLHPKSALSNMKLRSSLSRKAMASHAPPSGDDLLVFPPQIPGFNLLRKTWVDLCVDYMSDVGWNKQAFADLVVHPETKELVQALVMKQLVAAQSTDFVAGKGNGLIVLLHGGPGTGKTFTAEGVAEFAEKPLLRVTCGDVGTRAEVVEKKLQSSFHLGKIWDCVVLLDEADVFLEERDMKDLNRNALVSVFLRELEYYDGILILTSNRVGTFDEAFKSRIQLSLHYENLGVSQRRKIWRNFITRVRSLDSTIDYDDIRDHFDELSKAEMNGREIRNAITTARQLAQYKSEPLNSEHLAHVLRVSKKFGKYLSDLKDGATADEIKREKEIRLTYTASKPRSQESPF

SEQ ID NO: 22369 - DNA, 5982 bp, Muscodor strobelii
  misc_feature: SGI EST ID NO. CUFF.52654.0
  misc_feature: Variant of the nucleotide sequence at SEQ ID NO 22367
gaaaattgcacccgaggccttcaagagaagtttacaggccagtgtcgaccagcgcatgtgctcaggaggcgggcttctccaaccacggtctcgtcaggttagatttggtttcgaaatttaccatatgttgctaaagaagaagccacgaattattatatactcgtgcggtcatttgcaaggtgcttaagttatagtgttccgtgtcacaatgctttgtcgttgttattttcccttccgtgatcagactcctgcgcaacagtagccaaattgggtaggcagtctatgagattatcccccgctcaacaatctgcctgctgttaacgcatgtatcaacagctgacctcgttgcatccatgcataagtccatttaagcactcaaggcagactcaaggccaaattgggggcagtccatgcctgaagagccggctgcctccttagaactttgaccgtggcatagacaccgctggaaaccatctcgctttttttttactgaccaagttgcaaactgggacgatcatttcgtgctcgcccatgtcttagcatttgacctttcagtgttcttccttgctagattcgaatgtctttttccaacattttccaagacagcctcgcgatgtcaagagatgagacatctggcaacaaccttgacattgaacagctcaacatcatcgactctgctgcggatgaacatgcagatgatagttctacatcatcgactgatgactcgagcgaggaggacagcgatgactcccatcaagtgtcaataaggcttcgcgatgagtacatgagcacttcggtcggaagagggtatcgttctgagactacgacgcctcggccggtgcgcaatgttcgtatctcgtcaccagttgcgacctcgctattcgaaccgccagcctcgccaacaccgccgccattgtatcctcccggatcgcaccaagccactgtcgaaaataattccgactcagacgggagaattgagtcgaatgaaacgatctccgatgagaatatccgagatcgagccagaagcaaatcttctaatagcgacgagtcgggatcagatcgcaagaccttggttcggcgtaatgatcgggatgctcccacaacagacaccacggctgcccttttggatgagattgaaggcctgcgtcgcgaaaatgatcgtatgcgacaacagtatgaagcgtatcaagcgcctcagcagcctgcgaaaccggcatccacgtataagacattttattacatcaacccaacgcattatcttgacgaacctcattgggagccaggtgagaataatgcgacaattctaaggtccttgaatccaattcggaattatgaggactatttggatcagcatccagatattgcattcgcaatcgttaaaatttacaacaagcatccccctcgagatcgtaaaaagatcgagaggagagatggtgcctatcgcacccccgaaccggaatcgcaggttctgttgctaatctcggacacgatggtggatgctgtcgaggaattcgtgaatctcgtaccactattcaggcaactctttcctagcttcaagccccggaaacctatccccgcaccctatctcttcatgttttacagtgcaccatacttagaagacatactgcttgacgtcgacccggttcatcattaccttctagaacagttagataagtgcatcaagaaaagccatggcttcgagcatagttccgccgtcagtcttgcgaggaaaggacgtgtttccaatgacttgtttgggtatcttattaggcctggcgatgtacttgtccgtgaagcggggccatatacaaaagcatacattgcacttgattgggccagtgagaccgatgattccaagcaagaaaagctggatgacttcagatacgacgagattggcgctcaagatggggccccgaagaaagagtgggacgcatggaatcaagaggacaccaagacgagatatgagtggatggtaccggtttggtcatgggaatttgatggtagttttcacatgcagcgacgtcgcttgaaaatcggtgtcatggccagctactctgccgagatcatctccatacagcagttggagatcattcctctcaaacacgcgagaccggaaatacgcaaacagctagaaataagagggcgaatgttttggactcttcgatttcgtcgattcattagttacaagaaaagcgaacagggagagctaaacgatgtaagtgtgatatacattacctaattccaggtcaagctaactacttcaaggtttgtgacagatttatgatagataccgatacatataagaaactgcatcccaagtctgctttgagtaatatgaaactacgatcaagcttgtcccggaaagcgatggccagtcatgcacctccttctggcgacgaccttctagtgttcccacctcagatcccaggatttaatttattacgaaagacttgggtagacttgtgtgttgattacatgtccgatgttggttggaataaacaagcctttgcagatctagttgttcatcccgaaaccaaggaacttgttcaagcccttgtcatgaagcaacttgtggccgcacagtccacggacttcgtcgcgggaaaaggaaatggacttatcgttcttctacatggagggccggggactggaaagacattcactgccgagggagtggctgaatttgcagagaagccattactacgtgtgacatgtggcgacgttgggaccagggccgaagttgtggagaagaagctccaatcatcatttcacctggggaagatatgggactgtggtatggtttcccatgtgcggttgatttttcaaatgctgacgagtcgaagtggtcctcctggatgaagctgacgtgttcttggaggaacgggatatgaaagacctcaatcggaatgcattagtatccgtgttcctccgtgagctagaatactatgatggaatcctgatactaacatctaatcgcgtgggtacgtttgacgaagcgttcaagtctcgcatccagctgtcgcttcactacgaaaatcttggggtcagtcaacgacgaaaaatttggcgcaactttataacccgcgtcaggtctctcgattcaacaattgactatgatgatatcagagatcactttgacgaactcagcaaggcagagatgaatggacgcgagattagaaacgcgatcaccacagcaagacaattggctcaatacaagagtgagcctttgaactctgagcatcttgcccatgtcttacgagtcagcaagaagttcggcaagtatcttagtgatttgaaagacggagcgacggcagacgagatcaaacgggagaaagaaattaggttaacctacacagcttctaaacctcgctcgcaggaatcgccgttttgagatcttccagcacaaaggctccgttgcaggcaatgcattattaatggtgtcgcaagatagcacttggcttaagaaataatgctaaatggagcttatgtcttgtgtacttcatggcaatcgcaaaactggatcgttatatgtgactataccattaatgttctgatagccagaaaggggcaacccatttcaagcgataactattgtcttcctttttaatcttgcagcctagtaaaggatttcaccaaccacgtcttctatgttcataatcatgccatatggtatgatatgatagccaaaaaaggaacagtcatcctctgaagtatggataatgtcttggagaacggatctcaccagagaaatgtgcgcatcaatgacttgactgtagagaaatgagtagctttggtatggaagagctgaaagatttatcgaaagaactgggtatcttttgattcatgaatgcagagaaagactggtagtagatgatttcgtaggtaggtaggagttgagacacgtaagtctcaagcgtcatgttcgaaagtgtcgttgagatagcggacaaaggtctgccgtatcctcaaagcgcccatgttgcttacaccctcaagtcctataccaccccggttcaagcctacgaaagccctcctcagccgctgcagctggggcaggccgatcttcttgccgggcagctcgacgacgagttcctcctcctctgcggtgcctccaggcgagatcttgacttcgcctccgccctcgtcgccctgctggtcgaggatgcgcttgacgatgtcgtgcgtttcgcggtcgagagtgtagaggtagtcgccgtcggcgtcgcggctcctctggacggtggcctggttgggcttgacaatcttcctggagtcgccggcgatggcttcccacaggctatcgaagacctgcctggcgtggtcgtcgccgtcgtcccatatgagggtgaagagggggctgtcccaccgggtcatggggttgggctcttcgtaacggaagacgaggttctcccagttggccgggtcgtaggcggcctctgcgtctgcgtctgcctctgcctctgtgttggcttcggtgtcgtcggcatgggcatcgtggacatgggcatcgtgggctgtcttgcgggcttcgggagcagtgtcgggggcggtggtgtcgggcgtggtgcgcagacgcaggcgcagacgggcttcgttgatctcgcgcgacctgtcccgtccgcagccgacctgcaggatgcacgagggcgtgcgcatggccttggcctcgcagtgcagctggtagcgccagcccttgatgtagttcaggccgtcgaggatgacgatgtccctgtcgctgagcacgcgcttgacggccgcgtagatggcggcacgcgcgtccttctccgaggcattggcggaccgcgtgtgcgcgggcacggccgagaggtcgtagacggcgcgggagatggacagcgactggtcggagatcaggtgcagacggtatttgggcgcagagaggccgttcgtagtcgtggcttgggcggactgggcggcatgggcggattggatgcggtcggcgaggtatgcgtgcagctgcctcgctcgcgtcgacttgcccgacgtcgggaagcccgtcactatgatgaggggcatggaaacaacctcacctcacacacacgacgacaagctgagcatctgccgaaggctgcaggaggcaggatgcgggactcggaggcggttggagcgttgggatttggagattcgagaagtcttggagcacgtcgctagcgctggagcaactcgaacttgcaatggaagtgaggtgcgacctgtactgtttaccccaccatccacacatttggtcgtcactgcttcattgcatagtaccccgccatcgctaccaggtagcctctctgccccttggtcaaatctctcatgccagactagggctcgccaggtaggctcggtatgaacctgttgatccccattcagactgccgtccctcgctcgtcttcccaaacttgctctcagaatcaactctcgcactccaaatcccgctcctatcaactgcagccatatcctctcagatcaactcaagtcccctggcgcttcaagcaagactggacaatgcagacgcttcattcgacagaccgcgagtatgacactgcgatgcttgatatccttgacagtaactgacggaagaaccgaatgcttgggttgagagacactgtgagctgtacgatctggcggcctcgaaaggctagcaacacgagagcgaggactcgcagttgttcacatacagccttcaaatatgtgtactcgaacacccacatcaagtggagcaaagagagcctgcagtgtttaaagtacagtaatgacgatatcgcatcagcttgaaatctcattccgcgtctccaatcttggcagaaatattgatgcctcgtcgctctcgcactccaattcggcctagcgcagcagcgctgcacagtggacggtggaaaccaactacctgacactccatgtggttgaagccccttctcgtccccatctcgacaagcttatcgccggaaaaggccatggccctagagtcgtagcctgaag

SEQ ID NO: 22370 - DNA, 405 bp, Muscodor strobelii
  misc_feature: SGI cDNA ID NO. 567594
  misc_feature: Elevated expression when VOC is produced
  misc_feature: Encodes the peptide sequence at SEQ ID NO 22371
atgtggtcagcgacagactggtatgcgggcgcaacgaatgatccatactcgcagctggccagcgaaacatacgctaccgcagtgcacactttcaatcgcgatgttaccaatgatgcaagaaagcgaaatatcgcaacacagtcgggtagcttggaagacctgaaaaagactgtggaagataccaagtcgaaatacgaggacaaaattaagcataggaaattgcataaatggttgaataaagtctctctacgcatcaaattctatggtaatatctttgatgttttcgttcaacaccaccctgaatatgttagcctggcttggggagcatttaagctgcttttcacggtaagccgaattttcaagctttttgatgatgttctaacattcttaggttgcagagaataa

SEQ ID NO: 22371 - protein, 134 aa, Muscodor strobelii
  misc_feature: SGI Peptide ID NO. 567594
  misc_feature (24)..(117): NCBI GI: 169619756 Blast Desc: SNOG_13076 [Phaeosphaeria nodorum SN15] gi|160703897|gb|EAT79403.2| SNOG_13076 [Phaeosphaeria nodorum SN15]
  misc_feature (17)..(114): NCBI GI: 145609736 Blast Desc: MGG_03034 [Magnaporthe grisea 70-15] gi|145017126|gb|EDK01489.1| MGG_03034 [Magnaporthe grisea 70-15]
  misc_feature (17)..(114): NCBI GI: 149210699 Blast Desc: MGCH7_ch7g822 [Magnaporthe grisea 70-15] gi|86196777|gb|EAQ71415.1| MGCH7_ch7g822 [Magnaporthe grisea 70-15]
  misc_feature (19)..(114): NCBI GI: 256726536 Blast Desc: NECHADRAFT_39343 [Nectria haematococca mpVI 77-13-4]
  misc_feature (5)..(113): NCBI GI: 115449839 Blast Desc: [Aspergillus terreus NIH2624] gi|114187658|gb|EAU29358.1| [Aspergillus terreus NIH2624]
  misc_feature (45)..(114): NCBI GI: 169604254 Blast Desc: SNOG_05138 [Phaeosphaeria nodorum SN15] gi|160706528|gb|EAT87529.2| SNOG_05138 [Phaeosphaeria nodorum SN15]
  misc_feature (5)..(93): NCBI GI: 261358383 Blast Desc: [Verticillium albo-atrum VaMs.102]
  misc_feature (87)..(114): NCBI GI: 189205346 Blast Desc: conserved [Pyrenophora tritici-repentis Pt-1C-BFP] gi|187986107|gb|EDU51595.1| conserved [Pyrenophora tritici-repentis Pt-1C-BFP]
  misc_feature: Useful for introducing or modulating the production of volatile compounds
MWSATDWYAGATNDPYSQLASETYATAVHTFNRDVTNDARKRNIATQSGSLEDLKKTVEDTKSKYEDKIKHRKLHKWLNKVSLRIKFYGNIFDVFVQHHPEYVSLAWGAFKLLFTVSRIFKLFDDVLTFLGCRE

SEQ ID NO: 22372 - DNA, 2136 bp, Muscodor strobelii
  misc_feature: SGI EST ID NO. CUFF.52599.2
  misc_feature: Variant of the nucleotide sequence at SEQ ID NO 22370
gtgcgacgggtgtctgcaattgatcttacagaatgtcacatctagcactactggcctttcaactctaagattctactgtagagtttcaagaacactcgtgccatcttattgagatctaaccgaaataattagggttacgactcattatcttatcatgtggtcagcgacagactggtatgcgggcgcaacgaatgatccatactcgcagctggccagcgaaacatacgctaccgcagtgcacactttcaatcgcgatgttaccaatgatgcaagaaagcgaaatatcgcaacacagtcgggtagcttggaagacctgaaaaagactgtggaagataccaagtcgaaatacgaggacaaaattaagcataggaaattgcataaatggttgaataaagtctctctacgcatcaaattctatggtaatatctttgatgttttcgttcaacaccaccctgaatatgttagcctggcttggggagcatttaagctgcttttcacggttgcagagaataatgccaagttgctcaccactttgtcgaaagccattagtcaagtcggagactgtctcccgcgtacagagctctccgccatattgtatccgacggatcgtatgagaaaggcaaccatgcagctctatgtgcaaatcatcaattttctcattagagcgaaagcctggtatgaagagtcttgctttcgccgcattgctaatgctctcctaaggcctgccgagttgagatatgatgatatcattagtgacatcgaatactgcacaacacaaattgatcatctttcagcagcaggagcgagagcggagcaacgagacatgcatttaaggctcagagaaatcagccagcatcagcatcaagtagagagtctagtgaacgaagtcaaaagattgtgtatagaaacacaagcgataaactcaagcgccttcctcgatacgaatgctcgccttacagatctccaattcaacaacataatggaacatctctgcagagcccgaaaacaggaacccttgagcttactcggccaatgtcaatattatcagagaaagtacagaatgaaattaaataataagaaaagtccattgaccattctttctaagaattctaaattcaaacattggaagtctggacaggagcctgccgtcattctggtcaaaggcgatacagacacacgcgagtttgtcaagactctctctacgaatgtagtcgagacgctacgacgttataaactccccgtagtgtggatactgaaatcgccttcgcggacgtccggccccgggctgtctgccgttgacctaataaaggatttgatacatcaaattctgcgcctgaatcttgcatcacgtacggagaagtcgttatcgctttcatgcaagaaatttcatgtggcggataatccagtgcagtggttcgactttttggcctcagttattgagccacttgagatcttatacattgtgttagacatggaggccattgatacacgcctgatccaatattctgatggcttttcttgggtggcatcgtttttgtcgcttatacagaaattgcagcagcgacggttaaggactaagttgaaaatactgctcttgagttatggctcggcggtgcgtcaagaggggcaaaatttggctgacttccgagaagttgtattatcaacgcgcaacatggcattagacaagccatagatatacgtcaaatggcaacgtacatggtatggtatgaaaaacccgtatgcaaactgcaaaatggatcgctcggtggccaatgtttcaaacatttacaatacaagatccatccgtttgcccttatggaacttctctcgcagaattagcgaatgttgttcctataactggaactgttacttttctctatcgagagtgaaccttataatttctttcgttcaggtcgcgctgcatagcaggtcgcgtgtctatacttgggcggtcattactatttacctaagtgagcaccgtatgacttcacgctgaatgataccgcgttgatgaacgatcgcgataatgatgtaatatgagtgctgcgttaagattcttaattatttactacgtattgctacgctttcgagatagaatactgttttaaagaatcaacatactcccggaaaatctgc

SEQ ID NO: 22373 - DNA, 1047 bp, Muscodor strobelii
  misc_feature: SGI cDNA ID NO. 567595
  misc_feature: Encodes the peptide sequence at SEQ ID NO 22374
atggagcagcagaacattggcaaccagatccgtctcccttgggagcccagcaaccctccacaacgcccgaagccgccaactcggccatctatgggacgtcggaagagcagcatggcacaatctattgaagaacggcgtatccggctactcaatttcctaccgctgtcagtcaaaaatcacattgtggcggtcgcgagtgagttcgcgggtaccttcatgttcctcttattcgcatttggcggtaccaacgccgtcaataatgctcccaatgaaggacagccgcaagacctctctgcaaacgcagccaagctcctgtacatcagcctctgctttgggatgagtcttgctgtcaacgcttgggtcttctttcgtatcagcggcgggttattcaaccctgcagtcactattggcatgatggtagttggcgctgtcccctacttgcgtggggtcctcgtcatcatcagtcagattgtaggaggtatcgcagcaagcgccgttattcttggtattcagcccgggccactaagtgtggcaacgtcactcggaggtgggacctcggtcgttcaggggctgttcattgaagtcttcctcactgcacagttggtgctgacaattttcatgctcgcggctgagaaacaccgagctacattcattgcccctgttgggatcggtctatcgctatttattgcagagctgatgggggtctactacacaggcggaagtttgaatcctgcgcgatccttcggccctaatgttgtgtccgcatcctttcaaagctaccattggatctactgggtagggccaatcgtgggcgctctccttgcctccggcttctacgtaatcatcaaagcgcttgagtatgagacagtcaatcctgaacaagatgccaagggacactcgtttaaaccccgtacaaagcttcacacaattcgttccgacgaaaagggtgaaacagagcatgttgagcatgctgcctatggcgcaaatggccaaggcactgctacatacgacaacgctaatgatatggaggctgggatgagtcgctaa

SEQ ID NO: 22374 - protein, 348 aa, Muscodor strobelii
  misc_feature: SGI Peptide ID NO. 567595
  misc_feature (56)..(279): Pfam Id: PF00230 Pfam Desc: Major intrinsic protein
  misc_feature (10)..(345): NCBI GI: 169595556 Blast Desc: SNOG_00518 [Phaeosphaeria nodorum SN15] gi|111070893|gb|EAT92013.1| SNOG_00518 [Phaeosphaeria nodorum SN15]
  misc_feature (56)..(304): NCBI GI: 156035683 Blast Desc: SS1G_13045 [Sclerotinia sclerotiorum 1980] gi|154698450|gb|EDN98188.1| SS1G_13045 [Sclerotinia sclerotiorum 1980]
  misc_feature (43)..(300): NCBI GI: 154297745 Blast Desc: BC1G_12284 [Botryotinia fuckeliana B05.10] gi|150858413|gb|EDN33605.1| BC1G_12284 [Botryotinia fuckeliana B05.10]
  misc_feature (43)..(297): NCBI GI: 156043855 Blast Desc: SS1G_10931 [Sclerotinia sclerotiorum 1980] gi|154695318|gb|EDN95056.1| SS1G_10931 [Sclerotinia sclerotiorum 1980]
  misc_feature (43)..(309): NCBI GI: 169603784 Blast Desc: SNOG_04900 [Phaeosphaeria nodorum SN15] gi|111066171|gb|EAT87291.1| SNOG_04900 [Phaeosphaeria nodorum SN15]
  misc_feature (56)..(327): NCBI GI: 121714561 Blast Desc: aquaporin [Aspergillus clavatus NRRL 1] gi|119403045|gb|EAW13465.1| aquaporin [Aspergillus clavatus NRRL 1]
  misc_feature (37)..(328): NCBI GI: 46138603 Blast Desc: FG10816.1 [Gibberella zeae PH-1]
  misc_feature (43)..(295): NCBI GI: 146323615 Blast Desc: aquaporin [Aspergillus fumigatus Af293] gi|129555307|gb|EAL84488.2| aquaporin [Aspergillus fumigatus Af293] gi|159122244|gb|EDP47366.1| aquaporin [Aspergillus A1163]
  misc_feature (46)..(295): NCBI GI: 256729122 Blast Desc: NECHADRAFT_93338 [Nectria haematococca mpVI 77-13-4]
  misc_feature (58)..(323): NCBI GI: 261352753 Blast Desc: aquaporin-2 [Verticillium albo-atrum VaMs.102]
MEQQNIGNQIRLPWEPSNPPQRPKPPTRPSMGRRKSSMAQSIEERRIRLLNFLPLSVKNHIVAVASEFAGTFMFLLFAFGGTNAVNNAPNEGQPQDLSANAAKLLYISLCFGMSLAVNAWVFFRISGGLFNPAVTIGMMVVGAVPYLRGVLVIISQIVGGIAASAVILGIQPGPLSVATSLGGGTSVVQGLFIEVFLTAQLVLTIFMLAAEKHRATFIAPVGIGLSLFIAELMGVYYTGGSLNPARSFGPNVVSASFQSYHWIYWVGPIVGALLASGFYVIIKALEYETVNPEQDAKGHSFKPRTKLHTIRSDEKGETEHVEHAAYGANGQGTATYDNANDMEAGMSR

SEQ ID NO: 22375 - DNA, 635 bp, Muscodor strobelii
  misc_feature: SGI EST ID NO. CUFF.52564.0
  misc_feature: Variant of the nucleotide sequence at SEQ ID NO 22373
actgcacagttggtgctgacaattttcatgctcgcggctgagaaacaccgagctacattcattgcccctgttgggatcggtctatcgctatttattgcagagctgatgggggtctactacacaggcggaagtttgaatcctgcgcgatccttcggccctaatgttgtgtccgcatcctttcaaagctaccattggatctactgggtagggccaatcgtgggcgctctccttgcctccggcttctacgtaatcatcaaagcgcttgagtatgagacagtcaatcctgaacaagatgccaagggacactcgtttaaaccccgtacaaagcttcacacaattcgttccgacgaaaagggtgaaacagagcatgttgagcatgctgcctatggcgcaaatggccaaggcactgctacatacgacaacgctaatgatatggaggctgggatgagtcgctaacaaacttgcgatcctgggtcctctataggcgattaggtttaaattagatctatatgcctaaaatgtcggcaacggtcgaagagatgtacgacgcgttcgtcaaggtgcgcaaggaggagaagctcaggtatatccgcgtcaggcgtgatgccgtggcggagagactgtcgaatagctgg

SEQ ID NO: 22376 - DNA, 663 bp, Muscodor strobelii
  misc_feature: SGI cDNA ID NO. 567596
  misc_feature: Encodes the peptide sequence at SEQ ID NO 22377
atgaaaacgctctggctttcgtctatacttgccgtggcatactgtagtgcactcagtgacgcttccggctcagagcttacgaaatcacatgatgtatcctctagggcacacaccaatacgcttttgggccaattccaaaagagcgatctcgagtttgatgcatgggtggatcaaatgattcaagacggccacctctattcgcctaacatgaccgcactccttagtcgccaagatggctggggcgtcaaactcaaaaatgttggttgcgctcaagtgaccgggaaccaagacttggtcaacgatgtggaaactcacttttgtgagttcgtcaggcaagcagagcagttagcggcatcggagatggcaacagatgtaacgcgcctgatttgcgataataatcgcttctgcaaactggccgttagccagaccttcaactttttcggcctcttcaaggacgtagacgatgtgaccaagctctgccatgaaatgttcgacgctctgaatgcggcctgtcccggcggaggtgtggctgaagctgatgtcacagacccagtcgatgggcatactacaagtggacaactcgaggcagcatatgctttggatgatggctcaacatgcaaccccagtgttactcaagaatgtttcgatcagactataccttag

SEQ ID NO: 22377 - protein, 220 aa, Muscodor strobelii
  misc_feature: SGI Peptide ID NO. 567596
MKTLWLSSILAVAYCSALSDASGSELTKSHDVSSRAHTNTLLGQFQKSDLEFDAWVDQMIQDGHLYSPNMTALLSRQDGWGVKLKNVGCAQVTGNQDLVNDVETHFCEFVRQAEQLAASEMATDVTRLICDNNRFCKLAVSQTFNFFGLFKDVDDVTKLCHEMFDALNAACPGGGVAEADVTDPVDGHTTSGQLEAAYALDDGSTCNPSVTQECFDQTIP

SEQ ID NO: 22378 - DNA, 366 bp, Muscodor strobelii
  misc_feature: SGI cDNA ID NO. 567597
  misc_feature: Encodes the peptide sequence at SEQ ID NO 22379
atgcattcttccacgattctcactatctccttcgctgcctctactgcgctcgccggctgcttttcgggcggcgacaactgggcctcgcagagggccattgctttggcaaatgcagaaagcgtctgcaacaacaagttcagcgtattcactttcgaggctggtcaggaacttggcggctgcgccaatctcgatagcaccaagaagaccgatttcatcctgcagaacatcagcggagatcagagaacgcccacggctgctgagtgttacgacgggtttcaaaaggaaatcaatgcttgcgacaatggcggctcgacctcttacactaactggaagtacactgccgatcccaacgccgggcaatgctag

SEQ ID NO: 22379 - protein, 121 aa, Muscodor strobelii
  misc_feature: SGI Peptide ID NO. 567597
  misc_feature (1)..(121): NCBI GI: 226282594 Blast Desc: PAAG_01081 [Paracoccidioides brasiliensis Pb01]
  misc_feature (1)..(121): NCBI GI: 226292240 Blast Desc: PADG_03744 [Paracoccidioides brasiliensis Pb18]
  misc_feature (1)..(121): NCBI GI: 225681061 Blast Desc: [Paracoccidioides brasiliensis Pb03]
  misc_feature (3)..(121): NCBI GI: 171693607 Blast Desc: protein product [Podospora anserina] gi|170946752|emb|CAP73556.1| protein product [Podospora anserina]
  misc_feature (19)..(121): NCBI GI: 171682124 Blast Desc: protein product [Podospora anserina] gi|170941021|emb|CAP66671.1| protein product [Podospora anserina]
  misc_feature (1)..(121): NCBI GI: 169618764 Blast Desc: SNOG_12574 [Phaeosphaeria nodorum SN15] gi|111058752|gb|EAT79872.1| SNOG_12574 [Phaeosphaeria nodorum SN15]
  misc_feature (18)..(114): NCBI GI: 145609782 Blast Desc: [Magnaporthe grisea 70-15] gi|145017172|gb|EDK01535.1| [Magnaporthe grisea 70-15]
MHSSTILTISFAASTALAGCFSGGDNWASQRAIALANAESVCNNKFSVFTFEAGQELGGCANLDSTKKTDFILQNISGDQRTPTAAECYDGFQKEINACDNGGSTSYTNWKYTADPNAGQC

SEQ ID NO: 22380 - DNA, 1836 bp, Muscodor strobelii
  misc_feature: SGI cDNA ID NO. 567598
  misc_feature: Encodes the peptide sequence at SEQ ID NO 22381
atgcctaaccaacaggccgctacatcgccacctggaaattatggttcggtcacagagcgcagaaaatcgagctcgcaggagagcgtagaagtcaagaatgacaatgtaccacctagcagtcttgcaccagcccccgctgcccaacattccgagctggtgggctcgggattaggcgatgctgtattgcgcctgctgagaattcggaataggaccgaaaacggcggttttgatcttgatgcaattgcgacgcaatcgagtatttgggattcagaaaacatcgaggagtacaaatctaaatacattcatccggaatgggagaattatacagctttcgatccgtcatttcgttggactttcagagaggagaacgcagtgcgacataaagtcgattggaagataatggtctgggtgtgcgtgatgtttgctgctttggacatcgatcggggaaatatcagcaacgcagtttcggacaacttgcttgatgatcttggacttacaaccggtgactataatcttggtcaaacactttctaagatcggctttctacttgcggagctgccgtcgcagttgatttcgaaacgtattggcccagatctatggatccccattcagatctgcatattcagttttatctcgggcgcacagttttttatacagggccgggcatcgttcttagccactagatttctagttgctgtcttccagggcgggttcatccctgacatgattttatatctcagctattggtatactggtacaagggtaggcgtatttattccactttggacattcaaattcgctaacttttctacacagctacccattcgacttgcctggttctggacatcttcacagttagtcgacattgcgaccgggttcgctgctgtcggcctcttgtcactgcgtggtgttctagggttcgcgggttggcaatggttgtttcttgtcgagggcctttttaccttcgtgatcggactagcttcgttcttcttcatgccccagagcccagcgaaaacaaagagctggtggaacccgaaagggtacttcacggaaaaagaggtgaagatcatcgtgaactctgttatccgagacgacccaggaaaagcgggcatgtttaataggcaaggtctcaccgtcgggcaaatttggagttgcgcgaaagactacgacatgtggccgctctacgctctaggactattgttcgggattccgaagtatcccgtcacccagtatctaacattgtcatttcgcgaactaggattcagtgtcatccagactaacctgctaacaataccgtacatcgtcgcttcttctatcaccatgctactcatcaccgcattgagcgagtcagtgaagaataggagtctggtggcaatggccgaagatctttggcttctccccaattttgctgctttgattgccctgccggatccgatagcgccctggtcatattttgccatcgctacggtccttttgtcttttccatatacgcatcctattcaagttgcttggaccagccgcaatgctgggtccgtgcaacagaggaccgtttctgctgcgatttataatatctgggttcaagtgagcgcaatcattggggcaaatgtttatcagccaggcgacaagccgcgatactttaaggcaaataccggattattagttctctgcatctatttagtggtggtgcagtacccaggcacttatctgtactatcgccggcgtaactcgacaagggcaaaaatttgggattctatgactcccgcggaacaagaagagtacagaaagactacaacagatgttggcaataagaggctcgatttccgcttcgcgacctga

SEQ ID NO: 22381 - protein, 611 aa, Muscodor strobelii
  misc_feature: SGI Peptide ID NO. 567598
  misc_feature (137)..(534): Pfam Id: PF07690 Pfam Desc: Major Facilitator Superfamily
  misc_feature (9)..(611): NCBI GI: 67527704 Blast Desc: AN4129.2 [Aspergillus nidulans FGSC A4] gi|40740200|gb|EAA59390.1| AN4129.2 [Aspergillus nidulans FGSC A4] gi|259481275|tpe|CBF74641.1| TPA: [Aspergillus nidulans FGSC
  misc_feature (6)..(611): NCBI GI: 256722871 Blast Desc: [Nectria haematococca mpVI 77-13-4]
  misc_feature (9)..(610): NCBI GI: 169845255 Blast Desc: CC1G_00526 [Coprinopsis cinerea okayama7#130] gi|116509412|gb|EAU92307.1| CC1G_00526 [Coprinopsis cinerea okayama7#130]
  misc_feature (79)..(610): NCBI GI: 171676603 Blast Desc: protein product [Podospora anserina] gi|170936368|emb|CAP61026.1| protein product [Podospora anserina]
  misc_feature (75)..(610): NCBI GI: 170084545 Blast Desc: [Laccaria bicolor S238N-H82] gi|164651048|gb|EDR15288.1| [Laccaria bicolor S238N-H82]
  misc_feature (89)..(610): NCBI GI: 145230497 Blast Desc: An01g11450 [Aspergillus niger] gi|134055675|emb|CAK44049.1| protein product [Aspergillus niger]
  misc_feature (89)..(610): NCBI GI: 169770149 Blast Desc: [Aspergillus oryzae RIB40] gi|83767403|dbj|BAE57542.1| protein product [Aspergillus oryzae]
  misc_feature (89)..(610): NCBI GI: 238487474 Blast Desc: allantoate permease, [Aspergillus flavus NRRL3357] gi|220699854|gb|EED56193.1| allantoate permease, [Aspergillus flavus NRRL3357]
  misc_feature (76)..(609): NCBI GI: 164424070 Blast Desc: NCU07609 [Neurospora crassa OR74A] gi|157070359|gb|EAA33607.2| NCU07609 [Neurospora crassa OR74A]
  misc_feature (78)..(610): NCBI GI: 256731830 Blast Desc: NECHADRAFT_93751 [Nectria haematococca mpVI 77-13-4]
MPNQQAATSPPGNYGSVTERRKSSSQESVEVKNDNVPPSSLAPAPAAQHSELVGSGLGDAVLRLLRIRNRTENGGFDLDAIATQSSIWDSENIEEYKSKYIHPEWENYTAFDPSFRWTFREENAVRHKVDWKIMVWVCVMFAALDIDRGNISNAVSDNLLDDLGLTTGDYNLGQTLSKIGFLLAELPSQLISKRIGPDLWIPIQICIFSFISGAQFFIQGRASFLATRFLVAVFQGGFIPDMILYLSYWYTGTRVGVFIPLWTFKFANFSTQLPIRLAWFWTSSQLVDIATGFAAVGLLSLRGVLGFAGWQWLFLVEGLFTFVIGLASFFFMPQSPAKTKSWWNPKGYFTEKEVKIIVNSVIRDDPGKAGMFNRQGLTVGQIWSCAKDYDMWPLYALGLLFGIPKYPVTQYLTLSFRELGFSVIQTNLLTIPYIVASSITMLLITALSESVKNRSLVAMAEDLWLLPNFAALIALPDPIAPWSYFAIATVLLSFPYTHPIQVAWTSRNAGSVQQRTVSAAIYNIWVQVSAIIGANVYQPGDKPRYFKANTGLLVLCIYLVVVQYPGTYLYYRRRNSTRAKIWDSMTPAEQEEYRKTTTDVGNKRLDFRFAT

SEQ ID NO: 22382 - DNA, 1276 bp, Muscodor strobelii
  misc_feature: SGI EST ID NO. CUFF.52605.0
  misc_feature: Variant of the nucleotide sequence at SEQ ID NO 22380
cttcgttcttcttcatgccccagagcccagcgaaaacaaagagctggtggaacccgaaagggtacttcacggaaaaagaggtgaagatcatcgtgaactctgttatccgagacgacccaggaaaagcgggcatgtttaataggcaaggtctcaccgtcgggcaaatttggagttgcgcgaaagactacgacatgtggccgctctacgctctaggactattgttcgggattccgaagtatcccgtcacccagtatctaacattgtcatttcgcgaactaggattcagtgtcatccagactaacctgctaacaataccgtacatcgtcgcttcttctatcaccatgctactcatcaccgcattgagcgagtcagtgaagaataggagtctggtggcaatggccgaagatctttggcttctccccaattttgctgctttgattgccctgccggatccgatagcgccctggtcatattttgccatcgctacggtccttttgtcttttccatatacgcatcctattcaagttgcttggaccagccgcaatgctgggtccgtgcaacagaggaccgtttctgctgcgatttataatatctgggttcaagtgagcgcaatcattggggcaaatgtttatcagccaggcgacaagccgcgatactttaaggcaaataccggattattagttctctgcatctatttagtggtggtgcagtacccaggcacttatctgtactatcgccggcgtaactcgacaagggcaaaaatttgggattctatgactcccgcggaacaagaagagtacagaaagactacaacagatgttggcaataagaggctcgatttccgcttcgcgacctgagctccgtaaggtaccataccacaatgggactacttgagaaactagcagccagttgcgtgttgcacgtagttgtcggaatcgaggctcgtacgtggaaaatgctagtgtatagatgtttttacataactttgcaatatttgcgagcctacgacgggactaatcaaatgcgcaatctaacagttcctaatgagcaaagaactattcgcataaacccaagattcaagaagacctcgtgtcacacaagtttggtctcttttcttctaaaattgtagtcattcaaagttcgtaattgtgatctcgcaagcttatcgcctagtccttgggtgcgtgaggctggaccaggacgcggagtagttctcttggtcctgcgaatgcagtacgaccatgaagaaatcgatgattgtcgaggatataacctt

SEQ ID NO: 22383 - DNA, 1782 bp, Muscodor strobelii
  misc_feature: SGI cDNA ID NO. 567599
  misc_feature: Elevated expression when VOC is produced
  misc_feature: Encodes the peptide sequence at SEQ ID NO 22384
atgcctaaccaacaggccgctacatcgccacctggaaattatggttcggtcacagagcgcagaaaatcgagctcgcaggagagcgtagaagtcaagaatgacaatgtaccacctagcagtcttgcaccagcccccgctgcccaacattccgagctggtgggctcgggattaggcgatgctgtattgcgcctgctgagaattcggaataggaccgaaaacggcggttttgatcttgatgcaattgcgacgcaatcgagtatttgggattcagaaaacatcgaggagtacaaatctaaatacattcatccggaatgggagaattatacagctttcgatccgtcatttcgttggactttcagagaggagaacgcagtgcgacataaagtcgattggaagataatggtctgggtgtgcgtgatgtttgctgctttggacatcgatcggggaaatatcagcaacgcagtttcggacaacttgcttgatgatcttggacttacaaccggtgactataatcttggtcaaacactttctaagatcggctttctacttgcggagctgccgtcgcagttgatttcgaaacgtattggcccagatctatggatccccattcagatctgcatattcagttttatctcgggcgcacagttttttatacagggccgggcatcgttcttagccactagatttctagttgctgtcttccagggcgggttcatccctgacatgattttatatctcagctattggtatactggtacaaggctacccattcgacttgcctggttctggacatcttcacagttagtcgacattgcgaccgggttcgctgctgtcggcctcttgtcactgcgtggtgttctagggttcgcgggttggcaatggttgtttcttgtcgagggcctttttaccttcgtgatcggactagcttcgttcttcttcatgccccagagcccagcgaaaacaaagagctggtggaacccgaaagggtacttcacggaaaaagaggtgaagatcatcgtgaactctgttatccgagacgacccaggaaaagcgggcatgtttaataggcaaggtctcaccgtcgggcaaatttggagttgcgcgaaagactacgacatgtggccgctctacgctctaggactattgttcgggattccgaagtatcccgtcacccagtatctaacattgtcatttcgcgaactaggattcagtgtcatccagactaacctgctaacaataccgtacatcgtcgcttcttctatcaccatgctactcatcaccgcattgagcgagtcagtgaagaataggagtctggtggcaatggccgaagatctttggcttctccccaattttgctgctttgattgccctgccggatccgatagcgccctggtcatattttgccatcgctacggtccttttgtcttttccatatacgcatcctattcaagttgcttggaccagccgcaatgctgggtccgtgcaacagaggaccgtttctgctgcgatttataatatctgggttcaagtgagcgcaatcattggggcaaatgtttatcagccaggcgacaagccgcgatactttaaggcaaataccggattattagttctctgcatctatttagtggtggtgcagtacccaggcacttatctgtactatcgccggcgtaactcgacaagggcaaaaatttgggattctatgactcccgcggaacaagaagagtacagaaagactacaacagatgttggcaataagaggctcgatttccgcttcgcgacctga

SEQ ID NO: 22384 - protein, 593 aa, Muscodor strobelii
  misc_feature: SGI Peptide ID NO. 567599
  misc_feature (137)..(516): Pfam Id: PF07690 Pfam Desc: Major Facilitator Superfamily
  misc_feature (9)..(593): NCBI GI: 67527704 Blast Desc: AN4129.2 [Aspergillus nidulans FGSC A4] gi|40740200|gb|EAA59390.1| AN4129.2 [Aspergillus nidulans FGSC A4] gi|259481275|tpe|CBF74641.1| TPA: [Aspergillus nidulans FGSC
  misc_feature (9)..(592): NCBI GI: 169845255 Blast Desc: CC1G_00526 [Coprinopsis cinerea okayama7#130] gi|116509412|gb|EAU92307.1| CC1G_00526 [Coprinopsis cinerea okayama7#130]
  misc_feature (79)..(592): NCBI GI: 171676603 Blast Desc: protein product [Podospora anserina] gi|170936368|emb|CAP61026.1| protein product [Podospora anserina]
  misc_feature (75)..(592): NCBI GI: 170084545 Blast Desc: [Laccaria bicolor S238N-H82] gi|164651048|gb|EDR15288.1| [Laccaria bicolor S238N-H82]
  misc_feature (89)..(592): NCBI GI: 145230497 Blast Desc: An01g11450 [Aspergillus niger] gi|134055675|emb|CAK44049.1| protein product [Aspergillus niger]
  misc_feature (89)..(592): NCBI GI: 169770149 Blast Desc: [Aspergillus oryzae RIB40] gi|83767403|dbj|BAE57542.1| protein product [Aspergillus oryzae]
  misc_feature (89)..(592): NCBI GI: 238487474 Blast Desc: allantoate permease, [Aspergillus flavus NRRL3357] gi|220699854|gb|EED56193.1| allantoate permease, [Aspergillus flavus NRRL3357]
  misc_feature (76)..(591): NCBI GI: 164424070 Blast Desc: NCU07609 [Neurospora crassa OR74A] gi|157070359|gb|EAA33607.2| NCU07609 [Neurospora crassa OR74A]
  misc_feature (78)..(592): NCBI GI: 256731830 Blast Desc: NECHADRAFT_93751 [Nectria haematococca mpVI 77-13-4]
  misc_feature (19)..(591): NCBI GI: 145237082 Blast Desc: An07g00980 [Aspergillus niger] gi|134075654|emb|CAK96546.1| protein product [Aspergillus niger]
  misc_feature: Useful for introducing or modulating the production of volatile compounds
MPNQQAATSPPGNYGSVTERRKSSSQESVEVKNDNVPPSSLAPAPAAQHSELVGSGLGDAVLRLLRIRNRTENGGFDLDAIATQSSIWDSENIEEYKSKYIHPEWENYTAFDPSFRWTFREENAVRHKVDWKIMVWVCVMFAALDIDRGNISNAVSDNLLDDLGLTTGDYNLGQTLSKIGFLLAELPSQLISKRIGPDLWIPIQICIFSFISGAQFFIQGRASFLATRFLVAVFQGGFIPDMILYLSYWYTGTRLPIRLAWFWTSSQLVDIATGFAAVGLLSLRGVLGFAGWQWLFLVEGLFTFVIGLASFFFMPQSPAKTKSWWNPKGYFTEKEVKIIVNSVIRDDPGKAGMFNRQGLTVGQIWSCAKDYDMWPLYALGLLFGIPKYPVTQYLTLSFRELGFSVIQTNLLTIPYIVASSITMLLITALSESVKNRSLVAMAEDLWLLPNFAALIALPDPIAPWSYFAIATVLLSFPYTHPIQVAWTSRNAGSVQQRTVSAAIYNIWVQVSAIIGANVYQPGDKPRYFKANTGLLVLCIYLVVVQYPGTYLYYRRRNSTRAKIWDSMTPAEQEEYRKTTTDVGNKRLDFRFAT

SEQ ID NO: 22385 - DNA, 1276 bp, Muscodor strobelii; identical to SEQ ID NO: 22382
  misc_feature: SGI EST ID NO. CUFF.52605.0
  misc_feature: Variant of the nucleotide sequence at SEQ ID NO 22383

SEQ ID NO: 22386 - DNA, 1842 bp, Muscodor strobelii
  misc_feature: SGI cDNA ID NO. 567600
  misc_feature: Reduced expression when VOC is produced
  misc_feature: Encodes the peptide sequence at SEQ ID NO 22387
atgcccacaatagaaacagatgtcctcattgtaggtgcagggccaatcggcttgaacctcgcctaccaactacggcgcttctccctcccaccagtcgcagaccccaccacaacaccaatatcagtacacataatcgaggctcttccaaaaccaacacaacaggctttcggccgcgcggtaacattctggtcaaggcccatggaattactgtctcaactgggtctgggcgagcatatccttaatcactgtgtgactgtgagaacgtctgctgcgtataatgcaaaaggcgaggaggtgtttgggaggggatggagctttgtagaggggatcagtgatacgaggttcaagttcgcgagcgtgcttaggcagaaatatgtagaggatatttgccgggggaaattgaaagatctaggtgtggaagtgtgcgagcatcacaaattcatcgatctggaaattgatgagagtgtcctagtgggtggaatgggtagagtcgaggctaagatcttggatttgagtctaggagagggtgacgagagagagtacacggtgagctgcagatacctgatcggttgtgatggatcacgtacagtggtaaggggcgcagcggggatagagtcagatgggagtcgaaccgaggacaaatgggtgcgagtcgatggcgtgttgaaatacacgacgatgcctaaaccgttcgcatatggctcgctggaaagtccgatctacggcaacgtcctctgggtcccgctcgatcacggcgcgacaagaatcggtttcgcgctaaaggaggagagaaggaagctgtacgagaagatggacgaggaggcttatgcaaaggaggcgttgctgagcatcaagccgtttgaggctgaatacgagaaagttgattgggcaagtgtttattccgtcggtcaacgactggcgaggcacttctgcgcgaaagagtgtgtattcatcgcgggtgatgcggcacatagccattcgagtggtgcgggtcagggaatgaacacgggtgtccaagatgctgtgaatctaggttggaaactcgcgctcgtcctgactggtgctcttaagcacgaggtacttgagacgtatgatctggagcgaagaccgaatgcggcgaagttgattaggtacgatgaagatatcagcgttctcatcactgggagattgccgagcggctggcaagagagtaaagatcccaacgaagctctcggcgagatcttaaaggaggctgcgggattcaataccggattgactatcgcatatgcgcccaacactgcagtgctgggcgatcatgggacagagagtgaaagtgatcctaagtgtttttataatcaaccgtcgacgataccagcatcgacgatgcccgggtatagagcaccagatgtgcaacttctgaggccgggcttgtggtcgccggtctggttgcaggaacttacgccaaatgttgcgcgattctatgttctgacattcatcgggggttcttctgttagtcgggatagctttcgtcaatttcggtctattcttgagcaagaacagcggcttgacttacgcagcttggacgcaatggtcgcaacgagagaggttaaaaagtggccggttgaattcatcacaatcttaccagataaggccaataacatctgggctgaactcggtggtgatgccgctgggagcccgtattacgatgttgatgatggtgctgctggacgacggtacggtgtcgacgtcgaggctggcgccgtttttgtcttgaggcctgacggatttattggcgccaggttcccattgcagcctgggagtgtttcgggagttgttcagtacttaggcaggctgttgatgtga

SEQ ID NO: 22387 - protein, 613 aa, Muscodor strobelii
  misc_feature: SGI Peptide ID NO. 567600
  misc_feature (5)..(379): Pfam Id: PF01494 Pfam Desc: FAD binding domain
  misc_feature (7)..(26): Pfam Id: PF01266 Pfam Desc: FAD dependent oxidoreductase
  misc_feature (293)..(379): Pfam Id: PF01494 Pfam Desc: FAD binding domain
  misc_feature (5)..(211): Pfam Id: PF01494 Pfam Desc: FAD binding domain
  misc_feature (20)..(613): NCBI GI: 169596759 Blast Desc: SNOG_01149 [Phaeosphaeria nodorum SN15] gi|160707367|gb|EAT90798.2| SNOG_01149 [Phaeosphaeria nodorum SN15]
  misc_feature (21)..(613): NCBI GI: 189195290 Blast Desc: 3-(3-hydroxy-phenyl)propionate hydroxylase [Pyrenophora tritici-repentis Pt-1C-BFP] gi|187979862|gb|EDU46488.1| 3-(3-hydroxy-phenyl)propionate
  misc_feature (18)..(613): NCBI GI: 242778974 Blast Desc: conserved [Talaromyces stipitatus ATCC 10500] gi|218722967|gb|EED22385.1| conserved [Talaromyces stipitatus ATCC 10500]
  misc_feature (18)..(606): NCBI GI: 212536981 Blast Desc: 2,4-dichlorophenol 6-monooxygenase, [Penicillium marneffei ATCC 18224] gi|210068388|gb|EEA22479.1| 2,4-dichlorophenol 6-monooxygenase, [Penicillium marneffei ATCC
  misc_feature (18)..(592): NCBI GI: 67523237 Blast Desc: AN2075.2 [Aspergillus nidulans FGSC A4] gi|40745751|gb|EAA64907.1| AN2075.2 [Aspergillus nidulans FGSC A4] gi|259487444|tpe|CBF86128.1| TPA: conserved [Aspergillus FGSC
  misc_feature (6)..(599): NCBI GI: 212534722 Blast Desc: 2,4-dichlorophenol 6-monooxygenase, [Penicillium marneffei ATCC 18224] gi|210069916|gb|EEA24006.1| 2,4-dichlorophenol 6-monooxygenase, [Penicillium marneffei ATCC
  misc_feature (1)..(477): NCBI GI: 145257732 Blast Desc: An04g04680 [Aspergillus niger] gi|134058748|emb|CAK38732.1| protein product [Aspergillus niger]
  misc_feature (44)..(591): NCBI GI: 115390176 Blast Desc: conserved [Aspergillus terreus NIH2624] gi|114194989|gb|EAU36689.1| conserved [Aspergillus terreus NIH2624]
  misc_feature (3)..(612): NCBI GI: 212539626 Blast Desc: pentachlorophenol 4-monooxygenase, [Penicillium marneffei ATCC 18224] gi|210067267|gb|EEA21359.1| pentachlorophenol 4-monooxygenase, [Penicillium marneffei ATCC
  misc_feature (40)..(603): NCBI GI: 212532315 Blast Desc: conserved [Penicillium marneffei ATCC 18224] gi|210071678|gb|EEA25767.1| conserved [Penicillium marneffei ATCC 18224]
  misc_feature (7)..(589): SWISSPROT Homolog: EC 1.14.13.7 Phenol 2-monooxygenase
  misc_feature: Useful for introducing or modulating the production of volatile compounds
MPTIETDVLIVGAGPIGLNLAYQLRRFSLPPVADPTTTPISVHIIEALPKPTQQAFGRAVTFWSRPMELLSQLGLGEHILNHCVTVRTSAAYNAKGEEVFGRGWSFVEGISDTRFKFASVLRQKYVEDICRGKLKDLGVEVCEHHKFIDLEIDESVLVGGMGRVEAKILDLSLGEGDEREYTVSCRYLIGCDGSRTVVRGAAGIESDGSRTEDKWVRVDGVLKYTTMPKPFAYGSLESPIYGNVLWVPLDHGATRIGFALKEERRKLYEKMDEEAYAKEALLSIKPFEAEYEKVDWASVYSVGQRLARHFCAKECVFIAGDAAHSHSSGAGQGMNTGVQDAVNLGWKLALVLTGALKHEVLETYDLERRPNAAKLIRYDEDISVLITGRLPSGWQESKDPNEALGEILKEAAGFNTGLTIAYAPNTAVLGDHGTESESDPKCFYNQPSTIPASTMPGYRAPDVQLLRPGLWSPVWLQELTPNVARFYVLTFIGGSSVSRDSFRQFRSILEQEQRLDLRSLDAMVATREVKKWPVEFITILPDKANNIWAELGGDAAGSPYYDVDDGAAGRRYGVDVEAGAVFVLRPDGFIGARFPLQPGSVSGVVQYLGRLLM

SEQ ID NO: 22388 - DNA, 7526 bp, Muscodor strobelii
  misc_feature: SGI EST ID NO. CUFF.53118.1
  misc_feature: Variant of the nucleotide sequence at SEQ ID NO 22386
cggggacatctctattgaagaagaagcgtcgtgccgtaaagtactccttattgttctacctggaaggctaactttgaggttgaatccttgttctgtgtcgagtcaactatacttccccggttcaatttcttctcaacctgcctctggcatgttttcttgactatgacatccgaatagtccgataaaggttcgagggaggggcaattatatatctgaaggtgcatctgcatacgcagatacaggcgaccaccacatatatctgaaattcgtaaaaggcgtatgacgtctgcttcccctcagcccagggctaaattagcaacagctccctagactcttaatgtccactgctccgtcatgctccatgctacaacgagtttcttatcacaagaaatctcatggaattgccttcgtccgtcttgtctgtgccgctcaggtacaggtgcgggcagaatacttcatgcaatatattgcagatgacagcgtatgaggccggagtgagaaggcacgtggccatcgagatccccgccagcagggcatagccaatctgcataattcttgtcaagtatggtcgatccaaaatacatgccatgtagatccgagttcaatgaaaacaattggataatatgttgcctgcgtgtgcaaacagtcctcatgtgtacgaggacagatgcggcagacatacggtcgtctcacttatccctagcacgagaccacttaaaggccattaaccactatttcatccagtcaagtcgccaattgcaagccttcttgttcctagtatctttattttcatgactggtgacactcgggactaattagtatctactctaccccgattccctatgactctgtttgtaaagataagaccagattcagccagatgtagttatgattggtgtcatgatacccattccctgcccagttttgccgtgcccggagagcactcgttccatttgcccatcacagcggcccgtcatcaattcatctcagccatgctgatatcgttccgggtgatagacaccacgtctcactaggcagcaggcttcttagaaccgccctcaaccgtgtcagatctcttacgcttcccggtggaggattccgaagcctctgcttcttcctctgcttcattctcgtcgtcgtcgttggcagtccactcggtgatctcgtactcgacgcgcacgcggccatcgctactctgctggactcctctggttgtgtgcaactggcccaggcgactgcccgccagcagagagtcaaaccaggggatgctggagaaatggcggcccgtcagaatgctgctagcttcggaggcggcagggagcgagatgtccatgacgtcagactcatcctcattctcatcctcgtctgattccgactctggtaggagacccaagtcctggagaccgtggagatcctcggtcaacagactcccaatggtcagctggatgaaatcggcttcggtggcaggctgctcggagtagtacgatatcggagtgccgcagaggccgcaaaagtttcgacgagtgtatcggtcggcgaagacgcggcggatcgtgaatggggtgtcgtcttggtctacggtctggctgtggtaccagtcgagagggacgcggatgaaggccgacagcggggaggcagacgcaatgcctgcaaaacagcatcttggtcagaaatggggagcccaatcgctagtgggagacattggaggggagtgaggggcgagagaggggcaagcgaggggcaagagatggggcgtcgacatacgctggtcgaggctggagtcgaagatgatgctggccgagtgcgtggcatcggaggggatgtcgatggcgtactggtagcggccacaggtacacgagcctcggagcagggcgccgcgcgaagccatgttggtcgctacctgtgtgtgcctgtttggtcggggtgtgtgtggtcgcgagggggcttctgctccacgtctcagactgtgaagaggggaggattgggaaggtgcgacgcgaggagtgcgccagaggatgcgacagtcgtgtgtggttggggcagcaggtgcgagcaggacgcaagtcagtcgagagacagaggatggtggaggcgggaagccaaaaccatgatgagggacaatgggtcagagtgatgcaatcttcaatcttcaatcttcacttctcagatggcccccggcccctacagcctcattgctttgtcgctggtcgcggaggttaagtcgggtgtctgtgatgctttggaaggcgcgggatcaacgtcgtcgggatgcagctgggacgttctggtccattccagcgctgctgcactaacgtcataacccgtcgcgactgctatatcctttaggtagttgttgtattggcaggtggggttcacaccacctccacgcttctagaagccacgccggaatgccccgccgcaagtggccctactcccgatccccatttccaatcttttagcgtgaaagatgcgccaagccttttatctcgctttactgaccagcgagcacattgcaggtatccgaggcaggtatctacagactggattatcgaacgagagaacactgctcaatacatttatttataccttaagctttcgtctcatcaagtcttttcaccgagcggcatttgtgtgttgtggctcccctcatgcagcccattggactctgcaggttccatctgctcaacctcagctacacctgccaataattcctcgtcggagatgttcttcattcgctgtttcatccattgcttgaaaaagattgtcaagaattgcgctataaacacttgctcgacagtataaagaagcacaggtacctgaatcgccgagattgtatagtcgtctagcttcgaccacatcgccgccaccaacgggatgcctatgctcgtcgtctttgctgcaccgcagaagcacacagcaatcaccaggtccggcgacatcctcttcaccgtcaccgcctgtctgacttgtcttgagagatgtttccctgcctttgaatctgctatgtacttgttcacgattctgctcagtgagagtggaggatatgctatgtagtagcagatgactgtgaacatgcctcgagcgcacccgtctcaaacgctccagagaacgtcgccctgttcctgtgtcagcaattatatgcaactgcattaaaactgtcatcacttaccaggccacgagagccatcaggatagagcagaacttggccaggtagaacgtgctcaacgtccaggccacctgctttggaaacgcccacctcagagcctgtcccactgccaacggcaagagagcgctgagacccagctgcttcagaacacttgcgtacatcggtcccagcgtgctaggcccagccggcctcaacgaatcgaacaccgaatcagatggtaagaagccgtatatcaggaacggcgacagaaatgcgcccacgatattgccgatgactacttcaacgatagccgcggcctcatcacctccggcgtttctcgtcataacaatatttgatgcgatagtcgtaggaatgcagctaaccaccaccatacccaccaaaatacttggatcaatattgcccgagctgacaccacccgcggcgatgacgatgcggatcaagactagattcctttaggtacacgactatttgccttagcattgagcttgggaactcactgatttgtataatcggtatcagaattaggttagtgatctgaacaacaatgtgtagtctccagtttgccgcatgctccttaagtttgtcggggccaagctgtgcgccattgatgaggaatatcaacgcgatgacaccatataatattgaatactcggattttatgacacctccccgagccgcgacatctaaaaagcgtaaatcagtacgcttgacgcttctgtcggtaagtcaaacgtacggggaaatagataacccaacaatgcagcaaggccaaacccaatgaccagccagttatctagaataatggagaagattcgtctcgcaatggttaaggccctggatgattctctgcgatcctgactctcctgaggcgcggtcgaagggtccatccttgtactacccgacatatttcttatcgagggcttggcatcatagatcataatatttagatcacgcggcaactagtgaaccacgatggtggagtaactcgaagcgaagaacaaacgctgagcaagtcaagaaggccgaatttaagtttctcgaatcggcaaaaaaggtgaataccatatcgagaaatcagttttccattgattgcagttagacaccgttattcccgcttcaataaacccgatgtcgctctcgaagcggcgaaaaagtggtgacgtcggctttttcgccgaggtctcgaggactcgaccaccggcactccacgcttctcattgcatgctcgagaatcttgattggcgatagcttcactttctaaattgccattcttgatatacttcacgtgcccccgagagctttgtctttcatgagattatcaattcatgatagggtatggttgcacatcacggagttcgacgagccagaaaatacatctatcttattgatcgctaattaccagagtcttgttcgtggctctattctaggcgtgtatcatggatgtaggtggaagatgagaggctgagaagaacctccaagacacagcttattgccactataaacacgaaccatccacaccaccatagttatggaagacggatccatatatgtatacatcaagaaataactttcaacatggtgccgcactatgttgttcccaatcgagaacttacgcaaccccgcgaaaagccgaggacatcctatatctactataaagggatttatgctgttggcctagcgtttaaattctacatcttcgatcgctcaacgcgtctagatgttcaatgatatggaacttacgcctaatatgtacgcacctaagctaagtcgaatgaaacatggagatcagcatgtaatatacgatttttttttagaaacgacttataacgacgtgatacctattttcttagctcagacgtgcacaggcggagatgtcgacatacgatcgcaggtgtcccacaagaactccaactgcccgcactaacacccgagacacagtatcgctggaccgatactccaatccgcgcggaacttagcgacgatcgcccatagtatcgcccctctcgatatatcagtactgccccgagtccgatcactataatcgccgcaggtggataatgatcgcctatcttccgggccgatcatgcgcatattaacgacgactgtctacgtccttgtgcgcgatgctggtgtttaagatacaaacaccgtcggaaatcctcaaccgatgtctcatggctgttacatgtgccactggcaatccggctgcaatctttcgactatttcatacctatcatcctccaacgatctcgggaccatgtctataaacatatacgaatgaccacttacatatgaaaccctgccttataatcgcgccacgcagtcgctgtcttcacactaaagacgaagctcgtttatcacaaacctgtcgcggtcacatttagagtgatgcccacaatagaaacagatgtcctcattgtaggtgcagggccaatcggcttgaacctcgcctaccaactacggcgcttctccctcccaccagtcgcagaccccaccacaacaccaatatcagtacacataatcgaggctcttccaaaaccaacacaacaggctttcggccgcgcggtaacattctggtcaaggcccatggaattactgtctcaactgggtctgggcgagcatatccttaatcactgtgtgactgtgagaacgtctgctgcgtataatgcaaaaggcgaggaggtgtttgggaggggatggagctttgtagaggggatcagtgatacgaggttcaagttcgcgagcgtgcttaggcagaaatatgtagaggatatttgccgggggaaattgaaagatctaggtgtggaagtgtgcgagcatcacaaattcatcgatctggaaattgatgagagtgtcctagtgggtggaatgggtagagtcgaggctaagatcttggatttgagtctaggagagggtgacgagagagagtacacggtgagctgcagatacctgatcggttgtgatggatcacgtacagtggtaaggggcgcagcggggatagagtcagatgggagtcgaaccgaggacaaatgggtgcgagtcgatggcgtgttgaaatacacgacgatgcctaaaccgttcgcatatggctcgctggaaagtccgatctacggcaacgtcctctgggtcccgctcgatcacggcgcgacaagaatcggtttcgcgctaaaggaggagagaaggaagctgtacgagaagatggacgaggaggcttatgcaaaggaggcgttgctgagcatcaagccgtttgaggctgaatacgagaaagttgattgggcaagtgtttattccgtcggtcaacgactggcgaggcacttctgcgcgaaagagtgtgtattcatcgcgggtgatgcggcacatagccattcgagtggtgcgggtcagggaatgaacacgggtgtccaagatgctgtgaatctaggttggaaactcgcgctcgtcctgactggtgctcttaagcacgaggtacttgagacgtatgatctggagcgaagaccgaatgcggcgaagttgattaggtacgatgaagatatcagcgttctcatcactgggagattgccgagcggctggcaagagagtaaagatcccaacgaagctctcggcgagatcttaaaggaggctgcgggattcaataccggattgactatcgcatatgcgcccaacactgcagtgctgggcgatcatgggacagagagtgaaagtgatcctaagtgtttttataatcaaccgtcgacgataccagcatcgacgatgcccgggtatagagcaccagatgtgcaacttctgaggccgggcttgtggtcgccggtctggttgcaggaacttacgccaaatgttgcgcgattctatgttctgacattcatcgggggttcttctgttagtcgggatagctttcgtcaatttcggtctattcttgagcaagaacagcggcttgacttacgcagcttggacgcaatggtcgcaacgagagaggttaaaaagtggccggttgaattcatcacaatcttaccagataaggccaataacatctgggctgaactcggtggtgatgccgctgggagcccgtattacgatgttgatgatggtgctgctggacgacggtacggtgtcgacgtcgaggctggcgccgtttttgtcttgaggcctgacggatttattggcgccaggttcccattgcagcctgggagtgtttcgggagttgttcagtacttaggcaggctgttgatgtgatttatatactcgaatagtgttgttcacctccactgtcagtactagtttcggctgcatggcgcggtgcaataactatcacaaagtctgagattagatttctatgaacattttccatgttatggctttgaag

SEQ ID NO: 22389 - DNA, 741 bp, Muscodor strobelii
  misc_feature: SGI cDNA ID NO. 567602
  misc_feature: Reduced expression when VOC is produced
  misc_feature: Encodes the peptide sequence at SEQ ID NO 22390
atggcttcgcgcggcgccctgctccgaggctcgtgtacctgtggccgctaccagtacgccatcgacatcccctccgatgccacgcactcggccagcatcatcttcgactccagcctcgaccagcgcattgcgtctgcctccccgctgtcggccttcatccgcgtccctctcgactggtaccacagccagaccgtagaccaagacgacaccccattcacgatccgccgcgtcttcgccgaccgatacactcgtcgaaacttttgcggcctctgcggcactccgatatcgtactactccgagcagcctgccaccgaagccgatttcatccagctgaccattgggagtctgttgaccgaggatctccacggtctccaggacttgggtctcctaccagagtcggaatcagacgaggatgagaatgaggatgagtctgacgtcatggacatctcgctccctgccgcctccgaagctagcagcattctgacgggccgccatttctccagcatcccctggtttgactctctgctggcgggcagtcgcctgggccagttgcacacaaccagaggagtccagcagagtagcgatggccgcgtgcgcgtcgagtacgagatcaccgagtggactgccaacgacgacgacgagaatgaagcagaggaagaagcagaggcttcggaatcctccaccgggaagcgtaagagatctgacacggttgagggcggttctaagaagcctgctgcctag

SEQ ID NO: 22390 - protein, 246 aa, Muscodor strobelii
  misc_feature: SGI Peptide ID NO. 567602
  misc_feature (8)..(235): NCBI GI: 46125795 Blast Desc: FG07275.1 [Gibberella zeae PH-1]
  misc_feature (8)..(232): NCBI GI: 156037818 Blast Desc: SS1G_12623 [Sclerotinia sclerotiorum 1980] gi|154698031|gb|EDN97769.1| SS1G_12623 [Sclerotinia sclerotiorum 1980]
  misc_feature (8)..(235): NCBI GI: 256732779 Blast Desc: NECHADRAFT_100184 [Nectria haematococca mpVI 77-13-4]
  misc_feature (8)..(239): NCBI GI: 154315302 Blast Desc: BC1G_04690 [Botryotinia fuckeliana B05.10] gi|150847653|gb|EDN22846.1| BC1G_04690 [Botryotinia fuckeliana B05.10]
  misc_feature (8)..(235): NCBI GI: 85078549 Blast Desc: NCU00132 [Neurospora crassa OR74A] gi|28917237|gb|EAA26949.1| conserved [Neurospora crassa OR74A]
  misc_feature (8)..(239): NCBI GI: 145614324 Blast Desc: MGG_11336 [Magnaporthe grisea 70-15] gi|145021263|gb|EDK05392.1| MGG_11336 [Magnaporthe grisea 70-15]
  misc_feature (8)..(246): NCBI GI: 121700859 Blast Desc: conserved [Aspergillus clavatus NRRL 1] gi|119396837|gb|EAW07268.1| conserved [Aspergillus clavatus NRRL 1]
  misc_feature (8)..(242): NCBI GI: 261360133 Blast Desc: conserved [Verticillium albo-atrum VaMs.102]
  misc_feature (4)..(207): NCBI GI: 225561507 Blast Desc: conserved [Ajellomyces capsulatus G186AR]
  misc_feature (8)..(207): NCBI GI: 255930459 Blast Desc: Pc06g01840 [Penicillium chrysogenum Wisconsin 54-1255] gi|211581402|emb|CAP79177.1| Pc06g01840 [Penicillium chrysogenum Wisconsin 54-1255]
  misc_feature: Useful for introducing or modulating the production of volatile compounds
MASRGALLRGSCTCGRYQYAIDIPSDATHSASIIFDSSLDQRIASASPLSAFIRVPLDWYHSQTVDQDDTPFTIRRVFADRYTRRNFCGLCGTPISYYSEQPATEADFIQLTIGSLLTEDLHGLQDLGLLPESESDEDENEDESDVMDISLPAASEASSILTGRHFSSIPWFDSLLAGSRLGQLHTTRGVQQSSDGRVRVEYEITEWTANDDDENEAEEEAEASESSTGKRKRSDTVEGGSKKPAA

SEQ ID NO: 22391 - DNA, 7974 bp, Muscodor strobelii
  misc_feature: SGI EST ID NO. CUFF.53117.0
  misc_feature: Variant of the nucleotide sequence at SEQ ID NO 22389
cttcaaagccataacatggaaaatgttcatagaaatctaatctcagactttgtgatagttattgcaccgcgccatgcagccgaaactagtactgacagtggaggtgaacaacactattcgagtatataaatcacatcaacagcctgcctaagtactgaacaactcccgaaacactcccaggctgcaatgggaacctggcgccaataaatccgtcaggcctcaagacaaaaacggcgccagcctcgacgtcgacaccgtaccgtcgtccagcagcaccatcatcaacatcgtaatacgggctcccagcggcatcaccaccgagttcagcccagatgttattggccttatctggtaagattgtgatgaattcaaccggccactttttaacctctctcgttgcgaccattgcgtccaagctgcgtaagtcaagccgctgttcttgctcaagaatagaccgaaattgacgaaagctatcccgactaacagaagaacccccgatgaatgtcagaacatagaatcgcgcaacatttggcgtaagttcctgcaaccagaccggcgaccacaagcccggcctcagaagttgcacatctggtgctctatacccgggcatcgtcgatgctggtatcgtcgacggttgattataaaaacacttaggatcactttcactctctgtcccatgatcgcccagcactgcagtgttgggcgcatatgcgatagtcaatccggtattgaatcccgcagcctcctttaagatctcgccgagagcttcgttgggatctttactctcttgccagccgctcggcaatctcccagtgatgagaacgctgatatcttcatcgtacctaatcaacttcgccgcattcggtcttcgctccagatcatacgtctcaagtacctcgtgcttaagagcaccagtcaggacgagcgcgagtttccaacctagattcacagcatcttggacacccgtgttcattccctgacccgcaccactcgaatggctatgtgccgcatcacccgcgatgaatacacactctttcgcgcagaagtgcctcgccagtcgttgaccgacggaataaacacttgcccaatcaactttctcgtattcagcctcaaacggcttgatgctcagcaacgcctcctttgcataagcctcctcgtccatcttctcgtacagcttccttctctcctcctttagcgcgaaaccgattcttgtcgcgccgtgatcgagcgggacccagaggacgttgccgtagatcggactttccagcgagccatatgcgaacggtttaggcatcgtcgtgtatttcaacacgccatcgactcgcacccatttgtcctcggttcgactcccatctgactctatccccgctgcgccccttaccactgtacgtgatccatcacaaccgatcaggtatctgcagctcaccgtgtactctctctcgtcaccctctcctagactcaaatccaagatcttagcctcgactctacccattccacccactaggacactctcatcaatttccagatcgatgaatttgtgatgctcgcacacttccacacctagatctttcaatttcccccggcaaatatcctctacatatttctgcctaagcacgctcgcgaacttgaacctcgtatcactgatcccctctacaaagctccatcccctcccaaacacctcctcgccttttgcattatacgcagcagacgttctcacagtcacacagtgattaaggatatgctcgcccagacccagttgagacagtaattccatgggccttgaccagaatgttaccgcgcggccgaaagcctgttgtgttggttttggaagagcctcgattatgtgtactgatattggtgttgtggtggggtctgcgactggtgggagggagaagcgccgtagttggtaggcgaggttcaagccgattggccctgcacctacaatgaggacatctgtttctattgtgggcatcactctaaatgtgaccgcgacaggtttgtgataaacgagcttcgtctttagtgtgaagacagcgactgcgtggcgcgattataaggcagggtttcatatgtaagtggtcattcgtatatgtttatagacatggtcccgagatcgttggaggatgataggtatgaaatagtcgaaagattgcagccggattgccagtggcacatgtaacagccatgagacatcggttgaggatttccgacggtgtttgtatcttaaacaccagcatcgcgcacaaggacgtagacagtcgtcgttaatatgcgcatgatcggcccggaagataggcgatcattatccacctgcggcgattatagtgatcggactcggggcagtactgatatatcgagaggggcgatactatgggcgatcgtcgctaagttccgcgcggattggagtatcggtccagcgatactgtgtctcgggtgttagtgcgggcagttggagttcttgtgggacacctgcgatcgtatgtcgacatctccgcctgtgcacgtctgagctaagaaaataggtatcacgtcgttataagtcgtttctaaaaaaaaatcgtatattacatgctgatctccatgtttcattcgacttagcttaggtgcgtacatattaggcgtaagttccatatcattgaacatctagacgcgttgagcgatcgaagatgtagaatttaaacgctaggccaacagcataaatccctttatagtagatataggatgtcctcggcttttcgcggggttgcgtaagttctcgattgggaacaacatagtgcggcaccatgttgaaagttatttcttgatgtatacatatatggatccgtcttccataactatggtggtgtggatggttcgtgtttatagtggcaataagctgtgtcttggaggttcttctcagcctctcatcttccacctacatccatgatacacgcctagaatagagccacgaacaagactctggtaattagcgatcaataagatagatgtattttctggctcgtcgaactccgtgatgtgcaaccataccctatcatgaattgataatctcatgaaagacaaagctctcgggggcacgtgaagtatatcaagaatggcaatttagaaagtgaagctatcgccaatcaagattctcgagcatgcaatgagaagcgtggagtgccggtggtcgagtcctcgagacctcggcgaaaaagccgacgtcaccactttttcgccgcttcgagagcgacatcgggtttattgaagcgggaataacggtgtctaactgcaatcaatggaaaactgatttctcgatatggtattcaccttttttgccgattcgagaaacttaaattcggccttcttgacttgctcagcgtttgttcttcgcttcgagttactccaccatcgtggttcactagttgccgcgtgatctaaatattatgatctatgatgccaagccctcgataagaaatatgtcgggtagtacaaggatggacccttcgaccgcgcctcaggagagtcaggatcgcagagaatcatccagggccttaaccattgcgagacgaatcttctccattattctagataactggctggtcattgggtttggccttgctgcattgttgggttatctatttccccgtacgtttgacttaccgacagaagcgtcaagcgtactgatttacgctttttagatgtcgcggctcggggaggtgtcataaaatccgagtattcaatattatatggtgtcatcgcgttgatattcctcatcaatggcgcacagcttggccccgacaaacttaaggagcatgcggcaaactggagactacacattgttgttcagatcactaacctaattctgataccgattatacaaatcagtgagttcccaagctcaatgctaaggcaaatagtcgtgtacctaaaggaatctagtcttgatccgcatcgtcatcgccgcgggtggtgtcagctcgggcaatattgatccaagtattttggtgggtatggtggtggttagctgcattcctacgactatcgcatcaaatattgttatgacgagaaacgccggaggtgatgaggccgcggctatcgttgaagtagtcatcggcaatatcgtgggcgcatttctgtcgccgttcctgatatacggcttcttaccatctgattcggtgttcgattcgttgaggccggctgggcctagcacgctgggaccgatgtacgcaagtgttctgaagcagctgggtctcagcgctctcttgccgttggcagtgggacaggctctgaggtgggcgtttccaaagcaggtggcctggacgttgagcacgttctacctggccaagttctgctctatcctgatggctctcgtggcctggtaagtgatgacagttttaatgcagttgcatataattgctgacacaggaacagggcgacgttctctggagcgtttgagacgggtgcgctcgaggcacttccgcactcgtcagtcatcttcaacgtgtttatcaacgtggcggaatacatactgttcacagtcatctgctactacatagcatatcctccactctcactgagcagaatcgtgaacaagtacatagcagattcaaaggcagggaaacatctctcaagacaagtcagacaggcggtgacggtgaagaggatgtcgccggacctggtgattgctgtgtgcttctgcggtgcagcaaagacgacgagcataggcatcccgttggtggcggcgatgtggtcgaagctagacgactatacaatctcggcgattcaggtacctgtgcttctttatactgtcgagcaagtgtttatagcgcaattcttgacaatctttttcaagcaatggatgaaacagcgaatgaagaacatctccgacgaggaattattggcaggtgtagctgaggttgagcagatggaacctgcagagtccaatgggctgcatgaggggagccacaacacacaaatgccgctcggtgaaaagacttgatgagacgaaagcttaaggtataaataaatgtattgagcagtgttctctcgttcgataatccagtctgtagatacctgcctcggatacctgcaatgtgctcgctggtcagtaaagcgagataaaaggcttggcgcatctttcacgctaaaagattggaaatggggatcgggagtagggccacttgcggcggggcattccggcgtggcttctagaagcgtggaggtggtgtgaaccccacctgccaatacaacaactacctaaaggatatagcagtcgcgacgggttatgacgttagtgcagcagcgctggaatggaccagaacgtcccagctgcatcccgacgacgttgatcccgcgccttccaaagcatcacagacacccgacttaacctccgcgaccagcgacaaagcaatgaggctgtaggggccgggggccatctgagaagtgaagattgaagattgaagattgcatcactctgacccattgtccctcatcatggttttggcttcccgcctccaccatcctctgtctctcgactgacttgcgtcctgctcgcacctgctgccccaaccacacacgactgtcgcatcctctggcgcactcctcgcgtcgcaccttcccaatcctcccctcttcacagtctgagacgtggagcagaagccccctcgcgaccacacacaccccgaccaaacaggcacacacaggtagcgaccaacatggcttcgcgcggcgccctgctccgaggctcgtgtacctgtggccgctaccagtacgccatcgacatcccctccgatgccacgcactcggccagcatcatcttcgactccagcctcgaccagcgcattgcgtctgcctccccgctgtcggccttcatccgcgtccctctcgactggtaccacagccagaccgtagaccaagacgacaccccattcacgatccgccgcgtcttcgccgaccgatacactcgtcgaaacttttgcggcctctgcggcactccgatatcgtactactccgagcagcctgccaccgaagccgatttcatccagctgaccattgggagtctgttgaccgaggatctccacggtctccaggacttgggtctcctaccagagtcggaatcagacgaggatgagaatgaggatgagtctgacgtcatggacatctcgctccctgccgcctccgaagctagcagcattctgacgggccgccatttctccagcatcccctggtttgactctctgctggcgggcagtcgcctgggccagttgcacacaaccagaggagtccagcagagtagcgatggccgcgtgcgcgtcgagtacgagatcaccgagtggactgccaacgacgacgacgagaatgaagcagaggaagaagcagaggcttcggaatcctccaccgggaagcgtaagagatctgacacggttgagggcggttctaagaagcctgctgcctagtgagacgtggtgtctatcacccggaacgatatcagcatggctgagatgaattgatgacgggccgctgtgatgggcaaatggaacgagtgctctccgggcacggcaaaactgggcagggaatgggtatcatgacaccaatcataactacatctggctgaatctggtcttatctttacaaacagagtcatagggaatcggggtagagtagatactaattagtcccgagtgtcaccagtcatgaaaataaagatactaggaacaagaaggcttgcaattggcgacttgactggatgaaatagtggttaatggcctttaagtggtctcgtgctagggataagtgagacgaccgtatgtctgccgcatctgtcctcgtacacatgaggactgtttgcacacgcaggcaacatattatccaattgttttcattgaactcggatctacatggcatgtattttggatcgaccatacttgacaagaattatgcagattggctatgccctgctggcggggatctcgatggccacgtgccttctcactccggcctcatacgctgtcatctgcaatatattgcatgaagtattctgcccgcacctgtacctgagcggcacagacaagacggacgaaggcaattccatgagatttcttgtgataagaaactcgttgtagcatggagcatgacggagcagtggacattaagagtctagggagctgttgctaatttagccctgggctgaggggaagcagacgtcatacgccttttacgaatttcagatatatgtggtggtcgcctgtatctgcgtatgcagatgcaccttcagatatataattgcccctccctcgaacctttatcggactattcggatgtcatagtcaagaaaacatgccagaggcaggttgagaagaaattgaaccggggaagtatagttgactcgacacagaacaaggattcaacctcaaagttagccttccaggtagaacaataaggagtactttacggcacgacgcttcttcttcaatagagatgtccccgaccgacataccaagttgtcttaaactccgtgaacttctatgcgccatctacgatagtcccatacagcctcatcaagtcagctccgacggtatggaatgacagctcgatctattcgagatcgactttctgaaggtagtagacaaagattgtactgggttatcagcgaggtgtcaagaaattgtcattccgctcttcaatcagctcgagcttgagtgggatatcatctacaaacaaggcgccaatatttcaaaaggctgcctgcaaagaccagcaagctcatatcgtatacacgacgcagcgttctatgccatatttatgaggccggactactactctgctatcagtcgctgtaaggactgttatgacaatcttcgacagcttttgggttccgctgtcaacacccgcgctggctccaaaaaccgcgcggtggttcctcgggggacagggcgctttgctcagtaaatgcacattacctccaagctctcagcttgtcaatctacgtcatttcgc

SEQ ID NO: 22392 - DNA, 840 bp, Muscodor strobelii
  misc_feature: SGI cDNA ID NO. 567603
  misc_feature: Encodes the peptide sequence at SEQ ID NO 22393
atgcattccacgaccagtttatcaatcctgtgcctcgcactgggcgccacgagtgtttttggccatggttacgtccgcgaggtcattgccaataacatctcctatccgggctacgatgtttggggagaaggggaccagagcgatgctgtcacctggacgttcacaaacacaaactatggcggcgttaatgccagcgacgtcaatagtaatcagatcccctgccgtactggcgccaagaatgcgaagtcttccatccccgtgaatgccggtgatatcatcacgctcaaatggtacaacgaagacggcggcttcgaacaccctggacccattatgcattatctggcccggtgcagcaatggcgattgcaccaccgttgacaaaaacgagctgaatttcttcaagttttacgaacgcggcctcgtaaagcctggcacgcctgaagaggatgaagacgaaggccgcattgacacctacaatgtgaccgtccccagcgatattaagtccggtgcatacgttctgcgccacgagatgcttggcctccatatggctgacctcggtatagcagaattcttcccatcgtgcatgaatcttgaaatcagcggctctggcactctggagccgaagggcacacctgcttccaagttctacaatagcgaggatccgggcattcatatcgacatctggaagaggctccgaaactacaccatccctggtccaccagtctacacagagaataaacccgcgctaactgcgctctctatagtgaacaaaacaggtcgcaatagcagagagcattctcgtgatctccagcgggcttcctattttgaagggagaggctag

SEQ ID NO: 22393 - protein, 279 aa, Muscodor strobelii
  misc_feature: SGI Peptide ID NO. 567603
  misc_feature (5)..(236): Pfam Id: PF03443 Pfam Desc: Glycosyl hydrolase family 61
  misc_feature (1)..(243): NCBI GI: 115401906 Blast Desc: conserved [Aspergillus terreus NIH2624] gi|114190482|gb|EAU32182.1| conserved [Aspergillus terreus NIH2624]
  misc_feature (18)..(243): NCBI GI: 242775172 Blast Desc: endoglucanase, [Talaromyces stipitatus ATCC 10500] gi|218722209|gb|EED21627.1| endoglucanase, [Talaromyces stipitatus ATCC 10500]
  misc_feature (12)..(242): NCBI GI: 145258912 Blast Desc: An04g08550 [Aspergillus niger] gi|134074828|emb|CAK38942.1| protein product [Aspergillus niger]
  misc_feature (1)..(243): NCBI GI: 201066457 Blast Desc: endoglucanase IV [Trichoderma sp. SSL]
  misc_feature (12)..(242): NCBI GI: 255936287 Blast Desc: Pc13g07400 [Penicillium chrysogenum Wisconsin 54-1255] gi|211583790|emb|CAP91809.1| Pc13g07400 [Penicillium chrysogenum Wisconsin 54-1255]
  misc_feature (17)..(268): NCBI GI: 159122044 Blast Desc: endoglucanase/cellulase, [Aspergillus fumigatus A1163]
  misc_feature (9)..(242): NCBI GI: 115491813 Blast Desc: endoglucanase IV precursor [Aspergillus terreus NIH2624] gi|114197394|gb|EAU39094.1| endoglucanase IV precursor [Aspergillus terreus NIH2624]
  misc_feature (16)..(253): NCBI GI: 259480639 Blast Desc: TPA: conserved [Aspergillus nidulans FGSC A4]
  misc_feature (16)..(253): NCBI GI: 67901808 Blast Desc: AN7891.2 [Aspergillus nidulans FGSC A4] gi|40740355|gb|EAA59545.1| AN7891.2 [Aspergillus nidulans FGSC A4]
  misc_feature (3)..(243): NCBI GI: 238500562 Blast Desc: endoglucanase-4 precursor, [Aspergillus flavus NRRL3357] gi|220691752|gb|EED48099.1| endoglucanase-4 precursor, [Aspergillus flavus NRRL3357]
  misc_feature (1)..(243): SWISSPROT Homolog: EC 3.2.1.4 Cellulase
MHSTTSLSILCLALGATSVFGHGYVREVIANNISYPGYDVWGEGDQSDAVTWTFTNTNYGGVNASDVNSNQIPCRTGAKNAKSSIPVNAGDIITLKWYNEDGGFEHPGPIMHYLARCSNGDCTTVDKNELNFFKFYERGLVKPGTPEEDEDEGRIDTYNVTVPSDIKSGAYVLRHEMLGLHMADLGIAEFFPSCMNLEISGSGTLEPKGTPASKFYNSEDPGIHIDIWKRLRNYTIPGPPVYTENKPALTALSIVNKTGRNSREHSRDLQRASYFEGRG

SEQ ID NO: 22394 - DNA, 1602 bp, Muscodor strobelii
  misc_feature: SGI cDNA ID NO. 567604
  misc_feature: Encodes the peptide sequence at SEQ ID NO 22395
atgcaccagagagtgaccggcttcttcaagcccaaggcgggccaacaagtgcgccaacatctagcacacttaagaaacaacactaatgcaacttggtacaaagatgctggtcttaggagaaatgtatggcactgcgttgggttttatttcggtgtgttctatctaggttatgatgcctcgctcatgaatggtcttcaagccattccgcagtggcaagcctactttggtcatcctagcggaagtactctcggtctcatctcagctagtttgtttctaccggctatcgttactccgttcttcgtcgcatggatcaacgatcgttggggcagaaagccttgcttagcactaggaacagtactcatggtcctcggggcctttctcaatgccttcgcgaagaacattggaactttcattggcggtcgcgtcatcattggtgccgccggcccttttgctaagatcactgcgattgccatgattcaagagttggcgcatccacgacttcgcccttatgtagccactgcatactatagcaactactacgttggtcagattgtcgctgcttggttctgctacggcgcactactctgggaggacactgaatggagatggcgagccccttgcttattccaagtcttcgcgcctctcgttgtcctcgcgcatcttttatttgtgccggaaagccctcgatggctgatcgccaaagatcgaacagaagaagccatgaagatccttgctgacgaacacgctaacggcgacatcgacgacgaaatggtcaattacgaatacgacgagatctgcaaagccctgatcctcgagaaggaggacaacaacagcaagtacatagatttctttaggactccaggaaacagacgacgacttcttgttttgattactatgggtaccggctcgaactgggttggcaacggtattattgcttattacttgtctcctgcacttaagctcgtcggcatcacgcaagcaaaccagattgctggaatcaacggtggattagctatttggtctctgatctgggcttacgccggtgccatgagcgcagagcgtgttggcaggcgaactctttggatcacaggcactgctggcatgttaggcacatacgtggtcatcactggactcagcggatcatttgcaaataacccggtacaaggagttggacttgctgtcgtcccctttcaatacatttacaagacgttctactgcatgagctggtcgccattgccgtttgcttatggtgcagagatcctaccataccacatgagattgaagggtctcagtgttgagctcagtgttcagagcgtggccctcaccttcaaccaatacgtgaatcccgttgctcttgacgccattggatggaagtactacattgtatacatcgcactcatcgccatgtacttggtactcatcctcttctactttcctgaaactaagggcatgacgattgaagagatctcagtgctgtttgacacaggccggaagggtgatgcggaggcagcagcacgcaagttagaaggcaaggacacaaaggtgcttgacgaggaagatggcatgaaaagaaaacaacagacgacacatcacgagagataa

SEQ ID NO: 22395 - protein, 533 aa, Muscodor strobelii
  misc_feature: SGI Peptide ID NO. 567604
  misc_feature (50)..(413): Pfam Id: PF07690 Pfam Desc: Major Facilitator Superfamily
  misc_feature (44)..(493): Pfam Id: PF00083 Pfam Desc: Sugar (and other) transporter
  misc_feature (50)..(395): Pfam Id: PF07690 Pfam Desc: Major Facilitator Superfamily
  misc_feature (23)..(533): NCBI GI: 256722292 Blast Desc: NECHADRAFT_54362 [Nectria haematococca mpVI 77-13-4]
  misc_feature (62)..(525): NCBI GI: 261353682 Blast Desc: sugar transporter [Verticillium albo-atrum VaMs.102]
  misc_feature (21)..(511): NCBI GI: 159128521 Blast Desc: MFS sugar transporter, [Aspergillus fumigatus A1163]
  misc_feature (26)..(514): NCBI GI: 256720422 Blast Desc: NECHADRAFT_55927 [Nectria haematococca mpVI 77-13-4]
  misc_feature (58)..(532): NCBI GI: 119473503 Blast Desc: sugar transporter (hexose transporter [Neosartorya fischeri NRRL 181] gi|119406780|gb|EAW16730.1| sugar transporter (hexose transporter [Neosartorya fischeri NRRL 181]
  misc_feature (58)..(511): NCBI GI: 146323117 Blast Desc: MFS sugar transporter [Aspergillus fumigatus Af293] gi|129556473|gb|EAL86306.2| MFS sugar transporter, [Aspergillus fumigatus Af293]
  misc_feature (26)..(499): NCBI GI: 146323113 Blast Desc: hexose transporter protein [Aspergillus fumigatus Af293] gi|129556471|gb|EAL86303.2| hexose transporter protein [Aspergillus fumigatus Af293]
  misc_feature (26)..(499): NCBI GI: 159128523 Blast Desc: hexose transporter protein [Aspergillus fumigatus A1163]
  misc_feature (21)..(519): NCBI GI: 58267778 Blast Desc: hexose transport-related protein [Cryptococcus neoformans var. neoformans JEC21] gi|134112539|ref|XP_775245.1| CNBE5180 [Cryptococcus neoformans var. neoformans B-3501A] var.
  misc_feature (12)..(509): NCBI GI: 256728839 Blast Desc: NECHADRAFT_39978 [Nectria haematococca mpVI 77-13-4]
MHQRVTGFFKPKAGQQVRQHLAHLRNNTNATWYKDAGLRRNVWHCVGFYFGVFYLGYDASLMNGLQAIPQWQAYFGHPSGSTLGLISASLFLPAIVTPFFVAWINDRWGRKPCLALGTVLMVLGAFLNAFAKNIGTFIGGRVIIGAAGPFAKITAIAMIQELAHPRLRPYVATAYYSNYYVGQIVAAWFCYGALLWEDTEWRWRAPCLFQVFAPLVVLAHLLFVPESPRWLIAKDRTEEAMKILADEHANGDIDDEMVNYEYDEICKALILEKEDNNSKYIDFFRTPGNRRRLLVLITMGTGSNWVGNGIIAYYLSPALKLVGITQANQIAGINGGLAIWSLIWAYAGAMSAERVGRRTLWITGTAGMLGTYVVITGLSGSFANNPVQGVGLAVVPFQYIYKTFYCMSWSPLPFAYGAEILPYHMRLKGLSVELSVQSVALTFNQYVNPVALDAIGWKYYIVYIALIAMYLVLILFYFPETKGMTIEEISVLFDTGRKGDAEAAARKLEGKDTKVLDEEDGMKRKQQTTHHER

SEQ ID NO: 22396 - DNA, 388 bp, Muscodor strobelii
  misc_feature: SGI EST ID NO. CUFF.52621.0
  misc_feature: Variant of the nucleotide sequence at SEQ ID NO 22394
gaagggtctcagtgttgagctcagtgttcagagcgtggccctcaccttcaaccaatacgtgaatcccgttgctcttgacgccattggatggaagtactacattgtatacatcgcactcatcgccatgtacttggtactcatcctcttctactttcctgaaactaagggcatgacgattgaagagatctcagtgctgtttgacacaggccggaagggtgatgcggaggcagcagcacgcaagttagaaggcaaggacacaaaggtgcttgacgaggaagatggcatgaaaagaaaacaacagacgacacatcacgagagataagaacatgctagctatttagtcagatctatagtcttcttgtgaaatgaaatcgacgtcatattcctg

SEQ ID NO: 22397 - DNA, 1881 bp, Muscodor strobelii
  misc_feature: SGI cDNA ID NO. 567605
  misc_feature: Encodes the peptide sequence at SEQ ID NO 22398
atggcttactcgcctttggcatcgcaagaaatcagagtgctcaaacttgagccgggctccgaacatgacgctgttgtcacttgttctacaatggtcgtggaactgtctggaagcaaacacccaaaatatgaagccctatcgtacgtatggggcgacgcaaccgaacgtattcatatattgcttgacggtcgtattacatcagtaaccgcgggtctctggacattactcaaatacattcgcaaaccggacgttgctcgaactctttgggtagatgcattgtgcataaaccagagcgatctcctggagcgaaacgagcaggtcaaaaaaatgggtcaaatctattctgaagcctcacatgttctcatatggctcggtcctccagacatcgagatcgagagcacgttaacaactctggcagtcccaggggctttggtaggcaagacttacgagaattttcctgaagacattgcgtctggacttcgaagggttctctcgcagccatggtggcaccgcatttgggtagtgcaagagcacgtccttgccaaagtagatccaatcgtgggctgtggccacacttggattggctggaagcaactttcggaagcactgcttgactacgcaaggagtgaagtcgacaaaagtggaaccacctttgagactgacgcatcaacatgggtaatgaattctatgatgatcttatatcacgtaacttttagatcacagtggaaagaccctaacagtgctttcaaagaaaaagcaacaatagcaggaataattgagcgtacaagaggctacgaagctaccgataagcttgatcaagtgtatgctgtaagggatctgttgcgtgacgaagacaaggagaagttcccggtacctgactacgcgaggtcggtcagtgatgtttatcaagaaagtacgcttgccttttgtcgcagcaaagggaacctagcatttctatatcacgctattggccgaaaagatccaacgcttgggctgccatcatggtgcgtagacttctctaagaagcagtgggactggggtggatacttgaataaggcggaagctcgcgttggcaacgacagacctgaagatgttaaaatgtatatggaagtattctcacgaaagatgccacgaggcgcgctgcaagttctcggggagtcactcggcagagtggtaatgacacgcccgttagttcgtcccttggatgatacaaacgacggtttctccttccatcatcacaccggcattccgacagtgaccaggcgcccaacatatcaactttatttacaatttgttagagaggtcctcgaaatgacttcgatttcatttaatatctggaagaatcgttgcggcgagcagcgagcaaaagagaaggtggcagatggccaggtatgggagacgatcttcaaaggagcggtgctatttgacttcgtagatgctgtatgcatgcagaatggactcgaaatggtctatggagacgatcgacctcgcaagtattggtatatcgaggcctttgtgcgagctggctgtcctgggtatctcgccactatcaaagaaaagggattcttctatccgacgcttgagcttccagacagcgataggttgaaaaaggcactttggcatacaatgctgataataacgaaggctagtttaggccattggtggtttgttactgagatggactatgtggcaaatgcggatcacaaggttgagctggatgactaccttacaaacgttttgggttgcggacagccttttattctcaggccatttgaaggcgattatcaacttgttggcatgccatattctaatgattgttacgacgagcaccattgcaaacgcgagcagcagttagagcaacaagtcttcactctacgataa

SEQ ID NO: 22398 - protein, 626 aa, Muscodor strobelii
  misc_feature: SGI Peptide ID NO. 567605
  misc_feature (43)..(177): Pfam Id: PF06985 Pfam Desc: Heterokaryon incompatibility protein (HET)
  misc_feature (3)..(345): NCBI GI: 256722665 Blast Desc: NECHADRAFT_87188 [Nectria haematococca mpVI 77-13-4]
  misc_feature (8)..(348): NCBI GI: 115401102 Blast Desc: [Aspergillus terreus NIH2624] gi|114190080|gb|EAU31780.1| [Aspergillus terreus NIH2624]
  misc_feature (6)..(336): NCBI GI: 154312184 Blast Desc: BC1G_06125 [Botryotinia fuckeliana B05.10] gi|150850088|gb|EDN25281.1| BC1G_06125 [Botryotinia fuckeliana B05.10]
  misc_feature (1)..(344): NCBI GI: 145609415 Blast Desc: MGG_13423 [Magnaporthe grisea 70-15] gi|145016783|gb|EDK01213.1| MGG_13423 [Magnaporthe grisea 70-15]
  misc_feature (9)..(340): NCBI GI: 256721799 Blast Desc: NECHADRAFT_53281 [Nectria haematococca mpVI 77-13-4]
  misc_feature (5)..(461): NCBI GI: 256730476 Blast Desc: NECHADRAFT_98494 [Nectria haematococca mpVI 77-13-4]
  misc_feature (3)..(339): NCBI GI: 154305655 Blast Desc: BC1G_07642 [Botryotinia fuckeliana B05.10] gi|150853161|gb|EDN28353.1| BC1G_07642 [Botryotinia fuckeliana B05.10]
  misc_feature (2)..(341): NCBI GI: 256731898 Blast Desc: NECHADRAFT_80737 [Nectria haematococca mpVI 77-13-4]
  misc_feature (10)..(342): NCBI GI: 171679799 Blast Desc: protein product [Podospora anserina] gi|170939525|emb|CAP64753.1| protein product [Podospora anserina]
  misc_feature (3)..(341): NCBI GI: 46111023 Blast Desc: FG02393.1 [Gibberella zeae PH-1] gi|82779921|gb|ABB90278.1| heterokaryon incompatibility protein [Gibberella zeae]
MAYSPLASQEIRVLKLEPGSEHDAVVTCSTMVVELSGSKHPKYEALSYVWGDATERIHILLDGRITSVTAGLWTLLKYIRKPDVARTLWVDALCINQSDLLERNEQVKKMGQIYSEASHVLIWLGPPDIEIESTLTTLAVPGALVGKTYENFPEDIASGLRRVLSQPWWHRIWVVQEHVLAKVDPIVGCGHTWIGWKQLSEALLDYARSEVDKSGTTFETDASTWVMNSMMILYHVTFRSQWKDPNSAFKEKATIAGIIERTRGYEATDKLDQVYAVRDLLRDEDKEKFPVPDYARSVSDVYQESTLAFCRSKGNLAFLYHAIGRKDPTLGLPSWCVDFSKKQWDWGGYLNKAEARVGNDRPEDVKMYMEVFSRKMPRGALQVLGESLGRVVMTRPLVRPLDDTNDGFSFHHHTGIPTVTRRPTYQLYLQFVREVLEMTSISFNIWKNRCGEQRAKEKVADGQVWETIFKGAVLFDFVDAVCMQNGLEMVYGDDRPRKYWYIEAFVRAGCPGYLATIKEKGFFYPTLELPDSDRLKKALWHTMLIITKASLGHWWFVTEMDYVANADHKVELDDYLTNVLGCGQPFILRPFEGDYQLVGMPYSNDCYDEHHCKREQQLEQQVFTLR

SEQ ID NO: 22399 - DNA, 2022 bp, Muscodor strobelii
  misc_feature: SGI EST ID NO. CUFF.52632.0
  misc_feature: Variant of the nucleotide sequence at SEQ ID NO 22397
agaaatcagagtgctcaaacttgagccgggctccgaacatgacgctgttgtcacttgttctacaatggtcgtggaactgtctggaagcaaacacccaaaatatgaagccctatcgtacgtatggggcgacgcaaccgaacgtattcatatattgcttgacggtcgtattacatcagtaaccgcgggtctctggacattactcaaatacattcgcaaaccggacgttgctcgaactctttgggtagatgcattgtgcataaaccagagcgatctcctggagcgaaacgagcaggtcaaaaaaatgggtcaaatctattctgaagcctcacatgttctcatatggctcggtcctccagacatcgagatcgagagcacgttaacaactctggcagtcccaggggctttggtaggcaagacttacgagaattttcctgaagacattgcgtctggacttcgaagggttctctcgcagccatggtggcaccgcatttgggtagtgcaagagcacgtccttgccaaagtagatccaatcgtgggctgtggccacacttggattggctggaagcaactttcggaagcactgcttgactacgcaaggagtgaagtcgacaaaagtggaaccacctttgagactgacgcatcaacatgggtaatgaattctatgatgatcttatatcacgtaacttttagatcacagtggaaagaccctaacagtgctttcaaagaaaaagcaacaatagcaggaataattgagcgtacaagaggctacgaagctaccgataagcttgatcaagtgtatgctgtaagggatctgttgcgtgacgaagacaaggagaagttcccggtacctgactacgcgaggtcggtcagtgatgtttatcaagaaagtacgcttgccttttgtcgcagcaaagggaacctagcatttctatatcacgctattggccgaaaagatccaacgcttgggctgccatcatggtgcgtagacttctctaagaagcagtgggactggggtggatacttgaataaggcggaagctcgcgttggcaacgacagacctgaagatgttaaaatgtatatggaagtattctcacgaaagatgccacgaggcgcgctgcaagttctcggggagtcactcggcagagtggtaatgacacgcccgttagttcgtcccttggatgatacaaacgacggtttctccttccatcatcacaccggcattccgacagtgaccaggcgcccaacatatcaactttatttacaatttgttagagaggtcctcgaaatgacttcgatttcatttaatatctggaagaatcgttgcggcgagcagcgagcaaaagagaaggtggcagatggccaggtatgggagacgatcttcaaaggagcggtgctatttgacttcgtagatgctgtatgcatgcagaatggactcgaaatggtctatggagacgatcgacctcgcaagtattggtatatcgaggcctttgtgcgagctggctgtcctgggtatctcgccactatcaaagaaaagggattcttctatccgacgcttgagcttccagacagcgataggttgaaaaaggcactttggcatacaatgctgataataacgaaggctagtttaggccattggtggtttgttactgagatggactatgtggcaaatgcggatcacaaggttgagctggatgactaccttacaaacgttttgggttgcggacagccttttattctcaggccatttgaaggcgattatcaacttgttggcatgccatattctaatgattgttacgacgagcaccattgcaaacgcgagcagcagttagagcaacaagtcttcactctacgataaatgcagtttgtcggcaataaggccaatcaggagttggcgaatctccaatcaataatgaacagcatcagcaaaattcgctatcgcatggttgagaagtagttgcgcaccttaagtcgatggctcttagagctcgggctattgaatgaggccattattgttcaattcca

SEQ ID NO: 22400 - DNA, 315 bp, Muscodor strobelii
  misc_feature: SGI cDNA ID NO. 567606
  misc_feature: Reduced expression when VOC is produced
  misc_feature: Encodes the peptide sequence at SEQ ID NO 22401
atgtctgtccccaagatcgctatcatcggtgctggccctggtggcttgatgctcgctagcattctacacaataacaaaattccttgtaccgtattcgagagggaatccagtgccgttgcccgcgagcaaggtggcacgctcgacatccacgagcattcaggtcagcgcgccctcgatgctgctgggcttctcaacaagttccgctctctcgtacggcctggaggagagtcactcaaaggtaacttacatacccctatcgtcacctatgtcgattgggagcaaacgagtttcatggccaaggccgtcgtcatcgtc

SEQ ID NO: 22401 - protein, 105 aa, Muscodor strobelii
  misc_feature: SGI Peptide ID NO. 567606
  misc_feature (1)..(82): NCBI GI: 154309097 Blast Desc: BC1G_07443 [Botryotinia fuckeliana B05.10] gi|150852486|gb|EDN27678.1| BC1G_07443 [Botryotinia fuckeliana B05.10]
  misc_feature (1)..(79): NCBI GI: 254376134 Blast Desc: truncated monooxygenase [Streptomyces sp. SPB74] gi|197695950|gb|EDY42883.1| truncated monooxygenase [Streptomyces sp. SPB74]
  misc_feature (1)..(82): NCBI GI: 156049711 Blast Desc: SS1G_08562 [Sclerotinia sclerotiorum 1980] gi|154692961|gb|EDN92699.1| SS1G_08562 [Sclerotinia sclerotiorum 1980]
  misc_feature (5)..(79): NCBI GI: 269918976 Blast Desc: monooxygenase FAD-binding [Klebsiella variicola At-22] gi|269132832|gb|EEZ63289.1| monooxygenase FAD-binding [Klebsiella variicola At-22]
  misc_feature (5)..(79): NCBI GI: 206577009 Blast Desc: tetracycline resistance protein [Klebsiella pneumoniae 342] gi|206566067|gb|ACI07843.1| tetracycline resistance protein [Klebsiella pneumoniae 342]
  misc_feature (1)..(79): NCBI GI: 115375680 Blast Desc: monooxygenase [Stigmatella aurantiaca DW4/3-1] gi|115367328|gb|EAU66308.1| monooxygenase [Stigmatella aurantiaca DW4/3-1]
  misc_feature (1)..(78): NCBI GI: 169598320 Blast Desc: SNOG_01961 [Phaeosphaeria nodorum SN15] gi|111069053|gb|EAT90173.1| SNOG_01961 [Phaeosphaeria nodorum SN15]
  misc_feature (5)..(75): NCBI GI: 226305477 Blast Desc: monooxygenase [Rhodococcus erythropolis PR4] gi|226184594|dbj|BAH32698.1| monooxygenase [Rhodococcus erythropolis PR4]
  misc_feature (5)..(79): NCBI GI: 229011854 Blast Desc: Monooxygenase FAD-binding [Bacillus mycoides DSM 2048] gi|228749485|gb|EEL99329.1| Monooxygenase FAD-binding [Bacillus mycoides DSM 2048]
  misc_feature (1)..(79): NCBI GI: 254400015 Blast Desc: monooxygenase [Streptomyces sviceus ATCC 29083] gi|197709498|gb|EDY53532.1| monooxygenase [Streptomyces sviceus ATCC 29083]
  misc_feature: Useful for introducing or modulating the production of volatile compounds
MSVPKIAIIGAGPGGLMLASILHNNKIPCTVFERESSAVAREQGGTLDIHEHSGQRALDAAGLLNKFRSLVRPGGESLKGNLHTPIVTYVDWEQTSFMAKAVVIV

SEQ ID NO: 22402 - DNA, 805 bp, Muscodor strobelii
  misc_feature: SGI EST ID NO. CUFF.52641.0
  misc_feature: Variant of the nucleotide sequence at SEQ ID NO 22400
cttgatttataggtgcttgaggtagctggaaaactcggccttgtcagtcggcgcgcgtcaagcggacatcacagtttgccaaaatgtccggttccatcccgtgccgtcacaaccaacatttctcatgctcgtacaccgactcggacgtcatcagctcccattctacttgggtcagcccatccagaatgccttccatcatgagagcttcaatggaacagctgatcacatcgccgaaagccgatggactggccgagagctgtgaatctactaccatagcttgttcacctggatgaatgatatataaatttccttccaataagtcttgttgttgttgccatgtcatacacgactcatgtaatccaacatcttcaacatataggagatcttatcaattattatcaatcagtcaactgacttcaagcactttggacaaccgccaaatctccacacgcctccctgagcaatttcacagcatgtctgtccccaagatcgctatcatcggtgctggccctggtggcttgatgctcgctagcattctacacaataacaaaattccttgtaccgtattcgagagggaatccagtgccgttgcccgcgagcaaggtggcacgctcgacatccacgagcattcaggtcagcgcgccctcgatgctgctgggcttctcaacaagttccgctctctcgtacggcctggaggagagtcactcaaaggtaacttacatacccctatcgtcacctatgtcgattgggagcaaacgagtttcatggccaaggccgtcgtcatcgtcgtgaatgaaacacgctg

SEQ ID NO: 22403 - DNA, 1203 bp, Muscodor strobelii
  misc_feature: SGI cDNA ID NO. 567607
  misc_feature: Reduced expression when VOC is produced
  misc_feature: Encodes the peptide sequence at SEQ ID NO 22404
atgaaggcagcactcccgccacgctcgctctcgtcggggctgctcctgcggccgctgacatcaagtccgcgcagcatcgcagtcagatcgagcccaagccatgcgacctgtctacgggctgcgcagaggaggacgctgttccgcgggcagccgtcgacgtcgcaccgggccgtcgagcacctcaacatcggccgcatgcgcaacgactcgtacgagtaccacgtccggcggcgcaacttcctgctctcgggcgtcttcgccggcctcatcgccaccgcctacaccgcctcgctgctcttcaaggccgtcaagaagtcctgggccaccgacggcgccaccaggctcgacgccggcctgcccgacaacgccaaccccttcagcaccgacgccggctccaagcgcaagacggtcctgcacgaccaccgcggccgcgagatcgtgcccaccggcaacgccaccgtccccaccttcccccgcctgctggacctggctgttggcgcgcaggaggcgcacgagggtgagggccaggagacggtcaacggcgtcgagtacacgctcgtcggcctgggcgtccgcaccgtcagcttcctcggcatccaggtctacatggtcggctactacatcgccacccacgacatcgccgccctccagtcgcgcctcgtccaggagatcaaccccatagccacgacgctagtgtccaacgagaaggaagagctgcggacagcgctgctggatcccgagaagggcgagcagctctggaacaagatcctgatggatgtccgtccgcgctcgctgttcaggatcgtacctgtgcgagacaccgacttccaccatctccgcgatggctttgtccgtgctatcacgggccgcacgcagggcaaccatgccgactttggcgacgagtcattcggcctggccatgaaggacttcaagaccctcttcaaccgtggcaaggtgcccaagtccagagagctgctgatgtgccgcgatgctgcaggcagactgacggtgacctacgacgatggccacagcggcatgggcaccatcggccgtgtcgaggacgagcgcgtctctcgcctgctctggctcaactggttggcaggcaagaacgtcgcttcggagcccgcccgcaagaacattgtcgagggcatcatggagtttgtcgagaggcctgtgggaactgttgccacgcaagttgtataa

SEQ ID NO: 22404 - protein, 400 aa, Muscodor strobelii
  misc_feature: SGI Peptide ID NO. 567607
  misc_feature (37)..(400): NCBI GI: 39941068 Blast Desc: MGG_05446 [Magnaporthe grisea 70-15] gi|145022099|gb|EDK06119.1| MGG_05446 [Magnaporthe grisea 70-15]
  misc_feature (23)..(400): NCBI GI: 164426110 Blast Desc: NCU01218 [Neurospora crassa OR74A] gi|16415981|emb|CAB88565.2| conserved [Neurospora crassa] gi|157071202|gb|EAA32348.2| conserved [Neurospora crassa OR74A]
  misc_feature (15)..(400): NCBI GI: 46110429 Blast Desc: FG02096.1 [Gibberella zeae PH-1]
  misc_feature (14)..(400): NCBI GI: 171692589 Blast Desc: protein product [Podospora anserina] gi|170946243|emb|CAP73044.1| protein product [Podospora anserina]
  misc_feature (15)..(400): NCBI GI: 256728607 Blast Desc: NECHADRAFT_105568 [Nectria haematococca mpVI 77-13-4]
  misc_feature (31)..(399): NCBI GI: 154312818 Blast Desc: BC1G_05110 [Botryotinia fuckeliana B05.10] gi|150849812|gb|EDN25005.1| BC1G_05110 [Botryotinia fuckeliana B05.10]
  misc_feature (23)..(399): NCBI GI: 156051670 Blast Desc: SS1G_07242 [Sclerotinia sclerotiorum 1980] gi|154705020|gb|EDO04759.1| SS1G_07242 [Sclerotinia sclerotiorum 1980]
  misc_feature (104)..(399): NCBI GI: 258564082 Blast Desc: [Uncinocarpus reesii 1704] gi|237908293|gb|EEP82694.1| [Uncinocarpus reesii 1704]
  misc_feature (107)..(399): NCBI GI: 226284095 Blast Desc: conserved [Paracoccidioides brasiliensis Pb01]
  misc_feature (107)..(399): NCBI GI: 226288729 Blast Desc: conserved [Paracoccidioides brasiliensis Pb18]
  misc_feature: Useful for introducing or modulating the production of volatile compounds
MKAALPPRSLSSGLLLRPLTSSPRSIAVRSSPSHATCLRAAQRRTLFRGQPSTSHRAVEHLNIGRMRNDSYEYHVRRRNFLLSGVFAGLIATAYTASLLFKAVKKSWATDGATRLDAGLPDNANPFSTDAGSKRKTVLHDHRGREIVPTGNATVPTFPRLLDLAVGAQEAHEGEGQETVNGVEYTLVGLGVRTVSFLGIQVYMVGYYIATHDIAALQSRLVQEINPIATTLVSNEKEELRTALLDPEKGEQLWNKILMDVRPRSLFRIVPVRDTDFHHLRDGFVRAITGRTQGNHADFGDESFGLAMKDFKTLFNRGKVPKSRELLMCRDAAGRLTVTYDDGHSGMGTIGRVEDERVSRLLWLNWLAGKNVASEPARKNIVEGIMEFVERPVGTVATQVV

SEQ ID NO: 22405 - DNA, 3318 bp, Muscodor strobelii
  misc_feature: SGI cDNA ID NO. 567608
  misc_feature: Encodes the peptide sequence at SEQ ID NO 22406
atggcgaccctatcccctggcgctacggcaggaattgccgtcgcaggcgcgatcctcgtattcctcgtgctcggccccattctgatccaactagccaaacatgcagacaaacagcgcgtagctgcctgtccagtctccagtcttccatttaccgaacatgtggaatacggcgcagatgagaggaccggcccacggaagctacgcaagaagacactggttcgtgaatctatcctcgagcgtgctatgacagagagcgcgacggggagggaagaggcaagggggaggcatttgagtctgcctgctttccttccgcccatcttttcaaggccgggaagctttaattttactccgccacatggaactggatcgggatctgggggtgaaagtggtaatgaaggcgggaaccgcacaccaacaagatctagagcacacgcatgcgcgaatcctaatacggacctagaacgaccatctgcacaatcttcgccagagaagcagcgcggatatctcatcgctcagagccgtcgcaagacatcctggattgatgaggacgcgatccacggaccccggatatcgtccccgaagaacagaaaaggaaaaccaagcaatgataaagctgcttggtttgcaggtcgtagtatcgcaagacgattgagtagacatttgtctatccgcagccgtcgcgaaatgatagaacccgcgcagagcccgacactcccttgtaccgagaccggacagggccgagtttctctatctcaaccagggacgccttcgggggttgcccggaaaatgtatgatctcgcgagcgatatcgagatgggaccacgtttgccactgcataagaatggagtccacatccggatcgtaagtccactggtacaagcgcaacgtgtcccgatgccgctctcggctacatcgaacacaaagcagcgaagcgatgctgcgatcgccgcacagcagttagctggaggcgcgagggtgccaggcggacagattttttcggtaactagcatgcagaagagtaaaagtagcacagatatggagctccaggccatattgcgacgtacagccgagaaactcagtgacgggaataagagcgctagacggcagacacttatgttgacaacggcatcgtctctttcaccacctaccaagacgctaagtcagggagagggagagtgcggatgtggtaaacagcatgaggtgactagcgaagtccaccccgtgagcccctgcagaagccagaagagcgcccctgcagtaattttctgctctgaactggaaggctgcacccctagggtagacactgtgtctcggcccggacataaacgaacccatactcgacagatatcctacgtgtctcagatctcgcaggtatcgatgctctcggaagccgacagcatgatcgtgtctctcccgcagtcaagagatggatcacagccagatatggtgcacacagctctatcgagtccaagtcgcatgggtcagaaaactacctctgctcaacatggcgtgacggtgcgatcttattcgccagctagctcacaatcctctgggctctcgaccgtatacagcgaggaagaggaaagaggtattggaatggagaaaaaggccatgaacgaagtattgcgcgcttgtgatgcgcttgaccaacgccgagatacatccaggtcacctactcgtgaaggtactattcatcaatcgcctcatgcgagaaatggtacaatgggacaaatggttctgagcacgacgaccgtgactgcttcccctcaacgtgcggccagtgtggtcaatgtgaaaaaggtagaggcagcagcaagtgtgagaggctcaccaaaaccagcatctccattctcgatccagggcgcgaccgaagacccgttcacgacttgtgcaacaccgacgcgcatcacgcctcgtcgcctctctcaagtcttctcgcccttgccagcggaactgccgggttcgaatgtgaacccttctgtccacatcatgcccgcggggagcccgacgccctctcccacataccggcgagtgcttccacctccccatcaactgcgtccagccgtgagttccccgactctgggccaaaggcatcaggagaatatgggactacatgtccagctctctccgacgcggcaaccaagtcctgccgcttccgaaagtggcctctcgtcggtgtatgagagttatcggtacagtcggaatagcgacatctcgccacgactgagtttgcgactcagtacatcaacaagcttgtggactgtaccaacctgtgaaggttcacctacgaggtctccgtgggatggtgagttggctgtcgcatttgccgatatgaaaaggggaagcggaagcggaggcaagtcaccagtcttcgagtttcgggctggagacgtgggctcgactttagctggagagagcgaatcatacacacatatacctaacaaaggcacaacagcaatccgggagccagttagtcttgtagaagacacattttcacggccggagttgagacgggagactagtttcagcgtggcgagtgagacatctgctggctcgcgctattcgcaagatgaagatgaaagagacgcagtgcctccgctgatggtacggccgacaacgacagtgactgcggtaaagcattgtatgcgcatcacaagcacggtggcagaactccgacgcatgaacagtcaggtcagtaacgtaagcggatatagtacggtgacaacagctcccagcccgacactaccggcgttgcgaggtggagggttcagcccggggaagaagagtgctggcggtgggacgaagaactatctttcgctgggacacaattctcagcagagcggtagcgaaggcatcgaagaaagcaggaatacggaggcacggagaatttgccatggaaatgataatcagaagaagacaagcatggcgacagtggcaatcagggaagacaccacccgcggaggaaacaaagaccacggcattatcaaagagaccacgtcactacggagaggcggcactggcggcactggtggcgggaggtcacgccgcagcacggtggtgatgcggtttgaagaggatctagaccgcgcccgacaggtgcttcgagagagccggggcaatagcggacaacccgcagccgagcatttgagaaaaggggcggcagcagaagggttgtcgacacgggtgagcaagttgttgaaggaggaagggcgcgtgagcctcgagagcgtgggtctgtacgatgaaaaggggttcttgaaaaacccgtcatcgtcgtcgtcgccggcagcggcagcggcagcggcaaggaagacttga

SEQ ID NO: 22406 - protein, 1105 aa, Muscodor strobelii
  misc_feature: SGI Peptide ID NO. 567608
  misc_feature (884)..(1098): NCBI GI: 46123205 Blast Desc: FG05980.1 [Gibberella zeae PH-1]
MATLSPGATAGIAVAGAILVFLVLGPILIQLAKHADKQRVAACPVSSLPFTEHVEYGADERTGPRKLRKKTLVRESILERAMTESATGREEARGRHLSLPAFLPPIFSRPGSFNFTPPHGTGSGSGGESGNEGGNRTPTRSRAHACANPNTDLERPSAQSSPEKQRGYLIAQSRRKTSWIDEDAIHGPRISSPKNRKGKPSNDKAAWFAGRSIARRLSRHLSIRSRREMIEPAQSPTLPCTETGQGRVSLSQPGTPSGVARKMYDLASDIEMGPRLPLHKNGVHIRIVSPLVQAQRVPMPLSATSNTKQRSDAAIAAQQLAGGARVPGGQIFSVTSMQKSKSSTDMELQAILRRTAEKLSDGNKSARRQTLMLTTASSLSPPTKTLSQGEGECGCGKQHEVTSEVHPVSPCRSQKSAPAVIFCSELEGCTPRVDTVSRPGHKRTHTRQISYVSQISQVSMLSEADSMIVSLPQSRDGSQPDMVHTALSSPSRMGQKTTSAQHGVTVRSYSPASSQSSGLSTVYSEEEERGIGMEKKAMNEVLRACDALDQRRDTSRSPTREGTIHQSPHARNGTMGQMVLSTTTVTASPQRAASVVNVKKVEAAASVRGSPKPASPFSIQGATEDPFTTCATPTRITPRRLSQVFSPLPAELPGSNVNPSVHIMPAGSPTPSPTYRRVLPPPHQLRPAVSSPTLGQRHQENMGLHVQLSPTRQPSPAASESGLSSVYESYRYSRNSDISPRLSLRLSTSTSLWTVPTCEGSPTRSPWDGELAVAFADMKRGSGSGGKSPVFEFRAGDVGSTLAGESESYTHIPNKGTTAIREPVSLVEDTFSRPELRRETSFSVASETSAGSRYSQDEDERDAVPPLMVRPTTTVTAVKHCMRITSTVAELRRMNSQVSNVSGYSTVTTAPSPTLPALRGGGFSPGKKSAGGGTKNYLSLGHNSQQSGSEGIEESRNTEARRICHGNDNQKKTSMATVAIREDTTRGGNKDHGIIKETTSLRRGGTGGTGGGRSRRSTVVMRFEEDLDRARQVLRESRGNSGQPAAEHLRKGAAAEGLSTRVSKLLKEEGRVSLESVGLYDEKGFLKNPSSSSSPAAAAAAARKT

SEQ ID NO: 22407 - DNA, 2446 bp, Muscodor strobelii
  misc_feature: SGI EST ID NO. CUFF.52650.0
  misc_feature: Variant of the nucleotide sequence at SEQ ID NO 22405
caccagctctacagaatagtgtcactcagactcgggcttggtcaagctcaagatagcgctagaaggtgggtagacgagaatgctttaatctagattctttatctcccgagagatttgggctagggcaaatattgtcgagatgtttgttttgattctgcgttggaatttgcgcaattttgttgcctcactctgtcctgatggttcggatagctctggaccttcttcatgcgggattctttcctatctgcgaagcagcaggtatgcgtttgtgtgcaattcaggtaatcatagagtagcgaggcgcgacttgcacgaccataacgacattgtctagatattgcagattggacagcgtcacttcgctacgagcaaggccgactacctagattgcaactcctcaatcttcatctccaaacacgaatctcacaatggcgaccctatcccctggcgctacggcaggaattgccgtcgcaggcgcgatcctcgtattcctcgtgctcggccccattctgatccaactagccaaacatgcagacaaacagcgcgtagctgcctgtccagtctccagtcttccatttaccgaacatgtggaatacggcgcagatgagaggaccggcccacggaagctacgcaagaagacactggttcgtgaatctatcctcgagcgtgctatgacagagagcgcgacggggagggaagaggcaagggggaggcatttgagtctgcctgctttccttccgcccatcttttcaaggccgggaagctttaattttactccgccacatggaactggatcgggatctgggggtgaaagtggtaatgaaggcgggaaccgcacaccaacaagatctagagcacacgcatgcgcgaatcctaatacggacctagaacgaccatctgcacaatcttcgccagagaagcagcgcggatatctcatcgctcagagccgtcgcaagacatcctggattgatgaggacgcgatccacggaccccggatatcgtccccgaagaacagaaaaggaaaaccaagcaatgataaagctgcttggtttgcaggtcgtagtatcgcaagacgattgagtagacatttgtctatccgcagccgtcgcgaaatgatagaacccgcgcagagcccgacactcccttgtaccgagaccggacagggccgagtttctctatctcaaccagggacgccttcgggggttgcccggaaaatgtatgatctcgcgagcgatatcgagatgggaccacgtttgccactgcataagaatggagtccacatccggatcgtaagtccactggtacaagcgcaacgtgtcccgatgccgctctcggctacatcgaacacaaagcagcgaagcgatgctgcgatcgccgcacagcagttagctggaggcgcgagggtgccaggcggacagattttttcggtaactagcatgcagaagagtaaaagtagcacagatatggagctccaggccatattgcgacgtacagccgagaaactcagtgacgggaataagagcgctagacggcagacacttatgttgacaacggcatcgtctctttcaccacctaccaagacgctaagtcagggagagggagagtgcggatgtggtaaacagcatgaggtgactagcgaagtccaccccgtgagcccctgcagaagccagaagagcgcccctgcagtaattttctgctctgaactggaaggctgcacccctagggtagacactgtgtctcggcccggacataaacgaacccatactcgacagatatcctacgtgtctcagatctcgcaggtatcgatgctctcggaagccgacagcatgatcgtgtctctcccgcagtcaagagatggatcacagccagatatggtgcacacagctctatcgagtccaagtcgcatgggtcagaaaactacctctgctcaacatggcgtgacggtgcgatcttattcgccagctagctcacaatcctctgggctctcgaccgtatacagcgaggaagaggaaagaggtattggaatggagaaaaaggccatgaacgaagtattgcgcgcttgtgatgcgcttgaccaacgccgagatacatccaggtcacctactcgtgaaggtactattcatcaatcgcctcatgcgagaaatggtacaatgggacaaatggttctgagcacgacgaccgtgactgcttcccctcaacgtgcggccagtgtggtcaatgtgaaaaaggtagaggcagcagcaagtgtgagaggctcaccaaaaccagcatctccattctcgatccagggcgcgaccgaagacccgttcacgacttgtgcaacaccgacgcgcatcacgcctcgtcgcctctctcaagtcttctcgcccttgccagcggaactgccgggttcgaatgtgaacccttctgtccacatcatgcccgcggggagcccgacgccctctcc

SEQ ID NO: 22408 - DNA, 1584 bp, Muscodor strobelii
  misc_feature: SGI cDNA ID NO. 567609
  misc_feature: Reduced expression when VOC is produced
  misc_feature: Encodes the peptide sequence at SEQ ID NO 22409
atgtcttcaaagacactcactgccctcgccctgttgggcgcctcgtccgtggtcgaggctttctggcgcatggaatgccgtggacagactggattggctcgtattgaccctattgtggacttgggcacggttagcagccactcacacacgattcaaggatcatcaggtttctccatgtcagctacttacgatgacctcatcaacggtgactgcacatcttgcgccgtgactcaagataagagtgcctactggactccgggattgtatttcctcgacagcgccactaatgaattcaccgctgttccacaagtgggcggaatgcttgcttattaccttcagcgtggtgacgacgtcaaagcatttcccgctggctttcagatgattgctggagacaccaaccgacgcaactacagtgttggtgacgcatactcgcctgatccccctcagtcgagctggagtttcctaaagcaaactggtcagactgatctagcacagcgcgcccttggtttcaactgcttggactactctaagacccccgaggcttcgttgtaccgtcattacttgcctaacaagacttggactgatgagaactgccctgatggcctccgatttgagctcatgttcccatcatgctggaatggcgacctcacctcgtccgactccaagagtcatgttgcctatcccgatttggtcggcaacggcaattgccctgacactcacactaagcgcctcgtcactctcttttacgagactatctgggacacagccaacgctgcgtttgaaggcaaagatgggacatttgtcatttccaacggtgatgctactggctatggatatcatggggatttcatgaccggctgggacgaggacttccttcaggacgccattgatacttgcaccaatggatcaggcgaactcagtgactgcggcaagtttactagcaacgggcctctccagaccgaagccgagatgcaggagtgcaagtttgacatgcccatccagctgcagtctgaggatgatggtggctcagatatgaagtcccttcctggcggtgtggagatccaggacggtcctgaacctgctaccaagggtggctctggcggaatcgttggccaaatcaccagcgccattggaggtattcttaaccccagcgactcgaccaccacatcttctgccctctctacttccgccagtgtgccaaccaccacatccacacctctcccaacaccctcttcgtcctcatcgccgctcggtggagccttcatccagagctcatcagaaggcttgggcatccaagcggttacctcaaccacgtcgagctccacatctactcccgcgccgaccaccacttcagcccctgaatacacatcagagctcggtgttgagtatattcccgtcagcacgcaaacgctcactaagggtgatgtggttcaagagatcatttgggaggagcctgttgtctacgtgacggatgatatcacgaccaccgtgacggctacaggtgtcgcaccccagaagcgaagagtccgtggagagcatgtcgcgcgccatcgccaccagcacggtcgccgacgcggattctag

SEQ ID NO: 22409 - protein, 527 aa, Muscodor strobelii
  misc_feature: SGI Peptide ID NO. 567609
  misc_feature (36)..(287): Pfam Id: PF09362 Pfam Desc: Domain of function (DUF1996)
  misc_feature (1)..(491): NCBI GI: 46123203 Blast Desc: FG05979.1 [Gibberella zeae PH-1]
  misc_feature (17)..(436): NCBI GI: 39944134 Blast Desc: MGG_04078 [Magnaporthe grisea 70-15] gi|145014803|gb|EDJ99371.1| MGG_04078 [Magnaporthe grisea 70-15]
  misc_feature (7)..(525): NCBI GI: 85098527 Blast Desc: NCU01395 [Neurospora crassa OR74A] gi|28922133|gb|EAA31388.1| conserved [Neurospora crassa OR74A]
  misc_feature (18)..(491): NCBI GI: 256731488 Blast Desc: NECHADRAFT_3481 [Nectria haematococca mpVI 77-13-4]
  misc_feature (18)..(527): NCBI GI: 261358064 Blast Desc: WSC domain-containing protein [Verticillium albo-atrum VaMs.102]
  misc_feature (8)..(526): NCBI GI: 154308890 Blast Desc: BC1G_07973 [Botryotinia fuckeliana B05.10] gi|150852599|gb|EDN27791.1| BC1G_07973 [Botryotinia fuckeliana B05.10]
  misc_feature (10)..(519): NCBI GI: 171693567 Blast Desc: protein product [Podospora anserina] gi|170946732|emb|CAP73536.1| protein product [Podospora anserina]
  misc_feature (8)..(362): NCBI GI: 156052541 Blast Desc: SS1G_06436 [Sclerotinia sclerotiorum 1980] gi|154704216|gb|EDO03955.1| SS1G_06436 [Sclerotinia sclerotiorum 1980]
  misc_feature (20)..(514): NCBI GI: 119182991 Blast Desc: CIMG_06480 [Coccidioides immitis RS]
  misc_feature (1)..(358): NCBI GI: 115437766 Blast Desc: conserved [Aspergillus terreus NIH2624] gi|114188709|gb|EAU30409.1| conserved [Aspergillus terreus NIH2624]
  misc_feature: Useful for introducing or modulating the production of volatile compounds
MSSKTLTALALLGASSVVEAFWRMECRGQTGLARIDPIVDLGTVSSHSHTIQGSSGFSMSATYDDLINGDCTSCAVTQDKSAYWTPGLYFLDSATNEFTAVPQVGGMLAYYLQRGDDVKAFPAGFQMIAGDTNRRNYSVGDAYSPDPPQSSWSFLKQTGQTDLAQRALGFNCLDYSKTPEASLYRHYLPNKTWTDENCPDGLRFELMFPSCWNGDLTSSDSKSHVAYPDLVGNGNCPDTHTKRLVTLFYETIWDTANAAFEGKDGTFVISNGDATGYGYHGDFMTGWDEDFLQDAIDTCTNGSGELSDCGKFTSNGPLQTEAEMQECKFDMPIQLQSEDDGGSDMKSLPGGVEIQDGPEPATKGGSGGIVGQITSAIGGILNPSDSTTTSSALSTSASVPTTTSTPLPTPSSSSSPLGGAFIQSSSEGLGIQAVTSTTSSSTSTPAPTTTSAPEYTSELGVEYIPVSTQTLTKGDVVQEIIWEEPVVYVTDDITTTVTATGVAPQKRRVRGEHVARHRHQHGRRRGF

SEQ ID NO: 22410 - DNA, 2952 bp, Muscodor strobelii
  misc_feature: SGI EST ID NO. CUFF.52675.0
  misc_feature: Variant of the nucleotide sequence at SEQ ID NO 22408
cacagccagtcgaactagtcgccggtcctcgtatggccgccgctgcacataccacgaccatacgaggagtccacagcgcacatctgcatctaccctcccttatctgtacacacgtctctttcttcctccgtctttgttcacctcccttactcggaacggtctttacctcgcctctctcaccctcgtcgattcttcgcctcccacatatcagtgtgtgcgcgtgtttgtcttcgtgtgttccacactcccacgatcgttttcaacatcccatcaatacatttttggcagttcgcctgtcagctacgctccttaccacactctcacattgagactcgtccgtcttgcaccgcaattcgagattgccaagcctcgtctgtcgttcactcgttcactcgcctaaattgtgttgatcgcattcgttttcatctcgccttatatccagctctgtggtctatcgccaagccaagccaccccccgacattcgctttcaaggaggttggataactgttgccaatcccctcgttcctttgatgtggacacagacacaattccgtcgtaactcacctcactgcccacgatcagtatcgtaactggacattgcgaaggcgtattggaggaaaaacgatattatcgcgatagtcgtcctacacggaacaccttgggcgctggtagcaactgttcgaatcgaggatcgatatcattaaaatgtcttcaaagacactcactgccctcgccctgttgggcgcctcgtccgtggtcgaggctttctggcgcatggaatgccgtggacagactggattggctcgtattgaccctattgtggacttgggcacggttagcagccactcacacacgattcaaggatcatcaggtttctccatgtcagctacttacgatgacctcatcaacggtgactgcacatcttgcgccgtgactcaagataagagtgcctactggactccgggattgtatttcctcgacagcgccactaatgaattcaccgctgttccacaagtgggcggaatgcttgcttattaccttcagcgtggtgacgacgtcaaagcatttcccgctggctttcagatgattgctggagacaccaaccgacgcaactacagtgttggtgacgcatactcgcctgatccccctcagtcgagctggagtttcctaaagcaaactggtcagactgatctagcacagcgcgcccttggtttcaactgcttggactactctaagacccccgaggcttcgttgtaccgtcattacttgcctaacaagacttggactgatgagaactgccctgatggcctccgatttgagctcatgttcccatcatgctggaatggcgacctcacctcgtccgactccaagagtcatgttgcctatcccgatttggtcggcaacggcaattgccctgacactcacactaagcgcctcgtcactctcttttacgagactatctgggacacagccaacgctgcgtttgaaggcaaagatgggacatttgtcatttccaacggtgatgctactggctatggatatcatggggatttcatgaccggctgggacgaggacttccttcaggacgccattgatacttgcaccaatggatcaggcgaactcagtgactgcggcaagtttactagcaacgggcctctccagaccgaagccgagatgcaggagtgcaagtttgacatgcccatccagctgcagtctgaggatgatggtggctcagatatgaagtcccttcctggcggtgtggagatccaggacggtcctgaacctgctaccaagggtggctctggcggaatcgttggccaaatcaccagcgccattggaggtattcttaaccccagcgactcgaccaccacatcttctgccctctctacttccgccagtgtgccaaccaccacatccacacctctcccaacaccctcttcgtcctcatcgccgctcggtggagccttcatccagagctcatcagaaggcttgggcatccaagcggttacctcaaccacgtcgagctccacatctactcccgcgccgaccaccacttcagcccctgaatacacatcagagctcggtgttgagtatattcccgtcagcacgcaaacgctcactaagggtgatgtggttcaagagatcatttgggaggagcctgttgtctacgtgacggatgatatcacgaccaccgtgacggctacaggtgtcgcaccccagaagcgaagagtccgtggagagcatgtcgcgcgccatcgccaccagcacggtcgccgacgcggattctagacgatcgtctcccgcttggtcgaaacaaacattttatccatttcaatgaagatactttgggcaattcgcaggagaggatattgcaaactatggtttccacgtggctgctgagatttcgattcaactcagcccgggcgcatttttcggtacatgttgatcttacattcgggactctttggtgcaagagtacaagcatatgagctgaattcaagtggtggtttcttacccaccattactgctttacagcttggaagtgagaatcgacgcgtgattattgcatatgggagtgatgatactgcatgacactgctggactcgatagccgaatttctcacagatattgcaattcaggtggaaaagcatttccttcaggcaaggagatcctccacacctagtcttccaatgctgagtcggaatgcggatttgaagatagggattagagtctaccttaaaatctagaaaatgagaatcgagtacaaaaagttgtttgcattgctgaagcgtgacgctgcgattaaccgtgcgcatcggaccggaatcgatatctgacttgcactacggcttaagcattgtggcgcgtgtagaatcgccaattagcactctcaaaatatagcttcaggtaacattagcgtgacgtcgcaatcccaatccctctttaccgcca

SEQ ID NO: 22411 - DNA, 2814 bp, Muscodor strobelii
  misc_feature: SGI cDNA ID NO. 567610
  misc_feature: Encodes the peptide sequence at SEQ ID NO 22412
atggatgatctgtcaggtctcgattggtccgccaacaacggccagggcggcagcagcagcagcaacaccgccaaccccccgctgaagcccatgagcccgccctcattctatccctctctgcgcccgacgccctcgccccaaccctcgggccgctcgacgcctcttcagcctccgtctgcccagctatctgccgtctctgctgcctcaggccatgccaatcataagtctaaaccggccgccgacagcttcagcaacctcgtcagcttcggcggcgcaaagaccaacacgaacctgagcctgcgcgagcgacaagagcagctggccgccgagaagcagaggaaggagcaggagcagaggagccagctgcagtctcagtatggagggggtcagttctgggactctatcggccagggctccgcgcccgcctctcgcaccatgtcgcccgccgtcctgtcccccagcagcggcgtaggggctgccaacggagccaagaaggatgatgccgatgccgatgccgatgccgatgccgacctcttcgccgctttcaacagggacaccaaggtcgacaacgcgagccactaccctccccctgccgacctgtccaaagccagtgcctggaccacagccacaaccacaccaagcggcgttggggccgggggctacgatgacgacgatgacccctttggtctgagccagatgaagacgaagtccaacacccagcccgcatcctcctcgcgaccgacacctatcgacgacgacgacgacgattttctcggagacttgggacggcctgtggaggaggttcggcggaaagcccaagctgcccagccccagccacagccgggaaagccaatcgagggggacgactcctctgatcccgattccgactccgacctgccaccgaatccaccaccgaatcgccggggaccatcgtcggacccctttgacaaggccgtggccgagctgatcgacatgggcttcacggccgagaatgcgcgacgcggtctgaccgaatccggcgccggcctcaatgtccaggccgcagtgggctggctgctggacgacgcccaccgacaggctcgcaacaagcagaaccctcgtggcactcatgcagaacaacccagaagagaaggtagccggtcgagagaccaccagggtgcagggcgcgcgaggcccgacgatgccagtagtagaccacgacgccaggactcgcagtcgcctgcttacggcgacgacattcagaagagggcggcggcggtaggctcaagtctgttcaagacagcaaattcattgtggaaatcaggtcagaagcaagtgcaaaaggccgtcgcggatttccagcaggagggcggtgatccgaaccaaccaaagtggatgcgcgctgcgcaacaagaatcacgaccgtcagcgcgaaggcaagaatcctctggcaacgccaacacggacgaggctttgatgctcgagtccggtatgcgacccgagagacacccggcacgatcatcacaggcaacacaggcaccacgcgaatatccgcgcgatcagtctccggccttgcccgtgcgtcctggaggccaggccacggcgcccaagtggcagcagcaatcacaaccttcttcgcgctcaggctcggcagacccacgagcaagactgaacaagcaggtcatcgaagaacagtccgcccaagcctatgtcagcccagctaggcggaagaagactacaccgcaaccggcccctaaacctgagccagaacccgaggttgacctgctctttggctcatcggccgcgccacctgcccagtcgcgacctcagcgctctgcccaaccttctccagctcctcgaccatcacctcaggtctcttcgcggcccatcgctactcgcccacctccgcctgccagatccattccttctgtctcagcgtcaattctacaggcttctactcgtcatcgtcttgatgggaccgctcactttaagcggggcgactacgatgctgcacacacagcttataccaattcattatccggcataccccagagtcacccgctctgcattgttctactcacgaaccgagcccttacctccttgaagactggcagccctaagcaggctgtcagtgatgctgatgccgccattggcgtcatcggaccgtcacgtggcgagggcgagaaggtcgccatgccggatggagagtcacgcgacatgaaggatctctacggcaaggcactgagccgcaaagctgaggctctcgagcaaatggagaaatgggcggatgcgagtgaagtctggcaactttgcgtcgaagccggtgttggcggagcaagcgctacagcaggcagacagcgatgccagaaagctctcgcgcccaagcccaagcccacaccacgacccgcacaagcaaagccacgtccgaaaccttcggccatgtcggattttgcacctgcgaagagctctgaagccgtcgagagactgcgcgaggccaacaaggctgccgagaaagcggacgacgagaagttcgcgttaagtgaaaaagtggatgctaggatctcgttgtggagagatggcaagagagacaatctccgggctttattgggtagtatggaccaagtgctgtgggagaatagcggctggaagaaggttggtcttcatgagttagtcatggctaacaaggtcaagatccactacatgaaggccattgctaagtgccatccagacaaactaccccaagatgcaagcactgaggttcagctcatcgctgctaccgtctttgcgacactcaacgagagctgggacaagttcaaggcggacaatggactgtga

SEQ ID NO: 22412 - protein, 937 aa, Muscodor strobelii
  misc_feature: SGI Peptide ID NO. 567610
  misc_feature (314)..(352): Pfam Id: PF00627 Pfam Desc: UBA/TS-N domain
  misc_feature (1)..(937): NCBI GI: 46123201 Blast Desc: FG05978.1 [Gibberella zeae PH-1]
  misc_feature (1)..(937): NCBI GI: 39944138 Blast Desc: MGG_04080 [Magnaporthe grisea 70-15] gi|145014804|gb|EDJ99372.1| MGG_04080 [Magnaporthe grisea 70-15]
  misc_feature (1)..(937): NCBI GI: 256731090 Blast Desc: NECHADRAFT_48838 [Nectria haematococca mpVI 77-13-4]
  misc_feature (1)..(905): NCBI GI: 116206384 Blast Desc: CHGG_02485 [Chaetomium globosum CBS 148.51] gi|88183082|gb|EAQ90550.1| CHGG_02485 [Chaetomium globosum CBS 148.51]
  misc_feature (1)..(937): NCBI GI: 85102534 Blast Desc: NCU03622 [Neurospora crassa OR74A] gi|12718397|emb|CAC28705.1| conserved [Neurospora crassa] gi|28922893|gb|EAA32113.1| conserved [Neurospora crassa OR74A]
  misc_feature (1)..(937): NCBI GI: 171693565 Blast Desc: protein product [Podospora anserina] gi|170946731|emb|CAP73535.1| protein product [Podospora anserina]
  misc_feature (1)..(937): NCBI GI: 154313239 Blast Desc: BC1G_05621 [Botryotinia fuckeliana B05.10] gi|150849706|gb|EDN24899.1| BC1G_05621 [Botryotinia fuckeliana B05.10]
  misc_feature (1)..(935): NCBI GI: 156052567 Blast Desc: SS1G_06449 [Sclerotinia sclerotiorum 1980] gi|154704229|gb|EDO03968.1| SS1G_06449 [Sclerotinia sclerotiorum 1980]
  misc_feature (257)..(937): NCBI GI: 261358067 Blast Desc: UBA domain-containing protein [Verticillium albo-atrum VaMs.102]
  misc_feature (1)..(937): NCBI GI: 169780842 Blast Desc: [Aspergillus oryzae RIB40] gi|83773625|dbj|BAE63752.1| protein product [Aspergillus oryzae]
MDDLSGLDWSANNGQGGSSSSNTANPPLKPMSPPSFYPSLRPTPSPQPSGRSTPLQPPSAQLSAVSAASGHANHKSKPAADSFSNLVSFGGAKTNTNLSLRERQEQLAAEKQRKEQEQRSQLQSQYGGGQFWDSIGQGSAPASRTMSPAVLSPSSGVGAANGAKKDDADADADADADLFAAFNRDTKVDNASHYPPPADLSKASAWTTATTTPSGVGAGGYDDDDDPFGLSQMKTKSNTQPASSSRPTPIDDDDDDFLGDLGRPVEEVRRKAQAAQPQPQPGKPIEGDDSSDPDSDSDLPPNPPPNRRGPSSDPFDKAVAELIDMGFTAENARRGLTESGAGLNVQAAVGWLLDDAHRQARNKQNPRGTHAEQPRREGSRSRDHQGAGRARPDDASSRPRRQDSQSPAYGDDIQKRAAAVGSSLFKTANSLWKSGQKQVQKAVADFQQEGGDPNQPKWMRAAQQESRPSARRQESSGNANTDEALMLESGMRPERHPARSSQATQAPREYPRDQSPALPVRPGGQATAPKWQQQSQPSSRSGSADPRARLNKQVIEEQSAQAYVSPARRKKTTPQPAPKPEPEPEVDLLFGSSAAPPAQSRPQRSAQPSPAPRPSPQVSSRPIATRPPPPARSIPSVSASILQASTRHRLDGTAHFKRGDYDAAHTAYTNSLSGIPQSHPLCIVLLTNRALTSLKTGSPKQAVSDADAAIGVIGPSRGEGEKVAMPDGESRDMKDLYGKALSRKAEALEQMEKWADASEVWQLCVEAGVGGASATAGRQRCQKALAPKPKPTPRPAQAKPRPKPSAMSDFAPAKSSEAVERLREANKAAEKADDEKFALSEKVDARISLWRDGKRDNLRALLGSMDQVLWENSGWKKVGLHELVMANKVKIHYMKAIAKCHPDKLPQDASTEVQLIAATVFATLNESWDKFKADNGL

SEQ ID NO: 22413 - DNA, 3464 bp, Muscodor strobelii
  misc_feature: SGI EST ID NO. CUFF.52747.1
  misc_feature: Variant of the nucleotide sequence at SEQ ID NO 22411
caatgacagtgacaaaggcgctacctttatttgattgatgctggagcagctgagttaacagtgctgagctgtcaggtctccatcgtgaacaaacgaagcacgcgggcagaaatgcctaaggtacctatctctaccacagtacaacgttgtagaacactcggaacattttgcatcttgacatgaggaaacgaatacacgatggatgatctgtcaggtctcgattggtccgccaacaacggccagggcggcagcagcagcagcaacaccgccaaccccccgctgaagcccatgagcccgccctcattctatccctctctgcgcccgacgccctcgccccaaccctcgggccgctcgacgcctcttcagcctccgtctgcccagctatctgccgtctctgctgcctcaggccatgccaatcataagtctaaaccggccgccgacagcttcagcaacctcgtcagcttcggcggcgcaaagaccaacacgaacctgagcctgcgcgagcgacaagagcagctggccgccgagaagcagaggaaggagcaggagcagaggagccagctgcagtctcagtatggagggggtcagttctgggactctatcggccagggctccgcgcccgcctctcgcaccatgtcgcccgccgtcctgtcccccagcagcggcgtaggggctgccaacggagccaagaaggatgatgccgatgccgatgccgatgccgatgccgacctcttcgccgctttcaacagggacaccaaggtcgacaacgcgagccactaccctccccctgccgacctgtccaaagccagtgcctggaccacagccacaaccacaccaagcggcgttggggccgggggctacgatgacgacgatgacccctttggtctgagccagatgaagacgaagtccaacacccagcccgcatcctcctcgcgaccgacacctatcgacgacgacgacgacgattttctcggagacttgggacggcctgtggaggaggttcggcggaaagcccaagctgcccagccccagccacagccgggaaagccaatcgagggggacgactcctctgatcccgattccgactccgacctgccaccgaatccaccaccgaatcgccggggaccatcgtcggacccctttgacaaggccgtggccgagctgatcgacatgggcttcacggccgagaatgcgcgacgcggtctgaccgaatccggcgccggcctcaatgtccaggccgcagtgggctggctgctggacgacgcccaccgacaggctcgcaacaagcagaaccctcgtggcactcatgcagaacaacccagaagagaaggtagccggtcgagagaccaccagggtgcagggcgcgcgaggcccgacgatgccagtagtagaccacgacgccaggactcgcagtcgcctgcttacggcgacgacattcagaagagggcggcggcggtaggctcaagtctgttcaagacagcaaattcattgtggaaatcaggtcagaagcaagtgcaaaaggccgtcgcggatttccagcaggagggcggtgatccgaaccaaccaaagtggatgcgcgctgcgcaacaagaatcacgaccgtcagcgcgaaggcaagaatcctctggcaacgccaacacggacgaggctttgatgctcgagtccggtatgcgacccgagagacacccggcacgatcatcacaggcaacacaggcaccacgcgaatatccgcgcgatcagtctccggccttgcccgtgcgtcctggaggccaggccacggcgcccaagtggcagcagcaatcacaaccttcttcgcgctcaggctcggcagacccacgagcaagactgaacaagcaggtcatcgaagaacagtccgcccaagcctatgtcagcccagctaggcggaagaagactacaccgcaaccggcccctaaacctgagccagaacccgaggttgacctgctctttggctcatcggccgcgccacctgcccagtcgcgacctcagcgctctgcccaaccttctccagctcctcgaccatcacctcaggtctcttcgcggcccatcgctactcgcccacctccgcctgccagatccattccttctgtctcagcgtcaattctacaggcttctactcgtcatcgtcttgatgggaccgctcactttaagcggggcgactacgatgctgcacacacagcttataccaattcattatccggcataccccagagtcacccgctctgcattgttctactcacgaaccgagcccttacctccttgaagactggcagccctaagcaggctgtcagtgatgctgatgccgccattggcgtcatcggaccgtcacgtggcgagggcgagaaggtcgccatgccggatggagagtcacgcgacatgaaggatctctacggcaaggcactgagccgcaaagctgaggctctcgagcaaatggagaaatgggcggatgcgagtgaagtctggcaactttgcgtcgaagccggtgttggcggagcaagcgctacagcaggcagacagcgatgccagaaagctctcgcgcccaagcccaagcccacaccacgacccgcacaagcaaagccacgtccgaaaccttcggccatgtcggattttgcacctgcgaagagctctgaagccgtcgagagactgcgcgaggccaacaaggctgccgagaaagcggacgacgagaagttcgcgttaagtgaaaaagtggatgctaggatctcgttgtggagagatggcaagagagacaatctccgggctttattgggtagtatggaccaagtgctgtgggagaatagcggctggaagaaggttggtcttcatgagttagtcatggctaacaaggtcaagatccactacatgaaggccattgctaagtgccatccagacaaactaccccaagatgcaagcactgaggttcagctcatcgctgctaccgtctttgcgacactcaacgagagctgggacaagttcaaggcggacaatggactgtgaggtaggcctgcttcgaacgtgggccgggcagaagtagaaggtacctgtagataccaattttgaacgtgccccatggccacgaagcacaacctggtgcaggggactagatggcatgggacgggagcgaattagcgattagaggcatgaaattcatgagtttacgatgcatggaaagataaaactgcatggtgatagagattctgtgaggtacattactcagttatgggtacatacaccacattacgaattcgtccccacggggacgcctacattatgaaccctgatgttgatggtgaagaatgacaaacatactagcgttagaaatgcataaaacaatgacttaaagtgttggcattccctttcttgatcgttccgtgatttggtggttggtcatagtgtccccggatatccattcgtggttagagactaacagctaagactttgggaacgtt

SEQ ID NO: 22414 - DNA, 1647 bp, Muscodor strobelii
  misc_feature: SGI cDNA ID NO. 567611
  misc_feature: Encodes the peptide sequence at SEQ ID NO 22415
atggttaagaaatactttggcctgagaggccaggccctcaactatgctatcggcatcatcgcgggatgcgatttcttgctcttcggctacgatcagggtgtcaccggcggtgtcctgaccatggatcagtttctcaccgtcttccccgacatcaaccccgacggtaccgatgacacagtgctcaagtctcagcgctccacgaatcaaggtatatccgttgcggcctacaacttgggatgctttctcggcgccgttatcagtattttcatctccgacctgctcggtcggaagcgcatgatcatgttgggcaccagtatcatggttatcggcgccattcttcaagccagtgcctctactctaccccaatggatcgtcggacggattatcactggcttaggcaatggtggcaacacgtctaccgtcccgacatggcaatctgaaacatcgcgatctcacaagcgtggcaagttggtcatgatcgaaggtgctcttatcactggtggtatcacgctctcatactggattgatcttggattcagctttgctcctggtagcgtagcatggcgatttcccctggccttccagatcgctttctgtctgttcatcctgtcgatggtgtggaacttgcccgaatcgcctcgctggttgattttgaagaagcgcgaagacgaggccagagaggttctcgctgctctgggggacgtagatgtcaacgataagattatccaggatgagttcttggagataaaggagacggtcgaagagatgcagaagggaaagttctcggatcttttcaagaatacccaagacagagaattccaccgaactttgctggcctatgtcaaccaagttttccagcaaatctcaggtatcaacctcattacatactacgccgctgttatctacaaacggcttggccttagcggtttcctctccctgctactcgctgcccttaacggcacggaatacttcattgcctcgtggcccgctgtatacctcgtcgagcgtgtcggtcgtcgaaagcttatgttgttcggtgccgtcggtcaggccgcgtccatggcagcacttgcgggcgccgcctcgctgacggaggtagacaacccacccaaaggcccttctattgccgtcatcgcgcttctcttcgtcttcaatacatttttcgccgtcggctggctcggtatgacctggttatatcctgccgaaatcgtgccactgaaaattcgagccccggccaacgcgctctctacatctgcaaactggattttcaacttcctcgtcgtcatgatcacccccgtagcattcgacagtatcggctaccagacgtacatagtcttcgctgtcatcaacgcgttcattgttcctgttacctacttcttctaccccgagacggcataccgctcactggaagaaatggacgcaatattccacaaggcaaagggtctccgaggttacttcaccgtcgtgcagattgcgcgcgatgaacctagacgctacggcaagaacggcgaggttcttattgcgtatgatgagacggaggaacacaaggctcacacgcatggcgaccctcagcttcaacatgccgagcaccagggtgttgttgatagcagtgatggcgagaagggcgctggtggagttgttgtatag

SEQ ID NO: 22415 - protein, 548 aa, Muscodor strobelii
  misc_feature: SGI Peptide ID NO. 567611
  misc_feature (32)..(428): Pfam Id: PF07690 Pfam Desc: Major Facilitator Superfamily
  misc_feature (17)..(476): Pfam Id: PF00083 Pfam Desc: Sugar (and other) transporter
  misc_feature (70)..(428): Pfam Id: PF07690 Pfam Desc: Major Facilitator Superfamily
  misc_feature (1)..(533): NCBI GI: 39945596 Blast Desc: MGG_04780 [Magnaporthe grisea 70-15] gi|145011223|gb|EDJ95879.1| MGG_04780 [Magnaporthe grisea 70-15]
  misc_feature (1)..(518): NCBI GI: 46109204 Blast Desc: FG01484.1 [Gibberella zeae PH-1]
  misc_feature (4)..(544): NCBI GI: 261357090 Blast Desc: sugar transporter STL1 [Verticillium albo-atrum VaMs.102]
  misc_feature (2)..(518): NCBI GI: 116197527 Blast Desc: CHGG_06919 [Chaetomium globosum CBS 148.51] gi|88178198|gb|EAQ85666.1| CHGG_06919 [Chaetomium globosum CBS 148.51]
  misc_feature (2)..(524): NCBI GI: 164426171 Blast Desc: NCU01132 [Neurospora crassa OR74A] gi|16416050|emb|CAB88582.2| sugar transporter [Neurospora crassa] gi|157071226|gb|EAA31803.2| NCU01132 [Neurospora crassa OR74A]
  misc_feature (5)..(519): NCBI GI: 240106056 Blast Desc: Sugar transporter family protein [Coccidioides posadasii C735 delta SOWgp]
  misc_feature (3)..(542): NCBI GI: 238838527 Blast Desc: sugar transporter [Microsporum canis CBS 113480]
  misc_feature (3)..(521): NCBI GI: 212534812 Blast Desc: MFS monosaccharide transporter, [Penicillium marneffei ATCC 18224] gi|210069961|gb|EEA24051.1| MFS monosaccharide transporter, [Penicillium marneffei ATCC 18224]
  misc_feature (5)..(519): NCBI GI: 119192526 Blast Desc: CIMG_00640 [Coccidioides immitis RS]
  misc_feature (1)..(516): NCBI GI: 226281025 Blast Desc: sugar transporter STL1 [Paracoccidioides brasiliensis Pb01]
MVKKYFGLRGQALNYAIGIIAGCDFLLFGYDQGVTGGVLTMDQFLTVFPDINPDGTDDTVLKSQRSTNQGISVAAYNLGCFLGAVISIFISDLLGRKRMIMLGTSIMVIGAILQASASTLPQWIVGRIITGLGNGGNTSTVPTWQSETSRSHKRGKLVMIEGALITGGITLSYWIDLGFSFAPGSVAWRFPLAFQIAFCLFILSMVWNLPESPRWLILKKREDEAREVLAALGDVDVNDKIIQDEFLEIKETVEEMQKGKFSDLFKNTQDREFHRTLLAYVNQVFQQISGINLITYYAAVIYKRLGLSGFLSLLLAALNGTEYFIASWPAVYLVERVGRRKLMLFGAVGQAASMAALAGAASLTEVDNPPKGPSIAVIALLFVFNTFFAVGWLGMTWLYPAEIVPLKIRAPANALSTSANWIFNFLVVMITPVAFDSIGYQTYIVFAVINAFIVPVTYFFYPETAYRSLEEMDAIFHKAKGLRGYFTVVQIARDEPRRYGKNGEVLIAYDETEEHKAHTHGDPQLQHAEHQGVVDSSDGEKGAGGVVV

SEQ ID NO: 22416 - DNA, 2465 bp, Muscodor strobelii
  misc_feature: SGI EST ID NO. CUFF.52686.1
  misc_feature: Variant of the nucleotide sequence at SEQ ID NO 22414
tgcgcaaccagttaaccgtgtcgccgaggccgactcatgtacctcttttccccattccatgtgctgatcacactatgttcatttgtgtacagcaactgcaagaaagatacatccctgtgccgccgctccaaccgtacccaggatccggcgcgccgaggtggagatgaggaagcgttaaaaatttagtgctctgccaacctcacgcaagatggtcagtcgggtttccgtattcacaaatggttctccacagcatcttgtgcggtccctgtatgtaccttgtatgacgagagtgatggttgctataattctgcgaaagtgatgcgagtgagaaaataaagtcgcaaccgcgctcagcatttgatgttacagaatagtgtatataatggccattgacccgccgttctgcagctagggaagtctatactccagttcagcctttcgccttattgtttttgccttctagcgacatcttgccttgaagtggtgtatgcgaccacgtaccaaatttacatagagcatcaagcattgctcgtgcgatagtaaaaatacctgcctcattacagtcaacgacgagcggccgcgaaacgcgccagtcatcgacatcatggttaagaaatactttggcctgagaggccaggccctcaactatgctatcggcatcatcgcgggatgcgatttcttgctcttcggctacgatcagggtgtcaccggcggtgtcctgaccatggatcagtttctcaccgtcttccccgacatcaaccccgacggtaccgatgacacagtgctcaagtctcagcgctccacgaatcaaggtatatccgttgcggcctacaacttgggatgctttctcggcgccgttatcagtattttcatctccgacctgctcggtcggaagcgcatgatcatgttgggcaccagtatcatggttatcggcgccattcttcaagccagtgcctctactctaccccaatggatcgtcggacggattatcactggcttaggcaatggtggcaacacgtctaccgtcccgacatggcaatctgaaacatcgcgatctcacaagcgtggcaagttggtcatgatcgaaggtgctcttatcactggtggtatcacgctctcatactggattgatcttggattcagctttgctcctggtagcgtagcatggcgatttcccctggccttccagatcgctttctgtctgttcatcctgtcgatggtgtggaacttgcccgaatcgcctcgctggttgattttgaagaagcgcgaagacgaggccagagaggttctcgctgctctgggggacgtagatgtcaacgataagattatccaggatgagttcttggagataaaggagacggtcgaagagatgcagaagggaaagttctcggatcttttcaagaatacccaagacagagaattccaccgaactttgctggcctatgtcaaccaagttttccagcaaatctcaggtatcaacctcattacatactacgccgctgttatctacaaacggcttggccttagcggtttcctctccctgctactcgctgcccttaacggcacggaatacttcattgcctcgtggcccgctgtatacctcgtcgagcgtgtcggtcgtcgaaagcttatgttgttcggtgccgtcggtcaggccgcgtccatggcagcacttgcgggcgccgcctcgctgacggaggtagacaacccacccaaaggcccttctattgccgtcatcgcgcttctcttcgtcttcaatacatttttcgccgtcggctggctcggtatgacctggttatatcctgccgaaatcgtgccactgaaaattcgagccccggccaacgcgctctctacatctgcaaactggattttcaacttcctcgtcgtcatgatcacccccgtagcattcgacagtatcggctaccagacgtacatagtcttcgctgtcatcaacgcgttcattgttcctgttacctacttcttctaccccgagacggcataccgctcactggaagaaatggacgcaatattccacaaggcaaagggtctccgaggttacttcaccgtcgtgcagattgcgcgcgatgaacctagacgctacggcaagaacggcgaggttcttattgcgtatgatgagacggaggaacacaaggctcacacgcatggcgaccctcagcttcaacatgccgagcaccagggtgttgttgatagcagtgatggcgagaagggcgctggtggagttgttgtatagaatcgatacagttggatatatggtccgagatggaagagcttcgcttattgagagtatagacatgggaaagaaaagctcagaatagctcggccacggcgagcgctcgtcgcgcaaagggtttgcatatacaaccacattctagataccccacaatatcgaaatagaagatattagatacagtcttgcaaaaaaagtgtattgaattggtcaattt

SEQ ID NO: 22417 - DNA, 1242 bp, Muscodor strobelii
  misc_feature: SGI cDNA ID NO. 567612
  misc_feature: Encodes the peptide sequence at SEQ ID NO 22418
atgtcatcttcgaaatcacctcatgtgcttatctcaggcgctggaattggcggcctcgccctcgctcaagctcttcgcaagaagggaatctcatacgagattttcgagcgagacgcgagtgtacgggagagacgtccaggttgggtactcggcatgcatcatagtatgcttgacgacctcaaagaatcgataccggatgatatgccaccaatcgcatctatcagcaatctaggacccttgactaaggactatgctcctgagtttgtatactacaacccggcgatggatttcaaaggcaaaattggcgttcgcgatgacggcaccggatgggtcgtgcggacatctcgaggagcgctcatcgattggctaggcttacacatcccgattcaatataataagcaagccgtgaagattgaggaggttggtgagaaggtgagggtgcatttccaagatgggacatcggctgagggtgatatactcgttggcgctgagggctcgcaaagtgccactcgtaaacacatcatttctcctgatcctatgcgtcgtacaaccatggcgatagtaggcggtgagaaaacactctcaggagacgacatgatagagcagcttgagcttggacactcactgtacgtcgtggatatgaactccattgtcggtgagacaatggtgctcttggtttcgcttgcggaaatcaaccccgatgggaaatctggtcggtggttctacgcactgatatggccggatgaatcggctgcgaagggaaatcactggtatgagactgcacctgaccaggagaaatatgactttgttatggagaagacgaagaacttggaggcgaaatgtgagcatatacgacatcccccagttcatcgaactgtagtggatggctcaacattgaatgaacctttgcgtctgtatacactcatcatggaatcgatgcccagcggccgaatcactctcttgggagatgctgcacatgccatgccacccttccgaggcgagggtgcttatcacgccatcacagatgcgttgaacctcgctcgtgccatcgagaaagttgacaaggacgatgtggagagcatcaaggcagtctttggaccttaccaagaagagatgctcacgcgaggtgcgatcgcggcaaaagcgtcagagtccaatttcgctaaaaagcgagaggtcggtagcaaagatcctctctacgcctggggccgtccgatcgggcccctgcctgacgagaagtag

SEQ ID NO: 22418 - protein, 413 aa, Muscodor strobelii
  misc_feature: SGI Peptide ID NO. 567612
  misc_feature (6)..(383): Pfam Id: PF01494 Pfam Desc: FAD binding domain
  misc_feature (311)..(350): Pfam Id: PF01494 Pfam Desc: FAD binding domain
  misc_feature (1)..(410): NCBI GI: 242763238 Blast Desc: monoxygenase, [Talaromyces stipitatus ATCC 10500] gi|218723731|gb|EED23148.1| monoxygenase, [Talaromyces stipitatus ATCC 10500]
  misc_feature (8)..(411): NCBI GI: 189196474 Blast Desc: conserved [Pyrenophora tritici-repentis Pt-1C-BFP] gi|187980454|gb|EDU47080.1| conserved [Pyrenophora tritici-repentis Pt-1C-BFP]
  misc_feature (98)..(413): NCBI GI: 171680486 Blast Desc: protein product [Podospora anserina] gi|170939870|emb|CAP65096.1| protein product [Podospora anserina]
  misc_feature (8)..(412): NCBI GI: 164423615 Blast Desc: NCU11090 [Neurospora crassa OR74A] gi|157070167|gb|EDO64978.1| [Neurospora crassa OR74A]
  misc_feature (73)..(407): NCBI GI: 169615485 Blast Desc: SNOG_10900 [Phaeosphaeria nodorum SN15] gi|160702972|gb|EAT81399.2| SNOG_10900 [Phaeosphaeria nodorum SN15]
  misc_feature (8)..(345): NCBI GI: 154308118 Blast Desc: BC1G_08226 [Botryotinia fuckeliana B05.10] gi|150853111|gb|EDN28303.1| BC1G_08226 [Botryotinia fuckeliana B05.10]
  misc_feature (8)..(386): NCBI GI: 169610349 Blast Desc: SNOG_08276 [Phaeosphaeria nodorum SN15] gi|111063432|gb|EAT84552.1| SNOG_08276 [Phaeosphaeria nodorum SN15]
  misc_feature (4)..(386): NCBI GI: 145235555 Blast Desc: An03g05450 [Aspergillus niger] gi|134058113|emb|CAK38307.1| protein product [Aspergillus niger]
  misc_feature (1)..(383): NCBI GI: 46118629 Blast Desc: FG04720.1 [Gibberella zeae PH-1]
  misc_feature (1)..(383): NCBI GI: 256723521 Blast Desc: [Nectria haematococca mpVI 77-13-4]
  misc_feature (116)..(356): SWISSPROT Homolog: EC 1.14.13.1 Salicylate 1-monooxygenase
MSSSKSPHVLISGAGIGGLALAQALRKKGISYEIFERDASVRERRPGWVLGMHHSMLDDLKESIPDDMPPIASISNLGPLTKDYAPEFVYYNPAMDFKGKIGVRDDGTGWVVRTSRGALIDWLGLHIPIQYNKQAVKIEEVGEKVRVHFQDGTSAEGDILVGAEGSQSATRKHIISPDPMRRTTMAIVGGEKTLSGDDMIEQLELGHSLYVVDMNSIVGETMVLLVSLAEINPDGKSGRWFYALIWPDESAAKGNHWYETAPDQEKYDFVMEKTKNLEAKCEHIRHPPVHRTVVDGSTLNEPLRLYTLIMESMPSGRITLLGDAAHAMPPFRGEGAYHAITDALNLARAIEKVDKDDVESIKAVFGPYQEEMLTRGAIAAKASESNFAKKREVGSKDPLYAWGRPIGPLPDEK

SEQ ID NO: 22419 - DNA, 287 bp, Muscodor strobelii
  misc_feature: SGI EST ID NO. CUFF.52698.0
  misc_feature: Variant of the nucleotide sequence at SEQ ID NO 22417
ctgagcccaagcactaacaagcatttcatccgatagtccgaggcgagggtgcttatcacgccatcacagatgcgttgaacctcgctcgtgccatcgagaaagttgacaaggacgatgtggagagcatcaaggcagtctttggaccttaccaagaagagatgctcacgcgaggtgcgatcgcggcaaaagcgtcagagtccaatttcgctaaaaagcgagaggtcggtagcaaagatcctctctacgcctggggccgtccgatcgggcccctgcctgacgagaagtag

SEQ ID NO: 22420 - DNA, 1014 bp, Muscodor strobelii
  misc_feature: SGI cDNA ID NO. 567613
  misc_feature: Encodes the peptide sequence at SEQ ID NO 22421
atgatggaagactcaaacgaaacccagccaattgtgcctgtacccgcgccatggagactcaaggggacagtctatattatgagcttctggaccagccggaactcctttgggaaaggaagagaggacgggaaaatcgaaaatggctgtctgccgacaattgcatactcacctcttgagtcgcaatcgtccttcgcagacccagctacgtctgggaagtacctcgctgggctcagccagatttggatcatccgttataccgagagtcctgtcggcccttatgatgagcttctcatttgtcccgggagcttcgagaacgagaaagacggtgacaagggaaagaaaacgaagacgaaaaatttgaggattacaagaatatatgtgtcgcagaaatacacatgctggaatgggcgagcaaattacaagaaggaccggaatttgcaccgcactaagctaatcatttcctctcgtggtttattattattagactggaacatcccgaaacatcttgcgcgattcgcatgggagcaatcgcctgacggtaaaacaaaggtcaaagtatatccttacgatatagtagcaacggataggatcggcagcggcaccctctcagaatccgggccaagtgagaaatgcttctttcaagccactttccacccaatacgttgggcgccatccttcccgctctcgttctcgtggctaaggtacttgggtgtcgatgggtctctggtgcaaccaccattgcccgatggacgtcatggtaataatcggcgcggcgaagagttgatcggaacaagccgttggtgcaagattttgccgatcttgtcaacaagaagatcaaagctgggatggatagatatctctcaacgcgatcatcaagaggctgatgctggtggcaatgacagtagtgacgctgaatacgagaatttctggccaggtttgcgtcgttggaacatgactatcaagatggaggacgcagacatcgacttcgaggagggaacatattggaattcttag

SEQ ID NO: 22421 - protein, 337 aa, Muscodor strobelii
  misc_feature: SGI Peptide ID NO. 567613
  misc_feature (14)..(336): NCBI GI: 39945594 Blast Desc: MGG_04779 [Magnaporthe grisea 70-15] gi|145011224|gb|EDJ95880.1| MGG_04779 [Magnaporthe grisea 70-15]
  misc_feature (11)..(337): NCBI GI: 256729827 Blast Desc: NECHADRAFT_47096 [Nectria haematococca mpVI 77-13-4]
  misc_feature (4)..(335): NCBI GI: 189207499 Blast Desc: conserved [Pyrenophora tritici-repentis Pt-1C-BFP] gi|187976176|gb|EDU42802.1| conserved [Pyrenophora tritici-repentis Pt-1C-BFP]
  misc_feature (2)..(281): NCBI GI: 46122503 Blast Desc: FG05629.1 [Gibberella zeae PH-1]
  misc_feature (14)..(337): NCBI GI: 261353849 Blast Desc: conserved [Verticillium albo-atrum VaMs.102]
  misc_feature (4)..(137): NCBI GI: 171695712 Blast Desc: protein product [Podospora anserina] gi|170948098|emb|CAP60262.1| protein product [Podospora anserina]
  misc_feature (2)..(336): NCBI GI: 169616654 Blast Desc: SNOG_11503 [Phaeosphaeria nodorum SN15] gi|111060091|gb|EAT81211.1| SNOG_11503 [Phaeosphaeria nodorum SN15]
  misc_feature (7)..(297): NCBI GI: 189197371 Blast Desc: conserved [Pyrenophora tritici-repentis Pt-1C-BFP] gi|187980971|gb|EDU47597.1| conserved [Pyrenophora tritici-repentis Pt-1C-BFP]
  misc_feature (50)..(268): NCBI GI: 154281877 Blast Desc: [Ajellomyces capsulatus NAm1] gi|150411930|gb|EDN07318.1| [Ajellomyces capsulatus NAm1]
  misc_feature (50)..(267): NCBI GI: 239610530 Blast Desc: conserved [Ajellomyces dermatitidis ER-3]
MMEDSNETQPIVPVPAPWRLKGTVYIMSFWTSRNSFGKGREDGKIENGCLPTIAYSPLESQSSFADPATSGKYLAGLSQIWIIRYTESPVGPYDELLICPGSFENEKDGDKGKKTKTKNLRITRIYVSQKYTCWNGRANYKKDRNLHRTKLIISSRGLLLLDWNIPKHLARFAWEQSPDGKTKVKVYPYDIVATDRIGSGTLSESGPSEKCFFQATFHPIRWAPSFPLSFSWLRYLGVDGSLVQPPLPDGRHGNNRRGEELIGTSRWCKILPILSTRRSKLGWIDISQRDHQEADAGGNDSSDAEYENFWPGLRRWNMTIKMEDADIDFEEGTYWNS

SEQ ID NO: 22422 - DNA, 866 bp, Muscodor strobelii
  misc_feature: SGI EST ID NO. CUFF.52702.0
  misc_feature: Variant of the nucleotide sequence at SEQ ID NO 22420
ccgggagcttcgagaacgagaaagacggtgacaagggaaagaaaacgaagacgaaaaatttgaggattacaagaatatatgtgtcgcagaaatacacatgctggaatgggcgagcaaactggaacatcccgaaacatcttgcgcgattcgcatgggagcaatcgcctgacggtaaaacaaaggtcaaagtatatccttacgatatagtagcaacggataggatcggcagcggcaccctctcagaatccgggccaagtgagaaatgcttctttcaagccactttccacccaatacgttgggcgccatccttcccgctctcgttctcgtggctaaggtacttgggtgtcgatgggtctctggtgcaaccaccattgcccgatggacgtcatggtaataatcggcgcggcgaagagttgatcggaacaagccgttggtgcaagattttgccgatcttgtcaacaagaagatcaaagctgggatggatagatatctctcaacgcgatcatcaagaggctgatgctggtggcaatgacagtagtgacgctgaatacgagaatttctggccaggtttgcgtcgttggaacatgactatcaagatggaggacgcagacatcgacttcgaggagggaacatattggaattcttaggataaattatgacctcgcttctatttcgatagacctgaggcgtatgtttttgctatgccgcgcattgcacaccagcactcttgaaatcaactgagttacgactagattgagcttgaatgttgctaatgaatcttggggtttgtttgagttccggttcaagcttgtgtgtggaattccttagtggcatgatctagaaagatacaaaggcggaaagctagc

SEQ ID NO: 22423 - DNA, 1938 bp, Muscodor strobelii
  misc_feature: SGI cDNA ID NO. 567614
  misc_feature: Reduced expression when VOC is produced
  misc_feature: Encodes the peptide sequence at SEQ ID NO 22424
atggtgtcgtcgtccaaggaaaagagactcgccaagaaggcggcggcgggcgagggcaaggagcccaaggagaagaagacgctcgtctcccgctccaaggccggctccaaggctgcctccaagaacgccagcgccgcggggtccgcagccggcgacgaccccccggaccccaacgacctgccggcgaccagcgagaaggacgcggacaagatcaagcgtctcgcggaccagaaggacgcgcagggcctgtcggaccgcatcacgacgggcgtgctcgcgtcgatcgagagcagccgcgacgtcaagatctcgtcggcgtcgctgaccttccacggccgcgtgctgctgtcggacacggagctcgagctgaccaacgggcgccgctacggcctgctgggcgagaacggctgcggcaagtcgacgctgctcaaggccatctcggagcgcgagtaccccatccccgagcatgtcgacatctacctgctcaaccagggcgcgcccccctccgacctgggcgccctcgagtgggtcgtcaaggaggccgagaaggagatggaccgcctcgacaagctggccgagcagatcctcgaggacaacgggcccgacgacccccatcctgatggacatctacgagagacattgtgtactgactttgttcgacaacaacagcacatggacaagatggacccctcgaccttccagacccgcgcctcgctcatcctcaccggcctgggcttcaacaagaccaccatccacaagaagaccaaggacatgtcgggcggctggcgcatgcgcgtcgctctcgccaaggccctcttcgtcaagccaacgctgctgctgctcgacgaccccaccgcccacctcgacctcgaggcctgcgtctggctcgaggagtacatgaagaagtgggaccgcacgctcgtcctcatctcgcactcgcaggacttcctcaacggcgtctgcaccaacatgatcgacatgcgcaagcagcagctcatgtactacggcggcaacttcgactcgtacaccaagacccgcaaggagcaggaggtcaaccagatgaccgcctacaagaagcagcaggaggagatcaagcacatcaaggagttcatcgcctcggccggcacctacgccaacctcgtgcgccaggccaagtcgcgccagaagatcctcgacaagatgatcgccgacgggctcatcgaggaggtcaaggccgaccgcgagttcaccttccgcttcaccgacgtcgacaagctgccgcccccggtgctcgccttcgacgacgtcaccttctcctactcgggcgacgccaaggacgacctgtaccgcaacatcgacctcggcttcgacatggactcgcgcaccgccctcgtcggccccaacggcgtcggcaagagcaccctgctgcgcctcatgaccggcaagctctcccccaccgccggctccgtccgcaagcacacccatctcaagctcggcatgtactcgcagcactcggccgagcagctcgacctgaccaagagcgccctcgactttgtgcgcgacaagttcagcgaccagtcccaggactaccagttctggcgccagaagctcggccgctacggtgtctcgggcaccgtccagaccgccgtcatgggcactctttccgaaggacagaagagccgtatcgtcttcgctctcctcgccatcgagtctcccaatatgttgctcctggacgagcccaccaacggtctagatatacccaccattgatgctttggcagacgccattgagaactttactggtggtgtcatcgtcgtctctcacgacttcagattgctcgacaggattgccaagcagattcttgtgtgtgagaacaagaccatcaagccttggagcggatcaatcggcgagtacaagaactatctccgcaagaagatggtggcggccggtgctgtctaa

SEQ ID NO: 22424 - protein, 645 aa, Muscodor strobelii
  misc_feature: SGI Peptide ID NO. 567614
  misc_feature (452)..(619): Pfam Id: PF00005 Pfam Desc: ABC transporter
  misc_feature (126)..(330): Pfam Id: PF00005 Pfam Desc: ABC transporter
  misc_feature (1)..(645): NCBI GI: 145605962 Blast Desc: conserved [Magnaporthe grisea 70-15] gi|145013702|gb|EDJ98343.1| conserved [Magnaporthe grisea 70-15]
  misc_feature (3)..(645): NCBI GI: 171692535 Blast Desc: protein product [Podospora anserina] gi|170946216|emb|CAP73017.1| protein product [Podospora anserina]
  misc_feature (3)..(645): NCBI GI: 261360935 Blast Desc: ATP-binding cassette sub-family F member 2 [Verticillium albo-atrum VaMs.102]
  misc_feature (18)..(645): NCBI GI: 156052198 Blast Desc: conserved [Sclerotinia sclerotiorum 1980] gi|154705284|gb|EDO05023.1| conserved [Sclerotinia sclerotiorum 1980]
  misc_feature (3)..(645): NCBI GI: 256728551 Blast Desc: [Nectria haematococca mpVI 77-13-4]
  misc_feature (3)..(645): NCBI GI: 46110286 Blast Desc: FG02025.1 [Gibberella zeae PH-1]
  misc_feature (55)..(645): NCBI GI: 85091002 Blast Desc: ATP-binding cassette sub-family F member 2 [Neurospora crassa OR74A] gi|28920069|gb|EAA29453.1| ATP-binding cassette sub-family F member 2 [Neurospora crassa OR74A] iron inhibited 2
  misc_feature (21)..(645): NCBI GI: 119182085 Blast Desc: conserved [Coccidioides immitis RS] gi|240109154|gb|EER27323.1| ABC transporter domain containing protein [Coccidioides posadasii C735 delta SOWgp]
  misc_feature (21)..(645): NCBI GI: 238844484 Blast Desc: ATP-binding cassette sub-family F member 2 [Microsporum canis CBS 113480]
  misc_feature (18)..(645): NCBI GI: 261197686 Blast Desc: ATP-binding cassette sub-family F member 2 [Ajellomyces dermatitidis SLH14081] gi|239595208|gb|EEQ77789.1| ATP-binding cassette sub-family F member 2 [Ajellomyces SLH14081]
  misc_feature: Useful for introducing or modulating the production of volatile compounds
MVSSSKEKRLAKKAAAGEGKEPKEKKTLVSRSKAGSKAASKNASAAGSAAGDDPPDPNDLPATSEKDADKIKRLADQKDAQGLSDRITTGVLASIESSRDVKISSASLTFHGRVLLSDTELELTNGRRYGLLGENGCGKSTLLKAISEREYPIPEHVDIYLLNQGAPPSDLGALEWVVKEAEKEMDRLDKLAEQILEDNGPDDPHPDGHLRETLCTDFVRQQQHMDKMDPSTFQTRASLILTGLGFNKTTIHKKTKDMSGGWRMRVALAKALFVKPTLLLLDDPTAHLDLEACVWLEEYMKKWDRTLVLISHSQDFLNGVCTNMIDMRKQQLMYYGGNFDSYTKTRKEQEVNQMTAYKKQQEEIKHIKEFIASAGTYANLVRQAKSRQKILDKMIADGLIEEVKADREFTFRFTDVDKLPPPVLAFDDVTFSYSGDAKDDLYRNIDLGFDMDSRTALVGPNGVGKSTLLRLMTGKLSPTAGSVRKHTHLKLGMYSQHSAEQLDLTKSALDFVRDKFSDQSQDYQFWRQKLGRYGVSGTVQTAVMGTLSEGQKSRIVFALLAIESPNMLLLDEPTNGLDIPTIDALADAIENFTGGVIVVSHDFRLLDRIAKQILVCENKTIKPWSGSIGEYKNYLRKKMVAAGAV

SEQ ID NO: 22425 - DNA, 2993 bp, Muscodor strobelii
  misc_feature: SGI EST ID NO. CUFF.52926.0
  misc_feature: Variant of the nucleotide sequence at SEQ ID NO 22423
tttatcactatcaaattcccttccaattgcgatagataagatcctctgtaataagcaacttcttgtgccgtcatactcgagagttacttctcattttgcatgcattgttacaggctttggttgcattgacttgcgaaatttgcttacttaggttaggtacctatgggctcacacctatctcacactactgcccctcgacgccccgcgccgcgctctctcgcccacaactaagcggggtacatttctgacggtctacatactctttttttaatattttctatttccatctctcaacaccccgaatcaccttccacctcgcttgtccccttttgttggtccgcccatccccaagccgacaaagcccatcacatcaacatcaacatggtgtcgtcgtccaaggaaaagagactcgccaagaaggcggcggcgggcgagggcaaggagcccaaggagaagaagacgctcgtctcccgctccaaggccggctccaaggctgcctccaagaacgccagcgccgcggggtccgcagccggcgacgaccccccggaccccaacgacctgccggcgaccagcgagaaggacgcggacaagatcaagcgtctcgcggaccagaaggacgcgcagggcctgtcggaccgcatcacgacgggcgtgctcgcgtcgatcgagagcagccgcgacgtcaagatctcgtcggcgtcgctgaccttccacggccgcgtgctgctgtcggacacggagctcgagctgaccaacgggcgccgctacggcctgctgggcgagaacggctgcggcaagtcgacgctgctcaaggccatctcggagcgcgagtaccccatccccgagcatgtcgacatctacctgctcaaccagggcgcgcccccctccgacctgggcgccctcgagtgggtcgtcaaggaggccgagaaggagatggaccgcctcgacaagctggccgagcagatcctcgaggacaacgggcccgacgacccccatcctgatggacatctacgaggtatgtctccgtctctctgctctttcacatcaccatgaccacgatcatgaccgtctgctcccccatacacacacacacctcactcgacaagaaagcagacgcacacttgagagacattgtgtactgactttgttcgacaacaacagcacatggacaagatggacccctcgaccttccagacccgcgcctcgctcatcctcaccggcctgggcttcaacaagaccaccatccacaagaagaccaaggacatgtcgggcggctggcgcatgcgcgtcgctctcgccaaggccctcttcgtcaagccaacgctgctgctgctcgacgaccccaccgcccacctcgacctcgaggcctgcgtctggctcgaggagtacatgaagaagtgggaccgcacgctcgtcctcatctcgcactcgcaggacttcctcaacggcgtctgcaccaacatgatcgacatgcgcaagcagcagctcatgtactacggcggcaacttcgactcgtacaccaagacccgcaaggagcaggaggtcaaccagatgaccgcctacaagaagcagcaggaggagatcaagcacatcaaggagttcatcgcctcggccggcacctacgccaacctcgtgcgccaggccaagtcgcgccagaagatcctcgacaagatgatcgccgacgggctcatcgaggaggtcaaggccgaccgcgagttcaccttccgcttcaccgacgtcgacaagctgccgcccccggtgctcgccttcgacgacgtcaccttctcctactcgggcgacgccaaggacgacctgtaccgcaacatcgacctcggcttcgacatggactcgcgcaccgccctcgtcggccccaacggcgtcggcaagagcaccctgctgcgcctcatgaccggcaagctctcccccaccgccggctccgtccgcaagcacacccatctcaagctcggcatgtactcgcagcactcggccgagcagctcgacctgaccaagagcgccctcgactttgtgcgcgacaagttcagcgaccagtcccaggactaccagttctggcgccagaagctcggccgctacggtgtctcgggcaccgtccagaccgccgtcatgggcactctttccgaaggacagaagagccgtatcgtcttcgctctcctcgccatcgagtctcccaatatgttgctcctggacgagcccaccaacggtctagatatacccaccattgatgctttggcagacgccattgagaactttactggtggtgtcatcgtcgtctctcacgacttcagattgctcgacaggattgccaagcagattcttgtgtgtgagaacaagaccatcaagccttggagcggatcaatcggcgagtacaagaactatctccgcaagaagatggtggcggccggtgctgtctaagctgcgtgtttctctctttagaggcgtattggaagaaggggggacgattcgaggaatttcgacaacccgaggccatggggttctcacgacattcttatatgggttcgaaatgaacttttggggagcatataaaaagcatcaccaggcatcagagactagcggtttcaaaaagaaaaggggtcctatagattgggcagcatgccgaccattcatagagccgcgtccgccttctccctcatgaagggggatctgttatcaagagttgatccggtgaactgcactccaagatgagtgccaacgaggggactgtgtgttttagctcttcccacgaacgaaggcgaccttcagggcaggtcttcgtaatactttgctttgttcgttcccttgcgtactaggatagactattgacgatgactgacaaaatgaatgatataccttgcacataaaaattggacccctacatttggatgtgacaagtctgatatttcgaccaactgacttatcaagccgctgggatcagaagcaagcaggcaggtgtcaaaatacaacatcgaataccacaa

SEQ ID NO: 22426 - DNA, 423 bp, Muscodor strobelii
  misc_feature: SGI cDNA ID NO. 567615
  misc_feature: Encodes the peptide sequence at SEQ ID NO 22427
atgggtgcgccttattacggcgcgtatacggcgaccgctttcatggccggcgctacgagccttacggcgctcgatacgggcacaacgaactacgccgcatacgtgacgtttgacgcttccggtgccccgctgaaggctctcttgtataactcggattattactcaggaagcgggacacgttccactcagacttttacgctcgcaggattgactggctcttcggttagggcgaagaggctgacgggcgacagtgcggtggcccgtgtcgatcagggcggcaaggtgacgttcggtggacaaactttcacagatggcacctgtgtggtcagtggtacagagacgtttgaaacactcaccgtgagtggtgggcaggcaacggcagtgttgaaggcgagtgaggcgctccttgtttacctcaaatag

SEQ ID NO: 22427 - protein, 140 aa, Muscodor strobelii
  misc_feature: SGI Peptide ID NO. 567615
  misc_feature (1)..(140): NCBI GI: 164423621 Blast Desc: NCU08179 [Neurospora crassa OR74A] gi|157070170|gb|EAA30336.2| conserved [Neurospora crassa OR74A]
  misc_feature (1)..(139): NCBI GI: 145612047 Blast Desc: MGG_08057 [Magnaporthe grisea 70-15] gi|145019294|gb|EDK03522.1| MGG_08057 [Magnaporthe grisea 70-15]
  misc_feature (1)..(139): NCBI GI: 256721844 Blast Desc: NECHADRAFT_122999 [Nectria haematococca mpVI 77-13-4]
  misc_feature (1)..(139): NCBI GI: 238488217 Blast Desc: conserved [Aspergillus flavus NRRL3357] gi|220697734|gb|EED54074.1| conserved [Aspergillus flavus NRRL3357]
  misc_feature (2)..(140): NCBI GI: 259480533 Blast Desc: TPA: conserved [Aspergillus nidulans FGSC A4]
  misc_feature (1)..(140): NCBI GI: 115396490 Blast Desc: conserved [Aspergillus terreus NIH2624] gi|114193453|gb|EAU35153.1| conserved [Aspergillus terreus NIH2624]
  misc_feature (2)..(137): NCBI GI: 67541510 Blast Desc: AN6925.2 [Aspergillus nidulans FGSC A4] gi|40738490|gb|EAA57680.1| AN6925.2 [Aspergillus nidulans FGSC A4]
  misc_feature (2)..(139): NCBI GI: 154322010 Blast Desc: BC1G_01152 [Botryotinia fuckeliana B05.10] gi|150850399|gb|EDN25592.1| BC1G_01152 [Botryotinia fuckeliana B05.10]
  misc_feature (2)..(136): NCBI GI: 156060955 Blast Desc: SS1G_02620 [Sclerotinia sclerotiorum 1980] gi|154700024|gb|EDN99762.1| SS1G_02620 [Sclerotinia sclerotiorum 1980]
  misc_feature (1)..(139): NCBI GI: 255936445 Blast Desc: Pc13g08240 [Penicillium chrysogenum Wisconsin 54-1255] gi|211583869|emb|CAP91893.1| Pc13g08240 [Penicillium chrysogenum Wisconsin 54-1255]
MGAPYYGAYTATAFMAGATSLTALDTGTTNYAAYVTFDASGAPLKALLYNSDYYSGSGTRSTQTFTLAGLTGSSVRAKRLTGDSAVARVDQGGKVTFGGQTFTDGTCVVSGTETFETLTVSGGQATAVLKASEALLVYLK

SEQ ID NO: 22428 - DNA, 668 bp, Muscodor strobelii
  misc_feature: SGI EST ID NO. CUFF.52712.0
  misc_feature: Variant of the nucleotide sequence at SEQ ID NO 22426
tgtactcttaagacatcgtactaacttctttgtaacgtagtccgagcctcatactccaacataacacggacgtattttcaccacggcacggtcgggaactgccaatactgcttctggggccgatacagcatgggtgcgccttattacggcgcgtatacggcgaccgctttcatggccggcgctacgagccttacggcgctcgatacgggcacaacgaactacgccgcatacgtgacgtttgacgcttccggtgccccgctgaaggctctcttgtataactcggattattactcaggaagcgggacacgttccactcagacttttacgctcgcaggattgactggctcttcggttagggcgaagaggctgacgggcgacagtgcggtggcccgtgtcgatcagggcggcaaggtgacgttcggtggacaaactttcacagatggcacctgtgtggtcagtggtacagagacgtttgaaacactcaccgtgagtggtgggcaggcaacggcagtgttgaaggcgagtgaggcgctccttgtttacctcaaatagtcgcgatagggatcagaatcgaagccagcgctagaaaaagctgtgcgagttgtcagtagatacaaccttgtccacaatcaaaatgagtgatacatttatatgtctcaacatttgac

SEQ ID NO: 22429 - DNA, 786 bp, Muscodor strobelii
  misc_feature: SGI cDNA ID NO. 567616
  misc_feature: Elevated expression when VOC is produced
  misc_feature: Encodes the peptide sequence at SEQ ID NO 22430
atggccacctcttcagcggcaggcaagacggtcgtgatcaccggcgccggtggtggtctcggcaaggtcctggcctccgcactcctggacgccggggccaatgtggccgtgtgcgatgtcaacgagacgcgcctgaaggagaccgccacggagtgggaagccaagcacggcgacagcaagttcattgccacaattgccaacatcacagacgaggactcagtaaagaagttctttggtgatgtatccgccaagttcggccgagtcgatatgttgatcaacaatgcggggatcatggacaagtttgacgctgcgggcaccaccgagctagacctctggaaccaagtcatcaatgtgaatcttacgggtgccttcctctgcacaaaggcggccgtcaatacgtttgaggctcagacacccgttggcggtactatcattaatattgcgtctatcgcagcgctgcgcggtctcaatgcgggtgccgcctacactgttagcaagcacgggcttctcggcctcatgaggaatacagctggcttctacgggccgaaggggatttatagcgttgcattcttgatgggagcgatggagactaatatctttgagaaagcaatggcggagggtttcaatcaggagggcatgggaaagatggtagaggcgaacccaggccaaacaatgttgaacttgcccgacgttgccaagtattgcgtcttcctgagcgatccgaacatggcgaaaatcgtaaacgggtcgactatctccttgtctaacaactggcccagtcagtag

SEQ ID NO: 22430 - protein, 261 aa, Muscodor strobelii
  misc_feature: SGI Peptide ID NO. 567616
  misc_feature (9)..(181): Pfam Id: PF00106 Pfam Desc: short chain dehydrogenase
  misc_feature (4)..(259): NCBI GI: 116192999 Blast Desc: CHGG_06217 [Chaetomium globosum CBS 148.51] gi|88182130|gb|EAQ89598.1| CHGG_06217 [Chaetomium globosum CBS 148.51]
  misc_feature (9)..(259): NCBI GI: 171683921 Blast Desc: protein product [Podospora anserina] gi|170941921|emb|CAP67573.1| protein product [Podospora anserina]
  misc_feature (4)..(259): NCBI GI: 85074757 Blast Desc: NCU00606 [Neurospora crassa OR74A] gi|28927559|gb|EAA36510.1| [Neurospora crassa OR74A] gi|38567302|emb|CAE76590.1| related to 3-ketoacyl-acyl carrier
  misc_feature (4)..(258): NCBI GI: 70988847 Blast Desc: short chain dehydrogenase/oxidoreductase [Aspergillus fumigatus Af293] gi|66846907|gb|EAL87238.1| short chain dehydrogenase/oxidoreductase, [Aspergillus fumigatus Af293] short
  misc_feature (8)..(256): NCBI GI: 145235475 Blast Desc: An03g05050 [Aspergillus niger] gi|134058071|emb|CAK49157.1| protein product [Aspergillus niger]
  misc_feature (1)..(258): NCBI GI: 169778309 Blast Desc: [Aspergillus oryzae RIB40] gi|83772357|dbj|BAE62487.1| protein product [Aspergillus oryzae]
  misc_feature (1)..(258): NCBI GI: 238495592 Blast Desc: short chain dehydrogenase/oxidoreductase, [Aspergillus flavus NRRL3357] gi|220695682|gb|EED52025.1| short chain dehydrogenase/oxidoreductase, [Aspergillus flavus NRRL3357]
  misc_feature (4)..(258): NCBI GI: 119497887 Blast Desc: short chain dehydrogenase/reductase family oxidoreductase, [Neosartorya fischeri NRRL 181] gi|119413865|gb|EAW23804.1| short chain dehydrogenase/reductase
  misc_feature (1)..(260): NCBI GI: 255944673 Blast Desc: Pc20g05750 [Penicillium chrysogenum Wisconsin 54-1255] gi|211587839|emb|CAP85904.1| Pc20g05750 [Penicillium chrysogenum Wisconsin 54-1255]
  misc_feature (4)..(258): NCBI GI: 115433336 Blast Desc: [Aspergillus terreus NIH2624] gi|114189657|gb|EAU31357.1| [Aspergillus terreus NIH2624]
  misc_feature (1)..(258): SWISSPROT Homolog: EC 1.1.1.127 2-dehydro-3-deoxy-D-gluconate 5-dehydrogenase
  misc_feature: Useful for introducing or modulating the production of volatile compounds
MATSSAAGKTVVITGAGGGLGKVLASALLDAGANVAVCDVNETRLKETATEWEAKHGDSKFIATIANITDEDSVKKFFGDVSAKFGRVDMLINNAGIMDKFDAAGTTELDLWNQVINVNLTGAFLCTKAAVNTFEAQTPVGGTIINIASIAALRGLNAGAAYTVSKHGLLGLMRNTAGFYGPKGIYSVAFLMGAMETNIFEKAMAEGFNQEGMGKMVEANPGQTMLNLPDVAKYCVFLSDPNMAKIVNGSTISLSNNWPSQ

SEQ ID NO: 22431 - DNA, 3163 bp, Muscodor strobelii
  misc_feature: SGI EST ID NO. CUFF.52723.0
  misc_feature: Variant of the nucleotide sequence at SEQ ID NO 22429
ccttaacgttgaaccaagggatcatgtaatgcaatgcatgtgctgtttactatctacaggctgcatagcctatctacttagatgcaggcttacggcagcatcgaaatcctcttgacttcaacgcagatgctcaggacccttcaggacccttcaggaccctggatcctgcaatgcgaagtgttcccacgggtccgatgaggattgcggactcgaagaattccgattacgattgtttcgcaacaaaaagtgcttgtggcttgtgtagtgattgctctgatcggtacgtgaagcatctcgtattgatttgtgtgaagcttattgtgaactcgttcacttcgcgagcatttcggtcccttgctcgtattcggatgtcgtttacgatacaaacaataccccagtccgcacaaccgaacgacttgaacagtccgagtccccgtctgcatggtgatttgtttgtagcaaaccatgctgattggaggtagcgtcgcagaattaacgcatacagatacccattgtacacgagtcgttgctggtgaaaccgggagctggtgaagctcaatctctagtatgcttgattccgcccgtgccgcagtcctataggattccgcatcctctgttccgtacatatatatctgcatgcagacacaacgcatattgcattcatatacatactctcgtgacatctgatattcttttgcttatctttcacaatcccggaattacctttatagagcatatcatcgccaccgacgggacctccaacttactacatcataatctgacgttgacaaacaacaaaatggccacctcttcagcggcaggcaagacggtcgtgatcaccggcgccggtggtggtctcggcaaggtcctggcctccgcactcctggacgccggggccaatgtggccgtgtgcgatgtcaacgagacgcgcctgaaggagaccgccacggagtgggaagccaagcacggcgacagcaagttcattgccacaattgccaacatcacagacgaggactcagtaaagaagttctttggtgatgtatccgccaagttcggccgagtcgatatgttgatcaacaatgcggggatcatggacaagtttgacgctgcgggcaccaccgagctagacctctggaaccaagtcatcaatgtgaatcttacgggtgccttcctctgcacaaaggcggccgtcaatacgtttgaggctcagacacccgttggcggtactatcattaatattgcgtctatcgcagcgctgcgcggtctcaatgcgggtgccgcctacactgttagcaagcacgggcttctcggcctcatgaggaatacagctggcttctacgggccgaaggggatttatagcgttgcattcttgatgggagcgatggagactaatatctttgagaaagcaatggcggagggtttcaatcaggagggcatgggaaagatggtagaggcgaacccaggccaaacaatgttgaacttgcccgacgttgccaagtattgcgtcttcctgagcgatccgaacatggcgaaaatcgtaaacgggtcgactatctccttgtctaacaactggcccagtcagtagtgtttcgttaagtaatgtctaaaccggattcattgagtcacgaaatggatggcatagatcagacatatacacattcaaaatcatacacgaaagaaggataccccttatacataatatagaaagtcaacattatcaatttatcttcctgcttagaagtacagaagacgatacttaaaggtcggctggaaatttccgggactttcatgccgtatgcatcgaatccctcgacgcagtcctatcccatggtatcaatactccgaaccgagttaaaaagacaaatggtggcccagataatatccccatttttgtttacgaagataaattaggaaagacaaaagcagcaacgcatacgcgagattacaacgaagcgaaagctagcatgagtaaatactcgctcaacaaaccaccggcgatagagcctccggcaagccagaagccgtatcgaaaccaccaccaacagcttgcagaatccttgagctcgacatgtgcgatcattgcgccgagggacagggcagagccgcccgcagcaatggcatagtactgccaacccgtctgaaggaattgaccagcgagtgagagtagcgcgagcatgacacccaggataacccacagaaacaccttggtgcgatctctgaacaggacggctatgctctttactccaaccttcaggtcatccttgagatcttggtgtgcgtagatcgtatcgtatatgatggtccacagaatgctagcgaagaagacacacacgatcgcgggctggacccagatctgctcgccgctgtataacgatagctcacctccgaatggtccaccggtgaaaggtttcaagcccatggcgcaagatcccatcatgataccccatgcgagacaccagccaagcacgagttgagcgaagttggtgtgtcgcttggcccagggatagtagaacgtgccgatgatgttggggacggagtagattgcgctcccagcaggcatgaacaggaggaacgcagcagcacctagtccctggctaagtgtgaagatgaaagcagctcgtggtgtgatagcaccgcggggaataggccgtttgctcgtgcgcgatatagcacggtcgatgggggcatcgatgagatcgttccagccgtgtgcagcgttcgagaagaagaagctaccgccgagcatgacggcaccggcctttaggacctcgctcggcgatgaacgctggatcagagctgcgagcatgatgccgaagaagtgggggaagtagatgaggaataaggccgcgggtggactgagacgggcgagttgcacgtagggtacccatgatgaggggagacggccgacccagcctgctatgtggtttccgccgtattgctgtgcgagtgctgcttgctcggcttggtgatcgttcagtacgagaggcgacttttcagtcttgacttcacttcccgatgccatgacaagcgagagaagcgatatgtttcaactttgactccgttaatatagctatgatgttgagcaatgtcggatgttccgtaccaaggcaaactcttcgtggttatagaccggcgaggaaagcccaacgattatcaaggcgag

SEQ ID NO: 22432 - DNA, 1080 bp, Muscodor strobelii
  misc_feature: SGI cDNA ID NO. 567617
  misc_feature: Encodes the peptide sequence at SEQ ID NO 22433
atggcatcgggaagtgaagtcaagactgaaaagtcgcctctcgtactgaacgatcaccaagccgagcaagcagcactcgcacagcaatacggcggaaaccacatagcaggctgggtcggccgtctcccctcatcatgggtaccctacgtgcaactcgcccgtctcagtccacccgcggccttattcctcatctacttcccccacttcttcggcatcatgctcgcagctctgatccagcgttcatcgccgagcgaggtcctaaaggccggtgccgtcatgctcggcggtagcttcttcttctcgaacgctgcacacggctggaacgatctcatcgatgcccccatcgaccgtgctatatcgcgcacgagcaaacggcctattccccgcggtgctatcacaccacgagctgctttcatcttcacacttagccagggactaggtgctgctgcgttcctcctgttcatgcctgctgggagcgcaatctactccgtccccaacatcatcggcacgttctactatccctgggccaagcgacacaccaacttcgctcaactcgtgcttggctggtgtctcgcatggggtatcatgatgggatcttgcgccatgggcttgaaacctttcaccggtggaccattcggaggtgagctatcgttatacagcggcgagcagatctgggtccagcccgcgatcgtgtgtgtcttcttcgctagcattctgtggaccatcatatacgatacgatctacgcacaccaagatctcaaggatgacctgaaggttggagtaaagagcatagccgtcctgttcagagatcgcaccaaggtgtttctgtgggttatcctgggtgtcatgctcgcgctactctcactcgctggtcaattccttcagacgggttggcagtactatgccattgctgcgggcggctctgccctgtccctcggcgcaatgatcgcacatgtcgagctcaaggattctgcaagctgttggtggtggtttcgatacggcttctggcttgccggaggctctatcgccggtggtttgttgagcgagtatttactcatgctagctttcgcttcgttgtaa

SEQ ID NO: 22433 - protein, 359 aa, Muscodor strobelii
  misc_feature: SGI Peptide ID NO. 567617
  misc_feature (61)..(356): Pfam Id: PF01040 Pfam Desc: UbiA prenyltransferase family
  misc_feature (22)..(352): NCBI GI: 121713374 Blast Desc: prenyltransferase, UbiA family protein [Aspergillus clavatus NRRL 1] gi|119402451|gb|EAW12872.1| prenyltransferase, UbiA family protein [Aspergillus clavatus NRRL 1]
  misc_feature (28)..(352): NCBI GI: 242821326 Blast Desc: prenyltransferase, [Talaromyces stipitatus ATCC 10500] gi|218712578|gb|EED12003.1| prenyltransferase, [Talaromyces stipitatus ATCC 10500]
  misc_feature (21)..(352): NCBI GI: 46138197 Blast Desc: FG10613.1 [Gibberella zeae PH-1]
  misc_feature (28)..(338): NCBI GI: 242796843 Blast Desc: prenyltransferase, [Talaromyces stipitatus ATCC 10500] gi|218719475|gb|EED18895.1| prenyltransferase, [Talaromyces stipitatus ATCC 10500]
  misc_feature (4)..(315): NCBI GI: 145233691 Blast Desc: An02g10890 [Aspergillus niger] gi|134057151|emb|CAK48754.1| protein product [Aspergillus niger]
  misc_feature (28)..(273): NCBI GI: 212539616 Blast Desc: 4-hydroxybenzoate octaprenyltransferase, [Penicillium marneffei ATCC 18224] gi|210067262|gb|EEA21354.1| 4-hydroxybenzoate octaprenyltransferase, [Penicillium marneffei
  misc_feature (20)..(350): NCBI GI: 255943641 Blast Desc: Pc20g00240 [Penicillium chrysogenum Wisconsin 54-1255] gi|211587323|emb|CAP85353.1| Pc20g00240 [Penicillium chrysogenum Wisconsin 54-1255]
  misc_feature (36)..(352): NCBI GI: 171688778 Blast Desc: protein product [Podospora anserina] gi|170944351|emb|CAP70461.1| protein product [Podospora anserina]
  misc_feature (37)..(351): NCBI GI: 121706448 Blast Desc: para-hydroxybenzoate-polyprenyltransferase Coq2, [Aspergillus clavatus NRRL 1] gi|119399634|gb|EAW10060.1| para-hydroxybenzoate-polyprenyltransferase Coq2, [Aspergillus 1]
  misc_feature (37)..(351): NCBI GI: 242765719 Blast Desc: para-hydroxybenzoate-polyprenyltransferase Coq2, [Talaromyces stipitatus ATCC 10500] gi|218724227|gb|EED23644.1| para-hydroxybenzoate-polyprenyltransferase Coq2, [Talaromyces
MASGSEVKTEKSPLVLNDHQAEQAALAQQYGGNHIAGWVGRLPSSWVPYVQLARLSPPAALFLIYFPHFFGIMLAALIQRSSPSEVLKAGAVMLGGSFFFSNAAHGWNDLIDAPIDRAISRTSKRPIPRGAITPRAAFIFTLSQGLGAAAFLLFMPAGSAIYSVPNIIGTFYYPWAKRHTNFAQLVLGWCLAWGIMMGSCAMGLKPFTGGPFGGELSLYSGEQIWVQPAIVCVFFASILWTIIYDTIYAHQDLKDDLKVGVKSIAVLFRDRTKVFLWVILGVMLALLSLAGQFLQTGWQYYAIAAGGSALSLGAMIAHVELKDSASCWWWFRYGFWLAGGSIAGGLLSEYLLMLAFASL

SEQ ID NO: 22434 - DNA, 3163 bp, Muscodor strobelii
  misc_feature: SGI EST ID NO. CUFF.52723.0
  misc_feature: Variant of the nucleotide sequence at SEQ ID NO 22432
ctcgccttgataatcgttgggctttcctcgccggtctataaccacgaagagtttgccttggtacggaacatccgacattgctcaacatcatagctatattaacggagtcaaagttgaaacatatcgcttctctcgcttgtcatggcatcgggaagtgaagtcaagactgaaaagtcgcctctcgtactgaacgatcaccaagccgagcaagcagcactcgcacagcaatacggcggaaaccacatagcaggctgggtcggccgtctcccctcatcatgggtaccctacgtgcaactcgcccgtctcagtccacccgcggccttattcctcatctacttcccccacttcttcggcatcatgctcgcagctctgatccagcgttcatcgccgagcgaggtcctaaaggccggtgccgtcatgctcggcggtagcttcttcttctcgaacgctgcacacggctggaacgatctcatcgatgcccccatcgaccgtgctatatcgcgcacgagcaaacggcctattccccgcggtgctatcacaccacgagctgctttcatcttcacacttagccagggactaggtgctgctgcgttcctcctgttcatgcctgctgggagcgcaatctactccgtccccaacatcatcggcacgttctactatccctgggccaagcgacacaccaacttcgctcaactcgtgcttggctggtgtctcgcatggggtatcatgatgggatcttgcgccatgggcttgaaacctttcaccggtggaccattcggaggtgagctatcgttatacagcggcgagcagatctgggtccagcccgcgatcgtgtgtgtcttcttcgctagcattctgtggaccatcatatacgatacgatctacgcacaccaagatctcaaggatgacctgaaggttggagtaaagagcatagccgtcctgttcagagatcgcaccaaggtgtttctgtgggttatcctgggtgtcatgctcgcgctactctcactcgctggtcaattccttcagacgggttggcagtactatgccattgctgcgggcggctctgccctgtccctcggcgcaatgatcgcacatgtcgagctcaaggattctgcaagctgttggtggtggtttcgatacggcttctggcttgccggaggctctatcgccggtggtttgttgagcgagtatttactcatgctagctttcgcttcgttgtaatctcgcgtatgcgttgctgcttttgtctttcctaatttatcttcgtaaacaaaaatggggatattatctgggccaccatttgtctttttaactcggttcggagtattgataccatgggataggactgcgtcgagggattcgatgcatacggcatgaaagtcccggaaatttccagccgacctttaagtatcgtcttctgtacttctaagcaggaagataaattgataatgttgactttctatattatgtataaggggtatccttctttcgtgtatgattttgaatgtgtatatgtctgatctatgccatccatttcgtgactcaatgaatccggtttagacattacttaacgaaacactactgactgggccagttgttagacaaggagatagtcgacccgtttacgattttcgccatgttcggatcgctcaggaagacgcaatacttggcaacgtcgggcaagttcaacattgtttggcctgggttcgcctctaccatctttcccatgccctcctgattgaaaccctccgccattgctttctcaaagatattagtctccatcgctcccatcaagaatgcaacgctataaatccccttcggcccgtagaagccagctgtattcctcatgaggccgagaagcccgtgcttgctaacagtgtaggcggcacccgcattgagaccgcgcagcgctgcgatagacgcaatattaatgatagtaccgccaacgggtgtctgagcctcaaacgtattgacggccgcctttgtgcagaggaaggcacccgtaagattcacattgatgacttggttccagaggtctagctcggtggtgcccgcagcgtcaaacttgtccatgatccccgcattgttgatcaacatatcgactcggccgaacttggcggatacatcaccaaagaacttctttactgagtcctcgtctgtgatgttggcaattgtggcaatgaacttgctgtcgccgtgcttggcttcccactccgtggcggtctccttcaggcgcgtctcgttgacatcgcacacggccacattggccccggcgtccaggagtgcggaggccaggaccttgccgagaccaccaccggcgccggtgatcacgaccgtcttgcctgccgctgaagaggtggccattttgttgtttgtcaacgtcagattatgatgtagtaagttggaggtcccgtcggtggcgatgatatgctctataaaggtaattccgggattgtgaaagataagcaaaagaatatcagatgtcacgagagtatgtatatgaatgcaatatgcgttgtgtctgcatgcagatatatatgtacggaacagaggatgcggaatcctataggactgcggcacgggcggaatcaagcatactagagattgagcttcaccagctcccggtttcaccagcaacgactcgtgtacaatgggtatctgtatgcgttaattctgcgacgctacctccaatcagcatggtttgctacaaacaaatcaccatgcagacggggactcggactgttcaagtcgttcggttgtgcggactggggtattgtttgtatcgtaaacgacatccgaatacgagcaagggaccgaaatgctcgcgaagtgaacgagttcacaataagcttcacacaaatcaatacgagatgcttcacgtaccgatcagagcaatcactacacaagccacaagcactttttgttgcgaaacaatcgtaatcggaattcttcgagtccgcaatcctcatcggacccgtgggaacacttcgcattgcaggatccagggtcctgaagggtcctgaagggtcctgagcatctgcgttgaagtcaagaggatttcgatgctgccgtaagcctgcatctaagtagataggctatgcagcctgtagatagtaaacagcacatgcattgcattacatgatcccttggttcaacgttaagg

SEQ ID NO: 22435 - DNA, 1506 bp, Muscodor strobelii
  misc_feature: SGI cDNA ID NO. 567618
  misc_feature: Encodes the peptide sequence at SEQ ID NO 22436
atggctcgctttagggtggtgacgatcctgttatccctggttgggttttttgccttttcttcacaatgccagacacatcaaaatcagactacaacgaccgctgcatgttcacaccttgaaggtgctcttggttctactgtcaggttaccgacagatatggacttcaagaacgcgtcagaagcaaactgggtttcgagtgcgtgggagtcaccaatctgcatcttgcagcctactaccgcggaagagatttcacttgccgtgaagtatcttgtacccctgaaaatcaattttgctattcggtcaggtggccactctccagcaccatttgcggcaaatattaacgatggcgttttattcgatatgtccggattcaactccgttgagtaccaggaagagaacaacgttgctattgttggtactgggttgaggtggggtgaagtatacaatcatctcgatccctacagcgtgaccgtagtgggaggccgaattgtggatgtaggagttggtggcctcgcccttggtagtggactgtcatacctcagtgatctatatgggttggtgtgtgacaatgttgtgaacttcgaggttgtgcttgcggacggatctatcgtgaatgcaaatgcaacctcaaattccgatttatggtggtctctcaaaggaggagccaacaattttggaatcgtcaccaagttcacgttaaacacctatccaacgggcgacgtgtggggtggtcagaaatggtacacggctgatcagttgcccgacttgatccacgctctgcatgagtatcagtccgtagacaacaaggatccctacgcaaatctcatgatgcaggcctatcccctcaatgaatcgatcggggtcgagataaacttcgtatacaacaagccagtagcatcaccagaggctttcacagccttctatgacatcccgacgatctacgacacaacccaaatacaatccatgaccaactacctagctagccaagttcccgcggagttcccgcgcctcaactggtatgcaaccagcttcaaggtagacgccacgctcttcggtgaaatagagcagatcgtcacgacggctcccgaattagatgtgattagaaatctcaccgcgggcagtatagccgttggctggcagcccatctcgacgaacgcagtcgaagcgggactggcccggggcggcaatgccctgggcttagagaatgtcaaccagacctggctcgttatcgacattggttggtggttcgccgaggacgacgatgtggctaactcagctacgctgagtctgatcagcaagatcgaggctgcatcgagagctgcggacaaatatatcgactatatcttcatgaatgacgccgccgtcgcccaggatgtgatcagccattatggggccgacagtgtcacaaagcttctagccgcgcaggcgaagtacgatccgaacaaggtctttcaggagctggtgcccggtggctttaagttaccgacggcgataccctcttcgtga

SEQ ID NO: 22436 - protein, 501 aa, Muscodor strobelii
  misc_feature: SGI Peptide ID NO. 567618
  misc_feature (71)..(207): Pfam Id: PF01565 Pfam Desc: FAD binding domain
  misc_feature (10)..(494): NCBI GI: 242821307 Blast Desc: FAD-binding oxidoreductase, [Talaromyces stipitatus ATCC 10500] gi|218712574|gb|EED11999.1| FAD-binding oxidoreductase, [Talaromyces stipitatus ATCC 10500]
  misc_feature (30)..(495): NCBI GI: 46138193 Blast Desc: FG10611.1 [Gibberella zeae PH-1]
  misc_feature (33)..(453): NCBI GI: 116201119 Blast Desc: CHGG_08444 [Chaetomium globosum CBS 148.51] gi|88176962|gb|EAQ84430.1| CHGG_08444 [Chaetomium globosum CBS 148.51]
  misc_feature (60)..(497): NCBI GI: 242821331 Blast Desc: 6-hydroxy-D-nicotine oxidase, [Talaromyces stipitatus ATCC 10500] gi|218712579|gb|EED12004.1| 6-hydroxy-D-nicotine oxidase, [Talaromyces stipitatus ATCC 10500]
  misc_feature (30)..(494): NCBI GI: 259485759 Blast Desc: TPA: FAD-binding oxidoreductase, (AFU_orthologue; AFUA_3G03300) [Aspergillus nidulans FGSC A4]
  misc_feature (35)..(494): NCBI GI: 145231464 Blast Desc: An02g00740 [Aspergillus niger] gi|134056114|emb|CAK96289.1| protein product [Aspergillus niger]
  misc_feature (31)..(494): NCBI GI: 121712465 Blast Desc: FAD binding domain protein [Aspergillus clavatus NRRL 1] gi|119401996|gb|EAW12418.1| FAD binding domain protein [Aspergillus clavatus NRRL 1]
  misc_feature (63)..(494): NCBI GI: 240278798 Blast Desc: FAD binding domain-containing protein [Ajellomyces capsulatus H143]
  misc_feature (4)..(494): NCBI GI: 238490256 Blast Desc: 6-hydroxy-D-nicotine oxidase, [Aspergillus flavus NRRL3357] gi|220696778|gb|EED53119.1| 6-hydroxy-D-nicotine oxidase, [Aspergillus flavus NRRL3357]
  misc_feature (4)..(494): NCBI GI: 169772357 Blast Desc: [Aspergillus oryzae RIB40] gi|83768508|dbj|BAE58645.1| protein product [Aspergillus oryzae]
MARFRVVTILLSLVGFFAFSSQCQTHQNQTTTTAACSHLEGALGSTVRLPTDMDFKNASEANWVSSAWESPICILQPTTAEEISLAVKYLVPLKINFAIRSGGHSPAPFAANINDGVLFDMSGFNSVEYQEENNVAIVGTGLRWGEVYNHLDPYSVTVVGGRIVDVGVGGLALGSGLSYLSDLYGLVCDNVVNFEVVLADGSIVNANATSNSDLWWSLKGGANNFGIVTKFTLNTYPTGDVWGGQKWYTADQLPDLIHALHEYQSVDNKDPYANLMMQAYPLNESIGVEINFVYNKPVASPEAFTAFYDIPTIYDTTQIQSMTNYLASQVPAEFPRLNWYATSFKVDATLFGEIEQIVTTAPELDVIRNLTAGSIAVGWQPISTNAVEAGLARGGNALGLENVNQTWLVIDIGWWFAEDDDVANSATLSLISKIEAASRAADKYIDYIFMNDAAVAQDVISHYGADSVTKLLAAQAKYDPNKVFQELVPGGFKLPTAIPSS

SEQ ID NO: 22437 - DNA, 2246 bp, Muscodor strobelii
  misc_feature: SGI EST ID NO. CUFF.52738.0
  misc_feature: Variant of the nucleotide sequence at SEQ ID NO 22435
agatggtggtgttgtgacacgaattgtttcctccgaggtccctagctagctcttcagcattcgcaattattgaaacggccgtgatgtttaatggggattctgcgggaggatggggctgttgctcctagtcagattactcgctagcgcaagccctcaggggtgttatgtggctctcatctcatcgccgccgtcattatttgatcctgatatataaagtagcgctgttcgccttgaaacaatggcgagatgtgagatatatggagagtatggacaaagatctcatgtcgtattctcaacaagtcgcattaacacatgtactgaaaatatcgaagcatctctacacccgcaatggctcgctttagggtggtgacgatcctgttatccctggttgggttttttgccttttcttcacaatgccagacacatcaaaatcagactacaacgaccgctgcatgttcacaccttgaaggtgctcttggttctactgtcaggttaccgacagatatggacttcaagaacgcgtcagaagcaaactgggtttcgagtgcgtgggagtcaccaatctgcatcttgcagcctactaccgcggaagagatttcacttgccgtgaagtatcttgtacccctgaaaatcaattttgctattcggtcaggtggccactctccagcaccatttgcggcaaatattaacgatggcgttttattcgatatgtccggattcaactccgttgagtaccaggaagagaacaacgttgctattgttggtactgggttgaggtggggtgaagtatacaatcatctcgatccctacagcgtgaccgtagtgggaggccgaattgtggatgtaggagttggtggcctcgcccttggtagtacgtatcttgcggttccgttgacagatagaaagcagcgctgaccaattttaggtggactgtcatacctcagtgatctatatgggttggtgtgtgacaatgttgtgaacttcgaggttgtgcttgcggacggatctatcgtgaatgcaaatgcaacctcaaattccgatttatggtggtctctcaaaggaggagccaacaattttggaatcgtcaccaagttcacgttaaacacctatccaacgggcgacgtgtggggtggtcagaaatggtacacggctgatcagttgcccgacttgatccacgctctgcatgagtatcagtccgtagacaacaaggatccctacgcaaatctcatgatgcaggcctatcccctcaatgaatcgatcggggtcgagataaacttcgtatacaacaagccagtagcatcaccagaggctttcacagccttctatgacatcccgacgatctacgacacaacccaaatacaatccatgaccaactacctagctagccaagttcccgcggagttcccgcgcctcaactggtatgcaaccagcttcaaggtagacgccacgctcttcggtgaaatagagcagatcgtcacgacggctcccgaattagatgtgattagaaatctcaccgcgggcagtatagccgttggctggcagcccatctcgacgaacgcagtcgaagcgggactggcccggggcggcaatgccctgggcttagagaatgtcaaccagacctggctcgttatcgacattggttggtggttcgccgaggacgacgatgtggctaactcagctacgctgagtctgatcagcaagatcgaggctgcatcgagagctgcggacaaatatatcgactatatcttcatgaatgacgccgccgtcgcccaggatgtgatcagccattatggggccgacagtgtcacaaagcttctagccgcgcaggcgaagtacgatccgaacaaggtctttcaggagctggtgcccggtggctttaagttaccgacggcgataccctcttcgtgactcgattcggcgtgagtttttgtcgatacgttgtaatgatgatacctagataccaccttttcatgacgagcaatataataatccttccaaataccgaagttgagttattgaagtcagccatgcatggtacccttgtagtaacaagcattttgacacctccatggccgtggagttggagtcctctcgctggagacgcgcaaaatggaagtgctgaaaagggcatgctgtgcctttcacgcctaacgtcgatcagagtcacatgcggctttacgcgcaaatactggatccaagccaatgtaacctcacgacttcaggctgcagcagtaccagggtctttc

SEQ ID NO: 22438 - DNA, 741 bp, Muscodor strobelii
  misc_feature: SGI cDNA ID NO. 567619
  misc_feature: Encodes the peptide sequence at SEQ ID NO 22439
atgtctcaaacgaagcatgcggatccctacatgggaaaggtcatcacagctttcgaaggcggaataacgacacgcataatcagccatcccagaattccatctcgggtctttgcctacgaagtaacctttttgctaaatcacccacggatcgcggcagtcgcagcactaaaaccaccattgcacttccacccctaccaagaagagtatatcgaagtgactcacgggtctctcgctgtcgaggttgaaggcgtggagaccatcttaacgcctgctagcggagagtttcaagcacaaccttggaagaatcatcggttgtattctccacaaactaccacaactacggggggaggtgaatcaggcgaagatcctgagaatggtgagaaaacggtgttcttgctgagtggacaggatacggacgagtggtataggctagacactgtgtttttcgagaattggtatgcttatcaggatttggtctttgtgcaaggggaaaaaattgatttactgcaggtcatgagtatgttcgacgcagggggctcatacctgtcactcccaacttgggtcccgttcagtcggacagttgctcgtgccctaggtattgtcctcggtcggtgggtaggtggtatgctggggtatcaacctttccataagaaatggacgacggactgggatctcgcgtgccgcaagatggagatgtcgatttttcagagacggtttgccgaccgtgcgaagagcgaatag

SEQ ID NO: 22439 - protein, 246 aa, Muscodor strobelii
  misc_feature: SGI Peptide ID NO. 567619
  misc_feature (13)..(245): NCBI GI: 242821297 Blast Desc: conserved [Talaromyces stipitatus ATCC 10500] gi|218712572|gb|EED11997.1| conserved [Talaromyces stipitatus ATCC 10500]
  misc_feature (15)..(245): NCBI GI: 116201113 Blast Desc: CHGG_08441 [Chaetomium globosum CBS 148.51] gi|88176959|gb|EAQ84427.1| CHGG_08441 [Chaetomium globosum CBS 148.51]
  misc_feature (15)..(241): NCBI GI: 46138199 Blast Desc: FG10614.1 [Gibberella zeae PH-1]
  misc_feature (15)..(246): NCBI GI: 145256060 Blast Desc: An10g00180 [Aspergillus niger CBS 513.88] gi|134078581|emb|CAK49109.1| protein product [Aspergillus niger]
  misc_feature (15)..(246): NCBI GI: 255939374 Blast Desc: Pc16g00330 [Penicillium chrysogenum Wisconsin 54-1255] gi|211585079|emb|CAP92703.1| Pc16g00330 [Penicillium chrysogenum Wisconsin 54-1255]
  misc_feature (15)..(245): NCBI GI: 238502251 Blast Desc: conserved [Aspergillus flavus NRRL3357] gi|220691169|gb|EED47517.1| conserved [Aspergillus flavus NRRL3357]
  misc_feature (14)..(246): NCBI GI: 255948128 Blast Desc: Pc22g08160 [Penicillium chrysogenum Wisconsin 54-1255] gi|211591848|emb|CAP98104.1| Pc22g08160 [Penicillium chrysogenum Wisconsin 54-1255]
  misc_feature (14)..(241): NCBI GI: 238491836 Blast Desc: conserved [Aspergillus flavus NRRL3357] gi|220697568|gb|EED53909.1| conserved [Aspergillus flavus NRRL3357]
  misc_feature (58)..(241): NCBI GI: 115399716 Blast Desc: [Aspergillus terreus NIH2624] gi|114191120|gb|EAU32820.1| [Aspergillus terreus NIH2624]
  misc_feature (58)..(241): NCBI GI: 159124821 Blast Desc: conserved [Aspergillus fumigatus A1163]
MSQTKHADPYMGKVITAFEGGITTRIISHPRIPSRVFAYEVTFLLNHPRIAAVAALKPPLHFHPYQEEYIEVTHGSLAVEVEGVETILTPASGEFQAQPWKNHRLYSPQTTTTTGGGESGEDPENGEKTVFLLSGQDTDEWYRLDTVFFENWYAYQDLVFVQGEKIDLLQVMSMFDAGGSYLSLPTWVPFSRTVARALGIVLGRWVGGMLGYQPFHKKWTTDWDLACRKMEMSIFQRRFADRAKSE

SEQ ID NO: 22440 - DNA, 1742 bp, Muscodor strobelii
  misc_feature: SGI EST ID NO. CUFF.52756.0
  misc_feature: Variant of the nucleotide sequence at SEQ ID NO 22438
tttcggtgaaaatattccgcgacggctgatcgtcagcaatgttgatcgatagctttccaggtatcatgtgtcctggggtgtgcataccagacttgccgggttggcctaggggggtgaatcgatcttcggggagcacaagtttacatacgtacacatatacccagtgattcaatgtgaggcccatgcttaccactatgatgatgtttgattgcataaggaggaagcttcatcattagagacacacttagaagaaggcttcttgtctgtctgatgtaatcacaaatcacaacgccatcataagctatccaagatgtctcaaacgaagcatgcggatccctacatgggaaaggtcatcacagctttcgaaggcggaataacgacacgcataatcagccatcccagaattccatctcgggtctttgcctacgaagtaacctttttgctaaatcacccacggatcgcggcagtcgcagcactaaaaccaccattgcacttccacccctaccaagaagagtatatcgaagtgactcacgggtctctcgctgtcgaggttgaaggcgtggagaccatcttaacgcctgctagcggagagtttcaagcacaaccttggaagaatcatcggttgtattctccacaaactaccacaactacggggggaggtgaatcaggcgaagatcctgagaatggtgagaaaacggtgttcttgctgagtggacaggatacggacgagtggtataggctagacactgtgtttttcgagaattggtatgcttatcaggatttggtctttgtgcaaggggaaaaaattgatttactgcaggtcatgagtatgttcgacgcagggggctcatacctgtcactcccaacttgggtcccgttcagtcggacagttgctcgtgccctaggtattgtcctcggtcggtgggtaggtggtatgctggggtatcaacctttccataagaaatggacgacggactgggatctcgcgtgccgcaagatggagatgtcgatttttcagagacggtttgccgaccgtgcgaagagcgaatagttcaggtgccctcgtagtggatgagtgctgtgttgagtgttgttgagtaatagaaatcagagtgtcaccaattggaatgagatgggtttttgtttgcagtaccacatgctatgtcacacgaggacgaagtgcacataggcgcgtctgccagctcgaatctttggcccatacatgtacccgattctctagtgtgacacagtggtaaatttgtctatttgaatgaaatggataaattattgtaccaattttacgtattgttgatgcttgtgatgatattacattgtgactggatctggatactccattgtacacagtcatatgcttctctggactttgtacgcgctgatcgactcattgtgcgttgaatactgcactgcaatttcaaagacgcttcagcgccgtattgtcattcgagaccttagcccactcaaccgtcttaatccataacttctcctgaacagccttgtcttggctatccccggagctcgcttcattagggatggcaagtctgatatatcctcgcttctcgggatatttgttgctcagaacgagatcggctacatcttgtccagcatctacggctctccgaatatctggaagaacatattgcagaaccggccgtagaggctgtagcacaaatctctgcatgtacgacaacatgacaggcgtgtttgtccgcagggcgcgtgag

SEQ ID NO: 22441 - DNA, 996 bp, Muscodor strobelii
  misc_feature: SGI cDNA ID NO. 567620
  misc_feature: Encodes the peptide sequence at SEQ ID NO 22442
atggcaggaactatcatcatcacgggtgccaacggctccttggccacacatgccgtagaacatcttctaagcacggcgccagacaccgatctcgtattgacagtgcgaaacacctcagattcggacccgaatacaaagctgctgcgggaggcgatcgagaaatacaatggcgccaggacatctatccgagctctcgatctcgcgagcttgaaagccgtcaatgatttcgcagacaccatcacctctgaagtggccgacggaaagctgccacctttgcgaggcatcgtagcaaatgcgtacttttggaacttgatcaccgacccgcagctcacagccgacggtcttgaaaccacgatccaagtgaatcatgttgcgcatgctgcgctcaccttgaggttgttgggcagctttggatcggacggtgggcggctagtcttcttcacgagcgacgcgcattacccgaagcgcaatggactcgagaagtatcccgtggcactaccgagcgatttggatgagttggcgaaggcgggacctgaaacagataagcagggtcgtggattcctgagatacgcaaattcgaaactggctgtcctgatgtggacttatgctctgaatcggtatctggaaaaggatgagactttgagcaagatctcggccgtcgccatcgatccgggtaacctggcagactcacgcgccctgcggacaaacacgcctgtcatgttgtcgtacatgcagagatttgtgctacagcctctacggccggttctgcaatatgttcttccagatattcggagagccgtagatgctggacaagatgtagccgatctcgttctgagcaacaaatatcccgagaagcgaggatatatcagacttgccatccctaatgaagcgagctccggggatagccaagacaaggctgttcaggagaagttatggattaagacggttgagtgggctaaggtctcgaatgacaatacggcgctgaagcgtctttga

SEQ ID NO: 22442 - protein, 331 aa, Muscodor strobelii
  misc_feature: SGI Peptide ID NO. 567620
  misc_feature (3)..(159): Pfam Id: PF00106 Pfam Desc: short chain dehydrogenase
  misc_feature (3)..(99): Pfam Id: PF00106 Pfam Desc: short chain dehydrogenase
  misc_feature (1)..(329): NCBI GI: 145238726 Blast Desc: An07g09350 [Aspergillus niger] gi|134076505|emb|CAK39701.1| protein product [Aspergillus niger]
  misc_feature (1)..(328): NCBI GI: 242821302 Blast Desc: short-chain dehydrogenase, [Talaromyces stipitatus ATCC 10500] gi|218712573|gb|EED11998.1| short-chain dehydrogenase, [Talaromyces stipitatus ATCC 10500]
  misc_feature (1)..(317): NCBI GI: 242797990 Blast Desc: short-chain dehydrogenase, [Talaromyces stipitatus ATCC 10500] gi|218716421|gb|EED15842.1| short-chain dehydrogenase, [Talaromyces stipitatus ATCC 10500]
  misc_feature (9)..(331): NCBI GI: 154320850 Blast Desc: BC1G_01897 [Botryotinia fuckeliana B05.10] gi|150853586|gb|EDN28778.1| BC1G_01897 [Botryotinia fuckeliana B05.10]
  misc_feature (1)..(289): NCBI GI: 189207194 Blast Desc: short chain dehydrogenase/reductase SDR [Pyrenophora tritici-repentis Pt-1C-BFP] gi|187976024|gb|EDU42650.1| short chain dehydrogenase/reductase SDR [Pyrenophora tritici-repentis
  misc_feature (1)..(330): NCBI GI: 67901878 Blast Desc: AN7926.2 [Aspergillus nidulans FGSC A4] gi|40740390|gb|EAA59580.1| AN7926.2 [Aspergillus nidulans FGSC A4] gi|259480675|tpe|CBF73535.1| TPA: conserved [Aspergillus FGSC
  misc_feature (1)..(329): NCBI GI: 145246160 Blast Desc: An12g02470 [Aspergillus niger] gi|134080042|emb|CAK41089.1| protein product [Aspergillus niger]
  misc_feature (1)..(329): NCBI GI: 67528350 Blast Desc: AN4373.2 [Aspergillus nidulans FGSC A4] gi|40741100|gb|EAA60290.1| AN4373.2 [Aspergillus nidulans FGSC A4] gi|259482817|tpe|CBF77659.1| TPA: conserved [Aspergillus FGSC
  misc_feature (1)..(328): NCBI GI: 116179284 Blast Desc: CHGG_00270 [Chaetomium globosum CBS 148.51] gi|88184567|gb|EAQ92035.1| CHGG_00270 [Chaetomium globosum CBS 148.51]
  misc_feature (1)..(328): NCBI GI: 256724497 Blast Desc: NECHADRAFT_54716 [Nectria haematococca mpVI 77-13-4]
MAGTIIITGANGSLATHAVEHLLSTAPDTDLVLTVRNTSDSDPNTKLLREAIEKYNGARTSIRALDLASLKAVNDFADTITSEVADGKLPPLRGIVANAYFWNLITDPQLTADGLETTIQVNHVAHAALTLRLLGSFGSDGGRLVFFTSDAHYPKRNGLEKYPVALPSDLDELAKAGPETDKQGRGFLRYANSKLAVLMWTYALNRYLEKDETLSKISAVAIDPGNLADSRALRTNTPVMLSYMQRFVLQPLRPVLQYVLPDIRRAVDAGQDVADLVLSNKYPEKRGYIRLAIPNEASSGDSQDKAVQEKLWIKTVEWAKVSNDNTALKRL

SEQ ID NO: 22443 - DNA, 2310 bp, Muscodor strobelii
  misc_feature: SGI EST ID NO. CUFF.52757.2
  misc_feature: Variant of the nucleotide sequence at SEQ ID NO 22441
tgacactgtccatgttacgaaggctgtcaacatggtggttacacatcaccgttaggctaagggacgcctcacccgatgacagttgattgtcgagctgatattacgcctccttctgtcgataagcctttgttgcaacctcaacagactgtcaagagacaatcaagctttccaagtagcacagcgtatcggcgacaggcaggtatgcaatcctgacaggacagctgagcctttgagtagtgcagtaggcaagtttgcaaccgagaagcagtggtctttttaacgtcgtggtaggctggaataggctaggcgcatgtcgatagtatctcgatatgtctgtcgacaaactccacattcctctcactcagagcaccgtgacccatatcaaagtctggggcatccatcccatcccatcctgagctgctggtcaacaagcttgctgacacagcagactatataaaatggccgatatattcgccaatctctccggcacgatccggtgccgtcactggctatctcatgttctctacgaacacttgcttatgactgccggctgacatgactggcttggtgtctcgttgacttgctctggcccaagaccaccactgcatgacactaagagataaagacgtcgtacacgactcatgactgcctatatcacggaccctgatcctctgcttcacgtcagatcttctcgtattccacgttgattaccttgaatcatacgggagatggcaggaactatcatcatcacgggtgccaacggctccttggccacacatgccgtagaacatcttctaagcacggcgccagacaccgatctcgtattgacagtgcgaaacacctcagattcggacccgaatacaaagctgctgcgggaggcgatcgagaaatacaatggcgccaggacatctatccgagctctcgatctcgcgagcttgaaagccgtcaatgatttcgcagacaccatcacctctgaagtggccgacggaaagctgccacctttgcgaggcatcgtagcaaatgcgtacttttggaacttgatcaccgacccgcagctcacagccgacggtcttgaaaccacgatccaagtgaatcatgttgcgcatgctgcgctcaccttgaggttgttgggcagctttggatcggacggtgggcggctagtcttcttcacgagcgacgcgcattacccgaagcgcaatggactcgagaagtatcccgtggcactaccgagcgatttggatgagttggcgaaggcgggacctgaaacagataagcagggtcgtggattcctgagatacgcaaattcgaaactggctgtcctgatgtggacttatgctctgaatcggtatctggaaaaggatgagactttgagcaagatctcggccgtcgccatcgatccgggtaacctggcagactcacgcgccctgcggacaaacacgcctgtcatgttgtcgtacatgcagagatttgtgctacagcctctacggccggttctgcaatatgttcttccagatattcggagagccgtagatgctggacaagatgtagccgatctcgttctgagcaacaaatatcccgagaagcgaggatatatcagacttgccatccctaatgaagcgagctccggggatagccaagacaaggctgttcaggagaagttatggattaagacggttgagtgggctaaggtctcgaatgacaatacggcgctgaagcgtctttgaaattgcagtgcagtattcaacgcacaatgagtcgatcagcgcgtacaaagtccagagaagcatatgactgtgtacaatggagtatccagatccagtcacaatgtaatatcatcacaagcatcaacaatacgtaaaattggtacaataatttatccatttcattcaaatagacaaatttaccactgtgtcacactagagaatcgggtacatgtatgggccaaagattcgagctggcagacgcgcctatgtgcacttcgtcctcgtgtgacatagcatgtggtactgcaaacaaaaacccatctcattccaattggtgacactctgatttctattactcaacaacactcaacacagcactcatccactacgagggcacctgaactattcgctcttcgcacggtcggcaaaccgtctctgaaaaatcgacatctccatcttgcggcacgcgagatcccagtccgtcgtccatttcttatggaaaggttgataccccagcataccacctacccaccgaccgaggacaatacctagggcacgagcaactgtccgactgaacgggacccaagttgggagtgacaggtatgag

SEQ ID NO: 22444 - DNA, 1908 bp, Muscodor strobelii
  misc_feature: SGI cDNA ID NO. 567621
  misc_feature: Encodes the peptide sequence at SEQ ID NO 22445
cctatagctaaggacaaagcaatccaattcctcgacgagatcgtcccatatctagagtggcaagtcgattcagcctacaagaaggatccgcctcctgaatatttctttcctggttacgatatctttggagaagtggaaagaataagagagggtgttgtggctgacgagtatccaaacgagtactcttggcaggtggacctatacctgaatgtcgttggtaaaggtcatgatggtcattttgatatcacaacagatgttctgtctaactccctcgtttttgcgagacagtgggctttggtatctatcagcaaagatggtacttctttgcccgtgataaaggtgtacgacgacatggtctccgcaccagatacggcgtcagttgtgcagctgatcaacaatgtcgatgcatcgacctatctccggaactggattatccaaatgtcctctgctagaaccattgatgcagcttacaattccatgtttttctcaaaagcgatgaaccagactgggccccagggctatttctcgtctcagggccgaatcagattcgtctatcccgggccaaatacaacactcacttttgagaatggcactgaattgacccttccgaatctgggcatattgaagggcgattggtctgatgtaacagacgcttcatcgtttatcgcgcagtttgctcctggtatgttgagcaatacgacaagcttagcgacacccgcaatttcaataccgtccggttttgaaacaacgacgagaaggcgatttcgtaaaaagtccgcacagagtgcatcatcatcaacgatacctggatatccagaggcagttctaatctctgatgacactctcgtttccggctattttctatccggagacgggtttgaggatgtcgccgttttggccttgacttctttttctcccgacgaccctccatcgttccaaacagcgatgcaagattttctcgcgcttgctgtttcttctgggaagaaaaagcttgtggttgatgcccagatgaacggaggaggccatatcttccaaggatacgatgctttccgccagctttttccggatattgtccagaacggcacgggtaggtggagatcatctccgggatttgccgctacagcagaggcggtttccgtaggctgcgccgactatgatcctttgacttctagttctttcctaatcaatatgtgcgaaagtgtattcaactatcgttacgacttgaatgtctcccttcacaatttccagacgttcgacgaaaaattcggcccttatgagtaccgtagggacaatttcaccaatgttttccaatggaacttgagtaacccgcttgacaccagcaatgcgaccttcggcgaaggttacaatgtgaccggatacaacaatcgcactgacttcacacgtccatttggcggtcctgaagatattgtccttttacttgacggtttctgcgcctcaacttgctctttgttcgcgcagttcctgaaatgggatgccggcgtccagagcatcgcggtgggcggactaccacaggttggtccaatgcagggtgtcgggggggtaaaaggtgcacaagactatgatttctcagaagtctattcgagaattcaacgcgctagcacgatgactaatgatacagcgttattgaatgagtttagtcgatacacgacgtatcccatggaccgggctgacgatgcgcatcttggcgtgaaagatgaaatcttgccacagaacctgttggacggtactcctgcgcaatatgttgctgagtattctgattgccgtttgtactttactgccgatatgcacgaagacatcaccaacctttggaaagccgccgcttctgctgcttttaacggcgggcattgtgcgtatggggccatcaattcgactaagccaaataaataa

SEQ ID NO: 22445 - protein, 635 aa, Muscodor strobelii
  misc_feature: SGI Peptide ID NO. 567621
  misc_feature (1)..(635): NCBI GI: 171676888 Blast Desc: protein product [Podospora anserina] gi|170936511|emb|CAP61171.1| protein product [Podospora anserina]
  misc_feature (1)..(628): NCBI GI: 85107757 Blast Desc: NCU07923 [Neurospora crassa OR74A] gi|28924045|gb|EAA33203.1| [Neurospora crassa OR74A]
  misc_feature (1)..(627): NCBI GI: 156045575 Blast Desc: SS1G_09978 [Sclerotinia sclerotiorum 1980] gi|154694371|gb|EDN94109.1| SS1G_09978 [Sclerotinia sclerotiorum 1980]
  misc_feature (1)..(611): NCBI GI: 154309609 Blast Desc: BC1G_07275 [Botryotinia fuckeliana B05.10] gi|150852298|gb|EDN27490.1| BC1G_07275 [Botryotinia fuckeliana B05.10]
  misc_feature (1)..(628): NCBI GI: 261359152 Blast Desc: conserved [Verticillium albo-atrum VaMs.102]
  misc_feature (1)..(632): NCBI GI: 169777881 Blast Desc: [Aspergillus oryzae RIB40] gi|83772143|dbj|BAE62273.1| protein product [Aspergillus oryzae]
  misc_feature (40)..(632): NCBI GI: 238495114 Blast Desc: pyridine nucleotide-disulphide oxidoreductase family protein [Aspergillus flavus NRRL3357] gi|220695443|gb|EED51786.1| pyridine nucleotide-disulphide oxidoreductase family protein
  misc_feature (1)..(632): NCBI GI: 169594984 Blast Desc: SNOG_00225 [Phaeosphaeria nodorum SN15] gi|160700989|gb|EAT91720.2| SNOG_00225 [Phaeosphaeria nodorum SN15]
  misc_feature (1)..(623): NCBI GI: 189196070 Blast Desc: peptidase S41 family protein [Pyrenophora tritici-repentis Pt-1C-BFP] gi|187980252|gb|EDU46878.1| peptidase S41 family protein [Pyrenophora tritici-repentis Pt-1C-BFP]
  misc_feature (1)..(631): NCBI GI: 189200543 Blast Desc: peptidase S41 family protein [Pyrenophora tritici-repentis Pt-1C-BFP] gi|187983707|gb|EDU49195.1| peptidase S41 family protein [Pyrenophora tritici-repentis Pt-1C-BFP]
PIAKDKAIQFLDEIVPYLEWQVDSAYKKDPPPEYFFPGYDIFGEVERIREGVVADEYPNEYSWQVDLYLNVVGKGHDGHFDITTDVLSNSLVFARQWALVSISKDGTSLPVIKVYDDMVSAPDTASVVQLINNVDASTYLRNWIIQMSSARTIDAAYNSMFFSKAMNQTGPQGYFSSQGRIRFVYPGPNTTLTFENGTELTLPNLGILKGDWSDVTDASSFIAQFAPGMLSNTTSLATPAISIPSGFETTTRRRFRKKSAQSASSSTIPGYPEAVLISDDTLVSGYFLSGDGFEDVAVLALTSFSPDDPPSFQTAMQDFLALAVSSGKKKLVVDAQMNGGGHIFQGYDAFRQLFPDIVQNGTGRWRSSPGFAATAEAVSVGCADYDPLTSSSFLINMCESVFNYRYDLNVSLHNFQTFDEKFGPYEYRRDNFTNVFQWNLSNPLDTSNATFGEGYNVTGYNNRTDFTRPFGGPEDIVLLLDGFCASTCSLFAQFLKWDAGVQSIAVGGLPQVGPMQGVGGVKGAQDYDFSEVYSRIQRASTMTNDTALLNEFSRYTTYPMDRADDAHLGVKDEILPQNLLDGTPAQYVAEYSDCRLYFTADMHEDITNLWKAAASAAFNGGHCAYGAINSTKPNK

SEQ ID NO: 22446 - DNA, 733 bp, Muscodor strobelii
  misc_feature: SGI EST ID NO. CUFF.52760.0
  misc_feature: Variant of the nucleotide sequence at SEQ ID NO 22444
caaagcaatccaattcctcgacgagatcgtcccatatctagagtggcaagtcgattcagcctacaagaaggatccgcctcctgaatatttctttcctggttacgatatctttggagaagtggaaagaataagagagggtgttgtggctgacgagtatccaaacgagtactcttggcaggtggacctatacctgaatgtcgttggtaaaggtcatgatggtcattttgatatcacaacagatgttctgtctaactccctcgtttttgcgagacagtgggctttggtatctatcagcaaagatggtacttctttgcccgtgataaaggtgtacgacgacatggtctccgcaccagatacggcgtcagttgtgcagctgatcaacaatgtcgatgcatcgacctatctccggaactggattatccaaatgtcctctgctagaaccattgatgcagcttacaattccatgtttttctcaaaagcgatgaaccagactgggccccagggctatttctcgtctcagggccgaatcagattcgtctatcccgggccaaatacaacactcacttttgagaatggcactgaattgacccttccgaatctgggcatattgaagggcgattggtctgatgtaacagacgcttcatcgtttatcgcgcagtttgctcctggtatgttgagcaatacgacaagcttagcgacacccgcaatttcaataccgtccggttttgaaaca

SEQ ID NO: 22447 - DNA, 333 bp, Muscodor strobelii
  misc_feature: SGI cDNA ID NO. 567622
  misc_feature: Encodes the peptide sequence at SEQ ID NO 22448
atgcagttccgccagacaaccacacttcttgccgcctttggccttctccatcccggccttgccgcgactattcaagcccgggactgcggatgctcccacaacggcgatgctgggcgctggagggatgccctaagcccggcagaccgacttgctgagctctgcgcggccggtggcggttgctaccaagccgaggcaggccacatgtgtgtcactggcgacttgtcgcagtgcagctgcgctgtctcctttgccaaccaggagcagagttgggacggtgattggttcttgtggagtgctgtcaactgcggccctattggtgttactatcgactaa

SEQ ID NO: 22448 - protein, 110 aa, Muscodor strobelii
  misc_feature: SGI Peptide ID NO. 567622
  misc_feature (29)..(89): NCBI GI: 171680654 Blast Desc: protein product [Podospora anserina] gi|170939954|emb|CAP65180.1| protein product [Podospora anserina]
MQFRQTTTLLAAFGLLHPGLAATIQARDCGCSHNGDAGRWRDALSPADRLAELCAAGGGCYQAEAGHMCVTGDLSQCSCAVSFANQEQSWDGDWFLWSAVNCGPIGVTID

SEQ ID NO: 22449 - DNA, 202 bp, Muscodor strobelii
  misc_feature: SGI EST ID NO. CUFF.52769.0
  misc_feature: Variant of the nucleotide sequence at SEQ ID NO 22447
cagccacaacagattaaacgtccagaaacacacagttccaatcatacttaaagaactcgcagtcatcaccgtaagaacaccttggaaactaatattagtcgctaagcagaactgacccataaacaatatttgctagccattcttcaacactaccctatcgaaaatgcagttccgccagacaaccacacttcttgccgccttt

SEQ ID NO: 22450 - DNA, 306 bp, Muscodor strobelii
  misc_feature: SGI cDNA ID NO. 567623
  misc_feature: Encodes the peptide sequence at SEQ ID NO 22451
cgcaccggcttccgcggcgtcgtcgacatcgtcgccaccgcgccccggcccgacaagcccgacgtcgacatggccgatgtcgaacctctcgaaggagaccagggcaagagcaacaagagcaacaagaacaacaaacacgacaacaagaagaggaagggccccaacgacgccgacgacagcactgccgcaccgggagacggcaccaatgctacgttcagcaagcgtcagaagcagaagatgaggcgagaggccaagcaaaaggaggaagcagacgccgctgccagatcaaactccaaggccacttga

SEQ ID NO: 22451 - protein, 101 aa, Muscodor strobelii
  misc_feature: SGI Peptide ID NO. 567623
RTGFRGVVDIVATAPRPDKPDVDMADVEPLEGDQGKSNKSNKNNKHDNKKRKGPNDADDSTAAPGDGTNATFSKRQKQKMRREAKQKEEADAAARSNSKAT

SEQ ID NO: 22452 - DNA, 1976 bp, Muscodor strobelii
  misc_feature: SGI EST ID NO. CUFF.52775.0
  misc_feature: Variant of the nucleotide sequence at SEQ ID NO 22450
ccggcttccgcggcgtcgtcgacatcgtcgccaccgcgccccggcccgacaagcccgacgtcgacatggccgatgtcgaacctctcgaaggagaccagggcaagagcaacaagagcaacaagaacaacaaacacgacaacaagaagaggaagggccccaacgacgccgacgacagcactgccgcaccgggagacggcaccaatgctacgttcagcaagcgtcagaagcagaagatgaggcgagaggccaagcaaaaggaggaagcagacgccgctgccagatcaaactccaaggccacttgaccttgttcctctcggctgccttcttatatcgtcatgctttcattcattgtacaccgtttatggaaaagagtatgatattctcaggcgtttcgggcggcggcacctacgagaggaccagatgtatttacatgatacccccaaaatagacttgtcattgttgtttccaccctcacagaactcattgcgcctcgacgctctactctcatcttcttgtccccttcttcagacgattagctgatttcagttggtcctatatctctagttgaacttcgaagcattgcacggagacttttccatatcgagcatcgtgttgaagctccgacacctgcagtcttatgtctaatcatagatcggaagtatatttattgccaattcttatgacgtcggggcccaggggtctatcgtaaagttgaggttcctgtatcctgttgaaatgaaattgagtcgtgccccgggctggtcgtcgtcccggtgggcaaaagtttctcgtcgcagcgctgctacggaacctcggctccgatccaggaacagtcatttccatggcggctgaactgcctatcctataacaccgcctaccaatgtccacgcatcagaaataaaaccacggctatacccctccacggctccagcatacggcatccctacctgacgccacggctctcgtcaacggcatccagctctagggacgcatcacgacttcaacatactacctcggtcaacatgtgctcactgtcgaatatacaatgtccacggggtccactgcttccttcggaaatcgggaacaagatatcgaacaccaacatcattgaaccctgacagcatgaagtttgcgaacgcagccatcagcctcttggcctcggccagtttggcgtggggagcagccttgacgcaggtgacgggctttggcaccaacccaacctcgactcagatgtacatctacgtccctgacaaagtggccactaatccagccatcatcgtagctctccatccctgcggcggcacagcatcacagtggtactcggcgactacgctccccaagtctgccgacacctctggcttcatcctcgtctacccgcagacaacacgctacagcaactgctgggacgtgaacaacgccggctccctgactcatgggggctctggcgacgcgctcggcatcatcagcatggtgaactacacgctgaccaagtattccggcgacgcgacaaaagtctacgtcatgggtggttcctcgggtgccatgatgacaaacgtcatgctcggttcttaccctgacgtttttgccgcgggcgccgcctactcaggcacagcctttgcctgtttcgcgggctccctatccgaaccgacgcctttcggtgccaaccaaacctgcgcgcagggcctaacgcacacgcctgaggaatgggcacagttcgtacataatgcgtatccggggtacaccggcaaacggccacgcgtacagatcatccacggcctagccgatacactcgtccggccgcagtgcgcatacgaggccctcaagcaatgggctgctgtcctcggtttgacaaacactaagaacaacacgggtagtgcggtaccagaaggctcggcgtacaccgagcttgtgtatggtgatggaacacagctcatcggatacatgggtgcgggcgtaggacatgtaagtgaccgaac

SEQ ID NO: 22453 - DNA, 888 bp, Muscodor strobelii
  misc_feature: SGI cDNA ID NO. 567624
  misc_feature: Encodes the peptide sequence at SEQ ID NO 22454
atgaagtttgcgaacgcagccatcagcctcttggcctcggccagtttggcgtggggagcagccttgacgcaggtgacgggctttggcaccaacccaacctcgactcagatgtacatctacgtccctgacaaagtggccactaatccagccatcatcgtagctctccatccctgcggcggcacagcatcacagtggtactcggcgactacgctccccaagtctgccgacacctctggcttcatcctcgtctacccgcagacaacacgctacagcaactgctgggacgtgaacaacgccggctccctgactcatgggggctctggcgacgcgctcggcatcatcagcatggtgaactacacgctgaccaagtattccggcgacgcgacaaaagtctacgtcatgggtggttcctcgggtgccatgatgacaaacgtcatgctcggttcttaccctgacgtttttgccgcgggcgccgcctactcaggcacagcctttgcctgtttcgcgggctccctatccgaaccgacgcctttcggtgccaaccaaacctgcgcgcagggcctaacgcacacgcctgaggaatgggcacagttcgtacataatgcgtatccggggtacaccggcaaacggccacgcgtacagatcatccacggcctagccgatacactcgtccggccgcagtgcgcatacgaggccctcaagcaatgggctgctgtcctcggtttgacaaacactaagaacaacacgggtagtgcggtaccagaaggctcggcgtacaccgagcttgtgtatggtgatggaacacagctcatcggatacatgggtgcgggcgtaggacatgtaagtgaccgaacctgtcgattatcagaaactagccctttgtcttaa

SEQ ID NO: 22454 - protein, 295 aa, Muscodor strobelii
  misc_feature: SGI Peptide ID NO. 567624
  misc_feature (1)..(282): NCBI GI: 169595394 Blast Desc: SNOG_00434 [Phaeosphaeria nodorum SN15] gi|111070809|gb|EAT91929.1| SNOG_00434 [Phaeosphaeria nodorum SN15]
  misc_feature (8)..(282): NCBI GI: 85110055 Blast Desc: feruloyl esterase B precursor [Neurospora crassa OR74A] gi|67476933|sp|Q9HGR3.2|FAEB_NEUCR RecName: Full=Feruloyl esterase B; AltName: Full=Ferulic acid esterase B; Short=FAEB; B
  misc_feature (8)..(282): NCBI GI: 9955721 Blast Desc: ferulic acid esterase, type B [Neurospora crassa]
  misc_feature (1)..(282): NCBI GI: 39971957 Blast Desc: MGG_07294 [Magnaporthe grisea 70-15] gi|145019799|gb|EDK04027.1| MGG_07294 [Magnaporthe grisea 70-15]
  misc_feature (1)..(282): NCBI GI: 116197519 Blast Desc: CHGG_06915 [Chaetomium globosum CBS 148.51] gi|88178194|gb|EAQ85662.1| CHGG_06915 [Chaetomium globosum CBS 148.51]
  misc_feature (8)..(280): NCBI GI: 171689672 Blast Desc: protein product [Podospora anserina] gi|170944798|emb|CAP70910.1| protein product [Podospora anserina]
  misc_feature (21)..(280): NCBI GI: 116205203 Blast Desc: CHGG_10485 [Chaetomium globosum CBS 148.51] gi|88176613|gb|EAQ84081.1| CHGG_10485 [Chaetomium globosum CBS 148.51]
  misc_feature (6)..(275): NCBI GI: 169619784 Blast Desc: SNOG_13089 [Phaeosphaeria nodorum SN15] gi|111058296|gb|EAT79416.1| SNOG_13089 [Phaeosphaeria nodorum SN15]
  misc_feature (18)..(280): NCBI GI: 242791306 Blast Desc: feruloyl esterase B precursor, [Talaromyces stipitatus ATCC 10500] gi|218718319|gb|EED17739.1| feruloyl esterase B precursor, [Talaromyces stipitatus ATCC 10500]
  misc_feature (16)..(280): NCBI GI: 25090320 Blast Desc: FAEB_PENFN RecName: Full=Feruloyl esterase B; AltName: Full=Ferulic acid esterase B; Short=FAEB; AltName: Full=Cinnamoyl esterase; Flags: Precursor gi|10945109|emb|CAC14144.1| cinnamoyl
  misc_feature (24)..(282): SWISSPROT Homolog: EC 3.1.1.73 Feruloyl esterase
MKFANAAISLLASASLAWGAALTQVTGFGTNPTSTQMYIYVPDKVATNPAIIVALHPCGGTASQWYSATTLPKSADTSGFILVYPQTTRYSNCWDVNNAGSLTHGGSGDALGIISMVNYTLTKYSGDATKVYVMGGSSGAMMTNVMLGSYPDVFAAGAAYSGTAFACFAGSLSEPTPFGANQTCAQGLTHTPEEWAQFVHNAYPGYTGKRPRVQIIHGLADTLVRPQCAYEALKQWAAVLGLTNTKNNTGSAVPEGSAYTELVYGDGTQLIGYMGAGVGHVSDRTCRLSETSPLS

SEQ ID NO: 22455 - DNA, 1976 bp, Muscodor strobelii; identical to SEQ ID NO: 22452
  misc_feature: SGI EST ID NO. CUFF.52775.0
  misc_feature: Variant of the nucleotide sequence at SEQ ID NO 22453

SEQ ID NO: 22456 - DNA, 1200 bp, Muscodor strobelii
  misc_feature: SGI cDNA ID NO. 567625
  misc_feature: Encodes the peptide sequence at SEQ ID NO 22457
atgagaagtcttcactggggattgtggctacttgctcttgggacggcacaggccgcgaaagagaaggatgcgggtgatggaaacaacgatacaggtggcaatggtaataataatgactgtgctgcgacggtcacggtaaccgttggcgcgttccagaacgcttcgaaagcaacgactgtgcagcagatgcagaccgtcaccgtcacacagatgcccgataacgtcaacggactgctcgccgggctgctgggtaattcgcagtcggaacagctgggagcagcggacctgagccagagttttggggacttactgagttcaatttttggaaatgtcgggagtggaaatgcaggcaacgggaacgctggccaaaccgctacggtgacagtcacggagactgccagtgcacagggagatgtggcaaatgcgagcgcggtgaccgtgacagtagcctcgacgacaacgatgatgcagctcattgcctgtggctccgcgctgggaacacctgtctcaccgggagaggcttcgatcattgcttcgagcgtggctcaagctgtgtcaaccggcctgggaaatgtcgtgtcttcttcatcctctgccgttgccgcgacttcggtatcatcagtggcttcatctgcgatcgagacatcacaggccgctacttcttcgtcagctgccgctgcgacatcctcggcttctctggttgggctgcctggactgtcatccgtagcctccatagagacgtcgatatcttcagtagcaacatccgcagcaacgtcggtggaaacttcagtggcttcagccacagcatcttcgggagaatcttcagcggcgtcttcagcggctgcatcatctgcagtgtcatccgccgtgtcctcgcctgtttcaacaccgacttctctcgccacggttattgtctcgacttccgcatcctcggcagctgcggccaccacagccgcgaccggtcttacgtcgataccgctggctgctcaacagcccagttctacggccgatactgcgcagtcctcgatcgtgcttgctgccccctctcctacgacggccgccaacgcgcagaatgtggcggtcggcgcggcggcaccagccatcacggctacaacatttgccggagcgaacgaaggaccgtctatcgacttgagtggtgttacgctgaacagtgttatcaatctcggggctattgcgtaa

SEQ ID NO: 22457 - protein, 399 aa, Muscodor strobelii
  misc_feature: SGI Peptide ID NO. 567625
MRSLHWGLWLLALGTAQAAKEKDAGDGNNDTGGNGNNNDCAATVTVTVGAFQNASKATTVQQMQTVTVTQMPDNVNGLLAGLLGNSQSEQLGAADLSQSFGDLLSSIFGNVGSGNAGNGNAGQTATVTVTETASAQGDVANASAVTVTVASTTTMMQLIACGSALGTPVSPGEASIIASSVAQAVSTGLGNVVSSSSSAVAATSVSSVASSAIETSQAATSSSAAAATSSASLVGLPGLSSVASIETSISSVATSAATSVETSVASATASSGESSAASSAAASSAVSSAVSSPVSTPTSLATVIVSTSASSAAAATTAATGLTSIPLAAQQPSSTADTAQSSIVLAAPSPTTAANAQNVAVGAAAPAITATTFAGANEGPSIDLSGVTLNSVINLGAIA

SEQ ID NO: 22458 - DNA, 2099 bp, Muscodor strobelii
  misc_feature: SGI EST ID NO. CUFF.52779.0
  misc_feature: Variant of the nucleotide sequence at SEQ ID NO 22456
cagcgctggccgcaaggcttgatcacgctgcatatttgtgtcttgattgatctatcctggctagttacagatctacgaggatgcaggttgctgtaagtgacatgtgtaccttacgtatgcatatcgtgcatatcgtaccacgcgcagccaagcttcgtcacagaattaaggtgaggcttgaccagggcggtagctggtacccttgtcgaaacgcatgtccagaccgctggcgtctggtctctcctggctctcactccaatctcttctcttctgttcgttgttctgtttaagcttggtttctctcttgtggttttgacattcgtttgtattggtttggagtgaaagccaccgctccttttggctttttgttcttgaattgagcttctgagcgccagacaacccgattatgtccctacgctgagcgagctggattcattctgcattgatgctttgattatactatactatattattctcccaaacggctggcctgttttattactcttcttcctgcccgctccaaaaaatcgaaccgaagtagttggtaagaggttgggaaggttcatcgactagtcctcgtcaggatgagaagtcttcactggggattgtggctacttgctcttgggacggcacaggccgcgaaagagaaggatgcgggtgatggaaacaacgatacaggtggcaatggtaataataatgactgtgctgcgacggtcacggtaaccgttggcgcgttccagaacgcttcgaaagcaacgactgtgcagcagatgcagaccgtcaccgtcacacagatgcccgataacgtcaacggactgctcgccgggctgctgggtaattcgcagtcggaacagctgggagcagcggacctgagccagagttttggggacttactgagttcaatttttggaaatgtcgggagtggaaatgcaggcaacgggaacgctggccaaaccgctacggtgacagtcacggagactgccagtgcacagggagatgtggcaaatgcgagcgcggtgaccgtgacagtagcctcgacgacaacgatgatgcagctcattgcctgtggctccgcgctgggaacacctgtctcaccgggagaggcttcgatcattgcttcgagcgtggctcaagctgtgtcaaccggcctgggaaatgtcgtgtcttcttcatcctctgccgttgccgcgacttcggtatcatcagtggcttcatctgcgatcgagacatcacaggccgctacttcttcgtcagctgccgctgcgacatcctcggcttctctggttgggctgcctggactgtcatccgtagcctccatagagacgtcgatatcttcagtagcaacatccgcagcaacgtcggtggaaacttcagtggcttcagccacagcatcttcgggagaatcttcagcggcgtcttcagcggctgcatcatctgcagtgtcatccgccgtgtcctcgcctgtttcaacaccgacttctctcgccacggttattgtctcgacttccgcatcctcggcagctgcggccaccacagccgcgaccggtcttacgtcgataccgctggctgctcaacagcccagttctacggccgatactgcgcagtcctcgatcgtgcttgctgccccctctcctacgacggccgccaacgcgcagaatgtggcggtcggcgcggcggcaccagccatcacggctacaacatttgccggagcgaacgaaggaccgtctatcgacttgagtggtgttacgctgaacagtgttatcaatctcggggctattgcgtaatgagaacatctcaggcgggatatgtagaaaaagaaccgagcaagatggcaacgccactgtaggcagacatttactgggtccgaggtctcagcgagacgctgtccttgggctgatacaagacgggcgttggggattcgtgtattgtgtcatttattggtatataactaccatttattagaatccatattagaacgttcgaaaatcctatcaaaatcctgaaatgggccattttttactaggactccagtggctatatataactcctacatactcgggtcatctaagatccaagtccaaagaacttcaacatgaccg

SEQ ID NO: 22459 - DNA, 1251 bp, Muscodor strobelii
  misc_feature: SGI cDNA ID NO. 567626
  misc_feature: Encodes the peptide sequence at SEQ ID NO 22460
atgtcttctgccacagcacaggccatggcagtcgcctccgcccatcagtgcgcccatcgcaatgctccgcccgtcaaggagtgtcttgatcctcgtggcgatttgtttttggtcgtcggtcgaaacgagtgccaccagcaaccgtgcgctgccatcacacctcttcctccccatcacacccgccagtgcaagttccaggttgattccgagctgcttgctggtgtctctccggcctttgggttcattctcttgagcccgggctgtcagaatgagcgtctcactagcgccgagtgggtcgttgatctccccgacgacgacacgtacgccatgatggtggtcctcctggtggttcaccataaaacagacggcggagttttcacaggcgagagtccgattgatgtgaagctgatgtacgatctggcccgtctggtcgagaagtatggtctcggagagctgctggctccttgggtctcgcgctggtttcgagacctgcagaccttctggctgggcaagaagtttgacgccaacaatgcggaggatgcggagacaatgctgtacatcgcttgggccttcggacacgaggctatctattcctacttcatcctcacgattgcggcccagactggtatcgacaagactggccacctcgccgacgcagctaacgaacatatctttacggggaatgttgacgctgaggctattcctccctttgccggctttgaaatcgctcacgcccgtactggattgctcaccaatattagagctgacctgaaggtcacgttggaacgacaccttcacggcggcgacgcccagggcgctgagctctgccaacgacatgacgaccgtgacgacgccgcttggcgcaagagcatccttgcgtggtttgccaatacccttgccgacttacagctttggccgcttcctcccacccactccttcaagattagtcccagagccatggcagagagctttgcacgacgccctaacatctgtgcttttaagcacatcaagctggatgagaagaaatcatgccatgcggacggtagctacgcgagccgcatcgagaagatcattaccaccatgaacatcaatctctctcggcagaccatgcaggagctggcgaaaagagccgacaagagtggcttgaccgcatacttacgactgactggcgctgccgcacagcgcggtatctggtctatgaagagtgttgagcgcttcgtcggcttcgccgctcgtgctcatgaggattaa

SEQ ID NO: 22460 - protein, 416 aa, Muscodor strobelii
  misc_feature: SGI Peptide ID NO. 567626
  misc_feature (23)..(376): NCBI GI: 261353831 Blast Desc: conserved [Verticillium albo-atrum VaMs.102]
  misc_feature (62)..(381): NCBI GI: 116201755 Blast Desc: [Chaetomium globosum CBS 148.51] gi|88177280|gb|EAQ84748.1| [Chaetomium globosum CBS 148.51]
  misc_feature (63)..(221): NCBI GI: 85085455 Blast Desc: NCU04436 [Neurospora crassa OR74A] gi|28918605|gb|EAA28277.1| [Neurospora crassa OR74A] gi|40882185|emb|CAF06011.1| [Neurospora crassa]
  misc_feature (29)..(308): NCBI GI: 256724501 Blast Desc: NECHADRAFT_88143 [Nectria haematococca mpVI 77-13-4]
  misc_feature (29)..(211): NCBI GI: 85085459 Blast Desc: NCU04437 [Neurospora crassa OR74A] gi|28918606|gb|EAA28278.1| [Neurospora crassa OR74A] gi|40882183|emb|CAF06009.1| related to nuclear pore protein
  misc_feature (65)..(212): NCBI GI: 40882184 Blast Desc: [Neurospora crassa]
  misc_feature (24)..(217): NCBI GI: 170940283 Blast Desc: protein product [Podospora anserina]
  misc_feature (65)..(307): NCBI GI: 39942748 Blast Desc: MGG_03454 [Magnaporthe grisea 70-15] gi|145009998|gb|EDJ94654.1| MGG_03454 [Magnaporthe grisea 70-15]
  misc_feature (29)..(200): NCBI GI: 164428286 Blast Desc: NCU05906 [Neurospora crassa OR74A] gi|157072087|gb|EAA28870.2| [Neurospora crassa OR74A]
  misc_feature (27)..(223): NCBI GI: 170940282 Blast Desc: protein product [Podospora anserina]
MSSATAQAMAVASAHQCAHRNAPPVKECLDPRGDLFLVVGRNECHQQPCAAITPLPPHHTRQCKFQVDSELLAGVSPAFGFILLSPGCQNERLTSAEWVVDLPDDDTYAMMVVLLVVHHKTDGGVFTGESPIDVKLMYDLARLVEKYGLGELLAPWVSRWFRDLQTFWLGKKFDANNAEDAETMLYIAWAFGHEAIYSYFILTIAAQTGIDKTGHLADAANEHIFTGNVDAEAIPPFAGFEIAHARTGLLTNIRADLKVTLERHLHGGDAQGAELCQRHDDRDDAAWRKSILAWFANTLADLQLWPLPPTHSFKISPRAMAESFARRPNICAFKHIKLDEKKSCHADGSYASRIEKIITTMNINLSRQTMQELAKRADKSGLTAYLRLTGAAAQRGIWSMKSVERFVGFAARAHED

SEQ ID NO: 22461 - DNA, 4647 bp, Muscodor strobelii
  misc_feature: SGI cDNA ID NO. 567627
  misc_feature: Encodes the peptide sequence at SEQ ID NO 22462
atggagagcgacagccctccgaagcgcgtgacgcgtgcacgagctgcagccgcccaggccagcaaatcatccgcatcgaccacatcatcgtcgactagcaagaccaagactgccgctgagaagaaacagcccgccgtcgccaacatgaaccccatcgcctctggtacgaagcgcgtcaccaagtcatcgtcatccgcctctacctcctccaagacaccctcctcatcctcatccacatccaaggccgcgaagtcggctgttaacaagaagacagcctcgacgaccaagacctctggcaagaagacagctgccgcgaagaaggctcctgccgccaagtccgccgccgccaagcgtaccgctaagagtaccgccacgcccgctcctgcttcctcctcttacgcctctggcacccgagccagcaccctcaagcgcaagacgcgcgccgacgacaccgacgactcggatgacgacgccgatcatctatctcaagacaccagcaaggccgtcaagcccgcccgccggtccgccaagaaggtcaagaccgagcacgagcctgagtccgccgtccccaccgaaaccacaaccgacaacggtatcaacaagagagccgtgcgtggaagacccaagggtgccgccaacaaagcttccaaagcttcttcttcgtctgcctctgccgctagcacgcagcccctcccctcgggaaccaagcgtgtcaccaagtcgaccgctgccaaggacacagagtccgcctcatcctctacatccgcctcgaccaaccccaagccggccgcatccaaggcatcgacagcccgtgccaccaggaagaatgctgctgctgctcccaaagccgccaaggctgctaccaaagccaccaaggccaaggctacgaagaaagctgccggaactaccgatggcgctcttaagaagaccgtcaccttccaggagcccgacgacgacgaagatgagatctccggtcccgcccccgctcccatcgccgctaagcccaagcccaagcctaaggccaaggctacccgggccaccgcccccaagactgcagaggaggaggagaagcctgcagagagcattgccgacgagggcactgctgctgagcccgagacgggcatgcgtgccagacccgtccgcaaagccaccacctcggcccgtgccacccgcgctgcagcccgcgctgccacgccgtacgacaggcccgctacagccaccaagtctgccgccaagggcaagggcaagaacgtcaagaagaccgccatcgatggcgacgcggccgacgtggagaacgacgtgcctctggcggtgaagagcgagaccaaggccaagactgccgccaacaagacgacggccatcgccaagcgagacaatgttcagcccctgagccctagaaaggacggcccgaacctccctctggcgcgtgatgtgcgcgaagccagctccgacgatgagctggccacctacgagaagactccgctcaagccgctgatgaagagccccgtccgcgctgctaaggccatgcgcaagctcgagctcccccctgtcgccgccgagcccaaggctgagacggagatgcagaagacaggcgccaacgtggtggagacggacaagtcggagctggttgccggccctcacgcgagtgaagccgaggagaatgcgagcagcagcgttggccctgctgccactgttcattctaccgtccttactagcccagcccgcccttctcccgcctctcccccgaagatgctccagtctcctgccaagcgcccccaagccgacttgcaccccgccagcgccgagagccagacgaagcctaccgagctggttgccggtcctcacgcgagtgagaccgagaagcccgacagcagcgttggtcctgctgtcaccggccattctaccgcacttaccagtccggctcgtcgcttagcctctcctcccaagatccttcagtccatagccaagcgtgtccagagcatgtgggacccgaccgcgaccgggagcgagtccagcggcgtcgaccaggttggcggtctccacgcgagtggaaccgatcatgcagacaacagcgttggtcctgttgtcaccagtagtcaccagactctggctagcccatcccgtcgacccatcctcgctccagtcagccgcctcaagtcgcccgccaagcgtcctcagatgaccattcccgctttggagcagcccatctttgagcagtccggcagctcccactcacccgtgaaggtgtctcttatgcagtcacccgccaagcgcccccagcaaccccttccgactctcgagcactcgtctcttgaccaagctggtaatcctccctccgccaccaagacctcaggtcttcagagcccggccaagcgcccggcttctcctctcaagcttgaccgcccggtccatcagagcccgcagaagtccgctcaagctgccgtgggacccatcatccaaccagagtcgcctgacccgctcgcgttcccgggtcgtctctcagccatcttgccccgagaggccgacccagttcttcgaaaagagctgtcagagtctgcgaaggatgtgcctgctgcacctggatatcgagccgccgactacgagagcgactcgtccgaggagagtgacgaaagcaggctgatgcgcttcgatgccgaactggacctcaaggcagcacgaatgcggaatttcacgaccaatcccaaaccgaaggaggagctctccacacctacaacgaaacccttcaagttcggcactccctacctcaagaagaagtaccccaacaccaaagacgaaagcccgcagcagattgcggatcgcctccatcgcagccagcagatcagagagaagctgcagaagaagatggccaagtcacgcgcctcgcagcccgagaccccgacaggtccaaatggtacccccgaatggatggacaaggaacaattccgcatcgctcagtcggtgatctggcttgacgataatactcccctgcccggcggttcggcagcctcgtcccccaccagtctttcggcaactccaacagtcgccaaccctactaccactgattcagctgcgcccactccatccaaaggcttcttcgacgacgagatgagcgtccgcgccgatatggacaaagcagctgaggcgaaagctcaagagccagccacagtcgatgctaagaaagaggaccccaaaaaggctaacaccgagcttatgtgctaccagactcagtatgccgtcatccctaacgaagtcaccgacctcatggcggagagagatcaagcattggaccagcaggaggcagcggtccgagccgaagcccgccgtaaggaacgcgcagaagcaaacgctcgcaacaaagctgagtggcaacgcgctcagaacaatgctgagatggaggctgagatagaggccgctatgagcgccgacgtcgaattgaagttccgcaaggctggcatggacactatcgacgatgatctcctcagagacctcgcccgggcaaacaagtggtccacagtggctggcttgtcccccatccccgaagccagccaagagacgccgactacttatcccgtctccgaggccagtcaggaatacggcgacgaaaatacgcctcttgaccctcttctcttcggtgctccgactactcgccaatcctctggtcgatctgctagtgtggccctcaagcccgcccacgactttaccccacgccgacaaaagcggcccttgacatacgaggatgacgaggacgtcttgttcccgtctctcaaacgacgctctactgctacagactcgccgccattttaccctccttacgaaatgccggctaagctaccggtcaaatcgtctcgtcctctgcaaggagtggtggcctttgtcgatgtctacaccgagggcgaccaagtctgggctggtggcaacttccagtctttattggtaaagttgggagccaaggtcgtcaatcaatggacctggaaccccgtccccggcaagccgccgacagcccaggatgtcggtatcacccatgtcgtcttcaaagatggaaacatcccaaccctgcgaaaaatcaagatgagcgaaggcctcgtgcattgtgtcagctgcacttggctcgtggcatgtggggagcagatggagcacttgcccgaagacatgtacagatatgataccgacatcgttccacgtggtggacaaaggcgacgcaagagcatggagcccaagtcgctcgccaacgtcaacggtacccttgtaaccccagccaggaacaccaatcgcccgctaaatgaacccaagacggagccgaataaccttcggaaccgtcgcaccagcggctattgggtccgcagtccttcggaccacggagaagacgagaacgcagacgttatggactgggagcccaccgacgctccgctctccccactaccccagacccccacccccgagtccgttgcgctgtttgctctcaatgttactccgggcactgcttccaccacctcagctggcgatatttcgcctgaacccctcatgttacgaacctgcccgcccaagccaaaggcagagaacagagagacgggattagttgcggctcgtcgcaagagcttggcacatgccccaaagatcggaagccccttgaagaaggtttggaattag

SEQ ID NO: 22462 - protein, 1548 aa, Muscodor strobelii
  misc_feature: SGI Peptide ID NO. 567627
  misc_feature (1191)..(1547): NCBI GI: 116182260 Blast Desc: CHGG_01758 [Chaetomium globosum CBS 148.51] gi|88186055|gb|EAQ93523.1| CHGG_01758 [Chaetomium globosum CBS 148.51]
  misc_feature (1142)..(1547): NCBI GI: 46109212 Blast Desc: FG01488.1 [Gibberella zeae PH-1]
  misc_feature (1191)..(1547): NCBI GI: 256730575 Blast Desc: NECHADRAFT_102976 [Nectria haematococca mpVI 77-13-4]
  misc_feature (1191)..(1547): NCBI GI: 171695184 Blast Desc: protein product [Podospora anserina] gi|170947834|emb|CAP59998.1| protein product [Podospora anserina]
  misc_feature (1191)..(1547): NCBI GI: 261358638 Blast Desc: conserved [Verticillium albo-atrum VaMs.102]
  misc_feature (1192)..(1547): NCBI GI: 39946612 Blast Desc: MGG_08594 [Magnaporthe grisea 70-15] gi|145012456|gb|EDJ97112.1| MGG_08594 [Magnaporthe grisea 70-15]
  misc_feature (1280)..(1545): NCBI GI: 225679830 Blast Desc: conserved [Paracoccidioides brasiliensis Pb03]
  misc_feature (1280)..(1545): NCBI GI: 226291587 Blast Desc: conserved [Paracoccidioides brasiliensis Pb18]
  misc_feature (1170)..(1548): NCBI GI: 154314183 Blast Desc: BC1G_05185 [Botryotinia fuckeliana B05.10] gi|150848830|gb|EDN24023.1| BC1G_05185 [Botryotinia fuckeliana B05.10]
  misc_feature (1283)..(1545): NCBI GI: 226286107 Blast Desc: conserved [Paracoccidioides brasiliensis Pb01]
MESDSPPKRVTRARAAAAQASKSSASTTSSSTSKTKTAAEKKQPAVANMNPIASGTKRVTKSSSSASTSSKTPSSSSSTSKAAKSAVNKKTASTTKTSGKKTAAAKKAPAAKSAAAKRTAKSTATPAPASSSYASGTRASTLKRKTRADDTDDSDDDADHLSQDTSKAVKPARRSAKKVKTEHEPESAVPTETTTDNGINKRAVRGRPKGAANKASKASSSSASAASTQPLPSGTKRVTKSTAAKDTESASSSTSASTNPKPAASKASTARATRKNAAAAPKAAKAATKATKAKATKKAAGTTDGALKKTVTFQEPDDDEDEISGPAPAPIAAKPKPKPKAKATRATAPKTAEEEEKPAESIADEGTAAEPETGMRARPVRKATTSARATRAAARAATPYDRPATATKSAAKGKGKNVKKTAIDGDAADVENDVPLAVKSETKAKTAANKTTAIAKRDNVQPLSPRKDGPNLPLARDVREASSDDELATYEKTPLKPLMKSPVRAAKAMRKLELPPVAAEPKAETEMQKTGANVVETDKSELVAGPHASEAEENASSSVGPAATVHSTVLTSPARPSPASPPKMLQSPAKRPQADLHPASAESQTKPTELVAGPHASETEKPDSSVGPAVTGHSTALTSPARRLASPPKILQSIAKRVQSMWDPTATGSESSGVDQVGGLHASGTDHADNSVGPVVTSSHQTLASPSRRPILAPVSRLKSPAKRPQMTIPALEQPIFEQSGSSHSPVKVSLMQSPAKRPQQPLPTLEHSSLDQAGNPPSATKTSGLQSPAKRPASPLKLDRPVHQSPQKSAQAAVGPIIQPESPDPLAFPGRLSAILPREADPVLRKELSESAKDVPAAPGYRAADYESDSSEESDESRLMRFDAELDLKAARMRNFTTNPKPKEELSTPTTKPFKFGTPYLKKKYPNTKDESPQQIADRLHRSQQIREKLQKKMAKSRASQPETPTGPNGTPEWMDKEQFRIAQSVIWLDDNTPLPGGSAASSPTSLSATPTVANPTTTDSAAPTPSKGFFDDEMSVRADMDKAAEAKAQEPATVDAKKEDPKKANTELMCYQTQYAVIPNEVTDLMAERDQALDQQEAAVRAEARRKERAEANARNKAEWQRAQNNAEMEAEIEAAMSADVELKFRKAGMDTIDDDLLRDLARANKWSTVAGLSPIPEASQETPTTYPVSEASQEYGDENTPLDPLLFGAPTTRQSSGRSASVALKPAHDFTPRRQKRPLTYEDDEDVLFPSLKRRSTATDSPPFYPPYEMPAKLPVKSSRPLQGVVAFVDVYTEGDQVWAGGNFQSLLVKLGAKVVNQWTWNPVPGKPPTAQDVGITHVVFKDGNIPTLRKIKMSEGLVHCVSCTWLVACGEQMEHLPEDMYRYDTDIVPRGGQRRRKSMEPKSLANVNGTLVTPARNTNRPLNEPKTEPNNLRNRRTSGYWVRSPSDHGEDENADVMDWEPTDAPLSPLPQTPTPESVALFALNVTPGTASTTSAGDISPEPLMLRTCPPKPKAENRETGLVAARRKSLAHAPKIGSPLKKVWN

SEQ ID NO: 22463 - DNA, 1200 bp, Muscodor strobelii
  misc_feature: SGI cDNA ID NO. 567628
  misc_feature: Encodes the peptide sequence at SEQ ID NO 22464
atgtctggagtcccccctgtctacatcgtctccgctgcgagaacacccgtcgggtcgttccttggtactctatccagcctcagcgccacccaattgggtgcccatgccatcaaggccgccgtcgagcgcgtgccccagatcaagcccgaagatgtcgaggaggtcttctacggcaatgtattgtccgctaacctcggacaagcccccgctcgccagtgcgccatcggtgccggcctgtccaacacagttccggcaacgggcattaacaaggtctgcgcttcgggcatgaaggctatcatcattggtgctcagacaatcataaccggcaacgcctccatcgtcgtagctggcggaaccgagtccatgtccaacgccccgcattatctcccgacgctgcgcaatggagccaagttcggtgatcagtcgttagtcgacggcatgctcaaggatggtctgaccgatgcctacaagaaagagcacatgggtctcgctgccgagctctgcgccgatgaccacagcctgtcccgcgaggagcaggatgcttacgctatcgagacctaccagcgcgctcagaaggcgaccgccgacggtgtcttctccaaggaaattgtgcccgtcgaagtctctggcggccgtggcaagcccccagttcaaattacgaccgatgaggaggtgaagaacctgaacatagacaagctcaagaccgtgaaacccgtcttcaagcccaaggatggctccgtcaccgctgctaatgctgccccgctcaacgacggtgccgccgcagtggttctcatgtccgaggctaaggtcaaggagctcggtgtgacccctatcgccaagattctcggttggggcgacgccgcccgtgagcccgagcgcttcaccattgcccctgcgctcgccattcccaaggcgatcaagcacgccggtatcaccgagaaggacgtcgacttctacgagatcaacgaagccttctcggtcgttgccttggccaacatgaagctgcttggcctcaccagcgacaaggtcaacgtgttcggtggatccgtggctatcggccaccccttgggcgcctcgggtgcgcgtatcatcaccaccttgactaccgttttgcgcgagaagaagggcaagatcggagtggcgggtatttgcaacggtggtggtggtgccagtgccatcgtcatcgagagcctccaatga

SEQ ID NO: 22464 - protein, 399 aa, Muscodor strobelii
  misc_feature: SGI Peptide ID NO. 567628
  misc_feature (275)..(397): Pfam Id: PF02803 Pfam Desc: Thiolase, C-terminal domain
  misc_feature (4)..(268): Pfam Id: PF00108 Pfam Desc: Thiolase, N-terminal domain
  misc_feature (1)..(399): NCBI GI: 261355200 Blast Desc: acetyl-CoA acetyltransferase [Verticillium albo-atrum VaMs.102]
  misc_feature (1)..(399): NCBI GI: 116181524 Blast Desc: CHGG_01390 [Chaetomium globosum CBS 148.51] gi|88185687|gb|EAQ93155.1| CHGG_01390 [Chaetomium globosum CBS 148.51]
  misc_feature (1)..(399): NCBI GI: 171687235 Blast Desc: protein product [Podospora anserina] gi|170943579|emb|CAP69231.1| protein product [Podospora anserina]
  misc_feature (2)..(399): NCBI GI: 164427869 Blast Desc: acetyl-CoA acetyltransferase [Neurospora crassa OR74A] gi|157071916|gb|EAA36466.2| acetyl-CoA acetyltransferase [Neurospora crassa OR74A]
  misc_feature (2)..(399): NCBI GI: 145616020 Blast Desc: acetyl-coa acetyltransferase [Magnaporthe grisea 70-15] gi|145009800|gb|EDJ94456.1| acetyl-coa acetyltransferase [Magnaporthe grisea 70-15]
  misc_feature (1)..(399): NCBI GI: 154300455 Blast Desc: BC1G_11051 [Botryotinia fuckeliana B05.10] gi|150856576|gb|EDN31768.1| BC1G_11051 [Botryotinia fuckeliana B05.10]
  misc_feature (1)..(399): NCBI GI: 256735562 Blast Desc: [Nectria haematococca mpVI 77-13-4]
  misc_feature (2)..(399): NCBI GI: 38567134 Blast Desc: acetoacetyl-CoA thiolase [Neurospora crassa]
  misc_feature (1)..(399): NCBI GI: 156040271 Blast Desc: SS1G_12152 [Sclerotinia sclerotiorum 1980] gi|154696208|gb|EDN95946.1| SS1G_12152 [Sclerotinia sclerotiorum 1980]
  misc_feature (1)..(399): NCBI GI: 46134945 Blast Desc: FG09321.1 [Gibberella zeae PH-1]
  misc_feature (7)..(374): SWISSPROT Homolog: EC 2.3.1.9 Acetyl-CoA C-acetyltransferase
  misc_feature: Useful for fungicidal and/or biocontrol applications
MSGVPPVYIVSAARTPVGSFLGTLSSLSATQLGAHAIKAAVERVPQIKPEDVEEVFYGNVLSANLGQAPARQCAIGAGLSNTVPATGINKVCASGMKAIIIGAQTIITGNASIVVAGGTESMSNAPHYLPTLRNGAKFGDQSLVDGMLKDGLTDAYKKEHMGLAAELCADDHSLSREEQDAYAIETYQRAQKATADGVFSKEIVPVEVSGGRGKPPVQITTDEEVKNLNIDKLKTVKPVFKPKDGSVTAANAAPLNDGAAAVVLMSEAKVKELGVTPIAKILGWGDAAREPERFTIAPALAIPKAIKHAGITEKDVDFYEINEAFSVVALANMKLLGLTSDKVNVFGGSVAIGHPLGASGARIITTLTTVLREKKGKIGVAGICNGGGGASAIVIESLQ

SEQ ID NO: 22465 - DNA, 2158 bp, Muscodor strobelii
  misc_feature: SGI EST ID NO. CUFF.52803.0
  misc_feature: Variant of the nucleotide sequence at SEQ ID NO 22463
tagtaatccaagcttcctccggcatattccacacaaatacacattctcactaataataagcttcctcggagctgccatgagcagccctgcctctctacagtagtctagtagccaggtagtgtaatcaaataagaatgaataataaggctcagggggtgacgtgaagggcgggcagggatatcgggccttgggcctcgttttcgggttgaaaccaattcaatgggtcagtcaggctgtaaacagtccacagctcgacatcatcttatcttctctcccatcttctgatacaacctgttcctttctctccaacttcctcattgccattgccactctcctccgcttctcgtcacgtagccagtgcacacacaagttgaatcagtaccagaggcagtagtcacagtatccaacatgtctggagtcccccctgtctacatcgtctccgctgcgagaacacccgtcgggtcgttccttggtactctatccagcctcagcgccacccaattgggtgcccatgccatcaaggccgccgtcgagcgcgtgccccagatcaagcccgaagatgtcgaggaggtcttctacggcaatgtattgtccgctaacctcggacaagcccccgctcgccagtgcgccatcggtgccggcctgtccaacacagttccggcaacgggcattaacaaggtctgcgcttcgggcatgaaggctatcatcattggtgctcagacaatcataaccggcaacgcctccatcgtcgtagctggcggaaccgagtccatgtccaacgccccgcattatctcccgacgctgcgcaatggagccaagttcggtgatcagtcgttagtcgacggcatgctcaaggatggtctgaccgatgcctacaagaaagagcacatgggtctcgctgccgagctctgcgccgatgaccacagcctgtcccgcgaggagcaggatgcttacgctatcgagacctaccagcgcgctcagaaggcgaccgccgacggtgtcttctccaaggaaattgtgcccgtcgaagtctctggcggccgtggcaagcccccagttcaaattacgaccgatgaggaggtgaagaacctgaacatagacaagctcaagaccgtgaaacccgtcttcaagcccaaggatggctccgtcaccgctgctaatgctgccccgctcaacgacggtgccgccgcagtggttctcatgtccgaggctaaggtcaaggagctcggtgtgacccctatcgccaagattctcggttggggcgacgccgcccgtgagcccgagcgcttcaccattgcccctgcgctcgccattcccaaggcgatcaagcacgccggtatcaccgagaaggacgtcgacttctacgagatcaacgaagccttctcggtcgttgccttggccaacatgaagctgcttggcctcaccagcgacaaggtcaacgtgttcggtggatccgtggctatcggccaccccttgggcgcctcgggtgcgcgtatcatcaccaccttgactaccgttttgcgcgagaagaagggcaagatcggagtggcgggtatttgcaacggtggtggtggtgccagtgccatcgtcatcgagagcctccaatgaatagcaaatgcatcccgcttgtgatacaatctaggtaggtctcggtgggcatgaaacaaaaaggtgatatcacagaaacacacaaaacagaacatacagcacaacttcacatagaggctggcatgttgacgcatgacatgacaagccaaggtataggagacagaagcgcgatacctagagccggctagtctgatagacatatggagagaaggtagaacaaacccaaaagctagctagcatacaaatctaatacccgatcacagtagtcatggctcgctcaacgtttcggtgtgactctgcgtatcaacacaaatatctcatcaaggcttcttgttgtgtcaaatacatggacttatacgtggggccaccaaatgattgtcttgagagtcaaacaaatcgcgcaggtgtgtagattcgccactggttaaatcacctcttgctctgcgatattccaatagccttgggttgccgtagggaatcatacgaagctgcgaatttatcatgtgttcgggccactggacttcacaacgatcacatctgtcttccattt

SEQ ID NO: 22466 - DNA, 2970 bp, Muscodor strobelii
  misc_feature: SGI cDNA ID NO. 567629
  misc_feature: Encodes the peptide sequence at SEQ ID NO 22467
atggatgacctctacgatgagttcggcaatttcatcggggaagatgccggcgcatcagaggaggagtccgagcacggcgtcgacgccggcgcctacctcgacgacgacgacgacgagtaccccgaggcgcagccggagcaggagctgatggaggtcgacgacgaggggccgtcgaacgcggtggtgctgcacgaggacaagcagtactatccgacggcgcagcaggtctacggcgccgacgtcgagacgctcgtccaggaggaggacgcgcagccgctgacgcagcccatcgtcgcgcccgtcgaggtcaagacgttcgccgtcgaggaggccgacctgccgcccgtcttcttcgaccgcggcttcatggccgacctgatgaacttccccgcccagatccgcaacgtcgccctcgccggccacctgcaccacggcaagaccgccttcatggacatgctcgtcctcgagacccacgacatcgccggccgcctcgacaagcgcaccggcaagcgccgcgacaagcagctgcgctacaccgacacccacctcatggagcgcgaccgcggcctgtccgtcaaggccgcccccatgagcctcgtgctccagagcaccaagggcaagtcccacctcttcaacatcatcgacacccccggccacgtcaactttgccgacgaggtcgccgccgccctgcgcctggtcgacggcgtcgccctcgtcgtcgatgtcgtcgagggcgtccaggtcaacacggagcagatcatcaagcacgccgtgctcgaggacatccccatgaccctgatcatcaacaagttcgaccgcctgatcctggagctccggctgcccccgagcgacgcctacttcaaactgaagcatgtggtcgaagaggtcaacaccatcatcgagaacacccgcccgggcacgggtgctgcgaagcgcctgagcccggagaaggggaatgtcttgtttgcctgcagcgatatgggctggtccttcaccctgcagtccttcgccaagatgtatgccagtagcttccccagcgtcggtaccgaggagttcaacacgcacgagttcgcaaagcgtctctggggcgacatctacttcaaccctaggaagcgatcattcagtcggaaaccatttgagcagggcgcaaagcgagctttcatccactttgtcctcgaacccatctacaaagtattctcacataccatcagccagagcccggacgacctcaagcccatattggcagacctaggcatacatctcaagccctcgcaatacagaatggacgccaaagttctacttaaactcgtctgcgagcagttctttggcccctcgactggtttcgttgatatgatcgtccaacacattccctcccccgtggaagcagccgagcacaaactggagcggtattacacgggccccctcgacacgaaagcggcagaatctatgaagaagtgtgaccaagatgggccattagtagttcatgtcacaaaactcttcaattcctctgatgccaagagcttctactcgttcggtcgagtcctgagtggcatagcccgccctggtatgcaagtccgggttttgggagagggatactctattgatgacgaggaagacatggccatggcaactatcagcagcgtctatattaccgagacaagatacaacatagcgaccgatggagtcccagcaggcaattgggtattgttaagcggcgttgacaactcaatcgtcaagtctgccaccatcgtcccaccccggctcgaggacgacgaagacgcatacatatttaaacccgtttcgcacttcacggagtctgtgttcaaagtggctgttgagccaattaacccctccgaactgcccaaaatgcttgacggcttgaggaagattaataagagctaccccttgatcactaccaaggttgaggagtcgggcgagcatatcattctaggcactggcgaactctacatggactgcgttctccacgaccttcggcggctgtatgccgacatggaaatcaaagtgtccgatcctgtgacgcgcttctgcgaaaccgtggacgagatgtctgcgacgaaatgctacgccgaaacaccaaacaagagaaacaagatcacgatgatagccgagcctctggatgacggcatcgccgaggatatcgagaacggccgcgtcaacatgcgagacggcgcccggaaggtgggcaagttcttccaggacaaatacggctgggatttgctggccgcccggagtatctgggcttttggccctgaggaaatggggccaaatattttacaagatgatacactggccgaagtggataagacacttcttagaagtgtgcgcgagacaattcgacaaggtttcagttgggccacccgcgagggtcctttatgtgaagaacccattcgtaataccaaatttcgcatcacggacgccaccttggcgcaggaggctatcttcagaggtggtggccagattataccgaccgctcgtcgcacatgctacagttccttccttatggcatcccctcgactcatggagcctctctattcgtgctccatgattggccggcaagactcggtgcctatgctgtacaacgtgctccagcggcggcggggccacgtgttgtcggatggcccgatcgcgggcacgccgctctaccgtgtgcaaggactcataccggtgatcgattctttcggcttcgagacagatctcaggatccagacagagggccaggccatggtcagtttggtcttcgagaaatggcagaaggtaccgggtgacccgctcgatagggatctcaagttgcgacccctggaagcagccgatgcgcaggctactgcgagggatttcgtgctcaagaccagacggcggaagggattgagtgaagatgttagcgtcgccaagtttctggagcctgacttctatcaggaattgacggaaagtgggatcctcggtggaccttga

SEQ ID NO: 22467 - protein, 989 aa, Muscodor strobelii
  misc_feature: SGI Peptide ID NO. 567629
  misc_feature (507)..(584): Pfam Id: PF03144 Pfam Desc: Elongation factor Tu domain 2
  misc_feature (845)..(934): Pfam Id: PF00679 Pfam Desc: Elongation factor G C-terminus
  misc_feature (723)..(843): Pfam Id: PF03764 Pfam Desc: Elongation factor G, domain IV
  misc_feature (131)..(458): Pfam Id: PF00009 Pfam Desc: Elongation factor Tu GTP binding domain
  misc_feature (131)..(306): Pfam Id: PF00009 Pfam Desc: Elongation factor Tu GTP binding domain
  misc_feature (2)..(987): NCBI GI: 38567133 Blast Desc: ribosomal elongation factor EF-2 [Neurospora crassa]
  misc_feature (2)..(987): NCBI GI: 164427867 Blast Desc: 116 kDa U5 small nuclear ribonucleoprotein component [Neurospora crassa OR74A] gi|157071915|gb|EAA36467.2| 116 kDa U5 small nuclear ribonucleoprotein component [Neurospora crassa
  misc_feature (1)..(987): NCBI GI: 256734848 Blast Desc: [Nectria haematococca mpVI 77-13-4]
  misc_feature (1)..(987): NCBI GI: 46134943 Blast Desc: FG09320.1 [Gibberella zeae PH-1]
  misc_feature (2)..(987): NCBI GI: 171687233 Blast Desc: protein product [Podospora anserina] gi|170943578|emb|CAP69230.1| protein product [Podospora anserina]
  misc_feature (1)..(986): NCBI GI: 261355199 Blast Desc: 116 kDa U5 small nuclear ribonucleoprotein component [Verticillium albo-atrum VaMs.102]
  misc_feature (1)..(987): NCBI GI: 145616022 Blast Desc: MGG_13500 [Magnaporthe grisea 70-15] gi|145009801|gb|EDJ94457.1| MGG_13500 [Magnaporthe grisea 70-15]
  misc_feature (1)..(987): NCBI GI: 226281663 Blast Desc: 116 kDa U5 small nuclear ribonucleoprotein component [Paracoccidioides brasiliensis Pb01]
  misc_feature (1)..(987): NCBI GI: 225679495 Blast Desc: elongation factor 2 [Paracoccidioides brasiliensis Pb03]
  misc_feature (1)..(987): NCBI GI: 261201726 Blast Desc: U5 small nuclear ribonucleoprotein component [Ajellomyces dermatitidis SLH14081] gi|239590174|gb|EEQ72755.1| U5 small nuclear ribonucleoprotein component [Ajellomyces U5
MDDLYDEFGNFIGEDAGASEEESEHGVDAGAYLDDDDDEYPEAQPEQELMEVDDEGPSNAVVLHEDKQYYPTAQQVYGADVETLVQEEDAQPLTQPIVAPVEVKTFAVEEADLPPVFFDRGFMADLMNFPAQIRNVALAGHLHHGKTAFMDMLVLETHDIAGRLDKRTGKRRDKQLRYTDTHLMERDRGLSVKAAPMSLVLQSTKGKSHLFNIIDTPGHVNFADEVAAALRLVDGVALVVDVVEGVQVNTEQIIKHAVLEDIPMTLIINKFDRLILELRLPPSDAYFKLKHVVEEVNTIIENTRPGTGAAKRLSPEKGNVLFACSDMGWSFTLQSFAKMYASSFPSVGTEEFNTHEFAKRLWGDIYFNPRKRSFSRKPFEQGAKRAFIHFVLEPIYKVFSHTISQSPDDLKPILADLGIHLKPSQYRMDAKVLLKLVCEQFFGPSTGFVDMIVQHIPSPVEAAEHKLERYYTGPLDTKAAESMKKCDQDGPLVVHVTKLFNSSDAKSFYSFGRVLSGIARPGMQVRVLGEGYSIDDEEDMAMATISSVYITETRYNIATDGVPAGNWVLLSGVDNSIVKSATIVPPRLEDDEDAYIFKPVSHFTESVFKVAVEPINPSELPKMLDGLRKINKSYPLITTKVEESGEHIILGTGELYMDCVLHDLRRLYADMEIKVSDPVTRFCETVDEMSATKCYAETPNKRNKITMIAEPLDDGIAEDIENGRVNMRDGARKVGKFFQDKYGWDLLAARSIWAFGPEEMGPNILQDDTLAEVDKTLLRSVRETIRQGFSWATREGPLCEEPIRNTKFRITDATLAQEAIFRGGGQIIPTARRTCYSSFLMASPRLMEPLYSCSMIGRQDSVPMLYNVLQRRRGHVLSDGPIAGTPLYRVQGLIPVIDSFGFETDLRIQTEGQAMVSLVFEKWQKVPGDPLDRDLKLRPLEAADAQATARDFVLKTRRRKGLSEDVSVAKFLEPDFYQELTESGILGGP

SEQ ID NO: 22468 - DNA, 6207 bp, Muscodor strobelii
  misc_feature: SGI EST ID NO. CUFF.52977.1
  misc_feature: Variant of the nucleotide sequence at SEQ ID NO 22466
tggcgcgtctgtgagtgaacgagaggtaggtacctgcagctatacaattttctggaggttggagcgagctgatgagcatcgccgcgaagcgcaaactgcctccctctcgaccacgacgcccgaagcctgctagacgccatggatgacctctacgatgagttcggcaatttcatcggggaagatgccggcgcatcagaggaggagtccgagcacggcgtcgacgccggcgcctacctcgacgacgacgacgacgagtaccccgaggcgcagccggagcaggagctgatggaggtcgacgacgaggggccgtcgaacgcggtggtgctgcacgaggacaagcagtactatccgacggcgcagcaggtctacggcgccgacgtcgagacgctcgtccaggaggaggacgcgcagccgctgacgcagcccatcgtcgcgcccgtcgaggtcaagacgttcgccgtcgaggaggccgacctgccgcccgtcttcttcgaccgcggcttcatggccgacctgatgaacttccccgcccagatccgcaacgtcgccctcgccggccacctgcaccacggcaagaccgccttcatggacatgctcgtcctcgagacccacgacatcgccggccgcctcgacaagcgcaccggcaagcgccgcgacaagcagctgcgctacaccgacacccacctcatggagcgcgaccgcggcctgtccgtcaaggccgcccccatgagcctcgtgctccagagcaccaagggcaagtcccacctcttcaacatcatcgacacccccggccacgtcaactttgccgacgaggtcgccgccgccctgcgcctggtcgacggcgtcgccctcgtcgtcgatgtcgtcgagggcgtccaggtcaacacggagcagatcatcaagcacgccgtgctcgaggacatccccatgaccctgatcatcaacaagttcgaccgcctgatcctggagctccggctgcccccgagcgacgcctacttcaaactgaagcatgtggtcgaagaggtcaacaccatcatcgagaacacccgcccgggcacgggtgctgcgaagcgcctgagcccggagaaggggaatgtcttgtttgcctgcagcgatatgggctggtccttcaccctgcagtccttcgccaagatgtatgccagtagcttccccagcgtcggtaccgaggagttcaacacgcacgagttcgcaaagcgtctctggggcgacatctacttcaaccctaggaagcgatcattcagtcggaaaccatttgagcagggcgcaaagcgagctttcatccactttgtcctcgaacccatctacaaagtattctcacataccatcagccagagcccggacgacctcaagcccatattggcagacctaggcatacatctcaagccctcgcaatacagaatggacgccaaagttctacttaaactcgtctgcgagcagttctttggcccctcgactggtttcgttgatatgatcgtccaacacattccctcccccgtggaagcagccgagcacaaactggagcggtattacacgggccccctcgacacgaaagcggcagaatctatgaagaagtgtgaccaagatgggccattagtagttcatgtcacaaaactcttcaattcctctgatgccaagagcttctactcgttcggtcgagtcctgagtggcatagcccgccctggtatgcaagtccgggttttgggagagggatactctattgatgacgaggaagacatggccatggcaactatcagcagcgtctatattaccgagacaagatacaacatagcgaccgatggagtcccagcaggcaattgggtattgttaagcggcgttgacaactcaatcgtcaagtctgccaccatcgtcccaccccggctcgaggacgacgaagacgcatacatatttaaacccgtttcgcacttcacggagtctgtgttcaaagtggctgttgagccaattaacccctccgaactgcccaaaatgcttgacggcttgaggaagattaataagagctaccccttgatcactaccaaggttgaggagtcgggcgagcatatcattctaggcactggcgaactctacatggactgcgttctccacgaccttcggcggctgtatgccgacatggaaatcaaagtgtccgatcctgtgacgcgcttctgcgaaaccgtggacgagatgtctgcgacgaaatgctacgccgaaacaccaaacaagagaaacaagatcacgatgatagccgagcctctggatgacggcatcgccgaggatatcgagaacggccgcgtcaacatgcgagacggcgcccggaaggtgggcaagttcttccaggacaaatacggctgggatttgctggccgcccggagtatctgggcttttggccctgaggaaatggggccaaatattttacaagatgatacactggccgaagtggataagacacttcttagaagtgtgcgcgagacaattcgacaaggtttcagttgggccacccgcgagggtcctttatgtgaagaacccattcgtaataccaaatttcgcatcacggacgccaccttggcgcaggaggctatcttcagaggtggtggccagattataccgaccgctcgtcgcacatgctacagttccttccttatggcatcccctcgactcatggagcctctctattcgtgctccatgattggccggcaagactcggtgcctatgctgtacaacgtgctccagcggcggcggggccacgtgttgtcggatggcccgatcgcgggcacgccgctctaccgtgtgcaaggactcataccggtgatcgattctttcggcttcgagacagatctcaggatccagacagagggccaggccatggtcagtttggtcttcgagaaatggcagaaggtaccgggtgacccgctcgatagggatctcaagttgcgacccctggaagcagccgatgcgcaggctactgcgagggatttcgtgctcaagaccagacggcggaagggattgagtgaagatgttagcgtcgccaagtttctggagcctgacttctatcaggaattgacggaaagtgggatcctcggtggaccttgaaaatgctagtagctcaaaaggcgaaagcgaggacgtgaggctaaatacccaatggagtctacgtcttcgtattcccacgaatcaattcgggacaagactcctgattcagtagaggcggcgagtcccgatactcattatgagggtaaaatcaagacgaggctggccctacacataggcataattacctacaacattaccttttaggtggtgggcccctcttcgcggtcagatccgaagtcaaggatcgatcgtagataagatttaacgatatgcacatgaagggattacgtgtaagctagcgggtgtatactatgactgctcacaacccgattatcagcatggttccgaaagaatgccgggagacgtgggttaagcaatcagaacacaaacaaatccaagaaccggtctggatgaaccttacacttggtgtcaaactattcttataatgctgtctataaaatatgcacggttgatatgagttggtgggtgccaacctttactgccggattattgattgcggatttgtcggtctaaattaaacgaatttgctagaccggaggcctggtgggagagccatctgcatgcgtaaaccgcgctggagtgtgataaattgatcataacatagatcaatcgggttggtgcccttcgaaagccctccgacgccactgagcatggtatacaaatatacagagccttgcgtaatactacgacttctactatgaactttcgtcttccagccttcggttattatttcactcacgttccatctccgacgatagcgtctctggaagaaggcaaacaacagtaatgcgagatcaatgtggaagtacctactatacactatgcatagaagacgacaatactacccaaccccgcgattcgaccctttcggactgggctgcgagttcctggcaagtttgtaattaagaaacggcaactaccgatctgcaaagagattgctcgagtctcgaaggaaagatggtatagagcgcggagaaaggtcgcccgatgcctggtgccgaccgaccggcggctggggcaagacgggcatgcggctcggcttgcgacgctatgatggacgatgggttgtctgacatgtgattgacgatgtaggtgtgtctttattggggcatgtgtaaggagaatgctgaggctgatgtggtgagcttgggggccgcagacaacgacaacgatgggtaaagggtcaatcacgtccagttgattacgcaaaattagaaagaaatcgaagtgaacactgctaaatgaggcatagaactgtgatatgatccaggaacatgtgaatcctagtatttaaaaaattacattgtatcggttgtaaggatgatgaaatgtctgatcgcatccctagactgtgcaccaaacacgaggttacacgtaattctatcaggcctgcttcgtagcttctttacttcacaaataacagtagttgtcttgttcaaaccaataggtgaaaaaaatgtgttgcagcaatgactttgggttttgtgattatgctgattattctactggggcaggttcgcgatagaaacgccgcaatgcaatgaatgacaactaaaattcataatgtgttaacagtatgctctcagggcggctggtttgatttgggcaagagcaaggtgcaaaagggtatgacctatagtaattctagcttatgcaatcatttactcagtgaaggcgaagagctggcttggaaagacacttccaacaacgttgagacacgcattgtaatgattgcaagattgacatgactgggaatagatggttggaaacaaatagcgaatcatgagaatgataaacacaaaggacacacgacgcgcggtccgaaagatggatagattggacaaataatgatcgatgcatgtaactattcagctcttgcgagcacaagtccggttgccagtactaagagagggcttggtaacaatgatcagttatatgacaccagtcctgagcataacatgcaggaacccgcttggtgggggttacgtgtacggtacttcatcctatttacttttaagcaggttcgggggagccagcggattcgttctaaactggtttaaatgccgatactccgatcaattatcatggttgttttgtcgaccgtcgatcataagatgatcttattcaagttcccttgcttttcatgaaagtgaacaaggctacccattcggccatctcgtatacgaacagtcagcgagtttgattacgttcggcttgcaatagcacgagtgtgcgccgtacgcgtaaaccaccactttgacagaagtcgaatagcatggttgttaaaatcccacccctaatatcggtgtgtgtcgcccttgcatgggtaattatgagtggagagatgtcactatgccctaagaacatttcaagtcttcctgtgtgccgcaatggtaccacgacgagcgacggtaatatgtagtagacagtcggtgagaacccatgggttgaaacccttgtcatgtcaaggagttcgtgctgctcatttaagtttctgttaagattgaagcagagagtctaatgggatgggcctcatgacatctcttgatttagagatctatgatcaatctaagtgtaagtgagcagtggggatcgtgcagatgcctggttgtgcgtctcgcaacaagcgactccaagattcatatcagagcgtgtggcaatggaacataacggggcacgcggggaggatacactcctactcagatgcaagtctcgagcatcttatcgagaacgcccctcagagtatcgttttctagggcagcggcgactctttccttatcagccaattgtttattgacctgctcgtcctggctgtgagttccctccttgatcataacgtcgacacgatagttgggtggcagtgcccgttcaagacgaaccctgatgcccaggccgatgacggtggccagggagcagtgtgttatggtgggcgtgatcttgacaagcacttgtgttaaggcattgggatccgactctgctgacggcgatggagtgatgtgaatgtcaggtaaattcactacggcgagctggcccaacgagagcgggtgctctgggtcagaaattgtcgaaattagatct

SEQ ID NO: 22469 - DNA, 2997 bp, Muscodor strobelii
  misc_feature: SGI cDNA ID NO. 567630
  misc_feature: Reduced expression when VOC is produced
  misc_feature: Encodes the peptide sequence at SEQ ID NO 22470
atggatgacctctacgatgagtatgtgctgctacgtgacgacgacaggttcggcaatttcatcggggaagatgccggcgcatcagaggaggagtccgagcacggcgtcgacgccggcgcctacctcgacgacgacgacgacgagtaccccgaggcgcagccggagcaggagctgatggaggtcgacgacgaggggccgtcgaacgcggtggtgctgcacgaggacaagcagtactatccgacggcgcagcaggtctacggcgccgacgtcgagacgctcgtccaggaggaggacgcgcagccgctgacgcagcccatcgtcgcgcccgtcgaggtcaagacgttcgccgtcgaggaggccgacctgccgcccgtcttcttcgaccgcggcttcatggccgacctgatgaacttccccgcccagatccgcaacgtcgccctcgccggccacctgcaccacggcaagaccgccttcatggacatgctcgtcctcgagacccacgacatcgccggccgcctcgacaagcgcaccggcaagcgccgcgacaagcagctgcgctacaccgacacccacctcatggagcgcgaccgcggcctgtccgtcaaggccgcccccatgagcctcgtgctccagagcaccaagggcaagtcccacctcttcaacatcatcgacacccccggccacgtcaactttgccgacgaggtcgccgccgccctgcgcctggtcgacggcgtcgccctcgtcgtcgatgtcgtcgagggcgtccaggtcaacacggagcagatcatcaagcacgccgtgctcgaggacatccccatgaccctgatcatcaacaagttcgaccgcctgatcctggagctccggctgcccccgagcgacgcctacttcaaactgaagcatgtggtcgaagaggtcaacaccatcatcgagaacacccgcccgggcacgggtgctgcgaagcgcctgagcccggagaaggggaatgtcttgtttgcctgcagcgatatgggctggtccttcaccctgcagtccttcgccaagatgtatgccagtagcttccccagcgtcggtaccgaggagttcaacacgcacgagttcgcaaagcgtctctggggcgacatctacttcaaccctaggaagcgatcattcagtcggaaaccatttgagcagggcgcaaagcgagctttcatccactttgtcctcgaacccatctacaaagtattctcacataccatcagccagagcccggacgacctcaagcccatattggcagacctaggcatacatctcaagccctcgcaatacagaatggacgccaaagttctacttaaactcgtctgcgagcagttctttggcccctcgactggtttcgttgatatgatcgtccaacacattccctcccccgtggaagcagccgagcacaaactggagcggtattacacgggccccctcgacacgaaagcggcagaatctatgaagaagtgtgaccaagatgggccattagtagttcatgtcacaaaactcttcaattcctctgatgccaagagcttctactcgttcggtcgagtcctgagtggcatagcccgccctggtatgcaagtccgggttttgggagagggatactctattgatgacgaggaagacatggccatggcaactatcagcagcgtctatattaccgagacaagatacaacatagcgaccgatggagtcccagcaggcaattgggtattgttaagcggcgttgacaactcaatcgtcaagtctgccaccatcgtcccaccccggctcgaggacgacgaagacgcatacatatttaaacccgtttcgcacttcacggagtctgtgttcaaagtggctgttgagccaattaacccctccgaactgcccaaaatgcttgacggcttgaggaagattaataagagctaccccttgatcactaccaaggttgaggagtcgggcgagcatatcattctaggcactggcgaactctacatggactgcgttctccacgaccttcggcggctgtatgccgacatggaaatcaaagtgtccgatcctgtgacgcgcttctgcgaaaccgtggacgagatgtctgcgacgaaatgctacgccgaaacaccaaacaagagaaacaagatcacgatgatagccgagcctctggatgacggcatcgccgaggatatcgagaacggccgcgtcaacatgcgagacggcgcccggaaggtgggcaagttcttccaggacaaatacggctgggatttgctggccgcccggagtatctgggcttttggccctgaggaaatggggccaaatattttacaagatgatacactggccgaagtggataagacacttcttagaagtgtgcgcgagacaattcgacaaggtttcagttgggccacccgcgagggtcctttatgtgaagaacccattcgtaataccaaatttcgcatcacggacgccaccttggcgcaggaggctatcttcagaggtggtggccagattataccgaccgctcgtcgcacatgctacagttccttccttatggcatcccctcgactcatggagcctctctattcgtgctccatgattggccggcaagactcggtgcctatgctgtacaacgtgctccagcggcggcggggccacgtgttgtcggatggcccgatcgcgggcacgccgctctaccgtgtgcaaggactcataccggtgatcgattctttcggcttcgagacagatctcaggatccagacagagggccaggccatggtcagtttggtcttcgagaaatggcagaaggtaccgggtgacccgctcgatagggatctcaagttgcgacccctggaagcagccgatgcgcaggctactgcgagggatttcgtgctcaagaccagacggcggaagggattgagtgaagatgttagcgtcgccaagtttctggagcctgacttctatcaggaattgacggaaagtgggatcctcggtggaccttga

SEQ ID NO: 22470 - protein, 998 aa, Muscodor strobelii
  misc_feature: SGI Peptide ID NO. 567630
  misc_feature (516)..(593): Pfam Id: PF03144 Pfam Desc: Elongation factor Tu domain 2
  misc_feature (854)..(943): Pfam Id: PF00679 Pfam Desc: Elongation factor G C-terminus
  misc_feature (732)..(852): Pfam Id: PF03764 Pfam Desc: Elongation factor G, domain IV
  misc_feature (140)..(467): Pfam Id: PF00009 Pfam Desc: Elongation factor Tu GTP binding domain
  misc_feature (140)..(315): Pfam Id: PF00009 Pfam Desc: Elongation factor Tu GTP binding domain
  misc_feature (2)..(996): NCBI GI: 38567133 Blast Desc: ribosomal elongation factor EF-2 [Neurospora crassa]
  misc_feature (2)..(996): NCBI GI: 164427867 Blast Desc: 116 kDa U5 small nuclear ribonucleoprotein component [Neurospora crassa OR74A] gi|157071915|gb|EAA36467.2| 116 kDa U5 small nuclear ribonucleoprotein component [Neurospora crassa
  misc_feature (1)..(996): NCBI GI: 256734848 Blast Desc: [Nectria haematococca mpVI 77-13-4]
  misc_feature (1)..(996): NCBI GI: 46134943 Blast Desc: FG09320.1 [Gibberella zeae PH-1]
  misc_feature (2)..(996): NCBI GI: 171687233 Blast Desc: protein product [Podospora anserina] gi|170943578|emb|CAP69230.1| protein product [Podospora anserina]
  misc_feature (1)..(995): NCBI GI: 261355199 Blast Desc: 116 kDa U5 small nuclear ribonucleoprotein component [Verticillium albo-atrum VaMs.102]
  misc_feature (1)..(996): NCBI GI: 145616022 Blast Desc: MGG_13500 [Magnaporthe grisea 70-15] gi|145009801|gb|EDJ94457.1| MGG_13500 [Magnaporthe grisea 70-15]
  misc_feature (1)..(996): NCBI GI: 226281663 Blast Desc: 116 kDa U5 small nuclear ribonucleoprotein component [Paracoccidioides brasiliensis Pb01]
  misc_feature (1)..(996): NCBI GI: 225679495 Blast Desc: elongation factor 2 [Paracoccidioides brasiliensis Pb03]
  misc_feature (1)..(996): NCBI GI: 261201726 Blast Desc: U5 small nuclear ribonucleoprotein component [Ajellomyces dermatitidis SLH14081] gi|239590174|gb|EEQ72755.1| U5 small nuclear ribonucleoprotein component [Ajellomyces U5
  misc_feature: Useful for introducing or modulating the production of volatile compounds
MDDLYDEYVLLRDDDRFGNFIGEDAGASEEESEHGVDAGAYLDDDDDEYPEAQPEQELMEVDDEGPSNAVVLHEDKQYYPTAQQVYGADVETLVQEEDAQPLTQPIVAPVEVKTFAVEEADLPPVFFDRGFMADLMNFPAQIRNVALAGHLHHGKTAFMDMLVLETHDIAGRLDKRTGKRRDKQLRYTDTHLMERDRGLSVKAAPMSLVLQSTKGKSHLFNIIDTPGHVNFADEVAAALRLVDGVALVVDVVEGVQVNTEQIIKHAVLEDIPMTLIINKFDRLILELRLPPSDAYFKLKHVVEEVNTIIENTRPGTGAAKRLSPEKGNVLFACSDMGWSFTLQSFAKMYASSFPSVGTEEFNTHEFAKRLWGDIYFNPRKRSFSRKPFEQGAKRAFIHFVLEPIYKVFSHTISQSPDDLKPILADLGIHLKPSQYRMDAKVLLKLVCEQFFGPSTGFVDMIVQHIPSPVEAAEHKLERYYTGPLDTKAAESMKKCDQDGPLVVHVTKLFNSSDAKSFYSFGRVLSGIARPGMQVRVLGEGYSIDDEEDMAMATISSVYITETRYNIATDGVPAGNWVLLSGVDNSIVKSATIVPPRLEDDEDAYIFKPVSHFTESVFKVAVEPINPSELPKMLDGLRKINKSYPLITTKVEESGEHIILGTGELYMDCVLHDLRRLYADMEIKVSDPVTRFCETVDEMSATKCYAETPNKRNKITMIAEPLDDGIAEDIENGRVNMRDGARKVGKFFQDKYGWDLLAARSIWAFGPEEMGPNILQDDTLAEVDKTLLRSVRETIRQGFSWATREGPLCEEPIRNTKFRITDATLAQEAIFRGGGQIIPTARRTCYSSFLMASPRLMEPLYSCSMIGRQDSVPMLYNVLQRRRGHVLSDGPIAGTPLYRVQGLIPVIDSFGFETDLRIQTEGQAMVSLVFEKWQKVPGDPLDRDLKLRPLEAADAQATARDFVLKTRRRKGLSEDVSVAKFLEPDFYQELTESGILGGP

SEQ ID NO: 22471 - DNA, 6207 bp, Muscodor strobelii; identical to SEQ ID NO: 22468
  misc_feature: SGI EST ID NO. CUFF.52977.1
  misc_feature: Variant of the nucleotide sequence at SEQ ID NO 22469

SEQ ID NO: 22472 - DNA, 594 bp, Muscodor strobelii
  misc_feature: SGI cDNA ID NO. 567631
  misc_feature: Encodes the peptide sequence at SEQ ID NO 22473
atgaataaggacaacgccaaccccaccgttctcaatatctcggaattacccacgaggcaaaacaagaggaatgaaaagcagctcgccaagatcaatgctgaattcagtcatcttatcaaacctatcgattatctcaaggatcttcgttggtcgtctgatgatgccgcaagcgatgacgaattcaccattgagcccatcgacgaacaggagatctacgatctaatttcgacaatttctgacccagagcacccgctctcgttgggccagctcgccgtagtgaatttacctgacattcacatcactccatcgccgtcagcagagtcggatcccaatgccttaacacaagtgcttgtcaagatcacgcccaccataacacactgctccctggccaccgtcatcggcctgggcatcagggttcgtcttgaacgggcactgccacccaactatcgtgtcgacgttatgatcaaggagggaactcacagccaggacgagcaggtcaataaacaattggctgataaggaaagagtcgccgctgccctagaaaacgatactctgaggggcgttctcgataagatgctcgagacttgcatctga

SEQ ID NO: 22473 - protein, 197 aa, Muscodor strobelii
  misc_feature: SGI Peptide ID NO. 567631
  misc_feature (67)..(155): Pfam Id: PF01883 Pfam Desc: Domain of function DUF59
  misc_feature (114)..(155): Pfam Id: PF01883 Pfam Desc: Domain of function DUF59
  misc_feature (4)..(196): NCBI GI: 46134941 Blast Desc: FG09319.1 [Gibberella zeae PH-1]
  misc_feature (2)..(196): NCBI GI: 169623843 Blast Desc: SNOG_15165 [Phaeosphaeria nodorum SN15] gi|160705056|gb|EAT77390.2| SNOG_15165 [Phaeosphaeria nodorum SN15]
  misc_feature (5)..(197): NCBI GI: 67521900 Blast Desc: AN1407.2 [Aspergillus nidulans FGSC A4] gi|40745381|gb|EAA64537.1| AN1407.2 [Aspergillus nidulans FGSC A4] gi|259486715|tpe|CBF84795.1| TPA: cytoplasmic protein for A4]
  misc_feature (1)..(196): NCBI GI: 189204059 Blast Desc: PTRG_08033 [Pyrenophora tritici-repentis Pt-1C-BFP] gi|187985464|gb|EDU50952.1| PTRG_08033 [Pyrenophora tritici-repentis Pt-1C-BFP]
  misc_feature (4)..(197): NCBI GI: 85119738 Blast Desc: NCU02573 [Neurospora crassa OR74A] gi|28927516|gb|EAA36468.1| conserved [Neurospora crassa OR74A] gi|38567132|emb|CAE76427.1| conserved [Neurospora crassa]
  misc_feature (5)..(196): NCBI GI: 212541418 Blast Desc: cytoplasmic protein required for cell viability, [Penicillium marneffei ATCC 18224] gi|210068163|gb|EEA22255.1| cytoplasmic protein required for cell viability, [Penicillium
  misc_feature (5)..(196): NCBI GI: 115490937 Blast Desc: protein FAM96B [Aspergillus terreus NIH2624] gi|114196956|gb|EAU38656.1| protein FAM96B [Aspergillus terreus NIH2624]
  misc_feature (4)..(196): NCBI GI: 116181520 Blast Desc: CHGG_01388 [Chaetomium globosum CBS 148.51] gi|88185685|gb|EAQ93153.1| CHGG_01388 [Chaetomium globosum CBS 148.51]
  misc_feature (1)..(196): NCBI GI: 261201724 Blast Desc: FAM96B [Ajellomyces dermatitidis SLH14081] gi|239590173|gb|EEQ72754.1| FAM96B [Ajellomyces dermatitidis SLH14081] gi|239611888|gb|EEQ88875.1| FAM96B [Ajellomyces ER-3]
  misc_feature (5)..(196): NCBI GI: 119484080 Blast Desc: cytoplasmic protein required for cell viability, [Neosartorya fischeri NRRL 181] gi|119410099|gb|EAW20046.1| cytoplasmic protein required for cell viability, [Neosartorya
MNKDNANPTVLNISELPTRQNKRNEKQLAKINAEFSHLIKPIDYLKDLRWSSDDAASDDEFTIEPIDEQEIYDLISTISDPEHPLSLGQLAVVNLPDIHITPSPSAESDPNALTQVLVKITPTITHCSLATVIGLGIRVRLERALPPNYRVDVMIKEGTHSQDEQVNKQLADKERVAAALENDTLRGVLDKMLETCI

SEQ ID NO: 22474 - DNA, 4612 bp, Muscodor strobelii
  misc_feature: SGI EST ID NO. CUFF.52978.3
  misc_feature: Variant of the nucleotide sequence at SEQ ID NO 22472
ccgaaagttgttagtgccccaggtattcaattggaagtactcagcgcaatcgattgccaagaaaccccgccatagcaggcaccgatccggcgttgtgacgagacgccatcatcccgaggtcagagttctttacaaattgatactcactaactgtcgttctacctcatctcagccgctaccaaggcacacaactcaggaagtagcctctactgaaacttgaaccgaagctttccgtattagttcttcatctgtcttgatccggaagggagcagtgcatcttcaaaatgaataaggacaacgccaaccccaccgttctcaatatctcggaattacccacgaggcaaaacaagaggaatgaaaagcagctcgccaagatcaatgctgaattcagtcatcttatcaaacctatcgattatctcaaggatcttcgttggtcgtctgatgatgccgcaagcgatgacgaattcaccattgagcccatcgacgaacaggagatctacgatctaatttcgacaatttctgacccagagcacccgctctcgttgggccagctcgccgtagtgaatttacctgacattcacatcactccatcgccgtcagcagagtcggatcccaatgccttaacacaagtgcttgtcaagatcacgcccaccataacacactgctccctggccaccgtcatcggcctgggcatcagggttcgtcttgaacgggcactgccacccaactatcgtgtcgacgttatgatcaaggagggaactcacagccaggacgagcaggtcaataaacaattggctgataaggaaagagtcgccgctgccctagaaaacgatactctgaggggcgttctcgataagatgctcgagacttgcatctgagtaggagtgtatcctccccgcgtgccccgttatgttccattgccacacgctctgatatgaatcttggagtcgcttgttgcgagacgcacaaccaggcatctgcacgatccccactgctcacttacacttagattgatcatagatctctaaatcaagagatgtcatgaggcccatcccattagactctctgcttcaatcttaacagaaacttaaatgagcagcacgaactccttgacatgacaagggtttcaacccatgggttctcaccgactgtctactacatattaccgtcgctcgtcgtggtaccattgcggcacacaggaagacttgaaatgttcttagggcatagtgacatctctccactcataattacccatgcaagggcgacacacaccgatattaggggtgggattttaacaaccatgctattcgacttctgtcaaagtggtggtttacgcgtacggcgcacactcgtgctattgcaagccgaacgtaatcaaactcgctgactgttcgtatacgagatggccgaatgggtagccttgttcactttcatgaaaagcaagggaacttgaataagatcatcttatgatcgacggtcgacaaaacaaccatgataattgatcggagtatcggcatttaaaccagtttagaacgaatccgctggctcccccgaacctgcttaaaagtaaataggatgaagtaccgtacacgtaacccccaccaagcgggttcctgcatgttatgctcaggactggtgtcatataactgatcattgttaccaagccctctcttagtactggcaaccggacttgtgctcgcaagagctgaatagttacatgcatcgatcattatttgtccaatctatccatctttcggaccgcgcgtcgtgtgtcctttgtgtttatcattctcatgattcgctatttgtttccaaccatctattcccagtcatgtcaatcttgcaatcattacaatgcgtgtctcaacgttgttggaagtgtctttccaagccagctcttcgccttcactgagtaaatgattgcataagctagaattactataggtcatacccttttgcaccttgctcttgcccaaatcaaaccagccgccctgagagcatactgttaacacattatgaattttagttgtcattcattgcattgcggcgtttctatcgcgaacctgccccagtagaataatcagcataatcacaaaacccaaagtcattgctgcaacacatttttttcacctattggtttgaacaagacaactactgttatttgtgaagtaaagaagctacgaagcaggcctgatagaattacgtgtaacctcgtgtttggtgcacagtctagggatgcgatcagacatttcatcatccttacaaccgatacaatgtaattttttaaatactaggattcacatgttcctggatcatatcacagttctatgcctcatttagcagtgttcacttcgatttctttctaattttgcgtaatcaactggacgtgattgaccctttacccatcgttgtcgttgtctgcggcccccaagctcaccacatcagcctcagcattctccttacacatgccccaataaagacacacctacatcgtcaatcacatgtcagacaacccatcgtccatcatagcgtcgcaagccgagccgcatgcccgtcttgccccagccgccggtcggtcggcaccaggcatcgggcgacctttctccgcgctctataccatctttccttcgagactcgagcaatctctttgcagatcggtagttgccgtttcttaattacaaacttgccaggaactcgcagcccagtccgaaagggtcgaatcgcggggttgggtagtattgtcgtcttctatgcatagtgtatagtaggtacttccacattgatctcgcattactgttgtttgccttcttccagagacgctatcgtcggagatggaacgtgagtgaaataataaccgaaggctggaagacgaaagttcatagtagaagtcgtagtattacgcaaggctctgtatatttgtataccatgctcagtggcgtcggagggctttcgaagggcaccaacccgattgatctatgttatgatcaatttatcacactccagcgcggtttacgcatgcagatggctctcccaccaggcctccggtctagcaaattcgtttaatttagaccgacaaatccgcaatcaataatccggcagtaaaggttggcacccaccaactcatatcaaccgtgcatattttatagacagcattataagaatagtttgacaccaagtgtaaggttcatccagaccggttcttggatttgtttgtgttctgattgcttaacccacgtctcccggcattctttcggaaccatgctgataatcgggttgtgagcagtcatagtatacacccgctagcttacacgtaatcccttcatgtgcatatcgttaaatcttatctacgatcgatccttgacttcggatctgaccgcgaagaggggcccaccacctaaaaggtaatgttgtaggtaattatgcctatgtgtagggccagcctcgtcttgattttaccctcataatgagtatcgggactcgccgcctctactgaatcaggagtcttgtcccgaattgattcgtgggaatacgaagacgtagactccattgggtatttagcctcacgtcctcgctttcgccttttgagctactagcattttcaaggtccaccgaggatcccactttccgtcaattcctgatagaagtcaggctccagaaacttggcgacgctaacatcttcactcaatcccttccgccgtctggtcttgagcacgaaatccctcgcagtagcctgcgcatcggctgcttccaggggtcgcaacttgagatccctatcgagcgggtcacccggtaccttctgccatttctcgaagaccaaactgaccatggcctggccctctgtctggatcctgagatctgtctcgaagccgaaagaatcgatcaccggtatgagtccttgcacacggtagagcggcgtgcccgcgatcgggccatccgacaacacgtggccccgccgccgctggagcacgttgtacagcataggcaccgagtcttgccggccaatcatggagcacgaatagagaggctccatgagtcgaggggatgccataaggaaggaactgtagcatgtgcgacgagcggtcggtataatctggccaccacctctgaagatagcctcctgcgccaaggtggcgtccgtgatgcgaaatttggtattacgaatggctgccacgtacgttagcttcagagacttcgacattcggtagtgaatacaatgggtttgtggggtagaatctcaaaataatgtttaaagttcggtaacatgcatgacttttccatgcagctttgcgcttctagagtgttgtgcatatgactagccgcgtgcagctacgctcgcccaaacgatggatggtttagccaatcgagaccaggagaaatgacaatggtggtaagagcgaacaggggaaacatctacagccctatggttcgtcacggcctgatgtcgcgacttactagccgcatgggcaggatgctgcggattgtagcacttacagggctaacaagggccgattcgaaagaggttgtacgactactgattccaggcgagcaggtatggcagagctgcttttgcgctgacttgtcgacaaaagtggtacccctgctcttgaaccta

SEQ ID NO: 22475 - DNA, 2706 bp, Muscodor strobelii
  misc_feature: SGI cDNA ID NO. 567632
  misc_feature: Encodes the peptide sequence at SEQ ID NO 22476
atggccaacgacccggcggcagcccgcaggctgctgccccagagcgcgctgtcgaaccagttcacctttgcgccgccgacgtaccagccccccagggagacacagaagaattatgtcttcgttgacgagcacaaccgccacaagcgcttgaaggtgatgagagcctgtgagggctgccggaggaggaaaatcaaatgcgatgctgcgacgacgaatacctggccatgttctgcctgtattcggctgaagctccattgcgtgcgaccgaacgcgcagtacgatggttcgcccgacgacacccagcagtacgagccgacggcggctgagttcgaggccggcgcagagagcttcaggcagatggccatgcagcagcagcagcagcaacagcagtccgcccagcatgccatggtcggccatcccaagtctgccatgtatagttcgccgcctgcttcttatcccgctcgccacgccgtgtatccgcacatgccctacggcgatgccaacgccatgtctcagcacatgccgtatccatcgcctgtcggggttctggatcagccgtatacgcctgccagcgtctttcccactccacctatgcagtccatggccgctccccattctgaaggctcacctgaatcttatgtcgaccactacggtcaacacgatctagcagatcttcttggccctcttaagctagacgagaggggcactgccccctacctcaacaacaaacaggctctggtgacaggtcaagaagaggagccggctgttgaggatggtgacgactttaaaaatatgctgccgcccgtcactgttggtccaggctcgaaaatccggataccaccggaacttatgccggaagaagacacgattttacaatactttgatctatactttactcatatacatccctatgtgcctgtactaaacaaaacacagctatatcatcaatggaataccaacagggaatctgtctcccctctattactagaagccatctttgctgtggccggacgactcgctgacgagccagcccaaggtcaacagtggattgctcttgcctcaaaacatgcggattctttcatggaaaagccacggttgagcacgctccaggccctcctgattatactcaaggcccgggaggctgttcctaaacgcggctattattatcgttcttggatgtctatagtacattgcattgccatggcccgggatctgggtctcgacgagcatgttgaaaaccataaagccggcaaaccgtgcaactcgacacctgcagattgcttaacgaagacccgtgtttggcagaccatattcatttgtgagacaatgattgcagctccgcagggccgcaatgatctgtcagtgggactcgagagcctgaacttctcggtggcacaacccatgccggggatcgatgagtttgaaaatcatatctcacgtgattttactttcttcgctaggattgtgcgggtcatctcaaaaatgaacacaatctactccagaatcaagaagaagaaggattggggtctcgaacctgagtttgtccaactcaatccgcagttgaggagctggttgaatgacctgccgcaagatatggcagtacaataccccatggatgggtctcccccttggttgccctcacattttgtgggcaacatgcattcctactatcacctggctacgattctcctccatcgaccacagcttaccttcttggaccctgttggcgaggatggaaattggagagcacatatgctgacctcttacggatccgccaaagctctttgtcgcctccaggaagctatgctgcaatcctatgggcttagcgggctacagtgcatgcagcgcggcatcagcttcacgatctatgctattctgtcatgtatcgttcttcatctcgttgctttgacttctcctgaccctgccatcaacacggactctcgtgactacttcacccgacatatgagaatcctcgagaagaccatgtcctcgtggccacttccggagatgctgaaacaaatcgatgccgttagggaagccttctctgctgacaccaggaagccgttcgtcctgaaggctagcttcccctatggtagtccgcatccttcaagtcattcaagcccgcctagagcgccaaacttcaagccaccgatgctgaggaccaattcgctggatcctaacatggatgcccaggctggagcccacccacacgtcagttaccaccccgtgacgcccgtttccattggttctggggacagcaagagtgactcgccttcgcttcagtccgcacagtccctttccatgctcgcagctggtcagagctcgcagcccccgctcgcccacggattacccatggtagatcagtcgtcatggaatccgtctcgaatatttgatcagtggaattccacttttggtacgccgcttccatcccaaacaccatcggtggctccacaggccagttctctaaatgtttcctcaggtgcccccgaagttcccacgacccaggatatggcgatcgcccaagcatccatacccgtggctccccccacgctgcctccacagcagtattcagcgccatctgtccagaattttgtcacgccggccatgtggcaggaatccgtggccagtgtttacgagtcaggaggactaaagcgtcattgggactacgaccatggttcctccattggcatgagcaaacgtcgctaa

SEQ ID NO: 22476 - protein, 901 aa, Muscodor strobelii
  misc_feature: SGI Peptide ID NO. 567632
  misc_feature (54)..(94): Pfam Id: PF00172 Pfam Desc: Fungal Zn(2)-Cys(6) binuclear cluster domain
  misc_feature (54)..(87): Pfam Id: PF00172 Pfam Desc: Fungal Zn(2)-Cys(6) binuclear cluster domain
  misc_feature (1)..(890): NCBI GI: 46134939 Blast Desc: FG09318.1 [Gibberella zeae PH-1]
  misc_feature (7)..(901): NCBI GI: 156040283 Blast Desc: SS1G_12158 [Sclerotinia sclerotiorum 1980] gi|154696214|gb|EDN95952.1| SS1G_12158 [Sclerotinia sclerotiorum 1980]
  misc_feature (1)..(890): NCBI GI: 38567130 Blast Desc: related to Cutinase transcription factor 1 alpha [Neurospora crassa]
  misc_feature (1)..(890): NCBI GI: 171687229 Blast Desc: protein product [Podospora anserina] gi|170943576|emb|CAP69228.1| protein product [Podospora anserina]
  misc_feature (3)..(890): NCBI GI: 256734849 Blast Desc: [Nectria haematococca mpVI 77-13-4]
  misc_feature (50)..(892): NCBI GI: 261355197 Blast Desc: conserved [Verticillium albo-atrum VaMs.102]
  misc_feature (1)..(890): NCBI GI: 85119751 Blast Desc: NCU02576 [Neurospora crassa OR74A] gi|28927519|gb|EAA36471.1| conserved [Neurospora crassa OR74A]
  misc_feature (1)..(890): NCBI GI: 116181518 Blast Desc: CHGG_01387 [Chaetomium globosum CBS 148.51] gi|88185684|gb|EAQ93152.1| CHGG_01387 [Chaetomium globosum CBS 148.51]
  misc_feature (21)..(901): NCBI GI: 255948518 Blast Desc: Pc22g10180 [Penicillium chrysogenum Wisconsin 54-1255] gi|211592043|emb|CAP98306.1| Pc22g10180 [Penicillium chrysogenum Wisconsin 54-1255]
  misc_feature (26)..(887): NCBI GI: 119484078 Blast Desc: C6 finger domain protein, [Neosartorya fischeri NRRL 181] gi|119410098|gb|EAW20045.1| C6 finger domain protein, [Neosartorya fischeri NRRL 181]
MANDPAAARRLLPQSALSNQFTFAPPTYQPPRETQKNYVFVDEHNRHKRLKVMRACEGCRRRKIKCDAATTNTWPCSACIRLKLHCVRPNAQYDGSPDDTQQYEPTAAEFEAGAESFRQMAMQQQQQQQQSAQHAMVGHPKSAMYSSPPASYPARHAVYPHMPYGDANAMSQHMPYPSPVGVLDQPYTPASVFPTPPMQSMAAPHSEGSPESYVDHYGQHDLADLLGPLKLDERGTAPYLNNKQALVTGQEEEPAVEDGDDFKNMLPPVTVGPGSKIRIPPELMPEEDTILQYFDLYFTHIHPYVPVLNKTQLYHQWNTNRESVSPLLLEAIFAVAGRLADEPAQGQQWIALASKHADSFMEKPRLSTLQALLIILKAREAVPKRGYYYRSWMSIVHCIAMARDLGLDEHVENHKAGKPCNSTPADCLTKTRVWQTIFICETMIAAPQGRNDLSVGLESLNFSVAQPMPGIDEFENHISRDFTFFARIVRVISKMNTIYSRIKKKKDWGLEPEFVQLNPQLRSWLNDLPQDMAVQYPMDGSPPWLPSHFVGNMHSYYHLATILLHRPQLTFLDPVGEDGNWRAHMLTSYGSAKALCRLQEAMLQSYGLSGLQCMQRGISFTIYAILSCIVLHLVALTSPDPAINTDSRDYFTRHMRILEKTMSSWPLPEMLKQIDAVREAFSADTRKPFVLKASFPYGSPHPSSHSSPPRAPNFKPPMLRTNSLDPNMDAQAGAHPHVSYHPVTPVSIGSGDSKSDSPSLQSAQSLSMLAAGQSSQPPLAHGLPMVDQSSWNPSRIFDQWNSTFGTPLPSQTPSVAPQASSLNVSSGAPEVPTTQDMAIAQASIPVAPPTLPPQQYSAPSVQNFVTPAMWQESVASVYESGGLKRHWDYDHGSSIGMSKRR

SEQ ID NO: 22477 - DNA, 4397 bp, Muscodor strobelii
  misc_feature: SGI EST ID NO. CUFF.52908.1
  misc_feature: Variant of the nucleotide sequence at SEQ ID NO 22475
cttgtaacaggctattgtgacgtgaggacgaattgtcccttcctgacaccgatggaggtaccgcaaccctgtgtcctgtcagcaagtcgctgctcagtgctcgcaaccttgcagccgcagcggcacacgggtagtctgcgagcatttggagacagccagctgcgagggcagcaccgcttgctgcgtgggcaaaaggctcgagctctggcagcactctggcacagcgatctgcctcccgtcagctacgtcaggtataggccaccctggcccgggcagacggcgagtatcgcgggcaaagacgtgggaacttgggactgcctgggactgcctgggactccctgggactggcgaggtacctcgagctagcggcggtggggatagcgagatgcggcgcccacacgcccacaccagacaccaccagctcgccaaccagcagctactaaaggtaccaggccagccccaagtaataaggatgtctcgtccccctcaccagtcgctgttccaaggccgggttcttcctggcgccgcttgaagcagattctggcccagagtcgcccgacgtgctctctcgcccattcgtcccgccccaggattaagcgccgttgccaatagcctctccattgtcccgcctgtggccgccgtgaattgtgtctcgcgttgtgcgttgagtgttgcgtgttgcgtgctgcattgcgagttgtgagtcgtgaatgtccgcacagaaagcacagaaggcagaaatccggatgttgccgccgccattgcgctgttctgctctgccctcccattgtctctgccctccggcctgcacgcagcagcaaggacgactgccacccggccggccacgcgacccgacgacctgcccggaccgccgccctcgagcttgcgtgcatgactacagcgcatagggttgcgacggaccgctgaggctgccagagtcgaaaagcgccccccaacaccatggccaacgacccggcggcagcccgcaggctgctgccccagagcgcgctgtcgaaccagttcacctttgcgccgccgacgtaccagccccccagggagacacagaagaattatgtcttcgttgacgagcacaaccgccacaagcgcttgaaggtgatgagagcctgtgagggctgccggaggaggaaaatcaaatgcgatgctgcgacgacgaatacctggccatgttctgcctgtattcggctgaagctccattgcgtgcgaccgaacgcgcagtacgatggttcgcccgacgacacccagcagtacgagccgacggcggctgagttcgaggccggcgcagagagcttcaggcagatggccatgcagcagcagcagcagcaacagcagtccgcccagcatgccatggtcggccatcccaagtctgccatgtatagttcgccgcctgcttcttatcccgctcgccacgccgtgtatccgcacatgccctacggcgatgccaacgccatgtctcagcacatgccgtatccatcgcctgtcggggttctggatcagccgtatacgcctgccagcgtctttcccactccacctatgcagtccatggccgctccccattctgaaggctcacctgaatcttatgtcgaccactacggtcaacacgatctagcagatcttcttggccctcttaagctagacgagaggggcactgccccctacctcaacaacaaacaggctctggtgacaggtcaagaagaggagccggctgttgaggatggtgacgactttaaaaatatgctgccgcccgtcactgttggtccaggctcgaaaatccggataccaccggaacttatgccggaagaagacacgattttacaatactttgatctatactttactcatatacatccctatgtgcctgtactaaacaaaacacagctatatcatcaatggaataccaacagggaatctgtctcccctctattactagaagccatctttgctgtggccggacgactcgctgacgagccagcccaaggtcaacagtggattgctcttgcctcaaaacatgcggattctttcatggaaaagccacggttgagcacgctccaggccctcctgattatactcaaggcccgggaggctgttcctaaacgcggctattattatcgttcttggatgtctatagtacattgcattgccatggcccgggatctgggtctcgacgagcatgttgaaaaccataaagccggcaaaccgtgcaactcgacacctgcagattgcttaacgaagacccgtgtttggcagaccatattcatttgtgagacaatgattgcagctccgcagggccgcaatgatctgtcagtgggactcgagagcctgaacttctcggtggcacaacccatgccggggatcgatgagtttgaaaatcatatctcacgtgattttactttcttcgctaggattgtgcgggtcatctcaaaaatgaacacaatctactccagaatcaagaagaagaaggattggggtctcgaacctgagtttgtccaactcaatccgcagttgaggagctggttgaatgacctgccgcaagatatggcagtacaataccccatggatgggtctcccccttggttgccctcacattttgtgggcaacatgcattcctactatcacctggctacgattctcctccatcgaccacagcttaccttcttggaccctgttggcgaggatggaaattggagagcacatatgctgacctcttacggatccgccaaagctctttgtcgcctccaggaagctatgctgcaatcctatgggcttagcgggctacagtgcatgcagcgcggcatcagcttcacgatctatgctattctgtcatgtatcgttcttcatctcgttgctttgacttctcctgaccctgccatcaacacggactctcgtgactacttcacccgacatatgagaatcctcgagaagaccatgtcctcgtggccacttccggagatgctgaaacaaatcgatgccgttagggaagccttctctgctgacaccaggaagccgttcgtcctgaaggctagcttcccctatggtagtccgcatccttcaagtcattcaagcccgcctagagcgccaaacttcaagccaccgatgctgaggaccaattcgctggatcctaacatggatgcccaggctggagcccacccacacgtcagttaccaccccgtgacgcccgtttccattggttctggggacagcaagagtgactcgccttcgcttcagtccgcacagtccctttccatgctcgcagctggtcagagctcgcagcccccgctcgcccacggattacccatggtagatcagtcgtcatggaatccgtctcgaatatttgatcagtggaattccacttttggtacgccgcttccatcccaaacaccatcggtggctccacaggccagttctctaaatgtttcctcaggtgcccccgaagttcccacgacccaggatatggcgatcgcccaagcatccatacccgtggctccccccacgctgcctccacagcagtattcagcgccatctgtccagaattttgtcacgccggccatgtggcaggaatccgtggccagtgtttacgagtcaggaggactaaagcgtcattgggactacgaccatggttcctccattggcatgagcaaacgtcgctaatgatatcgaaaccatcttgtcacagcccttaactaaaccaactatctattatggactgtgttcctcgcgttaggaattaggatttcttcttgtcacagccacacactatcacgcatagatatgatgaacacaggcatctgatatccatgtcgttattgatttgcagaagccccccacttgcgtacatatagatgagtcgccagactgacatttatttcttacccatttcatttgctttgcacgtcagcatgtacaacaaaggcacgatcggccacgtttttatgatatcagggacatgacagggttcgccaacgggattaaaatggggggcataagcgggggtttgcttttacaattccagttgccgacagaggcaggcgcttcaggcgcattcggttgtatgataagacaaacgatatcctttagacgaacgcgccgtcatcgataacatcgaccacaattatgattgctcgttacctatctatgaaatcactgttgtctttggaaaactgagtaacggaaggtgccgatgcccgaacgaaaagctgggcatgtttctttccttggccttgtgagcaggtctatattcaatttgtgttcaatgccaatgtgtctttgtttatctttgtagatgtgatgcggaatggatatagcagactccaagttggcacgggtggaaagcggaacgagccgtctcgagaccttctataccaatcgagcgagaaagaaac

SEQ ID NO: 22478 - DNA, 2634 bp, Muscodor strobelii
  misc_feature: SGI cDNA ID NO. 567633
  misc_feature: Encodes the peptide sequence at SEQ ID NO 22479
atggccaacgacccggcggcagcccgcaggctgctgccccagagcgcgctgtcgaaccagttcacctttgcgccgccgacgtaccagccccccagggagacacagaagaattatgtcttcgttgacgagcacaaccgccacaagcgcttgaaggtgatgagagcctgtgagggctgccggaggaggaaaatcaaatgcgatgctgcgacgacgaatacctggccatgttctgcctgtattcggctgaagctccattgcgtgcgaccgaacgcgcagtacgatggttcgcccgacgacacccagcagtacgagccgacggcggctgagttcgaggccggcgcagagagcttcaggcagatggccatgcagcagcagcagcagcaacagcagtccgcccagcatgccatggtcggccatcccaagtctgccatgtatagttcgccgcctgcttcttatcccgctcgccacgccgtgtatccgcacatgccctacggcgatgccaacgccatgtctcagcacatgccgtatccatcgcctgtcggggttctggatcagccgtatacgcctgccagcgtctttcccactccacctatgcagtccatggccgctccccattctgaaggctcacctgaatcttatgtcgaccactacggtcaacacgatctagcagatcttcttggccctcttaagctagacgagaggggcactgccccctacctcaacaacaaacaggctctggtgacaggtcaagaagaggagccggctgttgaggatggtgacgactttaaaaatatgctgccgcccgtcactgttggtccaggctcgaaaatccggataccaccggaacttatgccggaagaagacacgattttacaatactttgatctatactttactcatatacatccctatgtgcctgtactaaacaaaacacagctatatcatcaatggaataccaacagggaatctgtctcccctctattactagaagccatctttgctgtggccggacgactcgctgacgagccagcccaaggtcaacagtggattgctcttgcctcaaaacatgcggattctttcatggaaaagccacggttgagcacgctccaggccctcctgattatactcaaggcccgggaggctgttcctaaacgcggctattattatcgttcttggatgtctatagtacattgcattgccatggcccgggatctgggtctcgacgagcatgttgaaaaccataaagccggcaaaccgtgcaactcgacacctgcagattgcttaacgaagacccgtgtttggcagaccatattcatttgtgagacaatgattgcagctccgcagggccgcaatgatctgtcagtgggactcgagagcctgaacttctcggtggcacaacccatgccggggatcgatgagtttgaaaatcatatctcacgtgattttactttcttcgctaggattgtgcgggtcatctcaaaaatgaacacaatctactccagaatcaagaagaagaaggattggggtctcgaacctgagtttgtccaactcaatccgcagttgaggagctggttgaatgacctgccgcaagatatggcagtacaataccccatggatgggtctcccccttggttgccctcacattttgtgggcaacatgcattcctactatcacctggctacgattctcctccatcgaccacagcttaccttcttggaccctgttggcgaggatggaaattggagagcacatatgctgacctcttacggatccgccaaagctctttgtcgcctccaggaagctatgctgcaatcctatgggcttagcgggctacagtgcatgcagcgcggcatcagcttcacgatctatgctattctgtcatgtatcgttcttcatctcgttgctttgacttctcctgaccctgccatcaacacggactctcgtgactacttcacccgacatatgagaatcctcgagaagaccatgtcctcgtggccacttccggagatgctgaaacaaatcgatgccgttagggaagccttctctgctgacaccaggaagccgttcgtcctgaaggctagcttcccctatggtagtccgcatccttcaagtcattcaagcccgcctagagcgccaaacttcaagccaccgatgctgaggaccaattcgctggatcctaacatggatgcccaggctggagcccacccacactccgcacagtccctttccatgctcgcagctggtcagagctcgcagcccccgctcgcccacggattacccatggtagatcagtcgtcatggaatccgtctcgaatatttgatcagtggaattccacttttggtacgccgcttccatcccaaacaccatcggtggctccacaggccagttctctaaatgtttcctcaggtgcccccgaagttcccacgacccaggatatggcgatcgcccaagcatccatacccgtggctccccccacgctgcctccacagcagtattcagcgccatctgtccagaattttgtcacgccggccatgtggcaggaatccgtggccagtgtttacgagtcaggaggactaaagcgtcattgggactacgaccatggttcctccattggcatgagcaaacgtcgctaa

SEQ ID NO: 22479 - protein, 877 aa, Muscodor strobelii
  misc_feature: SGI Peptide ID NO. 567633
  misc_feature (54)..(94): Pfam Id: PF00172 Pfam Desc: Fungal Zn(2)-Cys(6) binuclear cluster domain
  misc_feature (54)..(87): Pfam Id: PF00172 Pfam Desc: Fungal Zn(2)-Cys(6) binuclear cluster domain
  misc_feature (1)..(866): NCBI GI: 46134939 Blast Desc: FG09318.1 [Gibberella zeae PH-1]
  misc_feature (7)..(877): NCBI GI: 156040283 Blast Desc: SS1G_12158 [Sclerotinia sclerotiorum 1980] gi|154696214|gb|EDN95952.1| SS1G_12158 [Sclerotinia sclerotiorum 1980]
  misc_feature (1)..(866): NCBI GI: 38567130 Blast Desc: related to Cutinase transcription factor 1 alpha [Neurospora crassa]
  misc_feature (1)..(866): NCBI GI: 171687229 Blast Desc: protein product [Podospora anserina] gi|170943576|emb|CAP69228.1| protein product [Podospora anserina]
  misc_feature (3)..(866): NCBI GI: 256734849 Blast Desc: [Nectria haematococca mpVI 77-13-4]
  misc_feature (50)..(868): NCBI GI: 261355197 Blast Desc: conserved [Verticillium albo-atrum VaMs.102]
  misc_feature (1)..(866): NCBI GI: 85119751 Blast Desc: NCU02576 [Neurospora crassa OR74A] gi|28927519|gb|EAA36471.1| conserved [Neurospora crassa OR74A]
  misc_feature (1)..(866): NCBI GI: 116181518 Blast Desc: CHGG_01387 [Chaetomium globosum CBS 148.51] gi|88185684|gb|EAQ93152.1| CHGG_01387 [Chaetomium globosum CBS 148.51]
  misc_feature (21)..(877): NCBI GI: 255948518 Blast Desc: Pc22g10180 [Penicillium chrysogenum Wisconsin 54-1255] gi|211592043|emb|CAP98306.1| Pc22g10180 [Penicillium chrysogenum Wisconsin 54-1255]
  misc_feature (26)..(863): NCBI GI: 119484078 Blast Desc: C6 finger domain protein, [Neosartorya fischeri NRRL 181] gi|119410098|gb|EAW20045.1| C6 finger domain protein, [Neosartorya fischeri NRRL 181]
MANDPAAARRLLPQSALSNQFTFAPPTYQPPRETQKNYVFVDEHNRHKRLKVMRACEGCRRRKIKCDAATTNTWPCSACIRLKLHCVRPNAQYDGSPDDTQQYEPTAAEFEAGAESFRQMAMQQQQQQQQSAQHAMVGHPKSAMYSSPPASYPARHAVYPHMPYGDANAMSQHMPYPSPVGVLDQPYTPASVFPTPPMQSMAAPHSEGSPESYVDHYGQHDLADLLGPLKLDERGTAPYLNNKQALVTGQEEEPAVEDGDDFKNMLPPVTVGPGSKIRIPPELMPEEDTILQYFDLYFTHIHPYVPVLNKTQLYHQWNTNRESVSPLLLEAIFAVAGRLADEPAQGQQWIALASKHADSFMEKPRLSTLQALLIILKAREAVPKRGYYYRSWMSIVHCIAMARDLGLDEHVENHKAGKPCNSTPADCLTKTRVWQTIFICETMIAAPQGRNDLSVGLESLNFSVAQPMPGIDEFENHISRDFTFFARIVRVISKMNTIYSRIKKKKDWGLEPEFVQLNPQLRSWLNDLPQDMAVQYPMDGSPPWLPSHFVGNMHSYYHLATILLHRPQLTFLDPVGEDGNWRAHMLTSYGSAKALCRLQEAMLQSYGLSGLQCMQRGISFTIYAILSCIVLHLVALTSPDPAINTDSRDYFTRHMRILEKTMSSWPLPEMLKQIDAVREAFSADTRKPFVLKASFPYGSPHPSSHSSPPRAPNFKPPMLRTNSLDPNMDAQAGAHPHSAQSLSMLAAGQSSQPPLAHGLPMVDQSSWNPSRIFDQWNSTFGTPLPSQTPSVAPQASSLNVSSGAPEVPTTQDMAIAQASIPVAPPTLPPQQYSAPSVQNFVTPAMWQESVASVYESGGLKRHWDYDHGSSIGMSKRR

SEQ ID NO: 22480 - DNA, 4397 bp, Muscodor strobelii; identical to SEQ ID NO: 22477
  misc_feature: SGI EST ID NO. CUFF.52908.1
  misc_feature: Variant of the nucleotide sequence at SEQ ID NO 22478

SEQ ID NO: 22481 - DNA, 1698 bp, Muscodor strobelii
  misc_feature: SGI cDNA ID NO. 567634
  misc_feature: Reduced expression when VOC is produced
  misc_feature: Encodes the peptide sequence at SEQ ID NO 22482
atggcgtggtccaagtcgacgcgcatcagcgtcatgctggccatcgacatcgccttcttcctggtcgagctgatctcgggcttcatggtgcactcgctggcgctgatggccgacgccttccacatgctcaacgacatcatctccctgattattggtctctgggccgtgaccgtcgccaagcgcgccaccaccgaccgcttctcctacggctgggtccgcgccgagatcctcggcgccttcttcaacgccgtcttcctcatcgccctgtgcatctccatcatcctcgaggccgtcacccgcttcttcgagccccaggaggtctccaaccccgtcctcatcctcatcgtcggctgctgcggcctcgcctccaacctcgtcggcttcctcgtcctcggcggccacggccacagccacggccactcccactcccactcccacggcgacgacgaccacggccacgagcatgtgcaccaacacgatgacgtcgcggccgccgaggagggacgatcaggcgcggcccacgacatccgagacgagggcggccgcattgctgacgttctgcccgacgtcgtagtcgccagaacgcaggcccccgactacaacgccgagacgccgccccgccgcttccagtcccgccgctccgacagcggccgcaagtctggctcgccaaagagctcggtctcgaggggagagcgtcgacgcaccagcagccttaagcacagccgctttgcgagcatcgatggtctcagcatccacccggccagcttcaggcaggatatcatcgatcagagcagatcgacgcacagtgacaatgacacggacgagagctccgtggacggcggtcactcgggagctgctgttcgcggcgaggaatcagtcgcggatgagaacacgcctctgatcgtgaacggcggcgacaagaacaacggcactctcggccgtccgaggcgcgactctgctgtacacgctgaccaccaccataacaagccaaagtccaaggcgaagaagggccacggccacagccacgccgacatgggcatgaacggcatgattctccacgtcataggagacgctcttggcaacgtgggtgtcatcgtgaccgccttgattatctggctaaccgagtggccgggtcgttactatgctgacccagcggtgtccttgtttattacactaatcatcttaagatcggcaatccccctcaccaaagcatcgtctaaggtgctgctccaagccaccccggatcatatcaatcttcaagagatacgagaagacattcagaccttacctggcgtcgtcagttgtcaccacgtacatatatggcaactctccgacacaaaggtcgtggcttcactacatgtacaggtcgatttcccagttacggacgagagcggagaaagatacatgaagctagccaagctagcacggagatgtcttcatgcccacggcattcacagtgccactatccaacccgagttctgcctcgatcaaaattgctcacatgtagaggagcaatcattggatggccacgtctcaccaacccagggcgcgaccaagggtgagccgcgcgacgggtgtctcttgggttgtgtggatgattgcgcggatcagggctgctgcacgcagccagctgcggctggatcgagccggcgatctagtcattcgacggttcacagccatgatcaccaccatcactag

SEQ ID NO: 22482 - protein, 565 aa, Muscodor strobelii
  misc_feature: SGI Peptide ID NO. 567634
  misc_feature (9)..(498): Pfam Id: PF01545 Pfam Desc: Cation efflux family
  misc_feature (338)..(498): Pfam Id: PF01545 Pfam Desc: Cation efflux family
  misc_feature (9)..(139): Pfam Id: PF01545 Pfam Desc: Cation efflux family
  misc_feature (1)..(564): NCBI GI: 116180516 Blast Desc: CHGG_00886 [Chaetomium globosum CBS 148.51] gi|88185183|gb|EAQ92651.1| CHGG_00886 [Chaetomium globosum CBS 148.51]
  misc_feature (1)..(552): NCBI GI: 46108130 Blast Desc: FG00947.1 [Gibberella zeae PH-1]
  misc_feature (1)..(545): NCBI GI: 171687769 Blast Desc: protein product [Podospora anserina] gi|170943846|emb|CAP69498.1| protein product [Podospora anserina]
  misc_feature (1)..(553): NCBI GI: 85111973 Blast Desc: NCU03145 [Neurospora crassa OR74A] gi|28925965|gb|EAA34958.1| conserved [Neurospora crassa OR74A] gi|38567261|emb|CAE76551.1| related to cobalt accumulation COT1
  misc_feature (1)..(564): NCBI GI: 256735394 Blast Desc: NECHADRAFT_98906 [Nectria haematococca mpVI 77-13-4]
  misc_feature (1)..(560): NCBI GI: 156054901 Blast Desc: SS1G_06298 [Sclerotinia sclerotiorum 1980] gi|154704078|gb|EDO03817.1| SS1G_06298 [Sclerotinia sclerotiorum 1980]
  misc_feature (1)..(545): NCBI GI: 39943108 Blast Desc: MGG_03634 [Magnaporthe grisea 70-15] gi|145009780|gb|EDJ94436.1| MGG_03634 [Magnaporthe grisea 70-15]
  misc_feature (1)..(560): NCBI GI: 154290409 Blast Desc: BC1G_15674 [Botryotinia fuckeliana B05.10] gi|150847745|gb|EDN22938.1| BC1G_15674 [Botryotinia fuckeliana B05.10]
  misc_feature (1)..(541): NCBI GI: 261355296 Blast Desc: zinc/cadmium resistance protein [Verticillium albo-atrum VaMs.102]
  misc_feature (1)..(552): NCBI GI: 189203679 Blast Desc: zinc homeostasis factor 1 [Pyrenophora tritici-repentis Pt-1C-BFP] gi|187985274|gb|EDU50762.1| zinc homeostasis factor 1 [Pyrenophora tritici-repentis Pt-1C-BFP]
  misc_feature: Useful for introducing or modulating the production of volatile compounds
MAWSKSTRISVMLAIDIAFFLVELISGFMVHSLALMADAFHMLNDIISLIIGLWAVTVAKRATTDRFSYGWVRAEILGAFFNAVFLIALCISIILEAVTRFFEPQEVSNPVLILIVGCCGLASNLVGFLVLGGHGHSHGHSHSHSHGDDDHGHEHVHQHDDVAAAEEGRSGAAHDIRDEGGRIADVLPDVVVARTQAPDYNAETPPRRFQSRRSDSGRKSGSPKSSVSRGERRRTSSLKHSRFASIDGLSIHPASFRQDIIDQSRSTHSDNDTDESSVDGGHSGAAVRGEESVADENTPLIVNGGDKNNGTLGRPRRDSAVHADHHHNKPKSKAKKGHGHSHADMGMNGMILHVIGDALGNVGVIVTALIIWLTEWPGRYYADPAVSLFITLIILRSAIPLTKASSKVLLQATPDHINLQEIREDIQTLPGVVSCHHVHIWQLSDTKVVASLHVQVDFPVTDESGERYMKLAKLARRCLHAHGIHSATIQPEFCLDQNCSHVEEQSLDGHVSPTQGATKGEPRDGCLLGCVDDCADQGCCTQPAAAGSSRRSSHSTVHSHDHHHH

SEQ ID NO: 22483 - DNA, 453 bp, Muscodor strobelii
  misc_feature: SGI cDNA ID NO. 567635
  misc_feature: Encodes the peptide sequence at SEQ ID NO 22484
atgtcttcgttctatcagcaatttctcggggcgcacgcgagttgggaggatgaacatctttcattcctatcatacgacgaagaacaccatcgcatagctctgctgaacatgccaagtctcaaagcgaaagaccctcatacggcgggtctcgaccatttcgccttcacttacgagacaattgcggaccttatgacggcatataagcagcgaaaggctcttggtatcttgcccatgtggtctgtcaaccgaattgagacccaagtcgacaatttcgataccccagaggacgctacgaatttcatgtcaggtcccgatttcaaattgaatcccattggtgccgattttgacccagaggagttgatttacagacttgagagcggcgagagtgaatcggaactcaagaagcggccagatgtgggagccagaggccccaaggatatcccttttgtttag

SEQ ID NO: 22484 - protein, 150 aa, Muscodor strobelii
  misc_feature: SGI Peptide ID NO. 567635
  misc_feature (1)..(142): NCBI GI: 169615459 Blast Desc: SNOG_10887 [Phaeosphaeria nodorum SN15] gi|111060266|gb|EAT81386.1| SNOG_10887 [Phaeosphaeria nodorum SN15]
  misc_feature (1)..(142): NCBI GI: 256720164 Blast Desc: NECHADRAFT_56381 [Nectria haematococca mpVI 77-13-4]
  misc_feature (1)..(142): NCBI GI: 171683115 Blast Desc: protein product [Podospora anserina] gi|170941517|emb|CAP67169.1| protein product [Podospora anserina]
  misc_feature (1)..(127): NCBI GI: 1352083 Blast Desc: BPHC2_RHOGO RecName: Full=Biphenyl-2,3-diol 1,2-dioxygenase 2; AltName: Full=Biphenyl-2,3-diol 1,2-dioxygenase II; AltName: Full=23OHBP oxygenase II; AltName:
  misc_feature (1)..(133): NCBI GI: 39948439 Blast Desc: MGG_08685 [Magnaporthe grisea 70-15] gi|145009228|gb|EDJ93939.1| MGG_08685 [Magnaporthe grisea 70-15]
  misc_feature (1)..(136): NCBI GI: 226364757 Blast Desc: extradiol dioxygenase [Rhodococcus opacus B4] gi|226243246|dbj|BAH53594.1| extradiol dioxygenase [Rhodococcus opacus B4]
  misc_feature (1)..(133): NCBI GI: 111017558 Blast Desc: extradiol dioxygenase, type I [Rhodococcus jostii RHA1] gi|9711314|dbj|BAB07809.1| 2,3-dihydroxybiphenyl 1,2-dioxygenase [Rhodococcus sp. RHA1] extradiol dioxygenase, I
  misc_feature (1)..(136): NCBI GI: 1352084 Blast Desc: BPHC3_RHOGO RecName: Full=Biphenyl-2,3-diol 1,2-dioxygenase 3; AltName: Full=Biphenyl-2,3-diol 1,2-dioxygenase III; AltName: Full=23OHBP oxygenase III; AltName:
  misc_feature (1)..(146): NCBI GI: 280962363 Blast Desc: Biphenyl-2,3-diol 1,2-dioxygenase [Frankia sp. EuI1c] gi|270733598|gb|EFA61805.1| Biphenyl-2,3-diol 1,2-dioxygenase [Frankia sp. EuI1c]
  misc_feature (1)..(127): NCBI GI: 3059183 Blast Desc: 2,3-dihydroxybiphenyl 1,2-dioxygenase [Rhodococcus erythropolis]
  misc_feature (1)..(117): SWISSPROT Homolog: EC 1.13.11.39 Biphenyl-2,3-diol 1,2-dioxygenase
MSSFYQQFLGAHASWEDEHLSFLSYDEEHHRIALLNMPSLKAKDPHTAGLDHFAFTYETIADLMTAYKQRKALGILPMWSVNRIETQVDNFDTPEDATNFMSGPDFKLNPIGADFDPEELIYRLESGESESELKKRPDVGARGPKDIPFV

SEQ ID NO: 22485 - DNA, 2643 bp, Muscodor strobelii
  misc_feature: SGI cDNA ID NO. 567636
  misc_feature: Reduced expression when VOC is produced
  misc_feature: Encodes the peptide sequence at SEQ ID NO 22486
atggcactcctagaagatgagccatactctgtgacggatcctcttgcgtcaccatcagatagcgtcggctctcatccgactccgttcacggaatattcgtccgtccctgacagcccattcccaagcaaagtaatcccgagagatagtcgttcctatgcaaaagataagctatctcgcttgacggttgaagagaaggtctctcttcttacggctgcagacttttggcgaacgaaggcgataccatctaaaggtataccagcggtaaagacaagtgacggacccaatggagctcgtggcggcatctttgtagggggcacgaaggctgccttattcccatgtggaatctctttagcagctacttggaataagaatctgcttttccaagttggcgagcatctagcagctgaagcgcaagcacgatcagctcagattcttcttgcaccgacagtttgcatgcatcgacatccactcggaggcaggaacttcgagtcgttttcagaggaccctttgcttactggaaagctggcatcccagtatatccaaggacttcaatctaaaggagtcgctgctaccatcaaacacttcgttaccaatgaacaagagacacaccgactgaccattgattcgatggtaacagagcgtcctctacgagaactgtatttgcgcccctttgagattgcagttcgggaggccaatccatgggctatcatgacgtcctataatctcatcaacggtgttcatgccgatatgaatatgcacacactcaaggacatattgcgcggcgaatggggatacgatggcacagtgatttcagattgggggggcacaaattcaaccgtggaatccatcaaggcaggttgtgatattgagtttccctattcgacgaagtggcgatttgacaaagttctgaaagccctttccgagggagaaatcacgccagaagatattgacattgctgcggaaaacgtattgacgctcgttgaacggacgaagggagatgacatgaccgccgaggaggaagagagagaagatgatagagaggagacccgagcgctcatccgagctgctggcgtcgagggccttacattgttgaagaatgacggggccattttgccaattaatgcgaaaacaagtaaaatcgcagtgattggacctaatgcaaacagggccatcgctggtggcggtggcagtgctagtctcaatccctattacaagacactgcctctagaaagtatcagacaagttgcagaaaaggaggtgatctatgcgcagggttgtcatatctacaagtggctccctgtcgcatccccattctgcacagataagttgggcaatcaaggtgtttctctgcaatggttcaggggagacagattccagggcaacgttattgttgagcaacgaagaacgaacaccgatcttttcctatgggattctgcacccttggatcagataggccctgaatggtcagcgatcgcgacaacatacctgacgccaaccacttcagggaagcacacaatcagcttcatgagcgtggggccaggtaagttgtacgttaacggagacctggctcttgatttatgggactggaccgaagaaggcgaggctatgtttgatggctcagttgactacatggttgatgttcccatgacagctggtcaagctatcgaactgcgagtggagatgacgaatgaactgcgcccaatttcaaaacagaagcagttcaacatgacgcacaaatatggaggctgtcgcgtcggatttaaagaagaagaccaggtggattacctccaacaagcggtagatgccgcgaaggaggctgacgtcgcagtcgtcatcgtcggcctggatgctgaatgggaatcagaaggatacgatcggaagactatggacttgccctctgatggtagccaagatcgattggttgaggctgttctcaaggcaaaccctcggactgttgttgtcaatcaatcaggttctcccgtgacaatgccgtgggcggatgacgttcctgccattatccaagcttggtatcagggccaagaagccggcaatgcgttggctgatgttttgtttggccggtgcaacccgagtggcaaacttccttcaacattccctcgccggctgcaagatacgcctgcgtatcacaactggcctggcgagaaccttcaggtgttgtacggagaagggctatacattggctaccggcactacgaccgggcagaagtcgagcctttgttttctttcggacacggactgtcttattctacatttgaatacggacggccatcactcagcaaaagagtattggatgcaacagcccctgtgcacttagtcatggcggtgacgaacacaagttctgtggcgggcgcagagacagtgcaaatctatgtgcgcgatgagaaatcctcgctgcctcgacctgaaaaggaactcgtagcatttgagaaggtattccttgaacccggcgagacgaaacatatcacggtacccctagacaaatttgccgtcggatactacgacccgtccaaatcggcgtggatcgctgaagagggctcattcaaggtgctgattggagcttcggcaagggacatcagacattcggtgacttttgaggtaaaggagtcttttacatggatattctag

SEQ ID NO: 22486 - protein, 880 aa, Muscodor strobelii
  misc_feature: SGI Peptide ID NO. 567636
  misc_feature (77)..(292): Pfam Id: PF00933 Pfam Desc: Glycosyl hydrolase family 3 N terminal domain
  misc_feature (361)..(734): Pfam Id: PF01915 Pfam Desc: Glycosyl hydrolase family 3 C terminal domain
  misc_feature (444)..(594): Pfam Id: PF07691 Pfam Desc: PA14 domain
  misc_feature (16)..(880): NCBI GI: 116180862 Blast Desc: CHGG_01059 [Chaetomium globosum CBS 148.51] gi|88185356|gb|EAQ92824.1| CHGG_01059 [Chaetomium globosum CBS 148.51]
  misc_feature (20)..(880): NCBI GI: 46120532 Blast Desc: FG04913.1 [Gibberella zeae PH-1]
  misc_feature (12)..(880): NCBI GI: 164424203 Blast Desc: NCU07487 [Neurospora crassa OR74A] gi|157070417|gb|EAA35798.2| conserved [Neurospora crassa OR74A]
  misc_feature (11)..(866): NCBI GI: 171687205 Blast Desc: protein product [Podospora anserina] gi|170943564|emb|CAP69216.1| protein product [Podospora anserina]
  misc_feature (20)..(880): NCBI GI: 261355298 Blast Desc: thermostable beta-glucosidase B [Verticillium albo-atrum VaMs.102]
  misc_feature (27)..(880): NCBI GI: 256734900 Blast Desc: glycoside hydrolase family 3 [Nectria haematococca mpVI 77-13-4]
  misc_feature (11)..(880): NCBI GI: 154290413 Blast Desc: BC1G_15676 [Botryotinia fuckeliana B05.10] gi|150847747|gb|EDN22940.1| BC1G_15676 [Botryotinia fuckeliana B05.10]
  misc_feature (53)..(880): NCBI GI: 169603353 Blast Desc: SNOG_04685 [Phaeosphaeria nodorum SN15] gi|160706375|gb|EAT88445.2| SNOG_04685 [Phaeosphaeria nodorum SN15]
  misc_feature (53)..(869): NCBI GI: 189203279 Blast Desc: periplasmic beta-glucosidase precursor [Pyrenophora tritici-repentis Pt-1C-BFP] gi|187985074|gb|EDU50562.1| periplasmic beta-glucosidase precursor [Pyrenophora Pt-1C-BFP]
  misc_feature (335)..(880): NCBI GI: 156054915 Blast Desc: SS1G_06304 [Sclerotinia sclerotiorum 1980] gi|154704084|gb|EDO03823.1| SS1G_06304 [Sclerotinia sclerotiorum 1980]
  misc_feature (55)..(872): SWISSPROT Homolog: EC 3.2.1.21 Beta-glucosidase
  misc_feature: Useful for introducing or modulating the production of volatile compounds
MALLEDEPYSVTDPLASPSDSVGSHPTPFTEYSSVPDSPFPSKVIPRDSRSYAKDKLSRLTVEEKVSLLTAADFWRTKAIPSKGIPAVKTSDGPNGARGGIFVGGTKAALFPCGISLAATWNKNLLFQVGEHLAAEAQARSAQILLAPTVCMHRHPLGGRNFESFSEDPLLTGKLASQYIQGLQSKGVAATIKHFVTNEQETHRLTIDSMVTERPLRELYLRPFEIAVREANPWAIMTSYNLINGVHADMNMHTLKDILRGEWGYDGTVISDWGGTNSTVESIKAGCDIEFPYSTKWRFDKVLKALSEGEITPEDIDIAAENVLTLVERTKGDDMTAEEEEREDDREETRALIRAAGVEGLTLLKNDGAILPINAKTSKIAVIGPNANRAIAGGGGSASLNPYYKTLPLESIRQVAEKEVIYAQGCHIYKWLPVASPFCTDKLGNQGVSLQWFRGDRFQGNVIVEQRRTNTDLFLWDSAPLDQIGPEWSAIATTYLTPTTSGKHTISFMSVGPGKLYVNGDLALDLWDWTEEGEAMFDGSVDYMVDVPMTAGQAIELRVEMTNELRPISKQKQFNMTHKYGGCRVGFKEEDQVDYLQQAVDAAKEADVAVVIVGLDAEWESEGYDRKTMDLPSDGSQDRLVEAVLKANPRTVVVNQSGSPVTMPWADDVPAIIQAWYQGQEAGNALADVLFGRCNPSGKLPSTFPRRLQDTPAYHNWPGENLQVLYGEGLYIGYRHYDRAEVEPLFSFGHGLSYSTFEYGRPSLSKRVLDATAPVHLVMAVTNTSSVAGAETVQIYVRDEKSSLPRPEKELVAFEKVFLEPGETKHITVPLDKFAVGYYDPSKSAWIAEEGSFKVLIGASARDIRHSVTFEVKESFTWIF

SEQ ID NO: 22487 - DNA, 7370 bp, Muscodor strobelii
  misc_feature: SGI EST ID NO. CUFF.52850.0
  misc_feature: Variant of the nucleotide sequence at SEQ ID NO 22485
tcacttttcaggtccccaattcagcccacttccaatatgccatcttccgtgccacaatctcatctatttaccatgcaatgaataaccttcaatgctgatcacgagcgaaaccaaggcttatttctctatcacatgccattttacccaaattggcttcccgagtgctgtcaagccattctactaccgacgtgttcccgcaagacaggcacaagaaacgggcagtgtgcctttctcttgcaggagttatatagtgaacatgtatctaccacgacactcagcgccagtcggttcagtcggaaccttcgcctatctgagtatactgagcagggatactcaccgaaactgtgtctgggtctaactgaagtcggacgttgctactacgtgtcaaaagctcacctgtatgcctatggcactggagcatcatcgtttggtaaagagcaaagagaggaccaccgatcaatctcgtgacgttgtgctgacacaaggacacatgtatcgcggcgagaggaagatgacagctctgttcagacttcacatagcgtagttcatccccagacctagcaagtcggtccttataatactgtagcggatggacgaaacggctgactcaacgtcaaggcatagtgaaacaggcgttgtatgatgtgatagagcaactagttctgtcgggtcttcatcacgaattgcttcccgtctcaagtcgattatacatgcagaagagcggccccccactcgctgcatgcactcacagacataagtgcgggagaccttgctcaagatccagagctaacctccacccggtccgtcactgccgttacttcgtaagagacatgggcttgctgtcttatatgtcttatctgtttcccacatattatacgccctgtaagtgtgttgacgaggcttctggactacatccgatcttgccactttccaagcgacgggacgaatccggctgtcgtctccaatactagccagcttatggtgatcattgacagggtcatcactcatactatcagccttgcgtcaatgatgcaagataacctcgtcccgaggatccagatcgcttgcatcagcacttcgctatctcaagcaacattgtgctcggtttagctggagctatgagccatgaagcacaggggttgaatagttctccaaccagatgtttcctaattctccgtagtatgtggacttgttgccgtaccgcccctctttgcctgcaactggcgggcgttacatcttgaagcttctctgtacttgcaagcaatacggggtagaccgacgcgcgcaacaatacggatcgccttatctatataaaaagcatgtaaagaagccctctcgccccaaacatcatttccgactttattcggttccttgtagccagataccaactatcacatctcaacgagatatagattgattgaataaaatatggcactcctagaagatgagccatactctgtgacggatcctcttgcgtcaccatcagatagcgtcggctctcatccgactccgttcacggaatattcgtccgtccctgacagcccattcccaagcaaagtaatcccgagagatagtcgttcctatgcaaaagataagctatctcgcttgacggttgaagagaaggtctctcttcttacggctgcagacttttggcgaacgaaggcgataccatctaaaggtataccagcggtaaagacaagtgacggacccaatggagctcgtggcggcatctttgtagggggcacgaaggctgccttattcccatgtggaatctctttagcagctacttggaataagaatctgcttttccaagttggcgagcatctagcagctgaagcgcaagcacgatcagctcagattcttcttgcaccgacagtttgcatgcatcgacatccactcggaggcaggaacttcgagtcgttttcagaggaccctttgcttactggaaagctggcatcccagtatatccaaggacttcaatctaaaggagtcgctgctaccatcaaacacttcgttaccaatgaacaagagacacaccgactgaccattgattcgatggtaacagagcgtcctctacgagaactgtatttgcgcccctttgagattgcagttcgggaggccaatccatgggctatcatgacgtcctataatctcatcaacggtgttcatgccgatatgaatatgcacacactcaaggacatattgcgcggcgaatggggatacgatggcacagtgatttcagattgggggggcacaaattcaaccgtggaatccatcaaggcaggttgtgatattgagtttccctattcgacgaagtggcgatttgacaaagttctgaaagccctttccgagggagaaatcacgccagaagatattgacattgctgcggaaaacgtattgacgctcgttgaacggacgaagggagatgacatgaccgccgaggaggaagagagagaagatgatagagaggagacccgagcgctcatccgagctgctggcgtcgagggccttacattgttgaagaatgacggggccattttgccaattaatgcgaaaacaagtaaaatcgcagtgattggacctaatgcaaacagggccatcgctggtggcggtggcagtgctagtctcaatccctattacaagacactgcctctagaaagtatcagacaagttgcagaaaaggaggtgatctatgcgcagggttgtcatatctacaagtggctccctgtcgcatccccattctgcacagataagttgggcaatcaaggtgtttctctgcaatggttcaggggagacagattccagggcaacgttattgttgagcaacgaagaacgaacaccgatcttttcctatgggattctgcacccttggatcagataggccctgaatggtcagcgatcgcgacaacatacctgacgccaaccacttcagggaagcacacaatcagcttcatgagcgtggggccaggtaagttgtacgttaacggagacctggctcttgatttatgggactggaccgaagaaggcgaggctatgtttgatggctcagttgactacatggttgatgttcccatgacagctggtcaagctatcgaactgcgagtggagatgacgaatgaactgcgcccaatttcaaaacagaagcagttcaacatgacgcacaaatatggaggctgtcgcgtcggatttaaagaagaagaccaggtggattacctccaacaagcggtagatgccgcgaaggaggctgacgtcgcagtcgtcatcgtcggcctggatgctgaatgggaatcagaaggatacgatcggaagactatggacttgccctctgatggtagccaagatcgattggttgaggctgttctcaaggcaaaccctcggactgttgttgtcaatcaatcaggttctcccgtgacaatgccgtgggcggatgacgttcctgccattatccaagcttggtatcagggccaagaagccggcaatgcgttggctgatgttttgtttggccggtgcaacccgagtggcaaacttccttcaacattccctcgccggctgcaagatacgcctgcgtatcacaactggcctggcgagaaccttcaggtgttgtacggagaagggctatacattggctaccggcactacgaccgggcagaagtcgagcctttgttttctttcggacacggactgtcttattctacatttgaatacggacggccatcactcagcaaaagagtattggatgcaacagcccctgtgcacttagtcatggcggtgacgaacacaagttctgtggcgggcgcagagacagtgcaaatctatgtgcgcgatgagaaatcctcgctgcctcgacctgaaaaggaactcgtagcatttgagaaggtattccttgaacccggcgagacgaaacatatcacggtacccctagacaaatttgccgtcggatactacgacccgtccaaatcggcgtggatcgctgaagagggctcattcaaggtgctgattggagcttcggcaagggacatcagacattcggtgacttttgaggtaaaggagtcttttacatggatattctagtttctattgcctcatcaggctgtaaggggcggacagcgctgaattcacgactgctgtcgctggatatagccacgattacttcgcgcatggtcatggtgtacggcgtgcttggcatttgaatatggggagtctttgacattttttggcagtagcttggaggcttaatgtgagattgcgacatcttagggacattaattgaacattgtacttcatttgggatcgtgagacttgactaagtgttttttatcttgacagtatcttgattgatcttgttgttcgtgaggagatggtgtgagggatttgacgtgccacggaatcttggtatatatcggccgtactgacatacaccctccgggcatccgacatcgggtaattggcttccgatatccgatatcgatgatcggtgatgggatagccgagaaattcttgttcccgggaggcgtcgttgtcggctagaggtcgatgttgtcgactcgagactcggcgctgacgtgggtttaccaatgatccttgttgcgcgcggcaaagagaggttggctattgtttttgctgcttcacccgttaaggaagtgaaccccgagccaaagatggaccattccggcgcgctggtaggttcgttatattttgcgtcctcagtgctggtattcgattgaagttgagcataagcttaaagaatcatgacccgaacggtcgattgtgatggctgctccagtagacgaaaagggaacgatgaccaagagacagcgtggcgcatgtgctggacctttcgtgctgggccggtgaaagcgcgatactgcgactcgactctcttttcaggaactttccagtgtcttcgctacgaaggacccctgccgagttcgatatccgcccctttggccttttgcgtcttgatcccggccatggaagcgccaaaaactagtatcttattcgatggtcattagagggcatcacgctctggtcagaacattgtgtgggaacatatcaaatggcgcgaaatgataaaccagcctgcatatctctctacatgtgcatgaatgagctcgttggtttcaccgaatagtcacccccttttcctggccgcccttcttccccaggtgattatctatacatactccagcaatcgtataatcacctattggaccaccccgtgagattaataagttccccgatccgtcggtgtcgacgtatgcgtacgacctcgtcatgctgtgtttgaactcttccctcaccaggaccctactagagggcgcctccttcgtcgggaccacaagcttgtccggccgtgtgctgcgacagaggtcggcatacttctcatgatactcgtcgtcacccccgaaagccatgagattgaacgtcttgcccttatcgccaacctgcacgagcccgagcccgtcgctgagcgtgatgcgcccatcgtcatctagcgtgccggtgatgccgccgagcgagctgccgtcgacggctgtgacggcttcgaagacgagcgcaaagggcgctgtgacgacgcagccgcagttgacgcggatctcgcacgcgatatgcgctgtcgtgcccttcgcgagccgtgactcgcacccagtgatgttgtcaagccaccagttgatcgagaggttgtgggtacgtaagaactgcggacagtcggctcgctcaaaatcagtgcccgatacgcatcgatcgacccactggctgggtttggcattcggatcgctcatcttccaatacggcgccaggttcttgagtagccggcgccggtattcgatgatgtcaccagccgggtccatgatgcaacccaggaaagtcgcgcactggacgagcgttctaccggtttcgtcgcccaggatatgccggcgttcgttgttttcggggatcggctcgctactgaacgcgcccgtcttgatcttcttcccgacgttacagcccctgaacttgaacttgaacgtagggtcttcatctttgaggtgtacgctcatgtacttgcgcggcgtcccggtgatccccaccctcgcgtccgctgtgaccctgctttgtgttttcattctccccaatcggacgacgccggcaaagatgtcagttttgatgtcgtttgttacgttagggccagcattcctcgagccgatgtcagtgaccgggatccagtcccactcgcctctgtcccggctgctggtcgcgagcttcgtccaagcgtggcctgtcttaagtgatagttgtttgaagaaggcaaaggacatagagtcgatgtcttcacccgacaagtccttttcgatctcttcctgcgtgaagagccctttgaagatccccaaaagcccccggaatagatccattctcttttcacattgtctcggggtcaaggagatggctgagaagatgttgctgactcccttgtagttctgtatccaccactgaggaccaccgttgatgatgtcagttcgtgcgcacataatgcccctgacctgggtttggagaaagttaagtcgaacgacatcctcgtcaatgaatctgaggatgagattgacggacgaggtccggcgaactctggcattctctatccatgcgtatagcttcgtcgccttatccattgcatcagtagcgaggtccatccagatgtcaagcgtcccaatacaagacacattctgagaatccatagcaaagacttcgacattcttccccaagagcatctcttggaacgtccactaccgcactttgagtcagtagtgactcctcatagcgtgttttctattgtctcaggggcccaaaacatgtctccagagtacttgctcctgaaaacaaaggattggctcccaaaaacatccaggataggtagaaaacaactccagaaatcactcaccacccttgagaagtactcattgcggaaaaccgacttgatctggttggtgcaggttgagtagcagttgattacgcccatgtccacggccgcagatcgcactgtcggcttctcaaggctgaaagcccacggggcttcattcgcccagattcccagccggctggccgtcttctccgtcagctccacgctgtcggaagccatcgcggcctcgccgatgagcgagaggacgtgatccagaaacttgagattgtctacgacttgctgaggatagaatatctctgccatgtctacgaggatgtagcaccgcttggctgctttctagtgcatcaaaacatgtcagtcctttccttactcgttatcgtatggtagggagcattccccagccgccgcccggtttttaagtcgaaacaagtagtacttactacaacacgtattagcaaagatccttctagaaaat

SEQ ID NO: 22488 - DNA, 1179 bp, Muscodor strobelii
  misc_feature: SGI cDNA ID NO. 567637
  misc_feature: Elevated expression when VOC is produced
  misc_feature: Encodes the peptide sequence at SEQ ID NO 22489
atgtcctttgccttcttcaaacaactatcacttaagacaggccacgcttggacgaagctcgcgaccagcagccgggacagaggcgagtgggactggatcccggtcactgacatcggctcgaggaatgctggccctaacgtaacaaacgacatcaaaactgacatctttgccggcgtcgtccgattggggagaatgaaaacacaaagcagggtcacagcggacgcgagggtggggatcaccgggacgccgcgcaagtacatgagcgtacacctcaaagatgaagaccctacgttcaagttcaagttcaggggctgtaacgtcgggaagaagatcaagacgggcgcgttcagtagcgagccgatccccgaaaacaacgaacgccggcatatcctgggcgacgaaaccggtagaacgctcgtccagtgcgcgactttcctgggttgcatcatggacccggctggtgacatcatcgaataccggcgccggctactcaagaacctggcgccgtattggaagatgagcgatccgaatgccaaacccagccagtgggtcgatcgatgcgtatcgggcactgattttgagcgagccgactgtccgcagttcttacgtacccacaacctctcgatcaactggtggcttgacaacatcactgggtgcgagtcacggctcgcgaagggcacgacagcgcatatcgcgtgcgagatccgcgtcaactgcggctgcgtcgtcacagcgccctttgcgctcgtcttcgaagccgtcacagccgtcgacggcagctcgctcggcggcatcaccggcacgctagatgacgatgggcgcatcacgctcagcgacgggctcgggctcgtgcaggttggcgataagggcaagacgttcaatctcatggctttcgggggtgacgacgagtatcatgagaagtatgccgacctctgtcgcagcacacggccggacaagcttgtggtcccgacgaaggaggcgccctctagtagggtcctggtgagggaagagttcaaacacagcatgacgaggtcgtacgcatacgtcgacaccgacggatcggggaacttattaatctcacggggtggtccaataggtgattatacgattgctggagtatgtatagataatcacctggggaagaagggcggccaggaaaagggggtgactattcggtga

SEQ ID NO: 22489 - protein, 392 aa, Muscodor strobelii
  misc_feature: SGI Peptide ID NO. 567637
  misc_feature (1)..(392): NCBI GI: 256724134 Blast Desc: NECHADRAFT_86391 [Nectria haematococca mpVI 77-13-4]
  misc_feature (1)..(391): NCBI GI: 67526035 Blast Desc: AN3475.2 [Aspergillus nidulans FGSC A4] gi|40739846|gb|EAA59036.1| AN3475.2 [Aspergillus nidulans FGSC A4] gi|259482013|tpe|CBF76078.1| TPA: conserved [Aspergillus FGSC
  misc_feature (1)..(364): NCBI GI: 115398980 Blast Desc: conserved [Aspergillus terreus NIH2624] gi|114191962|gb|EAU33662.1| conserved [Aspergillus terreus NIH2624]
  misc_feature: Useful for introducing or modulating the production of volatile compounds
MSFAFFKQLSLKTGHAWTKLATSSRDRGEWDWIPVTDIGSRNAGPNVTNDIKTDIFAGVVRLGRMKTQSRVTADARVGITGTPRKYMSVHLKDEDPTFKFKFRGCNVGKKIKTGAFSSEPIPENNERRHILGDETGRTLVQCATFLGCIMDPAGDIIEYRRRLLKNLAPYWKMSDPNAKPSQWVDRCVSGTDFERADCPQFLRTHNLSINWWLDNITGCESRLAKGTTAHIACEIRVNCGCVVTAPFALVFEAVTAVDGSSLGGITGTLDDDGRITLSDGLGLVQVGDKGKTFNLMAFGGDDEYHEKYADLCRSTRPDKLVVPTKEAPSSRVLVREEFKHSMTRSYAYVDTDGSGNLLISRGGPIGDYTIAGVCIDNHLGKKGGQEKGVTIR

SEQ ID NO: 22490 - DNA, 3957 bp, Muscodor strobelii
  misc_feature: SGI EST ID NO. CUFF.52851.2
  misc_feature: Variant of the nucleotide sequence at SEQ ID NO 22488
tggggcgacacctccatccacaaatcgccaatacttgctttccagcctcaggcagcacctgcgaatggctggcaagacggccacacctgtagatagttgcatactggcagccgtcagcacaattgcaaaaattacattctttacacatcaaacactaccacaatctgcccccttcctttcgtattacttttaagacctcagcaagatgggaacaacgcacaagtccaattgttacttaacattatacttcagccaacttaatgctgattatataaaccagattaagtgagcaattttagctaacctacagggattctcgatgggctgaaacgctcatcgatcttacgcttggcatgcagcctaatctgttcctactcgcctatggtgaggggctatgatgatctgttgtcactgatacctaaagcgatgagtcaatgttggtccaagtcattgctcgactagagctaacctaacaacgccctgggaaacgttcgaacctcatgcaacatccgtggagatggggcctatcactccaattagacttctttgtcagcgagacggaaagttctctgtcatcgaaccagctgagggcaagtcctacgactttgatatcatctcctatcgttggggcggaaaggttagcccgtacaattgccggctcgatggcgtgacatggaacgtcacgataccgcagaagaagctggaagacattgagcgactgatggtcacaaaggggattcagtacatgtgggctgactgcgtgtgcatcagcgaagccaacaagcgggagcaggccgccgagatcgccaagatgtacgactactatggcacgtacaaaacaatccagttcctttttttattcgttattttctagaaggatctttgctaatacgtgttgtaaaagcagccaagcggtgctacatcctcgtagacatggcagagatattctatcctcagcaagtcgtagacaatctcaagtttctggatcacgtcctctcgctcatcggcgaggccgcgatggcttccgacagcgtggagctgacggagaagacggccagccggctgggaatctgggcgaatgaagccccgtgggctttcagccttgagaagccgacagtgcgatctgcggccgtggacatgggcgtaatcaactgctactcaacctgcaccaaccagatcaagtcggttttccgcaatgagtacttctcaagggtgtggacgttccaagagatgctcttggggaagaatgtcgaagtctttgctatggattctcagaatgtgtcttgtattgggacgcttgacatctggatggacctcgctactgatgcaatggataaggcgacgaagctatacgcatggatagagaatgccagagttcgccggacctcgtccgtcaatctcatcctcagattcattgacgaggatgtcgttcgacttaactttctccaaacccaggtcaggggcattatgtgcgcacgaactgacatcatcaacggtggtcctcagtggtggatacagaactacaagggagtcagcaacatcttctcagccatctccttgaccccgagacaatgtgaaaagagaatggatctattccgggggcttttggggatcttcaaagggctcttcacgcaggaagagatcgaaaaggacttgtcgggtgaagacatcgactctatgtcctttgccttcttcaaacaactatcacttaagacaggccacgcttggacgaagctcgcgaccagcagccgggacagaggcgagtgggactggatcccggtcactgacatcggctcgaggaatgctggccctaacgtaacaaacgacatcaaaactgacatctttgccggcgtcgtccgattggggagaatgaaaacacaaagcagggtcacagcggacgcgagggtggggatcaccgggacgccgcgcaagtacatgagcgtacacctcaaagatgaagaccctacgttcaagttcaagttcaggggctgtaacgtcgggaagaagatcaagacgggcgcgttcagtagcgagccgatccccgaaaacaacgaacgccggcatatcctgggcgacgaaaccggtagaacgctcgtccagtgcgcgactttcctgggttgcatcatggacccggctggtgacatcatcgaataccggcgccggctactcaagaacctggcgccgtattggaagatgagcgatccgaatgccaaacccagccagtgggtcgatcgatgcgtatcgggcactgattttgagcgagccgactgtccgcagttcttacgtacccacaacctctcgatcaactggtggcttgacaacatcactgggtgcgagtcacggctcgcgaagggcacgacagcgcatatcgcgtgcgagatccgcgtcaactgcggctgcgtcgtcacagcgccctttgcgctcgtcttcgaagccgtcacagccgtcgacggcagctcgctcggcggcatcaccggcacgctagatgacgatgggcgcatcacgctcagcgacgggctcgggctcgtgcaggttggcgataagggcaagacgttcaatctcatggctttcgggggtgacgacgagtatcatgagaagtatgccgacctctgtcgcagcacacggccggacaagcttgtggtcccgacgaaggaggcgccctctagtagggtcctggtgagggaagagttcaaacacagcatgacgaggtcgtacgcatacgtcgacaccgacggatcggggaacttattaatctcacggggtggtccaataggtgattatacgattgctggagtatgtatagataatcacctggggaagaagggcggccaggaaaagggggtgactattcggtgaaaccaacgagctcattcatgcacatgtagagagatatgcaggctggtttatcatttcgcgccatttgatatgttcccacacaatgttctgaccagagcgtgatgccctctaatgaccatcgaataagatactagtttttggcgcttccatggccgggatcaagacgcaaaaggccaaaggggcggatatcgaactcggcaggggtccttcgtagcgaagacactggaaagttcctgaaaagagagtcgagtcgcagtatcgcgctttcaccggcccagcacgaaaggtccagcacatgcgccacgctgtctcttggtcatcgttcccttttcgtctactggagcagccatcacaatcgaccgttcgggtcatgattctttaagcttatgctcaacttcaatcgaataccagcactgaggacgcaaaatataacgaacctaccagcgcgccggaatggtccatctttggctcggggttcacttccttaacgggtgaagcagcaaaaacaatagccaacctctctttgccgcgcgcaacaaggatcattggtaaacccacgtcagcgccgagtctcgagtcgacaacatcgacctctagccgacaacgacgcctcccgggaacaagaatttctcggctatcccatcaccgatcatcgatatcggatatcggaagccaattacccgatgtcggatgcccggagggtgtatgtcagtacggccgatatataccaagattccgtggcacgtcaaatccctcacaccatctcctcacgaacaacaagatcaatcaagatactgtcaagataaaaaacacttagtcaagtctcacgatcccaaatgaagtacaatgttcaattaatgtccctaagatgtcgcaatctcacattaagcctccaagctactgccaaaaaatgtcaaagactccccatattcaaatgccaagcacgccgtacaccatgaccatgcgcgaagtaatcgtggctatatccagcgacagcagtcgtgaattcagcgctgtccgccccttacagcctgatgaggcaatagaaactagaatatccatgtaaaagactcctttacctcaaaagtcaccgaatgtcta

SEQ ID NO: 22491 - DNA, 2187 bp, Muscodor strobelii
  misc_feature: SGI cDNA ID NO. 567638
  misc_feature: Elevated expression when VOC is produced
  misc_feature: Encodes the peptide sequence at SEQ ID NO 22492
atgtcaccctccgcagtgacgcccgaggtggtcgcaactcttccgctcaatgtatcacagaagcacggagatggtggactgatcattgagttgcaagataccgaacgctcaagacgcgtactccaaacctttagatgttttattgccgacttgtgtgagcagttcaagggtggccatcctgggagtgccatgggaatggcgcctatgggcatcgctctctggaaatacgtaatgcagtattcacccgaaaaccccaactatttcaacagggatcgttttattttatcaaatggacacacctgtctcttccaatacacgttcatgcacttagtgggttaccaaaacatgacaatcgaccaactcagatcttatcactccaccagaacggactctagctgcccaggacatcccgaaatcgagcacgagggtatcgaagtcacaaccgggccgttaggccagggcgtcgccaatgctgttggcctggccatggccacaaagcatctggctgcaacatacaataaacccaattttcccgttatcagcaataagacatggtgcgtgaccggagacgcatgtctacaagaaggtgtcgcattggaagccatatcgctcgctggccactggaaattaaataatctgattctcatatatgacaacaatcagataacatgtgatggctcggttgatttagcttgcacagaggatgttaacacaaagatggccgcatgtggctggagagttctcaacgtcgatgatggaaatgaagatatacaagcaatcgttgatgcgctggtgatcgccaaagccgagactgaggaacccgtattcatcaacattaagacgacgattggaataggaagcaaggtggcaggcgacgccaaagcgcatggtgcggctctcggccccgaggatgtagccaatatcaaacgagactcagggatggatccagaggagcattttgtaattcctagcgcgacgtacgaattttttgctgaggtgcgcgatcgtggacgtcgatacgaacgagactggaagaagctagttgaggcatatggaaaggagcatccagagctagcggctgagtttatttatcgtgtgaagggtgagatggtgggtgactgggagaagctcataccgaccaaagacgagttgcccacatcaccgacagcatcaaggaaatctgcaggacttgtctgtaacccactggcagccgggctcagaaatatcatggtgggcacggcagatttgtctccttcggtcaacatgatatggaaaggcaaagttgatttccaacatcctaatatgcggccgacttgtggtatcaacggcgactataccggtcgctacatccattggggcattagagagcacgcgatggcggccataagcaacggtctcgcagctttcaataaaggcacaattctgccagtcacatcgtcctttttcatgttctacctctatgctgcacctggcgtccgcatgggtgcactgcagcaacttcaagctatccatattgctacacatgacagcatcggtactggcgaggatggtcctacacaccaaccggtcgagctggcagcattgtaccgcgcaatgccgaatctactctacatccgaccctgtgacagcgaggaaactgctggcgctttcacagccgccttgcgcgccacgtcgtcgcccactatcatatcgctctcccggcagaatcttccacagtacccgcagcatacatcccgggatggcgtggcgagaggggcatatgtctttatagaagaggccaatgccgatgttacactaattggtgtgggctccgagatgaagttcgccgttggcgcccgagatattctggcatcaaagtatgggattaaagcccggattgtgtctttcccatgtcagcggcttttcgaggcacaggaccgcgcgtacaggaccgaagttctacaataccgctccagagcgccccgtattgtcgtcgaggcgtacgctgcaaatggctgggaaagatatgcagatgctggctattcgatgagctctttcggtcactcactgccaggtgctaaggcatacgaattcttcggctacgatgaggagcttattgcctcgcgcgtccgggactttctaaaagagatggaagccgaaggtggagtttacggagagttcagagatctcaacgtacgttcgcactag

SEQ ID NO: 22492 - protein, 728 aa, Muscodor strobelii
  misc_feature: SGI Peptide ID NO. 567638
  misc_feature (387)..(572): Pfam Id: PF02779 Pfam Desc: Transketolase, pyrimidine binding domain
  misc_feature (36)..(371): Pfam Id: PF00456 Pfam Desc: Transketolase, thiamine diphosphate binding domain
  misc_feature (586)..(627): Pfam Id: PF02780 Pfam Desc: Transketolase, C-terminal domain
  misc_feature (29)..(711): NCBI GI: 261352625 Blast Desc: dihydroxyacetone synthase [Verticillium albo-atrum VaMs.102]
  misc_feature (32)..(728): NCBI GI: 212544438 Blast Desc: dihydroxy-acetone synthase, [Penicillium marneffei ATCC 18224] gi|210065342|gb|EEA19436.1| dihydroxy-acetone synthase, [Penicillium marneffei ATCC 18224]
  misc_feature (1)..(728): NCBI GI: 46116446 Blast Desc: FG04065.1 [Gibberella zeae PH-1]
  misc_feature (1)..(728): NCBI GI: 256723106 Blast Desc: [Nectria haematococca mpVI 77-13-4]
  misc_feature (31)..(728): NCBI GI: 242790941 Blast Desc: dihydroxy-acetone synthase, [Talaromyces stipitatus ATCC 10500] gi|218718247|gb|EED17667.1| dihydroxy-acetone synthase, [Talaromyces stipitatus ATCC 10500]
  misc_feature (30)..(728): NCBI GI: 119474265 Blast Desc: transketolase [Neosartorya fischeri NRRL 181] gi|119407161|gb|EAW17111.1| transketolase [Neosartorya fischeri NRRL 181]
  misc_feature (30)..(724): NCBI GI: 159128244 Blast Desc: dihydroxy-acetone synthase, [Aspergillus fumigatus A1163]
  misc_feature (30)..(724): NCBI GI: 70986238 Blast Desc: dihydroxy-acetone synthase [Aspergillus fumigatus Af293] gi|66846242|gb|EAL86575.1| dihydroxy-acetone synthase, [Aspergillus fumigatus Af293]
  misc_feature (11)..(724): NCBI GI: 256720584 Blast Desc: NECHADRAFT_49818 [Nectria haematococca mpVI 77-13-4]
  misc_feature (40)..(723): NCBI GI: 67903128 Blast Desc: AN8551.2 [Aspergillus nidulans FGSC A4] gi|40747820|gb|EAA66976.1| AN8551.2 [Aspergillus nidulans FGSC A4] gi|259484505|tpe|CBF80783.1| TPA: dihydroxy-acetone synthase,
  misc_feature (40)..(723): SWISSPROT Homolog: EC 2.2.1.3 Formaldehyde transketolase
  misc_feature: Useful for introducing or modulating the production of volatile compounds
  misc_feature: Useful for fungicidal and/or biocontrol applications
MSPSAVTPEVVATLPLNVSQKHGDGGLIIELQDTERSRRVLQTFRCFIADLCEQFKGGHPGSAMGMAPMGIALWKYVMQYSPENPNYFNRDRFILSNGHTCLFQYTFMHLVGYQNMTIDQLRSYHSTRTDSSCPGHPEIEHEGIEVTTGPLGQGVANAVGLAMATKHLAATYNKPNFPVISNKTWCVTGDACLQEGVALEAISLAGHWKLNNLILIYDNNQITCDGSVDLACTEDVNTKMAACGWRVLNVDDGNEDIQAIVDALVIAKAETEEPVFINIKTTIGIGSKVAGDAKAHGAALGPEDVANIKRDSGMDPEEHFVIPSATYEFFAEVRDRGRRYERDWKKLVEAYGKEHPELAAEFIYRVKGEMVGDWEKLIPTKDELPTSPTASRKSAGLVCNPLAAGLRNIMVGTADLSPSVNMIWKGKVDFQHPNMRPTCGINGDYTGRYIHWGIREHAMAAISNGLAAFNKGTILPVTSSFFMFYLYAAPGVRMGALQQLQAIHIATHDSIGTGEDGPTHQPVELAALYRAMPNLLYIRPCDSEETAGAFTAALRATSSPTIISLSRQNLPQYPQHTSRDGVARGAYVFIEEANADVTLIGVGSEMKFAVGARDILASKYGIKARIVSFPCQRLFEAQDRAYRTEVLQYRSRAPRIVVEAYAANGWERYADAGYSMSSFGHSLPGAKAYEFFGYDEELIASRVRDFLKEMEAEGGVYGEFRDLNVRSH

SEQ ID NO: 22493 - DNA, 2415 bp, Muscodor strobelii
  misc_feature: SGI EST ID NO. CUFF.52884.0
  misc_feature: Variant of the nucleotide sequence at SEQ ID NO 22491
ccgggataccgtttagatcgatgcgcgccgcaacccaagaagccttagccccagatcagtcttgaaattataagacgtagagaaagcacagaaatcaaatgtgaagagttccaatatcacattcaacctcaacgaccttttgttccttgaaacctaaattaattgaatagttagaaaataatgtcaccctccgcagtgacgcccgaggtggtcgcaactcttccgctcaatgtatcacagaagcacggagatggtggactgatcattgagttgcaagataccgaacgctcaagacgcgtactccaaacctttagatgttttattgccgacttgtgtgagcagttcaagggtggccatcctgggagtgccatgggaatggcgcctatgggcatcgctctctggaaatacgtaatgcagtattcacccgaaaaccccaactatttcaacagggatcgttttattttatcaaatggacacacctgtctcttccaatacacgttcatgcacttagtgggttaccaaaacatgacaatcgaccaactcagatcttatcactccaccagaacggactctagctgcccaggacatcccgaaatcgagcacgagggtatcgaagtcacaaccgggccgttaggccagggcgtcgccaatgctgttggcctggccatggccacaaagcatctggctgcaacatacaataaacccaattttcccgttatcagcaataagacatggtgcgtgaccggagacgcatgtctacaagaaggtgtcgcattggaagccatatcgctcgctggccactggaaattaaataatctgattctcatatatgacaacaatcagataacatgtgatggctcggttgatttagcttgcacagaggatgttaacacaaagatggccgcatgtggctggagagttctcaacgtcgatgatggaaatgaagatatacaagcaatcgttgatgcgctggtgatcgccaaagccgagactgaggaacccgtattcatcaacattaagacgacgattggaataggaagcaaggtggcaggcgacgccaaagcgcatggtgcggctctcggccccgaggatgtagccaatatcaaacgagactcagggatggatccagaggagcattttgtaattcctagcgcgacgtacgaattttttgctgaggtgcgcgatcgtggacgtcgatacgaacgagactggaagaagctagttgaggcatatggaaaggagcatccagagctagcggctgagtttatttatcgtgtgaagggtgagatggtgggtgactgggagaagctcataccgaccaaagacgagttgcccacatcaccgacagcatcaaggaaatctgcaggacttgtctgtaacccactggcagccgggctcagaaatatcatggtgggcacggcagatttgtctccttcggtcaacatgatatggaaaggcaaagttgatttccaacatcctaatatgcggccgacttgtggtatcaacggcgactataccggtcgctacatccattggggcattagagagcacgcgatggcggccataagcaacggtctcgcagctttcaataaaggcacaattctgccagtcacatcgtcctttttcatgttctacctctatgctgcacctggcgtccgcatgggtgcactgcagcaacttcaagctatccatattgctacacatgacagcatcggtactggcgaggatggtcctacacaccaaccggtcgagctggcagcattgtaccgcgcaatgccgaatctactctacatccgaccctgtgacagcgaggaaactgctggcgctttcacagccgccttgcgcgccacgtcgtcgcccactatcatatcgctctcccggcagaatcttccacagtacccgcagcatacatcccgggatggcgtggcgagaggggcatatgtctttatagaagaggccaatgccgatgttacactaattggtgtgggctccgagatgaagttcgccgttggcgcccgagatattctggcatcaaagtatgggattaaagcccggattgtgtctttcccatgtcagcggcttttcgaggcacaggaccgcgcgtacaggaccgaagttctacaataccgctccagagcgccccgtattgtcgtcgaggcgtacgctgcaaatggctgggaaagatatgcagatgctggctattcgatgagctctttcggtcactcactgccaggtgctaaggcatacgaattcttcggctacgatgaggagcttattgcctcgcgcgtccgggactttctaaaagagatggaagccgaaggtggagtttacggagagttcagagatctcaacgtacgttcgcactagtatatcataatagtcattaaagtcatacagatgttgcattttaaggaa

SEQ ID NO: 22494 - DNA, 1710 bp, Muscodor strobelii
  misc_feature: SGI cDNA ID NO. 567639
  misc_feature: Encodes the peptide sequence at SEQ ID NO 22495
atggcgattgccatggccatgggctggcacaagcccgacaacgtcgccggctcgtcggccccggccatcatggtcgggctcttcgtcgcgaccggcgggcttctgtttggctacgatactggcaccatcaacggcatcctcgccatgccttcgttcatagatcagttcgcaacaagcctcgactacgacaaatctcccccgacccccgtcctccagcccggccagacgtccatcaccgtcgccatcctcagcgccggcaccttcgccggctccctcatctccgcccccttcggcgactggatcggtcgtcgctggtccatcatcgcctccatcgccgtcttcatcgtcggcgtcatcttccagatctcggcttctgcctttcctctgctgctagccggacgattcttcgctgggctcggggttggcgcggtgtcggtgctcgtgccgctgtaccagtccgagatggcccccaaatggatacggggcacgttggtctgcgcgtaccagttctccatcacgctcggcttactcgctgcctccatcgtgaaccaattgacgtaccagctgcacggctctgccgcttaccgcatccccataggcctgcagctcacctgggccatcgtcctcagcctgggtctgctcatcctgcccgagacgcctcgctacctcatcaaacgcggaaacaagcgcgccgcagccctcgccctcagccgcctccgccgcctcgacatcacccacccggccctcgtcgaagagctcgccgagatcgaagccaaccacgactacgagctgaccctcggcaccgcgtcctacaaggacatcttcaccggctctccccacctcggccgccgcatcctgacgggctgtggcctgcagatgctccagcagctcaccggcatcaacttcatcatgtactacggcaccaccttcttcaaccaggccggcatcgccaatcccttcctcatctccctcgtcttgaacgtcatcaacgtcgtctccaccgtgccgggcctgtttgtcgtcgagacgtggggccgccggaaactgctcatcgtgggctccattggcatggccatctgccaactgatcatcggtgccttttccaccgctgtccctcacatgaagggactcgtcgcgcagctgctcatcgccttcacggcctttttcgtcttcttctatgccgcctcctggggccccgtggcctgggtcgtcacgtcggagatctacccgctcaaagttcgagccaagtccatgtcgatatccacggcttcgaactggctgctgaacttcggcatcgcctacggcacaccgttcctggtagaagagggcaaaggggctgcctcgctggggaacaaggtattcttcctgtggggcgccttctgcattttgggtgtcttcttcgtctacggcatggtctacgaaacgagcaagatcagtctcgagcagatcgacgagatgtatgaacgagtgcacttcgcctggaagagtaaagagttcgagcccagctggagtttccaacagctgcgcgatcttggatttgccgacagtggcgtccctccgacggaacacgagttggcaccctcggtgacgggccagacggacacgagcatagacacgatacagacggcacatcacccggaaaacagcgagtcggaagaagacaaggcaatacgggaactggggttgggtaatgtcgatttcagctattga

SEQ ID NO: 22495 - protein, 569 aa, Muscodor strobelii
  misc_feature: SGI Peptide ID NO. 567639
  misc_feature (29)..(436): Pfam Id: PF07690 Pfam Desc: Major Facilitator Superfamily
  misc_feature (25)..(487): Pfam Id: PF00083 Pfam Desc: Sugar (and other) transporter
  misc_feature (1)..(569): NCBI GI: 116181510 Blast Desc: CHGG_01383 [Chaetomium globosum CBS 148.51] gi|88185680|gb|EAQ93148.1| CHGG_01383 [Chaetomium globosum CBS 148.51]
  misc_feature (1)..(569): NCBI GI: 85119774 Blast Desc: NCU02582 [Neurospora crassa OR74A] gi|67477413|sp|Q92253.2|RCO3_NEUCR RecName: Full= glucose transporter rco-3 gi|28927525|gb|EAA36477.1| NCU02582 [Neurospora
  misc_feature (5)..(569): NCBI GI: 171695918 Blast Desc: protein product [Podospora anserina] gi|170948201|emb|CAP60365.1| protein product [Podospora anserina]
  misc_feature (1)..(569): NCBI GI: 1314738 Blast Desc: RCO3 [Neurospora crassa]
  misc_feature (3)..(569): NCBI GI: 283482561 Blast Desc: hexose transporter [Glomerella graminicola]
  misc_feature (3)..(569): NCBI GI: 256734871 Blast Desc: [Nectria haematococca mpVI 77-13-4]
  misc_feature (3)..(569): NCBI GI: 46135639 Blast Desc: FG09342.1 [Gibberella zeae PH-1]
  misc_feature (3)..(569): NCBI GI: 46115340 Blast Desc: FG03512.1 [Gibberella zeae PH-1]
  misc_feature (99)..(569): NCBI GI: 145616012 Blast Desc: MGG_03620 [Magnaporthe grisea 70-15] gi|145009795|gb|EDJ94451.1| MGG_03620 [Magnaporthe grisea 70-15]
  misc_feature (70)..(505): NCBI GI: 261355203 Blast Desc: high-affinity glucose transporter RGT2 [Verticillium albo-atrum VaMs.102]
MAIAMAMGWHKPDNVAGSSAPAIMVGLFVATGGLLFGYDTGTINGILAMPSFIDQFATSLDYDKSPPTPVLQPGQTSITVAILSAGTFAGSLISAPFGDWIGRRWSIIASIAVFIVGVIFQISASAFPLLLAGRFFAGLGVGAVSVLVPLYQSEMAPKWIRGTLVCAYQFSITLGLLAASIVNQLTYQLHGSAAYRIPIGLQLTWAIVLSLGLLILPETPRYLIKRGNKRAAALALSRLRRLDITHPALVEELAEIEANHDYELTLGTASYKDIFTGSPHLGRRILTGCGLQMLQQLTGINFIMYYGTTFFNQAGIANPFLISLVLNVINVVSTVPGLFVVETWGRRKLLIVGSIGMAICQLIIGAFSTAVPHMKGLVAQLLIAFTAFFVFFYAASWGPVAWVVTSEIYPLKVRAKSMSISTASNWLLNFGIAYGTPFLVEEGKGAASLGNKVFFLWGAFCILGVFFVYGMVYETSKISLEQIDEMYERVHFAWKSKEFEPSWSFQQLRDLGFADSGVPPTEHELAPSVTGQTDTSIDTIQTAHHPENSESEEDKAIRELGLGNVDFSY

SEQ ID NO: 22496 - DNA, 3032 bp, Muscodor strobelii
  misc_feature: SGI EST ID NO. CUFF.53217.0
  misc_feature: Variant of the nucleotide sequence at SEQ ID NO 22494
gtcgccagcccattggcgttggagggtgctcgcagtcgtcgtgggcgccgatccctgccggacgtggctctgctgaccgactgggccttcttgcgactgtggtgtttccctccctcccgccttttccctcgctgtcactcttctccaccgtcctgtccaccctgcacctcgaaacctctaacctctcgctcgccgtcgtcgtatcgtctgttatacccaccatcaccatcatcatcgtcatccgtccatcaatgggagcccgcagcccgagaccgacgacaactgctgctaccgccaccgcctcccgtccgacgacgctctcctcgtaacgacgccgtcgcgaccgtgtcgacaccaccgccgaccctggcttgacgagcctctcgctgcaccatggcgattgccatggccatgggctggcacaagcccgacaacgtcgccggctcgtcggccccggccatcatggtcgggctcttcgtcgcgaccggcgggcttctgtttggctacgatactgggtgagcctccaccgccgcgacgaccgtctcccgttgtccgcatcgtctgctaaccccgaggcaccgtccgcagcaccatcaacggcatcctcgccatgccttcgttcatagatcagttcgcaacaagcctcgactacgacaaatctcccccgacccccgtcctccagcccggccagacgtccatcaccgtcgccatcctcagcgccggcaccttcgccggctccctcatctccgcccccttcggcgactggatcggtcgtcgctggtccatcatcgcctccatcgccgtcttcatcgtcggcgtcatcttccagatctcggcttctgcctttcctctgctgctagccggacgattcttcgctgggctcggggttggcgcggtgtcggtgctcgtgccgctgtaccagtccgagatggcccccaaatggatacggggcacgttggtctgcgcgtaccagttctccatcacgctcggcttactcgctgcctccatcgtgaaccaattgacgtaccagctgcacggctctgccgcttaccgcatccccataggcctgcagctcacctgggccatcgtcctcagcctgggtctgctcatcctgcccgagacgcctcgctacctcatcaaacgcggaaacaagcgcgccgcagccctcgccctcagccgcctccgccgcctcgacatcacccacccggccctcgtcgaagagctcgccgagatcgaagccaaccacgactacgagctgaccctcggcaccgcgtcctacaaggacatcttcaccggctctccccacctcggccgccgcatcctgacgggctgtggcctgcagatgctccagcagctcaccggcatcaacttcatcatgtactacggcaccaccttcttcaaccaggccggcatcgccaatcccttcctcatctccctcgtcttgaacgtcatcaacgtcgtctccaccgtgccgggcctgtttgtcgtcgagacgtggggccgccggaaactgctcatcgtgggctccattggcatggccatctgccaactgatcatcggtgccttttccaccgctgtccctcacatgaagggactcgtcgcgcagctgctcatcgccttcacggcctttttcgtcttcttctatgccgcctcctggggccccgtggcctgggtcgtcacgtcggagatctacccgctcaaagttcgagccaagtccatgtcgatatccacggcttcgaactggctgctgaacttcggcatcgcctacggcacaccgttcctggtagaagagggcaaaggggctgcctcgctggggaacaaggtattcttcctgtggggcgccttctgcattttgggtgtcttcttcgtctacggcatggtctacgaaacgagcaagatcagtctcgagcagatcgacgagatgtatgaacgagtgcacttcgcctggaagagtaaagagttcgagcccagctggagtttccaacagctgcgcgatcttggatttgccgacagtggcgtccctccgacggaacacgagttggcaccctcggtgacgggccagacggacacgagcatagacacgatacagacggcacatcacccggaaaacagcgagtcggaagaagacaaggcaatacgggaactggggttgggtaatgtcgatttcagctattgaccaacaaccacaacacacttctatctgcatggcgtctcatcattatcattatcatcatcatcataccctcggtcgaaattcctcattacccaatcgcataggttcatccggcatcattgtttttgtccccttttcacgatctacgcaaattattatatcagcgacggagttggcaggaacgggaaacggcatcggagttgattcgggaatttcaaaggctctctcggagggtcaaatttggggataccattccactggataccaggacaggcttgggctcaagtcaaggggcaggctttcggttttactatggggcaccagtccttgctcggcgcgataccatcagcggctcaacggcctgcaagtaacataatcatctacacgcgacatatctacccacctctggctgccggccattatacgaaactgctattcctgggatctagatacctctacgctagatcttagcgggcagtgcaacgacgggagcattctcctcgatctctatatacagttatcttatgtcttcggtagataggttatgaaatccactttggctactaggtcacctaattcaagtcaaccggtatccggagcatgaccgtcacatgattgaattgataagtgaactcaacctatactggacggtagtatggccatctttctagcgtctcgcatttgaaaatgcttagcctataaagatttccttgcgaaaatagtcgcggaaatgacagctgagggaacccacttagacattacagtaattcaacagacaccctttccacggtgatcaggatatgctcacttagcctctggactttatatacgtagaccagcatgaatgatacgtctccca

SEQ ID NO: 22497 - DNA, 1935 bp, Muscodor strobelii
  misc_feature: SGI cDNA ID NO. 567640
  misc_feature: Encodes the peptide sequence at SEQ ID NO 22498
atggcctacgggataatgggcagctttccagactctcacatcctgacctaccagaccaccaggcccatcagagccgtatatttcgacggcgaatcagccacgctcatgggcctcgggcaactagacagtcagatgctacacatctacggcaacatcagcggcccacctgataacggaggcggctttggcggcttaggcgcagaatacgcgcgcgcccacggtctctgcgattggctgcttcggtccggtctgcgcggtcccggctggggcttcgaaggcgtcatccgtatgaacgccgggttcgaggtgatttggtgcgattttacaagtcccagtctgaggttgctgtcgcaggttaatgttacggcgccgttgctcccggttgatgaggggggagaagaagacgaaggacaagatagatggagcgtggcttgggaagacgagcagcaagatgtagaagtcctcgaacttagacatcgtagagtagaaggtcccgaagattcagatccacctccctactacactcttccccctaaacccacccgcaccgactcctccagcgacccgactaatcccgcgatgcccccaaactggcgtcgcggcgaccgcgagccgtttctggcagcgcaaacctggggctggttcgacagcgccgtgtcgcattacggcggacccgtggccggcggctacgggtctggatccggcgagatgcgcgcacgagtcctcccttgcgggattctaagttattactcgcctcgctttggccgtctctcagcatggcgggctggagaggagcgcttgcgcctgaatttaacggagagtgggtactgggggaaagcaggtgtagttgaagggaagagtgatgagaatgaaagtggaatgtcgagtgaagatcgacaaagggcgctagaggatctcactcggcgtaggcggttccatcacttagctaatacgacgaccgaggaggcggagataatgcgaagagatgcggagcgcacgttgaaacgatacatcgaatctggagccgaccctgaaatgtgctccggtgcaggctgggtcgtcatggcaaatgagataaaacagaccacgacgacacagatccaggaaacgatgttgtcactctcgagtttccctcctaatgatggtgacagcgacggcaacactcatactatccctaacaccaacgctactgcgttgcgatcatggctggcaaacatccgatccttaaaccacctcttcatggtcagttatctcgaatatcccaaagtaagctccaccacccccgatcaagacccgtctaccatctggggcacaagctcagacctatacgcgcaaacttactcgcgttgtcgataccgatatacccggctgatggaaccatcatcctcatcgcccaccacagaccctctcaactccgaagagcaggatctccggtgggccatcgaggaaacctttggggcaatctgctcagtgctactaaccattggcttcgggatcgagcaagcttgggccacgcactttcagtacccatacagtcaatacaaggatacatcaatatcgagccagaaagtaaccgatgatttacgcaaccttgcggtatcttggataggtggtctcgatgagctcgtggcttggctggggtgggctgacgagttcgctggctgcaaggaagtctgtgcttggaatgagagatgttatatccctttgtggccactcatacagtttcgaggtccgccaggtggtatgccgcgaccgcctcgcaacggtacgcgtccgggacggccaccaccacaccatggtggtgatgggcctggcaaaggggatcccagtggtgggctgccctcccgagatggtcgtagatcggcttggttttatgatgatacggatctatgggagccgaagtgcatcaaggcgtcatatttcgtgcgcggatga

SEQ ID NO: 22498 - protein, 644 aa, Muscodor strobelii
  misc_feature: SGI Peptide ID NO. 567640
  misc_feature (1)..(371): NCBI GI: 212544338 Blast Desc: serine protein kinase, [Penicillium marneffei ATCC 18224] gi|210065292|gb|EEA19386.1| serine protein kinase, [Penicillium marneffei ATCC 18224]
  misc_feature (1)..(644): NCBI GI: 171680680 Blast Desc: protein product [Podospora anserina] gi|170939967|emb|CAP65193.1| protein product [Podospora anserina]
  misc_feature (440)..(563): NCBI GI: 212544340 Blast Desc: PMAA_001820 [Penicillium marneffei ATCC 18224] gi|210065293|gb|EEA19387.1| PMAA_001820 [Penicillium marneffei ATCC 18224]
  misc_feature (1)..(103): NCBI GI: 242214510 Blast Desc: [Postia placenta Mad-698-R] gi|220727815|gb|EED81723.1| [Postia placenta Mad-698-R]
  misc_feature (13)..(120): NCBI GI: 171679850 Blast Desc: protein product [Podospora anserina] gi|170939551|emb|CAP64778.1| protein product [Podospora anserina]
  misc_feature (14)..(121): NCBI GI: 169859963 Blast Desc: [Coprinopsis cinerea okayama7#130] gi|116502294|gb|EAU85189.1| [Coprinopsis cinerea okayama7#130]
  misc_feature (14)..(124): NCBI GI: 156848780 Blast Desc: Kpol_1002p60 [Vanderwaltozyma polyspora DSM 70294] gi|156117956|gb|EDO19413.1| Kpol_1002p60 [Vanderwaltozyma polyspora DSM 70294]
  misc_feature (14)..(124): NCBI GI: 255711062 Blast Desc: KLTH0B00374p [Lachancea thermotolerans] gi|238933192|emb|CAR21375.1| KLTH0B00374p [Lachancea thermotolerans]
  misc_feature (1)..(113): NCBI GI: 50545563 Blast Desc: YALI0A21131p [Yarrowia lipolytica] gi|49646184|emb|CAG84257.1| YALI0A21131p [Yarrowia lipolytica]
  misc_feature (15)..(123): NCBI GI: 170094598 Blast Desc: [Laccaria bicolor S238N-H82] gi|164646974|gb|EDR11219.1| [Laccaria bicolor S238N-H82]
MAYGIMGSFPDSHILTYQTTRPIRAVYFDGESATLMGLGQLDSQMLHIYGNISGPPDNGGGFGGLGAEYARAHGLCDWLLRSGLRGPGWGFEGVIRMNAGFEVIWCDFTSPSLRLLSQVNVTAPLLPVDEGGEEDEGQDRWSVAWEDEQQDVEVLELRHRRVEGPEDSDPPPYYTLPPKPTRTDSSSDPTNPAMPPNWRRGDREPFLAAQTWGWFDSAVSHYGGPVAGGYGSGSGEMRARVLPCGILSYYSPRFGRLSAWRAGEERLRLNLTESGYWGKAGVVEGKSDENESGMSSEDRQRALEDLTRRRRFHHLANTTTEEAEIMRRDAERTLKRYIESGADPEMCSGAGWVVMANEIKQTTTTQIQETMLSLSSFPPNDGDSDGNTHTIPNTNATALRSWLANIRSLNHLFMVSYLEYPKVSSTTPDQDPSTIWGTSSDLYAQTYSRCRYRYTRLMEPSSSSPTTDPLNSEEQDLRWAIEETFGAICSVLLTIGFGIEQAWATHFQYPYSQYKDTSISSQKVTDDLRNLAVSWIGGLDELVAWLGWADEFAGCKEVCAWNERCYIPLWPLIQFRGPPGGMPRPPRNGTRPGRPPPHHGGDGPGKGDPSGGLPSRDGRRSAWFYDDTDLWEPKCIKASYFVRG

SEQ ID NO: 22499 - DNA, 1321 bp, Muscodor strobelii
  misc_feature: SGI EST ID NO. CUFF.52911.0
  misc_feature: Variant of the nucleotide sequence at SEQ ID NO 22497
tggatccggcgagatgcgcgcacgagtcctcccttgcgggattctaagttattactcgcctcgctttggccgtctctcagcatggcgggctggagaggagcgcttgcgcctgaatttaacggagagtgggtactgggggaaagcaggtgtagttgaagggaagagtgatgagaatgaaagtggaatgtcgagtgaagatcgacaaagggcgctagaggatctcactcggcgtaggcggttccatcacttagctaatacgacgaccgaggaggcggagataatgcgaagagatgcggagcgcacgttgaaacgatacatcgaatctggagccgaccctgaaatgtgctccggtgcaggctgggtcgtcatggcaaatgagataaaacagaccacgacgacacagatccaggaaacgatgttgtcactctcgagtttccctcctaatgatggtgacagcgacggcaacactcatactatccctaacaccaacgctactgcgttgcgatcatggctggcaaacatccgatccttaaaccacctcttcatggtcagttatctcgaatatcccaaagtaagctccaccacccccgatcaagacccgtctaccatctggggcacaagctcagacctatacgcgcaaacttactcgcgttgtcgataccgatatacccggctgatggaaccatcatcctcatcgcccaccacagaccctctcaactccgaagagcaggatctccggtgggccatcgaggaaacctttggggcaatctgctcagtgctactaaccattggcttcgggatcgagcaagcttgggccacgcactttcagtacccatacagtcaatacaaggatacatcaatatcgagccagaaagtaaccgatgatttacgcaaccttgcggtatcttggataggtggtctcgatgagctcgtggcttggctggggtgggctgacgagttcgctggctgcaaggaagtctgtgcttggaatgagagatgttatatccctttgtggccactcatacagtttcgaggtccgccaggtggtatgccgcgaccgcctcgcaacggtacgcgtccgggacggccaccaccacaccatggtggtgatgggcctggcaaaggggatcccagtggtgggctgccctcccgagatggtcgtagatcggcttggttttatgatgatacggatctatgggagccgaagtgcatcaaggcgtcatatttcgtgcgcggatgaaatgttcaacagttagagtagatttctgtagtttacaggattatataccacctgattcttaaagtctatttgtcaatcttc

SEQ ID NO: 22500 - DNA, 2127 bp, Muscodor strobelii
  misc_feature: SGI cDNA ID NO. 567641
  misc_feature: Encodes the peptide sequence at SEQ ID NO 22501
atggcaccgccatcttatagcgcctacgggtctgggagtggctaccaggccgcctcctacgcgtcacgctactcctctcgctcgctcgaccatggcgtctccatctgggacgagatcatagtcgcttcgagaaacttcacccgacggttgtgggcgtacggcagaggctacggtcgccattctgcctggagcgttgctatgagagccggtcatcagctgaggcgcaacatggtgcgccgccgtctactgagcctctcacatctgctggttgctctctgggtcgtggtgctgctctggggcgagcgatggctctttgccagcaaagtccagagctgcgactgggaccattgggaagactggcccgccggcgcaacaccgcaccgcctcgtcttcgtagccgaccctcaaatcatcgatcccaaatcctaccccggtcggccttggcccataaaccctataacgatgcgcatcaccgataattacatgtccaaatcatacaaccagatacagaagacgctccaccccgacaccgtcatgtttctcggcgacctgttcgacggtggcagggagtggaagaccgaccatggcgactttgacgatcccgagtgggccaaggaccacaggccagaagaggaaaagaagctgctgaagcagtggaacaagaaatacgacgagcgatattggctgaaagagtacacaagattcaacggcatcttctctaagacctgggggcttggtggcatcgtgcctggtccgtttcagcgtgggcgcaagctgatcaccagcttgcccggaaaccacgaccttggctttggagctgaggtcaaaatcccggcacgagatcgtttcagcgcctactttggtgagacaaacagagtggatgtcattgggaaccacactttcgtgtcggtggacacagtctcgctaagtgcagatacctcctatatgatggggcagatcgagttgcaagacatttataagccggtcaacgatttcttgtccgatgtgaaggcgaccaagaggcgtgccgtgcagaaagagctgcgcttctggagcggtgagatcgaagaagttctgttcgagcacaaagtggaaacactacgtgacgttgatgagaccaccaactcgcccaccctggaccccgggccaaactcgcccgattttcctaccatcctacttacacacgttccgctacaccgcgaccccggcaccccttgcggtcccatgcgcgaacactggcctccagccaagccgccgaaagggcaaaccacacccgtgatccccgacgatcggaatgccatcagcgtgtcttcgggttaccagtaccagaacgtgctcagtgagacggactcggtgaagctcatcaaaagcattgggaacgtaatccatgctttttcgggagacgaccacgactattgcgagcttgtccactcaccagaacaggaaaacgtccgtgagatcacggtcaagagtctgagcatggctatgggggtaccaaccccaggcttccagatggtatcgctttacaacccgctaggcaaagacggggagtccctggctaagacgcctacattgcagactcatctttgcctccttcccaaccagctctctaccttcatgacctacgccgcattaggcgtgctcagcattctcatcctcgtggccagggcttttctggttcctatattacaactccagcctttcgctctggacggtgtatacgccgcgtcctccgcggtccttcccgtcttcaaaccgaaagacgatgcggatgatgcgtcgaactttgatatcaactcttccgccgcggcatcggctagcaatctcccctcggcgagaatgccgtctacgaggatgaggggcggacacagtctggcgccgcaggtaatgcacacatcgccgagctcaaaggggaagagaggaccgggaggcaaatgggggtgggcgcagggcaaaggacccaggatacagattaggagggatgactattatgagaaaggggattcttggcgaccggctgctagacagagggggaggttgggtgtggtcgccacggagatttggacctcgacttggagggtggtctggatggccgtgggcttctttgcctggcttacatttgtatga

SEQ ID NO: 22501 - protein, 708 aa, Muscodor strobelii
  misc_feature: SGI Peptide ID NO. 567641
  misc_feature (127)..(472): Pfam Id: PF00149 Pfam Desc: Calcineurin-like phosphoesterase
  misc_feature (1)..(706): NCBI GI: 261355299 Blast Desc: cell division control protein [Verticillium albo-atrum VaMs.102]
  misc_feature (18)..(707): NCBI GI: 39943100 Blast Desc: MGG_03630 [Magnaporthe grisea 70-15] gi|145009785|gb|EDJ94441.1| MGG_03630 [Magnaporthe grisea 70-15]
  misc_feature (20)..(707): NCBI GI: 46105310 Blast Desc: FG00283.1 [Gibberella zeae PH-1]
  misc_feature (4)..(707): NCBI GI: 164424207 Blast Desc: NCU07483 [Neurospora crassa OR74A] gi|157070419|gb|EAA35794.2| conserved [Neurospora crassa OR74A]
  misc_feature (20)..(706): NCBI GI: 256734821 Blast Desc: NECHADRAFT_30592 [Nectria haematococca mpVI 77-13-4]
  misc_feature (4)..(707): NCBI GI: 4063002 Blast Desc: fr [Neurospora crassa]
  misc_feature (8)..(707): NCBI GI: 171687207 Blast Desc: protein product [Podospora anserina] gi|170943565|emb|CAP69217.1| protein product [Podospora anserina]
  misc_feature (13)..(592): NCBI GI: 116180860 Blast Desc: CHGG_01058 [Chaetomium globosum CBS 148.51] gi|88185355|gb|EAQ92823.1| CHGG_01058 [Chaetomium globosum CBS 148.51]
  misc_feature (121)..(707): NCBI GI: 156040261 Blast Desc: SS1G_12147 [Sclerotinia sclerotiorum 1980] gi|154696203|gb|EDN95941.1| SS1G_12147 [Sclerotinia sclerotiorum 1980]
  misc_feature (162)..(707): NCBI GI: 154300465 Blast Desc: BC1G_11056 [Botryotinia fuckeliana B05.10] gi|150856581|gb|EDN31773.1| BC1G_11056 [Botryotinia fuckeliana B05.10]
MAPPSYSAYGSGSGYQAASYASRYSSRSLDHGVSIWDEIIVASRNFTRRLWAYGRGYGRHSAWSVAMRAGHQLRRNMVRRRLLSLSHLLVALWVVVLLWGERWLFASKVQSCDWDHWEDWPAGATPHRLVFVADPQIIDPKSYPGRPWPINPITMRITDNYMSKSYNQIQKTLHPDTVMFLGDLFDGGREWKTDHGDFDDPEWAKDHRPEEEKKLLKQWNKKYDERYWLKEYTRFNGIFSKTWGLGGIVPGPFQRGRKLITSLPGNHDLGFGAEVKIPARDRFSAYFGETNRVDVIGNHTFVSVDTVSLSADTSYMMGQIELQDIYKPVNDFLSDVKATKRRAVQKELRFWSGEIEEVLFEHKVETLRDVDETTNSPTLDPGPNSPDFPTILLTHVPLHRDPGTPCGPMREHWPPAKPPKGQTTPVIPDDRNAISVSSGYQYQNVLSETDSVKLIKSIGNVIHAFSGDDHDYCELVHSPEQENVREITVKSLSMAMGVPTPGFQMVSLYNPLGKDGESLAKTPTLQTHLCLLPNQLSTFMTYAALGVLSILILVARAFLVPILQLQPFALDGVYAASSAVLPVFKPKDDADDASNFDINSSAAASASNLPSARMPSTRMRGGHSLAPQVMHTSPSSKGKRGPGGKWGWAQGKGPRIQIRRDDYYEKGDSWRPAARQRGRLGVVATEIWTSTWRVVWMAVGFFAWLTFV

SEQ ID NO: 22502 - DNA, 2939 bp, Muscodor strobelii
  misc_feature: SGI EST ID NO. CUFF.52924.0
  misc_feature: Variant of the nucleotide sequence at SEQ ID NO 22500
ctttcagctaatcattgcagtgtctcatctttgagatgaatgtgtgagctgttcagacagaagtagagtgtaaagccgtctagactccaataaaagaaacagccgcaggttggaacctgaatccccaggattccccagccccaaagctcagcgacaagcaacgacccctacaatacgggtccaacgtaaccgcatcctcgccgtcatccatatctagactgagctagcgtgtcactagagcctctggacgaccagaagaactcgttaggtacattaattgtgacgaacggacagccgctggcccctatatcattgatttaattattaattcacatcaagacacgacacaacacgacacgacacgctccgatggtgaacaactgagagcttttctactgattcgccgtgcgtgccgccgtccgtctcaccaacgtcgggcctctgccattgatggctcccgactcagatcgccatggcaccgccatcttatagcgcctacgggtctgggagtggctaccaggccgcctcctacgcgtcacgctactcctctcgctcgctcgaccatggcgtctccatctgggacgagatcatagtcgcttcgagaaacttcacccgacggttgtgggcgtacggcagaggctacggtcgccattctgcctggagcgttgctatgagagccggtcatcagctgaggcgcaacatggtgcgccgccgtctactgagcctctcacatctgctggttgctctctgggtcgtggtgctgctctggggcgagcgatggctctttgccagcaaagtccagagctgcgactgggaccattgggaagactggcccgccggcgcaacaccgcaccgcctcgtcttcgtagccgaccctcaaatcatcgatcccaaatcctaccccggtcggccttggcccataaaccctataacgatgcgcatcaccgataattacatgtccaaatcatacaaccagatacagaagacgctccaccccgacaccgtcatgtttctcggcgacctgttcgacggtggcagggagtggaagaccgaccatggcgactttgacgatcccgagtgggccaaggaccacaggccagaagaggaaaagaagctgctgaagcagtggaacaagaaatacgacgagcgatattggctgaaagagtacacaagattcaacggcatcttctctaagacctgggggcttggtggcatcgtgcctggtccgtttcagcgtgggcgcaagctgatcaccagcttgcccggaaaccacgaccttggctttggagctgaggtcaaaatcccggcacgagatcgtttcagcgcctactttggtgagacaaacagagtggatgtcattgggaaccacactttcgtgtcggtggacacagtctcgctaagtgcagatacctcctatatgatggggcagatcgagttgcaagacatttataagccggtcaacgatttcttgtccgatgtgaaggcgaccaagaggcgtgccgtgcagaaagagctgcgcttctggagcggtgagatcgaagaagttctgttcgagcacaaagtggaaacactacgtgacgttgatgagaccaccaactcgcccaccctggaccccgggccaaactcgcccgattttcctaccatcctacttacacacgttccgctacaccgcgaccccggcaccccttgcggtcccatgcgcgaacactggcctccagccaagccgccgaaagggcaaaccacacccgtgatccccgacgatcggaatgccatcagcgtgtcttcgggttaccagtaccagaacgtgctcagtgagacggactcggtgaagctcatcaaaagcattgggaacgtaatccatgctttttcgggagacgaccacgactattgcgagcttgtccactcaccagaacaggaaaacgtccgtgagatcacggtcaagagtctgagcatggctatgggggtaccaaccccaggcttccagatggtatcgctttacaacccgctaggcaaagacggggagtccctggctaagacgcctacattgcagactcatctttgcctccttcccaaccagctctctaccttcatgacctacgccgcattaggcgtgctcagcattctcatcctcgtggccagggcttttctggttcctatattacaactccagcctttcgctctggacggtgtatacgccgcgtcctccgcggtccttcccgtcttcaaaccgaaagacgatgcggatgatgcgtcgaactttgatatcaactcttccgccgcggcatcggctagcaatctcccctcggcgagaatgccgtctacgaggatgaggggcggacacagtctggcgccgcaggtaatgcacacatcgccgagctcaaaggggaagagaggaccgggaggcaaatgggggtgggcgcagggcaaaggacccaggatacagattaggagggatgactattatgagaaaggggattcttggcgaccggctgctagacagagggggaggttgggtgtggtcgccacggagatttggacctcgacttggagggtggtctggatggccgtgggcttctttgcctggcttacatttgtatgatgatacctccaggcctcttacagcaagagaaggattgaagccagtatatagtagggtgggaaatgtgaaaagggaccggaaaacgcaagcgggtgtggaactacactagtcgttttagcagagggcatttgtatgatatagatgggatagatgatgcatatctttgaaagatgagcctaccgagtgtgtagtacttggacttggtgtttcgagtgagcctttgtgcccatccacagtgttcagccatcacggattgcaacatgtatttatatgccacttatcttcgcttgctcgttacgtcaaggttcaggctggctatctcggcattcttcaatgcatt

SEQ ID NO: 22503 - DNA, 1881 bp, Muscodor strobelii
  misc_feature: SGI cDNA ID NO. 567642
  misc_feature: Reduced expression when VOC is produced
  misc_feature: Encodes the peptide sequence at SEQ ID NO 22504
atggcccctcgtgtcattgtcgttggtggcggcttgtccggcctcagcgctgcccacacaatctacctggctggtggaaatgtagtcgttctcgacaaacaaggtttctttggtggcaactctaccaaggccacttcaggtatcaacggtgctctcacgcggacccaggtcgaccacaagattcaggacagcgtgaagcagttctacgatgacactttgaagtccgcccgtgacaaggcgagaccagacctgatcaaggttctcacgtacaagtcagctgccgccgttgagtggctgcaggatgtattcaaccttgacctgactctagtttcccgtcttggtggacactcacagccgagaacacacagaggtcacgatgccaagttccctggaatggccatcacatatgctctcatgcagcgactcgaggagcttgccgagaccgaacccgagcgtgtccagatcatcaagaaggcccgggtaacgagcctgaacaaggagggaaacaagatcactggcgtccagtatgagtctaacggcgagagcagcaccgtcgagggccccgttgtcctcgccactggtggttacgctgctgacttcggcgacacctctctcctgaagcagcacagacccgacacttttggcctcgccaccaccaacggctcccacgccacgggtgatggacagaagatggtcatggccatcggcggaaacggcattgatatggacaaggtccaggttcaccctacgggtctcgttgaccccaaggatcccggctccaagtggaagttcttggctgccgaggctctgcgtggtgagggtggtctgctgctcaacgccgacggcgaccggttctgcgacgaactcggccaccgtgactacgtctccggcatgatgtggaaggagaaggacaagggcaagttccctatccgcctcatcttgaactccaaggcttccaacaccctggacttccacactcgccactactctggccgtggcttgatgaagaagatgaccggcaaggagctcgccaaggagattggctgcacacccgatcacctccagcagaccttcactacctacaacgccattgccgatggcaagcagaaggatccctggggcaagaagttcttccacaacttgcccattgacatcaacgacgacttccacgtctccttgatggaacccgtcctccatttcaccatgggtggcatcgagatcaacgacaaagcccaggtcttgaaccagtcccagcagcccttcgagggtctcttcgcctgcggtgagttggctggtggcgttcacggtgccaaccgtttgggtggctcctcgctgctaggctgtgtcgtctacggccgtgtggctggtgacactgccagcaactacctcttccagcaggccctctcgggctctgccggtgccgcccagcgtgttggccaaatttcgttgcacatcgacccctcccagcccggcaaggtctctgtcgagtgggccaacggtgccaccgcctctccgactgtaggccagcagacgagcgctgccggccccacgccgaccgccgacgctggtaagtcctcccagcccgctgccaaggcgcagagccctaagaagtttgaggttcctgagaaggaattcacgatggaggaggttgctaagcacaacaccaaggaggacctgtgggtggtggtcaagggtgtggtgatggacctctccaactggcttgaggagcaccccggtggcccgcaggcgatcatgaacttcatgggacgtgacgcgacggaggagtttgagatgttgcacgacgacgaggtgatccccaagtacgccccacagcaagtgatagggcgcgtcaagggccaggaggtcacgcttgagttctaa

SEQ ID NO: 22504 - protein, 626 aa, Muscodor strobelii
  misc_feature: SGI Peptide ID NO. 567642
  misc_feature (544)..(618): Pfam Id: PF00173 Pfam Desc: Cytochrome b5-like Heme/Steroid binding domain
  misc_feature (4)..(458): Pfam Id: PF01266 Pfam Desc: FAD dependent oxidoreductase
  misc_feature (4)..(445): Pfam Id: PF00890 Pfam Desc: FAD binding domain
  misc_feature (4)..(72): Pfam Id: PF01266 Pfam Desc: FAD dependent oxidoreductase
  misc_feature (4)..(33): Pfam Id: PF07992 Pfam Desc: Pyridine nucleotide-disulphide oxidoreductase
  misc_feature (1)..(626): NCBI GI: 116181512 Blast Desc: conserved [Chaetomium globosum CBS 148.51] gi|88185681|gb|EAQ93149.1| conserved [Chaetomium globosum CBS 148.51]
  misc_feature (1)..(626): NCBI GI: 39943078 Blast Desc: conserved [Magnaporthe grisea 70-15] gi|59803125|gb|AAX07713.1| FAD-dependent oxidoreductase-like protein [Magnaporthe grisea] gi|145009796|gb|EDJ94452.1| grisea
  misc_feature (5)..(626): NCBI GI: 261355202 Blast Desc: fumarate reductase [Verticillium albo-atrum VaMs.102]
  misc_feature (1)..(625): NCBI GI: 85119766 Blast Desc: NCU02580 [Neurospora crassa OR74A] gi|28927523|gb|EAA36475.1| NCU02580 [Neurospora crassa OR74A] gi|38567126|emb|CAE76421.1| related to fumarate reductase crassa]
  misc_feature (1)..(625): NCBI GI: 256734870 Blast Desc: [Nectria haematococca mpVI 77-13-4]
  misc_feature (1)..(625): NCBI GI: 46135637 Blast Desc: FG09341.1 [Gibberella zeae PH-1]
  misc_feature (1)..(626): NCBI GI: 156054748 Blast Desc: SS1G_06222 [Sclerotinia sclerotiorum 1980] gi|154704002|gb|EDO03741.1| SS1G_06222 [Sclerotinia sclerotiorum 1980]
  misc_feature (11)..(626): NCBI GI: 171696256 Blast Desc: protein product [Podospora anserina] gi|170948370|emb|CAP60534.1| protein product [Podospora anserina]
  misc_feature (2)..(626): NCBI GI: 121719922 Blast Desc: fumarate reductase Osm1, [Aspergillus clavatus NRRL 1] gi|119404871|gb|EAW15233.1| fumarate reductase Osm1, [Aspergillus clavatus NRRL 1]
  misc_feature (1)..(626): NCBI GI: 67522172 Blast Desc: AN1543.2 [Aspergillus nidulans FGSC A4] gi|40745094|gb|EAA64250.1| AN1543.2 [Aspergillus nidulans FGSC A4] gi|259486869|tpe|CBF85078.1| TPA: fumarate reductase nidulans
  misc_feature (19)..(464): SWISSPROT Homolog: EC 1.3.1.6 Fumarate reductase (NADH)
  misc_feature: Useful for introducing or modulating the production of volatile compounds
MAPRVIVVGGGLSGLSAAHTIYLAGGNVVVLDKQGFFGGNSTKATSGINGALTRTQVDHKIQDSVKQFYDDTLKSARDKARPDLIKVLTYKSAAAVEWLQDVFNLDLTLVSRLGGHSQPRTHRGHDAKFPGMAITYALMQRLEELAETEPERVQIIKKARVTSLNKEGNKITGVQYESNGESSTVEGPVVLATGGYAADFGDTSLLKQHRPDTFGLATTNGSHATGDGQKMVMAIGGNGIDMDKVQVHPTGLVDPKDPGSKWKFLAAEALRGEGGLLLNADGDRFCDELGHRDYVSGMMWKEKDKGKFPIRLILNSKASNTLDFHTRHYSGRGLMKKMTGKELAKEIGCTPDHLQQTFTTYNAIADGKQKDPWGKKFFHNLPIDINDDFHVSLMEPVLHFTMGGIEINDKAQVLNQSQQPFEGLFACGELAGGVHGANRLGGSSLLGCVVYGRVAGDTASNYLFQQALSGSAGAAQRVGQISLHIDPSQPGKVSVEWANGATASPTVGQQTSAAGPTPTADAGKSSQPAAKAQSPKKFEVPEKEFTMEEVAKHNTKEDLWVVVKGVVMDLSNWLEEHPGGPQAIMNFMGRDATEEFEMLHDDEVIPKYAPQQVIGRVKGQEVTLEF

SEQ ID NO: 22505 - DNA, 2417 bp, Muscodor strobelii
  misc_feature: SGI EST ID NO. CUFF.53045.0
  misc_feature: Variant of the nucleotide sequence at SEQ ID NO 22503
cgcaaagcctactccgtcactgtttgcgccgacgaaatatctactggctgcttcgcccacacattcctcgtcttgctctccctcttcttccctttctccctcatcgctatctttatctcacgaacaacccgttccctctctcctcctgtctgtctcgttatcctctctcttttctttcgtgataccccgttgcattgctagcagaacacactagctcagtcttcaacatggcccctcgtgtcattgtcgttggtggcggcttgtccggcctcagcgctgcccacacaatctacctggctggtggaaatgtagtcgttctcgacaaacaaggtttctttggtggcaactctaccaaggccacttcaggtatcaacggtgctctcacgcggacccaggtcgaccacaagattcaggacagcgtgaagcagttctacgatgacactttgaagtccgcccgtgacaaggcgagaccagacctgatcaaggttctcacgtacaagtcagctgccgccgttgagtggctgcaggatgtattcaaccttgacctgactctagtttcccgtcttggtggacactcacagccgagaacacacagaggtcacgatgccaagttccctggaatggccatcacatatgctctcatgcagcgactcgaggagcttgccgagaccgaacccgagcgtgtccagatcatcaagaaggcccgggtaacgagcctgaacaaggagggaaacaagatcactggcgtccagtatgagtctaacggcgagagcagcaccgtcgagggccccgttgtcctcgccactggtggttacgctgctgacttcggcgacacctctctcctgaagcagcacagacccgacacttttggcctcgccaccaccaacggctcccacgccacgggtgatggacagaagatggtcatggccatcggcggaaacggcattgatatggacaaggtccaggttcaccctacgggtctcgttgaccccaaggatcccggctccaagtggaagttcttggctgccgaggctctgcgtggtgagggtggtctgctgctcaacgccgacggcgaccggttctgcgacgaactcggccaccgtgactacgtctccggcatgatgtggaaggagaaggacaagggcaagttccctatccgcctcatcttgaactccaaggcttccaacaccctggacttccacactcgccactactctggccgtggcttgatgaagaagatgaccggcaaggagctcgccaaggagattggctgcacacccgatcacctccagcagaccttcactacctacaacgccattgccgatggcaagcagaaggatccctggggcaagaagttcttccacaacttgcccattgacatcaacgacgacttccacgtctccttgatggaacccgtcctccatttcaccatgggtggcatcgagatcaacgacaaagcccaggtcttgaaccagtcccagcagcccttcgagggtctcttcgcctgcggtgagttggctggtggcgttcacggtgccaaccgtttgggtggctcctcgctgctaggctgtgtcgtctacggccgtgtggctggtgacactgccagcaactacctcttccagcaggccctctcgggctctgccggtgccgcccagcgtgttggccaaatttcgttgcacatcgacccctcccagcccggcaaggtctctgtcgagtgggccaacggtgccaccgcctctccgactgtaggccagcagacgagcgctgccggccccacgccgaccgccgacgctggtaagtcctcccagcccgctgccaaggcgcagagccctaagaagtttgaggttcctgagaaggaattcacgatggaggaggttgctaagcacaacaccaaggaggacctgtgggtggtggtcaagggtgtggtgatggacctctccaactggcttgaggagcaccccggtggcccgcaggcgatcatgaacttcatgggacgtgacgcgacggaggagtttgagatgttgcacgacgacgaggtgatccccaagtacgccccacagcaagtgatagggcgcgtcaagggccaggaggtcacgcttgagttctaaaagagtatatacccgcgagcatgagacagccgacggagctggacgaggttatacaaagcgacatacacgtggctccgacgtggcgaggaggcatagcacgcattgacgagcatatgaatccgcgcctgcacagattacatggaggcgagcatgaaaaaggagcagggattggttcacggcgccgggcttgcatttctgtcgtatgattctgtattgatatataggatagcatgattcgtcttattctgctttgatgcagttcacacaatctcacgatcacattgaaatagatggtgtattatcatatca

SEQ ID NO: 22506 - DNA, 636 bp, Muscodor strobelii
  misc_feature: SGI cDNA ID NO. 567643
  misc_feature: Encodes the peptide sequence at SEQ ID NO 22507
atgcgactctcatcgatatctctactgccgatactgatggtatcagcgtcttcgcaacacctgaccatccccaaagttctgcaagacgacactaatcaggcacccctcctcgatcccctcggtcccgccatgcccccaccagacgactctgagcaatctccggcagcgcaaagcggtgtcttgatatcggatgtgatgggtcgcgatcgtagtatcaacatatttgctggattcgcacgagacgtcgcctcgatatcgaatcgctttgacgactcgggcaacaacagcacggtcttggccccgctcaactcagccgtcgagaagctgccgcggaagccatgggaagatccaaaagagtatgatgctataggcgcgaacgcttacgagggagaagacggacaggatagagcacacaggaatatgaggagatttgtggaagcgcatattgtgcctgttagtccctggccggaaaaggagaaggtgaagtcgctgctggacggcgacagggagatctggtgggagaagaaggatggagttttaaagttacaaccggatgatattgagatccagagtatcgcaagcagagttggcaatggtgaggtctggatcctcaaagaggtgcggaattatccatag

SEQ ID NO: 22507 - protein, 211 aa, Muscodor strobelii
  misc_feature: SGI Peptide ID NO. 567643
  misc_feature (33)..(209): NCBI GI: 73921271 Blast Desc: YFAS1_NEUCR RecName: Full=FAS1 domain-containing protein NCU02579; Flags: Precursor gi|38567127|emb|CAE76422.1| conserved [Neurospora crassa]
  misc_feature (1)..(210): NCBI GI: 156054740 Blast Desc: SS1G_06218 [Sclerotinia sclerotiorum 1980] gi|154703998|gb|EDO03737.1| SS1G_06218 [Sclerotinia sclerotiorum 1980]
  misc_feature (1)..(210): NCBI GI: 171687217 Blast Desc: protein product [Podospora anserina] gi|170943570|emb|CAP69222.1| protein product [Podospora anserina]
  misc_feature (33)..(210): NCBI GI: 85119763 Blast Desc: NCU02579 [Neurospora crassa OR74A] gi|28927522|gb|EAA36474.1| NCU02579 [Neurospora crassa OR74A]
  misc_feature (7)..(204): NCBI GI: 116181514 Blast Desc: CHGG_01385 [Chaetomium globosum CBS 148.51] gi|88185682|gb|EAQ93150.1| CHGG_01385 [Chaetomium globosum CBS 148.51]
  misc_feature (33)..(179): NCBI GI: 154289523 Blast Desc: BC1G_16088 [Botryotinia fuckeliana B05.10] gi|150849182|gb|EDN24375.1| BC1G_16088 [Botryotinia fuckeliana B05.10]
  misc_feature (31)..(201): NCBI GI: 46135635 Blast Desc: FG09340.1 [Gibberella zeae PH-1]
  misc_feature (3)..(204): NCBI GI: 189203117 Blast Desc: FAS1 domain-containing protein [Pyrenophora tritici-repentis Pt-1C-BFP] gi|187984993|gb|EDU50481.1| FAS1 domain-containing protein [Pyrenophora tritici-repentis
  misc_feature (42)..(179): NCBI GI: 261355201 Blast Desc: transcriptional regulatory protein SIN3 [Verticillium albo-atrum VaMs.102]
  misc_feature (42)..(201): NCBI GI: 256735584 Blast Desc: NECHADRAFT_105858 [Nectria haematococca mpVI 77-13-4]
MRLSSISLLPILMVSASSQHLTIPKVLQDDTNQAPLLDPLGPAMPPPDDSEQSPAAQSGVLISDVMGRDRSINIFAGFARDVASISNRFDDSGNNSTVLAPLNSAVEKLPRKPWEDPKEYDAIGANAYEGEDGQDRAHRNMRRFVEAHIVPVSPWPEKEKVKSLLDGDREIWWEKKDGVLKLQPDDIEIQSIASRVGNGEVWILKEVRNYP

SEQ ID NO: 22508 - DNA, 1030 bp, Muscodor strobelii
  misc_feature: SGI EST ID NO. CUFF.52942.0
  misc_feature: Variant of the nucleotide sequence at SEQ ID NO 22506
ctgatgcagtggtgccttggatgagtgtgatatgggcagttggcgaatggcttaacagctggcagctgcttgaccacaagtgatgtcatgcggcttagtttcactcgcatcagcctgattcaacgagcattgaaaaacagatacatcttcgaatagggatcaagatgcgactctcatcgatatctctactgccgatactgatggtatcagcgtcttcgcaacacctgaccatccccaaagttctgcaagacgacactaatcaggcacccctcctcgatcccctcggtcccgccatgcccccaccagacgactctgagcaatctccggcagcgcaaagcggtgtcttgatatcggatgtgatgggtcgcgatcgtagtatcaacatatttgctggattcgcacgagacgtcgcctcgatatcgaatcgctttgacgactcgggcaacaacagcacggtcttggccccgctcaactcagccgtcgagaagctgccgcggaagccatgggaagatccaaaagagtatgatgctataggcgcgaacgcttacgagggagaagacggacaggatagagcacacaggaatatgaggagatttgtggaagcgcatattgtgcctgttagtccctggccggaaaaggagaaggtgaagtcgctgctggacggcgacagggagatctggtgggagaagaaggatggagttttaaagttacaaccggatgatattgagatccagagtatcgcaagcagagttggcaatggtgaggtctggatcctcaaagaggtgcggaattatccatagggggccttgtactgaaaacaagatataaagtacagaaatttattaccatttaatgacgactcgtttacatccaagacgagggttagagagctatgtctcagggttgtctgataataaatatgctctgtgacatttgttaattactatgtcaggctactattggcacttcatcaccacagggcagaagagctgccatgtactttatcaacgaatacgtaagccaaggttca

SEQ ID NO: 22509 - DNA, 3150 bp, Muscodor strobelii
  misc_feature: SGI cDNA ID NO. 567644
  misc_feature: Elevated expression when VOC is produced
  misc_feature: Encodes the peptide sequence at SEQ ID NO 22510
atgtacgagccgccccgccaaccacggcttgcgcgcctgcagcaggcgcaatttgatgtggcagatgtgcaagaaatgctagatctggggttagacttaaatgttcagtggacgagagacgatctgcagaggtcgtctggaggatgcgtggtgtattcttacgacccggactttggctgggcaaactacaataccccaattcatttgagcctcgtgaatggtgtacttgaagcggcggcgctgctgctcaagaacggcgccgatatcaactcgctgaatgcgcttgggaggacggcactacacgaaagcattcgaaaggcgaaacatgactctgtgaggttcctcatagcaaatggcgccgccttagatgtattgagtgaagcacgggtagccgaagttcaagataatgatgatgatgatgaagacgatgaagatcgctcgggtatcgctggcgtggcccctatccaagaagctatttacgccaacgacctccagtcactacaggctctgatagagggcggtgcgaacttatctcaagtatcaccagaaggttggacaacactggatctcgctttactagagagagatcaacggatcattgatctactgcacagacatggtgcccatatatcagagcgatctccgtctgaatacgttgatatgagccgcgaaagtcgaggcgagacagcgcgagccttgctagccggcaccggggtatttccccctcgtgaaagtcgagcagcatatctctatgtcatcagtcaaccccaatttgttgaggcttgggaagagtactcgaacaactctgagtcgagctgtgaccaacctctggagctttttgtcgcctcgctgtctaaagtgggagaggtagccaatcctgagaacgttccaggggcacccaaatgtgtgcaatgtgtcaagtatcttcgacagctatattcacaaggtaaagagccatttgtgcttcattctgatcgagcgtgtcttcgccagtcagctctgagcgatgggtgctgtctgtgtgcactttttgaagatgctttggttcatgggagcggaaggtgggctcgaaaaagccgtcgtgtacaggccgaaaatccatccgaagtcacgatccaaaccgaagtcgggcgttattcgcccaacctcacgattactgtgttctgcgagaaccagtccgaagctctagaagtttataattttccagattcattcctaatagaccatgataagtttctagatgatcgactgtctggaacttcatctccaagagcattcgaagtctgtcgtgcgtggctcaaagaatgcaaagccaaccaccctacgtgtagcgatactaaatccgcgaatccggtcttgccaaacgtagtggttgatgttggagatgaaagctcggagccccgtcttcgcgatggcaacgacgaaaccgctccgtatgttgcgctttcctatcgccgtggcggccaagactcaccccaaacaacaatggcatcgctgtcagatttctcgagggcgattcctccagagtcactgtccaagacgtttcaagacgccatacttgcgacgagaagtctaggcttccgttttctatggattgatgtcttttgtatcgtgcaagatcacccaggtcattggtttcaagaaatcgagcaaataggaacagtctttatgaacgctactgtcacgttgtcggctctcgactcccagagtacaatggagggcttgttccgaccgcgtcagaatggcgtagttagtcccgtgcctatatctctgcgcgttcccaataaatacagaggtaatactccttcaggccagacaaccaatttcgtgcttccagtcagcgctgaaaagaacttgcttcagcctggaccactcacccgctgggcgtcatctctccagcaacaggtttttagtacccgaattattcattggggtcctgggatcttgcattgggagtgcctgacctgcaatggctccgaggctgaccctgctggagtcacacatccgtacaatagtagctgcacaaatttctatagcaggcgccgacaaaagtgcatactacaaggccgaccgtacggagcagaccacttcggcggcaatgaggatgacgatgggccgtatagaacaaaaccagatgagagcgatcaatcagatagcgagattgacgaaacaagtgaagagcccgaggatggggacgagggggatggtggtgagggtgatgtcgatcaggataagcacagttcgaataccatggatcctccagagggcgaagaactggaattcaaacaagtctctagtcaagttgacgatttgaagaaagcagcgttccatgaatggcaaaagctggtcgctcgatattcctcaatggaaatggatccttcgcaagacaagattgccgcgtttctcggaacaaacacgctagtagcaaaacggatcggtgatgagtctctgatgggcatatggaaagaatcacatttattgcccagcctcttatgggcagcatctaaacccggggcgatatcgagaaacgactacccgtcatggacctggatttccgtgaacgggaaggtccactatccggttagcgatccgtggatgaaaataaattgggaaccaacagatgttactcttgccgttccgacggttgagttatcgaagactggagtagttcattgtctaactatcaaaagctcaattagagtatttccaaaatggtacaagttctggcgctacgagaactcgatgaacaacccgtttatgagctacacactaagtcgggagagcgtggagaagaaatccacaaaaagaataatggaggagttgatggtagtcgagagtttcagagacgttcggcgagtctcggccgcggacccggaagcccgatcctgggagggctctggtgaggagataacttgtcttgtgattgctcgtataggaaaagaaccaccgccgaaacacggatatcctatgttcatcggaggaagaccaaagtcttttgtctgcatgtgcctcgtgccggtgcagcaagatggagagcatgcagaatttgaaggcaataaggtgttccgccgtgttgggctgtgtcatttctgggatacacccgagttctggaagagcgcaacgaaggacgagacggtggtcatagtttga

SEQ ID NO: 22510 - protein, 1049 aa, Muscodor strobelii
  misc_feature: SGI Peptide ID NO. 567644
  misc_feature (62)..(94): Pfam Id: PF00023 Pfam Desc: Ankyrin repeat
  misc_feature (479)..(634): Pfam Id: PF06985 Pfam Desc: Heterokaryon incompatibility protein (HET)
  misc_feature (95)..(127): Pfam Id: PF00023 Pfam Desc: Ankyrin repeat
  misc_feature (479)..(580): Pfam Id: PF06985 Pfam Desc: Heterokaryon incompatibility protein (HET)
  misc_feature (19)..(689): NCBI GI: 46115998 Blast Desc: FG03841.1 [Gibberella zeae PH-1]
  misc_feature (329)..(859): NCBI GI: 256730657 Blast Desc: NECHADRAFT_73983 [Nectria haematococca mpVI 77-13-4]
  misc_feature (431)..(666): NCBI GI: 46127525 Blast Desc: FG08140.1 [Gibberella zeae PH-1]
  misc_feature (284)..(664): NCBI GI: 116206180 Blast Desc: CHGG_02383 [Chaetomium globosum CBS 148.51] gi|88182980|gb|EAQ90448.1| CHGG_02383 [Chaetomium globosum CBS 148.51]
  misc_feature (302)..(653): NCBI GI: 256720830 Blast Desc: NECHADRAFT_85535 [Nectria haematococca mpVI 77-13-4]
  misc_feature (420)..(888): NCBI GI: 171677360 Blast Desc: protein product [Podospora anserina] gi|170936748|emb|CAP61406.1| protein product [Podospora anserina]
  misc_feature (362)..(662): NCBI GI: 256726009 Blast Desc: NECHADRAFT_81484 [Nectria haematococca mpVI 77-13-4]
  misc_feature (302)..(666): NCBI GI: 256724492 Blast Desc: NECHADRAFT_88127 [Nectria haematococca mpVI 77-13-4]
  misc_feature (411)..(713): NCBI GI: 154304664 Blast Desc: BC1G_08071 [Botryotinia fuckeliana B05.10] gi|150853971|gb|EDN29163.1| BC1G_08071 [Botryotinia fuckeliana B05.10]
  misc_feature (418)..(682): NCBI GI: 46126655 Blast Desc: FG07705.1 [Gibberella zeae PH-1]
  misc_feature: Useful for introducing or modulating the production of volatile compounds
MYEPPRQPRLARLQQAQFDVADVQEMLDLGLDLNVQWTRDDLQRSSGGCVVYSYDPDFGWANYNTPIHLSLVNGVLEAAALLLKNGADINSLNALGRTALHESIRKAKHDSVRFLIANGAALDVLSEARVAEVQDNDDDDEDDEDRSGIAGVAPIQEAIYANDLQSLQALIEGGANLSQVSPEGWTTLDLALLERDQRIIDLLHRHGAHISERSPSEYVDMSRESRGETARALLAGTGVFPPRESRAAYLYVISQPQFVEAWEEYSNNSESSCDQPLELFVASLSKVGEVANPENVPGAPKCVQCVKYLRQLYSQGKEPFVLHSDRACLRQSALSDGCCLCALFEDALVHGSGRWARKSRRVQAENPSEVTIQTEVGRYSPNLTITVFCENQSEALEVYNFPDSFLIDHDKFLDDRLSGTSSPRAFEVCRAWLKECKANHPTCSDTKSANPVLPNVVVDVGDESSEPRLRDGNDETAPYVALSYRRGGQDSPQTTMASLSDFSRAIPPESLSKTFQDAILATRSLGFRFLWIDVFCIVQDHPGHWFQEIEQIGTVFMNATVTLSALDSQSTMEGLFRPRQNGVVSPVPISLRVPNKYRGNTPSGQTTNFVLPVSAEKNLLQPGPLTRWASSLQQQVFSTRIIHWGPGILHWECLTCNGSEADPAGVTHPYNSSCTNFYSRRRQKCILQGRPYGADHFGGNEDDDGPYRTKPDESDQSDSEIDETSEEPEDGDEGDGGEGDVDQDKHSSNTMDPPEGEELEFKQVSSQVDDLKKAAFHEWQKLVARYSSMEMDPSQDKIAAFLGTNTLVAKRIGDESLMGIWKESHLLPSLLWAASKPGAISRNDYPSWTWISVNGKVHYPVSDPWMKINWEPTDVTLAVPTVELSKTGVVHCLTIKSSIRVFPKWYKFWRYENSMNNPFMSYTLSRESVEKKSTKRIMEELMVVESFRDVRRVSAADPEARSWEGSGEEITCLVIARIGKEPPPKHGYPMFIGGRPKSFVCMCLVPVQQDGEHAEFEGNKVFRRVGLCHFWDTPEFWKSATKDETVVIV

SEQ ID NO: 22511 - DNA, 3441 bp, Muscodor strobelii
  misc_feature: SGI EST ID NO. CUFF.52954.0
  misc_feature: Variant of the nucleotide sequence at SEQ ID NO 22509
cgcaccggatcattccttcatgctcatatctttgggtctcgtattagatgtcttgtcagtcatttatttacaactgacttgttgtactacaacgactttttgtaggacagacgccttcagaaaatgtacgagccgccccgccaaccacggcttgcgcgcctgcagcaggcgcaatttgatgtggcagatgtgcaagaaatgctagatctggggttagacttaaatgttcagtggacgagagacgatctgcagaggtcgtctggaggatgcgtggtgtattcttacgacccggactttggctgggcaaactacaataccccaattcatttgagcctcgtgaatggtgtacttgaagcggcggcgctgctgctcaagaacggcgccgatatcaactcgctgaatgcgcttgggaggacggcactacacgaaagcattcgaaaggcgaaacatgactctgtgaggttcctcatagcaaatggcgccgccttagatgtattgagtgaagcacgggtagccgaagttcaagataatgatgatgatgatgaagacgatgaagatcgctcgggtatcgctggcgtggcccctatccaagaagctatttacgccaacgacctccagtcactacaggctctgatagagggcggtgcgaacttatctcaagtatcaccagaaggttggacaacactggatctcgctttactagagagagatcaacggatcattgatctactgcacagacatggtgcccatatatcagagcgatctccgtctgaatacgttgatatgagccgcgaaagtcgaggcgagacagcgcgagccttgctagccggcaccggggtatttccccctcgtgaaagtcgagcagcatatctctatgtcatcagtcaaccccaatttgttgaggcttgggaagagtactcgaacaactctgagtcgagctgtgaccaacctctggagctttttgtcgcctcgctgtctaaagtgggagaggtagccaatcctgagaacgttccaggggcacccaaatgtgtgcaatgtgtcaagtatcttcgacagctatattcacaaggtaaagagccatttgtgcttcattctgatcgagcgtgtcttcgccagtcagctctgagcgatgggtgctgtctgtgtgcactttttgaagatgctttggttcatgggagcggaaggtgggctcgaaaaagccgtcgtgtacaggccgaaaatccatccgaagtcacgatccaaaccgaagtcgggcgttattcgcccaacctcacgattactgtgttctgcgagaaccagtccgaagctctagaagtttataattttccagattcattcctaatagaccatgataagtttctagatgatcgactgtctggaacttcatctccaagagcattcgaagtctgtcgtgcgtggctcaaagaatgcaaagccaaccaccctacgtgtagcgatactaaatccgcgaatccggtcttgccaaacgtagtggttgatgttggagatgaaagctcggagccccgtcttcgcgatggcaacgacgaaaccgctccgtatgttgcgctttcctatcgccgtggcggccaagactcaccccaaacaacaatggcatcgctgtcagatttctcgagggcgattcctccagagtcactgtccaagacgtttcaagacgccatacttgcgacgagaagtctaggcttccgttttctatggattgatgtcttttgtatcgtgcaagatcacccaggtcattggtttcaagaaatcgagcaaataggaacagtctttatgaacgctactgtcacgttgtcggctctcgactcccagagtacaatggagggcttgttccgaccgcgtcagaatggcgtagttagtcccgtgcctatatctctgcgcgttcccaataaatacagaggtaatactccttcaggccagacaaccaatttcgtgcttccagtcagcgctgaaaagaacttgcttcagcctggaccactcacccgctgggcgtcatctctccagcaacaggtttttagtacccgaattattcattggggtcctgggatcttgcattgggagtgcctgacctgcaatggctccgaggctgaccctgctggagtcacacatccgtacaatagtagctgcacaaatttctatagcaggcgccgacaaaagtgcatactacaaggccgaccgtacggagcagaccacttcggcggcaatgaggatgacgatgggccgtatagaacaaaaccagatgagagcgatcaatcagatagcgagattgacgaaacaagtgaagagcccgaggatggggacgagggggatggtggtgagggtgatgtcgatcaggataagcacagttcgaataccatggatcctccagagggcgaagaactggaattcaaacaagtctctagtcaagttgacgatttgaagaaagcagcgttccatgaatggcaaaagctggtcgctcgatattcctcaatggaaatggatccttcgcaagacaagattgccgcgtttctcggaacaaacacgctagtagcaaaacggatcggtgatgagtctctgatgggcatatggaaagaatcacatttattgcccagcctcttatgggcagcatctaaacccggggcgatatcgagaaacgactacccgtcatggacctggatttccgtgaacgggaaggtccactatccggttagcgatccgtggatgaaaataaattgggaaccaacagatgttactcttgccgttccgacggttgagttatcgaagactggagtagttcattgtctaactatcaaaagctcaattagagtatttccaaaatggtacaagttctggcgctacgagaactcgatgaacaacccgtttatgagctacacactaagtcgggagagcgtggagaagaaatccacaaaaagaataatggaggagttgatggtagtcgagagtttcagagacgttcggcgagtctcggccgcggacccggaagcccgatcctgggagggctctggtgaggagataacttgtcttgtgattgctcgtataggaaaagaaccaccgccgaaacacggatatcctatgttcatcggaggaagaccaaagtcttttgtctgcatgtgcctcgtgccggtgcagcaagatggagagcatgcagaatttgaaggcaataaggtgttccgccgtgttgggctgtgtcatttctgggatacacccgagttctggaagagcgcaacgaaggacgagacggtggtcatagtttgatatagtttgatgttggatcaaagaatggagaatacagtcgttgtctacctaagataaaccctgccgatatcatgatcaatttctcaaaatttgtggcatagagagatttctgatttctcggagagttttcattcaaggtctcatgaaacgaataatggtacatccaca

SEQ ID NO: 22512 - DNA, 196 bp, Muscodor strobelii
  misc_feature: SGI cDNA ID NO. 567645
  misc_feature: Reduced expression when VOC is produced
  misc_feature: Encodes the peptide sequence at SEQ ID NO 22513
atgaactctcacgccgacgacgtctcgctgcgagatcgcgagtctgccgagcgccaccaccgcgacggctaccctgccggcaccccccatcacagcaacgccgcgtcgctgcagctgcaccagccagtcgcgagccggcctcagacggccatccacagccccggcggtctgctcgccaaccacggcggcgctggcc

SEQ ID NO: 22513 - protein, 65 aa, Muscodor strobelii
  misc_feature: SGI Peptide ID NO. 567645
  misc_feature (19)..(64): NCBI GI: 38567128 Blast Desc: related to transcription regulatory protein [Neurospora crassa]
  misc_feature (19)..(64): NCBI GI: 164427863 Blast Desc: NCU02578 [Neurospora crassa OR74A] gi|157071913|gb|EAA36473.2| conserved [Neurospora crassa OR74A]
  misc_feature (1)..(65): NCBI GI: 261355201 Blast Desc: transcriptional regulatory protein SIN3 [Verticillium albo-atrum VaMs.102]
  misc_feature (11)..(64): NCBI GI: 145616018 Blast Desc: MGG_13498 [Magnaporthe grisea 70-15] gi|145009799|gb|EDJ94455.1| MGG_13498 [Magnaporthe grisea 70-15]
  misc_feature (12)..(62): NCBI GI: 156054738 Blast Desc: SS1G_06217 [Sclerotinia sclerotiorum 1980] gi|154703997|gb|EDO03736.1| SS1G_06217 [Sclerotinia sclerotiorum 1980]
  misc_feature (19)..(64): NCBI GI: 116181514 Blast Desc: CHGG_01385 [Chaetomium globosum CBS 148.51] gi|88185682|gb|EAQ93150.1| CHGG_01385 [Chaetomium globosum CBS 148.51]
  misc_feature (28)..(63): NCBI GI: 46134915 Blast Desc: FG09306.1 [Gibberella zeae PH-1]
  misc_feature (19)..(61): NCBI GI: 171687219 Blast Desc: protein product [Podospora anserina] gi|170943571|emb|CAP69223.1| protein product [Podospora anserina]
  misc_feature (22)..(63): NCBI GI: 256734847 Blast Desc: histone deacetylase complex protein [Nectria haematococca mpVI 77-13-4]
  misc_feature: Useful for introducing or modulating the production of volatile compounds
MNSHADDVSLRDRESAERHHRDGYPAGTPHHSNAASLQLHQPVASRPQTAIHSPGGLLANHGGAG

SEQ ID NO: 22514 - DNA, 280 bp, Muscodor strobelii
  misc_feature: SGI EST ID NO. CUFF.52962.2
  misc_feature: Variant of the nucleotide sequence at SEQ ID NO 22512
gtgccattcaatgtgtacatagcccgagagcagagagcagtgcgctgacgtatcgagtgcgcccctgatagacggtcgcaagtgaagagccatgaactctcacgccgacgacgtctcgctgcgagatcgcgagtctgccgagcgccaccaccgcgacggctaccctgccggcaccccccatcacagcaacgccgcgtcgctgcagctgcaccagccagtcgcgagccggcctcagacggccatccacagccccggcggtctgctcgccaaccacggcggc

SEQ ID NO: 22515 - DNA, 1620 bp, Muscodor strobelii
  misc_feature: SGI cDNA ID NO. 567646
  misc_feature: Reduced expression when VOC is produced
  misc_feature: Encodes the peptide sequence at SEQ ID NO 22516
atgggtcacaaagacaacgaggccggtgtgcccacatactggggcacatctggcaagaagctgcagtttttgattacatctgtcgctactatcgactttttactcttcggttatgaccaaggtgtgatgtcgggtattatcaacggcgatgcttttgttaaagcattccctgttgtagatggagacgatacatggcaaggatttgtcacatctatctacgccgttggctgcttctttggtgccttattcattcttacggttggtgacaaacttggccgtaggaaatccatcttcctaggcggcttcgttatgatcgtcggtgtaatcattcagctatcgactaaaccgtttcctaatcacactggcgccactgcccaattcattattggacgttttatcactggaatgggcaacggaatcaacacatctactatccctatttggcaagcagagtgctcccacagtcacaacagagggaagctcatctgcatcgaaggcggaaacgtcgccattggaacgttgattgcttactggctcgattacggtgccagctacggtcccgatgacctgacttggcggttcccaattgcttttcagattgtattcgccgcttctgtccttgggctcatgatcaacctaccggaaagccctagatggctgctttcacacgatcgcgttgatgaagcaacaacgattcttgctgcactaaacggcgagagccgaacagacgctaacctcaagacccagcttgccaaccttcgtgacgcgatcagggcatcgggacagctcgacaacaagaccaaattctctgacctgcttactggtgggcctacccagcatcttcgccgcatgttgcttggtgcttcttcccagatgatgcagcagttgtccggttgcaatgcggtcatatactatttccctattctgttccaaacctccatcggcacgtctaaaaacttggctctgttgcttggtggaattaaccagattgtttacgcccttttcgccacgacatcctggttcttcgtcgagcgtgttggccgtagaaagctttacctgatcggtacagtcgggcaatgcttgtctatggtccttgtattcggtgcattactccctggtactgccatggcagctaagggtgcaggagttggtctatttacctatattgcgttcttcggtgcgacctggcttcctctaccatggctctaccctgccgagatcaacccccttaagactcgtgctaaggctaccgccgtctcaaccgtcagtaactggatctggaatttcttcgtcgtcatgatcacccctgttctcgtcaacaacactggtacaaacggttggggaacctatcttttcttcgccgctctcaatgccatcttcttccccatcatctacttcctataccccgaaacagccggtcgcagcttggaagagatcgatgtcatcttcgccaagggttacgctgagaacatcagctatgtcaaggccgtggctgagctgcccttcctggaggagtctgaagttcaagagaaggctcgcgagtatggcgttgctgtccaagatgaggaggcatctgcaggagttttggagaagcctacttctccatctgactctgattaa

SEQ ID NO: 22516 - protein, 539 aa, Muscodor strobelii
  misc_feature: SGI Peptide ID NO. 567646
  misc_feature (25)..(432): Pfam Id: PF07690 Pfam Desc: Major Facilitator Superfamily
  misc_feature (25)..(483): Pfam Id: PF00083 Pfam Desc: Sugar (and other) transporter
  misc_feature (12)..(539): NCBI GI: 156037402 Blast Desc: SS1G_12412 [Sclerotinia sclerotiorum 1980] gi|154697823|gb|EDN97561.1| SS1G_12412 [Sclerotinia sclerotiorum 1980]
  misc_feature (10)..(538): NCBI GI: 212546137 Blast Desc: hexose carrier protein, [Penicillium marneffei ATCC 18224] gi|210064742|gb|EEA18837.1| hexose carrier protein, [Penicillium marneffei ATCC 18224]
  misc_feature (12)..(539): NCBI GI: 154293215 Blast Desc: BC1G_14590 [Botryotinia fuckeliana B05.10] gi|150845630|gb|EDN20823.1| BC1G_14590 [Botryotinia fuckeliana B05.10]
  misc_feature (11)..(527): NCBI GI: 39964490 Blast Desc: MGG_09852 [Magnaporthe grisea 70-15] gi|145011159|gb|EDJ95815.1| MGG_09852 [Magnaporthe grisea 70-15]
  misc_feature (10)..(538): NCBI GI: 242824286 Blast Desc: sugar transporter, [Talaromyces stipitatus ATCC 10500] gi|218713148|gb|EED12573.1| sugar transporter, [Talaromyces stipitatus ATCC 10500]
  misc_feature (11)..(527): NCBI GI: 258564943 Blast Desc: UREG_06183 [Uncinocarpus reesii 1704] gi|237906917|gb|EEP81318.1| UREG_06183 [Uncinocarpus reesii 1704]
  misc_feature (9)..(539): NCBI GI: 240107393 Blast Desc: Sugar transporter family protein [Coccidioides posadasii C735 delta SOWgp]
  misc_feature (11)..(539): NCBI GI: 169609605 Blast Desc: SNOG_07895 [Phaeosphaeria nodorum SN15] gi|111063051|gb|EAT84171.1| SNOG_07895 [Phaeosphaeria nodorum SN15]
  misc_feature (11)..(526): NCBI GI: 171695602 Blast Desc: protein product [Podospora anserina] gi|170948043|emb|CAP60207.1| protein product [Podospora anserina]
  misc_feature (11)..(523): NCBI GI: 119489462 Blast Desc: hexose carrier protein [Neosartorya fischeri NRRL 181] gi|119411053|gb|EAW20998.1| hexose carrier protein [Neosartorya fischeri NRRL 181]
  misc_feature: Useful for introducing or modulating the production of volatile compounds
MGHKDNEAGVPTYWGTSGKKLQFLITSVATIDFLLFGYDQGVMSGIINGDAFVKAFPVVDGDDTWQGFVTSIYAVGCFFGALFILTVGDKLGRRKSIFLGGFVMIVGVIIQLSTKPFPNHTGATAQFIIGRFITGMGNGINTSTIPIWQAECSHSHNRGKLICIEGGNVAIGTLIAYWLDYGASYGPDDLTWRFPIAFQIVFAASVLGLMINLPESPRWLLSHDRVDEATTILAALNGESRTDANLKTQLANLRDAIRASGQLDNKTKFSDLLTGGPTQHLRRMLLGASSQMMQQLSGCNAVIYYFPILFQTSIGTSKNLALLLGGINQIVYALFATTSWFFVERVGRRKLYLIGTVGQCLSMVLVFGALLPGTAMAAKGAGVGLFTYIAFFGATWLPLPWLYPAEINPLKTRAKATAVSTVSNWIWNFFVVMITPVLVNNTGTNGWGTYLFFAALNAIFFPIIYFLYPETAGRSLEEIDVIFAKGYAENISYVKAVAELPFLEESEVQEKAREYGVAVQDEEASAGVLEKPTSPSDSD

SEQ ID NO: 22517 - DNA, 1971 bp, Muscodor strobelii
  misc_feature: SGI EST ID NO. CUFF.52971.0
  misc_feature: Variant of the nucleotide sequence at SEQ ID NO 22515
tctaatcccaccatctcctccgcatctccagaagacccttctccaaggaccccgagcaactcgagcgtcaaaatgggtcacaaagacaacgaggccggtgtgcccacatactggggcacatctggcaagaagctgcagtttttgattacatctgtcgctactatcgactttttactcttcggttatgaccaaggtgtgatgtcgggtattatcaacggcgatgcttttgttaaagcattccctgttgtagatggagacgatacatggcaaggatttgtcacatctatctacgccgttggctgcttctttggtgccttattcattcttacggttggtgacaaacttggccgtaggaaatccatcttcctaggcggcttcgttatgatcgtcggtgtaatcattcagctatcgactaaaccgtttcctaatcacactggcgccactgcccaattcattattggacgttttatcactggaatgggcaacggaatcaacacatctactatccctatttggcaagcagagtgctcccacagtcacaacagagggaagctcatctgcatcgaaggcggaaacgtcgccattggaacgttgattgcttactggctcgattacggtgccagctacggtcccgatgacctgacttggcggttcccaattgcttttcagattgtattcgccgcttctgtccttgggctcatgatcaacctaccggaaagccctagatggctgctttcacacgatcgcgttgatgaagcaacaacgattcttgctgcactaaacggcgagagccgaacagacgctaacctcaagacccagcttgccaaccttcgtgacgcgatcagggcatcgggacagctcgacaacaagaccaaattctctgacctgcttactggtgggcctacccagcatcttcgccgcatgttgcttggtgcttcttcccagatgatgcagcagttgtccggttgcaatgcggtcatatactatttccctattctgttccaaacctccatcggcacgtctaaaaacttggctctgttgcttggtggaattaaccagattgtttacgcccttttcgccacgacatcctggttcttcgtcgagcgtgttggccgtagaaagctttacctgatcggtacagtcgggcaatgcttgtctatggtccttgtattcggtgcattactccctggtactgccatggcagctaagggtgcaggagttggtctatttacctatattgcgttcttcggtgcgacctggcttcctctaccatggctctaccctgccgagatcaacccccttaagactcgtgctaaggctaccgccgtctcaaccgtcagtaactggatctggaatttcttcgtcgtcatgatcacccctgttctcgtcaacaacactggtacaaacggttggggaacctatcttttcttcgccgctctcaatgccatcttcttccccatcatctacttcctataccccgaaacagccggtcgcagcttggaagagatcgatgtcatcttcgccaagggttacgctgagaacatcagctatgtcaaggccgtggctgagctgcccttcctggaggagtctgaagttcaagagaaggctcgcgagtatggcgttgctgtccaagatgaggaggcatctgcaggagttttggagaagcctacttctccatctgactctgattaaggaagcaaatttgtatggcatggccgtgtcatgtatatgctccggctggtccggtcgcaaacctcatcgatctgcgatttaaagtcatttttgcccttttatgttggctgaggcgaattggattatagacatgataccactttgtttgcctatcagattgatggcaagagcgtttatgattagcttacacgaaaagccaccaatatctggcggctagcatataatgacaggcggccatagatctctatctgatttccaatgaacgatctcttaaaatca

SEQ ID NO: 22518 - DNA, 441 bp, Muscodor strobelii
  misc_feature: SGI cDNA ID NO. 567647
  misc_feature: Encodes the peptide sequence at SEQ ID NO 22519
atgtctggcgcagacgcccccgagatcctcgccgcctacgatgccgtacgctcggataaagacgagaccgattggctacttctatcttatgatggtgccgtaggcaacaaggtcgtgctgacaagcacagggacggggggactggaaaagctggcagaaaacctactggaaaccgaggcgcagtatggctatgtgcgcgtcgagtacgcaaatgatacggagagcaagcgagtaaagtttgttctcgtcatttggatcggcgagaagacaggggtaatgcgaaaagcgcgcgtgagcatccagagcggggatatcaagagagtcttgtcgcatcacagtatccaagtcgatgctcgggacaagagcgatttgaagaaggaagatgttgttgcgaggctaaggaaagccggcggtgctgattacaacggcggccgtggttga

SEQ ID NO: 22519 - protein, 146 aa, Muscodor strobelii
  misc_feature: SGI Peptide ID NO. 567647
  misc_feature (7)..(134): Pfam Id: PF00241 Pfam Desc: Cofilin/tropomyosin-type actin-binding protein
  misc_feature (1)..(146): NCBI GI: 46124193 Blast Desc: FG06474.1 [Gibberella zeae PH-1]
  misc_feature (1)..(146): NCBI GI: 170940380 Blast Desc: protein product [Podospora anserina]
  misc_feature (1)..(146): NCBI GI: 156051104 Blast Desc: SS1G_06959 [Sclerotinia sclerotiorum 1980] gi|154704737|gb|EDO04476.1| SS1G_06959 [Sclerotinia sclerotiorum 1980]
  misc_feature (1)..(146): NCBI GI: 154295227 Blast Desc: BC1G_13427 [Botryotinia fuckeliana B05.10] gi|150844154|gb|EDN19347.1| BC1G_13427 [Botryotinia fuckeliana B05.10]
  misc_feature (6)..(146): NCBI GI: 85068384 Blast Desc: NCU08053 [Neurospora crassa OR74A] gi|28926989|gb|EAA35948.1| conserved [Neurospora crassa OR74A]
  misc_feature (1)..(143): NCBI GI: 170099770 Blast Desc: ADF-like domain-containing protein [Laccaria bicolor S238N-H82] gi|164643782|gb|EDR08033.1| ADF-like domain-containing protein [Laccaria bicolor S238N-H82]
  misc_feature (5)..(146): NCBI GI: 39975499 Blast Desc: MGG_00104 [Magnaporthe grisea 70-15] gi|145019056|gb|EDK03335.1| MGG_00104 [Magnaporthe grisea 70-15]
  misc_feature (1)..(142): NCBI GI: 58263378 Blast Desc: [Cryptococcus neoformans var. neoformans JEC21] gi|134108594|ref|XP_776950.1| CNBB4780 [Cryptococcus neoformans var. neoformans B-3501A] gi|50259633|gb|EAL22303.1| CNBB4780 var.
  misc_feature (1)..(146): NCBI GI: 116194177 Blast Desc: CHGG_06806 [Chaetomium globosum CBS 148.51] gi|88182719|gb|EAQ90187.1| CHGG_06806 [Chaetomium globosum CBS 148.51]
  misc_feature (7)..(142): NCBI GI: 189192214 Blast Desc: conserved [Pyrenophora tritici-repentis Pt-1C-BFP] gi|187974052|gb|EDU41551.1| conserved [Pyrenophora tritici-repentis Pt-1C-BFP]
MSGADAPEILAAYDAVRSDKDETDWLLLSYDGAVGNKVVLTSTGTGGLEKLAENLLETEAQYGYVRVEYANDTESKRVKFVLVIWIGEKTGVMRKARVSIQSGDIKRVLSHHSIQVDARDKSDLKKEDVVARLRKAGGADYNGGRG

SEQ ID NO: 22520 - DNA, 1385 bp, Muscodor strobelii
  misc_feature: SGI EST ID NO. CUFF.52981.0
  misc_feature: Variant of the nucleotide sequence at SEQ ID NO 22518
gcaggatgatgggcaattcatgcaagatgagacagatatatcatattcttcctcctaaaccctttccgagttcatcctcaattgagctatacttgacgagatcgttcggtccacggcgttcataatattgagattgactatcttgcgaggttcgaacacgacatttcagtccccggaccaagctcagcgactcggagacaatcgacgctcgacccctatttccaaaccctacccctccatcccccaccaaaagcctgcccgccattttattccaggccacggcgatttacaatgtctggcgcagacgcccccgagatcctcgccgcctacgatgccgtacgctcggataaagacgagaccgattggctacttctatcttatgatggtgccgtaggcaacaaggtcgtgctgacaagcacagggacggggggactggaaaagctggcagaaaacctactggaaaccgaggcgcagtatggctatgtgcgcgtcgagtacgcaaatgatacggagagcaagcgagtaaagtttgttctcgtcatttggatcggcgagaagacaggggtaatgcgaaaagcgcgcgtgagcatccagagcggggatatcaagagagtcttgtcgcatcacagtatccaagtcgatgctcgggacaagagcgatttgaagaaggaagatgttgttgcgaggctaaggaaagccggcggtgctgattacaacggcggccgtggttgagagagaacgcgaattgctatttgcgccagcgtgcgagcgcatgtttcatgatggtttgggattggatgccgtaaacatagcggatggcgtcggtgaggtgatctaatcaattgaggtcttctggggccgttcaacataatccatcctctgtgttcattccgtggccggctcaccgccccaaccggttaagttgactacctcgggtatcctcccgctcctcacaattgtccaaatgacttcctcgtcaccatcgttgacttcttggtgttccatgtaagcagggatgagtgcgtagtctcccggatctaggtcgacgcgtttctttccgccatcgctaacaactgtacctttccctttcactgcataaacaatagtatcttgtgcaccgtgatgatgaacggcggatgccgtgtgtggcttcgcgagcatactggatgcgcaaatgccatcgcacttgtcgacgatcgcattagatcggatcatcccttccgtttggccgcctgacattttgagggccgatcccttcgtgagatgaacaggttgtgatggttctggatgtgacataacggatagaaattggattatcagtttcttttcttattgaaaagcagcaatgtaacctgttactgtattcgatgaagtttggagtgtca

SEQ ID NO: 22521 - DNA, 411 bp, Muscodor strobelii
  misc_feature: SGI cDNA ID NO. 567648
  misc_feature: Elevated expression when VOC is produced
  misc_feature: Encodes the peptide sequence at SEQ ID NO 22522
atgtcacatccagaaccatcacaacctgttcatctcacgaagggatcggccctcaaaatgtcaggcggccaaacggaagggatgatccgatctaatgcgatcgtcgacaagtgcgatggcatttgcgcatccagtatgctcgcgaagccacacacggcatccgccgttcatcatcacggtgcacaagatactattgtttatgcagtgaaagggaaaggtacagttgttagcgatggcggaaagaaacgcgtcgacctagatccgggagactacgcactcatccctgcttacatggaacaccaagaagtcaacgatggtgacgaggaagtcatttggacaattgtgaggagcgggaggatacccgaggtagtcaacttaaccggttggggcggtgagccggccacggaatga

SEQ ID NO: 22522 - protein, 136 aa, Muscodor strobelii
  misc_feature: SGI Peptide ID NO. 567648
  misc_feature (11)..(135): Pfam Id: PF00190 Pfam Desc: Cupin
  misc_feature (44)..(116): Pfam Id: PF07883 Pfam Desc: Cupin domain
  misc_feature (65)..(116): Pfam Id: PF05899 Pfam Desc: Domain of function (DUF861)
  misc_feature (7)..(129): NCBI GI: 145235587 Blast Desc: An03g05630 [Aspergillus niger] gi|134058129|emb|CAK38323.1| protein product [Aspergillus niger]
  misc_feature (10)..(129): NCBI GI: 189202080 Blast Desc: conserved [Pyrenophora tritici-repentis Pt-1C-BFP] gi|187984475|gb|EDU49963.1| conserved [Pyrenophora tritici-repentis Pt-1C-BFP]
  misc_feature (22)..(130): NCBI GI: 169595976 Blast Desc: SNOG_00735 [Phaeosphaeria nodorum SN15] gi|111071110|gb|EAT92230.1| SNOG_00735 [Phaeosphaeria nodorum SN15]
  misc_feature (11)..(132): NCBI GI: 256724694 Blast Desc: NECHADRAFT_48148 [Nectria haematococca mpVI 77-13-4]
  misc_feature (28)..(136): NCBI GI: 171681503 Blast Desc: protein product [Podospora anserina] gi|170940710|emb|CAP65938.1| protein product [Podospora anserina]
  misc_feature (32)..(130): NCBI GI: 85089549 Blast Desc: NCU06933 [Neurospora crassa OR74A] gi|28919303|gb|EAA28764.1| [Neurospora crassa OR74A]
  misc_feature (28)..(131): NCBI GI: 116203941 Blast Desc: CHGG_09854 [Chaetomium globosum CBS 148.51] gi|88175982|gb|EAQ83450.1| CHGG_09854 [Chaetomium globosum CBS 148.51]
  misc_feature (8)..(128): NCBI GI: 284992109 Blast Desc: Cupin 2 conserved barrel domain protein [Geodermatophilus obscurus DSM 43160] gi|284065354|gb|ADB76292.1| Cupin 2 conserved barrel domain protein [Geodermatophilus DSM
  misc_feature (10)..(126): NCBI GI: 222086909 Blast Desc: Arad_3599 [Agrobacterium radiobacter K84] gi|221724357|gb|ACM27513.1| conserved [Agrobacterium radiobacter K84]
  misc_feature (10)..(135): NCBI GI: 256679930 Blast Desc: SSPB78_26720 [Streptomyces sp. SPB78]
  misc_feature: Useful for introducing or modulating the production of volatile compounds
MSHPEPSQPVHLTKGSALKMSGGQTEGMIRSNAIVDKCDGICASSMLAKPHTASAVHHHGAQDTIVYAVKGKGTVVSDGGKKRVDLDPGDYALIPAYMEHQEVNDGDEEVIWTIVRSGRIPEVVNLTGWGGEPATE

SEQ ID NO: 22523 - DNA, 1385 bp, Muscodor strobelii
  misc_feature: SGI EST ID NO. CUFF.52981.0
  misc_feature: Variant of the nucleotide sequence at SEQ ID NO 22521
tgacactccaaacttcatcgaatacagtaacaggttacattgctgcttttcaataagaaaagaaactgataatccaatttctatccgttatgtcacatccagaaccatcacaacctgttcatctcacgaagggatcggccctcaaaatgtcaggcggccaaacggaagggatgatccgatctaatgcgatcgtcgacaagtgcgatggcatttgcgcatccagtatgctcgcgaagccacacacggcatccgccgttcatcatcacggtgcacaagatactattgtttatgcagtgaaagggaaaggtacagttgttagcgatggcggaaagaaacgcgtcgacctagatccgggagactacgcactcatccctgcttacatggaacaccaagaagtcaacgatggtgacgaggaagtcatttggacaattgtgaggagcgggaggatacccgaggtagtcaacttaaccggttggggcggtgagccggccacggaatgaacacagaggatggattatgttgaacggccccagaagacctcaattgattagatcacctcaccgacgccatccgctatgtttacggcatccaatcccaaaccatcatgaaacatgcgctcgcacgctggcgcaaatagcaattcgcgttctctctcaaccacggccgccgttgtaatcagcaccgccggctttccttagcctcgcaacaacatcttccttcttcaaatcgctcttgtcccgagcatcgacttggatactgtgatgcgacaagactctcttgatatccccgctctggatgctcacgcgcgcttttcgcattacccctgtcttctcgccgatccaaatgacgagaacaaactttactcgcttgctctccgtatcatttgcgtactcgacgcgcacatagccatactgcgcctcggtttccagtaggttttctgccagcttttccagtccccccgtccctgtgcttgtcagcacgaccttgttgcctacggcaccatcataagatagaagtagccaatcggtctcgtctttatccgagcgtacggcatcgtaggcggcgaggatctcgggggcgtctgcgccagacattgtaaatcgccgtggcctggaataaaatggcgggcaggcttttggtgggggatggaggggtagggtttggaaataggggtcgagcgtcgattgtctccgagtcgctgagcttggtccggggactgaaatgtcgtgttcgaacctcgcaagatagtcaatctcaatattatgaacgccgtggaccgaacgatctcgtcaagtatagctcaattgaggatgaactcggaaagggtttaggaggaagaatatgatatatctgtctcatcttgcatgaattgcccatcatcctgc

SEQ ID NO: 22524 - DNA, 996 bp, Muscodor strobelii
  misc_feature: SGI cDNA ID NO. 567649
  misc_feature: Elevated expression when VOC is produced
  misc_feature: Encodes the peptide sequence at SEQ ID NO 22525
atggaaatcacaaactcgcgcaggatactagctgtatcctctgaagactcagtacaccatcttgtccgagtcatcaaagatctcactggaacagcacctgaacaaacgtcaacgtccttggcagggaccacacataatctctcgctgaaaaatgcatattacacagcagaggttccgatatggatagatattatatcctcgccattagaatggtcggcttcattcctgtcgccggaagcgaaggaggttcttgaggtgctaggaggtgtcatgattgtgtttcctctaccaatgacacccacttcagatgaggcgaaatcagccaaaaatctaatagatcatgtcggaaaggtggtaaaagatggattaggaggttgggaatgggacggtgttcgactatgtcttggcgtcggcgaaattgacgacgtcgatgaatgggaggattgctgtgcagaatggggtcttgagttcgtgcaagtaagaaagcaatcaacacctacacggaatgaatacggcgagaagaccggtataccgcgagcacttgatgctttagagtcgaatgattgggcgaacacagcagcggatgagctcggatccgactttgagattatcgaggcagaaattgaggcggacaaagaacggcagaaacagcacggcgatgatggaagccacaatgaacctgacctagatcccgaaagccttgattttggattcgatcgagaagacttcgagggtcttaaacgcgcgatatggagctcaggacatgacgacgatgagtttctcaatggcggtctagggaagaatgatacggaggcggaaaaagaagcgtcgaggaaaacggaaaatgacgaagctttagacgacgaggaaatccagaagattgagcggatgatgaccaagcttcaggcggttcgagatacaaacgcaggtctaccggaggatcaacgcaagcgtgctgctgctaaggcagtggcagaggttatgaaagaattgtaa

SEQ ID NO: 22525 - protein, 331 aa, Muscodor strobelii
  misc_feature: SGI Peptide ID NO. 567649
  misc_feature (4)..(331): NCBI GI: 46132978 Blast Desc: FG09018.1 [Gibberella zeae PH-1]
  misc_feature (1)..(331): NCBI GI: 39940772 Blast Desc: MGG_04854 [Magnaporthe grisea 70-15] gi|145010921|gb|EDJ95577.1| MGG_04854 [Magnaporthe grisea 70-15]
  misc_feature (4)..(331): NCBI GI: 256727882 Blast Desc: NECHADRAFT_95305 [Nectria haematococca mpVI 77-13-4]
  misc_feature (28)..(331): NCBI GI: 171692991 Blast Desc: protein product [Podospora anserina] gi|170946444|emb|CAP73245.1| protein product [Podospora anserina]
  misc_feature (2)..(331): NCBI GI: 85098583 Blast Desc: NCU03590 [Neurospora crassa OR74A] gi|28922144|gb|EAA31398.1| [Neurospora crassa OR74A] gi|38566789|emb|CAE76099.1| [Neurospora crassa]
  misc_feature (1)..(331): NCBI GI: 154299392 Blast Desc: BC1G_10958 [Botryotinia fuckeliana B05.10] gi|150857300|gb|EDN32492.1| BC1G_10958 [Botryotinia fuckeliana B05.10]
  misc_feature (25)..(331): NCBI GI: 156042161 Blast Desc: SS1G_11631 [Sclerotinia sclerotiorum 1980] gi|154696014|gb|EDN95752.1| SS1G_11631 [Sclerotinia sclerotiorum 1980]
  misc_feature (1)..(331): NCBI GI: 189199032 Blast Desc: conserved [Pyrenophora tritici-repentis Pt-1C-BFP] gi|187982952|gb|EDU48440.1| conserved [Pyrenophora tritici-repentis Pt-1C-BFP]
  misc_feature (1)..(331): NCBI GI: 169614181 Blast Desc: SNOG_10226 [Phaeosphaeria nodorum SN15] gi|111061441|gb|EAT82561.1| SNOG_10226 [Phaeosphaeria nodorum SN15]
  misc_feature (173)..(331): NCBI GI: 261357993 Blast Desc: conserved [Verticillium albo-atrum VaMs.102]
  misc_feature: Useful for introducing or modulating the production of volatile compounds
MEITNSRRILAVSSEDSVHHLVRVIKDLTGTAPEQTSTSLAGTTHNLSLKNAYYTAEVPIWIDIISSPLEWSASFLSPEAKEVLEVLGGVMIVFPLPMTPTSDEAKSAKNLIDHVGKVVKDGLGGWEWDGVRLCLGVGEIDDVDEWEDCCAEWGLEFVQVRKQSTPTRNEYGEKTGIPRALDALESNDWANTAADELGSDFEIIEAEIEADKERQKQHGDDGSHNEPDLDPESLDFGFDREDFEGLKRAIWSSGHDDDEFLNGGLGKNDTEAEKEASRKTENDEALDDEEIQKIERMMTKLQAVRDTNAGLPEDQRKRAAAKAVAEVMKEL

SEQ ID NO: 22526 - DNA, 2613 bp, Muscodor strobelii
  misc_feature: SGI EST ID NO. CUFF.53065.1
  misc_feature: Variant of the nucleotide sequence at SEQ ID NO 22524
cacaaactcgcgcaggatactagctgtatcctctgaagactcagtacaccatcttgtccgagtcatcaaagatctcactggaacagcacctgaacaaacgtcaacgtccttggcagggaccacacataatctctcgctgaaaaatgcatattacacagcagaggttccgatatggatagatattatatcctcgccattagaatggtcggcttcattcctgtcgccggaagcgaaggaggttcttgaggtgctaggaggtgtcatgattgtgtttcctctaccaatgacacccacttcagatgaggcgaaatcagccaaaaatctaatagatcatgtcggaaaggtggtaaaagatggattaggaggttgggaatgggacggtgttcgactatgtcttggcgtcggcgaaattgacgacgtcgatgaatgggaggattgctgtgcagaatggggtcttgagttcgtgcaagtaagaaagcaatcaacacctacacggaatgaatacggcgagaagaccggtataccgcgagcacttgatgctttagagtcgaatgattgggcgaacacagcagcggatgagctcggatccgactttgagattatcgaggcagaaattgaggcggacaaagaacggcagaaacagcacggcgatgatggaagccacaatgaacctgacctagatcccgaaagccttgattttggattcgatcgagaagacttcgagggtcttaaacgcgcgatatggagctcaggacatgacgacgatgagtttctcaatggcggtctagggaagaatgatacggaggcggaaaaagaagcgtcgaggaaaacggaaaatgacgaagctttagacgacgaggaaatccagaagattgagcggatgatgaccaagcttcaggcggttcgagatacaaacgcaggtctaccggaggatcaacgcaagcgtgctgctgctaaggcagtggcagaggttatgaaagaattgtaagatatacgagaccattgacacctagctcttggagacataaaggagctccgaaacaggcgacatggaaagacatgactgcactagtctgtgtagctggaattgggctacctctggcacttcgtctcgccactgttgaacacgtgtgccacaagataattatagcgctgtgcgcggcattgtaatgtatctatcttcaattgagcccccgaatgtgttgacgaagtctaaatttcatgcaaaatgcattggctcgcaaagacttgcatcgaaatcgctctccctaataccatggatatacatttgacctacgaatatccacctgtccgagtcttcgtcttttcgtataacaaggggaaacctagagactctgcacaacataaccgcatcaccttcgcgtgtcgtacgtggcaccagcgcgagtcgaccgcccttggtctttgctatgcgacgacggaatgctaccttgaaaagcttgtcaaaagaggtaaacttactccacgttttccaagcatggccaaaaaacgtcatgggctttgcaaaaggcaattgttttaaccatttctgttgccagttgcgaattggatctagtgtatggtaccactcccagaagcttcgccgtgttgcctcaagtccagaagggaggagcgacccggcacagagagtctgccagtacgtgtcgacaaccgacgctttcgttttgtccttgtcagccgctcttgccggcagacctgcgaatgcctcccagcggactaaggtctcaagaggccagatgagtttgtaaagttcacggatgccataatcagcttgctggaatgcctctttaaaggtctggcgtacgcctttttcgtcttcttccgctgggttatagtctttaatcggttcatcatccatgattccaagatcggcgatagcgggcagcatttctgcaatctcacttatgctgtcaaatacgtagcctgccactgtgagagtggcgcgatcgtctgacacgctgatatctgaaaggtctgtaggattgatcatacatggacctccaaactggtaaccactacggtcgtcaaatggtgctgcaatatcctccgttctttcccaatctggggtccatgatggtagcttggtacccttggggtcctgatcgatctggctttccgactctttgctagaagctgattgcattccatgattctcagatgtatcagtgggacgttcctttctggatcggactttttgaagagatctccaatcgtattgataagtactcaagggcaagaacttaagtagggccaggctttgagatcgtaggatgagctccactgctacatttctatacaactcctcaacgctaacacgatagttcatcacaatgccgagcttagtggggttggaaatgaggcccaagaatgcataaatcttgtcgcgcgggtccgttgccgccctcgtccgaaatcttgccaggagttctaatagctgctcattcggctcacgtcgttgtttcaggcatcggagcgcttcttctagagagaggagctcagcaaagtcttgatccgaagagccaaaactgcgctcgggcgaccagaatctctcctgcgcagatgcgtaaatgattccgcgagatagcgcatccc

SEQ ID NO: 22527 - DNA, 2040 bp, Muscodor strobelii
  misc_feature: SGI cDNA ID NO. 567650
  misc_feature: Encodes the peptide sequence at SEQ ID NO 22528
atggctaagacatggctcaaggaatttgttttcaggccaagcttagaaggcttaggtgttctcgatcccactgaaatgttcccggactggaaaggtgaccccgacgaagatgagtatgattctaagaagactgatgcacaaagcgaagatttggagaagctttatgaagctttgtcttactgctggggagatgctgagactacaaagcccatattcgttgatagaggtgtgcttgaagtcactgtcaacctccgctcagcattgagacatttgcgccgctctgatgagcctcgtgttttatggattgatgcaatatgtatagatcaaagtaatattgacgaaagatcacatcaagtcaaattgatgggcgatatttaccgaagcgccgaacaggttgtggtttggctgggacgctctgaagaccatacagagaacaccttcatgatgctcaacgcactcgcgaaggaggcggaggacagtcaaaacgcagggcacgataccgagaaagaagtccgattaagttccgatcaacaaggaagaattgaagcaattattgagcaaacatggttcacacgatcctggaccgtacaagagatactattggctagaaagtgcctggtagtcagtggttgggaatcggtcagctgggatgcgctatctcgcggaatcatttacgcatctgcgcaggagagattctggtcgcccgagcgcagttttggctcttcggatcaagactttgctgagctcctctctctagaagaagcgctccgatgcctgaaacaacgacgtgagccgaatgagcagctattagaactcctggcaagatttcggacgagggcggcaacggacccgcgcgacaagatttatgcattcttgggcctcatttccaaccccactaagctcggcattgtgatgaactatcgtgttagcgttgaggagttgtatagaaatgtagcagtggagctcatcctacgatctcaaagcctggccctacttaagttcttgcccttgagtacttatcaatacgattggagatctcttcaaaaagtccgatccagaaaggaacgtcccactgatacatctgagaatcatggaatgcaatcagcttctagcaaagagtcggaaagccagatcgatcaggaccccaagggtaccaagctaccatcatggaccccagattgggaaagaacggaggatattgcagcaccatttgacgaccgtagtggttaccagtttggaggtccatgtatgatcaatcctacagacctttcagatatcagcgtgtcagacgatcgcgccactctcacagtggcaggctacgtatttgacagcataagtgagattgcagaaatgctgcccgctatcgccgatcttggaatcatggatgatgaaccgattaaagactataacccagcggaagaagacgaaaaaggcgtacgccagacctttaaagaggcattccagcaagctgattatggcatccgtgaactttacaaactcatctggcctcttgagaccttagtccgctgggaggcattcgcaggtctgccggcaagagcggctgacaaggacaaaacgaaagcgtcggttgtcgacacgtactggcagactctctgtgccgggtcgctcctcccttctggacttgaggcaacacggcgaagcttctgggagtggtaccatacactagatccaattcgcaactggcaacagaaatggttaaaacaattgccttttgcaaagcccatgacgttttttggccatgcttggaaaacgtggagtaagtttacctcttttgacaagcttttcaaggtagcattccgtcgtcgcatagcaaagaccaagggcggtcgactcgcgctggtgccacgtacgacacgcgaaggtgatgcggttatgttgtgcagagtctctaggtttccccttgttatacgaaaagacgaagactcggacaggtggatattcgtaggtcaaatgtatatccatggtattagggagagcgatttcgatgcaagtctttgcgagccaatgcattttgcatga

SEQ ID NO: 22528 - protein, 679 aa, Muscodor strobelii
  misc_feature: SGI Peptide ID NO. 567650
  misc_feature (55)..(198): Pfam Id: PF06985 Pfam Desc: Heterokaryon incompatibility protein (HET)
  misc_feature (80)..(649): NCBI GI: 256729019 Blast Desc: NECHADRAFT_79878 [Nectria haematococca mpVI 77-13-4]
  misc_feature (49)..(667): NCBI GI: 171678763 Blast Desc: protein product [Podospora anserina] gi|170937451|emb|CAP62109.1| protein product [Podospora anserina]
  misc_feature (55)..(663): NCBI GI: 39976177 Blast Desc: MGG_05985 [Magnaporthe grisea 70-15] gi|145011741|gb|EDJ96397.1| MGG_05985 [Magnaporthe grisea 70-15]
  misc_feature (55)..(662): NCBI GI: 145245067 Blast Desc: An11g08370 [Aspergillus niger] gi|134079496|emb|CAK46028.1| protein product [Aspergillus niger]
  misc_feature (49)..(514): NCBI GI: 116194324 Blast Desc: CHGG_03760 [Chaetomium globosum CBS 148.51] gi|88179673|gb|EAQ87141.1| CHGG_03760 [Chaetomium globosum CBS 148.51]
  misc_feature (55)..(667): NCBI GI: 115401102 Blast Desc: [Aspergillus terreus NIH2624] gi|114190080|gb|EAU31780.1| [Aspergillus terreus NIH2624]
  misc_feature (30)..(333): NCBI GI: 116200494 Blast Desc: CHGG_10792 [Chaetomium globosum CBS 148.51] gi|88175506|gb|EAQ82974.1| CHGG_10792 [Chaetomium globosum CBS 148.51]
  misc_feature (8)..(344): NCBI GI: 256724619 Blast Desc: NECHADRAFT_95927 [Nectria haematococca mpVI 77-13-4]
  misc_feature (55)..(463): NCBI GI: 261202540 Blast Desc: conserved [Ajellomyces dermatitidis SLH14081] gi|239590581|gb|EEQ73162.1| conserved [Ajellomyces dermatitidis SLH14081]
  misc_feature (55)..(452): NCBI GI: 239612306 Blast Desc: conserved [Ajellomyces dermatitidis ER-3]
MAKTWLKEFVFRPSLEGLGVLDPTEMFPDWKGDPDEDEYDSKKTDAQSEDLEKLYEALSYCWGDAETTKPIFVDRGVLEVTVNLRSALRHLRRSDEPRVLWIDAICIDQSNIDERSHQVKLMGDIYRSAEQVVVWLGRSEDHTENTFMMLNALAKEAEDSQNAGHDTEKEVRLSSDQQGRIEAIIEQTWFTRSWTVQEILLARKCLVVSGWESVSWDALSRGIIYASAQERFWSPERSFGSSDQDFAELLSLEEALRCLKQRREPNEQLLELLARFRTRAATDPRDKIYAFLGLISNPTKLGIVMNYRVSVEELYRNVAVELILRSQSLALLKFLPLSTYQYDWRSLQKVRSRKERPTDTSENHGMQSASSKESESQIDQDPKGTKLPSWTPDWERTEDIAAPFDDRSGYQFGGPCMINPTDLSDISVSDDRATLTVAGYVFDSISEIAEMLPAIADLGIMDDEPIKDYNPAEEDEKGVRQTFKEAFQQADYGIRELYKLIWPLETLVRWEAFAGLPARAADKDKTKASVVDTYWQTLCAGSLLPSGLEATRRSFWEWYHTLDPIRNWQQKWLKQLPFAKPMTFFGHAWKTWSKFTSFDKLFKVAFRRRIAKTKGGRLALVPRTTREGDAVMLCRVSRFPLVIRKDEDSDRWIFVGQMYIHGIRESDFDASLCEPMHFA

SEQ ID NO: 22529 - DNA, 2331 bp, Muscodor strobelii
  misc_feature: SGI EST ID NO. CUFF.53066.3
  misc_feature: Variant of the nucleotide sequence at SEQ ID NO 22527
ctctgaagaccatacagagaacaccttcatgatgctcaacgcactcgcgaaggaggcggaggacagtcaaaacgcagggcacgataccgagaaagaagtccgattaagttccgatcaacaaggaagaattgaagcaattattgagcaaacatggttcacacgatcctggaccgtacaagagatactattggctagaaagtgcctggtagtcagtggttgggaatcggtcagctgggatgcgctatctcgcggaatcatttacgcatctgcgcaggagagattctggtcgcccgagcgcagttttggctcttcggatcaagactttgctgagctcctctctctagaagaagcgctccgatgcctgaaacaacgacgtgagccgaatgagcagctattagaactcctggcaagatttcggacgagggcggcaacggacccgcgcgacaagatttatgcattcttgggcctcatttccaaccccactaagctcggcattgtgatgaactatcgtgttagcgttgaggagttgtatagaaatgtagcagtggagctcatcctacgatctcaaagcctggccctacttaagttcttgcccttgagtacttatcaatacgattggagatctcttcaaaaagtccgatccagaaaggaacgtcccactgatacatctgagaatcatggaatgcaatcagcttctagcaaagagtcggaaagccagatcgatcaggaccccaagggtaccaagctaccatcatggaccccagattgggaaagaacggaggatattgcagcaccatttgacgaccgtagtggttaccagtttggaggtccatgtatgatcaatcctacagacctttcagatatcagcgtgtcagacgatcgcgccactctcacagtggcaggctacgtatttgacagcataagtgagattgcagaaatgctgcccgctatcgccgatcttggaatcatggatgatgaaccgattaaagactataacccagcggaagaagacgaaaaaggcgtacgccagacctttaaagaggcattccagcaagctgattatggcatccgtgaactttacaaactcatctggcctcttgagaccttagtccgctgggaggcattcgcaggtctgccggcaagagcggctgacaaggacaaaacgaaagcgtcggttgtcgacacgtactggcagactctctgtgccgggtcgctcctcccttctggacttgaggcaacacggcgaagcttctgggagtggtaccatacactagatccaattcgcaactggcaacagaaatggttaaaacaattgccttttgcaaagcccatgacgttttttggccatgcttggaaaacgtggagtaagtttacctcttttgacaagcttttcaaggtagcattccgtcgtcgcatagcaaagaccaagggcggtcgactcgcgctggtgccacgtacgacacgcgaaggtgatgcggttatgttgtgcagagtctctaggtttccccttgttatacgaaaagacgaagactcggacaggtggatattcgtaggtcaaatgtatatccatggtattagggagagcgatttcgatgcaagtctttgcgagccaatgcattttgcatgaaatttagacttcgtcaacacattcgggggctcaattgaagatagatacattacaatgccgcgcacagcgctataattatcttgtggcacacgtgttcaacagtggcgagacgaagtgccagaggtagcccaattccagctacacagactagtgcagtcatgtctttccatgtcgcctgtttcggagctcctttatgtctccaagagctaggtgtcaatggtctcgtatatcttacaattctttcataacctctgccactgccttagcagcagcacgcttgcgttgatcctccggtagacctgcgtttgtatctcgaaccgcctgaagcttggtcatcatccgctcaatcttctggatttcctcgtcgtctaaagcttcgtcattttccgttttcctcgacgcttctttttccgcctccgtatcattcttccctagaccgccattgagaaactcatcgtcgtcatgtcctgagctccatatcgcgcgtttaagaccctcgaagtcttctcgatcgaatccaaaatcaaggctttcgggatctaggtcaggttcattgtggcttccatcatcgccgtgctgtttctgccgttctttgtccgcctcaatttctgcctcgataatctcaaagtcggatccgagctcatccgctgctgtgttcgcccaatcattcgactctaaagcatcaagtgctcgcggtataccgg

SEQ ID NO: 22530 - DNA, 486 bp, Muscodor strobelii
  misc_feature: SGI cDNA ID NO. 567651
  misc_feature: Elevated expression when VOC is produced
  misc_feature: Encodes the peptide sequence at SEQ ID NO 22531
atgactgataaaactcttgtcgagaaactcaacgaagttcgcctggctgggcttcggcaagcatctgagagtcgtgatgtagatgcactgatgtcgtggcattcaaaagacgcgacttttgtcgctccgggtcaaaatatgtccctgaaggggcgcgacgccgtccggggattctatgcaatggcgtacggcagcatgcctaccttcaagatcctagagtccaagtcaactgggcatacacccgagttcgtcgcatgcgagatgaaatgcgaaggccaagctggggttgacttgcccggattaggcgtcaaggctggcgaaacggtcactcatgtcggtgtctccttgttttggtggaggtgggaaggcgatggcgagtgggatggaaacttgtccgaggacgttgtgagaggctggaagattatcgaagagcatgcttattatcaggtgggagttagcggccgggagtcagaaaacaaggactaa

SEQ ID NO: 22531 - protein, 161 aa, Muscodor strobelii
  misc_feature: SGI Peptide ID NO. 567651
  misc_feature (21)..(120): NCBI GI: 114798586 Blast Desc: HNE_0060 [Hyphomonas neptunium ATCC 15444] gi|114738760|gb|ABI76885.1| conserved [Hyphomonas neptunium ATCC 15444]
  misc_feature: Useful for introducing or modulating the production of volatile compounds
MTDKTLVEKLNEVRLAGLRQASESRDVDALMSWHSKDATFVAPGQNMSLKGRDAVRGFYAMAYGSMPTFKILESKSTGHTPEFVACEMKCEGQAGVDLPGLGVKAGETVTHVGVSLFWWRWEGDGEWDGNLSEDVVRGWKIIEEHAYYQVGVSGRESENKD

SEQ ID NO: 22532 - DNA, 1084 bp, Muscodor strobelii
  misc_feature: SGI EST ID NO. CUFF.52991.0
  misc_feature: Variant of the nucleotide sequence at SEQ ID NO 22530
gatcacttttcagccccagagggttggattacgtaccgaagtcctgcttgacttttgtgtatataaatgtcctcgcagccttgggctgaattgaaaaagacacgcggctctcatttctcccttatagttcattaaaacataaatctcaattataaacatgactgataaaactcttgtcgagaaactcaacgaagttcgcctggctgggcttcggcaagcatctgagagtcgtgatgtagatgcactgatgtcgtggcattcaaaagacgcgacttttgtcgctccgggtcaaaatatgtccctgaaggggcgcgacgccgtccggggattctatgcaatggcgtacggcagcatgcctaccttcaagatcctagagtccaagtcaactgggcatacacccgagttcgtcgcatgcgagatgaaatgcgaaggccaagctggggttgacttgcccggattaggcgtcaaggctggcgaaacggtcactcatgtcggtgtctccttgttttggtggaggtgggaaggcgatggcgagtgggatggaaacttgtccgaggacgttgtgagaggctggaagattatcgaagagcatgcttattatcaggtgggagttagcggccgggagtcagaaaacaaggactaagccttgagatggttagcatgctatttgttgatagacgtcgatcagtcttgatcatcacggtgagcccgcgtgtatgagctcttatagacacgcatttaagtgttcagctcaaaaatgtcctgcgtttgtttcctatgaagactttgtagtggatgggttagcgcttcaattctgtagcgtggcagatgctgccagtaacattagctgaccacgtcttggctaagcttgggaaggttacctagattctttcagcactttagctataccctcagcaaatatggaatagaactaaatgttatatcgcatgagttcttactactgcactgatatatgatatttctaagattattcccacgagcattttgtagatgctgtctgtgaatgtattttccgactgcatttctggcggattaaccctgtttgtcctagggctgattctct

SEQ ID NO: 22533 - DNA, 2601 bp, Muscodor strobelii
  misc_feature: SGI cDNA ID NO. 567652
  misc_feature: Encodes the peptide sequence at SEQ ID NO 22534
atgaagaagaaaacaagagtgtcaatctcacatgtctcgttcgaacaccatgtcgagcctctgggcatcggtgaagcgaagcctcgtatctcatggcagtttgaaggcgatgccttaaattggacgcagaccggctacagcattgaagtctccagagggggcaattctcaagttttcgacttcgagtcatccgagtctgttctcgtgccgtggccgactgttgctctcagctctgccgagtctgccgacatccgagtcaaatcccaaggcatcgatgtgggcggagatactgactggtccgccgctttcacggtggaagcgggattgctgaacgaaaaggactggcacggtgctcagatgattgcagcagacgcacctacagaacagaacgctgcgcatcgcccaatacgtttgaggaaggaattcgagataaatagcgaaatctcatccgcccgtctttatatcacggcatttgggctttacgtagcttatacaaacggggagagggttggtgatgctgtgctggcgccgggctggcagtcatacaatcatcggctcgtttatgacacctatgatgtgacatcactactccagatcggctccaacgcaattggaatagaggtgggtgagggatggtttgctggacgacttggatttgactcgggaaatcgcaacatctggggtgatactctgggcgcaatggctctcttggtaataaagaaagccgacggcagtagtcaagtcataccaactgacttatcgtggtcatcatctggctccgggcctatcatcacctcggatatctacgacggcgaaatctacgattctgcacttgagatgcctttctggaatgtcgcaccgctcaattcctcatccgcgcatgcatggaacgcagtgaaaaagcttaggtccccaattagcaggcttgttgcccccgacggtcctccgatccgtcgtctaggagaggttggtattcgaaaaattttaacgactccttctggcgcaacagtcttagatttcggccaaaatcttgttggttggctacgtgtcaatgtggctggtccggctgttctacaggacggagagattgacattggtcctctccgtagtgctaggcagacggatacactgatactatcagggaatagtactcaaacgtgggaaccgaatttcacgtatcatgggtttagatacgttcaagtcaacaattggccgtcaaagtatacaccgctgagtacgacgagcattaaggcgatcgtactgcattccgacatgggacagaggaccggcgattttcattgttcaaacgcgctattgaacaaacttgtagaaaacgtagtttggagcatgaagggaaatttcatgagcatacctaccgactgtccacagagagatgagaggctcggctggacaggagatgcacatgccttctctgcgactgcgagtttcctatatgacacatcgggctttatgcggggatggatgagggatgtggtctcggagcagcttgagaatagcaatgttgtcccatttgttgttcccaacatccctgccctcggcgctgttcgaccaacatcagtatggggggacgttgttgttggaaatgcctggcagatgtatctcgcatccggagatattcatgcgctacacgaacaatatgtcggagccaaagcctgggtagagagtggaataccgaggggcccgaacgggctttggaatcatagctatgaacagtttggagactggctggatccaaaagccccgaacgacgaccctggtgctgccactacgtcgtcatccctggtttccgatgcgtatctagtctatgtgacccatttggtagcaacaatggcagccgtgctcggactgaaggacgatatggctcgattccaagcctcgctagagaaagtgaccactgcgttccaaaaagcttggatcgacccggacggcattgtggctaatgagactcagacaggtctcacgttaccgctacacttcgggcttttcccgcagggccaagacactgctgctgccagtaggttgcagaagatcattgcagcaaatgattatcatgttggaacaggttttgcgggaacgcaccttcttggacttacgctcacgagttatggcctgacagaggaattttacaagatgcttctacagaccacagtcccgtcatggttgtatcaagttgttcaaggtggaaccacaacttgggaacgctgggacagtcttatgcctgatgggaagactaattctaacggcatgacatccttcaatcactatgcgtttggctcggttgcgaactggatgttccaaacaatcggtgggcttgcgcctgctgagcccggttggaaaacgatcaaagtcgcacctgtaccaggaggtgggttaacattcgcgaaagccagctatcgtagtccatatggccaggtcgcgacgcactggtcaattgatgacgatggtgtattcgagctcctgctaacagtcccgccgaactcgaaggctgaagtacatttgccaggaggcggtggggttactcagacagttggtagtggaagacacaggttcaagatatcgagcatcttcaacgcgggttga

SEQ ID NO: 22534 - protein, 866 aa, Muscodor strobelii
  misc_feature: SGI Peptide ID NO. 567652
  misc_feature (328)..(840): Pfam Id: PF05592 Pfam Desc: Bacterial alpha-L-rhamnosidase
  misc_feature (146)..(323): Pfam Id: PF08531 Pfam Desc: Alpha-L-rhamnosidase N-terminal domain
  misc_feature (7)..(855): NCBI GI: 39968199 Blast Desc: MGG_02192 [Magnaporthe grisea 70-15] gi|145013075|gb|EDJ97716.1| MGG_02192 [Magnaporthe grisea 70-15]
  misc_feature (7)..(857): NCBI GI: 46127193 Blast Desc: FG07974.1 [Gibberella zeae PH-1]
  misc_feature (7)..(860): NCBI GI: 256722544 Blast Desc: NECHADRAFT_85306 [Nectria haematococca mpVI 77-13-4]
  misc_feature (7)..(841): NCBI GI: 46138343 Blast Desc: FG10686.1 [Gibberella zeae PH-1]
  misc_feature (7)..(857): NCBI GI: 261352470 Blast Desc: alpha-L-rhamnosidase A [Verticillium albo-atrum VaMs.102]
  misc_feature (5)..(857): NCBI GI: 145259094 Blast Desc: An04g09070 [Aspergillus niger] gi|134074885|emb|CAK38995.1| protein product [Aspergillus niger]
  misc_feature (5)..(859): NCBI GI: 169771311 Blast Desc: [Aspergillus oryzae RIB40] gi|83767984|dbj|BAE58123.1| protein product [Aspergillus oryzae]
  misc_feature (9)..(858): NCBI GI: 67516859 Blast Desc: AN0711.2 [Aspergillus nidulans FGSC A4] gi|40746032|gb|EAA65188.1| AN0711.2 [Aspergillus nidulans FGSC A4] gi|259489015|tpe|CBF88938.1| TPA: alpha-rhamnosidase nidulans
  misc_feature (7)..(859): NCBI GI: 119472483 Blast Desc: bacterial alpha-L-rhamnosidase domain protein [Neosartorya fischeri NRRL 181] gi|119406492|gb|EAW16443.1| bacterial alpha-L-rhamnosidase domain protein [Neosartorya NRRL
  misc_feature (5)..(859): NCBI GI: 255939313 Blast Desc: Pc15g02120 [Penicillium chrysogenum Wisconsin 54-1255] gi|211585048|emb|CAP83098.1| Pc15g02120 [Penicillium chrysogenum Wisconsin 54-1255]
MKKKTRVSISHVSFEHHVEPLGIGEAKPRISWQFEGDALNWTQTGYSIEVSRGGNSQVFDFESSESVLVPWPTVALSSAESADIRVKSQGIDVGGDTDWSAAFTVEAGLLNEKDWHGAQMIAADAPTEQNAAHRPIRLRKEFEINSEISSARLYITAFGLYVAYTNGERVGDAVLAPGWQSYNHRLVYDTYDVTSLLQIGSNAIGIEVGEGWFAGRLGFDSGNRNIWGDTLGAMALLVIKKADGSSQVIPTDLSWSSSGSGPIITSDIYDGEIYDSALEMPFWNVAPLNSSSAHAWNAVKKLRSPISRLVAPDGPPIRRLGEVGIRKILTTPSGATVLDFGQNLVGWLRVNVAGPAVLQDGEIDIGPLRSARQTDTLILSGNSTQTWEPNFTYHGFRYVQVNNWPSKYTPLSTTSIKAIVLHSDMGQRTGDFHCSNALLNKLVENVVWSMKGNFMSIPTDCPQRDERLGWTGDAHAFSATASFLYDTSGFMRGWMRDVVSEQLENSNVVPFVVPNIPALGAVRPTSVWGDVVVGNAWQMYLASGDIHALHEQYVGAKAWVESGIPRGPNGLWNHSYEQFGDWLDPKAPNDDPGAATTSSSLVSDAYLVYVTHLVATMAAVLGLKDDMARFQASLEKVTTAFQKAWIDPDGIVANETQTGLTLPLHFGLFPQGQDTAAASRLQKIIAANDYHVGTGFAGTHLLGLTLTSYGLTEEFYKMLLQTTVPSWLYQVVQGGTTTWERWDSLMPDGKTNSNGMTSFNHYAFGSVANWMFQTIGGLAPAEPGWKTIKVAPVPGGGLTFAKASYRSPYGQVATHWSIDDDGVFELLLTVPPNSKAEVHLPGGGGVTQTVGSGRHRFKISSIFNAG

SEQ ID NO: 22535 - DNA, 1737 bp, Muscodor strobelii
  misc_feature: SGI EST ID NO. CUFF.52994.0
  misc_feature: Variant of the nucleotide sequence at SEQ ID NO 22533
agttctacaggacggagagattgacattggtcctctccgtagtgctaggcagacggatacactgatactatcagggaatagtactcaaacgtgggaaccgaatttcacgtatcatgggtttagatacgttcaagtcaacaattggccgtcaaagtatacaccgctgagtacgacgagcattaaggcgatcgtactgcattccgacatgggacagaggaccggcgattttcattgttcaaacgcgctattgaacaaacttgtagaaaacgtagtttggagcatgaagggaaatttcatgagcatacctaccgactgtccacagagagatgagaggctcggctggacaggagatgcacatgccttctctgcgactgcgagtttcctatatgacacatcgggctttatgcggggatggatgagggatgtggtctcggagcagcttgagaatagcaatgttgtcccatttgttgttcccaacatccctgccctcggcgctgttcgaccaacatcagtatggggggacgttgttgttggaaatgcctggcagatgtatctcgcatccggagatattcatgcgctacacgaacaatatgtcggagccaaagcctgggtagagagtggaataccgaggggcccgaacgggctttggaatcatagctatgaacagtttggagactggctggatccaaaagccccgaacgacgaccctggtgctgccactacgtcgtcatccctggtttccgatgcgtatctagtctatgtgacccatttggtagcaacaatggcagccgtgctcggactgaaggacgatatggctcgattccaagcctcgctagagaaagtgaccactgcgttccaaaaagcttggatcgacccggacggcattgtggctaatgagactcagacaggtctcacgttaccgctacacttcgggcttttcccgcagggccaagacactgctgctgccagtaggttgcagaagatcattgcagcaaatgattatcatgttggaacaggttttgcgggaacgcaccttcttggacttacgctcacgagttatggcctgacagaggaattttacaagatgcttctacagaccacagtcccgtcatggttgtatcaagttgttcaaggtggaaccacaacttgggaacgctgggacagtcttatgcctgatgggaagactaattctaacggcatgacatccttcaatcactatgcgtttggctcggttgcgaactggatgttccaaacaatcggtgggcttgcgcctgctgagcccggttggaaaacgatcaaagtcgcacctgtaccaggaggtgggttaacattcgcgaaagccagctatcgtagtccatatggccaggtcgcgacgcactggtcaattgatgacgatggtgtattcgagctcctgctaacagtcccgccgaactcgaaggctgaagtacatttgccaggaggcggtggggttactcagacagttggtagtggaagacacaggttcaagatatcgagcatcttcaacgcgggttgatttatttatcgtcaaaatagtcgatcaggagtgatcgaaacaatttttatcatcacgcgaattggaatgttcgcgttttagtgtggttcatgtaccgttgtcctgtagcatggcttgtcgctaattgtcacaaaatatgctgcattgccgcaaaagcgcttataatatgatccattaattgaacttctgaatctgcgctggaa

SEQ ID NO: 22536 - DNA, 1287 bp, Muscodor strobelii
  misc_feature: SGI cDNA ID NO. 567653
  misc_feature: Encodes the peptide sequence at SEQ ID NO 22537
atgtcagggcttgatctctccatgccccttccctggatcaaagactcacctgcagcacaatcgttcattgaggaagatgaaatcgcatcacagttcttcgataaatacgtcatgtatccttgtaacagcaattcgataccagggtttcttgagcatctcccagttttgttccatgaggctagggttgagagccgcaaagctttgcgctgggcggtactgtcagcgtcgtatgcgagtatcgccaccaacaatagcaatgcagcaatgagaaataaagccctcgagtgttacggcgaagcattgaactctctccgagatgccctcaagtcacatactacgactccggatggctacgtacttatgactatagtcgtactcgatatcttcgagaccgtttatctcggagagtctgcatcaacaagctctcatgctgaggggatgaagctcgttctgcggcttcgcggcccgaaccagatctacgggcccagagggtggagcttattccggcttgcgcatcatcgtttacaaaagcagcagttggcatacagccaggaccctatgccagagtctgagctttggctgaacgcccttaatgaagatctacctcatattcgtggcgagaaagacaatcaccagataattaaaacatgtgccagagcacggcaaattcttaaggaaatcaataatgatcagctagaaagcgatcgactactcaagttagtgaacgaaatgtacgaactcgatcggtccacaaccatgtggcggagcagcacgaattgggcatatcaaaacaggcctcgtgaaaacctgttcgatagcgccgattcactagagtactttccagattatgtccagatccatccggacgtttggatcgcgtatgaatggaactaccaccgaacagccaggatcattctacatgaacaattattggaaatactggagcgaatcagctcagctgccagggcagatggactcacacctgcccctgtgccagtactcaaagacatctctgctagacttatcaagagtctcgcggacgaagtgctatcaactgttccgcaaatgctaggtatcattgatcacaatggtgagtcgctcagtgactcaaggactgtgacactatgtcaaggtgtcggtggctatctccttctatggcccatcaaggttatcaaagagactaaatcggcgcaacccgaacagaaagctgcagcacagtctatatttgagcgtatacgggaaaatacgcgcatgaaagaggttttgggcgaaatgagtaatatttga

SEQ ID NO: 22537 - protein, 428 aa, Muscodor strobelii
  misc_feature: SGI Peptide ID NO. 567653
  misc_feature (32)..(422): NCBI GI: 146322942 Blast Desc: C6 transcription factor [Aspergillus fumigatus Af293] gi|129558537|gb|EAL93501.2| C6 transcription factor, [Aspergillus fumigatus Af293] gi|159129603|gb|EDP54717.1| C6 transcription
  misc_feature (25)..(422): NCBI GI: 119481277 Blast Desc: NFIA_087260 [Neosartorya fischeri NRRL 181] gi|119408821|gb|EAW18770.1| conserved [Neosartorya fischeri NRRL 181]
  misc_feature (25)..(422): NCBI GI: 121715760 Blast Desc: C6 zinc finger domain protein [Aspergillus clavatus NRRL 1] gi|119403646|gb|EAW14063.1| C6 zinc finger domain protein [Aspergillus clavatus NRRL 1]
  misc_feature (17)..(422): NCBI GI: 115383924 Blast Desc: conserved [Aspergillus terreus NIH2624] gi|114196201|gb|EAU37901.1| conserved [Aspergillus terreus NIH2624]
  misc_feature (8)..(422): NCBI GI: 212537207 Blast Desc: C6 transcription factor, [Penicillium marneffei ATCC 18224] gi|210068501|gb|EEA22592.1| C6 transcription factor, [Penicillium marneffei ATCC 18224]
  misc_feature (16)..(422): NCBI GI: 255946295 Blast Desc: Pc20g14370 [Penicillium chrysogenum Wisconsin 54-1255] gi|211588650|emb|CAP86766.1| Pc20g14370 [Penicillium chrysogenum Wisconsin 54-1255]
  misc_feature (25)..(412): NCBI GI: 67540096 Blast Desc: AN6218.2 [Aspergillus nidulans FGSC A4] gi|40738814|gb|EAA58004.1| AN6218.2 [Aspergillus nidulans FGSC A4] gi|259479582|tpe|CBF69936.1| TPA: Zn(II)2Cys6 transcription
  misc_feature (25)..(412): NCBI GI: 242809918 Blast Desc: C6 transcription factor, [Talaromyces stipitatus ATCC 10500] gi|218716099|gb|EED15521.1| C6 transcription factor, [Talaromyces stipitatus ATCC 10500]
  misc_feature (56)..(412): NCBI GI: 121700557 Blast Desc: C6 zinc finger domain protein [Aspergillus clavatus NRRL 1] gi|119396686|gb|EAW07117.1| C6 zinc finger domain protein [Aspergillus clavatus NRRL 1]
  misc_feature (25)..(403): NCBI GI: 39961784 Blast Desc: MGG_09562 [Magnaporthe grisea 70-15] gi|145011065|gb|EDJ95721.1| MGG_09562 [Magnaporthe grisea 70-15]
MSGLDLSMPLPWIKDSPAAQSFIEEDEIASQFFDKYVMYPCNSNSIPGFLEHLPVLFHEARVESRKALRWAVLSASYASIATNNSNAAMRNKALECYGEALNSLRDALKSHTTTPDGYVLMTIVVLDIFETVYLGESASTSSHAEGMKLVLRLRGPNQIYGPRGWSLFRLAHHRLQKQQLAYSQDPMPESELWLNALNEDLPHIRGEKDNHQIIKTCARARQILKEINNDQLESDRLLKLVNEMYELDRSTTMWRSSTNWAYQNRPRENLFDSADSLEYFPDYVQIHPDVWIAYEWNYHRTARIILHEQLLEILERISSAARADGLTPAPVPVLKDISARLIKSLADEVLSTVPQMLGIIDHNGESLSDSRTVTLCQGVGGYLLLWPIKVIKETKSAQPEQKAAAQSIFERIRENTRMKEVLGEMSNI

SEQ ID NO: 22538 - DNA, 1935 bp, Muscodor strobelii
  misc_feature: SGI EST ID NO. CUFF.52999.0
  misc_feature: Variant of the nucleotide sequence at SEQ ID NO 22536
gaggctgcttaacttgtaggactagaagggtgaaggtattgccgcctagaaaatttgagttcctgacctcaccaagctcgttgccatactgatacttgagctagtgtgatgagggacgtcctacttgcaaacattgctcacgccgtcatgaacattgcacataccgagatatccagtcggtcacctttcgcgatgaaacgcaaaaggccatactgctgtccgcgcgtaagcaagcccggagctctagcacatcagcttctcatggctcaatcaaagctataaaccacagctatagtgcaacgtggccacatgcaaatgacggtatatcctcagatgcgcatcggctcgccatgtcagggcttgatctctccatgccccttccctggatcaaagactcacctgcagcacaatcgttcattgaggaagatgaaatcgcatcacagttcttcgataaatacgtcatgtatccttgtaacagcaattcgataccagggtttcttgagcatctcccagttttgttccatgaggctagggttgagagccgcaaagctttgcgctgggcggtactgtcagcgtcgtatgcgagtatcgccaccaacaatagcaatgcagcaatgagaaataaagccctcgagtgttacggcgaagcattgaactctctccgagatgccctcaagtcacatactacgactccggatggctacgtacttatgactatagtcgtactcgatatcttcgagaccgtttatctcggagagtctgcatcaacaagctctcatgctgaggggatgaagctcgttctgcggcttcgcggcccgaaccagatctacgggcccagagggtggagcttattccggcttgcgcatcatcgtttacaaaagcagcagttggcatacagccaggaccctatgccagagtctgagctttggctgaacgcccttaatgaagatctacctcatattcgtggcgagaaagacaatcaccagataattaaaacatgtgccagagcacggcaaattcttaaggaaatcaataatgatcagctagaaagcgatcgactactcaagttagtgaacgaaatgtacgaactcgatcggtccacaaccatgtggcggagcagcacgaattgggcatatcaaaacaggcctcgtgaaaacctgttcgatagcgccgattcactagagtactttccagattatgtccagatccatccggacgtttggatcgcgtatgaatggaactaccaccgaacagccaggatcattctacatgaacaattattggaaatactggagcgaatcagctcagctgccagggcagatggactcacacctgcccctgtgccagtactcaaagacatctctgctagacttatcaagagtctcgcggacgaagtgctatcaactgttccgcaaatgctaggtatcattgatcacaatggtgagtcgctcagtgactcaaggactgtgacactatgtcaaggtgtcggtggctatctccttctatggcccatcaaggttatcaaagagactaaatcggcgcaacccgaacagaaagctgcagcacagtctatatttgagcgtatacgggaaaatacgcgcatgaaagaggttttgggcgaaatgagtaatatttgatcggctgtagcatattaacgtcacagtagtagctgcttgcccggagctatgatatgaccgaattcccagattctccgactcatttagttcccgtgtcttttcttctagagatagtagaatgaagaatggccctgaatgttctctttgtgcgaataatcgcttgcgctattgatcggcagtaatttgcgtcacactccggataaagtcaggagcaagcattaccaccttttgccgacacgcgacacctttaaagaggaacccgaaatgcaagatctcgcgacatctatcccaatttccc

SEQ ID NO: 22539 - DNA, 861 bp, Muscodor strobelii
  misc_feature: SGI cDNA ID NO. 567654
  misc_feature: Encodes the peptide sequence at SEQ ID NO 22540
atggcattcgcaaagcagaactatatcatcattgcagcggtcgtcgctattgcggcaagcgcgctccttgtctttcttgagaaatgtccgaattaccgccagcagacagacgtggacacagcgtcgaccaacttttctgatccacatacaatgatatgcgaggaccagaagtatacaacagaaataatctcactcgaccctttagtgatatatattcgggactttttcaataaaaacgatatcgaagggatgctattggccggagagaaccgtttcaacccttctgtcgtgaataggggcggccaaatggtccagaatccttatcggacgtcgtggagcgccggtttaccagctgaagatccagctgtgcactgcgtgctcgaaagatcgcggaaatttctaggcacggtacttgatgagcaaagcgacgagatgggaataccccaattggtccgatatacggaaggtcaggagtacaacttacatcacgactggatgcgaataccgcaggcagcatttgacgggtcaccgcggacgtttaatcgcattgcaagctttttcgtgaccttacaagataactgcacgggcgggggaacttggttcccgttcgtcaatcctccttctcttcaagcagaggaagtcgcggacgggcggctgtggtatgctcacgaagagcgcggttttgtcgttcggccagtcgcgggcaacgcaatattttggatcaacctttttccaaatggcacaggtgatgcgcgtactgtgcatgctggtttgcctgttatcggtggcttaaagacggctatgaatatatggcccagacagtatcgtccgaatattccggatgacatagagatgagatga

SEQ ID NO: 22540 - protein, 286 aa, Muscodor strobelii
  misc_feature: SGI Peptide ID NO. 567654
  misc_feature (39)..(275): NCBI GI: 171695652 Blast Desc: protein product [Podospora anserina] gi|170948068|emb|CAP60232.1| protein product [Podospora anserina]
  misc_feature (68)..(275): NCBI GI: 116181314 Blast Desc: CHGG_01285 [Chaetomium globosum CBS 148.51] gi|88185582|gb|EAQ93050.1| CHGG_01285 [Chaetomium globosum CBS 148.51]
  misc_feature (53)..(275): NCBI GI: 171689818 Blast Desc: protein product [Podospora anserina] gi|170944871|emb|CAP70983.1| protein product [Podospora anserina]
  misc_feature (53)..(274): NCBI GI: 169604152 Blast Desc: SNOG_05086 [Phaeosphaeria nodorum SN15] gi|111066357|gb|EAT87477.1| SNOG_05086 [Phaeosphaeria nodorum SN15]
  misc_feature (89)..(274): NCBI GI: 154301350 Blast Desc: BC1G_10345 [Botryotinia fuckeliana B05.10] gi|150856246|gb|EDN31438.1| BC1G_10345 [Botryotinia fuckeliana B05.10]
  misc_feature (38)..(271): NCBI GI: 154300704 Blast Desc: BC1G_10940 [Botryotinia fuckeliana B05.10] gi|150856547|gb|EDN31739.1| BC1G_10940 [Botryotinia fuckeliana B05.10]
  misc_feature (9)..(271): NCBI GI: 156048362 Blast Desc: SS1G_08912 [Sclerotinia sclerotiorum 1980] gi|154693309|gb|EDN93047.1| SS1G_08912 [Sclerotinia sclerotiorum 1980]
  misc_feature (7)..(283): NCBI GI: 169601488 Blast Desc: SNOG_03610 [Phaeosphaeria nodorum SN15] gi|111067695|gb|EAT88815.1| SNOG_03610 [Phaeosphaeria nodorum SN15]
  misc_feature (102)..(270): NCBI GI: 242797049 Blast Desc: prolyl 4-hydroxylase alpha subunit, [Talaromyces stipitatus ATCC 10500] gi|218719520|gb|EED18940.1| prolyl 4-hydroxylase alpha subunit, [Talaromyces stipitatus ATCC 10500]
  misc_feature (36)..(271): NCBI GI: 242784571 Blast Desc: oxidoreductase, [Talaromyces stipitatus ATCC 10500] gi|218720561|gb|EED19980.1| oxidoreductase, [Talaromyces stipitatus ATCC 10500]
  misc_feature (30)..(275): SWISSPROT Homolog: EC 1.14.11.2 Procollagen-proline dioxygenase
MAFAKQNYIIIAAVVAIAASALLVFLEKCPNYRQQTDVDTASTNFSDPHTMICEDQKYTTEIISLDPLVIYIRDFFNKNDIEGMLLAGENRFNPSVVNRGGQMVQNPYRTSWSAGLPAEDPAVHCVLERSRKFLGTVLDEQSDEMGIPQLVRYTEGQEYNLHHDWMRIPQAAFDGSPRTFNRIASFFVTLQDNCTGGGTWFPFVNPPSLQAEEVADGRLWYAHEERGFVVRPVAGNAIFWINLFPNGTGDARTVHAGLPVIGGLKTAMNIWPRQYRPNIPDDIEMR

SEQ ID NO: 22541 - DNA, 276 bp, Muscodor strobelii
  misc_feature: SGI EST ID NO. CUFF.53002.0
  misc_feature: Variant of the nucleotide sequence at SEQ ID NO 22539
gtttaatcgcattgcaagctttttcgtgaccttacaagataactgcacgggcgggggaacttggttcccgttcgtcaatcctccttctcttcaagcagaggaagtcgcggacgggcggctgtggtatgctcacgaagagcgcggttttgtcgttcggccagtcgcgggcaacgcaatattttggatcaacctttttccaaatggcacaggtgatgcgcgtactgtgcatgctggtttgcctgttatcggtggcttaaagacggctatgaatatatg

SEQ ID NO: 22542 - DNA, 3450 bp, Muscodor strobelii
  misc_feature: SGI cDNA ID NO. 567655
  misc_feature: Encodes the peptide sequence at SEQ ID NO 22543
atgtggagcttaggttgcctctttctcgagtttgtttcctggtttctaatcggcaacgatgatgggcagaaggagtttgaaaactggcgagtttccgacgatatcccgagctccatacttcaattggcccagtacgttgaagacaagttcttcaatattactgatgagggacctgttattaaaacatccgttacaaattgggttgagaagctccggacgcttaacaattgccccgaatctatcgccgactttctgtctcacatccagtctgatctgctcgttctgaacagtaagaaacgtgcgagatgcgacacatttcatatgactttgaacggcatctttcaaaggtgtcagaaggatctcaactactgcgtcccattatctgcaagtaccagggacgcttatgttcacgactgtctcgtcgctgaaaagttcaaccagttgttgaagaacagtcttcctgcacaggccaaactctctgacgctagaatgaaacgcttttttgaagacacagagcttgcattaccacccgaagaggcacacttcgaacacagcgatgaaatggactccatacctgaccacgatgatctatctgctctagttgaactctctgaagcccgacttgaacgatttctcaaagatgacgcatctctatctttaaatctgcaaaaatatgaagaattgttggagggatcccagcattatctttggatgattggagagatacagagagagtctaccttacaccgcggcgagaccgatcgaatggaaccacttagaaaaacgataatacacgcccttccttcaccatatctcagcagaaggacaatcccgcaaagttatacggcgaatttcaaaatggactgggaccctatcctcttctgcatcggacaaaggtacactcagcctgcttggaagacgtttcaagaggcaataactttcactggttcggtcgacaatgcacaagccttaacccccgctggctatttctctcaaatttggccaaggaccgaaacgaatgattcagaatggggaaatttttcaatcaatattgagaatggcatggttgtggcaaccattacgagtattgcccctattatcgcagaagtcggacagcagctagcgtggctcggtgcggccttgcgaatttctccttatgagtccggagttgcggtttgctcgccatgtgtggatgtcgcaacgcaatacgagagctccggagaccagtttgaagctgatatcagtttcgcagtcagctttgagatttctcaatttttgccaacatcgagcgactctcaggggtgttgttggcataatatgttccgcagcccggtattggtggagggctaccccatcttacgcaaagaaaagccacatctcggcttagagctgccaattgagatgttgtctttcttcgctggctccagatatatcactgactttgacggaaagctctacatcaagggtttctcgacgatggtggttgcaatggaaaccattggaagctgcttgttgtggcactattactataatggccaaggcaacaacaacaaagggatttatcaaagttatattgactgtagaatttcttcagtgagcgtagaagctaagcatatggatttgaatcgactaggcacagcccgccacgttgtgggctggtgctcagagttcaaatggaatgctgctaatgctgactatgggagaattgacgaatgtagacttccacgaccgagcccaggcttcttcctcgataaggttaccataactggtggaaagttcatcaacttaggcctaggcttctcacctggcgtgatggatagtccgattcatctcactcacaacagttacattcccaaattgcgggaacttcgcaaacgatacgctgttttatgggatgaagatgataaacgagcctggcttgttaacggcaccagcgcgttactccatcttgtgaggaccagtctccaccaaagtagcatagacgaggacttctcctccgtttttaagctcgactttgataagatggtctacccatgtgggccgtgtaagccaaatactgcgacccaagttctcgcaaatgacgataataggcgacttgaggtgtggcgcggaaattctacacgatctgaagaaactacatcagcgactgaaggtggtgagaccaaggtccttaaactgaccaatcgagctaccctattcgaggacgtggtcgaagaccgtctcaattttcttgaacgaatgttcgagtatcaagtctccggaaaacagaatggtattgatgtgaagttctggaaccgcggacgtggacatgtagagggttgggacttcgtggcaactgccaccgactctaccttgaatgcctccgttgcccatttaccccgcgaagcttatggctgggtggagctcgctcgttccattaatgccgtcacactgcttggtcgagggttcggtaacattattgaacctttgacagtgtgccccttatggccaacagttcccattggcaggttttacttggctgcaagtgtctccgacatcgaaagagtccaaaaagcgcaaagtgtcagcatgcctgctattacttctcaagttgaatggatcagcccctcgcatccctttgcgcgatgcaaaagcacgtgtgtgtcaggtggcaccctagaaagtcacgatctagtccaaattctacgtccacgcaagcaatttagcactacaaagcttcagagtcctgatacggtaggacctagcggagctgtcatctttggagccgatcgtactaatattcggagctcgatattccgagaccaagcgcaggagaacgctcatcttgacttgagacataatttgcctcatccttcatactcatcgaccacgacaacttcggacactcggaatgatgcaaccactattacaggagagggtcagagctcacaaggctgggcagatgaaacggaaggaacttctcttgacgttggcccctcgagctcagcgctgggaacctcccaggatattaacttcggaattacccaagcacatcaaacacggcactctccatgcgatactaccctgttagaaaaggtcactcagtcgatcttagtgctgaatcctaccccccaaagcaccaatctcgaccgcaacccaatggatctacctgaagcaatctcaagggatccagcaacgggagaagatgcagctgttttggccttggcgcgcagtgctccacgaaagaccagtcctgacaacaccgtgtctgatccacccgaggctaccgtatccagcaacatcaggggtgaacacacaactactttgggcagccaaagatcggcgcatcccacgaccccggaaagaagaaacacactctttcctaagaaggccagcgaaaagattgctcagaggatagagcagatcaaaagacgtgtaaaactattctcaacgagagcgtataggccttga

SEQ ID NO: 22543 - protein, 1149 aa, Muscodor strobelii
  misc_feature: SGI Peptide ID NO. 567655
  misc_feature (225)..(924): NCBI GI: 70985797 Blast Desc: Pfs domain protein [Aspergillus fumigatus Af293] gi|66846033|gb|EAL86366.1| Pfs domain protein [Aspergillus fumigatus Af293]
  misc_feature (222)..(926): NCBI GI: 212530322 Blast Desc: Pfs domain protein [Penicillium marneffei ATCC 18224] gi|210074716|gb|EEA28803.1| Pfs domain protein [Penicillium marneffei ATCC 18224]
  misc_feature (222)..(897): NCBI GI: 115390136 Blast Desc: [Aspergillus terreus NIH2624] gi|114194969|gb|EAU36669.1| [Aspergillus terreus NIH2624]
  misc_feature (219)..(924): NCBI GI: 121704357 Blast Desc: Pfs domain protein [Aspergillus clavatus NRRL 1] gi|119398587|gb|EAW09016.1| Pfs domain protein [Aspergillus clavatus NRRL 1]
  misc_feature (179)..(924): NCBI GI: 145228841 Blast Desc: An01g02950 [Aspergillus niger] gi|134054821|emb|CAK43661.1| protein product [Aspergillus niger]
  misc_feature (213)..(924): NCBI GI: 145604212 Blast Desc: [Magnaporthe grisea 70-15] gi|145012257|gb|EDJ96913.1| [Magnaporthe grisea 70-15]
  misc_feature (224)..(882): NCBI GI: 256730429 Blast Desc: [Nectria haematococca mpVI 77-13-4]
  misc_feature (469)..(851): NCBI GI: 116193317 Blast Desc: CHGG_06376 [Chaetomium globosum CBS 148.51] gi|88182289|gb|EAQ89757.1| CHGG_06376 [Chaetomium globosum CBS 148.51]
  misc_feature (501)..(924): NCBI GI: 159128460 Blast Desc: Pfs domain protein [Aspergillus fumigatus A1163]
  misc_feature (444)..(678): NCBI GI: 171679062 Blast Desc: protein product [Podospora anserina] gi|170937602|emb|CAP62261.1| protein product [Podospora anserina]
MWSLGCLFLEFVSWFLIGNDDGQKEFENWRVSDDIPSSILQLAQYVEDKFFNITDEGPVIKTSVTNWVEKLRTLNNCPESIADFLSHIQSDLLVLNSKKRARCDTFHMTLNGIFQRCQKDLNYCVPLSASTRDAYVHDCLVAEKFNQLLKNSLPAQAKLSDARMKRFFEDTELALPPEEAHFEHSDEMDSIPDHDDLSALVELSEARLERFLKDDASLSLNLQKYEELLEGSQHYLWMIGEIQRESTLHRGETDRMEPLRKTIIHALPSPYLSRRTIPQSYTANFKMDWDPILFCIGQRYTQPAWKTFQEAITFTGSVDNAQALTPAGYFSQIWPRTETNDSEWGNFSINIENGMVVATITSIAPIIAEVGQQLAWLGAALRISPYESGVAVCSPCVDVATQYESSGDQFEADISFAVSFEISQFLPTSSDSQGCCWHNMFRSPVLVEGYPILRKEKPHLGLELPIEMLSFFAGSRYITDFDGKLYIKGFSTMVVAMETIGSCLLWHYYYNGQGNNNKGIYQSYIDCRISSVSVEAKHMDLNRLGTARHVVGWCSEFKWNAANADYGRIDECRLPRPSPGFFLDKVTITGGKFINLGLGFSPGVMDSPIHLTHNSYIPKLRELRKRYAVLWDEDDKRAWLVNGTSALLHLVRTSLHQSSIDEDFSSVFKLDFDKMVYPCGPCKPNTATQVLANDDNRRLEVWRGNSTRSEETTSATEGGETKVLKLTNRATLFEDVVEDRLNFLERMFEYQVSGKQNGIDVKFWNRGRGHVEGWDFVATATDSTLNASVAHLPREAYGWVELARSINAVTLLGRGFGNIIEPLTVCPLWPTVPIGRFYLAASVSDIERVQKAQSVSMPAITSQVEWISPSHPFARCKSTCVSGGTLESHDLVQILRPRKQFSTTKLQSPDTVGPSGAVIFGADRTNIRSSIFRDQAQENAHLDLRHNLPHPSYSSTTTTSDTRNDATTITGEGQSSQGWADETEGTSLDVGPSSSALGTSQDINFGITQAHQTRHSPCDTTLLEKVTQSILVLNPTPQSTNLDRNPMDLPEAISRDPATGEDAAVLALARSAPRKTSPDNTVSDPPEATVSSNIRGEHTTTLGSQRSAHPTTPERRNTLFPKKASEKIAQRIEQIKRRVKLFSTRAYRP

SEQ ID NO: 22544 - DNA, 1512 bp, Muscodor strobelii
  misc_feature: SGI cDNA ID NO. 567656
  misc_feature: Encodes the peptide sequence at SEQ ID NO 22545
atgcttttggccgccctgctgacgatcggaggtggcatacgccgtttattccttcaccccttggctcatattcctggcccgagacttgcggctctcacttggtggtacgaattctatttcgacgccattcaacccggccgatacgtcttcaagatccaggatctgcacaaacgatacggaccaattatcagggtcaccccggacgagattcacatctctgatgttggattcctcgacagcatttatgccccttcttcgtccccgagagacaagtatgagtaccaattgagatctttgcgggttcccggtggagttggcactgctcccagtgttgatgtccatcgcaaacgacgtgaagctctgtctccattcttcagcaaacgaaatgtggtcttccttgagccgacgattatcgacaaagttcaacagcttcgtcaattgcttttgaaacatgcctcggaacagacgccagtcaatctttcggatctttttttcgccttctccaatgatgttgtcaataacttcttgttctctcagaggacagacaccctttcggacgaacagaacgccgccacattacgccataacagctacgagctcatgatgggaatcaatctcaacaagcacttcccgttcattcccgacttcctagaatctctcccgaaatccatcagcagacctatcatgccacctggattgcttgatatgctagacctatttgatagagtccgagccgaactaataggcatcattaaagccaaagcttctggggccggtagcgattcgtcaagtgcaaaatctgtatactatactgtgctcgacagccctattttgcccgcaccagagaaggctttactccggcttgagcaagaaggtgcactcctagtcctcgcaggaactgaatcaccagccaagtccctgaacatgatattctaccacctattagccaatccacagatcatgagcaagctacgggaagaactcagcaccgtcgcacagccagcgtcgtggactcaacttgagcgactgccatatctcaccgcggtcatcgaggaaggtcaccgtctctccttcggtgtcacggccagaacagcgcgtatcgctcgggaaacactcatatacacccctacatctcatgcagcttactcttcgaacatcggaaagtccttcaaaattcccgccggtactcccatgagcacaactaccttgagcgcccataccgcaccgagtgttttccctgatccattcgttttcgatccggaacgctggctcggtgatgagggccgcaagctccagaaataccagatgtcatttggtaaaggtagcagaaagtgccttggcattgagctggcgcgtgccgagatgtatctagtgactgcagcgctggtgcagggctttgatatgaaattgtggaagactgaggcgagcgatgtggcatttgttcatgattatcatgtttcaatgccaagccttaagttcaaggggttggaggctacgatgactgccctgtga

SEQ ID NO: 22545 - protein, 503 aa, Muscodor strobelii
  misc_feature: SGI Peptide ID NO. 567656
  misc_feature (27)..(497): Pfam Id: PF00067 Pfam Desc: Cytochrome P450
  misc_feature (298)..(470): Pfam Id: PF00067 Pfam Desc: Cytochrome P450
  misc_feature (2)..(496): NCBI GI: 145249194 Blast Desc: An14g03110 [Aspergillus niger] gi|134081614|emb|CAK46548.1| protein product [Aspergillus niger]
  misc_feature (1)..(496): NCBI GI: 169782632 Blast Desc: [Aspergillus oryzae RIB40] gi|83774522|dbj|BAE64645.1| protein product [Aspergillus oryzae]
  misc_feature (206)..(489): NCBI GI: 238492275 Blast Desc: cytochrome P450, [Aspergillus flavus NRRL3357] gi|220695868|gb|EED52210.1| cytochrome P450, [Aspergillus flavus NRRL3357]
  misc_feature (13)..(501): NCBI GI: 171688250 Blast Desc: protein product [Podospora anserina] gi|170944087|emb|CAP70197.1| protein product [Podospora anserina]
  misc_feature (6)..(500): NCBI GI: 242815597 Blast Desc: benzoate 4-monooxygenase cytochrome P450, [Talaromyces stipitatus ATCC 10500] gi|218714939|gb|EED14362.1| benzoate 4-monooxygenase cytochrome P450, [Talaromyces stipitatus ATCC
  misc_feature (12)..(496): NCBI GI: 67902644 Blast Desc: AN8309.2 [Aspergillus nidulans FGSC A4] gi|40747776|gb|EAA66932.1| AN8309.2 [Aspergillus nidulans FGSC A4]
  misc_feature (12)..(496): NCBI GI: 259484233 Blast Desc: TPA: cytochrome P450, (Eurofung) [Aspergillus nidulans FGSC A4]
  misc_feature (1)..(489): NCBI GI: 119178512 Blast Desc: CIMG_08088 [Coccidioides immitis RS]
  misc_feature (13)..(483): NCBI GI: 115390408 Blast Desc: [Aspergillus terreus NIH2624] gi|114195105|gb|EAU36805.1| [Aspergillus terreus NIH2624]
  misc_feature (13)..(502): NCBI GI: 256728459 Blast Desc: NECHADRAFT_87909 [Nectria haematococca mpVI 77-13-4]
  misc_feature (115)..(472): SWISSPROT Homolog: EC 1.14.14.1 Unspecific monooxygenase
MLLAALLTIGGGIRRLFLHPLAHIPGPRLAALTWWYEFYFDAIQPGRYVFKIQDLHKRYGPIIRVTPDEIHISDVGFLDSIYAPSSSPRDKYEYQLRSLRVPGGVGTAPSVDVHRKRREALSPFFSKRNVVFLEPTIIDKVQQLRQLLLKHASEQTPVNLSDLFFAFSNDVVNNFLFSQRTDTLSDEQNAATLRHNSYELMMGINLNKHFPFIPDFLESLPKSISRPIMPPGLLDMLDLFDRVRAELIGIIKAKASGAGSDSSSAKSVYYTVLDSPILPAPEKALLRLEQEGALLVLAGTESPAKSLNMIFYHLLANPQIMSKLREELSTVAQPASWTQLERLPYLTAVIEEGHRLSFGVTARTARIARETLIYTPTSHAAYSSNIGKSFKIPAGTPMSTTTLSAHTAPSVFPDPFVFDPERWLGDEGRKLQKYQMSFGKGSRKCLGIELARAEMYLVTAALVQGFDMKLWKTEASDVAFVHDYHVSMPSLKFKGLEATMTAL

SEQ ID NO: 22546 - DNA, 1987 bp, Muscodor strobelii
  misc_feature: SGI EST ID NO. CUFF.53029.0
  misc_feature: Variant of the nucleotide sequence at SEQ ID NO 22544
gttgacgttgctggcgacggtaaaaatagctcggctccatgtctacggacgggacgttgaaaactggagcactgcggcttccggggtccccgccccacccgcgcctcccaacttcgactttcgccgtcaacatctactacgcatcttcttaccctcacgtcttctttctctccgtctcattcgcgtggtgtagagcttgccatggccatccttccaatctttctaacgacaatgcttttggccgccctgctgacgatcggaggtggcatacgccgtttattccttcaccccttggctcatattcctggcccgagacttgcggctctcacttggtggtacgaattctatttcgacgccattcaacccggccgatacgtcttcaagatccaggatctgcacaaacgatacggaccaattatcagggtcaccccggacgagattcacatctctgatgttggattcctcgacagcatttatgccccttcttcgtccccgagagacaagtatgagtaccaattgagatctttgcgggttcccggtggagttggcactgctcccagtgttgatgtccatcgcaaacgacgtgaagctctgtctccattcttcagcaaacgaaatgtggtcttccttgagccgacgattatcgacaaagttcaacagcttcgtcaattgcttttgaaacatgcctcggaacagacgccagtcaatctttcggatctttttttcgccttctccaatgatgttgtcaataacttcttgttctctcagaggacagacaccctttcggacgaacagaacgccgccacattacgccataacagctacgagctcatgatgggaatcaatctcaacaagcacttcccgttcattcccgacttcctagaatctctcccgaaatccatcagcagacctatcatgccacctggattgcttgatatgctagacctatttgatagagtccgagccgaactaataggcatcattaaagccaaagcttctggggccggtagcgattcgtcaagtgcaaaatctgtatactatactgtgctcgacagccctattttgcccgcaccagagaaggctttactccggcttgagcaagaaggtgcactcctagtcctcgcaggaactgaatcaccagccaagtccctgaacatgatattctaccacctattagccaatccacagatcatgagcaagctacgggaagaactcagcaccgtcgcacagccagcgtcgtggactcaacttgagcgactgccatatctcaccgcggtcatcgaggaaggtcaccgtctctccttcggtgtcacggccagaacagcgcgtatcgctcgggaaacactcatatacacccctacatctcatgcagcttactcttcgaacatcggaaagtccttcaaaattcccgccggtactcccatgagcacaactaccttgagcgcccataccgcaccgagtgttttccctgatccattcgttttcgatccggaacgctggctcggtgatgagggccgcaagctccagaaataccagatgtcatttggtaaaggtagcagaaagtgccttggcattgagctggcgcgtgccgagatgtatctagtgactgcagcgctggtgcagggctttgatatgaaattgtggaagactgaggcgagcgatgtggcatttgttcatgattatcatgtttcaatgccaagccttaagttcaaggggttggaggctacgatgactgccctgtgaagaggtgcagcctggtttcaatggctgacgtattactcacttagcaaagaatgggcaacttcaggtcattgacgtgtccagttataggtaataaaaacgatactttgggagtctcaatcgtgcagaaacttatattgacttgaaagttatgatactgagtgattacatctgtgctgttgagagcagctcttcatgtctgctttagctcgtaaagggggctacgaaccaacattgcagaaactcc

SEQ ID NO: 22547 - DNA, 609 bp, Muscodor strobelii
  misc_feature: SGI cDNA ID NO. 567657
  misc_feature: Elevated expression when VOC is produced
  misc_feature: Encodes the peptide sequence at SEQ ID NO 22548
atggttcgattcgccgcctctgctctcttggcttttgcctcgtctacctctctcgtctcagcactcactcccgtctccaattcgcacactggtgctgcagatggacagcaattcatcaccggccagtgcacaagctcgttagattgtgcccagcaatccaccgtctcaacatgctgcgcatccatcgctggtcctaacggggatataattggtgtttgctcgtcttctgacccaggggttcaatttgaacaaggcaagatgggctgcgggtttggcgacggcgcatcaggaagcgctcctcctgctgcgtctagcgttgccgcttcaagtacgattgccggcgtgccagctgctacaggcaccaccggaggcaccaccggaggcactggtacggtgatcgtcccaagtgaacctggagcttcaaacgttggaacgggaagcggcttgcagtttatcacaggacaatgcatcagcaatgctgattgtcaatctgcatgctgtgcggctggtgaatgtcgagccgtgggtgcactcccagccgatggttccctcacgtgtggatttgtcggaactctgggcagacgcacaatggtacagtggcaagcatga

SEQ ID NO: 22548 - protein, 202 aa, Muscodor strobelii
  misc_feature: SGI Peptide ID NO. 567657
  misc_feature (1)..(189): NCBI GI: 256725304 Blast Desc: NECHADRAFT_83046 [Nectria haematococca mpVI 77-13-4]
  misc_feature (1)..(191): NCBI GI: 261352733 Blast Desc: conserved [Verticillium albo-atrum VaMs.102]
  misc_feature (1)..(188): NCBI GI: 39972909 Blast Desc: MGG_07749 [Magnaporthe grisea 70-15] gi|145012518|gb|EDJ97172.1| MGG_07749 [Magnaporthe grisea 70-15]
  misc_feature (1)..(168): NCBI GI: 116182912 Blast Desc: CHGG_02084 [Chaetomium globosum CBS 148.51] gi|88186381|gb|EAQ93849.1| CHGG_02084 [Chaetomium globosum CBS 148.51]
  misc_feature (1)..(98): NCBI GI: 85119207 Blast Desc: NCU02910 [Neurospora crassa OR74A] gi|28927403|gb|EAA36356.1| conserved [Neurospora crassa OR74A]
  misc_feature (133)..(188): NCBI GI: 189201305 Blast Desc: [Pyrenophora tritici-repentis Pt-1C-BFP] gi|187984088|gb|EDU49576.1| [Pyrenophora tritici-repentis Pt-1C-BFP]
  misc_feature (24)..(188): NCBI GI: 171694612 Blast Desc: protein product [Podospora anserina] gi|170947548|emb|CAP59709.1| protein product [Podospora anserina]
  misc_feature (133)..(189): NCBI GI: 171679299 Blast Desc: protein product [Podospora anserina] gi|170939275|emb|CAP64503.1| protein product [Podospora anserina]
  misc_feature (132)..(201): NCBI GI: 256725304 Blast Desc: NECHADRAFT_83046 [Nectria haematococca mpVI 77-13-4]
  misc_feature (133)..(188): NCBI GI: 116178950 Blast Desc: CHGG_00103 [Chaetomium globosum CBS 148.51] gi|88184400|gb|EAQ91868.1| CHGG_00103 [Chaetomium globosum CBS 148.51]
  misc_feature: Useful for introducing or modulating the production of volatile compounds
MVRFAASALLAFASSTSLVSALTPVSNSHTGAADGQQFITGQCTSSLDCAQQSTVSTCCASIAGPNGDIIGVCSSSDPGVQFEQGKMGCGFGDGASGSAPPAASSVAASSTIAGVPAATGTTGGTTGGTGTVIVPSEPGASNVGTGSGLQFITGQCISNADCQSACCAAGECRAVGALPADGSLTCGFVGTLGRRTMVQWQA

SEQ ID NO: 22549 - DNA, 1108 bp, Muscodor strobelii
  misc_feature: SGI EST ID NO. CUFF.53036.0
  misc_feature: Variant of the nucleotide sequence at SEQ ID NO 22547
gttgaagtgctcagctctgcagtgtgatatgagggtgttgatgatggagtttctcatcgcaaacatatgaattcctgaaatatataagacgagaagcattctccgtctgctagtgcatttttgagatcatcatcagcatccacttccagcataacaacatcagcatcaaacagtgtaacactatcttccagaaatactatccttgctcagctatctgcatcaaccagatatttcacatctcaacatcccaacatcaaaatggttcgattcgccgcctctgctctcttggcttttgcctcgtctacctctctcgtctcagcactcactcccgtctccaattcgcacactggtgctgcagatggacagcaattcatcaccggccagtgcacaagctcgttagattgtgcccagcaatccaccgtctcaacatgctgcgcatccatcgctggtcctaacggggatataattggtgtttgctcgtcttctgacccaggggttcaatttgaacaaggcaagatgggctgcgggtttggcgacggcgcatcaggaagcgctcctcctgctgcgtctagcgttgccgcttcaagtacgattgccggcgtgccagctgctacaggcaccaccggaggcaccaccggaggcactggtacggtgatcgtcccaagtgaacctggagcttcaaacgttggaacgggaagcggcttgcagtttatcacaggacaatgcatcagcaatgctgattgtcaatctgcatgctgtgcggctggtgaatgtcgagccgtgggtgcactcccagccgatggttccctcacgtgtggatttgtcggaactctgggcagacgcacaatggtacagtggcaagcatgagtctgtccatgagtctgtccatgcggctgctgtatgggggctggttcatattggcgtttgtctttcggtcatttgggtatgggggtgatcgcataattcaaggtgtcgcccatttcaggattgcatttgattttggttagatggtattagcatagtcggcttgcaattttttctctctccatcttggcagagttgcgcacttaaaatgtcctatagtatttatacaagcattacctctaca

SEQ ID NO: 22550 - DNA, 501 bp, Muscodor strobelii
  misc_feature: SGI cDNA ID NO. 567658
  misc_feature: Encodes the peptide sequence at SEQ ID NO 22551
atgtcgctgaacggcgagcttaaccccaactcactctacatagctctcaactcacgtctagactataaggaccaataccactgggccctcgtaacaacggacgaaaaacgtcatccaatactacgccatgctaataacctgaaaggaccatgggagcacgaagtaatagacttcagtatggccgcacggcccttcaccattgtcttagcccgtattggcgatataaaagaccataatagaatgatttccgcgacacaagctgtgcctgcagatggcaacccttctgtaaggaccggtgggcctttcaattgcagatcttggatctcggatgttctatttactcttgctgaagagggcattattagtctccctacatctctcgatgatgtcgaggaagctgctgcgaaatgcgcggcttattatgcgggcgcggcggaaaggggtgatggtgcaacaatcgttgatgacccttttgcaatttcaaacgaaatacaaaaatga

SEQ ID NO: 22551 - protein, 166 aa, Muscodor strobelii
  misc_feature: SGI Peptide ID NO. 567658
  misc_feature (26)..(132): NCBI GI: 238841600 Blast Desc: conserved [Microsporum canis CBS 113480]
  misc_feature (7)..(161): NCBI GI: 240273243 Blast Desc: conserved [Ajellomyces capsulatus H143]
  misc_feature (7)..(158): NCBI GI: 119181467 Blast Desc: [Coccidioides immitis RS]
  misc_feature (8)..(127): NCBI GI: 156045738 Blast Desc: SS1G_09145 [Sclerotinia sclerotiorum 1980] gi|154693541|gb|EDN93279.1| SS1G_09145 [Sclerotinia sclerotiorum 1980]
  misc_feature (7)..(163): NCBI GI: 238842297 Blast Desc: conserved [Microsporum canis CBS 113480]
  misc_feature (7)..(154): NCBI GI: 154282631 Blast Desc: [Ajellomyces capsulatus NAm1] gi|150410291|gb|EDN05679.1| [Ajellomyces capsulatus NAm1]
  misc_feature (7)..(136): NCBI GI: 255938792 Blast Desc: Pc14g01720 [Penicillium chrysogenum Wisconsin 54-1255] gi|211584787|emb|CAP74313.1| Pc14g01720 [Penicillium chrysogenum Wisconsin 54-1255]
  misc_feature (7)..(147): NCBI GI: 238844841 Blast Desc: conserved [Microsporum canis CBS 113480]
  misc_feature (6)..(139): NCBI GI: 145237242 Blast Desc: An07g01810 [Aspergillus niger] gi|134075734|emb|CAK96626.1| [Aspergillus niger]
  misc_feature (6)..(166): NCBI GI: 238842401 Blast Desc: conserved [Microsporum canis CBS 113480]
MSLNGELNPNSLYIALNSRLDYKDQYHWALVTTDEKRHPILRHANNLKGPWEHEVIDFSMAARPFTIVLARIGDIKDHNRMISATQAVPADGNPSVRTGGPFNCRSWISDVLFTLAEEGIISLPTSLDDVEEAAAKCAAYYAGAAERGDGATIVDDPFAISNEIQK

SEQ ID NO: 22552 - DNA, 1504 bp, Muscodor strobelii
  misc_feature: SGI EST ID NO. CUFF.53050.1
  misc_feature: Variant of the nucleotide sequence at SEQ ID NO 22550
gttcacaccactgacagctgccaatcggacgaaacgtaccatctcaccaacattttcgtgaactgccgttttgatctttatatcatcagttgaagtttggaagctttttctgagggacgtttcatccccaagaaatttcattgtgttagaaaagcgccgaaaaatccaaagcaatatttgccacttccgccgacatatcatgcaaatgataagattgccagatatcgtaccagaacactaagtgcaaagatattcgtattcgccgtattctcatccgagcgtgttaccagattcgacgagagctcgtggctagatgtctcctgccaatacaacgaatcatcgccttccatccagctaacactgcatattctatctaccaaatgttgatgcctacatgtcattatgcgcgcccttcacttgttgcgcatacgacgtgtcgctgcctagaaatatagattcgtattaattcctcagcttcgtaagacaggtaacgtcaagctagcctatctaatgcgaaacaacgagtattacaaacctcaacgaatctcatctcatgatgtcgctgaacggcgagcttaaccccaactcactctacatagctctcaactcacgtctagactataaggaccaataccactgggccctcgtaacaacggacgaaaaacgtcatccaatactacgccatgctaataacctgaaaggaccatgggagcacgaagtaatagacttcagtatggccgcacggcccttcaccattgtcttagcccgtattggcgatataaaagaccataatagaatgatttccgcgacacaagctgtgcctgcagatggcaacccttctgtaaggaccggtgggcctttcaattgcagatcttggatctcggatgttctatttactcttgctgaagagggcattattagtctccctacatctctcgatgatgtcgaggaagctgctgcgaaatgcgcggcttattatgcgggcgcggcggaaaggggtgatggtgcaacaatcgttgatgacccttttgcaatttcaaacgaaatacaaaaatgatatcgacaggtgtatcaccagctcaatactacgtctctaaattgtcatcgtttgcttggggaaatacaactgcagatgtgatgtgatgacctcgatacaacagggtgtttctcaaactaagacagtcagaattcgttgcttcaacgtagcatgttgtgtgcgccggatgactagaagacatgaggattcattttgaccaatactttgcactgatagcggcattgttcgtactgttaagctttgaagagtaccgccccatcttttctctaatcactcccgaatcctacacgatccgagtattattggcaacgaactccgtgctggctatgttatgaatagtagcagagagatattgcaaattgcatcccttgcatactcggaaccaacggcgagatcaccgcgcgaaccgagtgttaatatgctgggggcagtgaatgcgttgtcata

SEQ ID NO: 22553 - DNA, 552 bp, Muscodor strobelii
  misc_feature: SGI cDNA ID NO. 567659
  misc_feature: Reduced expression when VOC is produced
  misc_feature: Encodes the peptide sequence at SEQ ID NO 22554
atgaacgtgcagagagttggcgtccgggcgctgcagcaagctgcacgacccaatgccttcgcccagaaccttccgcgcctcatgctcgccagcatgcagacacgacggcccgcctcaacaacaaaactcacagaatccgaagcccaatccgttctcgccagccaacgcttaaaccgccccgtatcaccacatctacaaatctacgacttccaacaaacctggttcagcgcctcagtctggacgcgcatcaccggtggtctcttcaccggcggtttctacgtcttctcgctctcctacctcgtcgctccccttttcggatggcatctcgagtccgcgtctctcgccgccgccgcagcctcgatgcccgctgccgttgccggaggattgaaattcctggttgcttggccttttatgttccatttttataatggtactagacacttggtttttgacttcgctaaggggtttaataagagtgtcatccgaaaaggtggatgggctatttggggcgctagcttggttagtgcgctggggatggctgctttcttgtaa

SEQ ID NO: 22554 - protein, 183 aa, Muscodor strobelii
  misc_feature: SGI Peptide ID NO. 567659
  misc_feature (55)..(177): Pfam Id: PF01127 Pfam Desc: Succinate dehydrogenase cytochrome b subunit
  misc_feature (1)..(183): NCBI GI: 116199017 Blast Desc: CHGG_07664 [Chaetomium globosum CBS 148.51] gi|88178943|gb|EAQ86411.1| CHGG_07664 [Chaetomium globosum CBS 148.51]
  misc_feature (1)..(183): NCBI GI: 39940728 Blast Desc: MGG_04876 [Magnaporthe grisea 70-15] gi|145010897|gb|EDJ95553.1| MGG_04876 [Magnaporthe grisea 70-15]
  misc_feature (1)..(183): NCBI GI: 171693117 Blast Desc: protein product [Podospora anserina] gi|170946507|emb|CAP73308.1| protein product [Podospora anserina]
  misc_feature (1)..(183): NCBI GI: 256728041 Blast Desc: NECHADRAFT_70858 [Nectria haematococca mpVI 77-13-4]
  misc_feature (1)..(183): NCBI GI: 46132950 Blast Desc: FG09012.1 [Gibberella zeae PH-1]
  misc_feature (1)..(183): NCBI GI: 85090713 Blast Desc: NCU07756 [Neurospora crassa OR74A] gi|28919920|gb|EAA29313.1| NCU07756 [Neurospora crassa OR74A]
  misc_feature (1)..(183): NCBI GI: 256728704 Blast Desc: NECHADRAFT_50762 [Nectria haematococca mpVI 77-13-4]
  misc_feature (10)..(180): NCBI GI: 70997878 Blast Desc: succinate dehydrogenase cytochrome b560 subunit [Aspergillus fumigatus Af293] gi|66851307|gb|EAL91633.1| succinate dehydrogenase cytochrome b560 subunit [Aspergillus b560
  misc_feature (32)..(183): NCBI GI: 225683516 Blast Desc: succinate dehydrogenase [Paracoccidioides brasiliensis Pb03]
  misc_feature (10)..(180): NCBI GI: 119479383 Blast Desc: succinate dehydrogenase cytochrome b560 subunit [Neosartorya fischeri NRRL 181] gi|119407874|gb|EAW17823.1| succinate dehydrogenase cytochrome b560 subunit [Neosartorya NRRL
  misc_feature: Useful for introducing or modulating the production of volatile compounds
MNVQRVGVRALQQAARPNAFAQNLPRLMLASMQTRRPASTTKLTESEAQSVLASQRLNRPVSPHLQIYDFQQTWFSASVWTRITGGLFTGGFYVFSLSYLVAPLFGWHLESASLAAAAASMPAAVAGGLKFLVAWPFMFHFYNGTRHLVFDFAKGFNKSVIRKGGWAIWGASLVSALGMAAFL

SEQ ID NO: 22555 - DNA, 1031 bp, Muscodor strobelii
  misc_feature: SGI EST ID NO. CUFF.53435.1
  misc_feature: Variant of the nucleotide sequence at SEQ ID NO 22553
tgtagctcctgcaattcatgaacgcatcgacaattaaacctcaactcgagcgtctcgtcgcattcaccacctctccactcccaccctaagctgttgatcagcaccccgcgacagcttcacctagcattctaccgagatcaacacctgaccagggatccatcaccgtcatgaacgtgcagagagttggcgtccgggcgctgcagcaagctgcacgacccaatgccttcgcccagaaccttccgcgcctcatgctcgccagcatgcagacacgacggcccgcctcaacaacaaaactcacagaatccgaagcccaatccgttctcgccagccaacgcttaaaccgccccgtatcaccacatctacaaatctacgacttccaacaaacctggttcagcgcctcagtctggacgcgcatcaccggtggtctcttcaccggcggtttctacgtcttctcgctctcctacctcgtcgctccccttttcggatggcatctcgagtccgcgtctctcgccgccgccgcagcctcgatgcccgctgccgttgccggaggattgaaattcctggttgcttggccttttatgttccatttttataatggtactagacacttggtttttgacttcgctaaggggtttaataagagtgtcatccgaaaaggtggatgggctatttggggcgctagcttggttagtgcgctggggatggctgctttcttgtaatttggaaatcatgcatgatcgatcggggacggaaacatggggaccggatgtccaggttggagagcagatgcatagaggatgaagcatgaaggatgactaggtgatgaccgactggtctgagtaggcagtatgcagcatacattgtataaagactgttttctatgttcacattggcatcctgtgctctataatggatatgatcgcctaacattccacggcggcgctatactccgatcgcctcgagtattatcttgacactgaactactctattgctaagatgacaaggcagacttctttagacattataatag

SEQ ID NO: 22556 - DNA, 1422 bp, Muscodor strobelii
  misc_feature: SGI cDNA ID NO. 567660
  misc_feature: Reduced expression when VOC is produced
  misc_feature: Encodes the peptide sequence at SEQ ID NO 22557
atggccactgctgctcgtgcccctgcccaggaggcggcaaagccaaacgagacccgactgctgtggaatcccgaaaacgtcaaagatgtggccgaatccgttggcatctccaccctcggcgacgagggcctgcgcatgctctcacaggacgtcgagtatcgtcttggccaggtcatggccgaagcccttcgcttcatgagatgtgccaagcgcaccactatgacggtcctcgatatctcccttgccctcaaggtgttggatgtcgaacccctctacggctacgactccaccaagagtctgcgatacggagaggctgctatgggccagtctttcttctacatcgacgacgaagaggccgacttcgagcgcatcatcaacggtccccttcccaaggtgccccgagatgcgaactacaccggtcactggcttgccatagaaggtgtccagccgacggtgcctcagaaccccacctctgccgagtcgcgaacccaagatctcctgcccaaggggcctggagccaaccccgcccttgctgctcttgctggccacgataacgccagcttcaagcccaccgtcaagcatgccgtgtcccaggaacagatcttgttcttcgagaaggtacaggctgcgctcctggacgacaacccagaccccgaggtccaccgactccgacaggcagctcttgctgcggtcataaccgagccgggcacccaccagctcatgccttactatgtccatttcatttccaaccaggtcacgcattacctcgatgacgtcttcatcttgcgccagatgatggagcttaccacctccttgatcaccaacgagcacaacttcgtcgatccctacgccaacagcctttgcgcccctgtcctcacatgcctgatgggtcgacgcctgggatcagagagcggaaccgatgctgtcagggagcagtatcagctgcgagagctcgcgggtgccctaattggccagatcgcgaagaagtattcgtcgtcgaataagatgcttcgacccaaactgatccgctcctgcctcaaggcttttctggaccacaacatgccaccccaggtctggtatggtgcgatcctcggcatcctcaatgccggcggatcggaggcagtcaaggtcctgataatacctcacctgaagcagttcgagacgatgatgctccagcctctgcgcgagaaaggcgaggctagccgcgacgatttcgagatggttgttggtggcatcatcaaggctatccagtctctgatagaaggcgacatgaccatgaacggcgttaatggcgccaatcccaaccaggagactactactgccctcaaggacttcgtcggtgagatcattggcgatcgtatcgttcgcctcaacaatcgccatctgactcaagctgtcttggatgcaaagaacttccgctag

SEQ ID NO: 22557 - protein, 473 aa, Muscodor strobelii
  misc_feature: SGI Peptide ID NO. 567660
  misc_feature (287)..(389): Pfam Id: PF07571 Pfam Desc: Domain of function (DUF1546)
  misc_feature (20)..(84): Pfam Id: PF02969 Pfam Desc: TATA box binding protein associated factor (TAF)
  misc_feature (291)..(389): Pfam Id: PF07571 Pfam Desc: Domain of function (DUF1546)
  misc_feature (19)..(472): NCBI GI: 46132948 Blast Desc: FG09011.1 [Gibberella zeae PH-1]
  misc_feature (19)..(472): NCBI GI: 85090715 Blast Desc: NCU07757 [Neurospora crassa OR74A] gi|28919921|gb|EAA29314.1| conserved [Neurospora crassa OR74A]
  misc_feature (12)..(472): NCBI GI: 171693115 Blast Desc: protein product [Podospora anserina] gi|170946506|emb|CAP73307.1| protein product [Podospora anserina]
  misc_feature (16)..(472): NCBI GI: 39940726 Blast Desc: MGG_04877 [Magnaporthe grisea 70-15] gi|145010896|gb|EDJ95552.1| MGG_04877 [Magnaporthe grisea 70-15]
  misc_feature (19)..(472): NCBI GI: 116199019 Blast Desc: CHGG_07665 [Chaetomium globosum CBS 148.51] gi|88178944|gb|EAQ86412.1| CHGG_07665 [Chaetomium globosum CBS 148.51]
  misc_feature (16)..(470): NCBI GI: 156044847 Blast Desc: SS1G_09612 [Sclerotinia sclerotiorum 1980] gi|154694007|gb|EDN93745.1| SS1G_09612 [Sclerotinia sclerotiorum 1980]
  misc_feature (19)..(470): NCBI GI: 154308898 Blast Desc: BC1G_07977 [Botryotinia fuckeliana B05.10] gi|150852603|gb|EDN27795.1| BC1G_07977 [Botryotinia fuckeliana B05.10]
  misc_feature (21)..(469): NCBI GI: 70984940 Blast Desc: transcription initiation factor TFIID complex 60 kDa subunit [Aspergillus fumigatus Af293] gi|66845604|gb|EAL85938.1| transcription initiation factor TFIID complex 60 kDa subunit 60
  misc_feature (21)..(469): NCBI GI: 119498819 Blast Desc: transcription initiation factor TFIID complex 60 kDa subunit [Neosartorya fischeri NRRL 181] gi|119414331|gb|EAW24270.1| transcription initiation factor TFIID
  misc_feature (20)..(467): NCBI GI: 258571087 Blast Desc: UREG_03864 [Uncinocarpus reesii 1704] gi|237904617|gb|EEP79018.1| UREG_03864 [Uncinocarpus reesii 1704]
  misc_feature: Useful for introducing or modulating the production of volatile compounds
MATAARAPAQEAAKPNETRLLWNPENVKDVAESVGISTLGDEGLRMLSQDVEYRLGQVMAEALRFMRCAKRTTMTVLDISLALKVLDVEPLYGYDSTKSLRYGEAAMGQSFFYIDDEEADFERIINGPLPKVPRDANYTGHWLAIEGVQPTVPQNPTSAESRTQDLLPKGPGANPALAALAGHDNASFKPTVKHAVSQEQILFFEKVQAALLDDNPDPEVHRLRQAALAAVITEPGTHQLMPYYVHFISNQVTHYLDDVFILRQMMELTTSLITNEHNFVDPYANSLCAPVLTCLMGRRLGSESGTDAVREQYQLRELAGALIGQIAKKYSSSNKMLRPKLIRSCLKAFLDHNMPPQVWYGAILGILNAGGSEAVKVLIIPHLKQFETMMLQPLREKGEASRDDFEMVVGGIIKAIQSLIEGDMTMNGVNGANPNQETTTALKDFVGEIIGDRIVRLNNRHLTQAVLDAKNFR

SEQ ID NO: 22558 - DNA, 2264 bp, Muscodor strobelii
  misc_feature: SGI EST ID NO. CUFF.53524.1
  misc_feature: Variant of the nucleotide sequence at SEQ ID NO 22556
agtccaacactgcgccttcctcttcaacgtcgcgcaacgcaataaccacagcgacgtcgcttccagtctgcagcgtctatcaagaactgcacagacgtcgcttccgctgtcgcggaacattgcatcacacgcgagttctctccgtcctcggcagtgctgcggctgccccaacgcaacactcttctacttatcgattccgcgcatcctcacgttcccaactgcgtctctcgttcccactagccgggctaccctgcgtgccgcccgatctaccaagtggccgcaaacttcaatcattaaaccctccaacccttaagctgcacattcaaaataacaccatatccaaattgctatctccgactacataagcgcgccatctccaaccaccgactacataagcgcgccatctccaaccaccgactgcgcgtcttgcgcacctccaaatacttcctttccactcgtaacttagcatgaatacgctcccctgatcgaagctccaatcattctcgctccaattcataccatcatccgcatttccaatcgactcatcagtcttaccattattcccaagtcatcatggccactgctgctcgtgcccctgcccaggaggcggcaaagccaaacgagacccgactgctgtggaatcccgaaaacgtcaaagatgtggccgaatccgttggcatctccaccctcggcgacgagggcctgcgcatgctctcacaggacgtcgagtatcgtcttggccaggtcatggccgaagcccttcgcttcatgagatgtgccaagcgcaccactatgacggtcctcgatatctcccttgccctcaaggtgttggatgtcgaacccctctacggctacgactccaccaagagtctgcgatacggagaggctgctatgggccagtctttcttctacatcgacgacgaagaggccgacttcgagcgcatcatcaacggtccccttcccaaggtgccccgagatgcgaactacaccggtcactggcttgccatagaaggtgtccagccgacggtgcctcagaaccccacctctgccgagtcgcgaacccaagatctcctgcccaaggggcctggagccaaccccgcccttgctgctcttgctggccacgataacgccagcttcaagcccaccgtcaagcatgccgtgtcccaggaacagatcttgttcttcgagaaggtacaggctgcgctcctggacgacaacccagaccccgaggtccaccgactccgacaggcagctcttgctgcggtcataaccgagccgggcacccaccagctcatgccttactatgtccatttcatttccaaccaggtcacgcattacctcgatgacgtcttcatcttgcgccagatgatggagcttaccacctccttgatcaccaacgagcacaacttcgtcgatccctacgccaacagcctttgcgcccctgtcctcacatgcctgatgggtcgacgcctgggatcagagagcggaaccgatgctgtcagggagcagtatcagctgcgagagctcgcgggtgccctaattggccagatcgcgaagaagtattcgtcgtcgaataagatgcttcgacccaaactgatccgctcctgcctcaaggcttttctggaccacaacatgccaccccaggtctggtatggtgcgatcctcggcatcctcaatgccggcggatcggaggcagtcaaggtcctgataatacctcacctgaagcagttcgagacgatgatgctccagcctctgcgcgagaaaggcgaggctagccgcgacgatttcgagatggttgttggtggcatcatcaaggctatccagtctctgatagaaggcgacatgaccatgaacggcgttaatggcgccaatcccaaccaggagactactactgccctcaaggacttcgtcggtgagatcattggcgatcgtatcgttcgcctcaacaatcgccatctgactcaagctgtcttggatgcaaagaacttccgctagtggcgaaataagtcttcacacctttggcggctgaaggagctcctggagaaggagcatcttgagaaggcgaattcgggttagaactctgcgtctggcgttctgggtgttacgtttgataccctctcattggtagcggaaaaggcgtttttgctgcatttgctctggcgtttagtgttgtaattagcttaaaaaggatagtccaagtatggaatggaattcataccgaatcaatgacaatcaagatagataatacaaaatatgaaatgaac

SEQ ID NO: 22559 - DNA, 1248 bp, Muscodor strobelii
  misc_feature: SGI cDNA ID NO. 567661
  misc_feature: Encodes the peptide sequence at SEQ ID NO 22560
atgccctcaacatctgctagagtcgttcgggatcgcctacctaagaagagatccaggcatggctgccgaaattgcaaattacgaaaggttaaatgtgatgaatctaggccgcaatgcaggagatgtacatcctttggccttctatgcaatgccaagcctggcgtcccagacctgcaacccatctgtgctgattccgagagggcatcaccatatccgcaagagagggtacggctccggcctcctccaacggccgctgtatggacatcggatgcttcgacatattacgagctaaacgcaagatgtcaagactattttactaggtacctcgctcgcagtattataaatcccgaagatccgaatatgaggctagccaatcgaaaactcttaagtttagcatttacacaccctcacctgatgcatgcctccctcgcagtagccctagcatacgaccgttatttgaacggttcatctcatggtggtcgatcaacagaagagtgctatcactggtcacgagccacatccctcttcaacgaaaagttgaacaacacaatcttgtccaatgataaagatccaatatgggggaccgccgctgccctcgccgtgctaactttcgcgtcccctgacatcggtaacactccagaaagctcatggcccctgaaacaaccccaacccacagatttagattgggtgcgtttatgtaatgggaaggggtctctgtgggacatcgtcaaccctttacgacacgatagcctcttcagtgtcatggcaacgacatatgctgagatgaactcgcctttggccgagataggtatcgatggtattccgactcccctagctatagcctgcggcctcacgacgtcatccaccgcagacaacaatccatattttagcacagcacatgcagtagcatatatcctcaatcggctggacagccaggtgacgacgggccaaaccgagcatttcacccgcagcgtaaaggggccattcttatctctcttattggcaaaagatcccgtcgcgcttttgctgctgtacctatggtaccgaaaagcaggtcgaagcatatggtggattaagttaagggcccaggctgagtgcccagcgatctgtctgtatctccagcggtattgcggctatagacaagatatcctagctctacttccaggagggataggcgttgagttttgggatacatgtagactgatgggatgggatgagactattggtgtcatagcatgtgtattatga

SEQ ID NO: 22560 - protein, 415 aa, Muscodor strobelii
  misc_feature: SGI Peptide ID NO. 567661
  misc_feature (20)..(59): Pfam Id: PF00172 Pfam Desc: Fungal Zn(2)-Cys(6) binuclear cluster domain
  misc_feature (20)..(49): Pfam Id: PF00172 Pfam Desc: Fungal Zn(2)-Cys(6) binuclear cluster domain
  misc_feature (1)..(396): NCBI GI: 119497451 Blast Desc: NFIA_022980 [Neosartorya fischeri NRRL 181] gi|119413646|gb|EAW23587.1| [Neosartorya fischeri NRRL 181]
  misc_feature (1)..(397): NCBI GI: 255955525 Blast Desc: Pc21g15030 [Penicillium chrysogenum Wisconsin 54-1255] gi|211590226|emb|CAP96400.1| Pc21g15030 [Penicillium chrysogenum Wisconsin 54-1255]
  misc_feature (1)..(396): NCBI GI: 70990132 Blast Desc: C6 finger domain protein [Aspergillus fumigatus Af293] gi|66847547|gb|EAL87877.1| C6 finger domain protein, [Aspergillus fumigatus Af293]
  misc_feature (1)..(396): NCBI GI: 159130397 Blast Desc: C6 finger domain protein, [Aspergillus fumigatus A1163]
  misc_feature (24)..(397): NCBI GI: 145250573 Blast Desc: An15g02620 [Aspergillus niger] gi|134082321|emb|CAL00416.1| protein product [Aspergillus niger]
  misc_feature (41)..(397): NCBI GI: 256723582 Blast Desc: NECHADRAFT_94076 [Nectria haematococca mpVI 77-13-4]
  misc_feature (42)..(387): NCBI GI: 46139267 Blast Desc: FG11148.1 [Gibberella zeae PH-1]
  misc_feature (46)..(388): NCBI GI: 67527136 Blast Desc: AN3994.2 [Aspergillus nidulans FGSC A4] gi|40740275|gb|EAA59465.1| [Aspergillus nidulans FGSC A4] gi|259481425|tpe|CBF74930.1| TPA: C6 finger domain protein, FGSC
  misc_feature (10)..(384): NCBI GI: 154319664 Blast Desc: BC1G_02313 [Botryotinia fuckeliana B05.10] gi|150855971|gb|EDN31163.1| BC1G_02313 [Botryotinia fuckeliana B05.10]
  misc_feature (1)..(371): NCBI GI: 212538825 Blast Desc: C6 finger domain protein, [Penicillium marneffei ATCC 18224] gi|210069310|gb|EEA23401.1| C6 finger domain protein, [Penicillium marneffei ATCC 18224]
MPSTSARVVRDRLPKKRSRHGCRNCKLRKVKCDESRPQCRRCTSFGLLCNAKPGVPDLQPICADSERASPYPQERVRLRPPPTAAVWTSDASTYYELNARCQDYFTRYLARSIINPEDPNMRLANRKLLSLAFTHPHLMHASLAVALAYDRYLNGSSHGGRSTEECYHWSRATSLFNEKLNNTILSNDKDPIWGTAAALAVLTFASPDIGNTPESSWPLKQPQPTDLDWVRLCNGKGSLWDIVNPLRHDSLFSVMATTYAEMNSPLAEIGIDGIPTPLAIACGLTTSSTADNNPYFSTAHAVAYILNRLDSQVTTGQTEHFTRSVKGPFLSLLLAKDPVALLLLYLWYRKAGRSIWWIKLRAQAECPAICLYLQRYCGYRQDILALLPGGIGVEFWDTCRLMGWDETIGVIACVL

SEQ ID NO: 22561 - DNA, 1388 bp, Muscodor strobelii
  misc_feature: SGI EST ID NO. CUFF.53057.0
  misc_feature: Variant of the nucleotide sequence at SEQ ID NO 22559
gaaaagtctagcaattgctctcgtactttcttgggtctagcagtaatcataacatccaagatgatcccctgagatacagcatgccctcaacatctgctagagtcgttcgggatcgcctacctaagaagagatccaggcatggctgccgaaattgcaaattacgaaaggttaaatgtgatgaatctaggccgcaatgcaggagatgtacatcctttggccttctatgcaatgccaagcctggcgtcccagacctgcaacccatctgtgctgattccgagagggcatcaccatatccgcaagagagggtacggctccggcctcctccaacggccgctgtatggacatcggatgcttcgacatattacgagctaaacgcaagatgtcaagactattttactaggtacctcgctcgcagtattataaatcccgaagatccgaatatgaggctagccaatcgaaaactcttaagtttagcatttacacaccctcacctgatgcatgcctccctcgcagtagccctagcatacgaccgttatttgaacggttcatctcatggtggtcgatcaacagaagagtgctatcactggtcacgagccacatccctcttcaacgaaaagttgaacaacacaatcttgtccaatgataaagatccaatatgggggaccgccgctgccctcgccgtgctaactttcgcgtcccctgacatcggtaacactccagaaagctcatggcccctgaaacaaccccaacccacagatttagattgggtgcgtttatgtaatgggaaggggtctctgtgggacatcgtcaaccctttacgacacgatagcctcttcagtgtcatggcaacgacatatgctgagatgaactcgcctttggccgagataggtatcgatggtattccgactcccctagctatagcctgcggcctcacgacgtcatccaccgcagacaacaatccatattttagcacagcacatgcagtagcatatatcctcaatcggctggacagccaggtgacgacgggccaaaccgagcatttcacccgcagcgtaaaggggccattcttatctctcttattggcaaaagatcccgtcgcgcttttgctgctgtacctatggtaccgaaaagcaggtcgaagcatatggtggattaagttaagggcccaggctgagtgcccagcgatctgtctgtatctccagcggtattgcggctatagacaagatatcctagctctacttccaggagggataggcgttgagttttgggatacatgtagactgatgggatgggatgagactattggtgtcatagcatgtgtattatgatctttcagggcctctcaaactaaaagactttgcgcatcaaaacattgaattatagggtgc

SEQ ID NO: 22562 - DNA, 930 bp, Muscodor strobelii
  misc_feature: SGI cDNA ID NO. 567662
  misc_feature: Encodes the peptide sequence at SEQ ID NO 22563
atgagagttttcgtaactggagcgagtggtaatatcggcctggcagtcacgaaagaactgctggtacatcaacacgaagttctcgctctcgcccacagcgatgcgagtgctgcgctgttgaatgatctcggtgctgatgttcagcgtggttcacttgaggatctaaatatacttagaaaggccgcttctgaatgtgacggtgtcgcacacttggcattcattgtcgactttgagaactatgccgccgcatgtgcagctgaccaggccgccattgaagccatgggagcttcgttagcgatggcaggaggcaatcgcgccttggtcatcagctctgggacggcgttgctcaaaaagggacaattagtcactgaggacgattcatacgacgaaaacgactcctttggagccattcgtggcccgtcagaagcagttgcactggcatttgccgagcaaggcgtgcgtgtctctgtgatgcggttgcccagtgtatatggagagggaagcttaggatgggttgcgcctatgttagcgcatgctcaaaaacataaggaaatcgtgtatgttggtgaaggacaaaatcgctggtgcgcaactcatgctctggatgttgctcgagcatatcgactagcattggaaaaggcaaatggaggttctgtctttcacgtagtagccgaagaaggagtgcgaagcaaggatgttgcggtcgcactcggaaaaaagactggacttcacgctgttagtaaagcaaaagaggaagctttggaggtttatggattaatggccggtcccatgatgatcgataatccctcttcaagtactaagacgagagaccggcttggatgggagccaatgcaaccgaccctactcgagtttcttgagtctagagattttgtgatggatatagcaatgccagcttggtctagtaaatag

SEQ ID NO: 22563 - protein, 309 aa, Muscodor strobelii
  misc_feature: SGI Peptide ID NO. 567662
  misc_feature (3)..(224): Pfam Id: PF01370 Pfam Desc: NAD dependent epimerase/dehydratase family
  misc_feature (5)..(207): Pfam Id: PF07993 Pfam Desc: Male sterility protein
  misc_feature (1)..(297): Pfam Id: PF04321 Pfam Desc: RmlD substrate binding domain
  misc_feature (3)..(72): Pfam Id: PF01370 Pfam Desc: NAD dependent epimerase/dehydratase family
  misc_feature (141)..(224): Pfam Id: PF01370 Pfam Desc: NAD dependent epimerase/dehydratase family
  misc_feature (1)..(303): NCBI GI: 70983870 Blast Desc: oxidoreductase [Aspergillus fumigatus Af293] gi|66845087|gb|EAL85423.1| oxidoreductase, [Aspergillus fumigatus Af293] gi|159123559|gb|EDP48678.1| oxidoreductase, [Aspergillus
  misc_feature (1)..(290): NCBI GI: 119485508 Blast Desc: oxidoreductase, [Neosartorya fischeri NRRL 181] gi|119410344|gb|EAW20291.1| oxidoreductase, [Neosartorya fischeri NRRL 181]
  misc_feature (1)..(298): NCBI GI: 242820252 Blast Desc: oxidoreductase, [Talaromyces stipitatus ATCC 10500] gi|218713942|gb|EED13366.1| oxidoreductase, [Talaromyces stipitatus ATCC 10500]
  misc_feature (1)..(298): NCBI GI: 212538827 Blast Desc: oxidoreductase, [Penicillium marneffei ATCC 18224] gi|210069311|gb|EEA23402.1| oxidoreductase, [Penicillium marneffei ATCC 18224]
  misc_feature (1)..(293): NCBI GI: 169780492 Blast Desc: [Aspergillus oryzae RIB40] gi|238505348|ref|XP_002383903.1| oxidoreductase, [Aspergillus flavus NRRL3357] gi|83773450|dbj|BAE63577.1| protein product
  misc_feature (1)..(293): NCBI GI: 91779544 Blast Desc: epimerase/dehydratase [Burkholderia xenovorans LB400] gi|91692204|gb|ABE35402.1| epimerase/dehydratase [Burkholderia xenovorans LB400]
  misc_feature (1)..(293): NCBI GI: 162456871 Blast Desc: UDP-glucose 4-epimerase [Sorangium cellulosum 'So ce 56'] gi|161167453|emb|CAN98758.1| UDP-glucose 4-epimerase. [Sorangium cellulosum 'So ce 56']
  misc_feature (1)..(297): NCBI GI: 94970117 Blast Desc: NAD-dependent epimerase/dehydratase [Candidatus Koribacter versatilis Ellin345] gi|94552167|gb|ABF42091.1| NAD-dependent epimerase/dehydratase [Candidatus Koribacter
  misc_feature (1)..(306): NCBI GI: 222081344 Blast Desc: nucleoside-diphosphate-sugar epimerase dehydratase protein [Agrobacterium radiobacter K84] gi|221726023|gb|ACM29112.1| nucleoside-diphosphate-sugar protein
  misc_feature (1)..(294): NCBI GI: 255942329 Blast Desc: Pc18g00870 [Penicillium chrysogenum Wisconsin 54-1255] gi|211586666|emb|CAP94311.1| Pc18g00870 [Penicillium chrysogenum Wisconsin 54-1255]
MRVFVTGASGNIGLAVTKELLVHQHEVLALAHSDASAALLNDLGADVQRGSLEDLNILRKAASECDGVAHLAFIVDFENYAAACAADQAAIEAMGASLAMAGGNRALVISSGTALLKKGQLVTEDDSYDENDSFGAIRGPSEAVALAFAEQGVRVSVMRLPSVYGEGSLGWVAPMLAHAQKHKEIVYVGEGQNRWCATHALDVARAYRLALEKANGGSVFHVVAEEGVRSKDVAVALGKKTGLHAVSKAKEEALEVYGLMAGPMMIDNPSSSTKTRDRLGWEPMQPTLLEFLESRDFVMDIAMPAWSSK

SEQ ID NO: 22564 - DNA, 372 bp, Muscodor strobelii
  misc_feature: SGI EST ID NO. CUFF.53062.0
  misc_feature: Variant of the nucleotide sequence at SEQ ID NO 22562
caaaatcgctggtgcgcaactcatgctctggatgttgctcgagcatatcgactagcattggaaaaggcaaatggaggttctgtctttcacgtagtagccgaagaaggagtgcgaagcaaggatgttgcggtcgcactcggaaaaaagactggacttcacgctgttagtaaagcaaaagaggaagctttggaggtttatggattaatggccggtcccatgatgatcgataatccctcttcaagtactaagacgagagaccggcttggatgggagccaatgcaaccgaccctactcgagtttcttgagtctagagattttgtgatggatatagcaatgccagcttggtctagtaaataggccacaaacttcgtc

SEQ ID NO: 22565 - DNA, 351 bp, Muscodor strobelii
  misc_feature: SGI cDNA ID NO. 567663
  misc_feature: Encodes the peptide sequence at SEQ ID NO 22566
atgcgcgtctctgctgctttcgctctcttgaccgctgccgtcgttagcgcgtcaccttaccctacctcctgtgggtccgctactgtcgtcattgaagcttcgcatggaggcgctggtagtggcctcaccaacaagacaatcgaagtgcctctcggaaaaatttacacaaacgaggatgcccttgatgaggtttcaacgctatacctcttgaaacctaacaccgtcacatgcacgccgtacaaggccacgacaggaaccggcactggtggactacctttcaccgtcggccatccttcactattgtccaccaacacagtcgttgtgggttcgttagtgtgtgctagctcttaa

SEQ ID NO: 22566 - protein, 116 aa, Muscodor strobelii
  misc_feature: SGI Peptide ID NO. 567663
  misc_feature (36)..(113): NCBI GI: 256725829 Blast Desc: NECHADRAFT_106217 [Nectria haematococca mpVI 77-13-4]
MRVSAAFALLTAAVVSASPYPTSCGSATVVIEASHGGAGSGLTNKTIEVPLGKIYTNEDALDEVSTLYLLKPNTVTCTPYKATTGTGTGGLPFTVGHPSLLSTNTVVVGSLVCASS

SEQ ID NO: 22567 - DNA, 678 bp, Muscodor strobelii
  misc_feature: SGI EST ID NO. CUFF.53075.0
  misc_feature: Variant of the nucleotide sequence at SEQ ID NO 22565
caaaaggcttaacataacctcaaccaaccgcatcgtcaacaaccacaaagcaaaactgcacgaagctatcctcgaatagttctaatcttcaatcccgactatctcttatcaactaatagccaaaattttatatcacaatgcgcgtctctgctgctttcgctctcttgaccgctgccgtcgttagcgcgtcaccttaccctacctcctgtgggtccgctactgtcgtcattgaagcttcgcatggaggcgctggtagtggcctcaccaacaagacaatcgaagtgcctctcggaaaaatttacacaaacgaggatgcccttgatgaggtttcaacgctatacctcttgaaacctaacaccgtcacatgcacgccgtacaaggccacgacaggaaccggcactggtggactacctttcaccgtcggccatccttcactattgtccaccaacacagtcgttgtgggttcgttagtgtgtgctagctcttaaatgcaggaccattactgctatcgtcaacgtaacgatagagatagtattgagggtgtatcagtaaagcaagggcttatagacatcatcaggacaggaacaaggctatttaacttgatgatagcttatgtacgagtaattgtcaatgataaactattaatttaaaactcccgcagaaattcgaaatgcgcta

SEQ ID NO: 22568 - DNA, 1662 bp, Muscodor strobelii
  misc_feature: SGI cDNA ID NO. 567664
  misc_feature: Elevated expression when VOC is produced
  misc_feature: Encodes the peptide sequence at SEQ ID NO 22569
atgggtttcgctaacatcctcggggctctagtaataagcctcacgatagctattgattatgtcgatgcacgaggaagcgtcagttcgaaaattgtctccgaccagcgaccaagacctttgtccttcccggtcggttcagttgcacaaaaaagtccattagcccgccgggatcaagatattcaggtctttggaaatgcgacatctgtctcaagcttcatccagctatacctcggctcccctcagcaacctgtcaaggtgatcgttgatttaggttcctacgagctctgggtaagcccagaatgtggcgataatgcagactcggactgtgactccaaccacgtctacaatcctaccaattccaaaaccagtgtgagcacgaacgacacaacgagcatcgcctatggtgatggcagccaggtgagcctgatgtactataccgacaccatcaccctaagtacagggcttcaagtaccaggtgcgcaatttggggttgcacaaaacaagacgggattttcgaatggtatccttgggctcggtttcggcgaatcggaggccaacacaaactatcctaatttcattgatcagttggcgtcgcaacagatcaccaagagcaaggccttcagcttggcgttggggaattcgacgacacctaatagtggggttataatcttcggcggcgtggacaccaagaagttttcgggccagttgagctcgaatgatatcgtggacactggctattccggatacacggtaccgctcgtcaatttcggtgttggcgcttggggcgtcccaagcacaaacatctcgaactccaacgcgacggtgctccttgattcgggcacgacgatctcgtatttgcctggctctgctgttgaggaattggctaaggaattcaatgcgacagtgaacaacgatgttgggggctatgtcgtgtcatgctctaagatacgaaatagcacttcattcttggccttcaatttcgcgtccgtcaccatccaagtctcttattccgccttattgatagactaccaggacgatgagtgcttctggggaattcagtctggtgatggcctgggctcacaattctccatcctcggtctcaacttcatgcgcagtacatacgccgtattcgatcagacactaaatactgtttctatggcacaatatatcaactgtgggcaaaacgaacaggagatgcctagctccggtgctgctagctttattggagaatgcgtaacgacaactactgacccagcttcaagcgggacaccgtcgtcgagccttacaacaacaccatctacccatcctcaaagcggtctctctacaggggcaaaagctggtattggtgtgggagtatctgtaggcgctttggctcttatcgcaggtgcagtctacttcatattaggccgcaagcggaaaaacgcgacgacagatgctgccggtgtacctgaaacacaaactaccccgaagccggaaacaggcccagacgcatatgcttatggtcctacaagtgcgccgccccaggagctgtacacgggagatggtggtgcgcattcgtacccccaggaaatgcagggccagaactactacccgcctgtagaattggcatcagaaccggcccagcacggatggaacgggcacgagacgactggcaccagataa

SEQ ID NO: 22569 - protein, 553 aa, Muscodor strobelii
  misc_feature: SGI Peptide ID NO. 567664
  misc_feature (70)..(389): Pfam Id: PF00026 Pfam Desc: Eukaryotic aspartyl protease
  misc_feature (72)..(389): Pfam Id: PF00026 Pfam Desc: Eukaryotic aspartyl protease
  misc_feature (37)..(411): NCBI GI: 39970765 Blast Desc: MGG_02849 [Magnaporthe grisea 70-15] gi|149210259|ref|XP_001522504.1| MGCH7_ch7g607 [Magnaporthe grisea 70-15] gi|86196562|gb|EAQ71200.1| MGCH7_ch7g607 grisea
  misc_feature (24)..(411): NCBI GI: 261353472 Blast Desc: candidapepsin-1 [Verticillium albo-atrum VaMs.102]
  misc_feature (55)..(432): NCBI GI: 171680938 Blast Desc: protein product [Podospora anserina] gi|170940427|emb|CAP65654.1| protein product [Podospora anserina]
  misc_feature (77)..(411): NCBI GI: 116191517 Blast Desc: CHGG_05476 [Chaetomium globosum CBS 148.51] gi|88181389|gb|EAQ88857.1| CHGG_05476 [Chaetomium globosum CBS 148.51]
  misc_feature (37)..(401): NCBI GI: 39948622 Blast Desc: MGG_08698 [Magnaporthe grisea 70-15] gi|145009241|gb|EDJ93952.1| MGG_08698 [Magnaporthe grisea 70-15]
  misc_feature (40)..(411): NCBI GI: 171691448 Blast Desc: protein product [Podospora anserina] gi|170945672|emb|CAP71785.1| protein product [Podospora anserina]
  misc_feature (40)..(375): NCBI GI: 85090078 Blast Desc: NCU09155 [Neurospora crassa OR74A] gi|28919587|gb|EAA29011.1| conserved [Neurospora crassa OR74A]
  misc_feature (73)..(432): NCBI GI: 171678269 Blast Desc: protein product [Podospora anserina] gi|170937204|emb|CAP61861.1| protein product [Podospora anserina]
  misc_feature (24)..(393): NCBI GI: 116205756 Blast Desc: CHGG_02171 [Chaetomium globosum CBS 148.51] gi|88182768|gb|EAQ90236.1| CHGG_02171 [Chaetomium globosum CBS 148.51]
  misc_feature (40)..(468): NCBI GI: 39971095 Blast Desc: MGG_03014 [Magnaporthe grisea 70-15] gi|149210653|ref|XP_001522701.1| MGCH7_ch7g799 [Magnaporthe grisea 70-15] gi|86196754|gb|EAQ71392.1| MGCH7_ch7g799 grisea
  misc_feature (75)..(388): SWISSPROT Homolog: EC 3.4.23.24 Candidapepsin
  misc_feature: Useful for introducing or modulating the production of volatile compounds
MGFANILGALVISLTIAIDYVDARGSVSSKIVSDQRPRPLSFPVGSVAQKSPLARRDQDIQVFGNATSVSSFIQLYLGSPQQPVKVIVDLGSYELWVSPECGDNADSDCDSNHVYNPTNSKTSVSTNDTTSIAYGDGSQVSLMYYTDTITLSTGLQVPGAQFGVAQNKTGFSNGILGLGFGESEANTNYPNFIDQLASQQITKSKAFSLALGNSTTPNSGVIIFGGVDTKKFSGQLSSNDIVDTGYSGYTVPLVNFGVGAWGVPSTNISNSNATVLLDSGTTISYLPGSAVEELAKEFNATVNNDVGGYVVSCSKIRNSTSFLAFNFASVTIQVSYSALLIDYQDDECFWGIQSGDGLGSQFSILGLNFMRSTYAVFDQTLNTVSMAQYINCGQNEQEMPSSGAASFIGECVTTTTDPASSGTPSSSLTTTPSTHPQSGLSTGAKAGIGVGVSVGALALIAGAVYFILGRKRKNATTDAAGVPETQTTPKPETGPDAYAYGPTSAPPQELYTGDGGAHSYPQEMQGQNYYPPVELASEPAQHGWNGHETTGTR

SEQ ID NO: 22570 - DNA, 2433 bp, Muscodor strobelii
  misc_feature: SGI EST ID NO. CUFF.53069.0
  misc_feature: Variant of the nucleotide sequence at SEQ ID NO 22568
gttgggggccgtttgcattgctgactgatcaggcagctgagacaacacatctgatccttcgaaagttctcttgcctgtatgtggacttgtgtggatccgacctcatgcaatcacgcattcatgatctcatgacaatggtaacagactcccgcgaatctcatcctctcgctcatggagcgtaacctgagttgcaggctaatacatactggctcaattatcgaatccgaaacctactggtcgcttagtgaggtgacggtcgctgcgtgctttgatggagtctagcttatgtacggactctctagcatggtcgcgtcaatcgcgcaggggacctaaagaggagactagcaaggtggaaagcagggaacaaggattgtaatctcatgggattctgtaactgaagcccccctttaagctgacgagctgacttctcaaactcagtcgtttactcgaaaatatgctttctgcctttgactttagcttcattgaataagtccagcagtgggcgctagtccatgtcggagcagactcaagatgggtttcgctaacatcctcggggctctagtaataagcctcacgatagctattgattatgtcgatgcacgaggaagcgtcagttcgaaaattgtctccgaccagcgaccaagacctttgtccttcccggtcggttcagttgcacaaaaaagtccattagcccgccgggatcaagatattcaggtctttggaaatgcgacatctgtctcaagcttcatccagctatacctcggctcccctcagcaacctgtcaaggtgatcgttgatttaggttcctacgagctctgggtaagcccagaatgtggcgataatgcagactcggactgtgactccaaccacgtctacaatcctaccaattccaaaaccagtgtgagcacgaacgacacaacgagcatcgcctatggtgatggcagccaggtgagcctgatgtactataccgacaccatcaccctaagtacagggcttcaagtaccaggtgcgcaatttggggttgcacaaaacaagacgggattttcgaatggtatccttgggctcggtttcggcgaatcggaggccaacacaaactatcctaatttcattgatcagttggcgtcgcaacagatcaccaagagcaaggccttcagcttggcgttggggaattcgacgacacctaatagtggggttataatcttcggcggcgtggacaccaagaagttttcgggccagttgagctcgaatgatatcgtggacactggctattccggatacacggtaccgctcgtcaatttcggtgttggcgcttggggcgtcccaagcacaaacatctcgaactccaacgcgacggtgctccttgattcgggcacgacgatctcgtatttgcctggctctgctgttgaggaattggctaaggaattcaatgcgacagtgaacaacgatgttgggggctatgtcgtgtcatgctctaagatacgaaatagcacttcattcttggccttcaatttcgcgtccgtcaccatccaagtctcttattccgccttattgatagactaccaggacgatgagtgcttctggggaattcagtctggtgatggcctgggctcacaattctccatcctcggtctcaacttcatgcgcagtacatacgccgtattcgatcagacactaaatactgtttctatggcacaatatatcaactgtgggcaaaacgaacaggagatgcctagctccggtgctgctagctttattggagaatgcgtaacgacaactactgacccagcttcaagcgggacaccgtcgtcgagccttacaacaacaccatctacccatcctcaaagcggtctctctacaggggcaaaagctggtattggtgtgggagtatctgtaggcgctttggctcttatcgcaggtgcagtctacttcatattaggccgcaagcggaaaaacgcgacgacagatgctgccggtgtacctgaaacacaaactaccccgaagccggaaacaggcccagacgcatatgcttatggtcctacaagtgcgccgccccaggagctgtacacgggagatggtggtgcgcattcgtacccccaggaaatgcagggccagaactactacccgcctgtagaattggcatcagaaccggcccagcacggatggaacgggcacgagacgactggcaccagataacatagtagtaaactacaactatgtacaggatcttaataatatagtcatagtcaactcagtatctttgacagagtctcttccaacctctcaattccttttaggctataaattggaatatagtgcatagacttcattcactaggacctgaactgcaccatcatatttggtctatgtactagacaagatgtagcgctgacagtagagcgcaaactgcatagttctcaagtcacaatactgata

SEQ ID NO: 22571 - DNA, 1014 bp, Muscodor strobelii
  misc_feature: SGI cDNA ID NO. 567665
  misc_feature: Encodes the peptide sequence at SEQ ID NO 22572
atgtttaataacttctctctactcttcctttcagctagtctgatcgtcaatcatgccgccgctgacgaccaggtctcgttcgatatatacagcaagaatgactgtggaacggatgatggatcggtcttcgacgagctctcttccaccatcgagacctggaaaacaacaccagaaactataaactgtgcaggaactcatatcgaactaaacgaatggcctgcatctcaaggagaatacaccgcattcttggattcttcagccgtcgaggatgattgtctacttgtcttctatactgctgccccgcctgatgaccagggtggcgaaggcggcgaatgctttttaccttaccgtactatcaacagtaactcaggatgcgccagcgttagcataccaaacgattacggtcttgtatactgttgcggcgatgactgcgaagcctcactgccttcgaattctggaaagagagaagtgctccctgcgagtccgcgggatgtgacgaaagccaaacgtggatcccttctacgtggtttgaatagcaagagagatagcacgtgcacattcgacaaaacgagcgacgtcaaaacagcgtacaaagcacctcagcaacttagtgctacggtagactgtcctggtgaggagtcgggcgattgtccaatttctggggagtattccactggttcgacaatcacaaattctgggactacgggtgtcaatgcaggtgcttctgctggcttcttcggaatcggtgcttctttcggggtcgaagacagtattaccaatgaggcgtcttctgagagttcatacacctactcttacaccattggggtgccacccggtcagtctggttaccttatcttcactgctaagattctttgcggcacaggcacctttaatggggatgactgtgacgacgcattgaatattggcgaggacgagtggtgcattccagacttgattcagggtcccaatggtacacagcctgatggaaaatggagctttctgcagacgaattaa

SEQ ID NO: 22572 - protein, 337 aa, Muscodor strobelii
  misc_feature: SGI Peptide ID NO. 567665
  misc_feature (18)..(337): NCBI GI: 46112995 Blast Desc: FG02914.1 [Gibberella zeae PH-1]
MFNNFSLLFLSASLIVNHAAADDQVSFDIYSKNDCGTDDGSVFDELSSTIETWKTTPETINCAGTHIELNEWPASQGEYTAFLDSSAVEDDCLLVFYTAAPPDDQGGEGGECFLPYRTINSNSGCASVSIPNDYGLVYCCGDDCEASLPSNSGKREVLPASPRDVTKAKRGSLLRGLNSKRDSTCTFDKTSDVKTAYKAPQQLSATVDCPGEESGDCPISGEYSTGSTITNSGTTGVNAGASAGFFGIGASFGVEDSITNEASSESSYTYSYTIGVPPGQSGYLIFTAKILCGTGTFNGDDCDDALNIGEDEWCIPDLIQGPNGTQPDGKWSFLQTN

SEQ ID NO: 22573 - DNA, 399 bp, Muscodor strobelii
  misc_feature: SGI cDNA ID NO. 567666
  misc_feature: Encodes the peptide sequence at SEQ ID NO 22574
atgcgttcgatcagcacaaccgtttttgccctcagcactctggctctgtccggcatctcccagggctgggagatgaagttctggtggggttcaagtagttgcggtgaaactgttggcgacacaagtcgtagcggtgacgcgggcaatagcgttgactgcgaggatctcaccgtcgatctcaaaactattctagtcgaagactgggatgataactgtcgtatcatgctttggactgaagaaggcaactgcttcatcgacggcggagagcctttctacaattatactaaagccgaagcgaaagaagaagaaactgcaatttttaatgatgcaggcgatagggcttgtatcaaggaccaaatcaatgataaccaattagcttactattcatacgtttgctaa

SEQ ID NO: 22574 - protein, 132 aa, Muscodor strobelii
  misc_feature: SGI Peptide ID NO. 567666
  misc_feature (1)..(132): NCBI GI: 46113011 Blast Desc: FG02915.1 [Gibberella zeae PH-1]
MRSISTTVFALSTLALSGISQGWEMKFWWGSSSCGETVGDTSRSGDAGNSVDCEDLTVDLKTILVEDWDDNCRIMLWTEEGNCFIDGGEPFYNYTKAEAKEEETAIFNDAGDRACIKDQINDNQLAYYSYVC

SEQ ID NO: 22575 - DNA, 2670 bp, Muscodor strobelii
  misc_feature: SGI cDNA ID NO. 567667
  misc_feature: Encodes the peptide sequence at SEQ ID NO 22576
atgcgtatttgggtgctgatcggtccgcctcaggccgacagcaccagtcgtagaattgaactcgaggttgacagcttcgacactgttggcagcgttaaggacaagattttcgacaaggcaggtataccggtgcggaaccaactaataatctggggtggcaagggactggaagacatgcaggcgttggcgtcttataatgtccgtcacgatagcacgcttaacgttgttcgcaggcgaccacgttcttcgccgccagattcatctgcggctccaatcaattacccatccgagattcttctccccacagacgaggaggccgccagtgtcctcgaagaatggcatcagcttgctgaaaagggaaactttgacgcagacactcatatcgttgctcccgaagcacatcacgtcgccattcgggctctcgaaaaggacgtcatcacctcgtcagaatggtttcgcgtgaaaggcgtgtacagcctcgaattgattttggctgacacagcagaccaagcatcattcttgcagggatggagtcctcaagtgcccgtgtggctacagtggttcataccagatgtcttcaacgatgcagaatctgcagacaagacggcgactttaagcctgtttcagtcttataatatcatacagtctgttatggatcagttcaactgcttaagatcgaagaagttctcgagcgactatttcagcttgctacttttaactgaaaacgaagaagctgcggaagtcctcaaagtcccaagagcgacgcttgtagaactcagcgaagcccttctcaccgtgatccctatagcacgggaggagggcatccgcactgtcgcctctattctagactctgcggattctttccgcaagttgtgcgagtcacttcggatcattcccgacaggaacgatgtcgtcgaaacgtgccgtatcatcgcctatcttcttgatcttgggctggtatgctatgttggatctcatgggtctcgtttcgaccgagagcatcttgaatacgaccaagacaagttcgaggtcggttctatcagagggattagtttcgaatgtcgactacacagtctagcctgtctcagtgcgttcttagattcgcgacaagtctgggtgtttagagtgcgccagggaccgcgcgattcgggttacgcgccgacaggtcctgttgtgaagaaagacctgtcaatcctcacgaccatagatgcatttgccgacatctggggcccagtatatgcagagatggcaaggggagacaatcgatccgctgttgacgctcccatccggaagtacaatgttggtggaggctgcatccgccgagttccaggcaatcaactcgatacgatagtcaagtgccattggtttagttggatgggagaaaagcgtcgcaaaatatcgcgcctcttctcggctccgcaaactcgaagccaagatcttaccatgtcaatggcggacaagctgcttatcggcaccaatctcgatattaatgggggttgtactttcagcctcgaggagtatcaatggagttatcatgaggctatcggcgaggcagggcccaagccctcgtcgtggcgtttcgacggcgtcgcggtatcgctgcagctagcaacacccaaaatcgtgacgcttcagatcgaaggacagtcgaagaggcttcctgagactacggtcaaagagaatgcttggcagaaatggcattcatgtccagagcgtgcaaacccggctttcctaaacgacttctatggtgtggaagtcagtcactgcacaggcaacgctaggagggtaactatgcgtcaaatcatgctcatgcgcccggtcatggacttcctcgatcgtcagattcctaactggtctcggacgccctggggcgtggattttgtcaaggccctgcaggagatcggcaacaaggccatgattcggttttggatgaagcacgctgcgcatcgagttgaagtcggacagcttgtggcgtgcgtcttggacatactagacaacacaggcaataaaaaccgtgagttccaagccggcctcttgcacgacaatcgtgagagcatcataaccatcgattctgaggctaatgactgggctggacttctacgggactcgtatcaaacagcgacctatgctatcgtcagcaaggtgtgtttagaataccgtttgccgaatcatacttgcgcggtttgcaatgatgaaaagagatacacggtgttgcagaccgaacttggcggaacctgcagtacggctggggactatgtcaagatccaaccattcgggctgtcgttcaagaagaccaccaacaatggagacacagtccgtccgccactatttgttgcgcagacgaagcggaatatctttcagtccttggcacagaggcatggcgaggcaagggaggtgatgagggcgctgacgcaggaagacgttggccgcaagcgcagagtcatgctacgatcttcaaagcagacgtttggcggcatggcttatccgcgagaacgtatgtctttgacagccattgccggtcaaactggtcccgacgaagatacagttatgagcgagtgtgtcgtcgatgatgattcggtggccatggacacgttggacgcattgcgggaccatgtaacagcacaggaggggctgtcacagatagagattgaacgcacattgcggaagtga

SEQ ID NO: 22576 - protein, 889 aa, Muscodor strobelii
  misc_feature: SGI Peptide ID NO. 567667
  misc_feature (10)..(80): Pfam Id: PF00240 Pfam Desc: Ubiquitin family
  misc_feature (15)..(80): Pfam Id: PF00240 Pfam Desc: Ubiquitin family
  misc_feature (211)..(718): NCBI GI: 67526319 Blast Desc: AN3617.2 [Aspergillus nidulans FGSC A4] gi|40740635|gb|EAA59825.1| AN3617.2 [Aspergillus nidulans FGSC A4]
  misc_feature (211)..(718): NCBI GI: 259481856 Blast Desc: TPA: TPR domain protein (AFU_orthologue; AFUA_3G01710) [Aspergillus nidulans FGSC A4]
  misc_feature (15)..(78): NCBI GI: 209447283 Blast Desc: TPA: TPR domain protein (AFU_orthologue; AFUA_3G01710) [Aspergillus nidulans FGSC A4]
  misc_feature (15)..(78): NCBI GI: 56692739 Blast Desc: ubiqutin/ribosomal protein [Singapore grouper iridovirus] gi|42517451|gb|AAS18117.1| ubiqutin/ribosomal protein [Singapore grouper iridovirus]
  misc_feature (15)..(78): NCBI GI: 9629963 Blast Desc: ubiquitin-like protein [Orgyia pseudotsugata MNPV] gi|464989|sp|Q05120.1|UBIL_NPVOP RecName: Full=Ubiquitin-like protein; Flags: Precursor gi|7439566|pir||T10294 ubiquitin-like -
  misc_feature (15)..(78): NCBI GI: 15220991 Blast Desc: ubiquitin family protein [Arabidopsis thaliana] gi|4587534|gb|AAD25765.1|AC006577_1 Belongs to the PF|00240 Ubiquitin family [Arabidopsis thaliana] ubiquitin family protein
  misc_feature (15)..(78): NCBI GI: 46309407 Blast Desc: ORF47 [Agrotis segetum granulovirus] gi|46200624|gb|AAS82691.1| ORF47 [Agrotis segetum granulovirus]
  misc_feature (15)..(78): NCBI GI: 56418270 Blast Desc: [Grouper iridovirus]
  misc_feature (15)..(78): NCBI GI: 76559884 Blast Desc: TPA: ubiquitin-60S ribosomal L40 fusion protein [Vitis vinifera]
  misc_feature (15)..(78): NCBI GI: 30409081 Blast Desc: ubiquitin extension protein [Heterodera schachtii]
MRIWVLIGPPQADSTSRRIELEVDSFDTVGSVKDKIFDKAGIPVRNQLIIWGGKGLEDMQALASYNVRHDSTLNVVRRRPRSSPPDSSAAPINYPSEILLPTDEEAASVLEEWHQLAEKGNFDADTHIVAPEAHHVAIRALEKDVITSSEWFRVKGVYSLELILADTADQASFLQGWSPQVPVWLQWFIPDVFNDAESADKTATLSLFQSYNIIQSVMDQFNCLRSKKFSSDYFSLLLLTENEEAAEVLKVPRATLVELSEALLTVIPIAREEGIRTVASILDSADSFRKLCESLRIIPDRNDVVETCRIIAYLLDLGLVCYVGSHGSRFDREHLEYDQDKFEVGSIRGISFECRLHSLACLSAFLDSRQVWVFRVRQGPRDSGYAPTGPVVKKDLSILTTIDAFADIWGPVYAEMARGDNRSAVDAPIRKYNVGGGCIRRVPGNQLDTIVKCHWFSWMGEKRRKISRLFSAPQTRSQDLTMSMADKLLIGTNLDINGGCTFSLEEYQWSYHEAIGEAGPKPSSWRFDGVAVSLQLATPKIVTLQIEGQSKRLPETTVKENAWQKWHSCPERANPAFLNDFYGVEVSHCTGNARRVTMRQIMLMRPVMDFLDRQIPNWSRTPWGVDFVKALQEIGNKAMIRFWMKHAAHRVEVGQLVACVLDILDNTGNKNREFQAGLLHDNRESIITIDSEANDWAGLLRDSYQTATYAIVSKVCLEYRLPNHTCAVCNDEKRYTVLQTELGGTCSTAGDYVKIQPFGLSFKKTTNNGDTVRPPLFVAQTKRNIFQSLAQRHGEAREVMRALTQEDVGRKRRVMLRSSKQTFGGMAYPRERMSLTAIAGQTGPDEDTVMSECVVDDDSVAMDTLDALRDHVTAQEGLSQIEIERTLRK

SEQ ID NO: 22577 - DNA, 1221 bp, Muscodor strobelii
  misc_feature: SGI cDNA ID NO. 567668
  misc_feature: Encodes the peptide sequence at SEQ ID NO 22578
atgcgtcttgttaatgcccgcactctggaattacaagatttttggggtatcgacatcccaccgtatgcaattctgtctcatacctggggcctagatgaggcgtccttcgatgactgggggaatcggatcgtcgcatcgcacaaaagtggctttcagaagattcaaaatgcagctgaattgacacgattatttgaactagattacctttgggtagatacagtgtgcattgacaagaagagcagtacagagttgtctgaggccatcaacagcatgttcgactggtactcaaaggccgcctggtgtctagtctttttgagtgacgtgactctgtccgaaaccaaaacagttgcttcggagaagcgatctggcggctacacctttaagtgtttgaaagaggcctcatggttcacacgaggttggacattgcaagagctccttgctccgatacatcttgtctttgaatttacagatgaatggctcgaacagagactgcgaaaatccagagcccagattctggaaatggagacggatcttgtgaaagacatatcaaagataacaggcataacagagtcgaatctattcactcatgggagccacactgatgagagtatcgcagtgaaaatgcactgggcatcaaatcgacgaacaacaagagtcgaagatatggcgtactgtttgatgggaatattccggattaatatgccgcttttgtatggagaaggcagagcagcctttaagagactgcaagaagaaatcatcaaaacgtcaacggatcagtcaatttttgcttgggacgatgttggagagaatgtggatcacgagggcatggatgtcagcgtactggcaccatggccgagcgcgttcaccaataaacacatcgtacgctgtaagagccttaatcgcgcccccagtgctttagtctatacattcacaaattttgggttgttcctccagcttccattgctgtccaatttgaagaaggatctttacgtcgccattttggactgtacagacagtcgttctcctaatgaggatgactccctcatttgccgatttcaatgtcaaagcaatgcgtacctccagctcagcgactcaacattcctagaacaagaggagctcttccatcagtaccttgccctatatgtcaactcaagttgggggaggagaaaacttacgtacttcttctcctcgtctcagctgcggagtcgagagtgtcgatag

SEQ ID NO: 22578 - protein, 406 aa, Muscodor strobelii
  misc_feature: SGI Peptide ID NO. 567668
  misc_feature (22)..(144): Pfam Id: PF06985 Pfam Desc: Heterokaryon incompatibility protein (HET)
  misc_feature (1)..(350): NCBI GI: 85092369 Blast Desc: NCU04912 [Neurospora crassa OR74A] gi|28920765|gb|EAA30124.1| [Neurospora crassa OR74A]
  misc_feature (1)..(321): NCBI GI: 256723740 Blast Desc: NECHADRAFT_52245 [Nectria haematococca mpVI 77-13-4]
  misc_feature (1)..(322): NCBI GI: 156035539 Blast Desc: SS1G_12973 [Sclerotinia sclerotiorum 1980] gi|154698378|gb|EDN98116.1| SS1G_12973 [Sclerotinia sclerotiorum 1980]
  misc_feature (1)..(345): NCBI GI: 171688186 Blast Desc: protein product [Podospora anserina] gi|170944055|emb|CAP70165.1| protein product [Podospora anserina]
  misc_feature (1)..(356): NCBI GI: 121715886 Blast Desc: HET domain protein [Aspergillus clavatus NRRL 1] gi|119403709|gb|EAW14126.1| HET domain protein [Aspergillus clavatus NRRL 1]
  misc_feature (1)..(367): NCBI GI: 145228631 Blast Desc: An01g01850 [Aspergillus niger] gi|134054715|emb|CAK43556.1| protein product [Aspergillus niger]
  misc_feature (1)..(323): NCBI GI: 46114894 Blast Desc: FG03289.1 [Gibberella zeae PH-1]
  misc_feature (1)..(336): NCBI GI: 145249734 Blast Desc: An14g05830 [Aspergillus niger] gi|134081889|emb|CAK42144.1| protein product [Aspergillus niger]
  misc_feature (1)..(336): NCBI GI: 145608538 Blast Desc: MGG_06555 [Magnaporthe grisea 70-15] gi|145016004|gb|EDK00494.1| MGG_06555 [Magnaporthe grisea 70-15]
  misc_feature (1)..(340): NCBI GI: 238493477 Blast Desc: conserved [Aspergillus flavus NRRL3357] gi|220696469|gb|EED52811.1| conserved [Aspergillus flavus NRRL3357]
MRLVNARTLELQDFWGIDIPPYAILSHTWGLDEASFDDWGNRIVASHKSGFQKIQNAAELTRLFELDYLWVDTVCIDKKSSTELSEAINSMFDWYSKAAWCLVFLSDVTLSETKTVASEKRSGGYTFKCLKEASWFTRGWTLQELLAPIHLVFEFTDEWLEQRLRKSRAQILEMETDLVKDISKITGITESNLFTHGSHTDESIAVKMHWASNRRTTRVEDMAYCLMGIFRINMPLLYGEGRAAFKRLQEEIIKTSTDQSIFAWDDVGENVDHEGMDVSVLAPWPSAFTNKHIVRCKSLNRAPSALVYTFTNFGLFLQLPLLSNLKKDLYVAILDCTDSRSPNEDDSLICRFQCQSNAYLQLSDSTFLEQEELFHQYLALYVNSSWGRRKLTYFFSSSQLRSRECR

SEQ ID NO: 22579 - DNA, 6723 bp, Muscodor strobelii
  misc_feature: SGI EST ID NO. CUFF.53269.1
  misc_feature: Variant of the nucleotide sequence at SEQ ID NO 22577
tcacgacagcatcgttgacggcagatataagagtgtgtttctcgttggcactgctgtccacaaacttgccaccgacgaacgctctcacagggataggatacagctcgaggtagggtgatggagcagtataggcggcgaccatcttcacaaatgaaagtgacaccggagcaattgagacctggctttccaatatatctagacgagtctgaaagatcgaccccagagccacatcgaccgtcctacgtaggcggcactcagtatttgtatgtccatcttagaacctacacagcccaagctgaagagaaatcctattcgatgagatacatgagacaacagtggtcagtggacttaatcattatcatcgctatggacgcctgaacactagcgagttacctatgaacttccgccgatacctgatctggacgtcgccattgtgtgggcccgtcggcggaagcaaccccgataactgaagctagcggtcagtcctccgcccaacgcatatctttcggcggaaaccaggacatgccagatggcaactgtgtcccgtggggcttagttaccatctcgatcagacaaattcgtttccgatagttgcatcatccctctaatccatgatacctaacctctagatcatcctcttctgacaaatcgataacatcgcgcctcattagcgctataggacgcgagtctagcgcgccttaaccgtgaacaggcggatatccaagttgcgattacaacaaattcggtttcaccacagtctcttaggtactccatatcatgagtcgagtcatggagccacattggcagggatcacctacatatcaccaaattcgaaagtgattgaatggacacgttctaagactagccgtatcgatgaacatgggagcacgactcaggacataaatgtatctggcaaatccgtagctgctcggtctcttagagcacgcattgacataagcaaacaatcggacctacctaaaacgcttagagaggggtgcggggggaagacgagtgcgcccagtctttggcataatcacgtgatagcgcgtttctgacgtattaacattgttttgagagttgacagtgaacacatccggtcgctcggattcgagactctagaacgtgacctctttcttcgtcacgccctagttaatagggcttcggaatagatacgatggcgcatcggcaagatggccttccaatggaccctggacctacactggacggatcgcggcacccggctttaggcaaaaggaaagttcgtaaagggacaactagctgttgggaatgcaaaaggagaaagcagcgatgtcacttcgagtctccctatagccagatatgtcaaggatgcatgcgtagggggaaaacctcctgtacgatgcaagattcggacgacccatccgaccgatccatcgcaccccagctgcatacacatgaacaatccgcagcaatctcccatagcgaagaaatggaagcgctacgagaaactgatcgcttgcaaacagctgaaacggggtcttcatcttccgttaatgccaggtacgagcctgcaaaccttcatttacaaatgttcggaactactgttggaacttccgaagggcctccgggctacccattcctccctgatcctcacgtaggaggacatagtcgcacaagtcaagctctccacgcagcatttccaactcaggcagacgctataaccataataggtgcaagctatacacctgcattccttcagttttttactctaccctatcaaaagctattctgtggcgatatgctttcctcctcagaactagcttctctgccagggccgagggatcatccggtcctactagctcgcacactcttatacttgacccatggactacagaatctcggtcctgctacgatggagacgacttcaatgaacttagattgccatccggccaaagcaatgaaatcttacctcaatacggcttccagactagtcacaagcaatgacgcgctcatcgggtcattagagggtctcgaatgtctcatactagagggcgtcttttatatccactcaggtgatcttcgtcgtgcctggttcatatttcgaaggtcgcttgctctggcgcagcttttgggactacatcttggacatacacaagaggtcccagtactggatcccaagtcgaaagctctaccagcaatgatgtggtacagaatcgtggggcaagatagatacttgtcgctcgtgcttgggcttcctccggggacttcgggggatctctccttgtcctcaatgacgaatatgccgaacgattgtgcaacggatttgcttgaacgccatcattacgacattatgggctatatggcagcacgatccacagaggcagcttcttcgcaagatgatggtttcattcagcgcatggacatgatgcttcaacaagcctcaaaaaacgtctcggccgaatggtggcttgtgccaagaggaagctacgccaggaacgatgcgcgtgttgacaacgacactgacattgaggcgctaggacgattacttgtgcagatcaatcactataatcttcttgtgattcttcacttgccctcgctgctgaatcaatgttcaatacagcatagcgaccatggtctaatgacatgcgtcaattcaagccgcgaacttctgaaccgctatatcagacttcgctgtatacgtatatcgccgttctgctgtcgaatgatagactttgcggcgttcacttcctgtctggctcttttgtgtgctcacatcgctcgacatcagcaaccaggaaatacggaccctctagctcatcaacatctaagtgatcgtgcaatggtcaaggagacaatcgagttaatgatccataccagcataagtgagatggaccaatcggtcttgcagcgtactgtcatgattttagaatgtctctctgcaattgaagtcgactcagcaacggtgaccgatcaggcaacacctctcgaggtcgcgactccgggtagagagcacacgcgatcgattgttcgcctgaaagtcccctttctcggtccggtcacaatcagtgcaagtggatttgacctcgaaggccttcatggccatcctgccagtacgcgacacagagtaacctggacccaagaaatggatcttccactcacacctgaggtctattttgataaggcgctcaccggtttcgaatcgtttcaacccgtgtttaccgaaagaatggagaatgctattaaccccgatctcatgcaatcgccttcggcattgcctcagacgagctatttcctatcacatgacaacactcagacaggagatatcgtgatgggattaactaatatgtaagcccagctagtaccactgattaaaaggagccgttttggggtccatccaggcacccaatgagctcggctgcccttgttcccacacactcagatttcttcaattgctagctgggcttggcgaccctgatactctctaaagacggacaagctagaaatgaacatcggcagagccatctcaataagtacctaatctccccaggaaaacacggaactcattcaaaagaatcgtcacacactgggaagaggcactagagtacttcgttcccgaacgccactaatttatgaatgcacacgcctcaatcatgtggcggacatgggcgagaataggatcgcgttcctattggtgggtacaaccctggtcatgcatctctggagtgctaaattactcctgcatgcgctgccgccgatggagaacgtgagctgcgcgaccgtcttccgctcccgcgtctcatgtgcacttcctctcaccttcgatgcctactcgctatcaatcatctgggccgttaatgacatgatcacggcttctacacgtcgtggctgtgcctggcgacgataatgcgtcttgttaatgcccgcactctggaattacaagatttttggggtatcgacatcccaccgtatgcaattctgtctcatacctggggcctagatgaggcgtccttcgatgactgggggaatcggatcgtcgcatcgcacaaaagtggctttcagaagattcaaaatgcagctgaattgacacgattatttgaactagattacctttgggtagatacagtgtgcattgacaagaagagcagtacagagttgtctgaggccatcaacagcatgttcgactggtactcaaaggccgcctggtgtctagtctttttgagtgacgtgactctgtccgaaaccaaaacagttgcttcggagaagcgatctggcggctacacctttaagtgtttgaaagaggcctcatggttcacacgaggttggacattgcaagagctccttgctccgatacatcttgtctttgtatcatggttctcgaccgtatcgcattacagtgactgggagtcagtctaacgtgcaacaggtatctcaaaactggcacacaatcggcatcttgcggaaagtctctttccgaaaattagaatttacagatgaatggctcgaacagagactgcgaaaatccagagcccagattctggaaatggagacggatcttgtgaaagacatatcaaagataacaggcataacagagtcgaatctattcactcatgggagccacactgatgagagtatcgcagtgaaaatgcactgggcatcaaatcgacgaacaacaagagtcgaagatatggcgtactgtttgatgggaatattccggattaatatgccgcttttgtatggagaaggcagagcagcctttaagagactgcaagaagaaatcatcaaaacgtcaacggatcagtcaatttttgcttgggacgatgttggagagaatgtggatcacgagggcatggatgtcagcgtactggcaccatggccgagcgcgttcaccaataaacacatcgtacgctgtaagagccttaatcgcgcccccagtgctttagtctatacattcacaaattttgggttgttcctccagcttccattgctgtccaatttgaagaaggatctttacgtcgccattttggactgtacagacagtcgttctcctaatgaggatgactccctcatttgccggttgggtatccctttgcaaaagtcggcagacgaggatgagacatacaggcgcatagtctcttctccctatcagatttcaatgtcaaagcaatgcgtacctccagctcagcgactcaacattcctagaacaagaggagctcttccatcagtaccttgccctatatgtcaactcaagttgggggaggagaaaacttacgtacttcttctcctcgtctcagctgcggagtcgagagtgtcgatagatccctctagacccacgagtcatcagtttgtttgtcaccagtgccacaggctgcgattctctgagtcggttcctcttcctgactacaaggaatgttcgcttccattactagtcgatcaggaaggcggtgcagataaaatctccctcgtaactcagatcaggttcggcacccaccataactccctacgctgtcactttagcgtgaccaaacagagaccgcgtcttcaattaacccgacgcacaaagcacgatttagaatatgtcgcggtagcgggtcaaggaggtcttgggacttgtagacagctagaccatcgagaggtaccgatcctcgtcagccttcaagccgtttcgcagagaccaaagctacattcgatgccgaccacatcgatcttgcaagataaggactcagtactaggcgtggagcgttgtacaaagaagcacagagaaaacaacgctcatcgtccaggactagccaacgactcgcgacgggagctagtttattctaaagggctcggaaaattcgttaaggttgatgcgagttggtcgtatgatacttcccctccagtccagacgaaggcaacgtagagaccctcaacctagaaaggcacataacaggaattggctgtagggagttgtgtcgctagcctgcgctgatcagtaataagcaatttttaggaaataatgactgttagaattgaatacaatatgcgagcatcggagagaagtttagaagttctaagtcggaccttctccgcgcttaatctctacactacctgcgactcatacatagtccagtttatataatgatacgacctgttttcggtaaatcttgagctcatgcagcgaagtgttaaaacatggattgggggcgcagtcgatgcagctcagcccaccctggcgttcagctgagctgcgcaaaaagcacccgctggccgcccatcaaatataaagtggcctgcttgtgcgtgattttctatggtaatcatcaagctgatagagtggagactactaggaaaccttgtccaccgctacagatctcaacctcacaacattcaagatgcgtatttgggtgctgatcggtccgcctcaggccgacagcaccagtcgtagaattgaactcgaggttgacagcttcgacactgttggcagcgttaaggacaagattttcgacaaggcaggtataccggtgcggaaccaactaataatctggggtggcaagggactggaagacatgcaggcgttggcgtcttataatgtccgtcacgatagcacgcttaacgttgttcgcaggcgaccacgttcttcgccgccagattcatctgcggctccaatcaattacccatccgagattcttctccccacagacgaggaggccgccagtgtcctcgaagaatggcatcagcttgctgaaaagggaaactttgacgcag

SEQ ID NO: 22580 - DNA, 456 bp, Muscodor strobelii
  misc_feature: SGI cDNA ID NO. 567669
  misc_feature: Encodes the peptide sequence at SEQ ID NO 22581
atggtcgccgcctatactgctccatcaccctacctcgagctgtatcctatccctgtgagagcgttcgtcggtggcaagtttgtggacagcagtgccaacgagaaacacactcttatatctgccgtcaacgatgctgtcgtgactcgagagttgcaatggtcgaatgcagaagacgtagaccgtgccgtcgaagcagcagagaagggatttaaggtctggaaagcttggagtgacactgcccgaagagatgcacttgtcaaatacgccagcatcattcgggagaacagcgagcggctacactggctcgaggctatacttgtcggaaaagatgcaggattctttaatctagagattgacatggcagcggaattgtttacgtactatggcaacataatcgacaagttgaacagcgacgttctcatctcgacaagcgatagtctccgagcaagtctctaa

SEQ ID NO: 22581 - protein, 151 aa, Muscodor strobelii
  misc_feature: SGI Peptide ID NO. 567669
  misc_feature (27)..(140): Pfam Id: PF00171 Pfam Desc: Aldehyde dehydrogenase family
  misc_feature (2)..(151): NCBI GI: 115387076 Blast Desc: ATEG_07393 [Aspergillus terreus NIH2624] gi|114191077|gb|EAU32777.1| ATEG_07393 [Aspergillus terreus NIH2624]
  misc_feature (2)..(138): NCBI GI: 256732225 Blast Desc: NECHADRAFT_80606 [Nectria haematococca mpVI 77-13-4]
  misc_feature (17)..(138): NCBI GI: 169613480 Blast Desc: SNOG_09871 [Phaeosphaeria nodorum SN15] gi|160702733|gb|EAT83136.2| SNOG_09871 [Phaeosphaeria nodorum SN15]
  misc_feature (50)..(130): NCBI GI: 145609023 Blast Desc: MGG_13331 [Magnaporthe grisea 70-15] gi|145016482|gb|EDK00912.1| MGG_13331 [Magnaporthe grisea 70-15]
  misc_feature (20)..(147): NCBI GI: 71279196 Blast Desc: aldehyde dehydrogenase family protein [Colwellia psychrerythraea 34H] gi|71144936|gb|AAZ25409.1| aldehyde dehydrogenase family protein [Colwellia psychrerythraea 34H]
  misc_feature (17)..(138): NCBI GI: 189208560 Blast Desc: aldehyde dehydrogenase X, mitochondrial precursor [Pyrenophora tritici-repentis Pt-1C-BFP] gi|187976706|gb|EDU43332.1| aldehyde dehydrogenase X, precursor
  misc_feature (22)..(147): NCBI GI: 209964754 Blast Desc: gamma-glutamyl-gamma-aminobutyraldehyde dehydrogenase [Rhodospirillum centenum SW] gi|209958220|gb|ACI98856.1| gamma-glutamyl-gamma-aminobutyraldehyde dehydrogenase centenum
  misc_feature (6)..(140): NCBI GI: 239867350 Blast Desc: Aldehyde dehydrogenase, [Perkinsus marinus ATCC 50983]
  misc_feature (20)..(145): NCBI GI: 48431273 Blast Desc: cytosolic aldehyde dehydrogenase [Saussurea medusa]
  misc_feature (6)..(140): NCBI GI: 239904453 Blast Desc: Aldehyde dehydrogenase, [Perkinsus marinus ATCC 50983]
MVAAYTAPSPYLELYPIPVRAFVGGKFVDSSANEKHTLISAVNDAVVTRELQWSNAEDVDRAVEAAEKGFKVWKAWSDTARRDALVKYASIIRENSERLHWLEAILVGKDAGFFNLEIDMAAELFTYYGNIIDKLNSDVLISTSDSLRASL

SEQ ID NO: 22582 - DNA, 2596 bp, Muscodor strobelii
  misc_feature: SGI EST ID NO. CUFF.53293.0
  misc_feature: Variant of the nucleotide sequence at SEQ ID NO 22580
agacgtagaccgtgccgtcgaagcagcagagaagggatttaaggtctggaaagcttggagtgacactgcccgaagagatgcacttgtcaaatacgccagcatcattcgggagaacagcgagcggctacactggctcgaggctatacttgtcggaaaagatgcaggattctttaatctagagattgacatggcagcggaattgtttacgttatacagtctatcaaccgttcggaatctgtgctgggattgttccattcaacggtcctctaattacaatggcgatgaaagctgcccccgctattgcctgtggtaataccatagtcatcaagacgagcgaaatgaaccccctctcaacactattcatggcatctctagcgaacttagcaggcatccccccgggcgtaatcaattgcctcacaggtggtgctcaagcaggcgaagcaattgcgtcgcacatgaagatccgcaaaatcagcttcacgggcagcaccaatatcggccgacaaatccaaatcgccgcagcaaagtcgaacttgaagagcgtcactctcgaacttggaggaaagtctcctgtcatcgttttcgcggatgccaatatcgagcaagcggtgtcatctatcatgtcattcgtgatgatgaacggccaaggatgcgcattagggacacgagtatacgtgcatacgtccattgcagaagaagtcatcgccaaaatcaagactcttgccgaagcccacgctagtacactgggtagcgatccattgtctaaggctactatctcttcccctctgtataaccaccgccaaaaagagactgtgctttcgtacatcgaatctggaaagaccgaagctactctcgttactggaggatcggcgtgtggcgtcaagggctgctatgtccagccaacggtgttcgttgacccccggccagacgcgcggcttctcaaagaggagatatttggcccagtccttgtcatatcgcgatttgactctgaagaggaagttgtgcagaaggccaacgatactgaatatggtcttgctgctatggtctggacgagggatattgcgtgtgctatgcgtatgtctcgtgttttggacgctggtcatgttcagatcaatggtcttgggttcccaaatgccagagtgcccatgaccggttggaaacagagcggacagagtatagaaaatggcaaggaagggatgttggattgggtacagaacaaagtcgtcacactcggtacttctgtgtgatctgatactatgactatactgatctatcagacatctttgcagctactgaacatgcgcgactgtacgcaagcaatgtctagcctgctgggacatcaacataggaaatgagacgcgtcaagcacaagcagcgtgtcccgttgagtgagtgttgtcttgttatcttcaagccgcgcttatagctcaattcgactaattagacgcgttgtgatcaaatatctgtgccccgcgttatccgatcttttatacggttcaaaatgatgttgccatgttcatgaaaagcgccgggaatttacggatatatgtaccactctcgccatctcatcacgacgagtatccatcaacttcagaatctgtatgccagaaccacaatgtcgcattggatcaaatacccatctcatttgcaaggggaaacaagaccttacccaattccgtcgtcacgtcacttatcccaactatagtaagagtaccacagtcccatgtcaagttcttggccgcgtgctgtagcttaatggccttaaccgcttgccataatagtggcaccgaaagccttcaggccattcgcaacctcctcgccaggagcctcgacatcttttgacttgctctttttctttttcttctccttcttcgtctttttagcagattcttcaacaacaggctctgcaacaacgggctctgcaacagcaagctcctctgcaagcttctctgcaagtttctcagcaacacgctccgcagcaacagattcgttaacagcaggctcttcagtcacaagtcgctcagactcagggagtaggtcagtagcaagctggctgacttcttgctgccgcggccgggcccatccccacgaggaggtaccggatgcggggatagctgaatcttcggcttccatgacttctgtcgctactggtgcttcgtctgtgtctgtatgccatgtccttggctcttcttccgtagattgagcggtactttcaagaactccatgggatggagcgcttgaatcgtctaccaggagcacaggcgatagcgcactcagcaataagtcaccgagtggccaagggtcatttgaggttttcacagcagtctgttggttcagatttacacttgacgatctcttggatgctggtcggaacaggtcttcagcccaagtgtccttgtatcgcagatccaagttttccttttgcaagagaccgaagatctggttcggcttaaactggctagcgagcttctgaatctcgccctgtgccagcttttctaaatctgcaagattatacttgcgagccgcgttgaaaacgcgcgcggcgatggcgagctcatcagtaaaatcgtcctcaggagagtctccttgtgattgt

SEQ ID NO: 22583 - DNA, 1479 bp, Muscodor strobelii
  misc_feature: SGI cDNA ID NO. 567670
  misc_feature: Encodes the peptide sequence at SEQ ID NO 22584
atggtcgccgcctatactgctccatcaccctacctcgagctgtatcctatccctgtgagagcgttcgtcggtggcaagtttgtggacagcagtgccaacgagaaacacactcttatatctgccgtcaacgatgctgtcgtgactcgagagttgcaatggtcgaatgcagaagacgtagaccgtgccgtcgaagcagcagagaagggatttaaggtctggaaagcttggagtgacactgcccgaagagatgcacttgtcaaatacgccagcatcattcgggagaacagcgagcggctacactggctcgaggctatacttgtcggaaaagatgcaggattctttaatctagagattgacatggcagcggaattgtttacgtactatggcaacataatcgacaagttgaacagcgacgttctcatctcgacaagcgatagtctccgagcaatctatcaaccgttcggaatctgtgctgggattgttccattcaacggtcctctaattacaatggcgatgaaagctgcccccgctattgcctgtggtaataccatagtcatcaagacgagcgaaatgaaccccctctcaacactattcatggcatctctagcgaacttagcaggcatccccccgggcgtaatcaattgcctcacaggtggtgctcaagcaggcgaagcaattgcgtcgcacatgaagatccgcaaaatcagcttcacgggcagcaccaatatcggccgacaaatccaaatcgccgcagcaaagtcgaacttgaagagcgtcactctcgaacttggaggaaagtctcctgtcatcgttttcgcggatgccaatatcgagcaagcggtgtcatctatcatgtcattcgtgatgatgaacggccaaggatgcgcattagggacacgagtatacgtgcatacgtccattgcagaagaagtcatcgccaaaatcaagactcttgccgaagcccacgctagtacactgggtagcgatccattgtctaaggctactatctcttcccctctgtataaccaccgccaaaaagagactgtgctttcgtacatcgaatctggaaagaccgaagctactctcgttactggaggatcggcgtgtggcgtcaagggctgctatgtccagccaacggtgttcgttgacccccggccagacgcgcggcttctcaaagaggagatatttggcccagtccttgtcatatcgcgatttgactctgaagaggaagttgtgcagaaggccaacgatactgaatatggtcttgctgctatggtctggacgagggatattgcgtgtgctatgcgtatgtctcgtgttttggacgctggtcatgttcagatcaatggtcttgggttcccaaatgccagagtgcccatgaccggttggaaacagagcggacagagtatagaaaatggcaaggaagggatgttggattgggtacagaacaaagtcgtcacactcggtacttctgtgtga

SEQ ID NO: 22584 - protein, 492 aa, Muscodor strobelii
  misc_feature: SGI Peptide ID NO. 567670
  misc_feature (27)..(486): Pfam Id: PF00171 Pfam Desc: Aldehyde dehydrogenase family
  misc_feature (2)..(488): NCBI GI: 115387076 Blast Desc: ATEG_07393 [Aspergillus terreus NIH2624] gi|114191077|gb|EAU32777.1| ATEG_07393 [Aspergillus terreus NIH2624]
  misc_feature (2)..(488): NCBI GI: 256732225 Blast Desc: NECHADRAFT_80606 [Nectria haematococca mpVI 77-13-4]
  misc_feature (16)..(486): NCBI GI: 242820069 Blast Desc: aldehyde dehydrogenase, [Talaromyces stipitatus ATCC 10500] gi|218713907|gb|EED13331.1| aldehyde dehydrogenase, [Talaromyces stipitatus ATCC 10500]
  misc_feature (9)..(484): NCBI GI: 46139039 Blast Desc: FG11034.1 [Gibberella zeae PH-1]
  misc_feature (20)..(488): NCBI GI: 212538877 Blast Desc: aldehyde dehydrogenase, [Penicillium marneffei ATCC 18224] gi|210069336|gb|EEA23427.1| aldehyde dehydrogenase, [Penicillium marneffei ATCC 18224]
  misc_feature (17)..(488): NCBI GI: 189208560 Blast Desc: aldehyde dehydrogenase X, mitochondrial precursor [Pyrenophora tritici-repentis Pt-1C-BFP] gi|187976706|gb|EDU43332.1| aldehyde dehydrogenase X, precursor
  misc_feature (9)..(488): NCBI GI: 256723549 Blast Desc: [Nectria haematococca mpVI 77-13-4]
  misc_feature (15)..(488): NCBI GI: 212539926 Blast Desc: aldehyde dehydrogenase, [Penicillium marneffei ATCC 18224] gi|210067417|gb|EEA21509.1| aldehyde dehydrogenase, [Penicillium marneffei ATCC 18224]
  misc_feature (9)..(488): NCBI GI: 171690144 Blast Desc: protein product [Podospora anserina] gi|170945020|emb|CAP71131.1| protein product [Podospora anserina]
  misc_feature (9)..(488): NCBI GI: 256734672 Blast Desc: [Nectria haematococca mpVI 77-13-4]
  misc_feature (9)..(488): SWISSPROT Homolog: EC 1.2.1.3 Aldehyde dehydrogenase (NAD(+))
  misc_feature: Useful for introducing or modulating the production of volatile compounds
  misc_feature: Useful for fungicidal and/or biocontrol applications
MVAAYTAPSPYLELYPIPVRAFVGGKFVDSSANEKHTLISAVNDAVVTRELQWSNAEDVDRAVEAAEKGFKVWKAWSDTARRDALVKYASIIRENSERLHWLEAILVGKDAGFFNLEIDMAAELFTYYGNIIDKLNSDVLISTSDSLRAIYQPFGICAGIVPFNGPLITMAMKAAPAIACGNTIVIKTSEMNPLSTLFMASLANLAGIPPGVINCLTGGAQAGEAIASHMKIRKISFTGSTNIGRQIQIAAAKSNLKSVTLELGGKSPVIVFADANIEQAVSSIMSFVMMNGQGCALGTRVYVHTSIAEEVIAKIKTLAEAHASTLGSDPLSKATISSPLYNHRQKETVLSYIESGKTEATLVTGGSACGVKGCYVQPTVFVDPRPDARLLKEEIFGPVLVISRFDSEEEVVQKANDTEYGLAAMVWTRDIACAMRMSRVLDAGHVQINGLGFPNARVPMTGWKQSGQSIENGKEGMLDWVQNKVVTLGTSV

SEQ ID NO: 22585 - DNA, 2596 bp, Muscodor strobelii; identical to SEQ ID NO: 22582
  misc_feature: SGI EST ID NO. CUFF.53293.0
  misc_feature: Variant of the nucleotide sequence at SEQ ID NO 22583

SEQ ID NO: 22586 - DNA, 1467 bp, Muscodor strobelii
  misc_feature: SGI cDNA ID NO. 567671
  misc_feature: Encodes the peptide sequence at SEQ ID NO 22587
atggtcgccgcctatactgctccatcaccctacctcgagctgtatcctatccctgtgagagcgttcgtcggtggcaagtttgtggacagcagtgccaacgagaaacacactcttatatctgccgtcaacgatgctgtcgtgactcgagagttgcaatggtcgaatgcagaagacgtagaccgtgccgtcgaagcagcagagaagggatttaaggtctggaaagcttggagtgacactgcccgaagagatgcacttgtcaaatacgccagcatcattcgggagaacagcgagcggctacactggctcgaggctatacttgtcggaaaagatgcaggattctttaatctagagattgacatggcagcggaattgtttacgtactatggcaacataatcgacaagttgaacagcgacgttctcatctcgacaagcgatatctatcaaccgttcggaatctgtgctgggattgttccattcaacggtcctctaattacaatggcgatgaaagctgcccccgctattgcctgtggtaataccatagtcatcaagacgagcgaaatgaaccccctctcaacactattcatggcatctctagcgaacttagcaggcatccccccgggcgtaatcaattgcctcacaggtggtgctcaagcaggcgaagcaattgcgtcgcacatgaagatccgcaaaatcagcttcacgggcagcaccaatatcggccgacaaatccaaatcgccgcagcaaagtcgaacttgaagagcgtcactctcgaacttggaggaaagtctcctgtcatcgttttcgcggatgccaatatcgagcaagcggtgtcatctatcatgtcattcgtgatgatgaacggccaaggatgcgcattagggacacgagtatacgtgcatacgtccattgcagaagaagtcatcgccaaaatcaagactcttgccgaagcccacgctagtacactgggtagcgatccattgtctaaggctactatctcttcccctctgtataaccaccgccaaaaagagactgtgctttcgtacatcgaatctggaaagaccgaagctactctcgttactggaggatcggcgtgtggcgtcaagggctgctatgtccagccaacggtgttcgttgacccccggccagacgcgcggcttctcaaagaggagatatttggcccagtccttgtcatatcgcgatttgactctgaagaggaagttgtgcagaaggccaacgatactgaatatggtcttgctgctatggtctggacgagggatattgcgtgtgctatgcgtatgtctcgtgttttggacgctggtcatgttcagatcaatggtcttgggttcccaaatgccagagtgcccatgaccggttggaaacagagcggacagagtatagaaaatggcaaggaagggatgttggattgggtacagaacaaagtcgtcacactcggtacttctgtgtga

SEQ ID NO: 22587 - protein, 488 aa, Muscodor strobelii
  misc_feature: SGI Peptide ID NO. 567671
  misc_feature (27)..(482): Pfam Id: PF00171 Pfam Desc: Aldehyde dehydrogenase family
  misc_feature (2)..(484): NCBI GI: 115387076 Blast Desc: ATEG_07393 [Aspergillus terreus NIH2624] gi|114191077|gb|EAU32777.1| ATEG_07393 [Aspergillus terreus NIH2624]
  misc_feature (2)..(484): NCBI GI: 256732225 Blast Desc: NECHADRAFT_80606 [Nectria haematococca mpVI 77-13-4]
  misc_feature (16)..(482): NCBI GI: 242820069 Blast Desc: aldehyde dehydrogenase, [Talaromyces stipitatus ATCC 10500] gi|218713907|gb|EED13331.1| aldehyde dehydrogenase, [Talaromyces stipitatus ATCC 10500]
  misc_feature (9)..(480): NCBI GI: 46139039 Blast Desc: FG11034.1 [Gibberella zeae PH-1]
  misc_feature (20)..(484): NCBI GI: 212538877 Blast Desc: aldehyde dehydrogenase, [Penicillium marneffei ATCC 18224] gi|210069336|gb|EEA23427.1| aldehyde dehydrogenase, [Penicillium marneffei ATCC 18224]
  misc_feature (9)..(484): NCBI GI: 256723549 Blast Desc: [Nectria haematococca mpVI 77-13-4]
  misc_feature (9)..(484): NCBI GI: 171690144 Blast Desc: protein product [Podospora anserina] gi|170945020|emb|CAP71131.1| protein product [Podospora anserina]
  misc_feature (9)..(484): NCBI GI: 256734672 Blast Desc: [Nectria haematococca mpVI 77-13-4]
  misc_feature (9)..(487): NCBI GI: 256734835 Blast Desc: [Nectria haematococca mpVI 77-13-4]
  misc_feature (17)..(484): NCBI GI: 189208560 Blast Desc: aldehyde dehydrogenase X, mitochondrial precursor [Pyrenophora tritici-repentis Pt-1C-BFP] gi|187976706|gb|EDU43332.1| aldehyde dehydrogenase X, precursor
  misc_feature (9)..(484): SWISSPROT Homolog: EC 1.2.1.3 Aldehyde dehydrogenase (NAD(+))
  misc_feature: Useful for introducing or modulating the production of volatile compounds
  misc_feature: Useful for fungicidal and/or biocontrol applications
MVAAYTAPSPYLELYPIPVRAFVGGKFVDSSANEKHTLISAVNDAVVTRELQWSNAEDVDRAVEAAEKGFKVWKAWSDTARRDALVKYASIIRENSERLHWLEAILVGKDAGFFNLEIDMAAELFTYYGNIIDKLNSDVLISTSDIYQPFGICAGIVPFNGPLITMAMKAAPAIACGNTIVIKTSEMNPLSTLFMASLANLAGIPPGVINCLTGGAQAGEAIASHMKIRKISFTGSTNIGRQIQIAAAKSNLKSVTLELGGKSPVIVFADANIEQAVSSIMSFVMMNGQGCALGTRVYVHTSIAEEVIAKIKTLAEAHASTLGSDPLSKATISSPLYNHRQKETVLSYIESGKTEATLVTGGSACGVKGCYVQPTVFVDPRPDARLLKEEIFGPVLVISRFDSEEEVVQKANDTEYGLAAMVWTRDIACAMRMSRVLDAGHVQINGLGFPNARVPMTGWKQSGQSIENGKEGMLDWVQNKVVTLGTSV

SEQ ID NO: 22588 - DNA, 2596 bp, Muscodor strobelii; identical to SEQ ID NO: 22582
  misc_feature: SGI EST ID NO. CUFF.53293.0
  misc_feature: Variant of the nucleotide sequence at SEQ ID NO 22586

SEQ ID NO: 22589 - DNA, 1452 bp, Muscodor strobelii
  misc_feature: SGI cDNA ID NO. 567672
  misc_feature: Encodes the peptide sequence at SEQ ID NO 22590
atggtcgccgcctatactgctccatcaccctacctcgagctgtatcctatccctgtgagagcgttcgtcggtggcaagtttgtggacagcagtgccaacgagaaacacactcttatatctgccgtcaacgatgctgtcgtgactcgagagttgcaatggtcgaatgcagaagacgtagaccgtgccgtcgaagcagcagagaagggatttaaggtctggaaagcttggagtgacactgcccgaagagatgcacttgtcaaatacgccagcatcattcgggagaacagcgagcggctacactggctcgaggctatacttgtcggaaaagatgcaggattctttaatctagagattgacatggcagcggaattgtttacgtactatggcaacataatcgacaagttgaacagcgactatacagtctatcaaccgttcggaatctgtgctgggattgttccattcaacggtcctctaattacaatggcgatgaaagctgcccccgctattgcctgtggtaataccatagtcatcaagacgagcgaaatgaaccccctctcaacactattcatggcatctctagcgaacttagcaggcatccccccgggcgtaatcaattgcctcacaggtggtgctcaagcaggcgaagcaattgcgtcgcacatgaagatccgcaaaatcagcttcacgggcagcaccaatatcggccgacaaatccaaatcgccgcagcaaagtcgaacttgaagagcgtcactctcgaacttggaggaaagtctcctgtcatcgttttcgcggatgccaatatcgagcaagcggtgtcatctatcatgtcattcgtgatgatgaacggccaaggatgcgcattagggacacgagtatacgtgcatacgtccattgcagaagaagtcatcgccaaaatcaagactcttgccgaagcccacgctagtacactgggtagcgatccattgtctaaggctactatctcttcccctctgtataaccaccgccaaaaagagactgtgctttcgtacatcgaatctggaaagaccgaagctactctcgttactggaggatcggcgtgtggcgtcaagggctgctatgtccagccaacggtgttcgttgacccccggccagacgcgcggcttctcaaagaggagatatttggcccagtccttgtcatatcgcgatttgactctgaagaggaagttgtgcagaaggccaacgatactgaatatggtcttgctgctatggtctggacgagggatattgcgtgtgctatgcgtatgtctcgtgttttggacgctggtcatgttcagatcaatggtcttgggttcccaaatgccagagtgcccatgaccggttggaaacagagcggacagagtatagaaaatggcaaggaagggatgttggattgggtacagaacaaagtcgtcacactcggtacttctgtgtga

SEQ ID NO: 22590 - protein, 483 aa, Muscodor strobelii
  misc_feature: SGI Peptide ID NO. 567672
  misc_feature (27)..(477): Pfam Id: PF00171 Pfam Desc: Aldehyde dehydrogenase family
  misc_feature (2)..(479): NCBI GI: 115387076 Blast Desc: ATEG_07393 [Aspergillus terreus NIH2624] gi|114191077|gb|EAU32777.1| ATEG_07393 [Aspergillus terreus NIH2624]
  misc_feature (2)..(479): NCBI GI: 256732225 Blast Desc: NECHADRAFT_80606 [Nectria haematococca mpVI 77-13-4]
  misc_feature (16)..(477): NCBI GI: 242820069 Blast Desc: aldehyde dehydrogenase, [Talaromyces stipitatus ATCC 10500] gi|218713907|gb|EED13331.1| aldehyde dehydrogenase, [Talaromyces stipitatus ATCC 10500]
  misc_feature (9)..(475): NCBI GI: 46139039 Blast Desc: FG11034.1 [Gibberella zeae PH-1]
  misc_feature (20)..(479): NCBI GI: 212538877 Blast Desc: aldehyde dehydrogenase, [Penicillium marneffei ATCC 18224] gi|210069336|gb|EEA23427.1| aldehyde dehydrogenase, [Penicillium marneffei ATCC 18224]
  misc_feature (9)..(479): NCBI GI: 256723549 Blast Desc: [Nectria haematococca mpVI 77-13-4]
  misc_feature (9)..(479): NCBI GI: 171690144 Blast Desc: protein product [Podospora anserina] gi|170945020|emb|CAP71131.1| protein product [Podospora anserina]
  misc_feature (9)..(477): NCBI GI: 256734672 Blast Desc: [Nectria haematococca mpVI 77-13-4]
  misc_feature (15)..(479): NCBI GI: 212539926 Blast Desc: aldehyde dehydrogenase, [Penicillium marneffei ATCC 18224] gi|210067417|gb|EEA21509.1| aldehyde dehydrogenase, [Penicillium marneffei ATCC 18224]
  misc_feature (9)..(482): NCBI GI: 256734835 Blast Desc: [Nectria haematococca mpVI 77-13-4]
  misc_feature (9)..(479): SWISSPROT Homolog: EC 1.2.1.3 Aldehyde dehydrogenase (NAD(+))
  misc_feature: Useful for introducing or modulating the production of volatile compounds
  misc_feature: Useful for fungicidal and/or biocontrol applications
MVAAYTAPSPYLELYPIPVRAFVGGKFVDSSANEKHTLISAVNDAVVTRELQWSNAEDVDRAVEAAEKGFKVWKAWSDTARRDALVKYASIIRENSERLHWLEAILVGKDAGFFNLEIDMAAELFTYYGNIIDKLNSDYTVYQPFGICAGIVPFNGPLITMAMKAAPAIACGNTIVIKTSEMNPLSTLFMASLANLAGIPPGVINCLTGGAQAGEAIASHMKIRKISFTGSTNIGRQIQIAAAKSNLKSVTLELGGKSPVIVFADANIEQAVSSIMSFVMMNGQGCALGTRVYVHTSIAEEVIAKIKTLAEAHASTLGSDPLSKATISSPLYNHRQKETVLSYIESGKTEATLVTGGSACGVKGCYVQPTVFVDPRPDARLLKEEIFGPVLVISRFDSEEEVVQKANDTEYGLAAMVWTRDIACAMRMSRVLDAGHVQINGLGFPNARVPMTGWKQSGQSIENGKEGMLDWVQNKVVTLGTSV

SEQ ID NO: 22591 - DNA, 2596 bp, Muscodor strobelii; identical to SEQ ID NO: 22582
  misc_feature: SGI EST ID NO. CUFF.53293.0
  misc_feature: Variant of the nucleotide sequence at SEQ ID NO 22589

SEQ ID NO: 22592 - DNA, 1086 bp, Muscodor strobelii
  misc_feature: SGI cDNA ID NO. 567673
  misc_feature: Encodes the peptide sequence at SEQ ID NO 22593
atggcaatggcggagttcaatcatgcaggcgcggtacccgcgaatgaagcaagcccacagccaaggaaatctccatttgctagctcaagcttcaaagtctacttcagcgataagccagctctcacagtgcctcgaactctgattgatcagaatccacagctgcttcgggataacaacccgattatggaggtcacttcaggcgttggccatgtcatcttttactttctcctcacaggctcgtatcagtgtctacaatcacaaggagactctcctgaggacgattttactgatgagctcgccatcgccgcgcgcgttttcaacgcggctcgcaagtataatcttgcagatttagaaaagctggcacagggcgagattcagaagctcgctagccagtttaagccgaaccagatcttcggtctcttgcaaaaggaaaacttggatctgcgatacaaggacacttgggctgaagacctgttccgaccagcatccaagagatcgtcaagtgtaaatctgaaccaacagactgctgtgaaaacctcaaatgacccttggccactcggtgacttattgctgagtgcgctatcgcctgtgctcctggtagacgattcaagcgctccatcccatggagttcttgaaagtaccgctcaatctacggaagaagagccaaggacatggcatacagacacagacgaagcaccagtagcgacagaagtcatggaagccgaagattcagctatccccgcatccggtacctcctcgtggggatgggcccggccgcggcagcaagaagtcagccagcttgctactgacctactccctgagtctgagcgacttgtgactgaagagcctgctgttaacgaatctgttgctgcggagcgtgttgctgagaaacttgcagagaagcttgcagaggagcttgctgttgcagagcccgttgttgcagagcctgttgttgaagaatctgctaaaaagacgaagaaggagaagaaaaagaaaaagagcaagtcaaaagatgtcgaggctcctggcgaggaggttgcgaatggcctgaaggctttcggtgccactattatggcaagcggttaa

SEQ ID NO: 22593 - protein, 361 aa, Muscodor strobelii
  misc_feature: SGI Peptide ID NO. 567673
  misc_feature (20)..(148): NCBI GI: 256721432 Blast Desc: NECHADRAFT_102248 [Nectria haematococca mpVI 77-13-4]
  misc_feature (40)..(191): NCBI GI: 39944570 Blast Desc: MGG_04296 [Magnaporthe grisea 70-15] gi|145015034|gb|EDJ99602.1| MGG_04296 [Magnaporthe grisea 70-15]
  misc_feature (20)..(165): NCBI GI: 256721623 Blast Desc: NECHADRAFT_78553 [Nectria haematococca mpVI 77-13-4]
  misc_feature (11)..(160): NCBI GI: 171676414 Blast Desc: protein product [Podospora anserina] gi|170936273|emb|CAP60932.1| protein product [Podospora anserina]
  misc_feature (20)..(137): NCBI GI: 256723062 Blast Desc: [Nectria haematococca mpVI 77-13-4]
  misc_feature (16)..(129): NCBI GI: 256723061 Blast Desc: NECHADRAFT_100746 [Nectria haematococca mpVI 77-13-4]
  misc_feature (20)..(129): NCBI GI: 146324081 Blast Desc: AFUA_5G06880 [Aspergillus fumigatus Af293] gi|129558078|gb|EAL91907.2| AFUA_5G06880 [Aspergillus fumigatus Af293]
  misc_feature (20)..(210): NCBI GI: 116200898 Blast Desc: CHGG_10994 [Chaetomium globosum CBS 148.51] gi|88175708|gb|EAQ83176.1| CHGG_10994 [Chaetomium globosum CBS 148.51]
  misc_feature (20)..(154): NCBI GI: 121704483 Blast Desc: ACLA_078270 [Aspergillus clavatus NRRL 1] gi|119398650|gb|EAW09079.1| ACLA_078270 [Aspergillus clavatus NRRL 1]
  misc_feature (44)..(129): NCBI GI: 159126322 Blast Desc: AFUB_054440 [Aspergillus fumigatus A1163]
MAMAEFNHAGAVPANEASPQPRKSPFASSSFKVYFSDKPALTVPRTLIDQNPQLLRDNNPIMEVTSGVGHVIFYFLLTGSYQCLQSQGDSPEDDFTDELAIAARVFNAARKYNLADLEKLAQGEIQKLASQFKPNQIFGLLQKENLDLRYKDTWAEDLFRPASKRSSSVNLNQQTAVKTSNDPWPLGDLLLSALSPVLLVDDSSAPSHGVLESTAQSTEEEPRTWHTDTDEAPVATEVMEAEDSAIPASGTSSWGWARPRQQEVSQLATDLLPESERLVTEEPAVNESVAAERVAEKLAEKLAEELAVAEPVVAEPVVEESAKKTKKEKKKKKSKSKDVEAPGEEVANGLKAFGATIMASG

SEQ ID NO: 22594 - DNA, 348 bp, Muscodor strobelii
  misc_feature: SGI EST ID NO. CUFF.53315.1
  misc_feature: Variant of the nucleotide sequence at SEQ ID NO 22592
atgtgagatgcgttgtgggttgtgtgtagacctgaatcgatatgtgcaaaatgcaaagttgggcatcaagcctcgcagtgttgtcaagaattcgcgttgtttatatcacgatatatggtgtcgcgtgtcctccttcttgagtttcttcattcgtcagtgccctgagtctcatccaagactttgcagcactgagtgatcaaccaccgagcttttgcgagaatatcgagtaaatggcaatggcggagttcaatcatgcaggcgcggtacccgcgaatgaagcaagcccacagccaaggaaatctccatttgctagctcaagcttcaaagtctacttcagcgataagccag

SEQ ID NO: 22595 - DNA, 1653 bp, Muscodor strobelii
  misc_feature: SGI cDNA ID NO. 567674
  misc_feature: Reduced expression when VOC is produced
  misc_feature: Encodes the peptide sequence at SEQ ID NO 22596
atgcatggcggtattgcgacatgcggctctggagcgggcggaagaatctaccaatgcaagggtaatggtcttgcggccaaggtctttcatgatggcaagaaagctatagatcttccgggctacatgggtattggccatcttcgatatccgactgccggaacctcttcgagcgccgaaagccaaccattctacattaacagtccttacggaatatgctttgcccacaatggcaacttgatcaatgcgccggaactgcgtcggtatcttgacgaggaggcccaccgtcacgtcaacaccgactccgacagcgagttgatgttgaacatattcgccaatgctctcaacgagactggcaaagctcgtgtaaatgtggacgatatcttccttgccctcaagactacctatacaagatgccagggagcctgggctgctactgcggtatgtggccttgagattgatgtggtgtgcatgatcgctggttttggcatcttggcattccgtgatgccaatggtatccggccccttctcatcggcacgcggccttccgctaccctccctggtgagacagattacatggtcgcctctgagagtatagcacttcgacagctcggattcgagaagtacagggatttgctgccaggcgaagctgtcttcatccaaaagggaggcaaagcagagttcaaacaggtcgtcgagaggaaaagctataccccagacattttcgaatacgtctacttcgccagacccgactcagtatcagattcgatcagcattcacaagagcagacaaaacatgggactgaagctcgcagacaagatcgtcaagactctcacgccggaggaacttaaatcgatcgatgtcataatacccgtaccagaaactgccaatacagcagcagctgtggttgctgagagactcagaatcccgctttccaatgcatgggtgaagaaccgatatgtattcaggactttcatcttacccgggcaaaagatcagacaaaagagcgtccgccgtaaactctccgccattcagactgagttcgagggaagaacagtgtgtctagtcgatgactccatcgtccgcggcacgacgtcaaaagagattgtcacgatggccagggaagccggcgctgtgaaagtctattttgccagttgcgccccaccgctagtctttccacatatttatggtattgacttggcctcaccgcaagaaatgatagcacatgaaaagacacggcaagacatcgcccagctgatcggagccgacgacctcatctaccaagacctagacgaccttaaagccgcctgcgcagaagccgcaccaaaaggcggcgtaagcgagttcgaagtcggtgtcttctgcggtgcttaccagacgactgtgccagacggctacttcgagcatctaaacgagctccgcggcacaaagcggaagattggcgtagtggatggcaattcgaccgcgacggaaacaggtaacagcggtcccgtgatgttgtccaatccgagcagcacaccgctagaagttcccgcccgaccaatttctacaaccacaaatggtagcggtacacctgtgccaccgcgaagtcctaatcctgagaaccgtgaagatatcagtatccacaacctggctacggagaatgaaggacggtaa

SEQ ID NO: 22596 - protein, 550 aa, Muscodor strobelii
  misc_feature: SGI Peptide ID NO. 567674
  misc_feature (8)..(197): Pfam Id: PF00310 Pfam Desc: Glutamine amidotransferases class-II
  misc_feature (254)..(407): Pfam Id: PF00156 Pfam Desc: Phosphoribosyl transferase domain
  misc_feature (15)..(197): Pfam Id: PF00310 Pfam Desc: Glutamine amidotransferases class-II
  misc_feature (268)..(407): Pfam Id: PF00156 Pfam Desc: Phosphoribosyl transferase domain
  misc_feature (4)..(545): NCBI GI: 164426476 Blast Desc: amidophosphoribosyltransferase [Neurospora crassa OR74A] gi|21622360|emb|CAD36991.1| amidophosphoribosyltransferase [Neurospora crassa] gi|157071350|gb|EAA31604.2| [Neurospora
  misc_feature (2)..(550): NCBI GI: 171693805 Blast Desc: protein product [Podospora anserina] gi|170946851|emb|CAP73655.1| protein product [Podospora anserina]
  misc_feature (4)..(549): NCBI GI: 156055896 Blast Desc: SS1G_05300 [Sclerotinia sclerotiorum 1980] gi|154703084|gb|EDO02823.1| SS1G_05300 [Sclerotinia sclerotiorum 1980]
  misc_feature (4)..(546): NCBI GI: 154302366 Blast Desc: BC1G_09967 [Botryotinia fuckeliana B05.10] gi|150855455|gb|EDN30647.1| BC1G_09967 [Botryotinia fuckeliana B05.10]
  misc_feature (3)..(546): NCBI GI: 145614540 Blast Desc: amidophosphoribosyltransferase, [Magnaporthe grisea 70-15] gi|145021445|gb|EDK05574.1| amidophosphoribosyltransferase, [Magnaporthe grisea 70-15]
  misc_feature (4)..(544): NCBI GI: 259480218 Blast Desc: TPA: amidophosphoribosyltransferase (Eurofung) [Aspergillus nidulans FGSC A4]
  misc_feature (4)..(543): NCBI GI: 258570501 Blast Desc: amidophosphoribosyltransferase [Uncinocarpus reesii 1704] gi|237904324|gb|EEP78725.1| amidophosphoribosyltransferase [Uncinocarpus reesii 1704]
  misc_feature (4)..(543): NCBI GI: 169777165 Blast Desc: [Aspergillus oryzae RIB40] gi|238494282|ref|XP_002378377.1| amidophosphoribosyltransferase [Aspergillus flavus NRRL3357] gi|83771785|dbj|BAE61915.1| protein
  misc_feature (4)..(546): NCBI GI: 242823106 Blast Desc: amidophosphoribosyltransferase [Talaromyces stipitatus ATCC 10500] gi|218712946|gb|EED12371.1| amidophosphoribosyltransferase [Talaromyces stipitatus ATCC
  misc_feature (4)..(543): NCBI GI: 240111790 Blast Desc: amidophosphoribosyltransferase, [Coccidioides posadasii C735 delta SOWgp]
  misc_feature (15)..(473): SWISSPROT Homolog: EC 2.4.2.14 Amidophosphoribosyltransferase
  misc_feature: Useful for introducing or modulating the production of volatile compounds
MHGGIATCGSGAGGRIYQCKGNGLAAKVFHDGKKAIDLPGYMGIGHLRYPTAGTSSSAESQPFYINSPYGICFAHNGNLINAPELRRYLDEEAHRHVNTDSDSELMLNIFANALNETGKARVNVDDIFLALKTTYTRCQGAWAATAVCGLEIDVVCMIAGFGILAFRDANGIRPLLIGTRPSATLPGETDYMVASESIALRQLGFEKYRDLLPGEAVFIQKGGKAEFKQVVERKSYTPDIFEYVYFARPDSVSDSISIHKSRQNMGLKLADKIVKTLTPEELKSIDVIIPVPETANTAAAVVAERLRIPLSNAWVKNRYVFRTFILPGQKIRQKSVRRKLSAIQTEFEGRTVCLVDDSIVRGTTSKEIVTMAREAGAVKVYFASCAPPLVFPHIYGIDLASPQEMIAHEKTRQDIAQLIGADDLIYQDLDDLKAACAEAAPKGGVSEFEVGVFCGAYQTTVPDGYFEHLNELRGTKRKIGVVDGNSTATETGNSGPVMLSNPSSTPLEVPARPISTTTNGSGTPVPPRSPNPENREDISIHNLATENEGR

SEQ ID NO: 22597 - DNA, 2086 bp, Muscodor strobelii
  misc_feature: SGI EST ID NO. CUFF.53096.0
  misc_feature: Variant of the nucleotide sequence at SEQ ID NO 22595
gcgacatgcggctctggagcgggcggaagaatctaccaatgcaagggtaatggtcttgcggccaaggtctttcatgatggcaagaaagctatagatcttccgggctacatgggtattggccatcttcgatatccgactgccggaacctcttcgagcgccgaaagccaaccattctacattaacagtccttacggaatatgctttgcccacaatggcaacttgatcaatgcgccggaactgcgtcggtatcttgacgaggaggcccaccgtcacgtcaacaccgactccgacagcgagttgatgttgaacatattcgccaatgctctcaacgagactggcaaagctcgtgtaaatgtggacgatatcttccttgccctcaagactacctatacaagatgccagggagcctgggctgctactgcgtatgtgatcatcttgctagaatataaatatacttgacaagtaatatgcgaggcattggactaacatgttttatgttactagcatgatcgctggttttggcatcttggcattccgtgatgccaatggtatccggccccttctcatcggcacgcggccttccgctaccctccctggtgagacagattacatggtcgcctctgagagtatagcacttcgacagctcggattcgagaagtacagggatttgctgccaggcgaagctgtcttcatccaaaagggaggcaaagcagagttcaaacaggtcgtcgagaggaaaagctataccccagacattttcgaatacgtctacttcgccagacccgactcagtatcagattcgatcagcattcacaagagcagacaaaacatgggactgaagctcgcagacaagatcgtcaagactctcacgccggaggaacttaaatcgatcgatgtcataatacccgtaccagaaactgccaatacagcagcagctgtggttgctgagagactcagaatcccgctttccaatgcatgggtgaagaaccgatatgtattcaggactttcatcttacccgggcaaaagatcagacaaaagagcgtccgccgtaaactctccgccattcagactgagttcgagggaagaacagtgtgtctagtcgatgactccatcgtccgcggcacgacgtcaaaagagattgtcacgatggccagggaagccggcgctgtgaaagtctattttgccagttgcgccccaccgctagtctttccacatatttatggtattgacttggcctcaccgcaagaaatgatagcacatgaaaagacacggcaagacatcgcccagctgatcggagccgacgacctcatctaccaagacctagacgaccttaaagccgcctgcgcagaagccgcaccaaaaggcggcgtaagcgagttcgaagtcggtgtcttctgcggtgcttaccagacgactgtgccagacggctacttcgagcatctaaacgagctccgcggcacaaagcggaagattggcgtagtggatggcaattcgaccgcgacggaaacaggtaacagcggtcccgtgatgttgtccaatccgagcagcacaccgctagaagttcccgcccgaccaatttctacaaccacaaatggtagcggtacacctgtgccaccgcgaagtcctaatcctgagaaccgtgaagatatcagtatccacaacctggctacggagaatgaaggacggtaatgagatcaaggtaggggaatccatcgagagatgtccaacgtaatcggtcggttcctttccagtgggaacaaaacaggctattctcgcaagattttttgctttgagttcggacgaaaaactccatatcctagagcatattggctccttctattgtttcacagtccaagtttggcccccaaggtatagattcgtgcatagaggcgagaagaaactagacaaaatcaagctgtcattatctgttcatcctgtatccttaatagtgccaccgtgtactactgcgtcgtcatcgcttcgggaggggctggtgtgcgactgcgggccgtggttatgacatgaacacgatcgcacaaacacaggtctcgtgacttgaatgcttcgtatgccgcagagctcgac

SEQ ID NO: 22598 - DNA, 1269 bp, Muscodor strobelii
  misc_feature: SGI cDNA ID NO. 567675
  misc_feature: Reduced expression when VOC is produced
  misc_feature: Encodes the peptide sequence at SEQ ID NO 22599
atggcttcgcgatcaggcaatcgccgtcgtcattacgacgatccgtacacatttgacgacccgtacctgcgctcaccacctacggacaaagatgcgcccacctatgaatacgtaggcactgatgaaccagtaacaccacgctggggatctccagcccagcaaccataccctcccccaccaacagaccaagaacgtcggcgcagacccagtccgcacaggcgctactctcgaaccactagtcctcccagacgtcctcgacaagacagaacgttaacaccaccgcctgaaccatcgcggcattcttcgtcgccgcgtcatgatgatcgagaccgccatcgcgacagcagaaaggcaccgaaggacaaacgtcatcatcgttaccaggacatcacgcaaaatccaaacctccaacgttacggcaagaaaggtttaacttttctgggcgaagctgcggccgcccttgctgctgcacaagctggagagccggccccggaaccagcccgagcccgatccagcgaccacgaagacatgcgtgatcggcgcagtagacatagacgtcggtacacgccgagcccctctccttcaccgccccgcagacggcattccacaagacatggggatcgcgaccgagatagagactacgatcgggacagagatttagaccgaaatagagaccgagatcgtcgtcggcacagcgtggcaaacgcatcgccgccaccactgagccgggacccggattcctacattgcttctcgcaaagtttcacaacgagacagaggtagagatggcgacagagaaagggcaagagaccgcagtcaagatagagaccgcggacgcgacagaagccacagaagatctcgccattccccctctccatcaccaccccgatcatcacgctcccgtcgacgcgggcgatccactccttcagatgggttccgggaaagcttgcgaggccagatgggcccgcctgccaacgtcaacacccagagatggcagatggctgcccgcgctgctcttgaagcaggcgggctcactgctttccgcctgcgcaaggagccgggcaagtggactggtgacaaagccgccaaagtcgccactgccgctctgggcgctgccgccatcgatgcctttgttgatcaggaccctcgacagtctcgctctggcggtcgcggcatgaagggtgtggctgagagtgccctgagcgggtttatcgcatcgcagatcatggggcataaggggtctactaagagaggtaaatctcgatattaa

SEQ ID NO: 22599 - protein, 422 aa, Muscodor strobelii
  misc_feature: SGI Peptide ID NO. 567675
  misc_feature (329)..(409): NCBI GI: 121701951 Blast Desc: conserved [Aspergillus clavatus NRRL 1] gi|119397383|gb|EAW07814.1| conserved [Aspergillus clavatus NRRL 1]
  misc_feature (268)..(409): NCBI GI: 115491343 Blast Desc: [Aspergillus terreus NIH2624] gi|114197159|gb|EAU38859.1| [Aspergillus terreus NIH2624]
  misc_feature (329)..(409): NCBI GI: 238498542 Blast Desc: conserved [Aspergillus flavus NRRL3357] gi|220693780|gb|EED50125.1| conserved [Aspergillus flavus NRRL3357]
  misc_feature (331)..(406): NCBI GI: 39944320 Blast Desc: [Magnaporthe grisea 70-15] gi|145014907|gb|EDJ99475.1| [Magnaporthe grisea 70-15]
  misc_feature (333)..(409): NCBI GI: 145612958 Blast Desc: [Magnaporthe grisea 70-15] gi|145020042|gb|EDK04270.1| [Magnaporthe grisea 70-15]
  misc_feature (328)..(408): NCBI GI: 189189734 Blast Desc: [Pyrenophora tritici-repentis Pt-1C-BFP] gi|187972812|gb|EDU40311.1| [Pyrenophora tritici-repentis Pt-1C-BFP]
  misc_feature (329)..(409): NCBI GI: 169781734 Blast Desc: [Aspergillus oryzae RIB40] gi|83774072|dbj|BAE64197.1| protein product [Aspergillus oryzae]
  misc_feature (347)..(421): NCBI GI: 119495944 Blast Desc: NFIA_015430 [Neosartorya fischeri NRRL 181] gi|119412909|gb|EAW22850.1| conserved [Neosartorya fischeri NRRL 181]
  misc_feature (254)..(409): NCBI GI: 145239361 Blast Desc: An08g02090 [Aspergillus niger] gi|134076835|emb|CAK45256.1| [Aspergillus niger]
  misc_feature (331)..(420): NCBI GI: 238843756 Blast Desc: conserved [Microsporum canis CBS 113480]
  misc_feature: Useful for introducing or modulating the production of volatile compounds
MASRSGNRRRHYDDPYTFDDPYLRSPPTDKDAPTYEYVGTDEPVTPRWGSPAQQPYPPPPTDQERRRRPSPHRRYSRTTSPPRRPRQDRTLTPPPEPSRHSSSPRHDDRDRHRDSRKAPKDKRHHRYQDITQNPNLQRYGKKGLTFLGEAAAALAAAQAGEPAPEPARARSSDHEDMRDRRSRHRRRYTPSPSPSPPRRRHSTRHGDRDRDRDYDRDRDLDRNRDRDRRRHSVANASPPPLSRDPDSYIASRKVSQRDRGRDGDRERARDRSQDRDRGRDRSHRRSRHSPSPSPPRSSRSRRRGRSTPSDGFRESLRGQMGPPANVNTQRWQMAARAALEAGGLTAFRLRKEPGKWTGDKAAKVATAALGAAAIDAFVDQDPRQSRSGGRGMKGVAESALSGFIASQIMGHKGSTKRGKSRY

SEQ ID NO: 22600 - DNA, 537 bp, Muscodor strobelii
  misc_feature: SGI cDNA ID NO. 567676
  misc_feature: Elevated expression when VOC is produced
  misc_feature: Encodes the peptide sequence at SEQ ID NO 22601
atgcgctttcaagatgtctacacccttgcccttgccggcttctccgccgcgacaacgtcttgtcagaccgggacgaccgcatgtgtcgacttcatcgaggaatgcggcattccgcctaccgcggttcttacatacggaggatgctacgaccaatgttctccaacgacctacaccgctccgccttgcccaacaccaacaataacaacgcctgtaaccctcatcacgacaactccatgcactttgacgggaacggtctgtgaagatcatttcgagacatgcggctcgccgacgccgacggctactctcacttacggcggctgccatgatgcctgccaacaggtcacttacagcccaccgccttgccctacggcgacttcgtcatgcacgttgaccggaacactctgcgaggatcactttgtgacttgcggcacgccaacacctacggctactttgacgtatggaggatgccatcctgcctgcgatcaaatcacttactctgcaccttcgtgccccacgcctactgtgacacccgcctaa

SEQ ID NO: 22601 - protein, 178 aa, Muscodor strobelii
  misc_feature: SGI Peptide ID NO. 567676
  misc_feature: Useful for introducing or modulating the production of volatile compounds
MRFQDVYTLALAGFSAATTSCQTGTTACVDFIEECGIPPTAVLTYGGCYDQCSPTTYTAPPCPTPTITTPVTLITTTPCTLTGTVCEDHFETCGSPTPTATLTYGGCHDACQQVTYSPPPCPTATSSCTLTGTLCEDHFVTCGTPTPTATLTYGGCHPACDQITYSAPSCPTPTVTPA

SEQ ID NO: 22602 - DNA, 1460 bp, Muscodor strobelii
  misc_feature: SGI EST ID NO. CUFF.53099.0
  misc_feature: Variant of the nucleotide sequence at SEQ ID NO 22600
ctcccttgacccaaacaaacaccttgcagacaggaaacatttccccgaaagtacggaaacactctagacgaaacaacaatactgtcataatgcgctttcaagatgtctacacccttgcccttgccggcttctccgccgcgacaacgtcttgtcagaccgggacgaccgcatgtgtcgacttcatcgaggaatgcggcattccgcctaccgcggttcttacatacggaggatgctacgaccaatgttctccaacgacctacaccgctccgccttgcccaacaccaacaataacaacgcctgtaaccctcatcacgacaactccatgcactttgacgggaacggtctgtgaagatcatttcgagacatgcggctcgccgacgccgacggctactctcacttacggcgggtgagtgctaagctaatgacaccgaaagaacgagaaactgacgtctcatagctgccatgatgcctgccaacaggtcacttacagcccaccgccttgccctacggcgacttcgtcatgcacgttgaccggaacactctgcgaggatcactttgtgacttgcggcacgccaacacctacggctactttgacgtatggaggatgccatcctgcctgcgatcaaatcacttactctgcaccttcgtgccccacgcctactgtgacacccgcctaatacctggcgaatgggagttgtgtggctggtaaatgccatgatggatcgggcctgagcgtgtctccctaaagtggcgtcgaaaagcacatgtcaagtagaagatgggaatatggatatctcgaagctttgacttgatcttggtttcattggtttctataaatgtcttggtatcataacgaagaaaaaagcagtatagacaagaatgagatcgggtctaccagcccgaacgacggcactccagtgcgcatcaagatgcttcgccttaaaccgtgtgcgtagatcctatatacaaaggaacaaggtagttttatcatatatgacttatgcgatgatcacagcagctagcccagccatcaagccgagagcaccaactccgttagaaacagcaccagcagtagggatgaatgtcgccgacgttgtggttatggacccagtcgggacgaatgtcgtcgagttcccaaccgggtagggtgtggtaatagcagccgatgaagtgggaatgacggatgtgggaagagcggaggaagatgtaacgccacaatcaccagcggtgactgtcacggtctcggcgggtgcggtttccgttactgtgatgtagcttgtttctgcgccggagctgccaggtaaaggagacgcgggataagagccatcagctgtggtggtagggagcgcagtgcctgtgggatacccattccccttcgcggagctgattgcagaagtggtacctgcggaacccgagtcggtacattgtgaagacgagaatgcatcggcaccctttgcaag

SEQ ID NO: 22603 - DNA, 975 bp, Muscodor strobelii
  misc_feature: SGI cDNA ID NO. 567677
  misc_feature: Encodes the peptide sequence at SEQ ID NO 22604
atgaagacatcaacgatcctctcaacactcgctctaggcttcacagcaacagcagaatttatagagccctacaagttcccgacgccagtaaagagggacctggaaactgtcacgtcagttgtagcacagatctccgatgctattacacagctggacacatccgttaaggcattcacggatgatgcaacacagatccagagtgacgccgataacctcttatcaacactcaaatccggggcgtcggagattgcggattcgggagcgctatcactcagtgatatcggcggattacagagcgtcgttacttcgctagagacagcaggcacatcgttgctcactgaccttgaggataagaaggatgccattgagcaggcgggtctttgtagctcattcgcgtcggctatcactggtatcgagacagaagtctcaagcttcatcgatagcgtcataaaggagctccctgagtcgatccagtctactgcaaagacattgactagctctcttaccgacgctcttgcaaagggtgccgatgcattctcgtcttcacaatgtaccgactcgggttccgcaggtaccacttctgcaatcagctccgcgaaggggaatgggtatcccacaggcactgcgctccctaccaccacagctgatggctcttatcccgcgtctcctttacctggcagctccggcgcagaaacaagctacatcacagtaacggaaaccgcacccgccgagaccgtgacagtcaccgctggtgattgtggcgttacatcttcctccgctcttcccacatccgtcattcccacttcatcggctgctattaccacaccctacccggttgggaactcgacgacattcgtcccgactgggtccataaccacaacgtcggcgacattcatccctactgctggtgctgtttctaacggagttggtgctctcggcttgatggctgggctagctgctgtgatcatcgcataa

SEQ ID NO: 22604 - protein, 324 aa, Muscodor strobelii
  misc_feature: SGI Peptide ID NO. 567677
  misc_feature (1)..(184): NCBI GI: 261357942 Blast Desc: cell wall protein [Verticillium albo-atrum VaMs.102]
  misc_feature (27)..(190): NCBI GI: 39960750 Blast Desc: MGG_09460 [Magnaporthe grisea 70-15] gi|145010953|gb|EDJ95609.1| MGG_09460 [Magnaporthe grisea 70-15]
  misc_feature (1)..(181): NCBI GI: 212543121 Blast Desc: PMAA_045380 [Penicillium marneffei ATCC 18224] gi|210066622|gb|EEA20715.1| PMAA_045380 [Penicillium marneffei ATCC 18224]
  misc_feature (1)..(191): NCBI GI: 169781436 Blast Desc: [Aspergillus oryzae RIB40] gi|238501292|ref|XP_002381880.1| conserved [Aspergillus flavus NRRL3357] gi|83773923|dbj|BAE64048.1| protein product oryzae]
  misc_feature (1)..(181): NCBI GI: 119638384 Blast Desc: Mp1p-like protein 1 [Penicillium marneffei]
  misc_feature (1)..(179): NCBI GI: 70989591 Blast Desc: cell wall galactomannoprotein Mp2/allergen F17-like [Aspergillus fumigatus Af293] gi|66847276|gb|EAL87607.1| cell wall galactomannoprotein Mp2/allergen F17-like [Aspergillus
  misc_feature (1)..(179): NCBI GI: 159129053 Blast Desc: cell wall galactomannoprotein Mp2/allergen F17-like [Aspergillus fumigatus A1163]
  misc_feature (1)..(179): NCBI GI: 38492189 Blast Desc: antigenic cell wall protein MP2 [Aspergillus fumigatus]
  misc_feature (1)..(180): NCBI GI: 145257266 Blast Desc: An04g03010 [Aspergillus niger] gi|134058581|emb|CAK44617.1| protein product [Aspergillus niger]
  misc_feature (1)..(179): NCBI GI: 119480223 Blast Desc: cell wall galactomannoprotein Mp2/allergen F17-like [Neosartorya fischeri NRRL 181] gi|119408294|gb|EAW18243.1| cell wall galactomannoprotein Mp2/allergen F17-like [Neosartorya NRRL
MKTSTILSTLALGFTATAEFIEPYKFPTPVKRDLETVTSVVAQISDAITQLDTSVKAFTDDATQIQSDADNLLSTLKSGASEIADSGALSLSDIGGLQSVVTSLETAGTSLLTDLEDKKDAIEQAGLCSSFASAITGIETEVSSFIDSVIKELPESIQSTAKTLTSSLTDALAKGADAFSSSQCTDSGSAGTTSAISSAKGNGYPTGTALPTTTADGSYPASPLPGSSGAETSYITVTETAPAETVTVTAGDCGVTSSSALPTSVIPTSSAAITTPYPVGNSTTFVPTGSITTTSATFIPTAGAVSNGVGALGLMAGLAAVIIA

SEQ ID NO: 22605 - DNA, 353 bp, Muscodor strobelii
  misc_feature: SGI EST ID NO. CUFF.53102.0
  misc_feature: Variant of the nucleotide sequence at SEQ ID NO 22603
gaatttatagagccctacaagttcccgacgccagtaaagagggacctggaaactgtcacgtcagttgtagcacagatctccgatgctattacacagctggacacatccgttaaggcattcacggatgatgcaacacagatccagagtgacgccgataacctcttatcaacactcaaatccggggcgtcggagattgcggattcgggagcgctatcactcagtgatatcggcggattacagagcgtcgttacttcgctagagacagcaggcacatcgttgctcactgaccttgaggataagaaggatgccattgagcaggcgggtctttgtagctcattcgcgtcggctatcac

SEQ ID NO: 22606 - DNA, 861 bp, Muscodor strobelii
  misc_feature: SGI cDNA ID NO. 567678
  misc_feature: Encodes the peptide sequence at SEQ ID NO 22607
atggcatccgttgatacctcgctccctgctaagcctacgggcgctgccgctggtctggcagaggcccatgcagcggaccacccactgaaactgtatggtgggtggttttgcccatttgttcaacgcagctggatcgtgcttcatgagaagagcattccgcatcagtatgttgaaataaacccatatcacaaagcgcctgagtttctggcacttaacccacgaggcctcgtgccgacactcgctgtgcccacaagctcctcaaacgcaggacagcgcaagggacagaaaccgttatacgagagtacggtcatttgcgagtatctggacgaggcttatggtgacgaaaacgcacttttaccacgaggcaatgacccacaacaagtttatgaacgcgcaagatgcaggctgtggattgatcatattgggggcaaaattgtgcccggcttctacaagctgctacaacacacaccagagaaagaatacagcattgaagaagcgcgtgacaatctgctgactcacatcaaaacctttgtgaaagagatggacgaggatggcccctggtttctgggcgagcgattcggcctggtcgatgtcatgctggcgccttgggcgaaacgattattcctcattgaccactataaacctggaggtgtcgggatcccaacagaaggaaatgggggcgaagatgaagaaacatggaaaagatggagggcatggttcgatgcaatcaccacgaggcaaagcgttttggatacttggagcgcggacgagatgtacatccaggcttacaagcgatatgcagaggacacgacgcagtcagaagttgcacgagcgacaaggaaaagccagaagctgccgtaa

SEQ ID NO: 22607 - protein, 286 aa, Muscodor strobelii
  misc_feature: SGI Peptide ID NO. 567678
  misc_feature (27)..(110): Pfam Id: PF02798 Pfam Desc: Glutathione S-transferase, N-terminal domain
  misc_feature (2)..(286): NCBI GI: 164428421 Blast Desc: NCU00549 [Neurospora crassa OR74A] gi|157072142|gb|EAA35474.2| conserved [Neurospora crassa OR74A]
  misc_feature (1)..(286): NCBI GI: 256725994 Blast Desc: NECHADRAFT_43145 [Nectria haematococca mpVI 77-13-4]
  misc_feature (1)..(286): NCBI GI: 46116740 Blast Desc: FG04212.1 [Gibberella zeae PH-1]
  misc_feature (1)..(286): NCBI GI: 261357199 Blast Desc: glutathione transferase omega-1 [Verticillium albo-atrum VaMs.102]
  misc_feature (1)..(286): NCBI GI: 39940910 Blast Desc: MGG_05367 [Magnaporthe grisea 70-15] gi|145021996|gb|EDK06016.1| MGG_05367 [Magnaporthe grisea 70-15]
  misc_feature (3)..(286): NCBI GI: 171684109 Blast Desc: protein product [Podospora anserina] gi|170942015|emb|CAP67667.1| protein product [Podospora anserina]
  misc_feature (1)..(286): NCBI GI: 238489971 Blast Desc: glutathione-S-transferase theta, GST, [Aspergillus flavus NRRL3357] gi|220698611|gb|EED54951.1| glutathione-S-transferase theta, GST, [Aspergillus flavus
  misc_feature (5)..(286): NCBI GI: 189200599 Blast Desc: glutathione transferase omega-1 [Pyrenophora tritici-repentis Pt-1C-BFP] gi|187983735|gb|EDU49223.1| glutathione transferase omega-1 [Pyrenophora tritici-repentis
  misc_feature (2)..(286): NCBI GI: 255948688 Blast Desc: Pc22g11650 [Penicillium chrysogenum Wisconsin 54-1255] gi|211592128|emb|CAP98453.1| Pc22g11650 [Penicillium chrysogenum Wisconsin 54-1255]
  misc_feature (1)..(286): NCBI GI: 119496379 Blast Desc: glutathione S-transferase, [Neosartorya fischeri NRRL 181] gi|119413125|gb|EAW23066.1| glutathione S-transferase, [Neosartorya fischeri NRRL 181]
  misc_feature (29)..(207): SWISSPROT Homolog: EC 2.5.1.18 Glutathione transferase
MASVDTSLPAKPTGAAAGLAEAHAADHPLKLYGGWFCPFVQRSWIVLHEKSIPHQYVEINPYHKAPEFLALNPRGLVPTLAVPTSSSNAGQRKGQKPLYESTVICEYLDEAYGDENALLPRGNDPQQVYERARCRLWIDHIGGKIVPGFYKLLQHTPEKEYSIEEARDNLLTHIKTFVKEMDEDGPWFLGERFGLVDVMLAPWAKRLFLIDHYKPGGVGIPTEGNGGEDEETWKRWRAWFDAITTRQSVLDTWSADEMYIQAYKRYAEDTTQSEVARATRKSQKLP

SEQ ID NO: 22608 - DNA, 1410 bp, Muscodor strobelii
  misc_feature: SGI EST ID NO. CUFF.53111.0
  misc_feature: Variant of the nucleotide sequence at SEQ ID NO 22606
ttgacgagagaatggagtgccttcctccaaaagttgcgatgcagtcatggaggtttcgtgataggtggggtttggttgggacgttgatgtcatcattcagctttactatccggtatcaatcatcacgtatccaatatccgcttctgtctcccgaatatccgttgagttccgttgaacttgcaaaactcgaaattgcttgcaaacaaattcattctaataaagaaacatcctgatggcatccgttgatacctcgctccctgctaagcctacgggcgctgccgctggtctggcagaggcccatgcagcggaccacccactgaaactgtatggtgggtggttttgcccatttgttcaacgcagctggatcgtgcttcatgagaagagcattccgcatcagtatgttgaaataaacccatatcacaaagcgcctgagtttctggcacttaacccacgaggcctcgtgccgacactcgctgtgcccacaagctcctcaaacgcaggacagcgcaagggacagaaaccgttatacgagagtacggtcatttgcgagtatctggacgaggcttatggtgacgaaaacgcacttttaccacgaggcaatgacccacaacaagtttatgaacgcgcaagatgcaggctgtggattgatcatattgggggcaaaattgtgcccggcttctacaagctgctacaacacacaccagagaaagaatacagcattgaagaagcgcgtgacaatctgctgactcacatcaaaacctttgtgaaagagatggacgaggatggcccctggtttctgggcgagcgattcggcctggtcgatgtcatgctggcgccttgggcgaaacgattattcctcattgaccactataaacctggaggtgtcgggatcccaacagaaggaaatgggggcgaagatgaagaaacatggaaaagatggagggcatggttcgatgcaatcaccacgaggcaaagcgttttggatacttggagcgcggacgagatgtacatccaggcttacaagcgatatgcagaggacacgacgcagtcagaagttgcacgagcgacaaggaaaagccagaagctgccgtaatagaaccgaagattgaacgaatatctgcagggaacataggagcacatggtctcattgaacatgtttctgtggttaagtcgttgctcttagaaagacaagtcgggtggttgagccgcctgcgatgacgactctgtcaagggctccctcatgcagaggcagtgcatacaagtgaagtgactagagaaacccgaatctcaacgaccgcgtccttgcttccactgatataactgttaatttggacccttgaatctggatactacatgtaattgcccaaatttcacccatatcaagtgtctctagcatagcatgtttaatat

SEQ ID NO: 22609 - DNA, 321 bp, Muscodor strobelii
  misc_feature: SGI cDNA ID NO. 567679
  misc_feature: Encodes the peptide sequence at SEQ ID NO 22610
atggacgaggatggcccctggtttctgggcgagcgattcggcctggtcgatgtcatgctggcgccttgggcgaaacgattattcctcattgaccactataaacctggaggtgtcgggatcccaacagaaggaaatgggggcgaagatgaagaaacatggaaaagatggagggcatggttcgatgcaatcaccacgaggcaaagcgttttggatacttggagcgcggacgagatgtacatccaggcttacaagcgatatgcagaggacacgacgcagtcagaagttgcacgagcgacaaggaaaagccagaagctgccgtaa

SEQ ID NO: 22610 - protein, 106 aa, Muscodor strobelii
  misc_feature: SGI Peptide ID NO. 567679
  misc_feature (5)..(106): NCBI GI: 164428421 Blast Desc: NCU00549 [Neurospora crassa OR74A] gi|157072142|gb|EAA35474.2| conserved [Neurospora crassa OR74A]
  misc_feature (1)..(106): NCBI GI: 261357199 Blast Desc: glutathione transferase omega-1 [Verticillium albo-atrum VaMs.102]
  misc_feature (1)..(106): NCBI GI: 256725994 Blast Desc: NECHADRAFT_43145 [Nectria haematococca mpVI 77-13-4]
  misc_feature (1)..(106): NCBI GI: 46116740 Blast Desc: FG04212.1 [Gibberella zeae PH-1]
  misc_feature (1)..(106): NCBI GI: 189200599 Blast Desc: glutathione transferase omega-1 [Pyrenophora tritici-repentis Pt-1C-BFP] gi|187983735|gb|EDU49223.1| glutathione transferase omega-1 [Pyrenophora tritici-repentis
  misc_feature (1)..(106): NCBI GI: 238489971 Blast Desc: glutathione-S-transferase theta, GST, [Aspergillus flavus NRRL3357] gi|220698611|gb|EED54951.1| glutathione-S-transferase theta, GST, [Aspergillus flavus
  misc_feature (1)..(106): NCBI GI: 119496379 Blast Desc: glutathione S-transferase, [Neosartorya fischeri NRRL 181] gi|119413125|gb|EAW23066.1| glutathione S-transferase, [Neosartorya fischeri NRRL 181]
  misc_feature (1)..(106): NCBI GI: 255948688 Blast Desc: Pc22g11650 [Penicillium chrysogenum Wisconsin 54-1255] gi|211592128|emb|CAP98453.1| Pc22g11650 [Penicillium chrysogenum Wisconsin 54-1255]
  misc_feature (1)..(103): NCBI GI: 238842877 Blast Desc: conserved [Microsporum canis CBS 113480]
  misc_feature (1)..(106): NCBI GI: 171684109 Blast Desc: protein product [Podospora anserina] gi|170942015|emb|CAP67667.1| protein product [Podospora anserina]
MDEDGPWFLGERFGLVDVMLAPWAKRLFLIDHYKPGGVGIPTEGNGGEDEETWKRWRAWFDAITTRQSVLDTWSADEMYIQAYKRYAEDTTQSEVARATRKSQKLP

SEQ ID NO: 22611 - DNA, 1410 bp, Muscodor strobelii; identical to SEQ ID NO: 22608
  misc_feature: SGI EST ID NO. CUFF.53111.0
  misc_feature: Variant of the nucleotide sequence at SEQ ID NO 22609

SEQ ID NO: 22612 - DNA, 3720 bp, Muscodor strobelii
  misc_feature: SGI cDNA ID NO. 567680
  misc_feature: Encodes the peptide sequence at SEQ ID NO 22613
atgagcgcgctagaagcgacgcgtacggcgaccacagatggggagagacctgaaagaccgtcggcacagcagagtgacacaaccaacacaacggaccatgaactcgagaagtcagtccgaagtagcgggtcacattggggagccggcccagggttcgaaaccgtcgatggtgacattaacggtcgaggctacaatgagacaactgttgatattataggtgtgccgtgcatcggcgcctcaccaattgacacatgggcgagagatccactgggtgaagggtacttcacactcccggcgccagtggagcttgagaagtatcctaccgtgaagaaactacctgcaagtagtgtattgacaccgacgatcgaccgcgtccttcccaaagccagtcatgtatggattcgacagggcattcgcaaggaggtgagcaaggctcgggtactactatatcgtcatcgcgagctagtggagggaatgacgatcgagcaagctgcagatgatcttcttgttgaggtttccaagatgcgagacggtctcaagagatcacgacctatcttcttcatttgtcatagtatcggggggttagtcgtgaaagcagcgcttgtgaaagctaagaaagacgaccaacttaaacaccttgtgttcgattgccatggcattacattctttggtaagaactcattcattgacctagctagtgaaatccggatctggacattttacgagactgtcgactcgcaactctccggcctaggtggttgtgattttgaccaggttcatttcagcgccccaatcacttctattaaatctgggcttgtgagaacaagagcagaacaggctctctcgctcgaaagtgatcatgctcactgtgcttcatttgggcctcacaaccttcaaatcatgcactcatatctatgcgacctgggaatcgcggttcataaagcggagagtctgagtttgcgattcgtgcacactccgctacaactgagtagcaaagtgagagtcgagatcattggcttttatgaggatcccgacggagagaaagatcaggatgtgagattatatgtctctaagcactatctagacgagtttcttgacaagggccctgaggaatgcttacgagaacgtctgagcaaagtatcaccaaaccctagaaaaggaactctgccaccctcacgccggcttgcctccagtccttccagagtatctggcgcgttgggaatctttcagggtctggggcagcgaattcttggctcatccccatctagggacaacccacgaagtccggatcgtgacctacccagtcatccttcacccgaaatagtggtaaccagtcacatgcctcgacgtccttcttttacaggggcggcaacggagccactggctagcacctcagcgagtccgtctcctatccgaagccgtggactgacggtccctgctctctcgacgccagggttccatgagccttctaagcggagggatagtagcagcgctgggagtgagggtagtcgctctagaccatcgtctgagccgatcatcccagatatttcgccaagaacaattgagcatacgacagatgagagtcagacagacgacgaggttattgatgatagagacccgaggtatgctaggaaaagtcgacgcgaccgtgtgagccgagcttcagcaatgcaggaccttacggccggcttctctcgaccaaatccaaatcgaagaaagttcatgtggatccatgttcctttcaacaacccccattgggtgaagggcatcttcgagaaactttctgaagttcagaatacaagctatgcgaaactccttaataacgattattgggctagcaaacatgtacaaggaagaaatgccaattttcatgtgtcgtacgtcaagccggggtgtgcatttgtacccgcggaagctaattctcctcgtcccacatcctccgatagacgtggacgaagtagtagtcccagcgtctctccagcgcacttctacctttacatcccctatctccacttcgacacttatataaatctcgttcggcgacgcaacatcatcaagcgccgattgaagcatggacgaacacgaccagtacctaaagatgtcgcggaactcgaatcgctagactctcgcgtcatctgggaatacattggacatgacccgccgcttaatgctcgaaggactctggaccagtatgggtatccgtcactccaggatacatgggctcgcgatgatgatcaaatgctctataagctcaccaaagaacgaattacggaaccatttatgcgcaagcgggacatgtaccacagaattgatgatttattagctgcgagctcgccagttagccgacttgtgtccgttgctgatggtttcatgaagtctgaaggcgcaaaccgcatggaagaaactgagacagagttagaagaggacattattgatggaaaagcattgatggttgatcaactctggttatgggctgtggatacaaccacgctcctaaccttcttcccgaagcgggagtcgcatccgaccgagggtcccctattccaacaagctgatttacgtaacagcatatacaatgagctgaacggtgatctcacagggcgttgtgacaatgccctggacttggcggcgtttgtcacacttcatgcagtcaccgtgctgatggaccgaacttctcacccagatctggaagtcttcagaatattcgaagaagctttaggcattctgactgagaggatgacatcctcacttaagcggtttcgaatgcagtcttataagaaaattcatgacgagtctgattccgacgaccccaacgataacagtgccaagaggatcaagaagcgtcatcaacgcgagcttgaacgagccgaacgagaaaaccgtgagaatacatcggcagtcttggaactacgtgatctcgaagacgagttacatacattactcagtctcttttcagagcagcaggaggctatcggaacaatgcaacggtgttacgagaaatccgagttgcaaaactttaccgagcgcggccgggcgtttttaatcgaggcgctgaaaagcttagatgattatagcaaacaagcacacgatatgttaaagcgtgtggatgctacccgcaaggattatgaaaagctgcaagagatggtccagaggcaagctcaggttgatgaggtccgttggagtcgtctccaaaccgagctagctagttctcaaaacctctctgtgatgatcttcaccacgttcacagtcattttcttgccgctgagcttcttcaccagtctttttggcatgaatacgcaagaatggggcggcccagatccaaataacttcattagcttgaaaacaattggcgccatatcgcttcccggttctgctttgctcataggcttcacactcattgctgcattcagcagtcgagttcaaggcgttttcaaactctgtttcagagctcttacgtcgactgtcgagcacaccaacaaacagctccttcgcctcgaaccgaaggcctcaaagcaggcaaaggaaaaacgaatgcacgttcgggaacttcgtgagaaacataaccagcgcaagagagagcgtggctacgacttttgggagactgtgcgagctgagcgccgtagtgactaccagattcctgattcgaataggaaaggggcggcaaggagacgtattgccctcggacgtgggacttgggggcggatgcttgacgatgactga

SEQ ID NO: 22613 - protein, 1239 aa, Muscodor strobelii
  misc_feature: SGI Peptide ID NO. 567680
  misc_feature (49)..(1218): NCBI GI: 171682100 Blast Desc: protein product [Podospora anserina] gi|170941009|emb|CAP66659.1| protein product [Podospora anserina]
  misc_feature (162)..(1229): NCBI GI: 116202171 Blast Desc: CHGG_08970 [Chaetomium globosum CBS 148.51] gi|88177488|gb|EAQ84956.1| CHGG_08970 [Chaetomium globosum CBS 148.51]
  misc_feature (571)..(1217): NCBI GI: 39979213 Blast Desc: [Neurospora crassa]
  misc_feature (571)..(1217): NCBI GI: 164426021 Blast Desc: NCU04767 [Neurospora crassa OR74A] gi|157071168|gb|EAA30980.2| [Neurospora crassa OR74A]
  misc_feature (650)..(1218): NCBI GI: 256727872 Blast Desc: NECHADRAFT_46452 [Nectria haematococca mpVI 77-13-4]
  misc_feature (133)..(1147): NCBI GI: 67539836 Blast Desc: AN6088.2 [Aspergillus nidulans FGSC A4] gi|40738873|gb|EAA58063.1| AN6088.2 [Aspergillus nidulans FGSC A4]
  misc_feature (650)..(1232): NCBI GI: 46130868 Blast Desc: FG08989.1 [Gibberella zeae PH-1]
  misc_feature (133)..(1147): NCBI GI: 259479725 Blast Desc: TPA: conserved [Aspergillus nidulans FGSC A4]
  misc_feature (138)..(1130): NCBI GI: 146322878 Blast Desc: conserved [Aspergillus fumigatus Af293] gi|129558505|gb|EBA27487.1| conserved [Aspergillus fumigatus Af293] gi|159129344|gb|EDP54458.1| conserved [Aspergillus A1163]
  misc_feature (564)..(1141): NCBI GI: 115443332 Blast Desc: conserved [Aspergillus terreus NIH2624] gi|114188342|gb|EAU30042.1| conserved [Aspergillus terreus NIH2624]
MSALEATRTATTDGERPERPSAQQSDTTNTTDHELEKSVRSSGSHWGAGPGFETVDGDINGRGYNETTVDIIGVPCIGASPIDTWARDPLGEGYFTLPAPVELEKYPTVKKLPASSVLTPTIDRVLPKASHVWIRQGIRKEVSKARVLLYRHRELVEGMTIEQAADDLLVEVSKMRDGLKRSRPIFFICHSIGGLVVKAALVKAKKDDQLKHLVFDCHGITFFGKNSFIDLASEIRIWTFYETVDSQLSGLGGCDFDQVHFSAPITSIKSGLVRTRAEQALSLESDHAHCASFGPHNLQIMHSYLCDLGIAVHKAESLSLRFVHTPLQLSSKVRVEIIGFYEDPDGEKDQDVRLYVSKHYLDEFLDKGPEECLRERLSKVSPNPRKGTLPPSRRLASSPSRVSGALGIFQGLGQRILGSSPSRDNPRSPDRDLPSHPSPEIVVTSHMPRRPSFTGAATEPLASTSASPSPIRSRGLTVPALSTPGFHEPSKRRDSSSAGSEGSRSRPSSEPIIPDISPRTIEHTTDESQTDDEVIDDRDPRYARKSRRDRVSRASAMQDLTAGFSRPNPNRRKFMWIHVPFNNPHWVKGIFEKLSEVQNTSYAKLLNNDYWASKHVQGRNANFHVSYVKPGCAFVPAEANSPRPTSSDRRGRSSSPSVSPAHFYLYIPYLHFDTYINLVRRRNIIKRRLKHGRTRPVPKDVAELESLDSRVIWEYIGHDPPLNARRTLDQYGYPSLQDTWARDDDQMLYKLTKERITEPFMRKRDMYHRIDDLLAASSPVSRLVSVADGFMKSEGANRMEETETELEEDIIDGKALMVDQLWLWAVDTTTLLTFFPKRESHPTEGPLFQQADLRNSIYNELNGDLTGRCDNALDLAAFVTLHAVTVLMDRTSHPDLEVFRIFEEALGILTERMTSSLKRFRMQSYKKIHDESDSDDPNDNSAKRIKKRHQRELERAERENRENTSAVLELRDLEDELHTLLSLFSEQQEAIGTMQRCYEKSELQNFTERGRAFLIEALKSLDDYSKQAHDMLKRVDATRKDYEKLQEMVQRQAQVDEVRWSRLQTELASSQNLSVMIFTTFTVIFLPLSFFTSLFGMNTQEWGGPDPNNFISLKTIGAISLPGSALLIGFTLIAAFSSRVQGVFKLCFRALTSTVEHTNKQLLRLEPKASKQAKEKRMHVRELREKHNQRKRERGYDFWETVRAERRSDYQIPDSNRKGAARRRIALGRGTWGRMLDDD

SEQ ID NO: 22614 - DNA, 4430 bp, Muscodor strobelii
  misc_feature: SGI EST ID NO. CUFF.53115.0
  misc_feature: Variant of the nucleotide sequence at SEQ ID NO 22612
gattcatctcgcatattgtacacgcaggctccgaggcaggctggcgcggtttgcgctgagtgtcagcattaggaatgtggttggtttctgtggcggaaaagggcagagtggcagccaccagatctcgatagcttgcatactcttaactcactggtcattactaggcatcagtacgccgtattcagccttatggcagactgggattcattgaaaaacggcggttcataaacaggggataccccaattccttacgaactctcccagctttcgctgtgtcttgcacgcgagcgaatttgcagtcgctttggcacttagatatgctcggcatgtgagtatattcacacgctcaagcgaacgatacaaatcggatgttgcgacgaagatgagcgcgctagaagcgacgcgtacggcgaccacagatggggagagacctgaaagaccgtcggcacagcagagtgacacaaccaacacaacggaccatgaactcgagaagtcagtccgaagtagcgggtcacattggggagccggcccagggttcgaaaccgtcgatggtgacattaacggtcgaggctacaatgagacaactgttgatattataggtgtgccgtgcatcggcgcctcaccaattgacacatgggcgagagatccactgggtgaagggtacttcacactcccggcgccagtggagcttgagaagtatcctaccgtgaagaaactacctgcaagtagtgtattgacaccgacgatcgaccgcgtccttcccaaagccagtcatgtatggattcgacagggcattcgcaaggaggtgagcaaggctcgggtactactatatcgtcatcgcgagctagtggagggaatgacgatcgagcaagctgcagatgatcttcttgttgaggtttccaagatgcgagacggtctcaagagatcacgacctatcttcttcatttgtcatagtatcggggggttagtcgtgaaagcagcgcttgtgaaagctaagaaagacgaccaacttaaacaccttgtgttcgattgccatggcattacattctttgcgacgccgcatcgtggctctagttatctctcgatgcctcatttgcgagagagcattgcacagctattatacctagagagaccgctcccatggtcaataactcaacagttgcgacttggacacaaaccattactgaagttgcacgacagattcattgacctagctagtgaaatccggatctggacattttacgagactgtcgactcgcaactctccggcctaggtggttgtgattttgaccaggttcatttcagcgccccaatcacttctattaaatctgggcttgtgagaacaagagcagaacaggctctctcgctcgaaagtgatcatgctcactgtgcttcatttgggcctcacaaccttcaaatcatgcactcatatctatgcgacctgggaatcgcggttcataaagcggagagtctgagtttgcgattcgtgcacactccgctacaactgagtagcaaagtgagagtcgagatcattggcttttatgaggatcccgacggagagaaagatcaggatgtgagattatatgtctctaagcactatctagacgagtttcttgacaagggccctgaggaatgcttacgagaacgtctgagcaaagtatcaccaaaccctagaaaaggaactctgccaccctcacgccggcttgcctccagtccttccagagtatctggcgcgttgggaatctttcagggtctggggcagcgaattcttggctcatccccatctagggacaacccacgaagtccggatcgtgacctacccagtcatccttcacccgaaatagtggtaaccagtcacatgcctcgacgtccttcttttacaggggcggcaacggagccactggctagcacctcagcgagtccgtctcctatccgaagccgtggactgacggtccctgctctctcgacgccagggttccatgagccttctaagcggagggatagtagcagcgctgggagtgagggtagtcgctctagaccatcgtctgagccgatcatcccagatatttcgccaagaacaattgagcatacgacagatgagagtcagacagacgacgaggttattgatgatagagacccgaggtatgctaggaaaagtcgacgcgaccgtgtgagccgagcttcagcaatgcaggaccttacggccggcttctctcgaccaaatccaaatcgaagaaagttcatgtggatccatgttcctttcaacaacccccattgggtgaagggcatcttcgagaaactttctgaagttcagaatacaagctatgcgaaactccttaataacgattattgggctagcaaacatgtacaaggaagaaatgccaattttcatgtgtcgtacgtcaagccggggtgtgcatttgtacccgcggaagctaattctcctcgtcccacatcctccgatagacgtggacgaagtagtagtcccagcgtctctccagcgcacttctacctttacatcccctatctccacttcgacacttatataaatctcgttcggcgacgcaacatcatcaagcgccgattgaagcatggacgaacacgaccagtacctaaagatgtcgcggaactcgaatcgctagactctcgcgtcatctgggaatacattggacatgacccgccgcttaatgctcgaaggactctggaccagtatgggtatccgtcactccaggatacatgggctcgcgatgatgatcaaatgctctataagctcaccaaagaacgaattacggaaccatttatgcgcaagcgggacatgtaccacagaattgatgatttattagctgcgagctcgccagttagccgacttgtgtccgttgctgatggtttcatgaagtctgaaggcgcaaaccgcatggaagaaactgagacagagttagaagaggacattattgatggaaaagcattgatggttgatcaactctggttatgggctgtggatacaaccacgctcctaaccttcttcccgaagcgggagtcgcatccgaccgagggtcccctattccaacaagctgatttacgtaacagcatatacaatgagctgaacggtgatctcacagggcgttgtgacaatgccctggacttggcggcgtttgtcacacttcatgcagtcaccgtgctgatggaccgaacttctcacccagatctggaagtcttcagaatattcgaagaagctttaggcattctgactgagaggatgacatcctcacttaagcggtttcgaatgcagtcttataagaaaattcatgacgagtctgattccgacgaccccaacgataacagtgccaagaggatcaagaagcgtcatcaacgcgagcttgaacgagccgaacgagaaaaccgtgagaatacatcggcagtcttggaactacgtgatctcgaagacgagttacatacattactcagtctcttttcagagcagcaggaggctatcggaacaatgcaacggtgttacgagaaatccgagttgcaaaactttaccgagcgcggccgggcgtttttaatcgaggcgctgaaaagcttagatgattatagcaaacaagcacacgatatgttaaagcgtgtggatgctacccgcaaggattatgaaaagctgcaagagatggtccagaggcaagctcaggttgatgaggtccgttggagtcgtctccaaaccgagctagctagttctcaaaacctctctgtgatgatcttcaccacgttcacagtcattttcttgccgctgagcttcttcaccagtctttttggcatgaatacgcaagaatggggcggcccagatccaaataacttcattagcttgaaaacaattggcgccatatcgcgtatgttataacttaagacatgtttccaatgttgacgaggcagctgattgtgacagttcccggttctgctttgctcataggcttcacactcattgctgcattcagcagtcgagttcaaggcgttttcaaactctgtttcagagctcttacgtcgactgtcgagcacaccaacaaacagctccttcgcctcgaaccgaaggcctcaaagcaggcaaaggaaaaacgaatgcacgttcgggaacttcgtgagaaacataaccagcgcaagagagagcgtggctacgacttttgggagactgtgcgagctgagcgccgtagtgactaccagattcctgattcgaataggaaaggggcggcaaggagacgtattgccctcggacgtgggacttgggggcggatgcttgacgatgactgagcggtcaatcttgaacttgtgagaagcatcgtgtattggatacccagagataccccttatattgcagttgaatacacttaatatcaagaaagatcgatagatgattgatatagaagcctctaggagtattataa

SEQ ID NO: 22615 - DNA, 1191 bp, Muscodor strobelii
  misc_feature: SGI cDNA ID NO. 567681
  misc_feature: Encodes the peptide sequence at SEQ ID NO 22616
atgcagagcggattctcctcgtcggagctgccgctgactctgagagacgcagtccatgttacctgcaatctaggctttcgctatctgtggatagacgccctgtgcatcctgcaggatagttgggacgataagagtcgcgaactcaataacatgggccaggtgtacaagaacgccattgcaaccatcatcgcgggtgcctcgaccgcagcaggagaggggttcttgagacaccaatccaagacgaacccgacgtgcaagatgccgctcaccattccaaacggcaaatcgggctcggtgaccatatgccccctcaagatgggtgcatttaatgttctgccactatcttcccgcgcctggtgctttcaggagtatatcctttccagcaggcatttatacttcactgatcaagagctcgtttggcaatgccgaaccttgaagcatgctaccgtgacagtcggaagcgtggcctatcctgcaaaaacggatcgagtgccgttcggagtgttccacgcgacacagagcggtgatgctgctagcttcacagaaactcggcaaaaacaaacattctggagagacgtgctgactgactttaccagacgcgcaatgactagcgctgaggacagactgaacgcaatcacgggtgtgattaacgaactggcagtagcatggggagacgactgcatctttggcatatggaagagtcgcttcatcgaagagttggcatggtcagtgtcaggtggatccgacgatgcgctgctgggcccgaggtctagccgggcaccatcttggtcctgggcgtcgatgaactcaccagcacagatttcctcaggctggttggattcgtcatccgaggcacgactgctgtctctatcggaagacagacggcaagctgtcattcgtggtacagtgctgaattcgcgacagatttcgatcgatgtagatgatgatgggttccacgatagacaacaggagtggggaaccatagacatggatctggacgagtcgatcgacgtcccgaagagtcggttcttgtcgattggctgggatagtaatgaaaggattgttgtccttcttcaggacgttggaggaggacgccatgaaagaatcgggttggctactttcgaagatgaaagtgatggtataacagcgttatggtctggccaaagtccagaagaggtcatcctcatttga

SEQ ID NO: 22616 - protein, 396 aa, Muscodor strobelii
  misc_feature: SGI Peptide ID NO. 567681
  misc_feature (4)..(123): Pfam Id: PF06985 Pfam Desc: Heterokaryon incompatibility protein (HET)
  misc_feature (6)..(64): Pfam Id: PF06985 Pfam Desc: Heterokaryon incompatibility protein (HET)
  misc_feature (13)..(376): NCBI GI: 116195248 Blast Desc: CHGG_04222 [Chaetomium globosum CBS 148.51] gi|88180135|gb|EAQ87603.1| CHGG_04222 [Chaetomium globosum CBS 148.51]
  misc_feature (1)..(269): NCBI GI: 46137909 Blast Desc: FG10469.1 [Gibberella zeae PH-1]
  misc_feature (1)..(316): NCBI GI: 256728052 Blast Desc: NECHADRAFT_23862 [Nectria haematococca mpVI 77-13-4]
  misc_feature (3)..(292): NCBI GI: 256723935 Blast Desc: NECHADRAFT_78444 [Nectria haematococca mpVI 77-13-4]
  misc_feature (4)..(269): NCBI GI: 171686078 Blast Desc: protein product [Podospora anserina] gi|170943000|emb|CAP68653.1| protein product [Podospora anserina]
  misc_feature (8)..(276): NCBI GI: 256720853 Blast Desc: NECHADRAFT_85575 [Nectria haematococca mpVI 77-13-4]
  misc_feature (3)..(277): NCBI GI: 238585000 Blast Desc: MPER_09943 [Moniliophthora perniciosa FA553] gi|215454498|gb|EEB91665.1| MPER_09943 [Moniliophthora perniciosa FA553]
  misc_feature (2)..(269): NCBI GI: 115388139 Blast Desc: [Aspergillus terreus NIH2624] gi|114195659|gb|EAU37359.1| [Aspergillus terreus NIH2624]
  misc_feature (1)..(268): NCBI GI: 46117825 Blast Desc: FG04660.1 [Gibberella zeae PH-1]
  misc_feature (9)..(284): NCBI GI: 256724255 Blast Desc: NECHADRAFT_87557 [Nectria haematococca mpVI 77-13-4]
MQSGFSSSELPLTLRDAVHVTCNLGFRYLWIDALCILQDSWDDKSRELNNMGQVYKNAIATIIAGASTAAGEGFLRHQSKTNPTCKMPLTIPNGKSGSVTICPLKMGAFNVLPLSSRAWCFQEYILSSRHLYFTDQELVWQCRTLKHATVTVGSVAYPAKTDRVPFGVFHATQSGDAASFTETRQKQTFWRDVLTDFTRRAMTSAEDRLNAITGVINELAVAWGDDCIFGIWKSRFIEELAWSVSGGSDDALLGPRSSRAPSWSWASMNSPAQISSGWLDSSSEARLLSLSEDRRQAVIRGTVLNSRQISIDVDDDGFHDRQQEWGTIDMDLDESIDVPKSRFLSIGWDSNERIVVLLQDVGGGRHERIGLATFEDESDGITALWSGQSPEEVILI

SEQ ID NO: 22617 - DNA, 3447 bp, Muscodor strobelii
  misc_feature: SGI EST ID NO. CUFF.53142.0
  misc_feature: Variant of the nucleotide sequence at SEQ ID NO 22615
tcaagctaggcacctcggcaccctcaatactttcgcggcgagctagaaattggaaagcactgcagaatttgtgtctatagctactctcttacaaaaggttgtacatctagatgcgtacttattaagctctacgaatctacgcacatctagactatcaagaaattatatcatcatagcaccgatttgcctgtaggcgcctactgtgacagatcctccaacaaatgtaggtaatctaagttatactcagaccaacttcatgttgggatggacatgtgaagaaagcaagcggtcacagcggtttccctcccattcttacgttacagcactatacaggaaacacgcgaccgaccgctcaccatggagtcatcacccaaagccgaaggcgatggttactgtcccacttgcgtagcaatgttctctcccgcaggcctcaaagcgctatgggacggcgaaggctactcacacctaggggccacgtcgtgcgcggacagcgcagcaaaaggatgtcccctatgccgcctcattctcgacacggcggggtggggctatcgggacgctcagacagtgccgctcgtgttcagggccagctgctcgcgcgcgaagccgtcgacggcgggagagacgcgcaccgcagccgctagcgaagcaggaggagtgaagacgatgaagttggatacgctggaagcgcagggatcgtaccagaaggggcggggagcgaacatgttcgtctgcaagctggctgtattggcagaccaaggtaagccaccacgtctttgcggtctatcaaatgaccatgaagattgggactttcgccacatgctcctcacctcgtgcttacgtgcctatgttttctctcgacagatggcccattgagtgattactttccgggaaggccactggtcgatatggccagtgaaggtgctacaacggccgctgcaggttggctgcgggattgtctgcatggccaccctgattgcagcgcagagaagcagcaacctcttctacccacgagggtccttgacgttggaaccagcgacgatccacaatcagtgcggctctacgtttccagcaagggccagagggatgagtatttggctttgagctactgttggggaggtccgcagccgctcgtcacgaccacttcaaatctcgaagctatgcagagcggattctcctcgtcggagctgccgctgactctgagagacgcagtccatgttacctgcaatctaggctttcgctatctgtggatagacgccctgtgcatcctgcaggatagttgggacgataagagtcgcgaactcaataacatgggccaggtgtacaagaacgccattgcaaccatcatcgcgggtgcctcgaccgcagcaggagaggggttcttgagacaccaatccaagacgaacccgacgtgcaagatgccgctcaccattccaaacggcaaatcgggctcggtgaccatatgccccctcaagatgggtgcatttaatgttctgccactatcttcccgcgcctggtgctttcaggagtatatcctttccagcaggcatttatacttcactgatcaagagctcgtttggcaatgccgaaccttgaagcatgctaccgtgacagtcggaagcgtggcctatcctgcaaaaacggatcgagtgccgttcggagtgttccacgcgacacagagcggtgatgctgctagcttcacagaaactcggcaaaaacaaacattctggagagacgtgctgactgactttaccagacgcgcaatgactagcgctgaggacagactgaacgcaatcacgggtgtgattaacgaactggcagtagcatggggagacgactgcatctttggcatatggaagagtcgcttcatcgaagagttggcatggtcagtgtcaggtggatccgacgatgcgctgctgggcccgaggtctagccgggcaccatcttggtcctgggcgtcgatgaactcaccagcacagatttcctcaggctggttggattcgtcatccgaggcacgactgctgtctctatcggaagacagacggcaagctgtcattcgtggtacagtgctgaattcgcgacagatttcgatcgatgtagatgatgatgggttccacgatagacaacaggagtggggaaccatagacatggatctggacgagtcgatcgacgtcccgaagagtcggttcttgtcgattggctgggatagtaatgaaaggattgttgtccttcttcaggacgttggaggaggacgccatgaaagaatcgggttggctactttcgaagatgaaagtgatggtataacagcgttatggtctggccaaagtccagaagaggtcatcctcatttgacagtctctgctagacaggagattgctacctttacgaacaggaagaggtctaccttcgcagtgttgtgagggggctggtcctagttaatgcggctctctgctccttgcctgaggaagttgcgttgctctcgttgcgatggtctacccaagtcaccttgtagctactctcgccatcactctcgagaacctgtggtggtcgaggatcctagcgacttactcagcacttgaaaagagcgcccttagacaagagcgggtttttaacaagttaaaaactatgggcgtttgaaagggtatgcctcagtgttaagcacatattcatctaggctaatgaggtctagggctaaaaatatgaggtagaagtacttcaacgtctcggcgaaccaaaagctctggtttagtcagctgtgttctttctttctagcagaggttgtacgtttcatatgcctacctccatagagtccgtcttctctgtgtcttaaggctatacagtcacgtgcttaatggcaaagaacgcgaggttggtttctgtcgccccgcggatagccgcgaacatgcgccaagctatctcttgccattcctaatcgcccgtgatgcgatacataatgaaaacgctctcgatagcttcagggcgcagtaagtaccgcaggtcgcgagcgtggtgcacgcccttcctcgacaacggaattgaatgaaagctacgagtcgcgtgcagtagtattgtcggggtttgttgttctccgtggattgaacttcgcgttctcaacaacaagctcacgtcggcgcactcctcatcatatcgtcaacatagtattattaatagtgcggataagcatcgaataatgtagcaatattggataatgagctagtcagagagagctgaacagttgctactccgttgtttccacgaaccgcgtttacccctggttggctgtcaagactaggtcacgctgcgggatcagccagggtacaattgcgcgcgatggtagtagatgcttcggctgatatccgcaatgcgaagaatgtttttatgtcatgccaatcttcataaatgaatgtccataatgtaatgtcatggcacgttggcgtcgctgacatcatcg

SEQ ID NO: 22618 - DNA, 765 bp, Muscodor strobelii
  misc_feature: SGI cDNA ID NO. 567682
  misc_feature: Encodes the peptide sequence at SEQ ID NO 22619
atgatgattctctcagtattagctgcttggttcagcttgggtgtatcgaccctcgctgccccaaatcgctccattcgtcgaagcctattaagccgaggtcacactaactacatttctcgcctacaagaaagagacgaattgcgccctgacaatgtgtggagtggcgccgtactattcggagattatacagatataataggaaatgtcatcgcacctatcccgaaaaatcccggaggcactggaggtagttcaacgtctgcttgggttgggatcgatggctggggctgtgacaatttcatccaagttggctttgatattaccgtcgaagctaatggccactactattacgaggcatgggccgaatggttccctagtggttccatgtattttgatggcatcgacatcaatgccggagacgagatttccatcggcttgcatgtgtatgctccgacatctgggattgtgtactttaagaatttgtcgacgaactctgttatattttttcacaacttcaccgaccaagctgagctacctctctgcggagagagtgcggagtggattgtggagagttttgaactccacgacggaacgccgcttgcgaacttcggcaaaatcgaattcaagaaaccattcgtccaaatacgaggaggtccattagtcaacgcccaaggtgctgatattgtcaaccttgtaaagatggatggcaccaggttaacagattgttccgctaatgacaatgatgttacttgtaattatatcgcatag

SEQ ID NO: 22619 - protein, 254 aa, Muscodor strobelii
  misc_feature: SGI Peptide ID NO. 567682
  misc_feature (50)..(253): Pfam Id: PF01828 Pfam Desc: Peptidase A4 family
  misc_feature (32)..(253): NCBI GI: 238499183 Blast Desc: aspergillopepsin, [Aspergillus flavus NRRL3357] gi|220692579|gb|EED48925.1| aspergillopepsin, [Aspergillus flavus NRRL3357]
  misc_feature (2)..(253): NCBI GI: 154293948 Blast Desc: BC1G_14153 [Botryotinia fuckeliana B05.10] gi|150845125|gb|EDN20318.1| BC1G_14153 [Botryotinia fuckeliana B05.10]
  misc_feature (2)..(252): NCBI GI: 212530110 Blast Desc: aspergillopepsin-2 precursor, [Penicillium marneffei ATCC 18224] gi|210074610|gb|EEA28697.1| aspergillopepsin-2 precursor, [Penicillium marneffei ATCC 18224]
  misc_feature (2)..(253): NCBI GI: 73543258 Blast Desc: acidic protease 1 [Botryotinia fuckeliana]
  misc_feature (1)..(251): NCBI GI: 242789335 Blast Desc: aspergillopepsin, [Talaromyces stipitatus ATCC 10500] gi|218717927|gb|EED17347.1| aspergillopepsin, [Talaromyces stipitatus ATCC 10500]
  misc_feature (2)..(252): NCBI GI: 242761411 Blast Desc: aspergillopepsin-2 precursor, [Talaromyces stipitatus ATCC 10500] gi|218723370|gb|EED22787.1| aspergillopepsin-2 precursor, [Talaromyces stipitatus ATCC 10500]
  misc_feature (2)..(230): NCBI GI: 156050497 Blast Desc: SS1G_07836 [Sclerotinia sclerotiorum 1980] gi|154692236|gb|EDN91974.1| SS1G_07836 [Sclerotinia sclerotiorum 1980]
  misc_feature (2)..(253): NCBI GI: 67901056 Blast Desc: AN7515.2 [Aspergillus nidulans FGSC A4] gi|40742905|gb|EAA62095.1| AN7515.2 [Aspergillus nidulans FGSC A4] gi|259483831|tpe|CBF79544.1| TPA: aspergillopepsin, nidulans
  misc_feature (2)..(230): NCBI GI: 6984107 Blast Desc: AF221843_1 acid protease [Sclerotinia sclerotiorum]
  misc_feature (1)..(230): NCBI GI: 145251555 Blast Desc: An15g07700 [Aspergillus niger] gi|134082826|emb|CAK42657.1| protein product [Aspergillus niger]
  misc_feature (53)..(253): SWISSPROT Homolog: EC 3.4.23.19 Aspergillopepsin II
MMILSVLAAWFSLGVSTLAAPNRSIRRSLLSRGHTNYISRLQERDELRPDNVWSGAVLFGDYTDIIGNVIAPIPKNPGGTGGSSTSAWVGIDGWGCDNFIQVGFDITVEANGHYYYEAWAEWFPSGSMYFDGIDINAGDEISIGLHVYAPTSGIVYFKNLSTNSVIFFHNFTDQAELPLCGESAEWIVESFELHDGTPLANFGKIEFKKPFVQIRGGPLVNAQGADIVNLVKMDGTRLTDCSANDNDVTCNYIA

SEQ ID NO: 22620 - DNA, 1254 bp, Muscodor strobelii
  misc_feature: SGI cDNA ID NO. 567683
  misc_feature: Encodes the peptide sequence at SEQ ID NO 22621
atgtccaaaccagagtcctcccgtaaatatgacatcgttgtcctcggcgcaacaggttacacaggaagattgattaccgagcatatcgcaaagcatcttcctactgacctaagatgggccatagctgggcgatctcataagaaactagaggaacttgccgcaaaaatcaagtcactggatccccatcggtcgcagccgtctatcgagatagtatatgtcgacaacaacacacagctcgacgcacttatcaagtcatcgaaagtttgcatcagcatcatctactaccgtgctggcggagatctcgtcatcgaatcttgtattcgaagtaagaccgattacctcgatgctctcggagatcctatatcttccaaaaaatggatccataagtatcatgagcaggcgaaggcagcctgtgtcgctataatacaagcctgctccttcgtctccgcaccacaagatctcctctcatacgccgtcacccaagaactacggaccaaagccaacgtctcaactaaggaagcgatatgctccatcgtacaagccgaagtaagcccaagcggcggttccttcgcaggaataatcgaatccatcctcaacgaccccgccgacgtcgtccgcgaagcacacgatcccttcacactatcacccgtcaaacgatcctccgtcccaacaccttccggtactctccaactccgcagagaacccgagctaggacttctctccgcagcagtcctccaagcgttcatcgacaccgcactggtaaaccgaacatggggcctccttcaagaacgaaatgctgcggaagcatacgggaagaacttcacattcaacgaataccaaaaagtcgactccacaatgggtggactagttcaagtcatcgtcacggcgatcatgggaacaatcatgaacttttcgttcatgggccatgtattgagacgactggttcctgagccgggcactggtccagatgtcgacaagacggtaaacgcgccgtttaagttcgagatgattggtatcggtaagacgggcgaagatggaagggagagaagagtgtatggaaagatggagtatccgagtgattcttatcatttcactggtgcttcgcttgcgcagggcgctgcgagtttgttgtataagagggagtttgtcggtgggtttacgggcggtgtgcttacgcctgcgattcttggggaggatttcgtggataggctgaggggtgttggtgtgaggatggtggttaagatgttggattga

SEQ ID NO: 22621 - protein, 417 aa, Muscodor strobelii
  misc_feature: SGI Peptide ID NO. 567683
  misc_feature (12)..(412): Pfam Id: PF03435 Pfam Desc: Saccharopine dehydrogenase
  misc_feature (12)..(142): Pfam Id: PF03435 Pfam Desc: Saccharopine dehydrogenase
  misc_feature (1)..(416): NCBI GI: 212544400 Blast Desc: conserved [Penicillium marneffei ATCC 18224] gi|210065323|gb|EEA19417.1| conserved [Penicillium marneffei ATCC 18224]
  misc_feature (6)..(417): NCBI GI: 226289224 Blast Desc: conserved [Paracoccidioides brasiliensis Pb18]
  misc_feature (1)..(411): NCBI GI: 242774748 Blast Desc: conserved [Talaromyces stipitatus ATCC 10500] gi|218722122|gb|EED21540.1| conserved [Talaromyces stipitatus ATCC 10500]
  misc_feature (8)..(417): NCBI GI: 154315663 Blast Desc: BC1G_04404 [Botryotinia fuckeliana B05.10] gi|150847344|gb|EDN22537.1| BC1G_04404 [Botryotinia fuckeliana B05.10]
  misc_feature (1)..(415): NCBI GI: 212532123 Blast Desc: conserved [Penicillium marneffei ATCC 18224] gi|210071582|gb|EEA25671.1| conserved [Penicillium marneffei ATCC 18224]
  misc_feature (6)..(405): NCBI GI: 156033141 Blast Desc: SS1G_13646 [Sclerotinia sclerotiorum 1980] gi|154699049|gb|EDN98787.1| SS1G_13646 [Sclerotinia sclerotiorum 1980]
  misc_feature (6)..(417): NCBI GI: 225682050 Blast Desc: conserved [Paracoccidioides brasiliensis Pb03]
  misc_feature (6)..(417): NCBI GI: 226279955 Blast Desc: conserved [Paracoccidioides brasiliensis Pb01]
  misc_feature (1)..(417): NCBI GI: 171686280 Blast Desc: protein product [Podospora anserina] gi|170943101|emb|CAP68754.1| protein product [Podospora anserina]
  misc_feature (6)..(417): NCBI GI: 225555920 Blast Desc: conserved [Ajellomyces capsulatus G186AR]
MSKPESSRKYDIVVLGATGYTGRLITEHIAKHLPTDLRWAIAGRSHKKLEELAAKIKSLDPHRSQPSIEIVYVDNNTQLDALIKSSKVCISIIYYRAGGDLVIESCIRSKTDYLDALGDPISSKKWIHKYHEQAKAACVAIIQACSFVSAPQDLLSYAVTQELRTKANVSTKEAICSIVQAEVSPSGGSFAGIIESILNDPADVVREAHDPFTLSPVKRSSVPTPSGTLQLRREPELGLLSAAVLQAFIDTALVNRTWGLLQERNAAEAYGKNFTFNEYQKVDSTMGGLVQVIVTAIMGTIMNFSFMGHVLRRLVPEPGTGPDVDKTVNAPFKFEMIGIGKTGEDGRERRVYGKMEYPSDSYHFTGASLAQGAASLLYKREFVGGFTGGVLTPAILGEDFVDRLRGVGVRMVVKMLD

SEQ ID NO: 22622 - DNA, 1077 bp, Muscodor strobelii
  misc_feature: SGI cDNA ID NO. 567684
  misc_feature: Encodes the peptide sequence at SEQ ID NO 22623
atgcgcgcccttcagtactacggagcgagagatctccgactggagcatgatatcatcgaacccaagtgcgggccagaccagatcaagatcaagcccgccttcgtaggtatatgtggcaccgacgtccacgagtaccagtcccagacgctgatcccaaaggccggacaaccgcatgctctgactcgtgaaagcgtgccccttacccttggacatgagatttcgggagttgtagttggagttggatccgatgtgccagcgactagcggcgtcaaggtaggcgacaaggtcgctgtcctgcctttattgtattgtcgaagttgcgtgccgtgtaaagaaggatatcagaactgctgtgtgacaaatggcttcatgggactctccggcgccggtgggggcctcagcgattttgtgtgcgcgaatcatgaagcagttttcaagctcgcagacaacgtctcattagaagtcggtgccctcgttgagccgctagccgttgcatggcacgctgtcgccgagtctggtgtcaaacccggacaggactgtatagtatttggcaccggtccgatcggtcttgccatcatacagtgtctgaaggcaaaagacgtagggaacatcatcggcgtagaggtggcgaagcaacgtcaggacttcgcgaaacagttcggtgcgacgcatatactagacccgacgaaaatcgatgtcgtaaaggaagccaagatgatgtctaatggactcggtcccgccgtggccttcgactgcgctggcgttcccgcgagccttgactctgctaccagggcagtacgggctcgtggtactatcatgaatgtagcgatatgggaggctgctgtcccatttatgcccaataacgtggtatttcatgaaaagaaatacatcggatgtctcacttatctacttgaggatttccaacatgtcatcgatgcgcttaaagagcggcggctagagccggagtccatgatcactcgtaagatagccattgatcgcgtagttgaggatggatttgaggctttaatacacgaaaaggataggcatgttaagattatggtggatttatcgctttag

SEQ ID NO: 22623 - protein, 358 aa, Muscodor strobelii
  misc_feature: SGI Peptide ID NO. 567684
  misc_feature (25)..(147): Pfam Id: PF08240 Pfam Desc: Alcohol dehydrogenase GroES-like domain
  misc_feature (176)..(316): Pfam Id: PF00107 Pfam Desc: Zinc-binding dehydrogenase
  misc_feature (1)..(357): NCBI GI: 46126611 Blast Desc: FG07683.1 [Gibberella zeae PH-1]
  misc_feature (1)..(356): NCBI GI: 169613991 Blast Desc: SNOG_10130 [Phaeosphaeria nodorum SN15] gi|111061345|gb|EAT82465.1| SNOG_10130 [Phaeosphaeria nodorum SN15]
  misc_feature (1)..(356): NCBI GI: 189199938 Blast Desc: sorbitol dehydrogenase [Pyrenophora tritici-repentis Pt-1C-BFP] gi|187983405|gb|EDU48893.1| sorbitol dehydrogenase [Pyrenophora tritici-repentis Pt-1C-BFP]
  misc_feature (1)..(356): NCBI GI: 223973463 Blast Desc: [Zea mays]
  misc_feature (1)..(357): NCBI GI: 119482057 Blast Desc: alcohol dehydrogenase, zinc-containing [Neosartorya fischeri NRRL 181] gi|119409211|gb|EAW19160.1| alcohol dehydrogenase, zinc-containing [Neosartorya fischeri NRRL 181]
  misc_feature (1)..(357): NCBI GI: 146323052 Blast Desc: alcohol dehydrogenase, zinc-containing [Aspergillus fumigatus Af293] gi|129558592|gb|EAL93890.2| alcohol dehydrogenase, zinc-containing [Aspergillus fumigatus Af293]
  misc_feature (1)..(357): NCBI GI: 159129985 Blast Desc: alcohol dehydrogenase, zinc-containing [Aspergillus fumigatus A1163]
  misc_feature (1)..(357): NCBI GI: 256723675 Blast Desc: [Nectria haematococca mpVI 77-13-4]
  misc_feature (1)..(356): NCBI GI: 145240533 Blast Desc: An08g07960 [Aspergillus niger] gi|134077435|emb|CAK45689.1| protein product [Aspergillus niger]
  misc_feature (1)..(357): NCBI GI: 238488553 Blast Desc: alcohol dehydrogenase, zinc-containing [Aspergillus flavus NRRL3357] gi|220697902|gb|EED54242.1| alcohol dehydrogenase, zinc-containing [Aspergillus flavus NRRL3357]
  misc_feature (1)..(354): SWISSPROT Homolog: EC 1.1.1.4 (R,R)-butanediol dehydrogenase
MRALQYYGARDLRLEHDIIEPKCGPDQIKIKPAFVGICGTDVHEYQSQTLIPKAGQPHALTRESVPLTLGHEISGVVVGVGSDVPATSGVKVGDKVAVLPLLYCRSCVPCKEGYQNCCVTNGFMGLSGAGGGLSDFVCANHEAVFKLADNVSLEVGALVEPLAVAWHAVAESGVKPGQDCIVFGTGPIGLAIIQCLKAKDVGNIIGVEVAKQRQDFAKQFGATHILDPTKIDVVKEAKMMSNGLGPAVAFDCAGVPASLDSATRAVRARGTIMNVAIWEAAVPFMPNNVVFHEKKYIGCLTYLLEDFQHVIDALKERRLEPESMITRKIAIDRVVEDGFEALIHEKDRHVKIMVDLSL

SEQ ID NO: 22624 - DNA, 254 bp, Muscodor strobelii
  misc_feature: SGI EST ID NO. CUFF.53136.0
  misc_feature: Variant of the nucleotide sequence at SEQ ID NO 22622
aatacatcggatgtctcacttatctacttgaggatttccaacatgtcatcgatgcgcttaaagagcggcggctagagccggagtccatgatcactcgtaagatagccattgatcgcgtagttgaggatggatttgaggctttaatacacgaaaaggataggcatgttaagattatggtggatttatcgctttagcgagcaattgtagtgagatgaatattatgtgattctgttgattttcgaatggaggtcatc

SEQ ID NO: 22625 - DNA, 1848 bp, Muscodor strobelii
  misc_feature: SGI cDNA ID NO. 567685
  misc_feature: Encodes the peptide sequence at SEQ ID NO 22626
atgcccaaccactactcttccaccctccaccccaacgaacgagactccctcgaactcgcctcattggcgtcctccagtccgggccccgacacatactccgagactgattcccgaccatccatatcatcctcccgcaaactctccctcgagcaggatgacccgctagacgatgacaatctggccagccggcccggctttggtggtcgtgatagaggatactcgacgacgtccaacttcgactactcggccaacctcttccccctctcctcgtctaccgcgccgggctatgctcccctcggcgcacccacgtccgccgcccagcatcatggcggcctgggcggcgcatcgctagagaagcacaagactctgacctacttgaatgggctgggactgatagtaggcctgatcattggatctggtatcttctcctcgccaagccaagtcaatatgaatgtagggtcgcccggcgcatctttgatcgtgtgggcgatagccggagtactggcatggacaggcgcagcgagttatgcagagttgggaggcgccataccgctcaatggaggcgcgcaggcgtatttatccaagatcatgggcgagctggcaggctttctattcacctgggtcgccgtcctggtactgaagcctggtagtgccgctatcatcgccatcatcatgggcgagtacctcgtgagagctttcatcggggcagaggccgaacatatcaacccctggatcaacaaaggggtgggcttagtcggcttgttcagcattacgttgctgaattgcatatcgacaaaactagggacccgcatcaacgacgggctcatgttcttgaagttcatcgctctgctcggtgtgacgatagtgggaattgtggtcgctctgacaggcttctcattctcaggtcaagcaaacatggaatggaagaatcatcaatggtttgaaggcacatcgacagatacccgccattgggcggttgccttgtatgccgggctgtgggcatacgacggctgggacaacacgaactatgttgttggcgagtttcgcaacccgtcgcgtgacctgccaagggtcatacacaccgctatgccactcgtcatcattggctatatgctagccaatttctcctactttttagttttacccaaggagacccttaacagcactaatactgtggccgttgcgtttggaagtaaggtatttggatccgtgggcgcactgatattcgccctcatcgtcagcgcgtcctgctttggatcactgaactcgacgacattcacaagtagtcggctggtgtacgctgcagcgaaagaggggttcattccctcgttcgccggtcgcatcggtattggctctgccgagcccgggatgtcgacactgagaaagcgaagctggctgtctaagcgattgcgcaacatggttggggacgaagagactgggctgttcttcactccggtcaacgcgctggtcctcaacttcttgttgacaacagcttatgtcgtggtcggcgagttcagcgaattactcacattttatggtgtcgcgggctattcgttctactttctgacggttctgggattgatcatcctcagggtgaaggaacctcatcttgagcgaccatacaagacttggataacgacaccgatcatattctgctgtgtcagcttgttcttgcttacgagagccgtctttgcgcaaccgttcaagacggtaattgtcgtcgcgtttgtgcttaccggtattcctgtcttcttctggcggatacagggtcgagaccaggtcactaaacgagagtctgggaggagagggccggcgtggaagttttggagaagatggggcagatcatga

SEQ ID NO: 22626 - protein, 615 aa, Muscodor strobelii
  misc_feature: SGI Peptide ID NO. 567685
  misc_feature (128)..(596): Pfam Id: PF00324 Pfam Desc: Amino acid permease
  misc_feature (128)..(449): Pfam Id: PF00324 Pfam Desc: Amino acid permease
  misc_feature (1)..(611): NCBI GI: 171693669 Blast Desc: protein product [Podospora anserina] gi|170946783|emb|CAP73587.1| protein product [Podospora anserina]
  misc_feature (2)..(611): NCBI GI: 156065369 Blast Desc: SS1G_00695 [Sclerotinia sclerotiorum 1980] gi|154691554|gb|EDN91292.1| SS1G_00695 [Sclerotinia sclerotiorum 1980]
  misc_feature (9)..(612): NCBI GI: 256731048 Blast Desc: [Nectria haematococca mpVI 77-13-4]
  misc_feature (1)..(610): NCBI GI: 11595634 Blast Desc: related to blood-brain barrier large neutral amino acid transporter [Neurospora crassa]
  misc_feature (1)..(611): NCBI GI: 116198215 Blast Desc: CHGG_07263 [Chaetomium globosum CBS 148.51] gi|88178542|gb|EAQ86010.1| CHGG_07263 [Chaetomium globosum CBS 148.51]
  misc_feature (12)..(612): NCBI GI: 46123497 Blast Desc: FG06126.1 [Gibberella zeae PH-1]
  misc_feature (2)..(615): NCBI GI: 258569601 Blast Desc: conserved [Uncinocarpus reesii 1704] gi|237903874|gb|EEP78275.1| conserved [Uncinocarpus reesii 1704]
  misc_feature (1)..(614): NCBI GI: 145607169 Blast Desc: MGG_04043 [Magnaporthe grisea 70-15] gi|145014766|gb|EDJ99334.1| MGG_04043 [Magnaporthe grisea 70-15]
  misc_feature (10)..(611): NCBI GI: 212546257 Blast Desc: amino acid transporter, [Penicillium marneffei ATCC 18224] gi|210064802|gb|EEA18897.1| amino acid transporter, [Penicillium marneffei ATCC 18224]
  misc_feature (1)..(614): NCBI GI: 255931503 Blast Desc: Pc12g04390 [Penicillium chrysogenum Wisconsin 54-1255] gi|211581927|emb|CAP80066.1| Pc12g04390 [Penicillium chrysogenum Wisconsin 54-1255]
MPNHYSSTLHPNERDSLELASLASSSPGPDTYSETDSRPSISSSRKLSLEQDDPLDDDNLASRPGFGGRDRGYSTTSNFDYSANLFPLSSSTAPGYAPLGAPTSAAQHHGGLGGASLEKHKTLTYLNGLGLIVGLIIGSGIFSSPSQVNMNVGSPGASLIVWAIAGVLAWTGAASYAELGGAIPLNGGAQAYLSKIMGELAGFLFTWVAVLVLKPGSAAIIAIIMGEYLVRAFIGAEAEHINPWINKGVGLVGLFSITLLNCISTKLGTRINDGLMFLKFIALLGVTIVGIVVALTGFSFSGQANMEWKNHQWFEGTSTDTRHWAVALYAGLWAYDGWDNTNYVVGEFRNPSRDLPRVIHTAMPLVIIGYMLANFSYFLVLPKETLNSTNTVAVAFGSKVFGSVGALIFALIVSASCFGSLNSTTFTSSRLVYAAAKEGFIPSFAGRIGIGSAEPGMSTLRKRSWLSKRLRNMVGDEETGLFFTPVNALVLNFLLTTAYVVVGEFSELLTFYGVAGYSFYFLTVLGLIILRVKEPHLERPYKTWITTPIIFCCVSLFLLTRAVFAQPFKTVIVVAFVLTGIPVFFWRIQGRDQVTKRESGRRGPAWKFWRRWGRS

SEQ ID NO: 22627 - DNA, 2717 bp, Muscodor strobelii
  misc_feature: SGI EST ID NO. CUFF.53154.0
  misc_feature: Variant of the nucleotide sequence at SEQ ID NO 22625
catctcttcctcgcatcatcaacagtaatacaccaccaataccacccaacgaccgtcacatacacccctcattatcgcatttaacagacaaggattacaacgaccttgacgattctatttctcaactcgcgacgttcggattgcccgaatacacctccggatttgtttggcgcaccgcaatctacgaaccgttttcaagctcggcgacgcaactaacgccgtcatactgtacatagcgcgctcagcaaattctaaaccgcacaaggagaatcgcaagtcggattgcgcccacccacgaggccctccggcacgcacatacctgaagctgtacatgaaaaaagatatagatatttccaccgactatatgcgcacgatgcttgcatggctttgaagcaagagacataaagaacatcacaccctccatcctctaccgaccccgaaagacagcaatgcccaaccactactcttccaccctccaccccaacgaacgagactccctcgaactcgcctcattggcgtcctccagtccgggccccgacacatactccgagactgattcccgaccatccatatcatcctcccgcaaactctccctcgagcaggatgacccgctagacgatgacaatctggccagccggcccggctttggtggtcgtgatagaggatactcgacgacgtccaacttcgactactcggccaacctcttccccctctcctcgtctaccgcgccgggctatgctcccctcggcgcacccacgtccgccgcccagcatcatggcggcctgggcggcgcatcgctagagaagcacaagactctgacctacttgaatgggctgggactgatagtaggcctgatcattggatctggtatcttctcctcgccaagccaagtcaatatgaatgtagggtcgcccggcgcatctttgatcgtgtgggcgatagccggagtactggcatggacaggcgcagcgagttatgcagagttgggaggcgccataccgctcaatggaggcgcgcaggcgtatttatccaagatcatgggcgagctggcaggctttctattcacctgggtcgccgtcctggtactgaagcctggtagtgccgctatcatcgccatcatcatgggcgagtacctcgtgagagctttcatcggggcagaggccgaacatatcaacccctggatcaacaaaggggtgggcttagtcggcttgttcagcattacgttgctgaattgcatatcgacaaaactagggacccgcatcaacgacgggctcatgttcttgaagttcatcgctctgctcggtgtgacgatagtgggaattgtggtcgctctgacaggcttctcattctcaggtcaagcaaacatggaatggaagaatcatcaatggtttgaaggcacatcgacagatacccgccattgggcggttgccttgtatgccgggctgtgggcatacgacggctgggacaacacgaactatgttgttggcgagtttcgcaacccgtcgcgtgacctgccaagggtcatacacaccgctatgccactcgtcatcattggctatatgctagccaatttctcctactttttagttttacccaaggagacccttaacagcactaatactgtggccgttgcgtttggaagtaaggtatttggatccgtgggcgcactgatattcgccctcatcgtcagcgcgtcctgctttggatcactgaactcgacgacattcacaagtagtcggctggtgtacgctgcagcgaaagaggggttcattccctcgttcgccggtcgcatcggtattggctctgccgagcccgggatgtcgacactgagaaagcgaagctggctgtctaagcgattgcgcaacatggttggggacgaagagactgggctgttcttcactccggtcaacgcgctggtcctcaacttcttgttgacaacagcttatgtcgtggtcggcgagttcagcgaattactcacattttatggtgtcgcgggctattcgttctactttctgacggttctgggattgatcatcctcagggtgaaggaacctcatcttgagcgaccatacaagacttggataacgacaccgatcatattctgctgtgtcagcttgttcttgcttacgagagccgtctttgcgcaaccgttcaagacggtaattgtcgtcgcgtttgtgcttaccggtattcctgtcttcttctggcggatacagggtcgagaccaggtcactaaacgagagtctgggaggagagggccggcgtggaagttttggagaagatggggcagatcatgaagatctaagagatggtatatgagctacaatacttgaattgcattggtatcgtttgcccggcgttggtttggtcaacaagttttgtgtggcttggatgctagaacatgcaggggacaacgcgcgcctcaaaatgtatatgaggcatgtatactacatggcgcctgctagtattggcttataagccgagtctcagcattgaatgtaatatatatatcccaataatgagcagaagttcaaaaaacaccccaccaaacagacagctgtcctagatggctgagtggtacagtcgtcagactttccacgctagagataccagaccaccgattcgagccccacggctgtcagagaaatttggcaaagttggaaggtgcatatcgacctgtataactatctcattcgaacaaaaaaagaaagaaaaaa

SEQ ID NO: 22628 - DNA, 1272 bp, Muscodor strobelii
  misc_feature: SGI cDNA ID NO. 567686
  misc_feature: Encodes the peptide sequence at SEQ ID NO 22629
atggtcgtcaaagacatcattatcctcggcgccggcccctgcggtctcgcgacagccatggcactagcaaaacaaagcactccgacatcacctcttcacataagactaatcgagatccgacccgaactcgcaaccatcggcggcacgctcaacgtgacccctctctgtctacggtacctagactatctcggtgttggagatcgcttgcgtgccggcggaatcagcttagacagtggtctcgactgcgtctctttgcgcacaggacgccgtattgggaatatttggggcggtatcggcggcatccgtgctattcggcattctctcgtcgagacattgttgcagacggtaaccgaagactacagtgatcttattgaggtccgttggggagcacgtgtgattgagatcttcgagtcaaagaccgaggacaggatcacggtcaagtttcaagacggctcggagctcaaaggagacgtcctcatcggcgccgatggcctacactcaacagcccgacgactgtacgttgagccggaacgtaaagattacttcaccggccgcgtcatcacgatggggtttcacgagcctgattctgcagggaagaagcagaagcaagcgctctcgctctcggatggcagcccgatgcttcgcgataccgcagtcatcatgacgcaggagggcatgctactcgcttcctactacgaaccgagcaggacgaagacgtactttgcgcatatcgcccatgcagatgagccccacggtgatgcaagagatggatggagagtgctcggctctgataaagcgaaagtcaaaagagagatcgtcgatgcttaccgacatgggagtatcgaaggtctgccagaagtgcttgcgcagtgcgatgattggcatttatatccagtttacatgcttcctggtggcgggaagtggttcaaggggcgggttatactcctaggggatgccgcacacgccatgccaccacaaggcgaatcaaccggcatagcaatcgaagacggcatcctcctcgcacacgtgctcagcagacgcgagaccagaactattcctcagctattcgcagactacgataccctacgtagaccggtcatcgacaaacacttcgaggactccgtctgggcgatgaaacatggcttcgccaaaagatcttggcttggctctatcctgctggagtggggtatgtgggtgtacttgggccttcgacgttggcgccaggagagccactttgcgggtgatgttagggagcttgagctgcctgcttga

SEQ ID NO: 22629 - protein, 423 aa, Muscodor strobelii
  misc_feature: SGI Peptide ID NO. 567686
  misc_feature (3)..(374): Pfam Id: PF01494 Pfam Desc: FAD binding domain
  misc_feature (307)..(327): Pfam Id: PF01494 Pfam Desc: FAD binding domain
  misc_feature (5)..(24): Pfam Id: PF07992 Pfam Desc: Pyridine nucleotide-disulphide oxidoreductase
  misc_feature (4)..(422): NCBI GI: 70990396 Blast Desc: salicylate hydroxylase [Aspergillus fumigatus Af293] gi|66847679|gb|EAL88009.1| salicylate hydroxylase, [Aspergillus fumigatus Af293] gi|159130525|gb|EDP55638.1| salicylate fumigatus
  misc_feature (3)..(398): NCBI GI: 238845748 Blast Desc: salicylate hydroxylase [Microsporum canis CBS 113480]
  misc_feature (17)..(415): NCBI GI: 115492665 Blast Desc: [Aspergillus terreus NIH2624] gi|114197820|gb|EAU39520.1| [Aspergillus terreus NIH2624]
  misc_feature (5)..(412): NCBI GI: 169601458 Blast Desc: SNOG_03594 [Phaeosphaeria nodorum SN15] gi|111067679|gb|EAT88799.1| SNOG_03594 [Phaeosphaeria nodorum SN15]
  misc_feature (6)..(395): NCBI GI: 154286110 Blast Desc: [Ajellomyces capsulatus NAm1] gi|150407491|gb|EDN03032.1| [Ajellomyces capsulatus NAm1]
  misc_feature (2)..(374): NCBI GI: 145249300 Blast Desc: An14g03640 [Aspergillus niger] gi|134081667|emb|CAK46601.1| protein product [Aspergillus niger]
  misc_feature (4)..(422): NCBI GI: 238494572 Blast Desc: salicylate hydroxylase [Aspergillus flavus NRRL3357] gi|220695172|gb|EED51515.1| salicylate hydroxylase [Aspergillus flavus NRRL3357]
  misc_feature (6)..(395): NCBI GI: 225558368 Blast Desc: salicylate hydroxylase [Ajellomyces capsulatus G186AR]
  misc_feature (1)..(422): NCBI GI: 115433216 Blast Desc: conserved [Aspergillus terreus NIH2624] gi|114189597|gb|EAU31297.1| conserved [Aspergillus terreus NIH2624]
  misc_feature (6)..(421): NCBI GI: 240274796 Blast Desc: salicylate hydroxylase [Ajellomyces capsulatus H143]
  misc_feature (6)..(365): SWISSPROT Homolog: EC 1.14.13.1 Salicylate 1-monooxygenase
MVVKDIIILGAGPCGLATAMALAKQSTPTSPLHIRLIEIRPELATIGGTLNVTPLCLRYLDYLGVGDRLRAGGISLDSGLDCVSLRTGRRIGNIWGGIGGIRAIRHSLVETLLQTVTEDYSDLIEVRWGARVIEIFESKTEDRITVKFQDGSELKGDVLIGADGLHSTARRLYVEPERKDYFTGRVITMGFHEPDSAGKKQKQALSLSDGSPMLRDTAVIMTQEGMLLASYYEPSRTKTYFAHIAHADEPHGDARDGWRVLGSDKAKVKREIVDAYRHGSIEGLPEVLAQCDDWHLYPVYMLPGGGKWFKGRVILLGDAAHAMPPQGESTGIAIEDGILLAHVLSRRETRTIPQLFADYDTLRRPVIDKHFEDSVWAMKHGFAKRSWLGSILLEWGMWVYLGLRRWRQESHFAGDVRELELPA

SEQ ID NO: 22630 - DNA, 1568 bp, Muscodor strobelii
  misc_feature: SGI EST ID NO. CUFF.53146.0
  misc_feature: Variant of the nucleotide sequence at SEQ ID NO 22628
ctcggcgccggcccctgcggtctcgcgacagccatggcactagcaaaacaaagcactccgacatcacctcttcacataagactaatcgagatccgacccgaactcgcaaccatcggcggcacgctcaacgtgacccctctctgtctacggtacctagactatctcggtgttggagatcgcttgcgtgccggcggaatcagcttagacagtggtctcgactgcgtctctttgcgcacaggacgccgtattgggaatatttggggcggtatcggcggcatccgtgctattcggcattctctcgtcgagacattgttgcagacggtaaccgaagactacagtgatcttattgaggtccgttggggagcacgtgtgattgagatcttcgagtcaaagaccgaggacaggatcacggtcaagtttcaagacggctcggagctcaaaggagacgtcctcatcggcgccgatggcctacactcaacagcccgacgactgtacgttgagccggaacgtaaagattacttcaccggccgcgtcatcacgatggggtttcacgagcctgattctgcagggaagaagcagaagcaagcgctctcgctctcggatggcagcccgatgcttcgcgataccgcagtcatcatgacgcaggagggcatgctactcgcttcctactacgaaccgagcaggacgaagacgtactttgcgcatatcgcccatgcagatgagccccacggtgatgcaagagatggatggagagtgctcggctctgataaagcgaaagtcaaaagagagatcgtcgatgcttaccgacatgggagtatcgaaggtctgccagaagtgcttgcgcagtgcgatgattggcatttatatccagtttacatgcttcctggtggcgggaagtggttcaaggggcgggttatactcctaggggatgccgcacacgccatgccaccacaaggcgaatcaaccggcatagcaatcgaagacggcatcctcctcgcacacgtgctcagcagacgcgagaccagaactattcctcagctattcgcagactacgataccctacgtagaccggtcatcgacaaacacttcgaggactccgtctgggcgatgaaacatggcttcgccaaaagatcttggcttggctctatcctgctggagtggggtatgtgggtgtacttgggccttcgacgttggcgccaggagagccactttgcgggtgatgttagggagcttgagctgcctgcttgaatgaccaggaaaagacatggtgttgtaagattcgtgtactgttattgtattcgtttgtcgtgctttaagttcttttgcactgactgtatctcctactctttccttccaaattagactacattacacttctagatttagatatatcttcatagaacaggacagtggcaggattccggggccccaagccatcgagagacgtcttggccctccaggcactcttgttaaataaatgtctatgcgctccatcatgataaagggtacttgcctaacccgtttacttaaaagcccgggtgatggccagatcataaggaagtcccaat

SEQ ID NO: 22631 - DNA, 1812 bp, Muscodor strobelii
  misc_feature: SGI cDNA ID NO. 567687
  misc_feature: Encodes the peptide sequence at SEQ ID NO 22632
atgcgctccttgtcgcaggaggaaaaagctgccaacgactccagtacgaacaatacgccgaaagagtcaagcctgagcgattcgggaacaggctatagggagcgctttcactggacgtctgttttgaacgacatcaatgaccagctggatgctcaaaatgacaatacaaacagcaaccagtcgagcacgcagaatgcaggagtgcagccggtcgtttcccgcggcattctgctccaccagggctgcaaacccataagcaaagccgagttgctgatggctatgcctgcgaagcagacagcagatagacttatcgctcgatatttctcatcatttggtgcccgaaatgagctagtgtgtaatggggacatgttcaggagtaggagagaaagtgctgatgaagaggcgcagtatgagaaattctggcaagatcaatctagcgccaccgtccccttcatcggccttctcttcagtatattatgtttaggggctcaatccgagagcccaaatatccgcataagcgacgcgaatgccacggatccgagcatgtctcctcttgggactgtggtagacttctatcgagaaaaggttgtccagtctctggttcttgcgagcttcagcaaaggcggtcctttcatcgtcgagacgatgttacattacatgattgtcgaacactatctacggaaagacaccgacattggtgtctggctggtcttggggaacatgtatcaagtcgcaattcgcatgggataccatcgtgatccagctcactttaagaacatctcagtttacgaaggcgagatgcgtcgccgtgtgtggatgaacatatggtgtaccgatgccgtcatctcgacccaaatgggcatgccgaccgttgtcagcatgtccatcgccgacactgcatcgccacgaaatctgctcgacagcgatttcaacgtgaactcgacctcgcttccacctcctcgcccgccggacgagatgacgcccgttctgcctctgattataaagagcaggatattcaagcaacttcgtctagctagtgagctagtcacgagtgtcagatcatcttcctattccgacgtgactaagatcgatgcgcaattgagggaagtgcaggacagcatcccccagcctttaaggattaagcctgcgggtcggtcgatattggatcctccattcgtcgtctttcagcgaatctacttgcaattattgtaccataagtcacaaattctattacaccagcgctaccttaccctcccttcacacctagaacagtacgcacagtcacgggaaacggcaatcgaagcgtccaagtcgctattgcaatatcaacacattatccacgacgagagcaagctgaacggccgtttctacgggatgacctggatccacaactccttgtttactcatgagttcctgcttgcgacaagtgtgctctgcttctgcatcaaacatgaactactggacacgggtactgacaaacaagggaatgtcaagaaactcttgcagagaacccgcgaaatatgggactcttcaaaggggttgtctgcagaggcgcggaaggcttcagctgcccttaatttgatcctggaagacgcataccctaggaataagagcgaagaatgtgagtgcatggcgggagaagagactggtacccagagcctggatggatttaatagatacgatgcaggatttctcgcagatgatgattacttcgaattattacaaacgccctggtcaacttggaatttcacagtagacgacattactacgggtccaatgcaaatgaaccatctagatggcacgctcgagtaa

SEQ ID NO: 22632 - protein, 603 aa, Muscodor strobelii
  misc_feature: SGI Peptide ID NO. 567687
  misc_feature (212)..(309): Pfam Id: PF04082 Pfam Desc: Fungal specific transcription factor domain
  misc_feature (234)..(309): Pfam Id: PF04082 Pfam Desc: Fungal specific transcription factor domain
  misc_feature (37)..(529): NCBI GI: 116205828 Blast Desc: CHGG_02207 [Chaetomium globosum CBS 148.51] gi|88182804|gb|EAQ90272.1| CHGG_02207 [Chaetomium globosum CBS 148.51]
  misc_feature (25)..(551): NCBI GI: 256722191 Blast Desc: NECHADRAFT_86811 [Nectria haematococca mpVI 77-13-4]
  misc_feature (25)..(532): NCBI GI: 115402211 Blast Desc: [Aspergillus terreus NIH2624] gi|114189028|gb|EAU30728.1| [Aspergillus terreus NIH2624]
  misc_feature (37)..(529): NCBI GI: 159130022 Blast Desc: fungal specific transcription factor, [Aspergillus fumigatus A1163]
  misc_feature (37)..(529): NCBI GI: 146323062 Blast Desc: fungal specific transcription factor [Aspergillus fumigatus Af293] gi|129558597|gb|EAL93929.2| fungal specific transcription factor, [Aspergillus fumigatus Af293]
  misc_feature (37)..(529): NCBI GI: 119482131 Blast Desc: fungal specific transcription factor, [Neosartorya fischeri NRRL 181] gi|119409248|gb|EAW19197.1| fungal specific transcription factor, [Neosartorya fischeri NRRL 181]
  misc_feature (26)..(529): NCBI GI: 121701153 Blast Desc: fungal specific transcription factor domain protein [Aspergillus clavatus NRRL 1] gi|119396984|gb|EAW07415.1| fungal specific transcription factor domain protein [Aspergillus NRRL 1]
  misc_feature (13)..(529): NCBI GI: 121719872 Blast Desc: C6 transcription factor, [Aspergillus clavatus NRRL 1] gi|119404846|gb|EAW15208.1| C6 transcription factor, [Aspergillus clavatus NRRL 1]
  misc_feature (4)..(529): NCBI GI: 70983604 Blast Desc: C6 transcription factor [Aspergillus fumigatus Af293] gi|66844955|gb|EAL85291.1| C6 transcription factor, [Aspergillus fumigatus Af293]
  misc_feature (4)..(529): NCBI GI: 159123665 Blast Desc: C6 transcription factor, [Aspergillus fumigatus A1163]
MRSLSQEEKAANDSSTNNTPKESSLSDSGTGYRERFHWTSVLNDINDQLDAQNDNTNSNQSSTQNAGVQPVVSRGILLHQGCKPISKAELLMAMPAKQTADRLIARYFSSFGARNELVCNGDMFRSRRESADEEAQYEKFWQDQSSATVPFIGLLFSILCLGAQSESPNIRISDANATDPSMSPLGTVVDFYREKVVQSLVLASFSKGGPFIVETMLHYMIVEHYLRKDTDIGVWLVLGNMYQVAIRMGYHRDPAHFKNISVYEGEMRRRVWMNIWCTDAVISTQMGMPTVVSMSIADTASPRNLLDSDFNVNSTSLPPPRPPDEMTPVLPLIIKSRIFKQLRLASELVTSVRSSSYSDVTKIDAQLREVQDSIPQPLRIKPAGRSILDPPFVVFQRIYLQLLYHKSQILLHQRYLTLPSHLEQYAQSRETAIEASKSLLQYQHIIHDESKLNGRFYGMTWIHNSLFTHEFLLATSVLCFCIKHELLDTGTDKQGNVKKLLQRTREIWDSSKGLSAEARKASAALNLILEDAYPRNKSEECECMAGEETGTQSLDGFNRYDAGFLADDDYFELLQTPWSTWNFTVDDITTGPMQMNHLDGTLE

SEQ ID NO: 22633 - DNA, 1497 bp, Muscodor strobelii
  misc_feature: SGI EST ID NO. CUFF.53157.0
  misc_feature: Variant of the nucleotide sequence at SEQ ID NO 22631
ttacgatttgagccttcaaatggttgaaatcagttgaatatgaatggctctccatcggccgaaacaccggcgcgtcgccgtcgcgataaagtctggctgtcatgcgctccttgtcgcaggaggaagtgagtccactcaagtctgaataagggcgtcggaccaactcaatcacgcgtcggcactgatgcaattggagaaggttgaaatgcgaccgtcagagcccttgctcttcctgtattagaagcaaatcggggaggagctcctgtatttaccccgaaaacccaggggttggaacacccaagtctgggactaagcccattcgcattagaaagctgccaacgactccaggtaccgtcaatatacagagagcctcgacacacgacaccaacattgaaagctcgccaaatccgacgtcactccttcgtgctgactctcctgctcccagtacgaacaatacgccgaaagagtcaagcctgagcgattcgggaacaggctatagggagcgctttcactggacgtctgttttgaacgacatcaatgaccagctggatgctcaaaatgacaatacaaacagcaaccagtcgagcacgcagaatgcaggagtgcagccggtcgtttcccgcggcattctgctccaccagggctgcaaacccataagcaaagccgagttgctgatggctatgcctgcgaagcagacagcagatagacttatcgctcgatatttctcatcatttggtgagccgctatgcatcttacacagggacgagtttctgaatctgtatgagaaattctggcaagatcaatctagcgccaccgtccccttcatcggccttctcttcagtatattatgtttaggggctcaatccgagagcccaaatatccgcataagcgacgcgaatgccacggatccgagcatgtctcctcttgggactgtggtagacttctatcgagaaaaggttgtccagtctctggttcttgcgagcttcagcaaaggcggtcctttcatcgtcgagacgatgttacattacatgattgtcgaacactatctacggaaagacaccgacattggtgtctggctggtcttggggaacatgtatcaagtcgcaattcgcatgggataccatcgtgatccagctcactttaagaacatctcagtttacgaaggcgagatgcgtcgccgtgtgtggatgaacatatggtgtaccgatgccgtcatctcgacccaaatgggcatgccgaccgttgtcagcatgtccatcgccgacactgcatcgccacgaaatctgctcgacagcgatttcaacgtgaactcgacctcgcttccacctcctcgcccgccggacgagatgacgcccgttctgcctctgattataaagagcaggatattcaagcaacttcgtctagctagtgagctagtcacgagtgtcagatcatcttcctattccgacgtgactaagatcgatgcgcaattgagggaagtgcaggacagcatccccc

SEQ ID NO: 22634 - DNA, 1983 bp, Muscodor strobelii
  misc_feature: SGI cDNA ID NO. 567688
  misc_feature: Elevated expression when VOC is produced
  misc_feature: Encodes the peptide sequence at SEQ ID NO 22635
atgacacaaattgaacaacttgttcagatttttctcaatgtttctaacgtagttgcatttgtctgggggccgatcaagtttgttcttcttattgccagtacccggcttgatacactcgaatgtttactggacacttatatcgacatcggagaggtgatccctggtcttaaacaatacgaccagctttttagaacagcgcctcgcatcatagaaattctagagagatacttctgcgacattctagagtttcatcgaaacgctctagaggtattttctagcccagcgtggaaagttctcttccattctgcatggaaaacgttcaagtcgagattcaagcctatcctggaaagtctcaagcgtcatagagcattactcttagatgaaagactcaatgcagcagtggtcgaggttcagagcagccggtcgcagataatcgaaaccataaacggttcgacgacatctgttacggaacaggtagagcaactggaaagacatgtacaagaagtcttcgaaaagctctcggatcaggtctatcaactacaccaaatggttcttggagatgaagaacggaaccgaaacgcctataaagagcatattaactctattgtggccaaaatggagcctccagatttcgaggcggaccaacggtctgctttcaacgcctgtcaccacggagcgggtcaatggatcttcaacaatccaattttcgagaagtggaaacattcaaaagacgcgacaagtgcggttcttttcatacatggtatgccaggatcaggcaagactatcatggcatctaatgtcatcagtaaactacggtctatgccaagacaataccacgagtcatgtctattcttctatttcaagcactcagacgatgccagaagaacgatcgcagatatgcttcgcactttcctggtccaactggtgcaccaggatggtgccttagccccgatacttcatgcggagtgctccgctctcagcaactcggacgcccgacaactgcataatcttcaaacatggtcattagagctactcaaaagtcagaatacatgcacaatcgttcttgatggtatggatgagtgtgaccatagtggtaacagcggggcgcgtaggatacttgaatggtcatttgcacaggcccgagcttctgagatcggagagaggttctcacttgacctgaccgagcaaaacaatattgtccaccaggtcactgaaacggcacaaggcatgttcctttatgccagggtggttcttgataaccttcttgctcagggatcggaagcagaactagaggaagagctccaagccgactttccgtcgggactggatcaagcatatgatcgtgtaatgcaccggatactcgatcccaaaacacggccggagaaaacgcgggtagcaagcttgaatatactgcgttggctcacatgtgcgaccagaccactcctctggcatgagttacaatgcttcttctgtatagatcctcacacggaccgatgcgatccaaaaaagagacgagttgatagcggtaaagttctctgtggatcattcgtggattatggcgatgtggccgttgagatgctgggatcatcgatcccaaatccgaccgtaagactcgttcatgagacagcgcgccgttatttcgtccaagccggctatgtcgacacaattgaggcaaatgccgcaataaccatctggtcgtctgcgtacttaggttcattgccattttccaagcacatcgatgaacaatttattcacgcaatggcatatgtcggttattatgggttggagaactatgtcatttcatcattccggacccacatctctctcctcaagcagacacctgatttacggttatcacccacgaccgtacagagcttacaacaggcactatatgagctcatcaagaaatttgacctggaccacaacaacgatgcagatctagacacacttgacaaaacgatgggtgtccccgccaaggtatag

SEQ ID NO: 22635 - protein, 660 aa, Muscodor strobelii
  misc_feature: SGI Peptide ID NO. 567688
  misc_feature (1)..(612): NCBI GI: 256722692 Blast Desc: NECHADRAFT_102084 [Nectria haematococca mpVI 77-13-4]
  misc_feature (1)..(651): NCBI GI: 46138109 Blast Desc: FG10569.1 [Gibberella zeae PH-1]
  misc_feature (1)..(594): NCBI GI: 115402309 Blast Desc: [Aspergillus terreus NIH2624] gi|114189077|gb|EAU30777.1| [Aspergillus terreus NIH2624]
  misc_feature (1)..(607): NCBI GI: 256730132 Blast Desc: NECHADRAFT_95028 [Nectria haematococca mpVI 77-13-4]
  misc_feature (1)..(640): NCBI GI: 46127693 Blast Desc: FG08224.1 [Gibberella zeae PH-1]
  misc_feature (1)..(657): NCBI GI: 256729300 Blast Desc: NECHADRAFT_47446 [Nectria haematococca mpVI 77-13-4]
  misc_feature (1)..(607): NCBI GI: 85089980 Blast Desc: NCU09760 [Neurospora crassa OR74A] gi|28919536|gb|EAA28964.1| [Neurospora crassa OR74A]
  misc_feature (1)..(617): NCBI GI: 171679325 Blast Desc: protein product [Podospora anserina] gi|170939288|emb|CAP64516.1| protein product [Podospora anserina]
  misc_feature (3)..(616): NCBI GI: 238482559 Blast Desc: zinc finger protein, [Aspergillus flavus NRRL3357] gi|220700568|gb|EED56906.1| zinc finger protein, [Aspergillus flavus NRRL3357]
  misc_feature (46)..(607): NCBI GI: 189201381 Blast Desc: conserved [Pyrenophora tritici-repentis Pt-1C-BFP] gi|187984126|gb|EDU49614.1| conserved [Pyrenophora tritici-repentis Pt-1C-BFP]
  misc_feature: Useful for introducing or modulating the production of volatile compounds
MTQIEQLVQIFLNVSNVVAFVWGPIKFVLLIASTRLDTLECLLDTYIDIGEVIPGLKQYDQLFRTAPRIIEILERYFCDILEFHRNALEVFSSPAWKVLFHSAWKTFKSRFKPILESLKRHRALLLDERLNAAVVEVQSSRSQIIETINGSTTSVTEQVEQLERHVQEVFEKLSDQVYQLHQMVLGDEERNRNAYKEHINSIVAKMEPPDFEADQRSAFNACHHGAGQWIFNNPIFEKWKHSKDATSAVLFIHGMPGSGKTIMASNVISKLRSMPRQYHESCLFFYFKHSDDARRTIADMLRTFLVQLVHQDGALAPILHAECSALSNSDARQLHNLQTWSLELLKSQNTCTIVLDGMDECDHSGNSGARRILEWSFAQARASEIGERFSLDLTEQNNIVHQVTETAQGMFLYARVVLDNLLAQGSEAELEEELQADFPSGLDQAYDRVMHRILDPKTRPEKTRVASLNILRWLTCATRPLLWHELQCFFCIDPHTDRCDPKKRRVDSGKVLCGSFVDYGDVAVEMLGSSIPNPTVRLVHETARRYFVQAGYVDTIEANAAITIWSSAYLGSLPFSKHIDEQFIHAMAYVGYYGLENYVISSFRTHISLLKQTPDLRLSPTTVQSLQQALYELIKKFDLDHNNDADLDTLDKTMGVPAKV

SEQ ID NO: 22636 - DNA, 3858 bp, Muscodor strobelii
  misc_feature: SGI EST ID NO. CUFF.53291.0
  misc_feature: Variant of the nucleotide sequence at SEQ ID NO 22634
agtaattccatcttagtttgaacatgacagcgatatcatacttagcatttgaacgggcaactcaaaagtttagagagagccttactgacgaacaaaacacagcttttctcgcaacttccctggacgatgtgcatgaagagatccaaaggatacagcagcggtacgtctccgtgaggaagctacgcaatcttaataggctgtctaaattcatagaaaccatgacacaaattgaacaacttgttcagatttttctcaatgtttctaacgtagttgcatttgtctgggggccgatcaagtttgttcttcttattgccagtacccggcttgatacactcgaatgtttactggacacttatatcgacatcggagaggtgatccctggtcttaaacaatacgaccagctttttagaacagcgcctcgcatcatagaaattctagagagatacttctgcgacattctagagtttcatcgaaacgctctagaggtattttctagcccagcgtggaaagttctcttccattctgcatggaaaacgttcaagtcgagattcaagcctatcctggaaagtctcaagcgtcatagagcattactcttagatgaaagactcaatgcagcagtggtcgaggttcagagcagccggtcgcagataatcgaaaccataaacggttcgacgacatctgttacggaacaggtagagcaactggaaagacatgtacaagaagtcttcgaaaagctctcggatcaggtctatcaactacaccaaatggttcttggagatgaagaacggaaccgaaacgcctataaagagcatattaactctattgtggccaaaatggagcctccagatttcgaggcggaccaacggtctgctttcaacgcctgtcaccacggagcgggtcaatggatcttcaacaatccaattttcgagaagtggaaacattcaaaagacgcgacaagtgcggttcttttcatacatggtatgccaggatcaggcaagactatcatggcatctaatgtcatcagtaaactacggtctatgccaagacaataccacgagtcatgtctattcttctatttcaagcactcagacgatgccagaagaacgatcgcagatatgcttcgcactttcctggtccaactggtgcaccaggatggtgccttagccccgatacttcatgcggagtgctccgctctcagcaactcggacgcccgacaactgcataatcttcaaacatggtcattagagctactcaaaagtcagaatacatgcacaatcgttcttgatggtatggatgagtgtgaccatagtggtaacagcggggcgcgtaggatacttgaatggtttttaatgtctgtcatacccgaatgtcagcgtaatggcacaacactgcggttgttgatattgggacaaagagatggaaatctagatgagcttctttctggctacccttccattcgattagaaaggatgttggaacactcaaatgatctaaggtcatttgcacaggcccgagcttctgagatcggagagaggttctcacttgacctgaccgagcaaaacaatattgtccaccaggtcactgaaacggcacaaggcatgttcctttatgccagggtggttcttgataaccttcttgctcagggatcggaagcagaactagaggaagagctccaagccgactttccgtcgggactggatcaagcatatgatcgtgtaatgcaccggatactcgatcccaaaacacggccggagaaaacgcgggtagcaagcttgaatatactgcgttggctcacatgtgcgaccagaccactcctctggcatgagttacaatgcttcttctgtatagatcctcacacggaccgatgcgatccaaaaaagagacgagttgatagcggtaaagttctctgtggatcattcgtggattatggcgatgtggccgttgagatgctgggatcatcgatcccaaatccgaccgtaagactcgttcatgagacagcgcgccgttatttcgtccaagccggctatgtcgacacaattgaggcaaatgccgcaataaccatctggtcgtctgcgtacttaggttcattgccattttccaagcacatcgatgaacaatttattcacgcaatggcatatgtcggttattatgggttggagaactatgtcatttcatcattccggacccacatctctctcctcaagcagacacctgatttacggttatcacccacgaccgtacagagcttacaacaggcactatatgagctcatcaagaaatttgacctggaccacaacaacgatgcagatctagacacacttgacaaaacggtaacttatcttgagaaaaatgattacatgacactcactcggcggctcgaagaagtgtcactgcctattcgaagggtggttgaagctatagatcctacaaagctcgacaagagacagagtgacatttttcaaactttgaacggtgttctacgatttaggtgcacccgtctaggatgtcaacgcttttcttgcgggtttgacgacgagaaatcccgcgatttgcacgtctcgcagcatgaaaatcaattcacatgtcccacagatgggtgtccccgccaaggtatagggtttaagtcaaggtccattcttgaaaaacatatagaagaagtgcaccaaccgactgagcaccaagtggacgtgttcccctctatacgaaaaccaaaagatatatggtctgcttgcgctcaaggtaacattgagtttgtcaaaagcttccgtgatgctggcgggaacttggaggccgtacggaatcaaaacggttatctcacgcctcttttcctcgcggcgcgaaacaaccatgttgagttatgccaatatctcgtcaccagtggttgtaaagtttccagctcgcggatgaagccggaagcttccgcagccggggaggccatgcgaacgcgtaatgtgagactatttaatgtcatattgacttcggtaaacaagactaccatggaagagttcatcaataactcttactttggaagatacgttgcagtggcaattaatataggaaaccgctttttcctggatcggcttctagagatgaactcgaaacggcagtacccgctcaatgccacagatattctaacagctgcttgcagaactaactcagagcatgacgatagggttgtgtcgtattttgaacagactttgagctcgctatccaaggaagagacaaataattttgtgacctgggcggacgcagccggtcgttcacatctttattgggcgtgtgtttaccaaaatgagaatgctgtacatgttcttctgccccgtatgaccaatgacaacatatatcgcacggtgaaagaccacataagcgcgataagccaaagcatgatgaagtccaactccgagatccttcgctccttggtccagcgcagccctgggcatgctacagctctatatcacgaaaacaataataggccgttgcatctcgcttgtcttcggggaaattttgaattcgtcacaatgctgcttcctcactctatggtgttcctaaacgaaggaaattcggtgggcgacacgcctttgcacttagcgatcaagggagagccaccaaagttcagtccatcactagcggtagtagacgcattactcaaaacaaggtctattgatctatcagtgagaaatcacaatagtcaaactgccctcgacatttgccatgatccggagatacggacgttgttagaatcttattggggggtcgaattaggactagatgctgaagcgcaagaacagttgaccattgacccgaaagaactagtaaactgatatgagaactgaacgatagaaataattatatgactcg

SEQ ID NO: 22637 - DNA, 2064 bp, Muscodor strobelii
  misc_feature: SGI cDNA ID NO. 567689
  misc_feature: Elevated expression when VOC is produced
  misc_feature: Encodes the peptide sequence at SEQ ID NO 22638
atgacagcgatatcatacttagcatttgaacgggcaactcaaaagtttagagagagccttactgacgaacaaaacacagcttttctcgcaacttccctggacgatgtgcatgaagagatccaaaggatacagcagcggtacgtctccgggccgatcaagtttgttcttcttattgccagtacccggcttgatacactcgaatgtttactggacacttatatcgacatcggagaggtgatccctggtcttaaacaatacgaccagctttttagaacagcgcctcgcatcatagaaattctagagagatacttctgcgacattctagagtttcatcgaaacgctctagaggtattttctagcccagcgtggaaagttctcttccattctgcatggaaaacgttcaagtcgagattcaagcctatcctggaaagtctcaagcgtcatagagcattactcttagatgaaagactcaatgcagcagtggtcgaggttcagagcagccggtcgcagataatcgaaaccataaacggttcgacgacatctgttacggaacaggtagagcaactggaaagacatgtacaagaagtcttcgaaaagctctcggatcaggtctatcaactacaccaaatggttcttggagatgaagaacggaaccgaaacgcctataaagagcatattaactctattgtggccaaaatggagcctccagatttcgaggcggaccaacggtctgctttcaacgcctgtcaccacggagcgggtcaatggatcttcaacaatccaattttcgagaagtggaaacattcaaaagacgcgacaagtgcggttcttttcatacatggtatgccaggatcaggcaagactatcatggcatctaatgtcatcagtaaactacggtctatgccaagacaataccacgagtcatgtctattcttctatttcaagcactcagacgatgccagaagaacgatcgcagatatgcttcgcactttcctggtccaactggtgcaccaggatggtgccttagccccgatacttcatgcggagtgctccgctctcagcaactcggacgcccgacaactgcataatcttcaaacatggtcattagagctactcaaaagtcagaatacatgcacaatcgttcttgatggtatggatgagtgtgaccatagtggtaacagcggggcgcgtaggatacttgaatggtcatttgcacaggcccgagcttctgagatcggagagaggttctcacttgacctgaccgagcaaaacaatattgtccaccaggtcactgaaacggcacaaggcatgttcctttatgccagggtggttcttgataaccttcttgctcagggatcggaagcagaactagaggaagagctccaagccgactttccgtcgggactggatcaagcatatgatcgtgtaatgcaccggatactcgatcccaaaacacggccggagaaaacgcgggtagcaagcttgaatatactgcgttggctcacatgtgcgaccagaccactcctctggcatgagttacaatgcttcttctgtatagatcctcacacggaccgatgcgatccaaaaaagagacgagttgatagcggtaaagttctctgtggatcattcgtggattatggcgatgtggccgttgagatgctgggatcatcgatcccaaatccgaccgtaagactcgttcatgagacagcgcgccgttatttcgtccaagccggctatgtcgacacaattgaggcaaatgccgcaataaccatctggtcgtctgcgtacttaggttcattgccattttccaagcacatcgatgaacaatttattcacgcaatggcatatgtcggttattatgggttggagaactatgtcatttcatcattccggacccacatctctctcctcaagcagacacctgatttacggttatcacccacgaccgtacagagcttacaacaggcactatatgagctcatcaagaaatttgacctggaccacaacaacgatgcagatctagacacacttgacaaaacgatgggtgtccccgccaaggtatag

SEQ ID NO: 22638 - protein, 687 aa, Muscodor strobelii
  misc_feature: SGI Peptide ID NO. 567689
  misc_feature (1)..(639): NCBI GI: 256722692 Blast Desc: NECHADRAFT_102084 [Nectria haematococca mpVI 77-13-4]
  misc_feature (9)..(678): NCBI GI: 46138109 Blast Desc: FG10569.1 [Gibberella zeae PH-1]
  misc_feature (47)..(621): NCBI GI: 115402309 Blast Desc: [Aspergillus terreus NIH2624] gi|114189077|gb|EAU30777.1| [Aspergillus terreus NIH2624]
  misc_feature (8)..(684): NCBI GI: 256729300 Blast Desc: NECHADRAFT_47446 [Nectria haematococca mpVI 77-13-4]
  misc_feature (35)..(634): NCBI GI: 256730132 Blast Desc: NECHADRAFT_95028 [Nectria haematococca mpVI 77-13-4]
  misc_feature (8)..(634): NCBI GI: 85089980 Blast Desc: NCU09760 [Neurospora crassa OR74A] gi|28919536|gb|EAA28964.1| [Neurospora crassa OR74A]
  misc_feature (47)..(674): NCBI GI: 46127693 Blast Desc: FG08224.1 [Gibberella zeae PH-1]
  misc_feature (2)..(643): NCBI GI: 238482559 Blast Desc: zinc finger protein, [Aspergillus flavus NRRL3357] gi|220700568|gb|EED56906.1| zinc finger protein, [Aspergillus flavus NRRL3357]
  misc_feature (9)..(644): NCBI GI: 171679325 Blast Desc: protein product [Podospora anserina] gi|170939288|emb|CAP64516.1| protein product [Podospora anserina]
  misc_feature (73)..(634): NCBI GI: 189201381 Blast Desc: conserved [Pyrenophora tritici-repentis Pt-1C-BFP] gi|187984126|gb|EDU49614.1| conserved [Pyrenophora tritici-repentis Pt-1C-BFP]
  misc_feature: Useful for introducing or modulating the production of volatile compounds
MTAISYLAFERATQKFRESLTDEQNTAFLATSLDDVHEEIQRIQQRYVSGPIKFVLLIASTRLDTLECLLDTYIDIGEVIPGLKQYDQLFRTAPRIIEILERYFCDILEFHRNALEVFSSPAWKVLFHSAWKTFKSRFKPILESLKRHRALLLDERLNAAVVEVQSSRSQIIETINGSTTSVTEQVEQLERHVQEVFEKLSDQVYQLHQMVLGDEERNRNAYKEHINSIVAKMEPPDFEADQRSAFNACHHGAGQWIFNNPIFEKWKHSKDATSAVLFIHGMPGSGKTIMASNVISKLRSMPRQYHESCLFFYFKHSDDARRTIADMLRTFLVQLVHQDGALAPILHAECSALSNSDARQLHNLQTWSLELLKSQNTCTIVLDGMDECDHSGNSGARRILEWSFAQARASEIGERFSLDLTEQNNIVHQVTETAQGMFLYARVVLDNLLAQGSEAELEEELQADFPSGLDQAYDRVMHRILDPKTRPEKTRVASLNILRWLTCATRPLLWHELQCFFCIDPHTDRCDPKKRRVDSGKVLCGSFVDYGDVAVEMLGSSIPNPTVRLVHETARRYFVQAGYVDTIEANAAITIWSSAYLGSLPFSKHIDEQFIHAMAYVGYYGLENYVISSFRTHISLLKQTPDLRLSPTTVQSLQQALYELIKKFDLDHNNDADLDTLDKTMGVPAKV

SEQ ID NO: 22639 - DNA, 3858 bp, Muscodor strobelii; identical to SEQ ID NO: 22636
  misc_feature: SGI EST ID NO. CUFF.53291.0
  misc_feature: Variant of the nucleotide sequence at SEQ ID NO 22637

SEQ ID NO: 22640 - DNA, 2685 bp, Muscodor strobelii
  misc_feature: SGI cDNA ID NO. 567690
  misc_feature: Encodes the peptide sequence at SEQ ID NO 22641
atggaccaaggaggtctccgaaaacgcacgtggacaacggctgggctggatgcggacgagcgaagaggcgtacgcacctgggatgcatcaaccaatccgacattttctgtcgaccagagccagatagtatgtgacaagcaagctggtagtacaccccagagcgaagaaaaggacccaacatgggactcttatccaaaagaatgcacaattatccagtctcccgcctcaactacgccccttgccgacggaaaaatatgttacggcgctatttgtgatgcaaaagtgaaattcgcccaaaatcagcttccttccttagcgcctaacgggtggaatcaattctgtcagtttgagcttgtcaaaaacagcagccactatggcgttcgatctatcggcagtataagcgaggagattggtgtcttagatcttatcactaccaatatcctgcaaccactgcagcaatggcctgaagttacaatgacagcaattttagcttcgcgcgacttcaatcaactgtcgaaaaagaaatcgcgtaacgtcattgctcatatcgtctcagtcaatatcatgggaccggagagcttacttgagcgggtaggcgacgcagtcgcagacagacagggtcatctccaacacccctatttcctgccggccgacgtggagtatttcaacccgcattacttctatccgcatggattgaaagtaaatctaagacatcttgtcgggcctcaacttgaatcgatggaggcggcaagttttgctcaggggctacaagacgtcttcagtagtctagcggacgttgacaattctcataaggccctttcagcgttgttgaatgaaatctatcaacaaggtttacttatgactccgttgaaaacacaccaagtccaggctcttgggttcatcctagcgagagaagatcatagtatcgccgcctcggtcagccagactctggaaggtctcttaggacgtcagtcacgcattccacgtatcaatccaatattaggtggtataaatgcagattcaatggggttaggcaagaccttaacgatgctgacggcaatactatgcactatggaagatgctacacagttcagcagatgccagtcgctgcaacttccagcaacaaaagcgactctcatagttgcaccatccccacaggtgatggagatttggaaatctgagattcttagtcactttgcagctggagtcatgtccgtctgcacatttcatggcgataaaagagcgcagttcatagaggacctcattaagagtgacctcgttctgaccacgtatcataccttgaaatcggatatgaaattaaagaagctactccaggggataatgtggtttcgcgtcgtgcttgatgaagcacattggattagaaatagcgcaactcagcaattcaaggccgctcgtagcttaacagcgcagagacgatggtgtataagtggtactccaattcagaactctttgaatgatctacggtcgtttctagattttcttcacttccagccattgtcagaatcaggctacttcgcgaaacatattatcgagccattgcaagtagactcgcctgaccgattcaagaatctaagagctctgatgcgtgcaatttgtttccgacgaacatctgagctgctggaccttccccagccgatcattcgagaagtcccggtaattctaacgcaagacgagcaaacagtctatgacgaagttgttgcggcttctgaaagagagtatcaggaaataattaacatgaagtcgatgaagaaaaagtattgcgtgttatttgcaacaaccatgaaactccgccgtctttgtaaccatggcactttccggaatctaagcatggccaatggttccccagcagatccatcgaacatgaattcggagagcgcaagcattcggaagacagacattgaccctgagcttccgtgtgcgtactgtgatggagatgacgcagatttggaagcattggatctgggaatggatacttgcccagagtgttgccgggctctgaataacacggcacaaagagtttactccccaatttctctctccccaacacccactaccgctttggacactccaagcatatctccgaagtggacgcccattgaccagactcaatccactgtgcacccaaagtcatcagtgcgtataggggaatcttcaaagctactagcagtattggataatatcgatagatcactttcatcttccaaacacctagtttttacgtcgtggcggtatacactggatattctccaattcatgttaagccagagaagcgttccgtgtctacgaatcgacggtcagacatctttttctgatagacagtcagttctcacgctgtttcggcaggacccatatcagaacgttcttcttctatccatcgcaactggtgcagttggtctgacattgacagtcgccgatcatgtgcatattgttgagccacagtggaatccgcttgtcgaagaacaagctattggccgagctgtgaggattggacaagaacgtcccgtgacaatctacaagtacattacgatgaacacggttgaaaggaacattgcaacccttcaaaagaaaaagagtcagcttgcgaagatctctctagatggctgcactggcgatcaagttcaacaaggactcgaggatttgatgttcattatgcaaacgaactag

SEQ ID NO: 22641 - protein, 894 aa, Muscodor strobelii
  misc_feature: SGI Peptide ID NO. 567690
  misc_feature (759)..(837): Pfam Id: PF00271 Pfam Desc: Helicase conserved C-terminal domain
  misc_feature (293)..(613): Pfam Id: PF00176 Pfam Desc: SNF2 family N-terminal domain
  misc_feature (293)..(501): Pfam Id: PF00176 Pfam Desc: SNF2 family N-terminal domain
  misc_feature (139)..(854): NCBI GI: 256722749 Blast Desc: NECHADRAFT_53012 [Nectria haematococca mpVI 77-13-4]
  misc_feature (184)..(894): NCBI GI: 164422685 Blast Desc: NCU10809 [Neurospora crassa OR74A] gi|157069777|gb|EDO64895.1| [Neurospora crassa OR74A]
  misc_feature (81)..(854): NCBI GI: 46138107 Blast Desc: FG10568.1 [Gibberella zeae PH-1]
  misc_feature (110)..(872): NCBI GI: 256730376 Blast Desc: NECHADRAFT_106263 [Nectria haematococca mpVI 77-13-4]
  misc_feature (62)..(868): NCBI GI: 171679323 Blast Desc: protein product [Podospora anserina] gi|170939287|emb|CAP64515.1| protein product [Podospora anserina]
  misc_feature (84)..(674): NCBI GI: 46127691 Blast Desc: FG08223.1 [Gibberella zeae PH-1]
  misc_feature (82)..(877): NCBI GI: 156062442 Blast Desc: SS1G_01337 [Sclerotinia sclerotiorum 1980] gi|154696673|gb|EDN96411.1| SS1G_01337 [Sclerotinia sclerotiorum 1980]
  misc_feature (136)..(874): NCBI GI: 115387833 Blast Desc: [Aspergillus terreus NIH2624] gi|114195506|gb|EAU37206.1| [Aspergillus terreus NIH2624]
  misc_feature (42)..(873): NCBI GI: 46137913 Blast Desc: FG10471.1 [Gibberella zeae PH-1]
  misc_feature (136)..(872): NCBI GI: 212529810 Blast Desc: helicase, [Penicillium marneffei ATCC 18224] gi|210074460|gb|EEA28547.1| helicase, [Penicillium marneffei ATCC 18224]
MDQGGLRKRTWTTAGLDADERRGVRTWDASTNPTFSVDQSQIVCDKQAGSTPQSEEKDPTWDSYPKECTIIQSPASTTPLADGKICYGAICDAKVKFAQNQLPSLAPNGWNQFCQFELVKNSSHYGVRSIGSISEEIGVLDLITTNILQPLQQWPEVTMTAILASRDFNQLSKKKSRNVIAHIVSVNIMGPESLLERVGDAVADRQGHLQHPYFLPADVEYFNPHYFYPHGLKVNLRHLVGPQLESMEAASFAQGLQDVFSSLADVDNSHKALSALLNEIYQQGLLMTPLKTHQVQALGFILAREDHSIAASVSQTLEGLLGRQSRIPRINPILGGINADSMGLGKTLTMLTAILCTMEDATQFSRCQSLQLPATKATLIVAPSPQVMEIWKSEILSHFAAGVMSVCTFHGDKRAQFIEDLIKSDLVLTTYHTLKSDMKLKKLLQGIMWFRVVLDEAHWIRNSATQQFKAARSLTAQRRWCISGTPIQNSLNDLRSFLDFLHFQPLSESGYFAKHIIEPLQVDSPDRFKNLRALMRAICFRRTSELLDLPQPIIREVPVILTQDEQTVYDEVVAASEREYQEIINMKSMKKKYCVLFATTMKLRRLCNHGTFRNLSMANGSPADPSNMNSESASIRKTDIDPELPCAYCDGDDADLEALDLGMDTCPECCRALNNTAQRVYSPISLSPTPTTALDTPSISPKWTPIDQTQSTVHPKSSVRIGESSKLLAVLDNIDRSLSSSKHLVFTSWRYTLDILQFMLSQRSVPCLRIDGQTSFSDRQSVLTLFRQDPYQNVLLLSIATGAVGLTLTVADHVHIVEPQWNPLVEEQAIGRAVRIGQERPVTIYKYITMNTVERNIATLQKKKSQLAKISLDGCTGDQVQQGLEDLMFIMQTN

SEQ ID NO: 22642 - DNA, 3379 bp, Muscodor strobelii
  misc_feature: SGI EST ID NO. CUFF.53163.0
  misc_feature: Variant of the nucleotide sequence at SEQ ID NO 22640
cccggagtcactcgattatttccaatacctgaaaatcgatggaccaaggaggtctccgaaaacgcacgtggacaacggctgggctggatgcggacgagcgaagaggcgtacgcacctgggatgcatcaaccaatccgacattttctgtcgaccagagccagatagtatgtgacaagcaagctggtagtacaccccagagcgaagaaaaggacccaacatgggactcttatccaaaagaatgcacaattatccagtctcccgcctcaactacgccccttgccgacggaaaaatatgttacggcgctatttgtgatgcaaaagtgaaattcgcccaaaatcagcttccttccttagcgcctaacgggtggaatcaattctgtcagtttgagcttgtcaaaaacagcagccactatggcgttcgatctatcggcagtataagcgaggagattggtgtcttagatcttatcactaccaatatcctgcaaccactgcagcaatggcctgaagttacaatgacagcaattttagcttcgcgcgacttcaatcaactgtcgaaaaagaaatcgcgtaacgtcattgctcatatcgtctcagtcaatatcatgggaccggagagcttacttgagcgggtaggcgacgcagtcgcagacagacagggtcatctccaacacccctatttcctgccggccgacgtggagtatttcaacccgcattacttctatccgcatggattgaaagtaaatctaagacatcttgtcgggcctcaacttgaatcgatggaggcggcaagttttgctcaggggctacaagacgtcttcagtagtctagcggacgttgacaattctcataaggccctttcagcgttgttgaatgaaatctatcaacaaggtttacttatgactccgttgaaaacacaccaagtccaggctcttgggttcatcctagcgagagaagatcatagtatcgccgcctcggtcagccagactctggaaggtctcttaggacgtcagtcacgcattccacgtatcaatccaatattaggtggtataaatgcagattcaatggggttaggcaagaccttaacgatgctgacggcaatactatgcactatggaagatgctacacagttcagcagatgccagtcgctgcaacttccagcaacaaaagcgactctcatagttgcaccatccccacgtgcgttacttcattataattacatttcttgtaatactgacctgattgactgcagaggtgatggagatttggaaatctgagattcttagtcactttgcagctggagtcatgtccgtctgcacatttcatggcgataaaagagcgcagttcatagaggacctcattaagagtgacctcgttctgaccacgtatcataccttgaaatcggatatgaaattaaagaagctactccaggggataatgtggtttcgcgtcgtgcttgatgaagcacattggattagaaatagcgcaactcagcaattcaaggccgctcgtagcttaacagcgcagagacgatggtgtataagtggtactccaattcagaactctttgaatgatctacggtcgtttctagattttcttcacttccagccattgtcagaatcaggctacttcgcgaaacatattatcgagccattgcaagtagactcgcctgaccgattcaagaatctaagagctctgatgcgtgcaatttgtttccgacgaacatctgagctgctggaccttccccagccgatcattcgagaagtcccggtaattctaacgcaagacgagcaaacagtctatgacgaagttgttgcggcttctgaaagagagtatcaggaaataattaacatgaagtcgatgaagaaaaagtattgcgtgttatttgcaacaaccatgaaactccgccgtctttgtaaccatggcactttccggaatctaagcatggccaatggttccccagcagatccatcgaacatgaattcggagagcgcaagcattcggaagacagacattgaccctgagcttccgtgtgcgtactgtgatggagatgacgcagatttggaagcattggatctgggaatggatacttgcccagagtgttgccgggctctgaataacacggcacaaagagtttactccccaatttctctctccccaacacccactaccgctttggacactccaagcatatctccgaagtggacgcccattgaccagactcaatccactgtgcacccaaagtcatcagtgcgtataggggaatcttcaaagctactagcagtattggataatatcgatagatcactttcatcttccaaacacctagtttttacgtcgtggcggtatacactggatattctccaattcatgttaagccagagaagcgttccgtgtctacgaatcgacggtcagacatctttttctgatagacagtcagttctcacgctgtttcggcaggacccatatcagaacgttcttcttctatccatcgcaactggtgcagttggtctgacattgacagtcgccgatcatgtgcatattgttgagccacagtggaatccgcttgtcgaagaacaagctattggccgagctgtgaggattggacaagaacgtcccgtgacaatctacaagtacattacgatgaacacggttgaaaggaacattgcaacccttcaaaagaaaaagagtcagcttgcgaagatctctctagatggctgcactggcgatcaagttcaacaaggactcgaggatttgatgttcattatgcaaacgaactagatttcttgctatagagctggcagaccaaggggatgccattaatattatgcccaaagtacatagatatattaatcgttattatgataatagtttaacgagaaccatgggaattgcttacatgataagtcaatggatctagactggagtccaagggactctaatagagaaatcaaagttcaacaaaaatcattctctggctgagattgaatttctcctagcaaaatacggctgtgacgaccagaccctcaacctgccaaagatacctctcgtaacctcggaactgctctaaactcaccactggtcttgaacatgacttgatagccattctggcgtatatcgcacgcacaggatgtataacttaatcccctgatgcttcacgtcagcaacattgtatcgctaggacctcgcggatctattgtttgattttgcatattgtgctgagtttttgattagcgatgtgtcatacttgactgcatgtggtagtatgattgctggataagtagtcggctttcttgtcgttgacctaagagtacaatgtataatacaaaatatactatatagtacatctggtgcagcgatcgcatttgaccggaggtcacag

SEQ ID NO: 22643 - DNA, 2661 bp, Muscodor strobelii
  misc_feature: SGI cDNA ID NO. 567691
  misc_feature: Elevated expression when VOC is produced
  misc_feature: Encodes the peptide sequence at SEQ ID NO 22644
atggaccaaggaggtctccgaaaacgcacgtggacaacggctgggctggatgcggacgagcgaagaggcgtacgcacctgggatgcatcaaccaatccgacattttctgtcgaccagagccagatagtatgtgacaagcaagctggtagtacaccccagagcgaagaaaaggacccaacatgggactcttatccaaaagaatgcacaattatccagtctcccgcctcaactacgccccttgccgacggaaaaatatgttacggcgctatttgtgatgcaaaagtgaaattcgcccaaaatcagcttccttccttagcgcctaacgggtggaatcaattctgtcagtttgagcttgtcaaaaacagcagccactatggcgttcgatctatcggcagtataagcgaggagattggtgtcttagatcttatcactaccaatatcctgcaaccactgcagcaatggcctgaagttacaatgacagcaattttagcttcgcgcgacttcaatcaactgtcgaaaaagaaatcgcgtaacgtcattgctcatatcgtctcagtcaatatcatgggaccggagagcttacttgagcgggtaggcgacgcagtcgcagacagacagggtcatctccaacacccctatttcctgccggccgacgtggagtatttcaacccgcattacttctatccgcatggattgaaagtaaatctaagacatcttgtcgggcctcaacttgaatcgatggaggcggcaagttttgctcaggggctacaagacgtcttcagtagtctagcggacgttgacaattctcataaggccctttcagcgttgttgaatgaaatctatcaacaaggtttacttatgactccgttgaaaacacaccaagtccaggctcttgggttcatcctagcgagagaagatcatagtatcgccgcctcggtcagccagactctggaaggtctcttaggacgtcagtcacgcattccacgtatcaatccaatattaggtggtataaatgcagattcaatggggttaggcaagaccttaacgatgctgacggcaatactatgcactatggaagatgctacacagttcagcagatgccagtcgctgcaacttccagcaacaaaagcgactctcatagttgcaccatccccacaggtgatggagatttggaaatctgagattcttagtcactttgcagctggagtcatgtccgtctgcacatttcatggcgataaaagagcgcagttcatagaggacctcattaagagtgacctcgttctgaccacgtatcataccttgaaatcggatatgaaattaaagaagctactccaggggataatgtggtttcgcgtcgtgcttgatgaagcacattggattagaaatagcgcaactcagcaattcaaggccgctcgtagcttaacagcgcagagacgatggtgtataagtggtactccaattcagaactctttgaatgatctacggtcgtttctagattttcttcacttccagccattgtcagaatcaggctacttcgcgaaacatattatcgagccattgcaagtagactcgcctgaccgattcaagaatctaagagctctgatgcgtgcaatttgtttccgacgaacatctgagctgctggaccttccccagccgatcattcgagaagtcccggtaattctaacgcaagacgagcaaacagtctatgacgaagttgttgcggcttctgaaagagagtatcaggaaataattaacatgaagtcgatgaagaaaaagtattgcgtgttatttgcaacaaccatgaaactccgccgtctttgtaaccatggcactttccggaatctaagcatggccaatggttccccagcagatccatcgaacatgaattcggagagcgcaagcattcggaagacagacattgaccctgagcttccgtgtgcgtactgtgatggagatgacgcagatttggaagcattggatctgggaatggatacttgcccagagtgttgccgggctctgaataacacggcacaaagagtttactccccaatttctctctccccaacacccactaccgctttggacactccaagcatatctccgaagtggacgcccattgaccagactcaatccactgtgcacccaaagtcatcagtgcgtataggggaatcttcaaagctactagcagtattggataatatcgatagatcactttcatcttccaaacacctagtttttacgtcgtggcggtatacactggatattctccaattcatgttaagccagagaagcgttccgtgtctacgaatcgacggtcagacatctttttctgatagacagtcagttctcacgctgtttcggcaggacccatatcagaacgttcttcttctatccatcgcaactggtgcagttggtctgacattgacagtcgccgatcatgtgcatattgttgagccacagtggaatccgcttgtcgaagaacaagctattggccgagctgtgaggattggacaagaacgtcccgtgacaatctacaagtacattacgatgaacacggttgaaaggaacattgcaacccttcaaaagaaaaagagtcagcttgcgaagatctctctagatggctgcactggcgatcaagttcaacaaggactcgaggtatga

SEQ ID NO: 22644 - protein, 886 aa, Muscodor strobelii
  misc_feature: SGI Peptide ID NO. 567691
  misc_feature (759)..(837): Pfam Id: PF00271 Pfam Desc: Helicase conserved C-terminal domain
  misc_feature (293)..(613): Pfam Id: PF00176 Pfam Desc: SNF2 family N-terminal domain
  misc_feature (293)..(501): Pfam Id: PF00176 Pfam Desc: SNF2 family N-terminal domain
  misc_feature (139)..(854): NCBI GI: 256722749 Blast Desc: NECHADRAFT_53012 [Nectria haematococca mpVI 77-13-4]
  misc_feature (184)..(885): NCBI GI: 164422685 Blast Desc: NCU10809 [Neurospora crassa OR74A] gi|157069777|gb|EDO64895.1| [Neurospora crassa OR74A]
  misc_feature (81)..(854): NCBI GI: 46138107 Blast Desc: FG10568.1 [Gibberella zeae PH-1]
  misc_feature (110)..(872): NCBI GI: 256730376 Blast Desc: NECHADRAFT_106263 [Nectria haematococca mpVI 77-13-4]
  misc_feature (62)..(868): NCBI GI: 171679323 Blast Desc: protein product [Podospora anserina] gi|170939287|emb|CAP64515.1| protein product [Podospora anserina]
  misc_feature (82)..(877): NCBI GI: 156062442 Blast Desc: SS1G_01337 [Sclerotinia sclerotiorum 1980] gi|154696673|gb|EDN96411.1| SS1G_01337 [Sclerotinia sclerotiorum 1980]
  misc_feature (84)..(674): NCBI GI: 46127691 Blast Desc: FG08223.1 [Gibberella zeae PH-1]
  misc_feature (136)..(874): NCBI GI: 115387833 Blast Desc: [Aspergillus terreus NIH2624] gi|114195506|gb|EAU37206.1| [Aspergillus terreus NIH2624]
  misc_feature (398)..(886): NCBI GI: 256729491 Blast Desc: NECHADRAFT_47402 [Nectria haematococca mpVI 77-13-4]
  misc_feature (42)..(873): NCBI GI: 46137913 Blast Desc: FG10471.1 [Gibberella zeae PH-1]
  misc_feature: Useful for introducing or modulating the production of volatile compounds
MDQGGLRKRTWTTAGLDADERRGVRTWDASTNPTFSVDQSQIVCDKQAGSTPQSEEKDPTWDSYPKECTIIQSPASTTPLADGKICYGAICDAKVKFAQNQLPSLAPNGWNQFCQFELVKNSSHYGVRSIGSISEEIGVLDLITTNILQPLQQWPEVTMTAILASRDFNQLSKKKSRNVIAHIVSVNIMGPESLLERVGDAVADRQGHLQHPYFLPADVEYFNPHYFYPHGLKVNLRHLVGPQLESMEAASFAQGLQDVFSSLADVDNSHKALSALLNEIYQQGLLMTPLKTHQVQALGFILAREDHSIAASVSQTLEGLLGRQSRIPRINPILGGINADSMGLGKTLTMLTAILCTMEDATQFSRCQSLQLPATKATLIVAPSPQVMEIWKSEILSHFAAGVMSVCTFHGDKRAQFIEDLIKSDLVLTTYHTLKSDMKLKKLLQGIMWFRVVLDEAHWIRNSATQQFKAARSLTAQRRWCISGTPIQNSLNDLRSFLDFLHFQPLSESGYFAKHIIEPLQVDSPDRFKNLRALMRAICFRRTSELLDLPQPIIREVPVILTQDEQTVYDEVVAASEREYQEIINMKSMKKKYCVLFATTMKLRRLCNHGTFRNLSMANGSPADPSNMNSESASIRKTDIDPELPCAYCDGDDADLEALDLGMDTCPECCRALNNTAQRVYSPISLSPTPTTALDTPSISPKWTPIDQTQSTVHPKSSVRIGESSKLLAVLDNIDRSLSSSKHLVFTSWRYTLDILQFMLSQRSVPCLRIDGQTSFSDRQSVLTLFRQDPYQNVLLLSIATGAVGLTLTVADHVHIVEPQWNPLVEEQAIGRAVRIGQERPVTIYKYITMNTVERNIATLQKKKSQLAKISLDGCTGDQVQQGLEV

SEQ ID NO: 22645 - DNA, 3379 bp, Muscodor strobelii; identical to SEQ ID NO: 22642
  misc_feature: SGI EST ID NO. CUFF.53163.0
  misc_feature: Variant of the nucleotide sequence at SEQ ID NO 22643

SEQ ID NO: 22646 - DNA, 381 bp, Muscodor strobelii
  misc_feature: SGI cDNA ID NO. 567692
  misc_feature: Encodes the peptide sequence at SEQ ID NO 22647
atggcagcgtcagctggtttcacaccgaagcaagctttgccctttgatggcagattattcgatgagcgtcagcgaaataaactaacactaatacctacttcctccacccgccagatcatcggtgccgacgagacacttactatagccaagcacgagatcactttgctccctccgtttccccgtggttctgtcgtccacgattcagcctgcgggttaggaccggtcacggagagcatcattgcaacgacaccgccggctgacatagaattgcatgccaccgatattgccccaccaatggtcggcatctacaacatgaaatcgggcgctggcaactggccggtcaaagccaccactatggacgcacagcgtctaccccgatag

SEQ ID NO: 22647 - protein, 126 aa, Muscodor strobelii
  misc_feature: SGI Peptide ID NO. 567692
  misc_feature (7)..(124): NCBI GI: 189196454 Blast Desc: conserved [Pyrenophora tritici-repentis Pt-1C-BFP] gi|187980444|gb|EDU47070.1| conserved [Pyrenophora tritici-repentis Pt-1C-BFP]
  misc_feature (24)..(124): NCBI GI: 46115658 Blast Desc: FG03671.1 [Gibberella zeae PH-1]
MAASAGFTPKQALPFDGRLFDERQRNKLTLIPTSSTRQIIGADETLTIAKHEITLLPPFPRGSVVHDSACGLGPVTESIIATTPPADIELHATDIAPPMVGIYNMKSGAGNWPVKATTMDAQRLPR

SEQ ID NO: 22648 - DNA, 1170 bp, Muscodor strobelii
  misc_feature: SGI EST ID NO. CUFF.53166.0
  misc_feature: Variant of the nucleotide sequence at SEQ ID NO 22646
caaaacttaggcggccaaccttggaaggtacaggtaagcatgtaaacagcgctatctcttgtatttcccttcccacagcttgccagcctttcgtcttgtcttcaatttcatcttcaacatactacccactatacctccgactaagttcaatcagtatggcagcgtcagctggtttcacaccgaagcaagctttgccctttgatggcagattattcgatgtaaatggaatgagatgacgattgccgcaatgttattgcgatagaacgtagagcgtcagcgaaataaactaacactaatacctacttcctccacccgccagatcatcggtgccgacgagacacttactatagccaagcacgagatcactttgctccctccgtttccccgtggttctgtcgtccacgattcagcctgcgggttaggaccggtcacggagagcatcattgcaacgacaccgccggctgacatagaattgcatgccaccgatattgccccaccaatggtcggcatctacaacatgaaatcgggcgctggcaactggccggtcaaagccaccactatggacgcacagcgtctaccccgatagcaagttcactcacgtctttttgtcgttcggtctgcccatcattcacgactctattgcggccgcaaaggaaaatgtatcgtaccctcgcgcccggtggcactgccgtgactgcgttctggttgcagattcctcagggagaatgcgccgaagccacccgccgcgctgtctggggccctgacgctcacctggcagtcgagccaaagcctcagcacaaggaccgtgactacatcaggagcctacttgtacagggcggcttcaaatttgaagacgtacaaatctacgaaaagtcggcattccttcttgtaagtgacctagacaaattcgcttgtgcaatttggactgctatcggccaaccgccgggtggatggactcaagaagacgaggacaagtgggatgtggcagtggcaaaatacaaggagctcctagccaagaagatgggatttactatggatggagaggggaacatcacgctggaagcaatcgctcagatgtgcattgtcaaaaagaactaacggtatgcatttcttagtagcattataattaataagataacatccgacgatacattccagattgtttgcctg

SEQ ID NO: 22649 - DNA, 441 bp, Muscodor strobelii
  misc_feature: SGI cDNA ID NO. 567693
  misc_feature: Encodes the peptide sequence at SEQ ID NO 22650
atgtatcgtaccctcgcgcccggtggcactgccgtgactgcgttctggttgcagattcctcagggagaatgcgccgaagccacccgccgcgctgtctggggccctgacgctcacctggcagtcgagccaaagcctcagcacaaggaccgtgactacatcaggagcctacttgtacagggcggcttcaaatttgaagacgtacaaatctacgaaaagtcggcattccttcttgtaagtgacctagacaaattcgcttgtgcaatttggactgctatcggccaaccgccgggtggatggactcaagaagacgaggacaagtgggatgtggcagtggcaaaatacaaggagctcctagccaagaagatgggatttactatggatggagaggggaacatcacgctggaagcaatcgctcagatgtgcattgtcaaaaagaactaa

SEQ ID NO: 22650 - protein, 146 aa, Muscodor strobelii
  misc_feature: SGI Peptide ID NO. 567693
  misc_feature (1)..(145): NCBI GI: 46115658 Blast Desc: FG03671.1 [Gibberella zeae PH-1]
  misc_feature (1)..(145): NCBI GI: 46116114 Blast Desc: FG03899.1 [Gibberella zeae PH-1]
  misc_feature (1)..(144): NCBI GI: 46137641 Blast Desc: FG10336.1 [Gibberella zeae PH-1]
MYRTLAPGGTAVTAFWLQIPQGECAEATRRAVWGPDAHLAVEPKPQHKDRDYIRSLLVQGGFKFEDVQIYEKSAFLLVSDLDKFACAIWTAIGQPPGGWTQEDEDKWDVAVAKYKELLAKKMGFTMDGEGNITLEAIAQMCIVKKN

SEQ ID NO: 22651 - DNA, 1170 bp, Muscodor strobelii; identical to SEQ ID NO: 22648
  misc_feature: SGI EST ID NO. CUFF.53166.0
  misc_feature: Variant of the nucleotide sequence at SEQ ID NO 22649

SEQ ID NO: 22652 - DNA, 1215 bp, Muscodor strobelii
  misc_feature: SGI cDNA ID NO. 567694
  misc_feature: Elevated expression when VOC is produced
  misc_feature: Encodes the peptide sequence at SEQ ID NO 22653
atgaatagcacgtcatttgattcagtagaagctactaatgctctacactacttccttatcgaagtctggacaaccttttcgattggaatccttttcacttcgctgagaacgtttgctcggccaaagcaagtcaaattcagagggttccaagcagacgactacttgatatgggttgcaatgctgttctacgcggccgagacgagtcttgcccacttcggtatcacaactaagggccttgcgaacaatggcttgacggctatgcaacggcagagtctagacccaaacggacaggaatatgccctgagagtcattggttccaaggtacaattggctggatggtcgacgtccctatctctactttggtgtctgaaggcatgctggctgtttttctacgtaagacttacagtgggactaagaaaggaatatcaacgacgcattcatttcgggtttgccctattgattgtgacttatcttattgttgttttggatgtgtttctgggttgtcacccgatctcaaaaaactggcaaattgatccggatccaggcaatgcgtgtcagcctgccatatcgacgagaattgtctgggtttatagcagcttcgacctcttcacagatctatacttgctttccattcccattccaatgctctggaatacttcactgaagcccttgaagaaggtcagcctgactgccttgttcagtgggggcattattgtcatgatcttcgccatactacgagctacctttatcgtcacggatccaatgaacggcgcacaagcctctggcttttgggcagttcgagaaagctttgtctctgtaatcacaacaaatttgcctatggtattcccgcttgttcggacctcaattagccctaaagtcgaagcaatgatacagcacataagccaactggctacgagcaagattgcggcaaagatagttccaaattccacctactgcagaggagggagtgatgatacttggcatggtcaccacactacgcccatatgtcctaacactcagtttccacaaaatgaaagtgaggaccacatcgtggaactccactcgactgaaatttcgaacggcagagtctctgacactgacatcggtgagcaatgtgaaggcaccaatcacagaggagccatcagagtccttacaacaatttcagtcgtatctactccacagcaatggaaacaaggcttgatggacccgttttga

SEQ ID NO: 22653 - protein, 404 aa, Muscodor strobelii
  misc_feature: SGI Peptide ID NO. 567694
  misc_feature (18)..(377): NCBI GI: 240277705 Blast Desc: conserved [Ajellomyces capsulatus H143]
  misc_feature (18)..(377): NCBI GI: 154285490 Blast Desc: [Ajellomyces capsulatus NAm1] gi|150407181|gb|EDN02722.1| [Ajellomyces capsulatus NAm1]
  misc_feature (15)..(389): NCBI GI: 171691508 Blast Desc: protein product [Podospora anserina] gi|170945702|emb|CAP71815.1| protein product [Podospora anserina]
  misc_feature (1)..(287): NCBI GI: 159128458 Blast Desc: conserved [Aspergillus fumigatus A1163]
  misc_feature (1)..(287): NCBI GI: 146323135 Blast Desc: AFUA_3G00850 [Aspergillus fumigatus Af293] gi|129556482|gb|EAL86368.2| AFUA_3G00850 [Aspergillus fumigatus Af293]
  misc_feature (1)..(352): NCBI GI: 119473677 Blast Desc: NFIA_001660 [Neosartorya fischeri NRRL 181] gi|119406867|gb|EAW16817.1| conserved [Neosartorya fischeri NRRL 181]
  misc_feature (15)..(372): NCBI GI: 226287149 Blast Desc: conserved [Paracoccidioides brasiliensis Pb18]
  misc_feature (18)..(291): NCBI GI: 256726137 Blast Desc: NECHADRAFT_25451 [Nectria haematococca mpVI 77-13-4]
  misc_feature (14)..(291): NCBI GI: 39975153 Blast Desc: MGG_00277 [Magnaporthe grisea 70-15] gi|145018850|gb|EDK03129.1| MGG_00277 [Magnaporthe grisea 70-15]
  misc_feature (16)..(373): NCBI GI: 226277626 Blast Desc: conserved [Paracoccidioides brasiliensis Pb01]
  misc_feature: Useful for introducing or modulating the production of volatile compounds
MNSTSFDSVEATNALHYFLIEVWTTFSIGILFTSLRTFARPKQVKFRGFQADDYLIWVAMLFYAAETSLAHFGITTKGLANNGLTAMQRQSLDPNGQEYALRVIGSKVQLAGWSTSLSLLWCLKACWLFFYVRLTVGLRKEYQRRIHFGFALLIVTYLIVVLDVFLGCHPISKNWQIDPDPGNACQPAISTRIVWVYSSFDLFTDLYLLSIPIPMLWNTSLKPLKKVSLTALFSGGIIVMIFAILRATFIVTDPMNGAQASGFWAVRESFVSVITTNLPMVFPLVRTSISPKVEAMIQHISQLATSKIAAKIVPNSTYCRGGSDDTWHGHHTTPICPNTQFPQNESEDHIVELHSTEISNGRVSDTDIGEQCEGTNHRGAIRVLTTISVVSTPQQWKQGLMDPF

SEQ ID NO: 22654 - DNA, 1513 bp, Muscodor strobelii
  misc_feature: SGI EST ID NO. CUFF.53175.1
  misc_feature: Variant of the nucleotide sequence at SEQ ID NO 22652
tcggaagcgacgataccatattggaaagctacaatgtgctctttgccctttgtcccttcatgagacgtacttttcatggcgattgatcgcatctcttgtagagatgaatagcacgtcatttgattcagtagaagctactaatgctctacactacttccttatcgaagtctggacaaccttttcgattggaatccttttcacttcgctgagaacgtttgctcggccaaagcaagtcaaattcagagggttccaagcagacgactacttgatatgggttgcaatgctgttctacgcggccgagacgagtcttgcccacttcggtatcacaactaagggccttgcgaacaatggcttgacggctatgcaacggcagagtctagacccaaacggacaggaatatgccctgagagtcattggttccaaggtacaattggctggatggtcgacgtccctatctctactttggtgtctgaaggcatgctggctgtttttctacgtaagacttacagtgggactaagaaaggaatatcaacgacgcattcatttcgggtttgccctattgattgtgacttatcttattgttgttttggatgtgtttctgggttgtcacccgatctcaaaaaactggcaaattgatccggatccaggcaatgcgtgtcagcctgccatatcgacgagaattgtctgggtttatagcagcttcgacctcttcacagatctatacttgctttccattcccattccaatgctctggaatacttcactgaagcccttgaagaaggtcagcctgactgccttgttcagtgggggcattattgtcatgatcttcgccatactacgagctacctttatcgtcacggatccaatgaacggcgcacaagcctctggcttttgggcagttcgagaaagctttgtctctgtaatcacaacaaatttgcctatggtattcccgcttgttcggacctcaattagccctaaagtcgaagcaatgatacagcacataagccaactggctacgagcaagattgcggcaaagatagttccaaattccacctactgcagaggagggagtgatgatacttggcatggtcaccacactacgcccatatgtcctaacactcagtttccacaaaatgaaagtgaggaccacatcgtggaactccactcgactgaaatttcgaacggcagagtctctgacactgacatcggtgagcaatgtgaaggcaccaatcacagaggagccatcagagtccttacaacaatttcagtcgtatctactccacagcaatggaaacaaggcttgatggacccgttttgatgtgctaggacgccgtcattaataatggcatcgcgtatgccctctcgagatccttagcgtagttaatatcgtacagcatacttatccactatactcacaataattacgatcattggcttacagtcctttcaaacagaatcgagcgaagcggagagacgaaagggaagaaatcttcagttcaatcgtgtatcacaa

SEQ ID NO: 22655 - DNA, 762 bp, Muscodor strobelii
  misc_feature: SGI cDNA ID NO. 567695
  misc_feature: Encodes the peptide sequence at SEQ ID NO 22656
atgaatagcacgtcatttgattcagtagaagctactaatgctctacactacttccttatcgaagtctggacaaccttttcgattggaatccttttcacttcgctgagaacgtttgctcggccaaagcaagtcaaattcagagggttccaagcagacgactacttgatatgggttgcaatgctgttctacgcggccgagacgagtcttgcccacttcggtatcacaactaagggccttgcgaacaatggcttgacggctatgcaacggcagagtctagacccaaacggacaggaatatgccctgagagtcattggttccaaggtacaattggctggatggtcgacgtccctatctctactttggtgtctgaaggcatgctggctgtttttctacgtaagacttacagtgggactaagaaaggaatatcaacgacgcattcatttcgggtttgccctattgattgtgacttatcttattgttgttttggatgtgtttctgggttgtcacccgatctcaaaaaactggcaaattgatccggatccaggcaatgcgtgtcagcctgccatatcgacgagaattgtctgggtttatagcagcttcgacctcttcacagatctatacttgctttccattcccattccaatgctctggaatacttcactgaagcccttgaagaaggtcagcctgactgccttgttcagtgggggcattattgtcatgatcttcgccatactacgagctacctttatcgtcacggtataa

SEQ ID NO: 22656 - protein, 253 aa, Muscodor strobelii
  misc_feature: SGI Peptide ID NO. 567695
  misc_feature (18)..(243): NCBI GI: 240277705 Blast Desc: conserved [Ajellomyces capsulatus H143]
  misc_feature (18)..(243): NCBI GI: 154285490 Blast Desc: [Ajellomyces capsulatus NAm1] gi|150407181|gb|EDN02722.1| [Ajellomyces capsulatus NAm1]
  misc_feature (1)..(251): NCBI GI: 159128458 Blast Desc: conserved [Aspergillus fumigatus A1163]
  misc_feature (1)..(251): NCBI GI: 146323135 Blast Desc: AFUA_3G00850 [Aspergillus fumigatus Af293] gi|129556482|gb|EAL86368.2| AFUA_3G00850 [Aspergillus fumigatus Af293]
  misc_feature (1)..(251): NCBI GI: 119473677 Blast Desc: NFIA_001660 [Neosartorya fischeri NRRL 181] gi|119406867|gb|EAW16817.1| conserved [Neosartorya fischeri NRRL 181]
  misc_feature (15)..(252): NCBI GI: 171691508 Blast Desc: protein product [Podospora anserina] gi|170945702|emb|CAP71815.1| protein product [Podospora anserina]
  misc_feature (16)..(251): NCBI GI: 226287149 Blast Desc: conserved [Paracoccidioides brasiliensis Pb18]
  misc_feature (18)..(252): NCBI GI: 256726137 Blast Desc: NECHADRAFT_25451 [Nectria haematococca mpVI 77-13-4]
  misc_feature (13)..(251): NCBI GI: 39975153 Blast Desc: MGG_00277 [Magnaporthe grisea 70-15] gi|145018850|gb|EDK03129.1| MGG_00277 [Magnaporthe grisea 70-15]
  misc_feature (16)..(251): NCBI GI: 226277626 Blast Desc: conserved [Paracoccidioides brasiliensis Pb01]
MNSTSFDSVEATNALHYFLIEVWTTFSIGILFTSLRTFARPKQVKFRGFQADDYLIWVAMLFYAAETSLAHFGITTKGLANNGLTAMQRQSLDPNGQEYALRVIGSKVQLAGWSTSLSLLWCLKACWLFFYVRLTVGLRKEYQRRIHFGFALLIVTYLIVVLDVFLGCHPISKNWQIDPDPGNACQPAISTRIVWVYSSFDLFTDLYLLSIPIPMLWNTSLKPLKKVSLTALFSGGIIVMIFAILRATFIVTV

SEQ ID NO: 22657 - DNA, 1513 bp, Muscodor strobelii; identical to SEQ ID NO: 22654
  misc_feature: SGI EST ID NO. CUFF.53175.1
  misc_feature: Variant of the nucleotide sequence at SEQ ID NO 22655

SEQ ID NO: 22658 - DNA, 1572 bp, Muscodor strobelii
  misc_feature: SGI cDNA ID NO. 567696
  misc_feature: Encodes the peptide sequence at SEQ ID NO 22659
atggagtttaccctcgtctcggtcatgacatggctcacggccgccatcgcgacatatgttgcgatcctgttcacctatcgggtcttacttcatccccttcgaaactatccagggccattccttgcgaagctgtcagatctctatagcggaatacatgccggttccatgaatcttcacgtcaggacgcgtcaggatcttcaaaaatatgggcctgtgatgcgacatggtccaaacaagatcgtgttcagttccttgcaagccatgcatgacatttatcggaacgaacgtatgaccaaatcccaggcatacgaatactcggctgtcactcaaggaaattggaacatattcagcaccattgataaaccactgcaccgtgctaagcgaaagcttgtcggtcaggccatctcagagcggtcgatgcgaatcttcgaacctacattaactcgacaaatcgacacgttcatgtcagtcttgtcagagtcagccgagacccagagccccatcgacatgacagagcggctcaggcgcctgacgattgacattgtcagtttgctggcattcggctatcccctgaacacgcaagtcgactctaaatatcgtttctttctgcctgctcatattttcggagactatcgtacgaatctcgtgatgcaatggccgctcctttaccgcttgggattttacaacattgtggagtttctcttcagcaaggatatcggtcgttattttaccgcgctgggagacataattgccacgcggacggccgaggataagcacgctcgccatgatctgtactcggccctcgcggactcgatggacacagatggcgagtatcgcttccaggacagcgagatctgggccgaggcgggtttcttcttcccggccggcgccgaaaccactgcgaccgtgctgtcagccacatttttctacctcgcgcacaacccgtcctcgtacgagaagctggcagatgagattaggtcgactttcacctcggctgacgagatcaaagggggaactgccctctccggctgcaagtacctccgggcctgtcttgacgagaccatgcgcatgtctccgcctgtactaggcgcgatgtggcgggagcaatgtgcagatgacacggaaccgttaatagtcgacgaccatgtcattccacggggcgtgcaggtgcgcgtcgatgcatacgccacaaaccatgacgaggagatatttcccaattcttttgactacaaaccagagcgttggctggacgcgagtatccctccagaccacagggcactcatggatgccgcgtttcaaccgttctccattggtagccgcagctgtgtcggcaaagccctggcgtacctgtcaccaagtattgtcctagccaagacgctcttgctgtttgatttcacactcccccccggggacttgggcaagttaggtggaggtagccctcgctctgggaaaggacgtgagagagagggcgagttccaactgtacgatgttctcagtgcacttcactatgggccgagcttgttatttcaggcgaggaaagacttaattgcggagcccagggggcgggtttga

SEQ ID NO: 22659 - protein, 523 aa, Muscodor strobelii
  misc_feature: SGI Peptide ID NO. 567696
  misc_feature (37)..(494): Pfam Id: PF00067 Pfam Desc: Cytochrome P450
  misc_feature (255)..(471): Pfam Id: PF00067 Pfam Desc: Cytochrome P450
  misc_feature (26)..(512): NCBI GI: 242771379 Blast Desc: cytochrome P450, [Talaromyces stipitatus ATCC 10500] gi|218721449|gb|EED20867.1| cytochrome P450, [Talaromyces stipitatus ATCC 10500]
  misc_feature (23)..(513): NCBI GI: 255954725 Blast Desc: Pc21g10830 [Penicillium chrysogenum Wisconsin 54-1255] gi|211589826|emb|CAP95980.1| Pc21g10830 [Penicillium chrysogenum Wisconsin 54-1255]
  misc_feature (5)..(505): NCBI GI: 169782556 Blast Desc: [Aspergillus oryzae RIB40] gi|83774484|dbj|BAE64607.1| protein product [Aspergillus oryzae]
  misc_feature (1)..(513): NCBI GI: 145256217 Blast Desc: An10g00660 [Aspergillus niger CBS 513.88] gi|134078632|emb|CAK40505.1| protein product [Aspergillus niger]
  misc_feature (5)..(505): NCBI GI: 238492179 Blast Desc: cytochrome P450, [Aspergillus flavus NRRL3357] gi|220695820|gb|EED52162.1| cytochrome P450, [Aspergillus flavus NRRL3357]
  misc_feature (3)..(512): NCBI GI: 121710976 Blast Desc: benzoate 4-monooxygenase cytochrome P450 [Aspergillus clavatus NRRL 1] gi|119401254|gb|EAW11678.1| benzoate 4-monooxygenase cytochrome P450 [Aspergillus clavatus NRRL 1]
  misc_feature (19)..(512): NCBI GI: 212529440 Blast Desc: benzoate 4-monooxygenase cytochrome P450, [Penicillium marneffei ATCC 18224] gi|210074275|gb|EEA28362.1| benzoate 4-monooxygenase cytochrome P450, [Penicillium marneffei ATCC
  misc_feature (5)..(512): NCBI GI: 145608110 Blast Desc: MGG_03375 [Magnaporthe grisea 70-15] gi|145015610|gb|EDK00100.1| MGG_03375 [Magnaporthe grisea 70-15]
  misc_feature (23)..(510): NCBI GI: 46123381 Blast Desc: FG06068.1 [Gibberella zeae PH-1]
  misc_feature (19)..(510): NCBI GI: 256733020 Blast Desc: [Nectria haematococca mpVI 77-13-4]
  misc_feature (33)..(465): SWISSPROT Homolog: EC 1.14.13.12 Benzoate 4-monooxygenase
MEFTLVSVMTWLTAAIATYVAILFTYRVLLHPLRNYPGPFLAKLSDLYSGIHAGSMNLHVRTRQDLQKYGPVMRHGPNKIVFSSLQAMHDIYRNERMTKSQAYEYSAVTQGNWNIFSTIDKPLHRAKRKLVGQAISERSMRIFEPTLTRQIDTFMSVLSESAETQSPIDMTERLRRLTIDIVSLLAFGYPLNTQVDSKYRFFLPAHIFGDYRTNLVMQWPLLYRLGFYNIVEFLFSKDIGRYFTALGDIIATRTAEDKHARHDLYSALADSMDTDGEYRFQDSEIWAEAGFFFPAGAETTATVLSATFFYLAHNPSSYEKLADEIRSTFTSADEIKGGTALSGCKYLRACLDETMRMSPPVLGAMWREQCADDTEPLIVDDHVIPRGVQVRVDAYATNHDEEIFPNSFDYKPERWLDASIPPDHRALMDAAFQPFSIGSRSCVGKALAYLSPSIVLAKTLLLFDFTLPPGDLGKLGGGSPRSGKGREREGEFQLYDVLSALHYGPSLLFQARKDLIAEPRGRV

SEQ ID NO: 22660 - DNA, 514 bp, Muscodor strobelii
  misc_feature: SGI EST ID NO. CUFF.53182.0
  misc_feature: Variant of the nucleotide sequence at SEQ ID NO 22658
gcggagcccggcaaggaaaaagactgcgaacttgtcctagcttgctctcggtgccatttcgtatggtatgcggaattgacctcccggtcgagaacattaggaatattcagaacctctcaatggaagttgcagactctagcttattgtatctgtaccttaaattaagctcgaccaagccgacaatggagtttaccctcgtctcggtcatgacatggctcacggccgccatcgcgacatatgttgcgatcctgttcacctatcgggtcttacttcatccccttcgaaactatccagggccattccttgcgaagctgtcagatctctatagcggaatacatgccggttccatgaatcttcacgtcaggacgcgtcaggatcttcaaaaatatgggcctgtgatgcgacatggtccaaacaagatcgtgttcagttccttgcaagccatgcatgacatttatcggaacgaacgtatgaccaaatcccaggcatacgaatactcggctgtcactcaagg

SEQ ID NO: 22661 - DNA, 888 bp, Muscodor strobelii
  misc_feature: SGI cDNA ID NO. 567697
  misc_feature: Encodes the peptide sequence at SEQ ID NO 22662
atgagttcgtcaataacggccctcgggtctttaacaccgttcaccgcaccgacgagttgtgcggagcagcacggcgtttacttcttttccgagggctacctggttcaagggccgacagacatcgcgaactgcatgccaaaagactacatcccatcgcgatcagcatactactctgactccacatgccctcccggcttcacagtagcttgcactagtctagtcacgagtgaagccaaagtcgttgagacggcttacacatgttgtcagaccatactcgagtacacgtgcgacccagacgatacgacattttatgcgccatggttcacgacgttaggctgttcgacgacttgggttttccaaacgactatagaggttacatctgttgacggtggttctattcatgttggggaacatacaatccagcccagcgggggcatcggagcctacagtgtacaaatacggtttggcagcagtgatcagtctgccacatcgtcaatatcatccacatcatccacatcatccgcgtcatccgcgtcatcaaggactcagtcaacaattccattagtaacaaacggagcaacacaaacacccgcgccttcgctcagcgcgggagccgttgccgggatcgccatcggttctgcactcggaggaattattctggcatccgttgtcggcatcttcctatggagacgtcaccgccagcgacaagtgacagcttctcccccaaggctcgtacaagccccagagcaacagcaattgaaagatggcgcgaattgggataaatcggggaacgtaacctccgaagtaggttctcagccactttacgaggttcataacgaagcgcaaagatatgagatggatgttggagagtctacacaacgacaatag

SEQ ID NO: 22662 - protein, 295 aa, Muscodor strobelii
  misc_feature: SGI Peptide ID NO. 567697
  misc_feature (3)..(166): NCBI GI: 116204789 Blast Desc: CHGG_10278 [Chaetomium globosum CBS 148.51] gi|88176406|gb|EAQ83874.1| CHGG_10278 [Chaetomium globosum CBS 148.51]
  misc_feature (5)..(229): NCBI GI: 85080307 Blast Desc: NCU01607 [Neurospora crassa OR74A] gi|16416017|emb|CAB91367.2| conserved [Neurospora crassa] gi|28917585|gb|EAA27282.1| [Neurospora crassa OR74A]
  misc_feature (44)..(292): NCBI GI: 156060363 Blast Desc: [Sclerotinia sclerotiorum 1980] gi|154699728|gb|EDN99466.1| [Sclerotinia sclerotiorum 1980]
  misc_feature (14)..(235): NCBI GI: 255930157 Blast Desc: Pc06g00220 [Penicillium chrysogenum Wisconsin 54-1255] gi|211581251|emb|CAP79015.1| Pc06g00220 [Penicillium chrysogenum Wisconsin 54-1255]
  misc_feature (12)..(161): NCBI GI: 242805878 Blast Desc: conserved [Talaromyces stipitatus ATCC 10500] gi|218715249|gb|EED14671.1| conserved [Talaromyces stipitatus ATCC 10500]
  misc_feature (12)..(287): NCBI GI: 119485867 Blast Desc: NFIA_100160 [Neosartorya fischeri NRRL 181] gi|119410432|gb|EAW20379.1| NFIA_100160 [Neosartorya fischeri NRRL 181]
  misc_feature (12)..(243): NCBI GI: 171695506 Blast Desc: protein product [Podospora anserina] gi|170947995|emb|CAP60159.1| protein product [Podospora anserina]
  misc_feature (43)..(220): NCBI GI: 212543619 Blast Desc: conserved [Penicillium marneffei ATCC 18224] gi|210066871|gb|EEA20964.1| conserved [Penicillium marneffei ATCC 18224]
  misc_feature (44)..(241): NCBI GI: 256727639 Blast Desc: NECHADRAFT_76668 [Nectria haematococca mpVI 77-13-4]
  misc_feature (200)..(252): NCBI GI: 256725664 Blast Desc: NECHADRAFT_81620 [Nectria haematococca mpVI 77-13-4]
MSSSITALGSLTPFTAPTSCAEQHGVYFFSEGYLVQGPTDIANCMPKDYIPSRSAYYSDSTCPPGFTVACTSLVTSEAKVVETAYTCCQTILEYTCDPDDTTFYAPWFTTLGCSTTWVFQTTIEVTSVDGGSIHVGEHTIQPSGGIGAYSVQIRFGSSDQSATSSISSTSSTSSASSASSRTQSTIPLVTNGATQTPAPSLSAGAVAGIAIGSALGGIILASVVGIFLWRRHRQRQVTASPPRLVQAPEQQQLKDGANWDKSGNVTSEVGSQPLYEVHNEAQRYEMDVGESTQRQ

SEQ ID NO: 22663 - DNA, 1277 bp, Muscodor strobelii
  misc_feature: SGI EST ID NO. CUFF.53187.0
  misc_feature: Variant of the nucleotide sequence at SEQ ID NO 22661
cctctctgccgtagccctgcatcgagccagacgtgcttagtcttggtgcgcatttgggaacaaggactttggatcttcctcaaaaggcagcaacatactgtaatgcgtggacaccttgctcttggtgtttgcattgcagcgcctctcttggaaactctttctgccaatctgagcaatcggatgtcttgaaccaaacccataatacgatcaaggaaaagtcgcagatacgcgcgggaagccatgagttcgtcaataacggccctcgggtctttaacaccgttcaccgcaccgacgagttgtgcggagcagcacggcgtttacttcttttccgagggctacctggttcaagggccgacagacatcgcgaactgcatgccaaaagactacatcccatcgcgatcagcatactactctgactccacatgccctcccggcttcacagtagcttgcactagtctagtcacgagtgaagccaaagtcgttgagacggcttacacatgttgtcagaccatactcgagtacacgtgcgacccagacgatacgacattttatgcgccatggttcacgacgttaggctgttcgacgacttgggttttccaaacgactatagaggttacatctgttgacggtggttctattcatgttggggaacatacaatccagcccagcgggggcatcggagcctacagtgtacaaatacggtttggcagcagtgatcagtctgccacatcgtcaatatcatccacatcatccacatcatccgcgtcatccgcgtcatcaaggactcagtcaacaattccattagtaacaaacggagcaacacaaacacccgcgccttcgctcagcgcgggagccgttgccgggatcgccatcggttctgcactcggaggaattattctggcatccgttgtcggcatcttcctatggagacgtcaccgccagcgacaagtgacagcttctcccccaaggctcgtacaagccccagagcaacagcaattgaaagatggcgcgaattgggataaatcggggaacgtaacctccgaagtaggttctcagccactttacgaggttcataacgaagcgcaaagatatgagatggatgttggagagtctacacaacgacaatagactcgagagaagcatcgatgcgtgtatcttgcgcaatagaagacagatggacatatttatcacgattagcgggctttgatgtaatgtaatttctagcggcaagtgtctaaggtgcagagcatcaatgaatagagaatgcttcatcggaa

SEQ ID NO: 22664 - DNA, 2043 bp, Muscodor strobelii
  misc_feature: SGI cDNA ID NO. 567698
  misc_feature: Encodes the peptide sequence at SEQ ID NO 22665
atgtccaagatcggggacaactgcgtcgaagcggagaactcaacggactgcttacttcgagaactcctccaagtcgtgggcgatcaagccactgaatacaactgggacccagtgactttcgcttttaccctcattcttggtattgcagctctcttatttgcggtgctcaccatcttccaagccatcacagcgagtgactctacgcgaagaaagtgtaatgagcgtgctattggagcctggtccgcgaataacaagaaagaatggagaatgcgggacatgacccgagtatacactgtcgaaacaccggttctgaagtacgcaaaattcaccgactggacaccctggaacggcacacctagtccattcgaagcattccaagaaaatgagtggcacccgattgaccacgcgtcaatagacccagttgcaacttgggtggtatttcttaaagccataggcttcggggaccctaatatgacggcagacagtctgcgacgagccgaagcaaactactttcccgctgacctcgtcactgccccggcatatggcgaaatcggtttcatcgtcactatggcagctgcagcgggagctcatactttcagcgtcaccaacggtgaccgttaccctctaatcattgccgacaactttgtatttgattttagatcccaccctactctgggagtagtaggttgcttcacaaagttcgcgtcatccggtttggaaagattcaagtttgtaccgaatgagtggcggcgatatgtcgtacaacagcacataaatggctatattgaggttggatctttctgtgataaacgttatttcgatgatataacattactggatgacaaagacgaaaagggatttatcaaagtcgagacacaatggtcactgctcaagggacgagcacggtcgtcagacccgtctcaccatacaacaaaatgcatgtgttttcacgagagctttgataatgcagggtttgttgaacttcattgggctgatacgccatcctacattcctgcactttttccacaaagggaaatggccaagagggctacggggctcaaggccttggcctgctgcagccagttttggtctgggatcacacacagtgcgttcggactccggttcgggagggaggtaaatagttttgctttattcgatccgaattcaggggatcacgtggttatgagagaactccaagccgttgaggatctcactagacccgagaaaagcagacaacttaaggcggaagaccacgatcgactattgggtggagttcgctacggtgagtcatctgagaatgagttcacggcgattggaggacttttgggcccttccaaacagtttttaaatgattataagggttttgaaggatggttttcggcccttgacatggggcgaaagcgaattttcagggccacaacactccttcagctccagagtattgaccggcacctagatatttgcgtgagcgtcgctcaacgtatatgtgtgaacagattcttgtaccacgtcatttcctgtctggcgccgatatttacagccacccggctccctgactggccagagggacatgagtctcgttgggcaagtttgcccagcacttcatctcagattcttcacacgttgattagatatgcgagattcctcgaaaatcttgtcaacgtcacgattgatgattttcagccgttcttcaccgctcataaagacacaatcgccgaaatccttgccaactggcccggcctcaagttttgtgaggactctttcttagcggaagattataagggaacgaagaattcacactttctttatgggccgattcacagggagattactagaattacgaaggctctggatcagtgttacgacatactgaataataatgatgcctctggccagatatcggagggtgatcaagtatggtatgaggcgatcgacatcatgatatggcgttcaatcctcatacacatgctgttttgtacagccgagaacagcgaagagctccggcgtaagattgcatggaatcaagtggtccctattaattaa
